United States Patent Application Publication US 2007/0054278 A1 - sequence listing, part 111

SEQ ID NO: 98215 - DNA, 79669 bp, Homo sapiens
tgtaatcccagcactttgggaggccaaggtgggtggatcacttgaggtcaggagtttgagaccagcctgaccagcacggagaaaccccgtctcttctaaaaatacaaaattagcagggtgtggtggcacatgcctgtaatcccagctactcgggaggctgaggcaggagaatcgcttgaacccaggaggcggaggttacggtgagccaagattgcgccattgcactccagcctgggcaacaagagcgaaactgtctcaaaaaaaaaaaaattacttttggcagagatgagatctcgctatgttgcccaggctggtcccaaatgcctgagctcaagtgatcctcctgccttggcctcccaaagtgctgagattgtaggtgagagccaccatgcccagccaaacatttattgagcacctattatatatcaagcattgtgctagggttaaggtttggagatagagagaaaaataaattaaatctgttgttacaaggaagtcacagtctagtaggagacacaggtgaaaaactggcaatgaagtatagtggctaaaaacatgggatttgcagtctgagaaacctgagctcaattctaggttctgttacctactggctatgtgaccttgggctacagaaataaaaatgggattactactggtaccttccttatagggtagttgtgaggattaaaagtaaaagcactagtatctatacttttacatctcactagttatgtgttgcttaaccatggggatatgctctgagaaacgcattgtcaggtgattttgtggttgtgtgaatatcataaagtgtccttacacaaacctaggtggtgtagcctactacacgcctggctgtgtggtgcacaggcagtctactgctttgaggttacaaacttgtacagcatgttactgcactgaacactgtaggcaattgtaacacagtggtatgtgtgtatctaaatgtatctcaacatacaaagttccagtaaaaatatggcataataaatcttatgagaccactgttgtatatgtgctctgtcattgacccaagtgttggaatgtcatacacatgactatatgcctaggatatattaagtccttaataaatgttacctaaaattattgtcaattgtaacaatagcactttgtacttggtttagaggtagcacagaggaggcactgattaagtagagctaaggaggtcagcagaagtttaatgggtgaagcgatgtcagagccggatcttaaggaaatggtactttcaccaagagatcaagtggggaaaggcaatccagacagaggaaacaacatgtataagaacatggaagaatgaaatagcactatgtgttcaggaaaacatgagcatcttgctattgctaaatggtcaaggcctaggcatgaaaaataatgagacgaggctgagttacgtggaggtatacacaaaaagcctggattggacttgatcctgcagttgagcatctaggaagaatttttaattctaatttttaatttttagcaccatttacttgcttttgagaggaagaatttctaaaacttttattttaaaataatttcaaagctgtagaaaagtagcaaattgaaaaaataaaaaactctgctatacccaggttctccaatttttaacgttctctcacatttgtcttatcattcatttctctttctgacttccactatgtgtaattgtcaaaatcagggaattcataaggatacaacgcaacctaatttcctttatagcaaaaacctttctttcttttgatccaaaaatccaacccatgatcatgtgttgcatttagctgtcaggtctcttcagtctccttgaatctggaagagttcttcaaatctgtcttttgggacattggcattttgaagagcataggtcaattatattgtagaatgtcttcagcttgtgtttgtctgatatttcctcatgattagaggcatttatgcattttttttcaggaacactagaaaagataatactgtattctcctcaatggttcatatagagaggtgtacaatgtctatttgtcacattattggtgatttttcactttgatcacaataaagagtatctcccaggtctctccactttaaagttactatttttcctttttaaatgataaacgttttgtagggagttacactgagatatgtaaaaatatggcaaactatataaagaacaaaagacagtgaaaactcttaacgcagcaattccacttttaagactgtatctgaagacctcctcgcctcatgcctgcatgcaggctgcatgcctgctcatcccagtactttgggaggccaaggtgggaggatggcttgagatcaggagttcgagaccagcctgggcaacatagggagaccctgttgctattaaaaaaaaaaaaaaaaaaaaatggatatatatatatatatctcctaagtaaataaggatgtatgtaaagttttagctaaacggatattcactgaaaccttgtttataatagataacaatttaaaataacctaaatgtccattattagtggatttggttcagtaaattacccatacgatagaatattatgcagacattaaaattatgtggtaaaagtataattgatgacaataaagaatgttgtgtgcagtggcttgtgccagtaatcccagcactttgggaggcgggggtgacaggaccacttcagcccagaagttcaagaccagcctggacaacatagtgagacccctgtctccacaaaaaagctaaaaaattagctgggcaaggtggcgtgtacctgtagtcctaactagtccagaggctgaggcaggaacatcacttgagctcaggatgttgaggctgcagtgagctgttgtgtccggaattggtgggttcttggtctcactgacttcaagaatgaagccatggaccctcaccgtgagtgttacagttcttaaaggcatcgtgcctggagtttgttccttctgatgttcagatgtgttcagagtttcttccttctggtgggttcctggtctcgctggctcaggagtgaagctgcagaccttcacggtgagtgttacagctcttaaggcggcacttctggagttgcttgttctcccgggtgggttggtggtctcgatggcttcaggaatgaagctgcagaccttcatggtgagtcttacacctcataaatgcagtgtggacccaaagagtgagcagtagcaagacttatagcaaagagtgaaagaacaaagcttccacggtgcagaaagtaacccccatgggttcccactgctagcttgggcagcctgcttttattcccttaactggccccacccacatcctgctgattggtccattttacagagagctgattggtccattttgacaggttgctgattggtgcgtgtacaaaccttgaactagacacaaaagttctccaagttcccactagattagctagacacagagcactgattggtgcatttacaaaccttgagctagacacatgatgcttattggtgcatttacaaaccttgcactagatacagagtgctgattggtgtattcacaatcccttagctagacataaagattctccaagtccccaccagattagctagatacagagtgtggattggtgcatccacaaaccctgagctagacacagggtgctgattggtgtgtttacaaaccttgagctagatacgagtgctgattggtgtatttacaatcccttagctagacataaaggttctccaagtccccactagactcaggagcccagctggctacacccagtggttcccgcactggggccgcaggtggagctgtctgccagtcccgagctgtgagcccgcactcctgagcccttgggtggtccatgggaccgggtgccctggagcagggggtggccctcgtggggaggcttgggccacgtgggcaggagcccacggtggggccgggggaggctcaggcatggcgggctgcaggtcctgagccctgccccgtggggaggcaggtaagccccggcaagaaatccagcacagcactggtgggccggcactgctgggggacccggcgcaccctccgcagctgctggcccaggtgctaagcccctcactgcccgaggccggcggggccggccggccgctctgagtgcgggccgccaagcccacgcccacctggaactctagctggcccgcaagcgacgcacgcagccgcagttgccacccgtgcctctgccaccacacctaccacaagctgagggaaccgtctctggcctcggccagcccagagaagggctcccacggtgcagcggcggctgaagggctcctcaagcacggccagaatgggagctgaggccaggaggcaccgagagcaagcaagggctgcgagggctgccagcatgctgtcacctcgctgtcacctctcactgtgagcaccactgcactccagcctggttgacaggatgagatgctgtctcaaagaaaaaccaaacgacaaacaaaaagttgacatcatagtaactgaagaaatcaggtaagtaaattactttatatggtatggtgcagtttttatttaaaaaatattttatacatacatacatacttattgatttttttcttgtatacaaaagtatatgtatgtatgcatgtaaacatttctattacttgattttattacatcatttttactgcttatattgcaaaactaagtttttttttttttgagacatggtcttgctctgccgtttgggctggagtgcagtggcaggatcatagcttaccatatccttgacttctcaggttcaacagatcctcccagctcagcctcctcagtagctgggactacaggcgcctgccaccatgcccggctaattttttagtttttagttttagtttttgtagagacggggttttgccatatttccaccctggtctcgaactcctggcctcaaagaatccgctggccttggtgccctggatgccctggcctctcaaagtgctgggattgattacaggcgtcagccaccgctcctagccaaaacaaagttcttaaaaataaaagtaatatgagcttttctggtgtattaagtacggagaagttaaaaaaatacaataacaaagttcacagccttttgtgatcagtaaatgttagtttttcgctcttccctagtgacaaggaggcactcaagcatgagttacaacacaaccgacctggaatacagctgaaaagattgaagcaacaggttcgcaggggaaggcctttacagcttctttcgactctgacatttcaggatcagcacaattctcccctatttactgctgaagcaatcaactgggattatacaaaaaaattatttgtattgaatacctgacagttgtgttactattactagcactatcggttttgaaggggaggtggtggtgtgtggaaaaaaaaagtctggcaggagggagggcagatgtgaatcccagcccaccgtcccgttgacagctctatggctctcctttctgtgaatgagcggtggtccttaggcctcagacccgacaatgtcagtgagaaacagaacttaacccaagggactgttctccaaggagcggcgggggaatccaacgcagaggagcgcagcgccctctctagcctcctgcgggtgtcggggatgatcagggctcctgggtgttcgtcagtgaagacgactgtcttatctgactgtaggcacagagagtgcgccgcgagagggcggctcctcaccgtcaggcgccggcaggtcgcgttctctgctggccgacgcccgaaggcgccgaatgggggggccctgccgagctcccttacagccccaatgtgcgcgccgccgggaggcttgggcacgcaggcaccgccggcggggggcggggcgaaggcggcggggcggggcaccagctgcgcgcgcggggcgggggcgggggcggggcggggcgcgctgcgtggtcccggccggccctgggctcctccccctcccgcgcccaggccagcggcgggcccagctcctcccccgactcggtctctctcccctcccctccgcccggcagttcctccctcccgccgccgcctcttcctcggtgaggcgctcttccagcgggcaggcagcatggcggccgtggagacgcgggtgtgcgagacagacggctgcagcagtgaggccaagctccagtgtcccacttgcatcaagctgggcatccagggctcgtacttctgctcgcaggtaggcgcccgctgccccgcggatatgccgccgctgcgggacccctcctcgcttctcccctgctggctcctcccgcccttgcggcgagtcgggacgcgctcctcctcttccccccggccgcgtttcctcctccccccacccgcgtcgccaccgccccctcctgcctcctggggtccctgggtcctcgggaaccgcgctgggctcacgcgggggcgggggcgccacccgccgcggccatgtgggctggggcggaagcgggctgtgcggggtcgcgtggccgcgctagacctccgcgttctggggccggttccccgcgctggggcgggggccgccaggtgtgcgggctgccggaggcaggtagcggcgccgggaaggagggcagcccgagcgtcgcgagcctccacatccgcagcaccggcggggctcgggtctgggcgctggaggcgccgggccgtccgtcgggtccctgcggggtggggggctgaagctacctgccgggctctgagagatgggtggcccgaggaccgtcggagtcgcagagaggaggaacgctagctagctccagccccacttctttgtgctttactaccgtgctttgacacttaagcaactttgggggtggggaagggagaggtctgtgtaattcattcttttctttcggtatataaaattattaatttacaaaactgtaagctaacgggatgagtcacctgtgactgaatttcccagagtgaaaaggacagttccattgagggttaggcgtgaatgctgtagtgtattttaagttttgtgcagtagagcaaacccagcgttgaatggggtccagactgaagcgtgtgctcgtgtttctgtttactgaagagtactagtgttgctgctgcatttcgagacccaggatgagggctgggcggcaatagtatggctcttagttacagtccaggtttagtgaagagaggcacatgaatattcaaatattaaattggtagcgtcctgtggggaggagagccggaataaagagaaggcctgattggggccctgcccttgccagttattgtgcgatcttgaattagtaaagttacttaatctttctgagttccagtgttacactgtacagaggggatgattatagctttctttgtaagtttcacaagcttcttctgagacccagattatccaaggaacgtgaaatgctgttataatgtaaagtcctttattttttaaaggattctagtacgatttaactctgccataaataaaaatatgaataagaatgaaggcagatatatgaacacaatacaaataataaaagtgttttccaacataaaacataaaaacgtaaagatataaataaatacaatctttacgtcacaatatttgtagataagcgattgcaaaaggtcttagctgtgttatacagtcttgtttttagataggatatgatccttgaccttgttagtataatttggaaaaacttgcacgtggaggagtgttgcttgatctaaaaatagcattaccgaacaatctaaaggacctgtactaggtttaacatgttgagcattactcatgttagacctagtacacgtcctttagattctttaaaattcccaaattctatcttgttgtggcctgtgtgggacctgaamttaagaaacagtgtttgcttttgacagttgtaccatctgagtagaataactttaaaagtaggtggcattttgaattaatatgtattacaatcttctgttaagattttaaaaaggtagtgtgaaaccacattcatgaaacaggtagaaagaaggtgaatcactggggtttgtggaaaaatgctagacaaatttgtgaaaacaaaacatctagggtttattccgtgtgttaggattggaggtatttacatgttggattctgcaggtatatttctggtatcactgttagacatgcactcaaatattcccagagtggctgtcccaactgtctctttttcttcatttctgttaccacctcctatggtcagcttttaaaatttcccaccaaatcagttgtcatactctcttaatttatttctctactgtaattcctccccttgcaaacaaacgcccacaaaaaaccctatcaaacaaaaccttttgtacagaagttatttttcccgcagtctgattatgcgtatccctcattgctttcaggattccagccccacattcagggcccctcttctgagcctcttgctctagccaaaggctatgtttacattctttcctttccgaagtgtcacctgtcttctgaaatcacagctgttcccccaatcccagcttgagaccttgatcaagtcactgtaacttattctaagcgctttatacatctgtgatgaaatatgggcttggctgggcatggtggctcacrcctgtaatctcagcactttgggaggcctaggcgggtggatcacctgaggtcaggagtttgagaccagactgggcaacatgtcaaaaccctgtctctactaaaaatacaaaaattagctgggcgtggtggcacacgcctgtagtcccagctactcaggaggctgagacacaagaatcacttgaacctgggtggtggaggttgcagtgagccgagrttgcaccactgcactctatcctgggcaacagagcaagactccgtctcaagaaaaaaacaaaaacaaaacawaacaaaaaaccaaaaagaagaaattagggattttccttaacacttctgtgatcactaggaggtctttctttctactgctctggtccctggcctggctgtctggccagcttgtctttgggaacaaacagaacaaaactgcaagaggcctttctatcacaccattaacagaagtaaggcattcccagttactctgtcacaccaccttgtttattcctttatgaccttttgtgcaatctatgattacctcacctgttagaaaaatgaggattttttttttttttgagacggagtttcgcttttgttgcccaggctggagtgcaatggtgcgatctcgactcaccgcaacctccgcctcccaggttcaagcagttctcctgcctcagcctcgcaagtagatggaattacaggcatgcaccaccacgctcagctaattttgtatttttagcagagatggggtttctccatgttgaggctggtctcgaactgctgacctcaggtgatccaccctccttggcctcccaaagtgctgggattacaggcgtgagccaccatgcccggccgagaatgtctgttttttagtcggaaggtgaacttcatgaatgatcctatcttgttcactgccctgttctcatttcccagtatgatgctctgtatgcagtaggtggccattaaatgtttgaattaatggataaatgcatcaaaatagagaggtatactgctgtgtttgaatcacagctccatcatttactagttatgtgacttgggcaaataacctctctttttcagctgtatctttttaaaatggggctattaataatacctatctcagggttttgatgaagactaaatccaaagtatgtaaagctcttagcatattagtaaacttaatgaatgttagctctttttattgttatactgttttatgtttaggaaagtagaaatattttatctaggatgcttaattttttttttttttttttttgagaccgagtcttgctctgtcacccaggctggagtgcagtggtgtgatctcggctcactgcaacctctgcctcccgggttcaagcgattctgctgcttcagcctccccagtagctgagattacaggtgcgcaccaccacgcctggctaatttttttgtatttttagtagagacgggctttcaccgtgttagctaggatgktctgtaactcctgacctcgtgatccgcctacctcagcctcccaaagtgctaggattacaggcatgagccactgtgccagcctaggatgtttgattttaaggaaagcttttgttctttagaggagtacaaccagttttacttgaaaattgagttttccaagagttcttgatgttcgattgtgtttattaatagaagttttccttcctatttaatagtttatgtatgtctttttcatttgtgtgtaagaattttttgaggacagagggtgtgttttactcatttttgtattttccaaagtgccttgcccacagtaggccctcatttccttacatgaaagaaaagacatcagtgggcttgcaatggaaaacaaagaaattctgtatttacattatcctttgtaaacactgaatagtatagtatattgttgatacactcatttatttgcttatggttgaatttagttacttttcagttttttagctgatgtttaactttgtgaatagcatagggcagttgctgtctcctctggttagaggatcagctgggagggacctgagtgatctgtaactatttatatttataaggcataaaaggtagtaagcatagtgtaagtggaaggagacctggattttgctcccatgaccttgggtaagtcccctcctttgcttaatgaagcatcctcttcaatggagttgagcagaaggtgactaagagagcatccagggtgcctagtagagcatatagtaaatttgggccttattgtgcatataacctcatatgtaatgttattaaaatcagtaccaaggaaggcttaaaaatctttgaggggaaatgttacttgtttatgaacatttttgacaaatccaataataggttctttaaaagaagtggtaggtaacatgattaactgaatccaggaagaaagtcttttttttttttttttttaaataacaagacagtttttcttctctctctctctttttttttttttgagttgggatcttactctgtcaacccaaggttgaagtgcagtggcgtgatcttggttcactgcaaccttcacctcccaggctcaagtgatcctcctacctcagcctcccaggtagctgggaacaccagtttgagccaccacacctggctaattttttgtgtttttggtagagacggggtttcaccgtgttgcccaggctggtcttgaatttctgagttccactttgcctcagcctcccaaagtgttgtctatacaggtgtgagccactgcacctggctggaagaaagtcttgttgagcatcttgtaggttggagttagaaggtagagaaggaattgccgttataacatgcagtatctttgaaatgcaaccctgccctctgaaactttctctgtcagtaacaacattcctgccagtgcagggtgtttctggaattcatcttcattaaaggagatattatcatgttgtgcgtttttatttatagggattttctttaaattcctcatgtcacttcagaccacccttaaacactcctgtaagttagctgagtttaggtacaaatgccatagcttcttataagcaaaaagataggatgaggtaaagagaaattatgagtctttttaaaacaaaacaaaaataatttcataaattgtttattgtagaaaaatagaaaatatgtgtgaagataatcaattacccagagatgatttctatgaaattttggtgtgtattcttaagaacatatttgcgtatttattcatgtgcacacagttgtgtatgtttttacaaaaatggcaaccataatacatataatcttagagaattttctcatccttaatgtcttaaccagtgttttggtagtgtcatgtcatggctacatttacatgatcctttataaagactgttatgggtgtactgtcatttgtttattcacttatagttgaatttaatttcttttcaattttttaccttctgtttactcttcaataaatattcctcgaaaatttaaatcattttgacttactcaggaacgtataataatggtacaggatttggtacatgaacccagaattgaactatcctaagctaattctatatccttttccagaacagtggttctcacagtgtagttagtggattattgttggtttgagggccttctggtcatctatgaagttttggcatgaaatatacctacattacagtagaatttgtaaaacaacaacaacaaaaaaacgagcatcatttggttggtaggcaatcaaaagttataccagtctttgagttacctttttggaaattgaagtgctataggaaatgtgatcttatactgttcacttagtttgtggattgaaatcaagttttagtcatggttttttaaggtgaatctttttcatgtttagcatatttgcaaaattttagttaagttttagtaaatttcataggagtgacagacataagtgcatagctaagctcattccagctctagatattcggaagaaaagcagtggcacggtaactccttctgtaattgtctttggtattactgcaatagcaaacacttttagatagatattaaataggcagaaatactttataaagcaaccgttgagcttcattctgtatcaaatgtttaatgtaatggaatataaatgtaattacaaccctttgtgcttgatcctgaacttcgcctgacctcacagttttaacatgaagcattcttttattcatgcttgggcaggtagtgctcccagctcaacaattataagtcttttcctttgatttccttgattggtatcagtcttgtctctgggtttgaataaagagcaattcaaaacactctgtaaacgaggcctgcctttctcattgtgtgtgcatgtgtgtgtggggcaccttatggatgaaactaggatagggaccccatggaacttctcatgctttgtaagttgtaaataagttctctcctgtttttatctccagtaacctgacttattgcaaggctcagtaaagatttcttcctgatacaccagagctgtgccatgtctgttggaaagcatttctaaaaaccctgttaaggccaggcgccgtggcttatgcctgtaatcccagcactttgggaggctgaggcgggcagatatcttgctacgagatcagcctggtcaacatggggaaaccccgtttctactgaaaatacaaaaattagctgggtggtgatggtgcatgcctgtaatcccagctactactcaggaggctgaggcacaagaatctcttgaacctgagaggtggagtttcagtgagctgagattgcgccactgcactccagcctgggcaacagaataagactgtctcaaaaacaaacaaacaaacaaacaaaaaacaacaaaccaagaaaagcccctgttaattggggtctsctatctgctaatgtggcatttatctgggtcacaggctcaagcctttaaagagtggttaggatataaatgataagtgaaattgtaactttagcaacttcccttatcattataaagtgggaggcaacagagacttctctgtgttttgaatgtgtgtttaatgattcttctgtgatttaagtacaaaacgcaaaccaatctttgcatcacattctgaaggttaaccctgtcttatccagcaagttacaggcttagtcgttcaataaaataggtaaatgtaagttccgttaggttttaaaaatgtcataacttttttttgtcttctgagtggggatttatgttattactgattatttcactaactggtaatagggatgggattgactattagaatactgttaacttctcactccactaaacaaatgatagagaaaaatgtgaatgttgttacatgaataatttaatattgcttttgaattaaagttttaaggaccataaagtcaggatctgtcgatgtatgttttctaaattgtttttgatattgagtagaataaaaatattagtaaatgtttgggaaaaaaactcaaacttttttccctctgttctcataccacaacagtcatcaacacagatgatttctgtaaccaaacctatgggggtttctcctcaccaccaagcgagcaatcatttctgcagtggacaccaactgggtgtcctttagttcatttcctacactgtttgactggatatagtgtcagatcccagagatagagggcttagtcctcgaagctgcccctttcccaccctgttcagacaccagtcacgagtttgggcctccggaacttaaaacttgactggcttcaagttggggttctcatggctccccctctttgggtttggttaatttgctagagcagctcacagaactcaggaaaatacttattttactagtttattataaaggatattgcagaggatacagatgaagagatgcatagggcaaggtattggggaagggatgccaagcttccatgagttcagtgttcagctagctmtttggaaactctctgaacccaatcctcttgggtttttatggaatcttcattccttcagggtatatggggtgggaccctctctggaatgagagtcttatgacccacatcacaaaggtgggggttagacacttgccttcaggtagggtgaaaggaagagagcaggagaaggttggagagagtctgtttcctgaggcctaaagcacccaacactataacgagactgcaacaaggctaggggagttattagccaaggaactgtggacagatacacacacacacacacacacacacacacacacacacaacacacacacacacacacacacacacacaaaataacacagcaaatcatccacgggatctaaagaagcatgatacagtaaatgcctatatacctaccatctaacttattaaaaagaacattaccaggaaaacaagtgaaaacagaaggctcctttttctttgtccctcatccaagaggtattccatatcctgaattttgtgtttatcattcatttgcatttccatgtttgatttcttaaaaaatgtatttttaatgtttttgaaattttttttaccaacaaaatgattacatgtattcttttacaacatgcgtttttttgtttgtcattatgttcctgagatttatccatgtttcattgtagctctggttcattttcattgttttcactgctatgtgatattccaataaattaatatatcataacttttacattcttctgtcaatggaaatttgggttgttacggtttttctattataaatagtcctcctctagacattcttgtgcctgattcttggtgcctgtttgtaaaaatttctcttgggtatacccctaaggagtaaattttttgggtcataggatatgtgtttagctttactttgatgataccagattgttttccaaagtggttgtacttcaaaataaataattgggacataattaaagtaaaaagcttctgcacagcaaaaataataataataatcacagtaaacagacaacctgtagggagaaaatatttgcaaactatgcatctgacaaaggactaatacccagaatctacaaggaactcaracaaatcagcaagaaaaaaaaatcaaataatctcatcaaaaagtgggcaaatgacctaaatagaattttctcaaaagaagatatggccaacaaacatatgaaaaaatgctcaatgtcactaatcatcagggaratgcaaattaaaaccacaatgagataccaccttactccagccagaatggccattactaaaaagtcaaagaacaatagatgttggcatggatgtgatgaaaagggaatacttaaacactgctggtgggaatgtaatttagtacaaccactgtagaaaccactgggtatctatccaaaggaagagaagtcattatataaaaagacacctgtatatgtatgtttatcgcagcacatttcacaattgcaaagatagggaaccaacctaagtgtcagctgatgagtggataaagcaaatttgatatatatacatcatgaaatactccccagccattaaaaaaagaatgaaataatatcttttgcagcaacgtggaaggaaccagaggctgttattctaagtgaagtaactcyggaatggaaaaccaagtaccaggtcgtctcgcttacaagtaggagctaagctgtgggtactcaaagacattcggagtggtataatggactttggagactcagaaagggggagggctggctgarggtgagggataagaaactacatatttagtacaatgtacatactaggatgactgcactaaaatctcagactttagcattaaacaaaaaacaaaaatggtggtacttatagagagtttatgttgtttcatatgctagctaggacttgttgttaacagactttttatttttgccagtctggagttgtgtattactcatgaacagcagtgttcactgggctatttgcatcagtacacttgcaaaaatttaaaagggtttaactgtcttcaaggggcttatgctattcttgtatagacaagaagtactggaaaaaagataaataacagggaagtgctagtgaatgttatagacaaggaactatgttttccttgaattttttataattttactgagtttctctagctttttactgtgacaaatttcaaacaaatagaaaagtttaaagaagaatatagtataattgcagtatactcttcacctaagttaacattttgctgtatttgttttatttatgtgtgcttgtatgtgtattgggtgtgtgtgtatatgtgtatttgttgaaatattttgggaataagacacagaaaacacgacactgaatctattaaatattcagcaaacattttctaatgacaagggcattcttaactataatactattattacacctaagaagattaacaagaattctctgatttcatctaataggccaatcttacttaaatttctcaattatctcccaaatgtcatccataaaagcttttttgtttgttttgctttttgattatagactcaggaacctatcaaagctcacatatagcatttggctgtcatgtctcttaatttagaatagtcctcatcttattttcatgatactagcttcttgaagaggctagtcagttgtcttgtagaatgttacacatttttgattaactgtttcctcaaagtgtctttaagttgttcttttgtcccctgtagtttctgtaagccagaaatcaagcccaactgctgttagatttgtgaaacactttttttttttttttgagacggtctcattctgttgcccaggctacagtgcagtggtgtgatcatggctcactacagcctcaacctcctgagctcaagtgatgctcccgccttggcctcctgagtagctgggaccataggcatgccaccatgcctggctaatttttgtactttttgtagagatggagatctccctatgttgcccgggctgctgtctcactcctgggctcaagtgatctgcttgcctcggcctcccaaagtactgggattacaggtgtgagccactgcacctgaccgtgaaacgctgttgacaagactcataggtgatgttatccacttcacatttcatcacatcaggaggcacagagtggctggtggttctgttcctagcagatcaccattgattgcacrggtacttttttttaacctcacaattggcatttaatctgtgggatgatattctggcacttggagagtatgcattttctcaacaatctttctctgagtggttttagcattgcgatgatccttacctgataattatttcagtggaggttgcaaatggtgattttctccctaagtctgtcattcaatagctgatctttttttttttttctgtaaggtagagttttccctcatcaactggtaaatgaactacgttccaccattcctaccaagaagatagaaatggttgtgtactgggcactaaccagtagttgcaaatgtttgttgttttcaattaggagctttggattgttttctttttcatgttcaaattgtctcaaatttgattagtgttawcacctttaaagtggcttctatatccttttgagtctcctccattactctctgattgcttcctagctctctggcatatgataaaacacattccctaatactttcccagccccagatctgcaatcagtcttgtttctaagcagccctggtttctggcaggaatgtttttagaaatctacatctgagtgctaggtatgcttcctcctgtaatgtccttgcctttagaagaaggggtagtgacatcttcaaggaatattgctcatgtggaggacacagataaaacagctaaagaacagtttttaaaagcagcacactaagtagctgaacaatgtactaggtaaagacaggctttgaaacgcctcatgaaggagttaagaactgaattttgataaataggtgtgaaaatcaaatagaggagtaggtaaataaaatggtatatattaaggtgaaggagaggacattctctgcagggaaaggatgtgtttatggaagtaggagcaagctgaggcatgtaggtaatagcaagtagattagcagctttactttaaggaagagtccaagtacagaaatataaggaaatgaaatgatcgttagtagggatagagaccttgctgttcagttgaatatttttttccaaaatgtaaatatttcctgttaaatatattgttataaaaaggagtacatgatctttgcagaaatttaaaacagaagtgtgttaggtgaaaactatcataattctagcatcctaaaaccaaagcmttgtttggtttcttatctttccagatttttacatatgtactrtatacaggttaagaacatggatgctgtcttaagagggcctgcattcaaaacttggacctgtcattaattacccctgtgttttttggacatgttaatctgtgcctcagctttctcatctgtaaaatgagatatctgtgataatagtacctatgtcttggtagtggtgtgaggattaattctctgcctaatcagtgcttggtatgtagtaaaatctcaaatgttagctgctgttttttatctttcaaaataaaatagaattgttgctctgcattatatacacctatacagttttgtaatttaccattttttacatatctttaaaaaatttgttataaaaaacatttaattttactgtcttaattatttttatgtgtatagttcagtagtgttaagcatatttatgttgtgaaacagatctctagaacgttttcattttgcagaactgaactccatagccctataacagcaactctcctttgtcctgtttcccaaacccctggtaactactattctactttctgtaggaatttgactactttagacatttcatataagtcagattacacaatatttgttcttttgtgactggctgatttcacttaatgccctgaaagttccttcatgttgtacccgtcacaggatttcctttgtaaggctgcatagtatttcattttatgtgtaccgcatgttgtgtttatccattcttctcttgatggacatttgggttgtctctacctcttggttattgtaaatagtgcttatgaacacgagcgtgcaaatatttccttgagaccctgctttcagttcttttggatctrtactcagaagtgggattgctggatcacacgattatttgtttttagttttttgaggagcagtcattctgttttctatagtagttggattgttctacaattccaacacaatgtacaagggttctgatttctccatatccccaccaacatttgttcttttctgttttgtttttttcatagtagtcatcctaatgggtatgagctgatacttcatagagattttgatttgcacttttctgatgattagtgatgttgagcacgtttcatatgcctgttggctagtatatatcatctttggagaaatgtctgcttaagtcttttgcccattttaaaaattgggttaattcattttttgatattatgttgtaagagtcttaaaatataatctagatgtcaacccattaccaggtatgttatttgcaaatcttttctcctattccataggttaccttttactctgttgattgtgtcctttgatgaacaaaagttttttaagtttgagtagtctcatctgtctgtttttgctttaattgcctgtgcttttggtgttatctccaaacaatcattgcctagtccattgtcacaaagtatttccccatttcccttatgttttcatctaggagttttatagttttgggtctcatgttcaggtctttaatctcttttgagttaatttttatatatggttaagataagggcacaactttattctttggcatttggatccagttttcccaacagtgtttattgaagagactattctttgcctgttggcacccttgtcaaaaatcatctgaggccaggtgtggtgcctcacacctgtaatccctgcactttgggaggctgaaactggaggattgcttgagcccaggaattcgaaaccagtttgggcaagatggtgaaaccctttctctacaaagaatacaaaaattagccaggcgtgttggcatgcgcctgtagtgccaactacttgggaggctgaggcaggaggaccccttgagccctaaagagtttgaggtggcagtgagctatgattgtgccactgcactccagcttaggtgacgaggtgagaccccatctttaaaaaacaaaaacctcccaaaaaacacacatgaccaaatacacaaggatttatttctggattctgttccatttgtctgtgtatctgtttttatgccagtattacaccattttcattactgtagctctggtatgttttgatatcaggaagtgtgagtcttccaaatttgctctttttcagaattgttttggctatttgggtcccttgagatttcatatgaattttagaatttttttcaatttctgcaaaatatgccattgggatttggtgaggattgcattgaatctgtaaactgctttgggtaatattgatatcttaaccttatcgttttcagatacatgaacatgggatgtctctctatttgtgttgcctttacttgcttttggcaacgtgttgtagtttgcattatacaagtcttttaacctccttagtttaggtttatttctaggtattttatttttaatggaaatttatttttaaatggaattgttccttaatttatcttaaaattattcattgttagtgtatagaaatgcaactgatttttatgttgattatcctgcaactttagtttattagctctaacagtttttttttttaatgaaatctttaaggttttctacatgtataagatcatgtcatctgtgaacagagataattttacttcttcctttttaatttggatgccttttatttctttttcttgcctaattgctctggctaggacttccaatacaatgttgaatagaagtgatgagagctggcatctttatcttgttcctggactcagatgaaaagctttctgtctttcaccattgagtttgatgttagttatgggcgtcttatatatgagctttgttatgttgaggtaattttcatgtattcctagtttgttgagtgtctttattttgaaggagtatcagatcttgtcagatggtttttctgaatcaattgagatgattatgtgatttttatccttcattctgttaatgtgatgtattaaattgatttttgtttttgaatattcttgcattcctggaataaattccacttggtcatggtgtatagtcctttcagtgtgctattkaatttatttgttagtgttttgttcaagattttgcatcaatatttataagggatactggtctttagtctttatctggctttggtataagggtaatggtggtttcaaagtatgagcttgggctgggcgtggtggctgatgcctgtaatcccagcactttgggaggctgaggcaggcggatcacctgaggttgggagttcgagaccaccctgaccaacatggagaaatgccatctctactaaaaatacaaaattagccaggcgtggtggcatatgcctgtaatcccagctactcgagaggctgaggcaggagaattgcttgaacctaggaggcggaggttgcggtgagcagagatcgctccatttcactccagcctgggcaacaagagtgaaactccatctcaaaaaacaaaacaaaacaaaacaaaacaaaatgagcttggaagttttctctcctcctttttagttattgagtcttatctcttttcttcggtagtctagctaagggttggccactttcttttcattgtttttatttttttgggtaaagatggggtcttgctgtgttgtccaggccggtcttgcattcctggcctcaggcagtccttcccacctcagtcttccttattgcctattaatttctaatatttattatttccttctgttagccttaggttttatcttttcttctttttctagttcttgaggtaaaagtygggttgttaatgtgagtttttttttttttttttcaagacagtgtctcgctctgtcacccaggctggagtgaggtggcacaatcttggcttactgcaacctttgcctcctggattcaagtgattctcttgcctcagcctctcgagtagctgcactgacttacaggtgcctgccaccacgcccggctaatttttgtatttttagtagagacagggtttcaccatgttggccaggctagtctcgaactgctgacgtcaggtgatctgccccgcttggcctcccaaagtgctgggattacaggcatgagccaccacacccggccgaggtgtttcttttttagtgtatatgtttacagctgtagactttccttttaaaacatctttggctgtatcccataaagttttttttttttttttttttttttttaaagatttaaagaggtttattctgagccaaataagagcgaccaaggtctgtgacacagcctcaggagttcttgaaaacrtgtacccaaggtggttgggttacagcttgattttatacattttagggggacagaagttacaggcagacattaatctgtacatgtaaggtgtgcactagtttggtccgcaaaggtgggacaacttgaagtggggtcttccaggtcataggtgggttcaaagattttctgattagcagttggttgaaagaggcaacttattatctaggggactggaattaatagaaaggagtgtctggattaaaataagggattgtgaagaccaaggttcttactatgcatcccgtaagttttgcatactaaatgtttttgtttttatttgtgttgaagttcccttgtgactttttctttgacacattggattgagagtatgtttcatttccacatatttgtggatttttcacatttctaacttacctatttttttaaaacctaagacattgtagacttctttgcacatgtaagattaatttcattacttctttcttttatgaaaatatttttattttctataaatacatttggaagaaattatttcttcccaacccagtccaycccattaactgtcagttttttctactaaaaaagatgctaataccaccctcacctgtgactgctaaacagaaaaatattgcctggactaggcattattcccctagttggaaataaaggctgttgggcatgggagtttgatcttgtaaagaaatcaacactgagacaaaggatctcttagcaaggctggtttactttctgccaaaagggtgcactcaccagcagtccagccacgagagcacaccaaacaaaggagacggggacatttataacctttacatcctgatgcaatcccctatggctgtgtcccgttcccattggctgggatgggacctcacactctaaacttaactggattggttaataatttaaaactttcctaaataggacgaagggaaaaaggacaaagaaaagaggaagttagtgatgagaggtcagaggggttcccaaataaggaatggcatgtatcctgatctgggactcatttagccttatctcaacctactggaacaagctggagcagccttggaatacacacatcctaacatttaaccggggaatgataaatctgtatggatttaagaaactttgaggaacttctccattcctttcaattccctcctctttttgttttataattcttcaaacttgtctagcaagtctctgctttgttgtttggcttgatcccctaataaaagcaacctttccgaatagggtgggggagaggcagaggatagattattaagggttgtactgatgagcctttgtacaagccgtcgaatacagggtatgacacaacatccaataagtagaagtatacctaacacagttatagaggaagtgaggattgaggttaagatatctttccaatttccaaatcagttttctagccagctagagatgggttatttatgccagagttcttagctagcttgtttgataaagcagtaagtccctctagggctcttgttatacttctatctggggctgtgttatttggaatgaacgtgcagtattgggtcttaatcattacgcaaacaccacctttctcagctagcatcatatcaagagtgattctgttatcctgtgtcatttggctagtagatcttaattcatctgcaattcccctgaccactttggtgtagttaactaatcattgttgattatagtaaatatagtttatccagtctacatttttgtttatcgtgacccaccaaaataacgttgactcgagtctagcagctatctgatctctggccttaaattcatcaggaaccccccttgcaacacctgtcgcatctaggtggatatgaggatcaaaggatctgtaaggagctcttstagtgtgttggtggtggggtgtttcctatttttgttgatgaaatgccagggtaaaagggatagccaattggactagagtgcaartaccattccagttatatggcagagtatccagtaagtgccccccgacattaccaccatatgtcccactcaaggatggctgatggaggcctcatgggttagctcttagaagtgccttacctccctgcatcctgtgaaatttccaaggaatattgagttctcctcctgctgtgagaggcatgaggcaaactctgccctggaagatggaggctgaatggccctcgggggctgaccctcagggtgttgtacttcaggatatagcagagagagagcttggcaagattcatcattccaggctgtagaatcttgaaagagagctaccacacactccaaatccrtcgcatgtgaagaacacttaagtggaaaggggacaatctgggcctctggcttaccgtgtgcacaagtgtaacagtcgcttttgtttagagtgtggacagaatatttaatccgttttaaccaggcatttgcatcttgataccctgtctcaatagcttaagtctgctttaagtcatttacttgtactactgatgcttttgtcttatcatttagtaaaggactaattgggataatagaagtttgatttaaagccgagactactggggttggagaagggaaaggaggaagagggagaaggcgtatttcaaacctccctatcggatccttcccctttgacatttgcccaataccgtagagatggccgatagctggctgattatctatattagaattaagaatagggttacactgataaagcttacaatcaggggaaatgcttccttatgtgaaataaagattaggcctaagctcagtacaaacccctcctgtagaggtccagcctctgtattgagtggtccatagaacattattccaactgctgcaaggctgccattcggtgggaatgaagaagcggcgtcttggctttaattgatcgcatctatgggagtgagagactgttagattaaatgggggaccaggacatagatatttttctgaagaggctagttgcctttggttatgtaggtccccgcatggcatcactagacaagcatcaaaggatatcacttgagatgattccaatctagttatgttaataataaaatgagagatagtgagaggaaagaaagaaaaatagaaataaaggtatgttaggttcttcttaattttaacttggtgggacttggctcggggaccacaatccaggattctgagggtgtcgacgctttcttgactcgagtgtgatgggtccaccccttctcggcagtgcgaactgcrgtttcgatggtcaataacatgaggtaggatccttcccaggctggctcgagccttccttccttccatccctttatgaagacgtggtctccaggctgatgcgattgtactgggaattccaagggtggtgcttgtgctaaaagacctttggttttaagggaagaaaaagtagaggagagtccaaatatgtwatttctaaggaactgatctttggtttcaaaggtaggcacatcagctgaggaatgtaagtaaggcaatccatataacatttcatagggggatgaacctgtatctcttcggggagctgtcctgattctgaataaagcaatagggaggcatttggtccatcgtagatgagtctctaaaatttagttagatgacttgtctgattcattctttctactctcctggaggaggaggggtgccaccgaatgtggtattcccattctatgtccagcacctgggccagttttatcataatgtgtgccgtaaagtgggtcccattatctgagtcaacattttctattaatccaaacctgggtataatatgttcaattaaggccgtcactatattactggcagtggcctttgagaaaggagtggcctctacccaatgagtgatgtggtctactatcactaataggtattttagcctactggcagcatttcaatataatcaacttgaacactttggaatggtcttagcctaggtgttcttcatcctagaggtagtttctttagggtctgcttattagttttcttacagataatgcagctgtcagtgacctgtctggccagggtgtagatcccagtacatccatagactgaggacagcgtcacatagggcctgagggccccagcatgttccttggtgtaagtgggacagaacttctttcataaggggtttggagagcatctctctctgatctgggagaatccatctcccttctgtattttctttagcccacatttcgcttagtttttccttttaggctgaagagaaaataggagctaatttgggggagaggagggagggagttagatgaaatatttgtttcacagccattgctgctcttttggctacctgatctgcaagattattacctcgactttcaaatgaaaagtcatgctggtgtccagggacatgtacaatagctatttctcctggtagctggagattatttaaaacacaagtcactaatgactcatgagcaagcttttggccttggctgttcatcaggcctctgtctgccccaatttttccaaatgtatgcgctaccccaaaagcatacttacagcctgtataagtgttcctatctcattttctggatatttaagggcctgactgagagcaaatagttcacagccttcggcggaatagttatcaggtaattgccccgattcagtttcctcaagagtttctccatccaccacagcatatccactgtgcctgtctccatcaaacatccgagaggacccatctaggaacaaatgttgtcttgttttataaggggtttcagataggtctggtcataccttggtatcataattaaatctagatacaaatgttctrtttgcagcaatggattccctcttaagaatccggcagggtcaagtgaactatcagtggttatagttagataatctctttctaataggatagcctcatactttaaaatcctagaatcagtcagccatctttccgctttttgatttaggatgacattgaccttatggggtgtacttactgttaagtatcccccaaaggtaatctttctgctttcttccactaatatggcattggctgccacagactggatgcactggggacagccactggcaactggatctaagactttggacagaaaggcaactggttgccggtggtctccatgttgttgagtgagtactccaagggccactccattgtctgtgctaacaaaaagatgaaagggtttttctaaagaaggcagggctaaaacaggggcagatattaatcatgcttttaattcatttatttggtctacttcatcagaagtccttataagtgggtctggcctatttttagttaatttctcataaagcaatttacttcttaatgcataagaatcaatccataatctacagtatccagtcaatcccagaaataagttcctgttttgtttgaggcaggggcaaggagacatttccctcgacctgttcaggtcctattctccttttggccgtgctaattagatgacctaaatgtctaacttctgtttctacatattggagctcttctttggagacccgcagtcccttagagtataaatgattcaggaagtacacagagtattcacttactttttctatatcttctccagatataagtatgtcatccatatataggattaattgtaaatgtggtggagtgtctgtctttctaataatcctatctagagcatgagtaaaaatattcagtgaatcctcaaatcctggggcaatactatccaccggtactgctgcttctgtcctgtatgggggtcctcccatttgaatgtgaatagatcttggctgtcctcagccaaaggacgtgcccagaaagcatcctttaagtctattacagtaaaccattgatgactttacagaattttactaaggttaatatatggatttgtcatagtagcgtgagtggtttgaactatttcatttatagctctgagatcttgtactaataggtaggatccatcaggcttcctgacaggtaggataagggtattatacggagacatgcaaggctctaaaagtccatctttaataaggccttcaatcacaggttttagtcctacccggccttccagggagatcgggtattactttctccgggctactcccccttggaacctttaaatgtatttgtatcaggggaatccgtaactcccttgctttccttctcttgaccataaatccggatgaattttcctctcatcaacagtagttagcaggtggagagagggaaggaacccctttggccctacttgcagtccaagacctaactttagcattaagtctcttcctaacaaattagtgcctgcttcaggaattaatggaaattgaatattagctgcctcatttttgtatctgacttctatatcttctaggattttggccttaaacctctcttctttcaccccagataatagtagctcttctggagaacagctgaggccacttggagaaaagcgtaaggaagaacaagtagctccagaatcaatgaggaatgttattagttaatggtttggtcccacctccaaatttatcaagggctcttgatgggactcaaggtggaaaagaaagagcccctgactcmcrtattcttcctctctgaaggttggcatgagaggaggaatttcctctgtggcctttaggtcagggcattctctcttaaaatggcctgtttttccacatttataatacctatcttgtcccccttcttgttctattctggagatcctttgttttagtttctcttcatctgctctacatctccaccctttatgacatatgctgtggtcttctcatgttccatttcaacctcgacccctgcctctctgtgagatggcacccctggacactggtcaaaatctcatcccaggtatatttggtcctagtgaaatctgccaaaaaatttttgccttttgtttttgtctgtcttcatccttctcatgtatgctttctctgctgctgctaaaagttcttcaattgactgatttttccacctctctatcttttgtagcttcctcgcgatacctggccaactattggtaacaaaatgtaattttaacataccttgtcctagtggactgtcaggatctaaatcagcataccttcttatctgctcccttagtctaaaaagtgcataggtccctcatctttctcttgttgttcatcaaaggccttagtgaggttttggggtctgggtgcagactccttgataccttttataattaattcttgtagatccctcatattcttctggtgagcagcattattattattccattgtgggtcccgagcaggaaatgtaacatccgctgccggaatattttgaccggcagggtaatcacgttcccaggcccccatagcagctctgcagatcatgttccgctcttcctttgaaaagaggatacccaggattgacattaattcagtccaagtatatagtttggaacctaaaaactggtcaatttgctctgctactctctctgggtcatctagcaaaggcttaagctctttctttagacctcggacttcagaggtggttaaaggggcgttcatgaatccagttgtacccctaccctgtggcacctccattagagggaagagctgagaagccagctcttcggaagcgcagggaaagggaaaattttgaatatcccttctacattgttctatctctctctgaagccctctttttaaggagatatcagagacttctgcctccggagcctgaggaggaggaggcgggactaccacctgaggaggaggtgggactaactgctgcctgaggaggaggaggcgggactagaaaaggaggaagatggtttaggggatcccactggatattctctttttaccctcctccatcccttgcttcagatcccttaggggataaagagaaactggccccagctgccagcacatggcatagtgtatctcttctgaagacatacaacttttgctattaacatacagtattagaagctggcagacccagtcttcattcgagccatattttggccagaaaacagcaggttttaaaattggctcttgggtccacagaaagcaacaatacttgatcattagttgctttttcttatatttagtcctttcattttctttccagtgtgtaagcataagtcctaaaggactatcaggagggattcagtctttcttgcctccttcatctctggccttgtttccagttgcaggcctactagaagtattccccatgttgggtgagactttttcccagtagactcaatcccccagatcctccagctcagggatatcttgtctgctcaaatgtatttactccttttccctggggattagccttcccctttttagtgttagtttcttattgcctgtattctcagttccctggagataactttctcccctctgttccctgttctgaagataatccacattcctcttacagtcactttctctcaaccacagtcattcactcacatacatcacacaacccttcaaggaaggaccaccaaagaagtactttgccaccctctagcagtttttcctaccttggctcatgcacgaggtctcctggtcccgcggttttaaaagtctccttgtcccctgcattgctgagaatccagatgtattcctcttactgggtgagccctggctatctccctggggctgcygcarcagggcagctgggtgcctccccacaagagagggccaaggactggaggggaaacagtgtccccatacgrgccacaaaattgatgggcacgggaatttgatgttgtaaagaaatcaacaccgagacaaaggatctctcagcaaggctagtttactttctgcagaaagggtacactcaccagcagtccagccacgagagcacaccaaacaaaggagacagggacatttataacctttacatcctgacacaatcccctatggctgtgtcccgttcccattggctgggatgggacctcacactctaaacttaactgggttgggtaataatttaaaactttcctaaataggaagaagggaaaaaggacaaagaaaagaggaagttagtgatgagaggtcagaggggttcccaaataaggaatggcatgtatcctaatctgggactcatttagccttatctcaacctactggaacaagttggagcagcctgggaatatacacatcctaacatttaaccggggaatgataaatcctttatggatttaagaaactttgtagaagaacttcttcatgccttacaaggcccttcctgggggcaggaagtgagattccaagaggaccctatagcagtaggcaaccaagagtcaaaacaagcatatgcagtagtcataatcatgctagtatgacagtatgaattagccaggcatatataggagtttagatgggggaatagtggaagcccacaaaacttccacgtttgggccctcaccagagacactggtctagaaacacaataaaatgtctgcctgggtagtcatgatcattctattatgaggtagacaggaaacagagcagggccaggagatggaaggggcctcccttgccctcaggagtccctgaccagggaagatccctccatgctctctgagggtggcggggctccaaagatcctggccaggagtgctttgttggagtgggccttgtcctaggcagttgccaggtgagcccattcacaccctactggctgtgctgctttccgggccctcagttcctgctcagtaggacgttgggcaaatgtccaggagccatctgggtgagcaagatccccatcaacagcaagaaagcattgtccccattccacactttgaagatagaagatggtctcacacttggcctgagtgacctccactctcaggtgctgcctgtgtgcacacctggcgctcaaaggcaaggtgctcgctgtggtgggaccaggtgaaatggtgcaagtacttgagattccataggtcataatgggaggggctgcacctgtgggtacccataggcgtgttgtgtagactggccgccacactcttggctatgcgcttgtcacggaactccacccatccctctgtgtagtccttgctgtggtactgcttttttccctcccacggctgctgctgccttctttttgcatctcacaaaccagtcctcagcctgaaagaacgcatctgacctcaccataggcactgagaaggttgcrgacatgtaggggctggaagtgtggtgggatatggcccaggtacacaatacctggcactacccgcttcttgctgccacaggctgctgctttggattcctcctgctcctcctccacatctagtgtctggtctgtccyttccagcgcctttgctctgttgcggccttctccgattcctctgcctccgtgttgactgacacgagcagcacgacctaatttcattacttctaatgactgcatagattcatttgcatggttaaatcacaatttaacctattttatattgatgtatatctaaattctctttttcacaatagtaagtaatgctatagtgagcattaagttgcatatgttttgctcgtttgtcagattatttcctttggttaactatttggaattgagctactgggtcaaagtatttttttttgtctttgcatatgtgtttatatattaagtatttgtaagtatttatatatatgttatatcttgatacatacaaatccttttagttaccaggtgactactcagcattctttctaacattgtatggtgtgcttatttgctcacactctcatcaacatgaattgatgttagatttgagatggtggaaaagagagagaggtaatacaggatcttaaggtaataggacacattatgggtggtcacattatgaaaaccatttaatgttaattctagccactactttaggatggtttggaataggaaagaatttgagagaggttcaagatggggagatatrttgtgaagccgttgtagtttggcaagtcagtggggcctaaaataaggtgggagttagttgcactggttaatttgatagatactaaagtagtgtaaccatacaatgggttcatcttgcttgctgcctagacagagctgattatcaagacaagggaattgcagtagagaaagagttacttattcatgcagagccagctgtgtgggagatgggagttttattactcaaatcagtctcctcgagcgtttgggtaagggaggagactactcctcatattgtcttatgcccaatttctgcctccaaagaaagaagtaaaaactaaaaggcagaaatgaaatctacaagcccacagcccrgcgccacgccctgggcctggtagttaaagatcaacccctgacctaactggttatgttatctacagattccagacattgtatggaaaagcatcgtaaaaatccctgtcctgttctgttgtgttctgattatcggtacatgcagcccccagtcacgtaccccctgcttgctcaattgatcatgaccctctcacgcggacccccttagagttgtgagcctttaaaagagacaggaattgctcacttggagagctcggctcttgagacaggagtcttgccgatgttcctggccaaataaaccccttccttctttaacttggtgtctgaggggttttgtctgtggctcttcctgctacaaggggatcagagtttttacggataatttggttggggggtgggcagtgagttgggagtactgattggttgggtcggagatgaaatcatagagagtcaaagctgtcctcttgtgccgagtcagttcctgggtgggggccacaagaccacatgagccagtttactgatctgggtgatggcagctgatccatcaagtgcagagtctgcaaaatatttcaagcactgatcttaggttttacaatagtgttgttatccccaggggcgatttggggagggtcagaatcttgtagcctccagctgcatgactcctgaaacataatttctaatcttttggctaatttgttagtcccacaaaggcagtctggtctccaggaagaagggtttggtttgtgaaagagctgttattgtctttgttttaagtggttcctaacctgtttggcaccagggaaaagttttgtgaaagacaatttttccatggacttgggggtggtggggatatggtttcaggatgaaactgttctacctcagatcttcgagaattagttagattctcacaaggagtgtgcagcctggctccttgcatgtgcagttcaaaatagagtttgtgcgctcctatgagaatctaatgccactgctgatctgacaggaggtggagctcaggctccacccggtaatgcggtaataatgccagcccatctgctgctcacctcctgctgtgtgggctggttcctaacaggccactgaccagtagcagtccatggcctggggtttggggacccctgttttaaactataaactaagtttttcccaaagttagtttggcctgtgcccaggaatgaacaagtttggcctatgcctaggaatgaacaaggacagcttggaggttagaagcaagacagagttggttaggtcagatctctttcactgtttgagttataattttgcagtagcgatttcagtaggaaataacttgttctagaagtgaaatgagagcaccttctcttaactctgactcttttcagtgattcacagtactggaaataaataagaattacctacatagcaaattcccagagattctgattgaatttgaagtggggaataacatggctatttatttgtaaagaaaagcatttcacaggattttaatgaggagccagagctgagaaccacactatcccattttagcttgtaaaccaaaaaaataaaatttgaactgccaaccaccctggcccccagcaaccatctgaatggactctccctccttggccagggcactctaacctgaaagactggttcaggccatgactggaagtgggatttggacgtgcctcattatacccttccagcattagcatcaacacagagcttgagtctgataagaaatatttacagtctattttctctgaagcctgttatgttacctggaggcttcatctgcatggtaaaaaccttggtctccacaaccccttgtcttaacccagacattcctttctacagataataacactttcaaccaattgccagtcagaatatgtttaaatctacctgtcacctggaaggctccttccccacttttgagttgtcccacccttccagatggaaccagttaagtcttacatgtattgattgatgtattatgtctccctaaaatgcataaaagcaaactgtaccctggccaccttgggcacatgttgtcagtactccctgaggctgtcactggtgcatccttaactttggcaaaataaactttctaaagtgactgagacctgtctcagatattttgggttcataagctcctaaatttagtaaattcctgttggtgctaaagaaaaaagcatgttgtcttggattgaaaactaaagttttacctactagttataataatgctttggtgttattaaataagtggagaataaagtagtaaaacaaagtgctgttcagcgagtattgaataagtacatgtgacatgttwagcttgtgtgtggagtgaagtgtggacattttttagagaaagtagcatttgaaacgacctaatggaatgggtaaagcttctgaggacgtagttataacggtgagtgttaggattaggtaggtcaggttatacaaagggaagagattgggaagtgtggtgtttgcctggggacctctaaatctaggttagttaggtctttggttcatttgttagagatgaggagggaaagattgccctgttaaggagtcagaaattaactcttcagagaatggatagtctttcaggattttgagtattcctcttctactggggaataagaggaagaaaaagagtgaagttgtggtttagagaaggcacattatttaggcttagagagttcttaggagatgtgggaatattttgacaccattaatgatgttgaagaccatgacttggttgcctcatggccccagtaaggaagataaagatgggtgtccttaaagaggtgagaggtgtttattatgaatattttggttactttatgctcatatatcttgaaatacaagcccttagctaatgaatctgttttgtgagacaagtccttagtttatttaatgagaataattctatcagccctcttgttaaaaagctaagaatttgatgaatgtttcatgaaccaagtataaagcactctgaaatcctctgaggagaatacaaggctatttgagtagctacttttcaatgaatatactgaatttcaaaatattagttaatgatggctgtgtagacccaagggaaaatttcccctttgccctttgaaggttcactgaaaaatcaacttacaaaaaccagattaataggagaaatggtatacaaatttattagtgtgcatgrggaagaatcacagaatgattgtctaataacccactggggtacagatgcttattaccctacttcttaggggaaaaggagatggggaaatgtggatgtttttatggggattgtaaatgatttttaggggaactcagtgggcttcaaggacaagtggcctgggacagtcttttaggcctgcagaacagacatggtttgtgaaaagtccttccaggtgtgttgacagactttagtctttcttcctgcggtatgagttcagttaatgaaaactcagggaagggacaagaggtcaccccccccccgcctttgtcatataacctaacatatttatatttacacattccttgggttctgaggaataggaagtggacatctttgaagtgccattattctgcttaccagactaacccaacctccccaaaagactgagctcagttttagcttcaaaactgaaaaatctctaatgctgtagatacctttttatacatttggaatttgtttaggttgtaggttgtagagatagggatgacctggattttctttgcttaactgttgcgggctgtggaggctacagaaagagtaaagagaaagtagtgaagattctagctgaggttggagaaactgatctttcagagtcccttgggcaaacctttacagaaggcagctttagtgtaatatgatttggttaactacswarwcctagggatttttttttcccgtgctttttttttccttaactttcttcttgtccgtgtcttactagttttatgtctacaaagataacacatttgtaagactttgtgaattctcttagcatttttaataatttatttgagtaactttgaactctttgaaggagaggccatcaacctcaaaacataaataaagtctatgtctgtttgaattattcttttcctttattacttgagttccttacttgaattcaattaattacttgaattcattttcccagtttgccacttcttactagtgtctgaaatatgttacatgaacatattttcctaaatgaaaagtctttctagttactcattaattctgatcattcagtcaagcattcactgaaaccctagcacatgccaggcactctgcttggctctgagcaatagtggtaaactttgataccatcccttccctcacacagcttatggcctcagggctgtgtcacatagtaactacttacatgggtgattttagtgtgtgtatgactgattgggaatctaactactgtaaataaaagaatctgcaaaaattttcttgcagtttttttccagtgtatgattggttaattgtctaatgattcttttgaaatacttcgtaatagtttgttgacataaaattgaaatataactgtgactattatataacatttagcctaatattccttgcttatttgaaataaagtttaggttgctttttgaagtgaatattgaacaggtgtcatttcttaagcttttcccaaatatttaattcgcaaagttacaggtcttggtttttgcaaatagtttacaataactcttgcttatatacaatattccttaaaatgtttcttattaaggaaggcctgacactaattttccttttttgttcttttaggaatgttttaaaggaagttgggctactcacaagttactacataagaaagcaagtaagtacaatcacaaatttttacaccatttgtcttagaagtggcatttgtgccagaaaacaagaattcttctagttctgaaagtgtatatttgaatgttctgaaagtataatcctgaatactagaattatgacatattttaaatttttgtgatatgtaaataaaatatgtctggataatatcttaatcttgtattacatatttaacatgaaaacatgagatagttgttagtatagatggatcttgcttgagccatacctgatgatgctgtcatcttttgacacactgttatgttgctggaagtgtttgcatattgtagtcagggattatgtgagtgatttggcttcatttaaccagattccttttggtttcttttagtttcaatttgtattgctttttctactcaaaactatattactttgttttttggtgttttaatgttattacctgcagtcttatgtttaattttcttttttgaagttttttgtgtgacactacaaagtaaaactattagctgctccttagctattactgtcagccacactgatgtagctgagattcacattgccttttttgctccagctaatttatcctgtaaattcatgtcattagygtggctggtttaagacaacctgtcacagttgcctgaaagttgacaagggctttctgttctatatagcattgccatcctgatggatcaaagcttgatttaatttgaagtgggaaataacatggttatttatttacattgttcttggtataaggtttctgtttctacatacctgatcttggtgtcttatattcatctacttgtgtattttttttttaggagttagctgatttaatgaagtttgaatgtagtgtgtttttaccaaaacaaatctaattgaggtcagccaaaccaccatttgaaggaacagggaaatacaaattttaaaaagacaaattttctgtagttgtataaagcgacatctacatttaatggacatgctaggctgttgtgggagaaatgtggttagagatgaggaaaaatgatgtgactcagtgtaagtttatcaacgcataaaagayaggacttgttgatttgttacctctgtcaaaatttagagatggatttaaataatctcacttaactatattcattcatgcattacatacatcctgtgtttctaatgtgttaggtattttgcagagctctttgagccagttactagcattttatacccaggaagttaaaagcattggtaagtaataaagggttgaggttaaacaatatgttagtaaaaaagcttaaaatcggcctctccctcagatttgctaactcattgatgtgtgcctgtttcttcaatactggatatttaggggcagggctatttccttttgacttacactacaagggaataaacagcaagtgttccctatgtaaaaagaaggtgattattacaacactggatttaggctatttgcatttttacttacacctctagtgtttagtatggtgccatcttgtagctattgctctgttggatcttttgggataacttttttcagtggatgagcctgctgttcttaatccctttggctgtgatggatagagatcatccttaggtggccagctctgtatctttcataccctagtaagttgaccacagtaaattttgagtgacagtcctagagggagggaatggtgtggggaagggtgatctccagagacaagaagagtattaggaaaagcattggggaaacagaatgttgcactaggaaggaaccaatgcatctttaaagttagcacttcagtccaagaagtgatagtgagataacacatagcaagcatttcttgtcatggagacgatatagttaggtttttttttttttttaagtatagtgtctactgatctctgattaatattcatatggaatattgatctataatttgcttttaatatatttgactggttttggtattggagcaattctggactcttaaaataaaatgggatatatttcccacttctgttttctagaagagattatgtagaattgatattatttcttcttaaatgtttgatagaattcaccactgaaacatctggatctggagtttgcttaatcatagaagcttaattttcttatgcaggccttaggaaattttcaagtgagttaaataaatgactcaaaggtagtttttttttttttttttttttttacttgtcatatagtaaagaagaccattcagatggtaaagtccttaattaaaagcacttaatgctgattcttgggtgcatgttttttatactgtgtcttctgtcacagtgtaccttaagcagcatttacttttagtattatctgtagaagttgtagcatttcacatctcaagactgtattattgtacactttttaatgtatcgctgacatattcagtgtgtttgtttctcattttcctgaagtaaaggtggaataatttgacaagtatcttgaatagccaaaattaaggtataaaagccgcatttaataaaagaactctaagtaatacttttycttccactcccctacccattcacactagtgtgcctgatttttggattacagagagaaggtgttatgtaatgtcttaaactggctccaccaaactttgtgaccrtgggttattctaagtctcacctccaagatgctggaatcataggtttgtgtgaggattaaataaagaaatccatgagaagtgcttagcatgtgtaccatgcatagtaagtactcaaaaactaataatcatctctggaagacttgagtcagaattttgatcagaaaatcctgtcccatgcaaagcttagacatctgtagttattttgtgtcagctgaccagaggaagcagcctgcatacaactttttaaagaataaagcctgactgtgatgaactttgggccagaccttgcatgtatcacgtacttatgacactacctgcattttacctgggactgttgcattgtgatgtttggaagacagcttacaaatgtatatttatactgccctgttgttgtacagtcttttcaaaaagactagttattatgcagttgtgctaccatcatcagctcaattcagatttgttaatggtctgttaatctggttagcacctaaggctcagatcaaattgatcctaaaatgtaaacgaattttcttttcaagtgtgaattttccgttaagtaaattgtacytagagatgagaggagaacttgccatattcaactttagttgtcttggtagttttgggttatattatttgtttgctttacattcgttttttttttgttttgttttgttttgtttttttttgagacagggtgttcctctgttgcccaggctggagtgcagtggtgcaatcatggctcactgcagccttaacctcctgggctcgagcaatccttctatttcacctcagccttccgagtagttgggattacaggtgtgcaccaccatgcccagctaagtttcgtattttttgtggagacgggtttttccatgttgtccaagctggtcttgaacttctgagctcaagcagtccacctgccttggcctcccaagtgctggtattacaggcgtgacctgctgtgcctgtacctaaattctcttttgaatataaactgtggaagggtaaaatccagagcaacaggaagctttaaaggatttttacaccctcaccttctcctgttctcctccccagaagtatgctagtgcaaaaagcctgcgtcttgattgcttttctctcctaggttttggragaaagttattcttgaggttcatgtttcagacaaaatcacttgatgcacttcatagctgaagcaggctcagttggcccccattttgaactgttttctgtcatgtttgacccaactagcagtgaatgaagtttgtttttgtcctgtgaggagaaagttttcctattgatattaacattcacagtggctttcttgaattccagaggggagaaagatattttaaaattcaatagcatggtatctttctattcctttatatgtgatagtataaatatattcttttccaaagtaatatgaatggattttccatatttttgcattcttgtcagttgtaccttaagggcctttccagagttagccacatgctctttaagagtactggacgggggctggcattcttgtgtcacagctcttgtgaaccacacagtctctgtttcctcatatgtacaataaagaaacaacactatattgtctttaagatcctctctaagtttaacattttaagattccatctagtttccttcattttgtattttaaatagattgtttaagaggggagttttatttttttttttttcggacacttctaaaatcaagtttgaagtttgacttttaaaacctatggtagaatgacaataatcaggaaaaggtctgagtgcactgggagatgtttaggccaatacttggtctacgagggacttgtattccggctacttaaagtcttattttactatgtggataagagttttattttactatgtgaataagaggtgcagccagtatgttgacatcacaggcaccaaagagtgtcttctgtgtgagtagaattcttgcgtatatttcagtcagcacacatagattaataactgacacgattgtgtgtatggatatgattcttaatttttctgctgaactttaaacagaccgttccctcccttgtctttgcctttttcctgcctctttcctttacccctttctgaaaagaggcaaatgatgatcataaagttttcaaagcaatttgaaatattgacttgaaagcaattgatcagctttgtgagaaataattatttttgattttgaatttgctttgggattacttgggatctgttcttttagtaagaacataatttatttgtaacatctgacctcagttgggtaggttttactagggcttatgtttcatattttaaaatgggctttctataaattgatgtggtcagaatacatttagaaaagctgtctatgacctgttcttgttcgatattatgtaaaaacttagtatatgtttacatggagttttttcttccaagacctttagatcttcaaaaaggagttataagggttttgaatatagcagtaaagcagttgctttggtgatttaggttaaggtaaaagtttggtggatttttgtgcctggacttgttggcttggttttaaacaagagatattcaaagtatgctgctgctcattagcttgaccactgaaacattcctttccctccttctcctccttcctctcatatctattcctccgtctcccagaagatgaaaaggcgaagcgagaagtgtcttcctggactgtggaaggtgatattaatactgacccatgggcaggttatcgatatactggtaaactcagaccacattatccactggtgagtaaataaggtaataaaaacaacattccaattttgaaktttccaaaaatgatactcgtaatttgttttccagtagtgaatcatataatcaggattgtgtttacaaaggaactcgaattttagctcttgagctcttacggtgcatcatttgggagctggtagtttggcaatcatggaagaagtgggaaaaattttagatgaaagaactaaaacttttaaaaagaagtgtagggtaaggtagaatagatattttgttgctggcatgatggtagtgtgtacagtcgtccctcgatatccatggatgattggttccaggacatcctcactccccatatagttacsaaaatccactgacgctcaagtcccttaaagtcaaccttccgtatcacagattgtgcgtcaacagatgcagaaccaggagatatggaggactgactgtattatacttttctaaaattattttattatgatatatttctcccttaatttagatatggcttttctgccactcttttgccttcctctattcttggcagataggacttggagtcttaatgtaagaattcattcaagttgaaatctgtttgtcacccttaaatatttaaattctctttactgatgattttctttttataaaaggaatacatctttaatctttaaaatttggaaaaataggaaaagcataacaaaatctccttaattctgcctcccagagataatgactaggaacatgttggtatatatttactttgagacatcattttattgttgttagcttgccaatttgtttggaataacatgggtgtcttgttattagtctctgtctaatcttaaatccttaatggccttggccactttccccctttctaaataccctgcaaaaggggtggcattaccactaggaaaagtaaagcataatcttaatgaaatatatatctgttataatatttaagatgccatttaaaacttctaaaaacttttgaatggacttctttctcccctcgttttatttatttttcgttggtaaatcagttttaactaactttgtttttagatgccaacaaggccagtgccaagttatattcaaagaccagattatgctgatcatcccttaggtaagctctgctatgttgattcttcatttttcaatttgtgggcttgatgactactgcaaagggaaggaatgcttttcttgtagaaatttttcagtgctggacttctaataaatgtgttttcaagcaccattagaacattgaagagaattaaagattcttgcccccattagaaatctacctacctctgaaaacactatgtagctgttaaagactatatttaaaataatactgtattttatgttgttataacaacttctagacttactaaaaaacagtttttaattttaatattccctcctatctaaattaaacaatatctatttaggtaaaggcagatggtagaggcctgagtgaatgcataactaaagactttggactgtaacattaacagaagtagtaatggtggtgatagtgatagtaatgatgagaatgatatgatgatgatggttctctaataataactggtatttatttttgcttaactatgtgtcaggcactgtgctaagttctttgcacgtgttactccatttaacactttcaacactgctgaggtaggttctgttgtcttctccatttttatagataatgatactgagacacccagcgaagataggtaatttgcaacacaggtcagtggaacaatctctgaccttaaggcctgtacacataattaatttagactttgtgaaattactgattttgcatgtcaaagaaggtcgactctcagcaattttgtgtggttttatctagcaagctaagctatccttgctttgttctctaagaagtggggaactgtattacataacattcttatgaatatcatttttaaattttagttaaaccctactatttcagaaaaatttaagggaaagatagtctaaatgatagcctactgttgaggatgtataatttcattatttttctatttaatcttaaatgtagtattagcttgtattttagaaaaacaatcatagacaaggtaaattctaacaaatgttatgcagtgaaagtaagttctagtccttagaggtaactgctattcacctttatgtacagaacttttcagaactattctatatatgtaaacacattaggaccccgtctctgccatctatacacaaatggaaaaaactatatttaccttttcaccttgctgtattcacttaatatgtcttacaaatgtgtcttataaagccacctcctttttagtgaatgaaggttatgtggatgtatcatatttcttaagccaggcttttactactgagtgtttagatcatttcgaggtttttgcttattgtaatttgactgcaaatttgttgcaatttgactgcagtaactactcttatatttatatctttgtccatgtgtcaaagtatttctgtaggttgatagtctaaaataggtggatcaaaggatatatacatttttgattttgagagatattacaaatttcagagatttttccagttccattaaaaatacatggatgtctcttttctgctatatttttcgcagcatagtgtgttacaaagctttatgatctttgctaatctgaaagacgaaaaatgttattttgctattattttaatctgcattttaaaattatgagtaaggttgagcatcttttcatatattaaagtcatttatattttcttcccttttgaaatgtttattcatatccttagcctttttttccctgttagagtactagttttttccatattgatttataaatgttcttagtatattaacgaaaataaccttttgatgtatgtttttaaaactgttttttaccaattgaccgtttgttttgtcattacatttattacagattttgagtatcctaacatagtaaaatttatcagtgttttattttacagtgtgtatggctctatgacctagaaagacctttttggtgcagaagttataaaaaaatattcctatgttttcttctagcatttttatggtttcagtcttttttatgtatgataaaaatcatttgtatatctgaaacttacttggcataaggagttaaatagggatgcaacttaattttttttctcagaaggatacctggttattatatcaccagttatttaaaaaatcagcctttccttattgatttgaagtgcaacctatattgttgtattatgttctcacatgtctttaggtctatttctggattctattctgttttattaacccatttgtctaatcatgtaccactgccaaacttttaattatcatagctatataatgtttaatatttggtaggccttgttgcccctacctttcctctttttcagaattttcctggctattcttgcatgtttgtttttccatgtgaaatttagaatcagcttgtctggttctcaaaattatcctgttgacatttttttattgggatagtattaaatttatagattaattttggaagaattgacatctttacaatattgagtcttcctgtccaggaacagggtatgtttttaaagttttatttgactccttttatgtctttcagtggtgttttcagattttcttcatgtagggattttattgttaaatttattcctgggtacttcatctttttagttgtttttgtacataatagcttctgtattttttagctgattatttgtatgtgggaaagttattgattttgataaatttatcttaaacaatatgccaacttgctgaatttgtatttatggtcatttaccaggtgattcttctgttctagagatacataatcacatctgaaattgataagaattttgtcctttcttttctagttttatatgttttatttctttctcttgtttaattgcatctgctagtattgccaggacagtgttaaataatagtgccgatagtgggcattctgtaatgttggttctcagtttgagatttatatttatcatgtcaaggtggtagctggccatgttatcagaattaactttccttctagatgattatttacttttactttatttatgaatgatgaattggatgaatagatttgtcagtattgaactatccttgccttctggtatgaatctcacttgcatcctgatgtattaagtttttttggattctgtttgttaatatttttatttggaatttttccattagtacttgtaaataagattagttgacattatttttgttagattttgagttaattgctatcctggctttattacttttcatgtatgtaaaacttgaagctaacaaattttattagtgaagatttttagggcaatatttttaaaacttttttgagtatgactcagaaatggcttttataacgtgatcttygtatgtgtatataaataaagatttcatggcagcacttattcctactccgtataatacgagtataatactttgttatgccattttaatattttctgtcccatttatttacttttaaaaaatgttaagtgtagcctaataaaaggtcacaaactggagattgaaaaacacttaactttggttcctgtttcagaaaatagtgtaattaattcatcagttgttgatgtataattgcttcatgagatgattatgaaagtaatttgtaaattctgtggtacttttcaaatgtatatcatttactgagtctgattatcacacggcctggcatataataagtactctataagwattggctgatttctaataggtctgaaaatttatcytttagaattttttcttcagttggtttagcgagtttccctttgatgttgaaaatgtttttttttwaaaatctaacctagaccatcccaaatcatgaattactgttgtgtgaaacagtgagactactgtttttatgccacaggtttataattatgcaaataaatactacatctttgcattcawtttggttttacttaccgaattttcattccaggaatgtctgaatctgaacaggctcttaaaggtacttctcagattaaattactctcatctgaagatatagaagggatgcgacttgtatgtagggtaagagtgattttttctccatggggtaggaaatgtttaagcagtacttagacatgaagtcagtggtttgctgatttataaagatagcaaatgttatattgttagactgaccagccatgctttttttttttttttaacttttttttgagacagagtttcactctgtcgcccaggctggagtgcagtggcgtgatctctgctcactgcaacctccaccttctgttttcaagcgattcttctgcctcagcctcctgagtagctgggattacaggtgcccaccaccacacctggctaatttttgtatttttagtagagatggggtttcaccatgttgcccaggctggtctcgaactcctgacctcgtgatctgcccaccttggcctcccaaaatgctgggattacaggcgtgagccaccacacctggcctttttttgtatttttagtagatacagggtttcaccatgttggccaggctggtctctaactcctgacgtaaggtgatctgcccgcctcggcctcccacagtgctgggattacaggcgtgagccattgtgcccggtttagccatgcttttcattaaactattgttagtatataattttagtcaacagttttcttcttaaaagcctatttcagaattaatctggtggatagtctatatttagatgacaatccttttcatttatttaatgatatttaaaaacattttgtcattttattttcacaagtcatcataacataggacagagtttaaggctcagagggttatgctgtaggcctttttgtgaaatacctatgatgagtggtagtagtggttggtactcattaggtgaaatcacatatttattctgaaggaaaatataatacattgatattattcatttaagtaagattcttaaggtttctattcagtgctttaaaagtgatttgattctaattttgtttgatatcctggagaactttctcttcctatgacttgctgtgattctttgaggaattcattcatctatttttttttttttgagacagggtcttgctatcactcaggctagagtacagtggcacaatcatagatcatatagatcatagctcatagcttactgtaactccaaactcctgggctcaagctatccttccacctcagcctcctgagtagctgggatcacaggcatgtgccactacacctgactacttttttttttttttttttaagagacaggatctcactatgttgcccaggctcatctgttcttttttcttttcctctacttttccccattatagaaatgagagaagactacctctatcagttgatgatagtttagatttcttaggatgtatattttcacatagaaatcagccaaccttactgctgcttgcttgttaacccaatttttatataaaattaatgtttgtttttatgtatttacatataatatatttatatattttctataaaattataatattcaaggggagattcatttttaccaatcttccacagtcaaacagtagaaagggtatagatttctgtttctgtgtcttttttaatgtattgagtgttccttttttacagcttgctagagaagttttggatgttgctgccggcatgattaaaccaggtgtaactactgaagaaatagatcacgctgtacacttagtaagaacttcacttttttactttgagtaattttgttacattactagatgctttgaacttaaacattaagtagatttaagttctgagtgtctaaggtaacttgggtaaactcatttgaaagcaaatttttgctttgtttcaaatatggaaaacattcaacagtcattattctcatctttaagaatctataatattaaggtctgaggtaagcttgaaatatcttgtttctgaaacaacatatttgtaataagcatttcagttgagcttttataaaatgattgattttatctgctttaagtaaatcctgccactacagacatcaaatattctgaaataaaaaaaagaatatgacttctgatggtagattagttaaatgtttcctcaaggcaatgaacagtccacataaatatttgtagtaagtatagggattaaaaataaataaataaagattgtctgcccatcaaagagagaccttaagacyttattagatgagtgtacacattatatgaattttaaaaaaaagagtgataagtagttaatataacatatggaaagcagatcacacgtgttctagtaaacaaatacaaattataaagacctagtaaatttgtattttaaagatgtttatatgcattgcttgtgtggaaatgatgaaactggtcctctcttctgcttggtgatggtattgtaaattggaagaacccttttggaaggatttgacaatctatcttgagctatgaaaatgtttataaattttttattcagaatcttattaatcctgacttttgggtattgtttcatatgttagtataagacgtatcgtatgcaataatagcattttgagtatgctctgtgggccaggtactcaagtgcttcttttacattaactcattaatcttaccaacaacctcttgagggtaggtactattgtaatctccgttttataggtaaggaaactgaggaagagagaggttaattaattaaattggtaaaagttacacaacttgtaagtgatggaattggcattttcaatctagaaagtctaattctgtatgctctgaactattatttgtaatgctatgagaagtagagaagtatattcctaaatgagggaaaagccacaaatgtakttattggttgtaagattttttttttttttgtaattgaggaaacttcatattaatttagattttcagtaagaatggaattgctagtaaaatcatggtatattctgcatattctgcaaatggtatattgtgcaaccattaaaaaatattagcctgaagactagagcaggttggaaacagaaattacgtatactgtgattaccactgtgtaaaagcatccagtaaagtaagacttgttatggagagcagaccatgtttttctgttaggagttcttttgttgttccactgaatgtggttattaaaatatctggaagtactttaccgtttcttaattatactagtagtcatttttggggcatagtgatataggcttgtttcaacataagaattataattacatcaaaaatgcttgttaatatttacttcaaatattttatttttactttaacatttttcataaggactagttaattctaaagtaaaatcttcatatgtggtaatatttatatatatatttgttatagaggttgagtatcccttatctgaaatgctttggaccagaagtgttctgrattttgaatttttttggattttggaatatttgtattatacgtaactggttaagtgtctgtaatttcaaatttgaaattctaaatgctccaatgggcatttctttgagtgtcctgtcggtgttcagaaagtttcagattttggaggatttcagatttttggattaggaatacttaacctgtatgtcattttacttttcctttgtgcagttaccagtaaactggtttgtgtatgtgtacctgactggcacaaaccctgttgtatattgtttaagataatatccagtactgttactaaaataaaatactgagttcttcatagtagcatgtgtccaactgttttcacatttttcaaattttaaaatctgtaatttcatacagattttttcttttatatattccaaattattttttctgtattataggcatgtattgcaagaaattgctacccttctcccctgaattattataatttcccaaagtcttgttgtacctcagtgaatgaagtcatttgccatggaataccagacagaaggcccttacaagaaggtgacattgttaatggtaagaaaaatatgttactttcatcaccatgggcaaagaaacaacaaagcttggggaatctgacagtgacttgtgttttcttgacttgcttcctgtacttaaactttttcctttttaaaattcagtatcactaactcttaaatctacaggaagctctcttaacggttttgtgcatgttgcttttaagatacttccggtgtgatgtgtttggtgcagtgtatttctttaatgcttatctcatatgtgattggtaaataggtcaaagatgtcagtgaaatgtggagtctagtttttttcccccagaagttcactaatggttttgaagagaccagggcaggctttgttatagatacaggaaaacccttcataatatatgaagacctaaaggaaagctgaaaatcttgcagaagtgccttacttgagtggaagtagctttaaagacccctatgttaagctaccttgggaagttacaagtatagagagtagaggaagtagtttaaaagacattaatgaaggctttcctagatggcatttgtttttgttttgtgtattattttattttttggagacagggtctcactgtcacccaggctcgagtgcaggggcgccaccatggctcactgcagtcttgacttccctggctcaggtgatcctcccacctcagaagtagatgagactgcaggctcattgctaccatgcccagctcagtttttgtattttttgtagagatggggttttgccatgttgcccaggctggtctcaaactcctggactcaagcatctgcccaccttggcctcccaaagtcttgggattacaggcatgagccaccrtgcctggcttagatggcattttaatattgatggaattagactctttgttaataagatatcttaaaggaactacctatcaaatgaggaagcatgagcccaagtgttagaggctgcagataattgactgattgtgatgctagctgtgaatgatagccgaaatttaactatgacactatttttattagaattgctactgctttagttagggtatctgttcataaagttccataggttttgaggccaaccctgtttttcaaatataaagcctgttatttttattatatgtagaatgtgtgaggtttttcaggaatgtatgtgttgtgctagaaccaaaatatctatattgtgatgttacaggttgattgaaatatgtggtttaaaaatactcaatgtgctctctagatacattataatggtataatagtatataatatatagtataatagtaatctatattcttaaacatggggacaaagagaagaatgaatattcacaaataagagaaaagcaaatgagttttaaaaaaacaggtgtagagcagtgtaaatttttctgttattccctagcaggagtaaggaacttgtaaaagataagtgaaaatggtattttgtagcaatgtagcaaagttttcaatttaatgttactaactctggtaatttattttgcatgattgtgtcccacatacatttttcttttgccacaagtgatacaattactataagagtataaaaacccactatctggcttatgttacatggccatattcctgctctccacagtgagttcagttacatctcagggagcttctgttgggcaataactatctatccattggtgtctaatttgagaatgcagaagttgtctttttcattaagttgctagatgctgtcatgttggaaaaacacttgaattttgaaatgaaaataagtatggtctttatrtttgcacattctcttgcagtggatatcactctttatcgcaatggttatcatggggacctgaatgagacattttttgttggagaagtggatgatggagcacggaaacttgttcagaccacatatgagtgcctgatgcaagccattgatgcaggtcagcctcagtgttgagcacctattggcagtcctgtgtgttgatgggccaagaatgactgggcgctgcagttctgtgcattccttgtaccttccaggttgcccctsttctacctgagttagctttggttgttagcagtaatgggtaaaaggatgatctgggaatctcttggtggtgatagaccagatgattggttagcatcctttgtttcttctgtgatttatcttccttttctttgcctgataaatgaagaggactgtgcagatggttttttagtgcaacttttattctatttttaaaattctttccagtacataaatattatgttctcctcataaaaaattaaaagtgaagattatgagtgaaaaatgtgtgatcctcctttacacttgcctcccctcttatctctctcttctctctagagatatcccattaccgtttaggttttttctctctcctgtgcattaatgcacacacgtatgtgtatgtgttaaattaagttaaatggaatcataatatttttaatgtgtaactgggctgttttttcaactatcatagagatcttttcaagttagcatatatacctacagacatagatttacctcattcttttaatggctatgtattatattctatagtattacaatttgtgtaactattctgttggattttggtgctttccagatttcttactattgtagtaatgggtaggggtgtatttctggaggatttttctcaggctgtctgtctttgtacatatgaacaacttatcgaggcttttttgtttaatcagtatcttatggggataagagaaggaaaggggctgggcatggtggctcactcctgtaatcccagcaccttgggaggctgaggttggcagatcacttgaggtcaagagttcgagaccagcccggccaacatggtgaaaccctgtctctaataaaaatacaaaaattagccaggtgtggtggcgggcgcctgtaatcccagctactcgggaggctgaggcaggagagttgctggaacctgggaagtggattgtgccaccgcattccagcttgggcaacagagcgagactccatttcaaaaaaagaagaaaagaaaaaaaagaaaggaaagttcttaacagcatcttgttggagttgttaacaaactgttaataaatgggcaaacagccttctggttaaatccttaccatatcaactttattaccagtgtgctacctgcaaycctccccagtctctccaaatcttgatgtcatcaacagaatagtgaacaggacagagttcttagacaaacatacagttatctctaataatgtkgatccagtatttttattgtttttagtgcgttctttaatgtgtatgggagatgaaatttttactcaagttggaggaatggaaatgaaggaatatgatatttttgtgtatcaggtgaaattttgaaaacttattactcattgttgattattttaaaacattaatacaggaggtggaattgaagaaatttaatgtttaatttgtcatttgtgaaagcttaagtttgaaataatttttagagtttctgccagataatatagtcaatatttctattctttttgcttctctgtgaatcaactgaagaaacaaaaaaaaaaaaaaaaaaaaaagaaaaagaaaaaaccagatagttagaatgctgttttatatgacgtatgactggaacttgccaatagttttcataacagtagccaggaaggaacgaaagtggcttgatcttttttggaaagtgctttgaattcctttgtatatatcatttttgcccctcattttgcaccycccttactcccccaggtagagggtttgaaaagctgttgaaattaggcttcttaagtagggtttcttagtctatgcacttagtggcttttgggcctgataattttttgttgtagagacctgttctatacacataagatgttccacaagcattcctggtctctacccagtaaatgccagttacaccaccaccctgtgtttgacaaccagaaatattaatatctctagatactacccttggggccgcagttggagcagtttgaaaattagggaagacttcctctgtcactctttctatgcaacatggattacaatattgttccccctcccaccccaggctgataggaaggcctggataggaatgaaagaaagtaattatgaaagtcagcatgatttttcaaaaccagaaacctccttccttctccccccaaaatcaagctgcaaaatacagttaagagcaagtaaaaatgttaattaaactgattccttgagctatttaccctgaaatggatgggaaagatacattgtatctgaayctcagtctgggaatcagataggctgagtaggagagtagagagagttaaggatccccagagccatcttgaggttctctaggagtctgacagtgcccagctcctgggtcttagtgtgagggagaaccttatagtgatgagaaccactttttttgttttgtgttttattgaaacactagtaaaagtcataaaaactaaacagagcagaaagtgtatatagtgagaagtatctttcctgtactgtacctctagggttgtcctgtagaggcagtcatggaaagtttgagaactatttttatggggataaagaagcccaggggaagtaagtcttttagaagttgtccaggctgaaactcaggacaattcgttactttttggacgttccttttactcctagtgcactttcttatctcttctgctcatattaatagaatggaacacttggccttagggaaggatgcgaaaagaagtgtattttcctctctatttttctctgttgttaaagaaagcaaaaggtacctacttccaaccctttagtgctgctatgagtctaacgtttttggcatgaaaggaggaactacagatgcccttggtttgaattagaactttaccaattactggctgtttggcctctctgtgcctcatctgtaagttgaggcatggatgcataaaagtgtttcaaaaacttcctagcacaaagatagtaattactttttttttttctttttctattttgagacaaggtctctctcttttgcccaggccagagtacagtggcaggaacactgcagccttgacctcccgggttctagtgatcctcctagcacagcctcccaaatgtagctgggactataggcatgcaccactatgcgggactaattttcatattttttgcagagacagggctttgccctgttgcccaggctggtcttgaactcctgagctcaggcgatcttcctgccttgacctctcaaagtgctgggattacaggcatgagccactgcatctggttgatagtaattgcttagtacgtattagttattagtttatcatgaattttcttttttcctttcagtgaagcctggtgttcggtacagagaattgggaaacattatccagaagcatgcccaagcaaatgggttttcagttgttcgaagctattgtgggcatggaatccacaagctttttcatacagctcccaatgtaccccactatgctagtaagtactatccagagatttggtataagctcaccatttattcaacaaatacttattcatacatttaacagtacctactattttgtattcactagagtaatctcttagctgtaatagatagattcccaaaatgtgtatttgctgaaacacagtgcaagttcgtatcttactcacataatagtccaaggcaggtgtgtttggtcactgtgggggcagggcagttactatgtgacacaggctgtgtcatctttgacctrtggctttcaaagtcactttgggagttgccctcctggtcagtagatagtggagatgttgggggttgaagcttgaaggggtatacctgggagkttttaacagacagctggaattggcataaatcaaatttattttccattggcaggaattcagtcacatggctacatttaaatgcaagggagatgggaaaacgtaatctaattgtgttatggaagaaaagtaaccttattttggcaaacagtcaacagtttgccacaggcctagccattactcttctgattccttaggtgaagtcagttcgtcttgcttggtttgagtgtttaatgtatgtcagatcctgtaatatttgtttatataaatagaggggaataaacaaagtgcctttccttaggttgagtgccgtgtgatacaataacaaagaaagtgtaagatagataatatcttacagaaacattttctgtagagagagaagaacatgttcaggaatgaatctgttatttaatgtcagaartgaaagctgtccacagtaagtgacctaggaaggaacttagcacatatatwttgagccgctgctagatgaacactttcatctccttgtgcttaatttttttcatctgtacaatagtagggaatggtacttactgtagaattgttatgaggattaagtgagatgatacatggaaagcacttagaattctgcatgaaaacagtacatgaaagcatttaatgttaatgtttacaatgacagtaatatgcattatctcatttgatcatcacaactctatggataacttcttagcccaatttttttaaagcaactctgtgcttacagaggtaattggcttgctcaaggtcacacaaactagtaattaaatgccagactagcattgatacctgggttctgtcttgctttctggagtcagtcttttctcccatacttcatgctgacgagtaaggattgaagaaatttggtgcagggggcggtgggagaactaagttttggttgggtggagaggagaaaaagccagttggtgggtgaacatgggtgcttcaaatagagaaaaacagagaaaatataaggttggctgagttatatgttaaggactagcagcaggcagtccaggtgtgccaaatgccagactgaaggaatttgacttgtatgtcggaatcttcagaaatatttttgggcagaagaatggcataatgaagctgatattttgagaaggctaatttggcagtggtgactaagatggattgcaggtgggagttctgaagatagttggcctgatggacagttgttgctgtagtgcaggtgtgaggtggtaaaatcctagacgtggatagttgtgaagagaaagtgaaatgagtgagcaacctttctaagggagaagctggagcagtcattcagagcaggggtccccagcccctgggccgcagacaggtaccaatccatggcctgttaggagctgggctgcacagcatgaggggagcagcaagcaagcgagctttaccacctgagctccacctgctgtcagatcagcagtggcattagattctcataggagtttgaaccctgttgtgaactgtgcatgtgagggatctaggttgcgcactccgtatgagagaatctaatgcctgatgatctgaggtggaacagtttcatcctgaatcatccccccaaggcttgtaccctcaaaatcctcctggtctgtggaaaaattctgttctacaaaaccggtccctagtgcaaaataggttggggactgctggtttagagcacagcatctaatgtgtgtcaataaatggttattagcagaccacctaattctttttatttaaaatgtgaatcatgcttgaaataaaagctagcaacagaaaataggtaactgacttcattccttccttttataccctgtaatcatctgaatatgcattccctttcacagaatggaagtagctattctagttacagtggggtgtgtgtatgtaagagtatgtgcaggggagggaatgaaaacagtccccttacttgcagaagcaataaaatttgagtttagatatggatttgagtgtgagggaaagagagagactgaagacaataatatttatgggagaaggggattttggtcagtggttatagtgtcagcaaaatatgttgccactgttatacaaaaggtgtcatgtgagtttcctattaaagcatttgattagacataagaaacaattatgaaaagaggaacaaagacccaggtgtactttattttatatagtttttttgagacaggatctcgctgtgtcgcctaggctaaagtgtagtggtgcagtcacagctcactggaaccttgacctccgagagctcaagcagtcctcctacctcagcctcctgagtagctggtacttcaggtgtgggccaccatccctggctaatttttatatttttgtagagacagggtttctccatgttgcccagactgatatcaaactcctgggctcaagcagtctgctcacctcaggctcccaaggagctggggttacaggtgtgagctaccacacccagccttatatattatgtttatgaagagtcacatttatgtaaaacaaaatatgcaatgatcactgtagggaagtattaaactattgaggktttttttttttgtatagcagagatatcttttgaaatgtaaatctctgctttagtttgtaactctatattcctagcccaaatgagggaagaaccaggaaattgttgtataacattcctccactccttctatgtaggagaaatccttgttaggtgagagtttatttgcttctatgtttgaatcaatgggtgggaagtaatgatgataatactctgcatttaaactgtacaggcatacctcagaggtaactgtttggttctagacccttgcaatatagtgaatatcacaataaagcaagtcatacagattttttggtttcccagtgcagtgcataaaaagttatgtttatacagtagtctattgtgtgtgtagtctaacaatgcacaacccttgatttaaaaatactctattgctaaaaaatgctaacagtcatctgagtcttcagtgagttgtaatcctctggctggtgaaaggtcttctcttgatgttgatggctactaactgatcagggtggtggttgctgaaggctggggtttgtattacattctcacattgttagaaattcctggtagaattcttgttagaacctgggtaatttataaagaaaagaggcttaattggctcacggttctgcaggctatacaagcatggcagcatcagcttctggagaggcctcagggaacttacaatcatggcggaaggcaaagagggagtgagtgtctcacatggtgggagcaggagcaagagagagagtgcatgggaggagaaacaaccagatctcatgacaactcattcactgtgcagtaccaagggaggtggtgctaaaccattcatgagaactctgcgcccaggatccagtcactttccaccaggcctctcctccaacactgggaattacatttcaacataagatttgggtaggaacacagatccaaaccatatcagggttgttgtggcagtttcttgaaataagacaacaaagtgtgtcacattgattgactcttcctttcacgaaggatttttctgtagcttgtgatattgtttgatagcattttatccacagaacttctttgaaaattggagtcagttctctcaaaccctgctcctgttttatcaactaagtttatgtaatattccaaatcttttgttgtcatctcaacatcttctctatgggtagattccatttcaagaaactactttctttgtttatctgtaagaagcagctactcaactgttcaagtttcatcatgagattgcagcaatccactcacatcctcaggctccattactaattctagttctcttgctctttccaccacatctgcagttacttgctccactaagtttcaaactcctcatagtcatccaaaagggttgaaatcactttctgcccaactcatgttaatattgatatttggcttcctctcatgcatcacacaatttcctcccatgaatcacaattttttggttttggttttgtttttgtttgttttgagacagggtctcactctggttgcccaggctggagtgcagtggcacgatctcagctcactgcagcctccacctcctgggctcaggtgattcccccacctcagcctcctgagtaactgggattacaggcacgtaccaccctgcctggctatttttttttgtatttttagtagaaatgggattttactgtgttgcccaggctggtcttgaacttctggagtcatacattccacccgcctctgcctcccagagtgctgggattacaggcgtgtgccaccacacccagcctacaaagtttttaatggcatcgagaatggtgaattctttcaagaaggtttttcagtttacttttgtccagattcatcagaggaatcactatctacggcagccttagaaaatgtatttcttaaataataagacttgaaagtcaaaattccttcttgatccatgagctacagaatagatgccatgttagcaagcatgaaaccaacattcatctccttgtacatctctgttagagctcttgggcgaccaggtgcattgtcagtgagcagtaatattttgaaacgaatctttttctctgagcagtaggtttcagcattaatattattaattayattaactatattatatgttaattatatattaatattattaaaatattcagtaaaccatgctataaattgaggtgctgtcatccaggctttgttgttctgtttctagagcacaggcagagtagatttcgcttcattcttaaggaatctttaggaatggtagatgagcattggcttcaacttaaagtcacaagctgcaggatcccctaacaagaaagtcagcctgttctttgaagccagttgttgacttctcctctctagtgagaaagtcctaggtggcattttcttccattagaaggctgttttggtctgcattgaaaatctgtttgttagtatagccaccttcatcaattatcttagctatatcttctggcaaatttgctgcagtttctacatcagcacttgccgcttcaccgtgcacttttatgtaatggagacggattctttaaacctcacgaaccaacctctgctagctttcaacttttcttctgcagctttgtcacctctctcagccttcgtagaattgaagagagttagtgccttgctctggattgggctttggcttaagggaatgttgtcggttgtgtgatctatccagaccattcaaacttcctccataacagcagtaagactgttttactttcttgcatttgtgggttcagtgaagtagcgctttcaatttccttcaagaactttccctctgcattcacaatgtggctaactctttggaacaagagacctagcttttggcctatctaggctattgacatgcctttctcattaagtttaatcatttctagcttttgattcaaagtgagagacatgtgactcttcctttcagttaaacacttagaggccattctagggctattaagtggcctaatttcagtattgtgtttcagggaatagggaggcctgaggagagggagagagaagtggggcaggctgatggagccttcagaacacacacaaacatttgtttgccgtctttacatgggcacagtttgtggtgctccaaaacaattaaaattttaacatcaaagaccattgatcacagatcactataactggtgtgataataatgaacatgtttgaaagattgtgaaaattaccaaattgtgacacagagacatgaagtgaacatgcactgttggaaaaatgacattgttagacttgctcagagcagggttgccacaaatcttcaatttatttwwaaaaaaaaaagcatctggtcagatgtggtggctcatacctgtaattccagcaccttgggaggctgaagcaggcggatcatttgaggtcaggagttctagaccagcctggccaaaatggtgaaaccacgcttctactaaaaatacaaaaattagccggccatggtgcatgcaactgtagtccccagctactcaggagcctgaggtgggaggatcacttgaacctggaaggtggaggttgcagtgagccgagatcgtgccactgcactccagcctggacaacagagcaagagtccatctcaaaaaaaaaaaaaaaagagaaaagaaagaaggaagcagtatctgtgaagcataatatagtgaaatgcaataaaacaaggcatgcctgcatattacagtcattctktgagagactatagatcaggtacaaattttttaaaaagtacctaagagtgtctgcgatagtatagtcactcagataatgtgtatttgttgagtgaggtatgttgggaaactgaaactttaatcagtgtaaaaattattgagagatatgttacatgttgttttagtctttgaaatccaaagggcttttgcactgatagcctcagttctgattggtcacttttcaagtactttctagctatacatggccaatgctgctgttctggacggcagagttcaagagtctttcatcctttttactttctgtgacaccacactgacattcttgacgttttctttttggtttctccaaggaaatacagaccaattctgtatatgtattaagcatgtcattttgaaagtttatgaatttagaaattaaaagtcaaatgtttgtttttcttttcttccttttttcaaatgaccttaggattttataacagtttagaagctccagatttgaaatctgcagtaagtgtattttggcaatacctaagatagtggaaagcagcacgatagctattcatctggaaagttatgcaggaatataaacgtgtaggggaggttagaccattcctggaaagaggagagtttagttgagtcagcctcaaagggcgggcaaatttgccattcataacaaagttgcagatcagaacaacctcgcagaggaaccctgaaaagctgatgtattagccatctggtggtcaggttgggcattgcagtcattcacttagctgatacccttattaggttttgtttaacttggaatttaaattagttctccatttttgtctaaaaaagcctattcctagttttaacatttttggcatttttgaggggtatggcaggtctggtcactgtaatttattgttgtattgctcatgatgatcctgaaaaaaacttacattagtgaacttggacaaagaagctaaaaagtacttggagagagaaatggagtttgcttttttgctttgaattaaaaaataatggtctccttagttgtttgttttttgttttgttttttgttttttttgtttgcttgtttgtttgtttgtttttgagacggagtcttgctctgtcgcccaggctggagtgcatggcacaatctcggctcactgcaagctcagcctcccgggttcatgccattctcctgcctcagcctcccggtagctgggactacaggcccccgccaccacgcccagctaattttttgtatttttagtagagacagggtttcaccatgttggccaggatggtctcgatctcctgacctcgtgatccaccmacctcggcctctcaaagtgctgagattacaggtgtgagccactgcgcccggccttgtttttatttttgagagagtcttgctcaatcgcccaggctggagtgcagtggcgcaattgatctcagctcacttcaacttctgtcttctgggttccagtgattccctgcttcagcctcttgagtagctaggatttcaggtgcacgccaccacacctggctartttttgtatttttagtagagacaggttccgccatgttggccaggctggtctcaaactcctgacctgcctcaggtgatccacctgcctcggcttcccaaagtgctgggattataggcatgagccaccgcacccagcttattttttaaaaartaggttaatgtgcatagattttgttcttctttgaagatgagaaaaacacaacagcttatgaaacattatgaaaatcatgtagtttctatgggctgtgcacctgtgtrcaaacacatgcttaccccccaaagcggtgggaaatttctggcataatctgaaacrtctgtcattctcctttgagcttctctacccggatgagtagtggaactcttggttctgtgattgcaattctaatcatgaggtaatagaaatcaaggcacttttcttttattctttatttgccacttttctttttatagaagtgatactcatctctgaaatacagcctacaaatacctctgttttcctagagaacacataagcgtaattgaaatgtgcctaggacaatacgtgcaccatattagatggctgccagtataatacctgtttgttgaactttaagaaagggaatcagggtaattaatttaacaatcactgatgggaatttgagttatgtactctttctagttagctgttcaacagtacactgttggttttgctaccttttgagatttttttctttgatttcagaaaataaagcagttggagtgatgaagtcgggccatgtatttacaattgagccaatgatttgtgaaggtgagaaaaaaggatgccatgatatttttcaattgaatttatatgtattttaggtaattcatcatgtcagtggtcttttctacctgcttgctttttgcttcctactcactccctgtcccacctcaaacttgattcagtatcgtgaagaactgaaaattgtgagggttggcaagaacggcatgggttctgcgtggtagtcttctgtcaggagatgctgaaatgcttgaattctggtcccttttcataaagatcatgtcaaagggtgcattgtaataatgaggtgcccaggtcaagtctgtgcggacgttcttgcttgatgtaggagagggaagaggagggaacagagcagagcattgacgagccacccagttcgaggcagacatgattatatgatttaattcttcacaatttataaggtaggtgttaccccattatagaaactaggaaactggtccttgaagagggtgggtagcttgcctgtaacttagcttgttacttggcagaatttgtcagactcagctcatgagctgttctgacccttcatggtctgtactcatgtcatcacgtggcatcatatagctattgtggggaaagcacaccaaggacacttggaaagcacacttggctctggcagcctccccactgttgtcatctcttccagacaggcttgtagcagtgataggagactgggagtcacaattagggctcctcaccgagattttcagagtgattctggtaatggagctttctggttaggggatgcaaagtgaggcagtagcagtagagcttgtgtgtcctgagccctgttttaaaggatactccctctcttgatccttccagtctttttatawcccagtcttgggagtgacttctatattgtctttcttagaagtgattcactgaatccagcccgcactcaaggggagcaggagctcacacaagggcctgcatgccaggaggctggggatcactgaagtcactttagaggctgccttctaaagctggttccttattgcgttttctgtaaaatgaaaattagaatctctatcttgccaacacccagggctgctagactgagatgatttatgttatgttatatactttaaaagactgcacaaatgtgcagtaaagtttttgtcatcctcttataataaggataaagttctgatcacgtgcaaccagttgtaaagatggtaagtatttagcagtgaaaagaaagatagtgggaggaaattgtcattttggctacgtatttccattaactagcacctggttggtgagccatgatgtagtgttttcagtaagcaaataactttctatacagccagcacaggtaattaatcatcaaattatagcagatatacttgaagtgtaactcagctaggttaaatccctggactagaaagtctcaaatctgcaggakaatttcctcagaatagccaaataagtttgacttgacattactaaaaatcctgttttatcagatcacaataaaattacagtagtaatgttttaaatttgtgtaaaggccatttgtgtaaaggccattacattgaaaaacatcgatgtactcatctttagttgcttgatgaggcatgagttaacttttttaggccgcctcgtattttctttttagcctgggatttaatattgcaaaagtagtttacttcactacagagtttatgttctgggatttgtctgtctgaggcagtgagtcctagaggtaatatgtttcacctaaagattactcaaaatgaagaaagtattgatttttttttaacatctaattttgaaagaagaaagctcgcaaatacatcttttacagtagtatctagaattgcctttctcattccacctctgcttcacattctcttgggcctttgctttctgctttccctcattatgaccccttcaccccctttccctcctttctctgagttttctttcatggcctcccagattcactgtccctttgcttcccttctctggtttcaactcctgtccagaccattctgcttcatatttttcttatgctctcacaccagtctttcttttgcccctctttctgattccaggggtatagttyacaaaaatttcactgtataatctgttctcaccatctgtttgtgtgcctaccattttgaaattatatcaggaattgaatgctgtaataaaactgtaaacatttacatgatttccttcacaatatatgctgagtatagttttgtcagatgcccaagttatactaggaaagagctaaattcattcaagttttttttctgattttttaattgtaaaatacacatctcatttttaaatgtacagttcaatattattaaatacattcataacgttgtgcacccattaccaccatccatctccaaaagtcttttcatcttgtaaaactgaaactcaacccattaaacattcccttcctattgctcactactcccagaccttggcacccactgttctgctttctatctccatgattttgactactgtactctacctcatagaagtggaatcattaagcacatgctttttttttttttttttttttgagacggagtcttggtctgtcgcccaggctggaatgcagtggcgcgatctcagctcactgcaagctctgcctcccaggttcatgccattcttctgactcagcttcccgagtagctgggactacaggcgcccaacaccatgcccgggtgattttttgtatttttagtagagatggggtttcactgtgttagctaggatggtctcaatctcctgaccttgtgatctgcccgcctcggcctcccaaagtgctgggattacaggcgtgtgccaccgcgcctggccaagcatatgcttttttatgactggcttatttcacttagcattatgttctcaaggttcatctgtgttgtagcatattgcagaatgtcctttttaaaaaatttcctgttttaaaatggacaattattgtacatattcatagggtacatagtgatgctttgatacatataatgatacatataattaattaaggttgttactcaaagttgtggtgattggtatcaatatgttgttaaaatgaaatccagcgcctttattttggaaattccatcttgatttgatatttgggatatataaaaaatgtggttgtaatacatctgatgaaatttaaacatcaaacatactgaagaccaaaatgaagttggaaaggcattagctaaaacaattggcatgtaaataaggatcttagtagtgaattttttccttggctttcttcttgatagagttcatttagaaaactgagtgaactaagaaattgtttttgtttgttgaaggcggatggcaggatgaaacctggccagatggttggactgcggtgacaagagacggaaagcggtctgctcagtttgagcacaccctcctggtcacagacactggctgtgaaatcctaacccggcgacttgacagtgcacggcctcacttcatgtctcaattttaatttctcccaagatggcacatctcagtaccttcttactgtgctatgcattttattgagagtacagaaaggaagaggaacctttttttaatcacttgttttgttttgactatagataagaaaggactacagcatttgatgtgtgtcctcaagaacttgtcttgggtctgaaaaagctgagaagaataaaggaaacattgctcaactcttcagccccctccccctgcacacctgttttctcatttgccctttgagcacttttacttaaacttgcttgtagttgcttttatcactgccgcaaaacagccatcaagagccatctgctttccaggtgaacattggaaatgagaatctttgaaacttagcaatatgtgttgcaccagattttttaaattatatatatggaaatatatatgtatacattttaagttctgtatacataattaccaaacactatgtgacctggagtttgtgttgtttctgctctgacaggtttatatgttcttacaaatggatccatagtttgcagtgatttaattcctggttgggatttggcctcccctctcccccatgctaattatttacccttgtaattgtgcatagggaagcactcacccaatgagactttctccaatgtggactctgtgtgtcagtgaatgaatgtagtaaaattcactttggaaggttatcaggcttttaaaaatctagtttatggcaaaaatagccattttccaagtggtggctgactgttgcagggaatgagaatttcataatacactgctatttcagacctctgtttggtcagaaatggaaaagaaaaagccccctttcttcccttttctgtttyacttcaagggcataccttggaggtgctcagagaagcgtgaagtttgcactatggtggaggatggggaaagagttctaaagtgtctccagctgtgaacccaggaggtcaagtgggctattaaaatctaacgttgagtaaatgtgatagtgatgagaaaggaattttgtgtactgtaaccttgcagtagagatgcagctgtccttcgtgtgtggaaacacacctctcctttacatagttgggaacctcattagaaatgacctcagctgccccatatctacgttcctttcagcagttgtccaagtaggagtgtatccagtgaagacatatcaaatcacaaagtcattgtcattagagtgtacttgattactgggcatccttgtaatataatttcataccactgacacattatacttgtaagagaacatctttcccagagtgcctcagaccttattgctttaaaatataataatgttttcattacttttattatttgaatgatttagtaaagttgactgaatmtggtatagactttgggagtatgtgtgtgaagtttttatcaaactgtaatatttgtgaatggaatgccttgcaatatgaatgttaatataatgtgtaaagggagattaaaaagtttgaatgattatcctaccatgtagtcattaactttgctgcatttctttgggatttcagagggaaatggtgggaatggggaggctgtttgataatctaaaataaattcatgaccatttgagtagaaatgttttttcaggtgtaatggctgtrcataaactcagtagagtgccagcagcatttgagatgcaaccatatttttgagagcttttaagacagaatgctgaatattaggggagcattttatgtactgattgtggaattaacaatgtgggcttattcagtgtctgtcattagaatataagctgaaggaagaaagatcttggtgtgatagttttttggttaaaagataaaacaccacactggtgataatgcttttcttagtttgggagattttaaaacaatatggactctagtctaattgcatatatctaattacaaatgttcattggatttaggtgacaaaacacctagtttcatcattctgccacctttttacaaaacaagtcagagcatggtgtgcgagcctgtagcattagctactcttgagactgagatggggggatcgcttgagcccaggagttcaaggttacagtgagctatgattgtgccactacactccagcctgggtgagagagagagacctcatctcaaaaaaaaaaaaaaaaaaaaaaaaaaatcaaagtattaacttctttttttacattaacttttagaataattttttccccctgccagtcttccaactcctttggaattataacttggaagaagggaaacatgaacttcattttatgtcttttgttgataaaaaggattaaccaacacctttataccacttgcacccacatatctaaattaataggcaagagttgatgaggtttaggaatttgtttgcttgattcctcagtttgttctctaacgacttctgggttttcattggatttggttaaaactgagagcaggatgctcccctttgcttaacctctaccctcatggtatctgtaagcgatttccttcctgtttttcccttcttttaaaatttttattttttatctccaactttttatattgaaaattttcaaattacagaaaagttgaaagtatagtacagtgaaataatcatatatcccttacctttatctaacaaatgtcattttgtcacctttgctttatctctgtataagcacttttcttttgaaagaagcaacatcgtacttcaccctactacatcagcatgtatctcttaacctaatgacattcttttacatgatcataacacaattagaaatttagtattaatacagaattatataatgtataggatataaactttaattttcccccaaaatgttatttaaagcttccaaattcatggcatttagttgtcatgtatctgtagtctcctttttttttagatggagtttcactcttgttcaggctggagtgcagtggtacaatcttggctcactgcaacctccacctcctgggttcaagcgattctcctgcctcagcctccctagtagctgggattacaggcccccgccatgacccaggctaatttttgtatttttagtagagacggtttcaccatgttgatgccaggctggtctcgaactcctgacccgtggtgatccacctgactcggcctcccaaaatgctgtgattacaggagtgagccaccatacctggtcttagtcttcttaactctagcagccgtgtctaatcctttgagtgcgaggatcttttatctgtggtggtggatatcatgaaaattatgcacaggcctttgtttgagctcatcagctatcgttggtgtattttacatgtggcccaagataattcttcttccactgtggcccagggaagctaaaaggttggacacccatgctagaataaccctcacaccttttttgatgtcttacgaaatggacacttgaaaaatcaggttagtttacaaaagtccgtttgtctgattgttcctcatgaggatagatgcaggataaacatcttggtggaagactacagaaatggcagttgtatgccccattcattgtacaacgtgaggcacataatgttcttgtcaccttattgctgatgcaaagtttgatcacttggtgtttgtcagaccttttcactgtaaaaataccttttttcctaaacaagtaatctgggagattaatatttgcttgatactaccagacagatgtaaaattgtttcaaaattactacactaaaatcactgccaacaataaagtacactttctttatgattctttttttcttagaacatatcattgaagtaatttagatcttattctgaatttcataaaccatgggctactttaagaatgaatgcagtgaatctcgggggcaaaaaatacagtagaggtggggagggatatattagtggtctggcagttagaaatactggaactgtttgagacagtgtagtaagattctgtctacatttgatagtgtttaacttttaccaagctttccagctgcaagaggagcaaatcataccacttgtaaattacaccacacttgtggcagtgtcgctcattttccaactcctttatttatttatttttatttttttctttttttattatactttaagttctagggtacatgtgcacaacgtgcaggtttgttacgtatacatgtgccacgttggtgtgctgcacccattaactcgtcatttacattaggtatatctcctaatgctatccctcccccctcctcccaccccacgacaggccccagtgtatgatgttccccttcctgtgtccaagtgttctcattgttcaattcccacctgtaagtgagaacatgtggtgtttggttttttgcccttgcgatagtttcctgagaatgatggtttccagcttcatccatgtccctacaaaggacatgaactcatccttttttatggctgcatagtattccatggtgtatatgtgccacattttcttaatccagtctatcactgatggacatttgggttggttccaagtctttgctattgtgaatagtgccacaataaacatatgtgtgcatgtgtctttatagcagcatgatttataatcctttgggtatatacccattaatgggatggctgggtccaatggtatttctagttctagatccttgaggaattgccacaccgttttccacaatggttgaactagtttacagtcccaccaacagtgtaaaagtgttcctatttcttgacatcctctccagcatctgttgtttcctgactttttaatgattgctattctaactggtgtgagatggtatctcattgtggtattgatttgcatttctctgatggccagtgatgatgagcattttttcatgtgtctgttggctgcttaaatgtcttgagaagtgtctgttcatatccttcgcccactttttgatggggccaactcctttatgttagaacataacatttagacattcatgttttaggaacaaactgtttcataacataggctgcattaggctaaaacctataaaagttgtgttttgttctattttaaaaatggacacctaaggaaaggttagcttagcacacagtctgtgtatggaaactctggcccttatggcaaccttctctcatcttccttttggtgctaagtaggaaaaagaaaaatagtctgcatttatttgggtgttttgcaagatgaagcaggaataaggtggccctggctacgtgtttgctgcttttcattttggggactgtgggtgagcaacaatagaactgtgtatatggtgattctggttatttttgaaaaaaggtcaacactggtattttactagaatactccaaaaagttaaaatatggagcactcaagaaggacttcctataaaaattttcacttatcacaattgtgctgttagtcgttcacagtattttaatagttttttgttgttgttgttgttgttcctcaggctggaggcagtggcatgatcatggctaactgcagccttgacctcctgggctcaagcagttctcccacctcagcttgccacgtaactaggactacaagcatgttccaacacacctgattattattatttttctatagagacagggtctatgttgcccaggctggtcttgaactcctggcctcaagtgatcctcccacttcagcctcccacagtgcttggattacaggtgtaagccaccacacccagccaatttctacaatttttaaattgattctgtggctaggagaacaaatcgccacacttctctgtggcaatctcctatttgtgcagtgatatgacaactaccaactgttttattctatacagaatgtgactggctatgaagcagatttgctttgtttcagtagttgggtcagagatcaccagacaattccagatagaattttttaaacttaaatctgaatttgagccctggatgattctgaggaaacaatgccaaggataagaacatttaatattaacatgtagattacagaaagagatcaacatattttaaagcgtgttctgctgctttatcttgcttaacatatctcgatatttttggcagtcaagagtacatgtttaaactggaggtaattccatggtgggttatcactcttttcttgaaaggagcatgtgcatatttctcttatacataaggaattctgatatgtccagtttgataaaaatcaatctgcttaagagctcattacgctgctttgtcaccataatgttccaccgaaggaaatcttgtataatagaggactttgctcatcttgttcacttggtagttgttccttaaagacacaattaccttggtatagttctatgcaattattatctaaatagctgtttatacagtacttaataaaatgttttccaagtgtgtttgtagtgtactttttctaaaaggtatttgctgacaaagaaattgatcttgtgtgtgaactgaaaaaaattggctgaagccagttagtcaacaaggtgtccctgtaggcccaaagaactaaactgtactttaggactttgattatcaacctacatggcagattggtagccgagcagaaaagttctgaagcattctgtgcatgtaaaatatgtttccccttccctgagtcaacaaaacattttgagaattaccagctaagtaaaattttccattcagatgggatgaacagaaatagtgctatgtatactttttggagccatttttgttaggtgttaagttgtacacatgttgactggctccactgtagtaaagttttggacataatgcagttttttccatacctctatcccaaacgacgtcatcatcccataaattctactctatatgttagttttgtgtgaataaagaacttgtgcctatcagacatgcctgtagacggactgtctccagcgagtatcactaggtaggttacatagcagaatagccaaacatgctaaaaatggcaatgcaggaaatacttgaagagaaatttttatattgggaatataaaaattttgcaattaaacataaagatgcttaagttccttacatggcaaaattttagatcctttaaaaaaattttaccagctttaatgaaatatacagtggaagttaatatccatctgtattgcaattatatacctcttgtccaaaaaagcagcttaaagataactttcaaaagttttccaacaattaataatttattgtatatttcaaaacagctaaaagagcagctttggaatgttcttttagaaatgatcattgtttgaggtgatggatattccagttattctgatgtgatcattatatattgtatgcacatatcaatatcacatgctcggtaagtacatacaactattatgtatcaactgaaaaaatgtctaacaagacttctaaagtggttgaatcccaatttgggacaaccagggtagatttgcttacatgcacttagtgaatggttggttggttttttttttttttgagactgagtcttgctttgtcggtcaggctgtagtgcagtggcgcgatctcggctcacggcaacctctgcctcctggctttaagcctcccgagtagctgggattacaggtgttgtgcgccaccacactcagctgatttttgttagtagagacagggtttcaccatgttggccaggctggtttcaaactcctgacctcaagtgatccacctgcctcggcctcccaaagtgctgggattacaggtgtgagccaccacgcctggcagcttttagcatatataacatacatatgttaagcaattcctcaattcaagacgatgtattaaaatgatcttaaaaagaaagacttggctaggcgcagtggctcacgcctgtaatcccagcactttgggaggctgaggtgagtggatcacctgaggtcaggagttcaagaccagcctggtgaacatggtgaaaccccgtctctacaaaaaatacaaaaattagccgggcatggtggcatgcgcctgtaatcccagctactcgggaggctgag

SEQ ID NO: 98216 - DNA, 71919 bp, Homo sapiens
tctgcccgcctcagcctcccaaagtgctgggattacaggtgggacccaccacgctcggccataatctctcagttacacttaagtataaacagacaattgagaatcataaaacatttagaaaagacctccaacaaataaaaaagagaccaaaataaacccaacaaagcactgatgaagtgctaccacccatgatgaaatcttgctaaaaaattgaacctggccgggcgcagtggctcacgcctgtaatcccacgacttcaggaggccgaggcaggtggatcacctaaggtcaggagttcaagaccagcctggacaacatggtgaaaccccgtctctaataaaaatacaaaaattagccgggcatggtggcaggtgcctgtaatcccagctacttgggaggctgaggcaggagaatcgcttgaacccaggaggtggaggctgcaggagccgagatcacgccattacactccagcctgggtgacaagcgtgaaactccatctcaaaaaaaaaaaaaaattgaacctgaatatcatccagcctcatctagaactaagtacagtaagtcctcacttaatgtcattgataggttcttggaaacggcaactttaagcaaaatgatgtataaggagaccaattttaccataaaaggtagttgatacaaacaagatttaagttcctgtaacatatttctggtcagaaaacatcaccaaacttctaaataaagatccaaacccttttaatattaaacactgaaataaatgtgagctatacatatatgtacagaagattcataagaacaagtaagataattatttacccacttattccagttcagggtcaaggttggctagagtgtatcctggcagctcagggcacaaggggggatgccaccctggacaggaagccattcatggcattgcacactcacacacacactcactgacactaggatcatttagacatgtcaatgaagctaatgtgcttatcgtggggacatgggaggaaatcagagcatccggcaaaaacccacataggcatgaggaatgtgccaactacagacagacagtggacccatccagaatcaattttttcttatcaatgttatgttttaacaaaatgttgagagtaccacacaatcaaaaatgtatagactataatcaaaataacatctatagataaggtactctgctacgcattagtgctaagcacttttcatgaactacctactttaatataactacctcagcaagtggttatcaacttcattttacagctggagggctcaaggttcccagctaacaagtggcggaactgggactagtacaggcagacctcagagatactgagagttcagctgcagaccacataaataaagccagtcacatgaattttttgatttcccagttcatataaaagttatgtcagctgggcacggtgactcacgcctgtaatcccagcactttgggaggccgagatgggcggtcatgaggtcaggagatcgagaccatcctggctagcacagtgaaaccccgtctctactaaaaatacaaaaaattagccgggcgtggtggcgggcgcctgtagtcccagctactcgggaggctgagggaggagaatggcgtgaacccaggaggcagaacttgcagtgagccaagatcacgccactgcactccagcctgggcaacagagctacactccgtctcaaaaaaaaaaaaaagttatgtctacacttgtagttaagtgtgcaatagcattgtctaaaaaactaatgtacataccttaatttaaaaatatttggccgggcacagtggctcacacctgtaatctcagcactttgggaggccaaggtgggtgggtcacggggtcaggagttcgagaccagcctggccaatatggtgaaaccccgttctactaaaaatacaaaaattagctggtggtggtggtgggcacctgtaatcccagctactcaggaggctgaggcaggagaattgcttgaacctgggagacggaggttgtagcaagccgagatcacgccattgcattccagcctgggcgacagagcaacactcagactcaaaaaaaaaaacaaaaaacaaaaacaaaacaaacacacacacacaaaaacaccactttattgggcaggcacaatggctcacgcctgtaatcccagcactttgggaggcccaggcgggagaatcacctgagatcaggaatttgagaccagcctggccaacatggcaaaaccctgtctctactaaaaacacaaaattagctgggtgtagtggcaggtgcctgtaattccagctactcaggaggctgaggcaggagaatcgcttgaacccaggaggcagaggttgcagtgagccaagatcatgccaatgcattccaccgtgggtgatgagatgaaactgtctcaaaaataaaaataaaaataaataaaaacaccttattgctaaaaaatgctaacaattatctgattcttcagtgagttgtaatatttttgccagtagagggtcttgcctccatgttaatagctgctgactgatcagggtagtgattgctgaaggttggaatggctatggcaatttattttttctttttttttttttttttgagacagagtctcactctgtggtgcgatctcggctcccgggttcaagcgattctcctgcctcagcctcccaaatagtggggattacaggtgcccgccaccacaactggcttttatattcttagtagagtcagggtttcaccatgttggccaggctggtcttgaactactgacctcaagtgatcgcccacctcagccacccaaagtgctaggattacaggcatgagcctgtaatgcaggattatactgcatccggcaactgtggcattttcaatgttttttttttttttttttttaagatggagtctcactctgtcgcccaggctggagcacagtggttgcaatgctcactgcaacctccgcctcctgggttcaagcgattctcctgcctcagcctctggagtagctgggactacaggcgcataccaccgtgcctggtaatatttgtatttttagtagagacggggtttcaccatgttggccagactggtctcgaactcctgacctcaggtaatccgcccgcctcagcctcccaaagtgctatgacaatttcttaaaataagacaatagtgatgtgtgtcacatcgatggactctcttcctttcatcaaagatttctctatagcatgtaatgctatttaatagcattttacccacagtagaacatctttcaaattgaagtcaatcctcttaaatcctaccactgctttgtcaactaagtttatgtaatactctaaatcctttgctgtcatttcaacaatgttcacagcatcttcaccaggtgtagatttcaactcaagaaaccactttcaccaggcacggtgattcacacctgtaatcccagcactttgggaggctgagagatggagaccatcctggctaacacagtgaaaccctgtctctactaaaaatacaaaaaattagccaggcgtggtgacacatgcctgtaatcccagctactcgggaggctgaggcagaagaatcacttgaacccgggaggcggaggttgtggtgagcactttgggaggccaaggcaggaggactgcttgagaccaggagttcaagaccagcctgctcaactaacaagaccctcatctcaaaaaaaaaattagcgaggcatggtattacacacccaggtactgaggaggcaggaggctaaggcaggaggatcactttcgcctagaagttcaagtctgcaatgagccatgatcaccactgcactccagcctggacaacagaacaagaccctgtctgaaaacaaaagtaaaaacaaagccgggcatgtagtggctcaggtctgtaatcccagcactttgggaggccgaagcaggtggatcacatgaggtcaggaggtcaagagtgtgccatgcactccagcctgggcaataagagtgaaactccatctcaaaaaaaaaaaaaaagaaaaaaagaaaccactcctcatccatccaagttttatcatgaggttgcagcaattggtcacatttttaggctccccttctaattccagtttgcttgatttttctatcatatctgcagttacttcctccactcgggtcttgagtctctcagttatccatggcggcctgactcaactttttcaaactccttttaatgatttttttttttttttagacggagtcttgctctgtcgcccaggctggagtgcagtggtgcagtcttggctcactgcaacctctgcctcctgggttcaagcaattctcatgcctcagcctcctgagtaactgggattacaggcgcccaccaccacacccagctaatttttgtatttttagtagacacagggtttcttcaagttggccaggctggaattgatattttaaccccttcccacaaatcatgaatgttcttaatggcacctagaaatcctttccagaacattttcaatttactttgcccagatccatcagaggaatcactacctatggcagctatggcgtcacaaaatatatatatatttttttgatatggagtctcatcactctgtcgcccaggctggagtgcaatggcacaatcttggctcactgcaagctccgcctcccgggttcaagtgattctcctgcctcagcctccccagtagctgggattatgggtgcccgccaccacatccggctaatattttgtattttttagttgagacggggtttcactatgttggccaggctggtctcaaactcctgacctcgtgatccacccgcctcggcctcccaaagtgctgggattacaggcatgagccaccatgcccagcccacaaaatgtatttcttaaataatgacttgaaagtcaaaattactccttgaaccatgggctatagaatgcatactgtgttagcagacatgtaaagtaacattaatctctttgtacatcttcatcagagttccttggtgaccaggtgccttgttaatgaccagtaatatcttgaaaggaatccttttttctgaacagtaggtctcgatagtaggcttaaaatattcagtaaaccacactgtaaatatgatgtaaagacattcagtaaagagatgtgtggtcatcctgggtttgttgttgcatttacagagcataggcatttctagcttcgtcatttctagcttttgatataaagtgagagacatggaactcttcctttcactgaacacttaggggccactgtggggctattaattggcctaatttcaatattgttgcctctcaggctacaaggaggaccgagagggaggagagaaacagggaactggcaggtagtggagcagtcagacacaacacttaagtttgctgtcttataccagtgaggttcgtggccacctaaaacaattgcaataacaacatcaaagatcactgatcacagatcactgtaacggtgcacctgaaataaaaagtttgaaatatagcgatagttaccaaagtgtaagtgacaggaagtgggcacatgctgttgaaaaaatagttgctcggtgcagggctgcttgctacaaactttcaatttgtaaaaaacacggtatctgtgaagtgcaataaagcgaggtatggctgtactcaagtccctcacatcattcattcaacaaatatttacaacacatctacacagcagttaagaaacctgaacagcctcccataaaaacaggtacccacctcccacgcggggaaggcttccaggtttgtttactgcgttactccctgcgggctcagtgggagtaaggtcgcccatataccagcccttccgctcctgggccacggagccgggaggaggaaacccctgatttggatccgcgcacgctaaggggcattgcgtggactcgagcaccggccaggagcgcactagacgcctgggaggatgcggtgcccccagggcggaagacaagaagccgagaagacgcggcgggagaggatggcaggctccgggccccgtcctgcgccctcttgtcgcacttcctccattcccgcaccacagacccgcaggtagacaacatcacctgcactttcaggggaggaagcggaggctcggacagatttcaccgggctcggaggaacccgactgaggtccttgccgggctcactgccggaaaggccgagcccagaagagggtggggacgttagggccgggcctcgtacctggggaagccgagccatcgggcctgacgttgggagaaaacccggcggtatacggcgatccgggacctgcttcttaactcccgcgcggtccacgcccgcctcagcgcttcgcgcgcctctagacgccagtctcgcgcgggcccgccctcgtctccacggcgacgcggcgcgcacgaggaccaccccgcccagaccccggggcttgcgcagcctcagtcgggtaggtggcgcacttcgggttgctttgcagcagcagcaatgagaatcggtttcgaggggcgtggagcatgcaccctctgggcatccccaccgagggttctttatctccttggctcgccagcttcgctctgagctcagcttgctactgctcctcttagacaagagaagtgggaggtattccgaggcggaaccccgagttacgccgcccgcggccgagcactaaagatgaggttccagctgggaggcggctgcgtacgaaagtcctccctccctcacttccggastcgtgcgtgggcctctctggcttttggttcacagggagtggaaaccggaacccgtggagtatgacccgcccatgcgtggacccggcaggttgctacaacttgcacttggaggggagaggtcccaaggcccccgaattagaaatgccaggctcatctctttttgtaacccttcattttaaaatgtaattaataascactctttttgttaaatttttaaatttgggccgatcctaataatcttaaaaataggagtgggaggggtaagtgggacttttcaaatacttttttacgtgctttgtaaaacatttgaaagcacgtgagattcctggtgcagagmctaaaagcagtagttatttatttgaaagattttacgctaaaaacaggaaaattaacttgttgggtgtctcgggcttagcatcacagacaatttgtatttttgccctattttctacatgctaatttttgcaattaaaacatttattatttattttttgagaaggagtctccctctgtagcccaggctgcagtgcagtggcgtgatctgggctcacttccacctccacctcccgggttcaagtgtttctcctgcctcagcctcccaggcgcacgccaccacgcccggctaatttttttttgtttttttgatagagacggtttttaccatgttggccaggtgtgtctcgaactcctgacctcagatgatccgcccgcctcggcctcccaaagtgctgtgattacaggcatgagccaccgcgcctggccctaaattatgttttatatggtgaaacctcgtctctactaaaaataaaatttaaaaaattagccgggggtggtagtgggcacctgtaatcccagctactggggaggctgaggcaggagaatcgcttgaacccaggaggcaaatgttgcagtgggccgagatcgtgtatttgcatttgcctgggcaacaagagcaaaactgtctcaataataataataataataatttaaagggagttctactttagcggacatcaatgctaatgttttagggacaacttttatctgaacttaatgtggccaagtagttttaaaataatttagtaagcttcaaggttgtaattaacagtataacaaaaatatatttactgtaatttagcctaagtacttttatgtaattatgtaaatttatataaattatatatttaggataagtcaataagcacttctttctagatgatttgagctaatttcctaatgctttcttcctgttatgtgcatttaccatcctcagctttgacaaatttaggagggatgaaaggcatttccatttgagttacaatgaaaatagtcctgttgggaaagattagaagataatagtacataataatagctaggacaaggacatcttagaggctgggcacggtggctcacacctgtaatctgagcattttggaaggctgagccaggagaattgcctgagcccagtagttcaagaacagcctgggcaacatagtgcccatctctacaaaatataaaaaatttgaccaggcgcggtggctcaygcctataatcccagcactttgagaggccaaggtgggtgatcacttgaggtcaggagtttgagaccagcctggccaacacggtgaaaccccatctctactactaaaaatagaaaaattagccaggcgtggagtcacgagcctgtaatcccggctactcggggggttggggcaggagaatcgcttgaacctggtgggggcggttgcagtaagccaagatcctgccactgcactccagcctgggtgacagagcgagactctgtctcgaaaaaaaaaaaaatctaagggttactcttggagcaagaaaaactgagtaggaaaaagcccatttagagaggtgcaatccagccttctgtgatgaggctgctgaaaggtcatggcctggcattaaactctctcacaggtgctctcataatttctgggtttctagtattttcttttttcttttttttttttttttgagacagtttcacttttgtcacccaggctggagtgcagtggcgcgatctcggctcactgcaacctccgcctctcaggttcaagcaattttcctagctcagccacccaagtagctgggattacaggcatatgctaccacgcccagctaattttgtatttttagtagagacggggtttggtcacgttggccaggctggtctagaattcctgatctcaagtgatcctcccaccttagcctcccaaagtgctaggatcacaggcatgagccaccatgtccggccagtttctggtattttcatttgcttctctgctgttcttggactgctaatttccccgactgactgaacctttgagaccccttatgccaaactttgggccaacaatttagacctaaaccaagatcttacacatatttagtaaagaactagaataatttctctctcaaagagctttcccaagctgatacttgaaaattggttattagttgcagaagggggcatttagaattacaaattattggcctggcacgatggctcacacccagcactttcggagcccaaggttgggggatcacgtgaggtcaggagttcagaccagcctggccaacatggtgaaaccccatctctactaaaaatacaaaagttagccaggtgtggtggcacaggcctgtagtcccagcttcttgggaggctgaggcatgagaattgcttgaactcaggaggcagaggttgagtgagccgattgtgccactgcactctagcctgggcgacagagcaaaacttggtctcaaaaaattacaagttataggccaggcgcggtggctcacacctgtaatcacaacactttgggaggccaaggcgggtggatcatgaagtcaggagatcgagaccatcctggctaacgtggtgaaaccctgtctctactaaaaataaaaaatttagccgggcgtggtggcgggcgcctgtagtcccagctactcgggaggctgaggcagaatggcctgaacccagggggcagagcttgcagtgagccgagattacgctactgcactccagcctggacgacagagcgagactccgtctcaaaaaaaaattacaaattatcaggccgggcgtggtagctcatgcctgtaatcccagcactttgggaggccgaggtgggcggatcatgaggtcaggagtttgagaccagcctgaccaacatggtgaaatcctgtctctactaaaaatacaaaaattagctgggcgtggtggcatgcgcctgtaatcccagctactcaggaggctgaggcaggagaatcacttgaacctgggaggcagaggttgcagtgaaccaagatcacaccattgcactccagcctgggcgatacagcgagactccttctcaaaaaataaaaaataaaaataaaaattatcctgccaaggagagtaacactcaaaaactacaatgaaacaagaatttgcaatttgtaagcatctagcttttgccaggcacaggtgaaagaagtttagggaagcctcccttagattattaccttttttcctaggtaataaccatcttcttctataaggacagagtgagactttgagaggtaagaaatgagttgaggccaaagttctacaagacattaaaggagcctagtggaaaagtaggtcctaagtaggatagaccagagggctcaggaaattagttccagctatcaaatcatgatagctacaatgccctgggcactgatatcatgtatggcttgtggtggtttaaaacatgcctacacattccttgacattcctcccacatagaggtggagtctaagttcctttgctttgaatatagggtagccgtgctgactcctttctaaggaacagaatgtggcacgtggtagaactgattccagggctaggttaggaaaggcaatacagcaactatatggctttcttgttcgctctctgaacacttgcccttagaatccagccctgatatttcaaggaagctcagacacagggagaggccatgtgtaagtgttccagggacagctctaatggtcccaggtcctagctgacagccaccatcaaccaccagacatgtacgcttttacgggaccctcagccccagcctttgggctgcccccactggtgctgaatggatcagaaaccagccgtcccagcaggaaccagcccattttgcagatttgagagcaaaatataattggaattctggggtggtttgttacgtaacagtaggtaaccagaaatccataatttccgggtttctagtattttctttttcaagaaagctcaggtgtggtggctcatgcctgtaatcccagtgcttttggaggctgaggcaggaggatcacttgaggccaggaatttgagaccagcctgagcaacatagcaagatcccgtctctgcaaaaaatcgttaaaaattagcctgctgtagtggcaggagcctgtagtcccagctatttgggaggctgaggctggagcagtgagctatgattgtgccattgctttccagcctggatgacagagcaagacttcatcacccccaaaataaaataaccagagcagtgtttttaatgttatctttaattccctctgcaagcctaaaaagtaggtatactgcgatccctttcggaaaaatgaggaaagggagatccaggtggtgaaatgcctggctcaggtttcacactaattggcagggtcaggatttagcagcttcaaagaacgggccttctccactactccagggagtctccaagacactaaaggggattagacctgtttcccacagctttaggaagaatttggattccaaaaacagcttgattgttaaaataataacatctgtattatcacctgcaacgtgtctctgtataggcttaaaaaggctcagcagctttatgggttatatatggttttttacccaccttatcctgtttaatcttaactgccccatgagcaggttatatcatcttcgcaatttcacaggtaaaactaagaatcaatagactaactctccatagcttgtaggaggtggcagagatgagaatgcaaactcaggcctgatgtgcaagtgtttccctctgcctcttgcctgtaaaaaaacagtttgtaagaaacacactttattcagtaatacaaacgaaaagttttctgttgccargattcacaagaagggagctgagttagtggtcactcactgcccaacaccctaatttcacaagtgaagtgaagttccaacaaagtaggcctcttggaagaaatgtagacgttgctgtcctttaaccaggaaaattgcgttctcgggacttcacgcctatgtatcgcttcacaccaacgctgcgcagtaccacagggcagaaatgggtgcttgtggtattccagcacataggacttcctccccaggatgcagttacccacactgctcacatatttgcatttctgtggccccctgtcagcctgagtctgcactacgtggtaagcacttgacattcgccgtctcatttccccaactccactcgcacttcccctttctgtgcaggctaaggacagattcaggttaccggagggaaacaacatttcaatgaatttgttagtcgcctttatcgctatcaaagccaatcgtgacaagtttgtcttttaatgcagcaaccagtactcgcgcataagcctcatagatttacagaggccattttagaaacacgaccgaaacttaggttaagtcagctttgcctaagatcacgccactcgcaaaacagctgaggttcgaacccgcactgggaaggctcggaagaccccaatctcctatctcaaattcccactgccgaagccccacggttctctgcctatgcgaaccatgcaaatacagcggtcgtcgcgccacaggccgtgctagccgccagcccagccccatctagccaccgcctccgggagagtggcgtgccgcgagtcgcgggtcccaagtgccgtccgctctgccctgcagcgcgcgtgggaacgcggcggcggtggcctctgggctgcccacggcgaccgcctgcgcgcacgggagcgggtttccgctatccccaccgtggcctcctcctcgccgccaccaccttcccaccccccggcccgcgcaggggctggcgtccgggragcgcgcggcgatgcttctttttcgcccggcaccgctgcagccacctcacatccgggcgcgcggcggggaaggcggcgccggggccagggtgcgtggagggagttattaagggggagggggccgaagaggaggggcggagggccgggctgcagttacggcggctgaagagagacagcccaagccggtcggggtgggggcgcgagagcgaaggctgcggggagcggcgctgggaccggtgcgggcagcggggaggggagcggcggccgaggcaaagggccgccgagcggcggaggcaccgagtaagggtcggcggcggtggcggctgggtccggggcaccgcgcgcccggtgctcccgggtgtagaaggggcgcgggcgcattgctcccggggtcgcgtgcgtgagcgcgggcgccggggcgcccgcagggggtgggcaggggcgcgaggcccgcaaggcggccggcgggtagccggcgggctggctggcggggaccgagccgccgggccggggaggacggctgcgggcctgcgctagctccagcttgaagcgcccgggcmgggagattcggcctccctcctccctgcggccggccgcccctcagtgagtacggtcyccgcccttcctccgaaggaggccgctgggcccgggcctgcgtgagggrctgcgggttggggtcgcggcccggggaagccaagtttcggagctgaagccggtgctcgccctttccttgccatcggcgcccctgacatggccacaggtgcggctggcctggcgaggggcgctcgggccccgtccccagtccctgatcgccggataacaaggggcagctggcgccgtccattggcaagtgacaggcactttccaacagacttcgcgggttcccagcctaaccagtcttctacctgcccccactccgggaaacttccccaccagtcttgaaagatccccatgggtggcagctactaatcttggtttctcttgtgttaaagctgcttaaaggttatataccttgaattgggcaccttctactttttaccatgttgatgcttaggatactaggaaagagaactgagtaccaatgattctatctccaagttctaatttatagcataattttggggtggggacttgtttttaacactagctgttttgagagattaaaaagtttcagcttctgaagaaacagccaagatttctgaaaacttactgttctcggtgacaattttgtgccgatttatcttccaggtgcagagcattgtagaccaaggagccatggataggagaagtatgggtgaaacagaaagtggagatgctttccttgacctgaagaagcctcctgcctccaaatgcccccatcgctatacaaaagtaaggtttgccactaatgaaatagtgtttctttttaggtggcgaagttagtaacattgtataactatttcattcctattaagtggtaatctcattctgactcactacatggactaaatattaactaaatttagtagtgcattactttgaacatttttctgcaagtgtagatacccagcgtttaagctggaatttgctttgagrggcttttaggtgaagggaatgtaggcttagatttttttaaaattgcggatcagtatactttgtaagttctgtaacagctatgtaattggtacgtttattgatttacatactgtactgtgaggattaaagccctaggatgcgttacaaagttagtgtcctctgtattgatgtttccttaagaggcagactccccataggaatgctcttgagtgtgcttttcatgggtaactggcttttcaatcctgtttttttattttctattacaaattggatatggactcaaaaaagtaaggcttcagtcatatttcccctagctaaaaactggagatgcttaaactgcttgtccagataactgcttttgggagagagagraagtcatatttattaaagatcttgcatcagtacatgtcttgttggctactgaatgtttttgaagaggttgacaggactcaaattgtaaattcatttctgggtccctgaaatgtgtcaggctggatcccataaaacttgctcaacagtgttgaagcagttgggaccactgatgacaagaagggttatatcctagttgggcacacatccatatatttccttagtatggatttttctttttttttttttttttttgcacccgacagggcgtcactttgtcgccgaggctggaatgcagtggtgcaatcatggctcactgcagcctggacctcccgggctcaagccatcctcccatctcagtctcctgagtagctgggaccacaggcgtgcaccagtacgctcggctaatttttgtattttttatagagatgggaattcgccatgttgcccaggcaaactcctgggcttaagcaatycgcccaccttggcctcccaaagtgttgggattacaggggtgagccactgtgccaggcctcagtcattgactctgacatggcttattgtccctggcttcctgggatactgattggttaatgctttaaagccagctcttgtttgtgttctggtgcactactcttacctacttgataaagtatcaaatactgtcagattaatactcattttcagcactgaaggaaactgaactgcagtaagagaaatgttttcaggtgtaaagtgttcttggttgattgctctcttaggatgatctgttttggtatgacagcatgtaagttgatagaaaactttttccacattcagatttggtcttcccaaatatattttctctcaaacctgagagtgtttkagtagtgtttcacaacttaaattcatttcctaaaatgctgacaggtgaattctgaatggagaaaagccatcaaatgaagggaaaagaaaatcttccagtacttttttttttttgagatggagttttactcttgttgcccaggctggagtgcaatggcaccacctctgcctcctaagttcaagtgattctcctgcctcagcctcctgagtagctgggattacaggcacgcgtcaacatgcccagctgatttttttttttttttttatagtagagacggggtttctccatgttggtcaggctagtctcgaactcccaacctcaggtgatctgcccgccttggcctcccaaagtgctgggatcacaggcgtgagccactgcgcccagcygttccagtacttatttttttgtttctttgagacggagtctcgctctatcaccagagtgcaatggtgcgatcttgattcactagcctctgcctcctgggttcaagtgattatcctgcatcagcctcccaagtagctgggactacaggcgtgcgccaccatgcccagctaatttttgtagttttagtggagacgggatcttgccatgttggccaggctggtcttgaaatcctgaactcaagtgattcacctgcctcagcctcccaaagtgctgggattacacgtgtgagccactgcacctggcccccttccagtactttttgtttattattttttttgagccggagtctcactgtgtcgcccaggctggagtgtagtggtgcaatctcggctcactgcaacctctgcctccctggttcaagcgattctcctgcctcagcctcccaagtagctgggactacaggtgcacgctgccacacccagctaattttgtttttgtatttttatttttatttatttwttttttttgagacggagtttcgctcttgtcgccgaggctggagtgcaatggtgctatctcggctcactgcagtctccgcctccggggttcaagtgattctgctgcctcagcctcccaagtagctgggattacaggcatgtgccaccacgcccagctcatttttgtatttttagtagagacagggttttgccatgttggccaggctggtctcaaactcctgacctcgctggtctcgaactcctgacctcaggtgatccacccgcctcggccccccaaaatgctggaattataggtgtgagccactgcacctggcctatttttttttgtatttttagtagagacggtttcactgtgttgctggtgttgaactcctgagctcaggtgatccacccacctaggcctcccaaagtgctgggattataggtgtgagccaccragcctggccccttccagtacttttatttttatttttttgagatggagtttcactcctgctgctcaggctggagtgcaatggcacgatcttggctcrctgcaacctccgcttcccgggttcaagcaattctcctgcctcagcctcctgagtaggtgggattacaggcatgcaccaccatgcctggctaattttgtatgttggtcagtcctgtcttgaactcctgacctcaggtgatccacccacctcagccttccaaagtgctgggattataggtgtgagccaccacacccaccctttccagtatttttttcactaaagttctaaccagtagtctactggtagagtccaggcagagaggcttttgaatcactttcacacaccgatcagaggttaacatgtatatttcatctttgtgtatgtttctatctttatgcttacatcatttttagggagatatttctctttcttagggtaggacttatgtttctttgcagtaaagattaagaacctcagtattgtccatttttgacagtccagcctcagaattctgtcatacgtagataaatgtgccttgaagaactggttaaaagcattttttagcttaatgacagtggagcttagatttaagtcttttctaccaaattaattggaaataggtttactttctactcttaagaggatttagttaatgacaattttaggatagtgtttaggcagtgttagggtagtgctttcatggttttcaacactctagtaattctatgcgggacttggggataaagaagtcttctccctttaaagagagcttgaaatgattatgtgttcctagcactataataaatatgttagttccacaactggaataatattcaaaccatccttcttccttgtctatgtactgagatcaaagtactggaataaatagactttaatgatgtttctgccacttcaagttcacgggctagaagatctagaagcagtagagggaaactgttttcactggtgattttgaggtggagtttcactcttgttgcccaggctggagtgcaatggcgccatctccgctcaccgcaacctccgccccaggttcaacctattctcctgcttcaccttcctgagtagctgggattacaagcatgcgccaccacgcccggctaatttttgtctttttagtagtgacagggtttctccatgttggtcaggctggtgtcaaactcccgacctcaggtgatccgcccaccttggcttcccaaactgctgggattacaggtgtgagccggccggtgatttttttttttttttaaataggtggtgtattctgtggaaacttgtagctgtgtatgtttacttacagggtcaaaaaaacacgttggccagatgagagggccccttaaccattgacccttcttagtttagtgttcagttgctttctgggataatgttagtagtttgttgttcagaattcgaagagtttttgtttttcccccatgagtagaagaagtataaatgttttggtcaggtgcttttcagagtaatgtaccagagtttccttttgtgtgaagacatcctttagttagcttgtttcgcaaatgttaatatgcctgggggatcacctttaggccttgggaaaggaattctgagtggtaagcaggggtggtcctgaagattctactttttaacccactcccaagtggtgcacatgctgctggtccactgactatactttaagtatcaaggctttggtcttccttagagaacttgataaatggtgttggtggtgtcaagtaactcagatgcatagttattctttggggttcagatgatgttcattgtgcttcgaagaatattttaggacctcaagttagagtcacattgggtgcattcagacctactcctaaatctcattgtgggatggttataaatgggtttatcatatgcacctgttaccctgagggtcttgaacccctaagttataaatgctggtctgttttctaggccacattcctaagaccaaaagctatattttggtagtatctaagtatgcatttttaaagtgatcggatcatgttgaaggacttttggaggttatagagtggggtctcacctgaaagttatggtttaagagtggtttagacagtggttctcaaagtgtggtccctgaactagcattagcatcatctggtaacttgttagaaatacaaatctcaggcctcttctcagtggtattaaaggagaaacttggggagtagagcttaaccgtctgcatttaacaagctcttcaggggattctggctctggttcaagtttgagaaccattggcttaagaaatgatcacctgctcgctgggtgtggtggctcacacttgtaatcccagcagttagggagactgagatgggaggattgcttgagcccaggagttcaagaccagcctgggcaggatgacaagaccctgtcactacaaaaaaaatttaaaaattagctaggtatggtggcgtattgcctgtagtctcagctacacaggggactgaggtgagagaatcgtttgaggctgcagtgagccatcatcgcgccatttcactacagcctgtgcaacaaaaagagaccctgtctcaaaaaaaaaaaaaaaaaaaaaagatcatctcctggcagtggtgctcattcaactttttcttcaccagaagcccttgttcaccagttctggaatatagtacctgctattctgttagtgatgccatcttctgcttgaaatacaaaatagaaatgttttaggccatcccactattcagatccatgtggttttcttttctgtttttttgttttgagacagagtctctgtctgtcgccaggctggagtgcagtggccctatgtcggctcactgcaacctctgcctcccgggttcaagcaatttccctacctcagcctcttgagtagctgggactacaggcgcgtgcctccatgcccagctaattttttttacattttagtagagatggggtttcaccatgttggccaggatggtctcgatctcctgatctcatgatccacccaccttggcctcctaaagtgctctgattacaggcgtgagccaccacgcctggcctcacatccatgttattttcgtcaagtgaatagactaatctgtttttttttgtttgtttttgagacygcgtctcactctgtcacccaggctggagtgcagtgttgcaatcttggctcactgcaacctctgcttcccaggttcaagcarttctcctgcctcagcctcctgagtagctgggattacaggcacrtgccatgatgcccagctaatttttgtatttttattagaaacggggtttcaccatattggtaaggttggtctcaaactcctgacctcaagtgatccacctgccgtggcctgccaaagtgctgggattacaggcgtgagctaccgcacccggccaaatagactaatcttataaaggatacatacgttatgctgttcttcctttgctcctgtgttttgccactgattccttattaaatgactgtcacctgccagttggacagggaataaaagcagagacactcagaacattcagcttgatactgaccagtgttaaacatgcgtattaaagttaagtgaatgttgaattatcttagtttaacttcatgtggaatttttttttttttttttgagacaggctctcactgttatccaggctggagtgcagtggtacagttaactcactgcagcctcgaactctgcattcatgcgatccttccacctcagcctcctgagtagctaggactacaggtgtgtgtcaccacacatggctaattttttcatttctttgtagagataggatctcattatgttgcccaggctggtctccaactcctgacctcaagcgatcctcctgcctcagcctcctaaagtgctggaattccaggtgtgagccactgcatctggccccatgtggactcctcataaccttgactagttacaaagtggcattattgtagtcattagtgtctccagggatctttaagggaggccatcctaatttgtggctggtaggccaattggtcatagcagtcagtacagccatgtttgtctttcctttaaaacaatcaggaaaatggacaagcagttgaagtgactgacttgagtcatcctagccttcttggatataatcagaagacttgaagccaatccccagagaaaagagtaactgatttaaatcctaggttgaaacaggaatcaggtggtccctttttccagtacagaaatcttatttgataactaaatgtatcttttataaactgagtagtaactcaggtggcatttctgtgacaaatttaggtataaacttcttaaactaatttaaggatacctatttatgttggagaaggtagaattatggtatgaaaagtcattgggaggacaaggtgggaggatgaattgagtccaggagttcacgaccagactgggcaatatagtgagaccccatctcgttaaaaaaaaaaaaaattgccagaggtggtggtgtgcacctgtggtcccagatactcaagaggctaacgtgggaggatcacttgagcttgggaagttgagcttgcagtgagctatgactgcaccattgcactccagcatgggcaacagagtgagactctgtctcaaaggaaaaaaaaattattcaatcttaatgtgtcaactgtccagaaaacctatcttactggaagttgttagagcaggctggctggcaagaccatagagaatagcttctgactgctttttcctacccgttccttttttgttattgttgagacagagtcttgcacgatcttggctcactgcaacctccacctcccaggttgaagtgattctcctgcctcagcctcctgagtagttgggattacaggtgtgtgccaccatgcccagctgattttcttttttttagtagagacgatttcgccatgttggccaggatggtctcaaactcctgacctcaagtgatctgcccaccttggtctcctaaagtgctggggttacagacgtgagccactgcacccggcccctgcctgttcggttttgttttgttttcagagggagttttgttcctgttgcccaggctggagtgcaatggcgtgatcttggctcaccacaacctctgcctcccgggttcaagcgattctcctgccttagcctcccgagtagctgggactacaggcgcacgccaccatgcccggctaattttttgtatttttagtatagatggggtttctccatgttaggctggtctcaaacttctgacctcaggtgatctgcccgtctcaccctcccaaagtgctgggattacaggcgtgagccaccacgccygcccaggaatatttcccttttaatcccccttccataaatgtgacttatgtgaaattctacataatgtcagaaggtccatcagaatgcatagttgtttctgcataggatttctgcagaaagaaatggataaggattttaaccattgttcttttgggcttttgttgagattcatttgctttccactttaatagtgatcaccaaaagtgggtgttcatactagtaattccccaataggttttgggagccttgacacattttctttaaggaaggctgctgcaactaagaaaatatgtttatgcttccttgggtgtgtggctcttgggcaattagcagcttgttcttgcctagtcaggttttagtaacctgtgcaaaaagtgaagtctcaggtattaactcttatattcgccatatggtaatcttaatgaattcattcgtgatcagtaagttcctatgggttaagactttccaggctaggcacagtggctcacacttgtaatcccagcactttaggaggctgaggcaagatgatcacttgagcctaagagttcagaccagcctgggcaacacagcaagacctcatctctacaaaaaattttttaaattagctggatgtggtggcatgcacctgtagtcttagctgcttgggaggctgaggcaagaaagatcacttgagtccatgagttttgaggctgcagtgagctatgatcatgccactgcactccagcctgagagtgagaacctgtctcaaaaaaaaaactccaaaaggatagattaaaaaaaaaaaaaaaaaacacctttccaaaagggtaatatcacatcctttcttgaaatactcataagaaggaagcactcctagttagagtggccacttcccaagtattctgtctttagccatagttgaacgttttctttgaaaatatcccaaaggggtatttccacgaataatgttaagggctcttgatgagatggcaagtttaagaactcttttcatgcttgcttcggcagcacatatactaaaattgcaacaatacagagaagattagcatggcccctgcgcaaggatgacacgcaaattcatgaagtgttccatatttaaaaaaaaaaaagactcttctcttgtccaggcatggtggctcacacccgtaatcctaacactttgggaggccgaggcaaacggattacctgagctcaggcagcctggccaacatgatgaaaccgcatctctactaaaatacaagaaaaacattagccgggcatggcggcatgagcctgtaatcccacctactcaggaggctgaggcagcagaattgcttgaacgctggaggcagaggttgcagtgagctgagatcgccttggtgacagagtgagattccatctccaaaaaaaaaaaaaaatttctttcgagagactggaagagctgtaggggtggggacaagagtcatctgtctatgtgtggcactaaactgggcacacaggatatattatgtggacagttgtaaagagagcaaactttttttttttttttttttgaaacagtctctctgtgtcacccaggctggggtgcagtggtgcgatctcagctcactgcaagctccgcctcccgggttcacgctattctcctgcctcagcctcccgagtagctgggactacaggcacctgccaccacgcccggctaatttttttgtatttttgatagagacggggtttcaccatgttagccaggatggtctcgatctcctgacctcatgatccgcccgcctcagcctcccaaagtgctgggattacaggcttgagccactgtgcccggccatttttttgtattttcagtagagacagggtttcactgtgttagccaggatggtctcgatctcgtgacctcgtgatccgcccgccttggcctcccaaagtgctgggattacaggtgtgagccactgcactcagcatttttttttttttttttttttgagacagagtcttgctctgtcacccatgctgtagtgctgtggcatgatctcggctcactacaacctctgtctcctgggttcaggcagttcttgtgcctcagcctcctgaatagtacctgggatttcaggtgtccaccaccaggcccagctagtttttttatttttagtagagacgtggtttcaccatgttggccaggctgctcatgaactcctgactcaagtgatagctggtctcggcctcccaatgttttgagattacaggtgtcagccagcatgcctggcccaaactgtattgacttagctcatggtttctctcttccccacttaagtaggggatcttcttgtgctgggataccaccttaagcatcttaggatcatgctggaaggtaacacatttagtgctgtaaacagtgaggaagttttctctcatttttccctaaatgtccacgtggaccttgggccatattttgagaaacatgctcagttggaagcaataatttttaacctcttgggcattcattggaaatcttttgaaggtgtgaacattcactgcagaaattgcacaaatgcatcattttccatatggtttcaaatgggaggtcttacactccttgacaccatggaactgatttaagaagtcttacttttcaagaacagtaaatactgtttacctagatgtttacagtgactccctgccacttttacaacccaagagttgtcttgtttctaagcccatttctcagtgaagaaaatggctctttatcctctatggacaggtgagctatgttttagccattgtatttggtcaaaagtgcgccctggcacaaataatgttgctggtgtggttaatgtcagtgtgtaactagcttgctactctgccttctgctcttacaggcctgtgaagtttgtacatctgttcacttaagcatcacacctatgtatgctaagcatgtaaagtcaacaacgaaaactggaatacggaagtgaaaatgagaattttgttaactcttcttaactgagagtagttggtgtttatcactctgtgattagagcaataactctaagaggaaagattatattgaacaaaacattaactttgaataacctctcaatttcaaattctctytttttgtttttttttttttttttttttttttggagacagaggtcttgttctgttgccgaggctggagaatctcagcttactgcaacttccacctcctgaattcaaccaatttctcctgcttcggcctctcaagtgaggctgagattacaggcatgcgccatcatacccagctaattttttaatttttagtagagacagggttttgctatgttggccatgctggtcttgaactcctgacctcaagtaatacgtccggcctcttttttttttgagacaggttttctgtcactcgggctagagcgcggtggtacaattacagctcattgcggcctggatctcctgggctcaaccaagtcgcctggacaataggcatgccaccatgccctgcctttttttttttttttttttgagacagggtctccctcaaaaagggtgcagtcttggctcactgcaacctctgcctcccaggttcgcaattctcatacctcagcctcccaagtagctggggctacaggtgtgcacccccacacctggctaatttttttgtttgtttgacacagaatcttactctgttgtccaggctggagtgcagtggtgtgatcttagctcactgcaacctctgcctcccaggctcaggcaattctcctgcctgagtctcccaagtagctgggattacaggcgtgccaggctggtcttgaactcctgatcttaagtgatccacccgccttggcctcccaaagtgctgtgattacatgtgtgagccaccgtgcccagcccatattttcctatttttaaactaatatcctttttctgttcaaggattctatccaggataccatattatgtttagttgtcctctctctttagcctcctattttcctttttttaagactgttacttctgttaaagtattttttgattcctcgtcaataggaccaaaattaggcttttctggatgttttgtggttgtgttaaagtattaacctttcccaggtgactcctaaataaataggtaaaatcattatagagttcagcaaacagctgtagtggtaattgagaacacctattgggatccctgttacctttggagttaaaagtttcaaacaaaacaccacttagaaacttccctacattaagaatttacacatttaagcgtgaaagattgtctttgattgaatagcacattagggttcttagtatctgcatggggtagtaaggggatatgtgataatctttagttacttttaagagtaaaaaattgctttgcagtggtttttcctgtagcattatgtataagtatttcctatattgcaaggtccttcctgtttctactagaaaaattttaagccctcttgtccttaggatttctgtgttacagtaatatctgatattttcataattactattgctccatcctccctgaacccctccccccagccccaaagttgtgctaaccctacagatctgacaccatgtttgccctgaagatttctctggagtctcccgtggtgtgttttgtttttttctttttttgagacagggtctctgtcacccaggatggagagcagtggtgcgatcgctgcagccttgacctcaagtgaccctcccaccgcagcctcctgagtagcggggaccacacttggtgaattttttttttttttttttttaaacggagtctcgctctgtcacccaggctggagtgcagtggcgcgaactcagatcactgcaacctcagcctccctacaggtagctgggattacaggcgtccgctaccacacctggctaagttttatatttttagtagagacagggtttcaccatgttggccaggctggtctcaaactcctggcctcaagtgatctgcctgcctcagcctcctatagtgctgggattacaggcgtgagccactgtgcccggcccactcgatgaattttaaaatattttttgtagagacaggtgtctccttatattgcccaggctgatcttgaactcctggactcaagcagtcttcccgcttcagcctcccaaagttctgggagtacagatgtgagccactggacctggctgactcctatctttactggtgatttataggttgtatgttctttgacagttttttttcagaattttgaacagcctttaggtatgtctttgtatttggaactgtgtttatctcagtcttacaaatttttattcgtatttctatccagttataagacaggtaattgataaataaatcctaaataaatgcaaatgcctgattgatatcctggtcttaaaactgaagtatcatatagtcctaaggcggcatcttgtcctgaagaaaacatttagatgcttcagttttctgtaaacactagagaattcatggtatgctatacccagtgattcttgtgggctgattgagcaaatctgtccctccatcctcaccccaagatgttgaatcagtgatctgagaagcagtgcacattctcctactacaaggcctgggatgggagtgttgccaaagtcatggcatagtggtatgtgcttttttgcaaggcagttgcagcattttactggtgctgaaagtttcggaattgctttttaactttattataaaaaatatttcaaagtataccaaaaggaggcagtagtttgttgtatatatgggtagatatgtgtgttagtgtgcatgtgtgtatatatatgtgtgtatatgtaagtgtgtatatttcctaactctactgaaagggccttcaagcaaatgaggatacccagttcccagaccttggtgttttatgcaattcctcacttaaagaaactaggatttctcagaaatagctgattccagggctgggacaggatgaatacaaaataagctagaacgtatgacagtctttaggaaaaaaaaaaaaaaaagatggcatgttgaaaaagacacatgggccagtttgaagaggcacccactggcaaaatctgggacagtttgagcgccacataattgaggacattaatgagttatagaccaacagaaaaaccaggagtcagccgggcacggtggctcacgcctgtaatcccagcactttgggaggctgagacaggcagatcacttgaggtcaggagttgcagagcagtctggtcaacgtggtgaaactccgtctctactaaaaatacaaaaaaaattagccagccatggtggtgcatgcctgtagtcccagctattcgggaggctgaggtggaagaagtgcttcaacccagaaggcaggggttgcagtgagccaagattgcgccagtgcactccagcctgggcgatagagcaagactgtctcaaaaaaaaaaaaagaggaaaaactaggagtctgtgagtccataccaataatacataggtatataaacaggggaaaggaggacttgcctttacagtatgatgccaagtgctggctggtaaatatggagagtggagagagggctagagtggcaaaatgaagagtggtttggtcaagaatcattaatggatgctaactttagtggaaaactgaagaccaagatatttgggtgattttaaagtgtctccccacagattgcatgctaaatgcaaatgggaaagcagtaactaaatagtagagaaactagagaataccttgaccaaatgatccaaattagcaccatagataaaggacagwtgaacatcatggcctccagaagtgacggtctgtgaaggacacagcacctcttcagttagtattctgccccatggatatttaggctcagtctatcatgagaaaacatcagaccaacccaaaatgaataatgttcttttacagaaagggactatattttctagaaatgtcactatcataagagacaaaagttgtagaaatgttctagattaagggagaccaaagagatacaacaatcaaatatckgattctagactggatcctgttttggagggggaagatcaatataaaggacattactgggtcaatttacaaaactggaattgggaaggtagattagaaaaaagtattatcaatagttgtagttataaaaaaaactggcagttcttctcaacttgggtctgcagaagtcttcatgccctgaggcatccgttatatgtgagggattagcctctctcctgtgcataccagctaagtacatccttgagagaatgggaaaatagttcactcaggtcattttctgtagggctaaattctctcatggagctggataacaggctgtaaaggaatatcttcattcttaggaaataggcactgcagtatttaggagtaaggcatcatgacttatgcaatttactctctagtcaaaaaaaaaaaaaaaaagctcgctcatatgtggaagccaaaaaaacttggcttcgtggagatagagaatagaatgatagataccagagtctgggaaaggtgtgtgggtgggatggcagaatacaaagaggttggttatatggatacaaacatgcagttgaaggagtaaattctaatgtttgatagcagagcagagtggctgtggttaacaagtgtattgtatatttcaaaacagctagaagggaggactttaaatgtctccaaaacataggaaggataaatacttgaggtaattgacacccragatatcctgacttgatcattacacagtttatacatgtaacaaaatatcacatataccccataagtgtatacaaatgtctgtatcaatttttttaaaattctgcaaaaaagtaaatgataaatagggagaaatgttaataggtacatagtatatggatgttttttgtgttttttcagtcttgcaacattacatttaaaaaaaactatcgccccccggcccggttgctcacacctgtaatcccagcactttgggaggccgaggcgggcagatcgcctgaggtcaggggtttgagaccagcccggccaacatggcaaaaccccgtctctactaaaaatacaaaaattagccaggcatggtggcgtgtgcctgtaattccagccacttgggagactgaagcaagagaattgcttgaacccaggaggtggaggttgtagtgggccaagattgtgccactgcacttcatcctgggctacagagtgagattccatgtaaaaaaaaaaaaaaaaaatccccttgtaagttgtcatctaatgcattgaaaattggtaagattaggcagaggttttatctaacactaaagtttccttgccttgatgagctttcagtgttacgaaatgttattcaatagcaattatgagagattgttttagccagaaactgatcacttttaagttactggattattctgcttgagcttgtgagaacctcaatgtactccagtcctttctgaaataaggcaagatgtaaataagaattgtgtgaagtgtttaagatggacacttagaattattcagaacagaagtttaaagtgtgtggcctaagaaatgtaattcaaaatgactatttgacttctctttttaggaagaactcttggatataaaagaactcccccattccaaacagaggccttcatgcctttctgaaaaatatgacaggtatgtgtgtcattctagtccttaactacttctagtcaataactttttgttataccaaacttggtaaattaagaattgtattgttttgaagttttctggtagaattataagtgaaagagggatttcragaggtaataagatgggtttcaactacctaggaatgaaactaaaattaaaagatgacctggtcagagtcacatagtcagaaagcagaattaagacttgaacccgacagggcatggtggcttatgcctgtaatcccagcactttgggaggccaaggcaggcggatcacgaggtcaggagatcgagaccatcctggctgacatggtgaaaccccatctctactaaaaatacaaaaaattagccaggcgtggtggcgtgcgcctgtagtcccagctactcgggaggctgaggcaggagaatggcatgaactcgggaggcggagcctgcagtgagctgagatcgcactactgcactccagcctgggcgacartgcgagattccgtctcaaaaaaaaaaaaaaagacttgaacccaggagtcctcaccagggtcttgtcctctaccagtggttttttgcactgtactttgagggtacctgcctcaggtatgctgctcaggggcgctcttggttctttttttttgcattcccacaaaaaactattcagccgttcagattagctttatttcatcctagtttccctcagaagaagaaggctttggtttgggaagactatagctaaaaatggtctgaaaatctcctacaataatcctatattgtactacttatggccaccttagtcatttcttttctttttttttttttgtccgagacagagtttcactctttttgcccaggctggagtgcattggcgcgatctgggctcactgcaacctccacctcccaggttcaagcgattctcctgcctcagcctcccgagtagctgggattacaggcacccactaccacgcacagctaatgtttttgtatttatggtacctatggtactatagtgcctatagtcccaagtactcaggaggccaaagygagaggtttgcttgagcccaggagcttgaggatgcagtgaattatgattgtgtcactgcactccagcctgagcaacagagatcctatctcaaaaaaaaaaaaaaaaaaagtcctatttaaccaggaaattgaacattaatatgatgctttatatgttaaaaaaaatgtaggctaatactaatataaaccatctaccttgatatttaagagatgatgggccaggtgcagtggctcacacctgtaatcccagcactttgggaggccagggcgggcagatcacaaggtcaggggtttgagaccagcctggccaacatggcgaaaccctgtgtctactaaaaatacaaaaattagctgggtgtggtggcacatgcctatagtcccagctactcgggaggctgaggcaggagaatcgcttgaacccgggaggtggaggttgcgttgatcctagactgcgccattgcactgcagcctgggcaacagagcaagactccatctcaaaaaaaacaaaacaacaacaacaaaaaaacctggatgcctcaaccacattccctgatgaaggtgatacttgatacttgaataatggctatgccaattagttaggatttttcttttttttttttttttttttgaggtggagtttcgctcttgttgcctaggctggagtgcaatggcgcaatcttggctcaccacaaccttcccctcccgggttcaagcgattctcctgcctcagcctcccgagtagttgggattacaggcacccaccaccacacctggctaatttttatagttttagtagagacggggtttcaccatgttggccaggctggtctcgaactcctgacctcaggtgatccacccacctcagcctcccaaagtgctgggattagcaggcatgagccactgcgtctggcctacaaaatatatttttaaaaattatctgggcatggtggcacctgcctgtagtcataactactcaggaggctgagatgggaggatcacctgagtccagaagtttcaggctgcagtgaggtataatcatgccactgcattccagcctgggtgacagaactctgagaccctgtctgaaaaaaataaaaaagttatcctgggcagacaaacagcttttatttctgaagcagagacattgtgcctggtggtaaaaataagaaagaggagagagcttctcatttcctttcacctctctgagaactaaaatttgttgggctcttaaatgctagataatcctcaccactaccctagaaggtaggtagtatatattttattgtgaggagtttgagactgaaaagctaactcacttattcaagaaatgttcattggtacctgctatgtcataaatactgtgccagattctataaaatattccgtggcttcatggggcattggtctatggaaggatataatcaaatacttgtaaaaatttatcattgcaaacatcacaggctgcaaaggacaagtgtgaagtacgttgctagtgtatagcatggcctggtctaatctgggggctgggaagttctttctgcagaagatgcagctcagtaacttgtccaggatgttcccagtagtggtggcaaaactagaattaaagcccagattttgggctccagagtttctgctcgtgcacagtactacccaccaccccatcattacacagagaataaaataaaacctaaactacacattttaggtcgtaagagctgtttgccctgcttgtggaaaaactaagactgtgcatagaaattctggaaaaatacacatcaaatgatccaggtgctacttctggtgagagagttaagggactcttttttctcctttgtattagtcttcagtaaacaacagttaatatttatggaacatcttctttgtatagtacaggcgtagttattgtaatccatgtgcatgccaaggtatatggtctgaatgtttcaattgtgtacagaccattagttttcaagtgactgttggtgttgtgtgatcaacaacaaagcattactgaattaatagatgtttttgttttcatattaaaagaggtaacaattctgcaggcagtcatgaagctttattttagaaatgggtttctggctgggcgtagtggctcacatctgtaatcccagcactttgggaagccaaggcaggcagattacttgaggttaggagttagagacctggcctggccaactggtgaaaccccatctctactaaaaatacaaaaattagcaagatgtggtggtgggcacttgtaatcccagctactggtgaggctgaggcagaagaatcacttgaacctgggaggcagagggtgcagtgagctgagatcacgccactgcgctccatcctgggcgacagagcgagaccctgtctcaaaaaaggagaaatgggtttccataactattagctgaggaggtttagaaatcacactgcctatatggttcatgggcgtaagtgctaacagttgtattttttgacctgtagtgatggtgtctgggaccctgagaagtggcatgcctctctctacccagcttcagggcggagctcaccagtggaaagtctgaagaaagagttggatacagaccggccttccctggtgcgcaggatagtaggtgagcacacagtcactcagaagtggggttagtgattttggggacatgcttttgcctgctggtttcattcttagctctgagaattttatgctttgaggggaaatgtcattatcaggaaactgatttatcggttggatttttcctaatcagcagggtaaagtcatagtctactttgtcacagctatataagaagactgttaggctgtgtgcttctgaattaaaagtaccgattatctttcactggcatggataactgagttagatgtggtgggtagcataaagctgtgctggaaatctcattatgctttctttcatatgtgagaccagtcctccggtataaattagttctggcaattcttttttttttgttctgtttttttttgagacggagtcttgctctgttgcctagtctgcaacctctgcctcctgggttcaagcaattctctgccttagccacccaagtagctgggattacaggtgcctgccaccatgcctggctagtttttgtatttttagtagagatggggtttcaccatcttggccaggctggtcttgaactgctaacctcgtgatccacccacctcggcctcccaaaatgctgggattacaggcatgagccactgcgcccggcctagttctggcaattcttaattcatagtggactgtgatcggaataaaggcttggatacggtttgagactgaagttaagtctgatcttccaactttcctagtttaaagtttacccctttagaaacgttgtttaagggtgaaatggagaccaggtaatataaaagcagtcaaggaacttgttgcaagaactttttttgagatgagaggacgactcatcataaaaacttggaactaaacgaaaaagatagcccggctctagtttaagctataagacccttctacacagtctgtcagtacactcagtacagtaatgtctctcaaagaatttattctagcagaatcattaaagatatgcagagactttattaaaatgatgaaaactgagaaggaacctaaatatccaacagtagaaatgggtcgcgtaaacttcggtrtatccatatatgggaatgttacattgcattgtcctgtaaaaccatgttgcagatgtgtttattggcaaataatgktcatgacgtactgactcatagaaaactctccatattgtatcctgtgtttggaaaaaacagactgcacagaaattctgtaaaagtacacaacagaacattctaggagctgtttgtgataacagaattaaagcagatttttctcacatggactaatcttcagtttcctggtttttctaggaagacattttttgtatggtgacatgtttgttcttcctacaccaataaatttattgagatagaatttacatatagcctgcacaaaaagtataccatttgatgtcttgacatgtgtatatacctgtgaaaccgttaccaaaatcaacataagcatttttatcacccccaaaagttccctagtattcctatgtgtccctccctttagctgccccccccacaacacttcccccttcccaagcaagcgctgatttgctttgtttttttttgttgtttttttgagacagagtctccctctgttgcctaggctggagtacagtggcgtggtctctgcttactgcaacctctgcctcccaggttaaagcgattgtcttgcctcagcttcctgagtagctgggattacacatacacgttccaccgtgcccagctaatttttttttcccccaccgagacagagtcttgctctgtcacccaggctggagtgcagtggcgcgatctcggctcactgcaacctctgcctcccgggttcaagcgattgtcgcgcctcagcctcccaagtagctgggattataggcgtgcgccaccatgcctggctaatttttgtatttttagtagagacagggtttcaccatgttggccaggctggtcttaaactcctgacctcaagtgatccacccacctcagcctcccaaagtgctgggatcacaggcatgagtcaccgtgcctggccccaatttttgtatttttagtagagacaaggtttccctatgttggccaggctggtgttgaactcccaacctcaggtgatccacctgtcttggcctcccaaagtgttgggattacaggcatgagccatagtgtccggactgatctgctttctgtatctgctttctgttyctatagattagtttacatttcctaggattttatataaatggagttactatagtatatactccttgtatagcttttttcattaagaatagttacgatttatccacgttgttgagtgtctagtttattttcattgcttaatagtattccattgtatggatttagcagttgatccgtttatctgttgatgtacatttgggttgtttccagtttttgactgttaaataaccaaagctgcaatgaacattcatgtacaagtctctggacataagctttcttttctcttgggtaaaaacctaggattaaaatggctgggttgtatagcagatgtatgtttaaccttctgggaaattgccaaactgttttccaaagtagttgtaccattttacgtttccaccagtggtgtatgagagttgcacttgctccaacatcctcatctgcacttggaatggtcatttaaattttagccattgtaataggcgtgtagtagtatcacatggtttaatttgcatttccctaatgactaattatgttgagtatcttttcatatgcttatttgccttccacataacctctttggtgaagtgtctgttcaaaccatttgtctatttttcaattgtgttggttttttttttttttttttgagacagagtctggctcttggtgcccaggctacagtgcagtggtgcagtctcagctcactgcaacctccacttcccaggtttaagcgattctcctgcctcagcctcccaagtagctgggattacaggtgcctaccaccacgcctggctaattttgtatttttagtagagacgaggtttcaccatgttggtcaggctagtctcgaactcctaacctcaggtgatccacctacctcagcctcccaaagtgctgggattacaggcgtgagccactgggttggtttattaagagattttatgtgttctgaatttaagtcctttatcagaaaaatgctttgaaatattttgtctcagtctgtggcttgtctttgcattctctaaacagtgtctttcaaagagtagaagttttaaattttgatcaagcccagtctatcagtgttttttaaatggatcatgcttttggtgtcatgcctaagaaaactttgcctaacccagtgccacaaggatttcctcctatattttgttctagaaatttttagttttaggttttacatttagatctgtgatccattttgaattaatttttgtatatatctgtttatatatatatatatatatatatatatttttttttttttttttttttttttgagactgaatcttagtcttttgcccaggctacagtgtagcggggtgacttctgctactgcaacctctgcctccaggttcaagcgattctcctgcctcagcctcccaagtaactgggattacaggcacctgccacaatgcctggctaatttttgtagttttagtagagacggggtttcaccatcttggccaggctggtcttgaactcctaacctcgtgatccacctgccttgacgtcccaaagtactggattataggcgtgagccaccatgcccggccccaaatatagatttaagttcatttctttgtctgtggatatctaaccgttcaacaccattttgttgaagagacactttaactttttaagcagttattttttcaaatacgcctgctgtagtttattagttgacaaaacatttgctaataattcttagataaggatttggtcaaaataaaggcactgcaaagactaatcatggaaaattatttatcgtgacgtacttctattgctgcaaagaggaaggccaatgtctcagccttatttaaatacataatgtacatgttaccctgaatctgctgataagcccaattttagtggtgactctcttccaaccatccccttcctcccatcagtcatggacatactatctaaaaaagaagaaaacacccttgttggtttgtttaactttgtctttcccacgtccttccagatccacgagagcgtgtgaaagaagatgacttagatgttgttctcagccctcagagacggagctttggagggggctgccacgtgacagccgctgtyagctcccggcgctcaggaagtccattagagaaagatagtgatgggcttcgtctgcttggtggacgtaggattggcagtgggaggataatctctgcccggacctttgagaaggatcaccgtcttagcgataaggacctgcgggacttgagagacagagaccgagagagggacttcaaggacaagcgtttcagggtttgtctttttttttttttttttttttttaaattgagacggagtttcgctcttgttgcccaggctggagtgcaatggcacgatcttgactcactgctgcctcagcccagtatctgggattataggcaygcaccaccatacccggctaactttttatatttttagtagagacggggtttctccatgttagtcaggctggtctctcaagctcccaaccttaggtgatcggcctgcctcggcctcccaaagtgctgggattacaggcgtgagccaccacacccgacctgggtttgtcttctagattctttggtagttcatgtgcttggggacttgatattcactttttttataccaggttactttgagaacaggcatgaacacagcctgctcttaaaccagtcagggaggaaggggtgggggtggtgatgggcctcaggtatacagcatcatatcttcctttcactattgaacattacaacgaagaccytgactgaagtagaaatggcttgactagaaattttttaatcttgctttatgtacttttccagagagagtttggagatagtaagcgtgtctttggtgagcgtagaagaaatgattcttacacagaagaagaaccagagtggttctctgctggacccacaagtcagtctgaaaccatcgaactgactggctttgatgataagatactagaagaagatcacaaagggagaaaaagaacaaggcgacggacagcctctgtgaaggaaggtcagttcaaactttgggagggaagttcgctgttttaaaatgagatgtaggctgggcgtggtggctcacacctgtaatcccaacactttgggaggccgaggtgggcggatcacctgaggtcaggagtttgagaccagcctggccaacatggtgaaaccccgtctccacaaaaattcaaaaattagtggggtgtggtggctggtgcctgtagtcccagctactcgggaggctgaggcacaagaattgcttgaacctgggaggcagaggttgcagtgagctatcacaccactgcactccagcctgggtgacagagcaagactgtctcaaaaataaaatagagatgtgattatcactggctaattgtacacttaggaatgggcaccagatgtataggaaatggcaagtttttcatgatgcatcctgattttgaaatctttttttttttttgagacggagtctcgctcagttgcccgggctggagtgcagtggcaccatctcagctcactgcagcctccatttccttggttcaagcgattcttccctgcctcagcctcccgagtagctgggattacaggtgcctgccatgacgcctgggtaattttttctatttttagtagagatggggtttcaccatgttgcccaggctggtctcgaactcctgacctcaggtgatcacccgcctcggcatcccaaagtgctgggattataggtgtgagccaccatgcccagcccctgcaactgcttaagtgaggattcactaagtgtagatcatactgtttccctaactcgttctgcctgccacactaaacagaaaagtctgaagttatcctgtaagaggactgtgtacatgaaagagttccccagaaataagaaacgtggtagaaaaatgagaggtctcatttattgagcaattatgtcctaaacacagtggtgagtgtattttgtctgtgtaatccttcatctcctaatgaccttgtgcagtgtaggtacttttttatgcccatttcatagatgagcaaatggaggctcagaggrcttaagtaactcaaggacacttaaggtagtcaccatggaaataagtagtgaagtcaagagtaaagcaagatgcttctgggcatcagagcctaccttcttcatcatggtattaggccttcccaggtcagttgtttgtgatttgccttctctcaaacttagtttcaggatgagtacggtggctcacgcctgtgatcccagcactttgggaggccaaggcgggtggatcatttgaggtcaggagtttgagaccagcctggccaacatggtgaaaccctgtctatattgaaaatacaaaaattagctgggtgtgttgacgcatgcctgtactcccggctactggagaggctgaggcaggagaattgcttgaatccaggagacaggttgcagcgagattgtgctactgcactccagcctgggagacagagttgagactctgtctccaaaaaaaccaaaaaaacctagtttcctcagctgtaagatggggtcagatatctcccttgctaaactgaaggagccagagctaatgtgtgtgaagtacctgctgcagagtgggagcccattggtctgcagccaatcattttttagggcagtgacctggctctaaggtggccagtcccaggctgatggtcttgggaaggaggcactgtagagccaggtggggactaacctgggttaaagtactagggctcctgcttagaaaaggataatttttgacaaaattttgacagctgggcctgtttctttgtaaagggaagaacaatgcctatcataacttaagggttacctttagcattgaagaacacatgtacccatcagaactcagcctccaagaaggcactcagtaaattctacctgcctcaagctttcaggcttagttgaaagccttttggcagatactaggcaacaaaaggggaaagcctttttttttgttttttgtttgtttgtttgttttgagatggagtcttgctttgttgcctaggctggagtgcagtggcacgatcttagctcacggcaaactccgcctccgggttcacgccattctcctgcctcagcctcccgagtagctgggactacaggcgcccaccaccacgcccagctaaatttttgtatttttagtagagatggggtttcactatgttagccaggatggtctcgatctcctgacctcgtgatccacccgcctcagcctcccaaagtactgggattacaggcgtgagccactgcgccagtcctctatttttttttttaattaattttcttttttttttgagacggagtctcgctctgtcacccaggctggagtgcagtggtgcgatcttggctcactgcaagctccgcctcccagggtcaagcaattctgcctcagcctccggagtagcggaactacaggcgcgtgccaacacacccagctaattttttgtatttttagtagagatggtgtttcaccgtgttagccaggatggtctcaatctcctgacctcatgatccacctgcctcagcctcccaaagtgctgagattataggcgtgaaccactgcgcctggtctgggaaagctattttaataaataagggaaaaatcagtgccaccttaacattttgatgaagacaaatataagcagaaataagctgatggcatttatttagaaggagaaggaaatggagaatcaaaatactcatcttcttttgtagtcttcaaaatatagtacatattaccattatctttgtgctatcacacagtgttccctaggataatgtaagaaaytgataggtaacttggaagactttgctattaaattggctttgagatatgtctttgtctcattcttaattaaagcagcacccaataaagcaccactttaacgataaagatcaggcttctggtgagaaaaaattatgtttttcttaagtgaggtgaaatctgaatttcarccattcttgtatcaagtgcaggagtcaggagtgagatagattggtagtggcacctccttattttacagatgcagagagaaattgagacctggagagaagggatggatttcatggsagagcctggagtagaatccaggggtcttggttcatcccattagctaactacagaatgtctctaggttgcccttgctatgtatttaaaayaaataaaaacaaataaaaacattaaaaactaagatgtcagatgccttaaatgttagcatctggcagtttcactttgtctccccatcctaaaaacaactgaacattgtagagtatacctggcactacagagtaagacaaagctggttagaccaggttccctaccctcagagtttagcctcaccagagagttactattatacagtgtgacaagtactcagagatgacataaggattatagagaaggtagcaattaattttactaggtagggcaaaaatgggtaggcrgggcaagcttcccagagaaggtcacatttgaatttcgccttgaaggatgagctacaacaaccaacctgtaggcaagtgaaaattgccctcatgccaggtttctcataaataccttaggttgctgagccctgactgaaagtggtgctacaggtgcatgggcagaagcagagctaaattaatttggttccatttttaagcagtaagagacttgcaaagactatcctttwaaaaaaaaatcactagaaaaagaactaggcatggtgctggacacagtggctcactactgtaatcctagcactttgggaggccaaggcaggaggatcacttgaggtcagcagtttaagtccaggctgtgcaatttagcgagactcagtctctacaaaaaattaaaaaattatccaggcatggtggtgtgcacctgtggtcccagatactctggaggctaaggcaggaggatcacctgagcccaggaggtagagactacagtgagctgtgatcgtgccactactctccagcctgtgcaacagagcaagaccccatctcaaaaaaaaaaaaaaaaaaaagacccccctccactatagaaaatatgaagttcccacgaagggaaccataatcctccccacatcccrttggtattctagctttattaaggcttttttccttttctgcctcccgtagaagggggactgttttattcttgcaagtacagtacctgcacgagaagtctgctttttaagtcatgtgtggctcttctacatgtatactgatggctgaagccacagagggacactggagtgatttacttatcagacggtttttgtcctggttttgctttcaggtatagtagagtgcaatggaggagtggccgaagaggatgaagtggaggtcatccttgcacaggagcctgcggctgatcaggaagtgccaagggatgctgtcttgcctgagcagtccccaggagactttgactttaatgagttctttaaccttgataaggtgccatgcttggcttcggtgagtgtagcagcacacttaaaaatgtgtggttaaatttgacctgagtatttaagacatcggtttgaaagtgttgttttgctagatgcytttggggtttttggcttttattcttacatatttaaatttttgttggctttgttttgagaggcttaatggataatatgagatttttgtaccagttaactcttttttaagctggtggtgttagactaaaaattctttttttgttgtttttttttttttgagttggaatcttactctgtcacccaggctgaagtgcagtggcacgatcttggctcattgcaacctccgtctcctgggttcaagcgattcttctgcctcagcctcctgagtagttgggatcacaggtgtgtgccaccatgcccagctaatttttgtatttttagtagagatggggtttcactatgttggccagacgggtcttgaactcctgaccttgtgatcctcctgtcttggtctcccaaagtgctgggattacaggcgtgagccaccgcacctggctttttaaagttatttttagaattcctgtttatcactaagatgcttatattttggatacactccccaatttttcacagtgatgtatcatgcttatcttatattttaattaatacaaaattagtgcacttaaaagtcagcattatttaaggtatgagcatctacaggtggaatgtgattgaaattgtctagataattcctctgaaaatagaaattctggaaacaataattagggtcttgaattaaaatcccttcaaaagaagtatattgtggcttaatttgggtatggattatgaaaacattcttccagataagaacaaagaataaatctaagcttcccctgcttaactttggaaactgtgggttccagatttcaaataaaacagtcactaattctgtcatccatgtaccagtttttgaaaaagcatgttttctgtttatcagtgggattgacgtgaaagtatatgacttattttcaaggatatgtctgatttttggatagatgtttgctctatcttgtcttttctaaatattgataagaatactgcaaaaaatcaatttggatakttgactgaatttatggtatgatttgaattgaaaaattttttaaatgcttaaatctagtttttaagaaagattggcactatttcataatttctaccaaagcaatttattgttcatagtgtgttatttaattgtccttattaaatgtaaactatggaggttggatttggaaacagaaaacacctgaaaactctctattaatctcaaacagaaattagagatcagttgaaatttcatcttccacaatcatactttttctaaactttgacttggaattacagtctttatgagctctgcttttttagcctttggcttctgaaactctcaagattgaatttcataatgttcattacaaccttgaaaccactaagtttgaagcaatggttttctttcatcagttccccatacttgatatttagttgaaggtcactcatcagcttgtcagtggaatgctgtggcattgacactgttctctgagaacatttggtagtacgtggatttactcctgaggcaaaggatagaaacccaaaaacctttttgtagcatagaggctttgctttatattcttagaaagtagtggtggttcatgcctgtaatcccagcactttgggaggccaaggcaggtggatcatttgaggtcagaagttcgagacaagcctggccaacatggtaaaaacccatctctactaaaaataaaattaaaaatagccaggcatatggtggcgtatgcctgtagtctcagctactcgagagcctgaggcataagaatcacttgaacctgggaggcagaggttgcagtgagccaagattgcacccctgcacttcagcctgggcaacagagcgagactgtcttaaaaaaatagtagaccgggtgtggtggctcatgcttgtaatcccagcactttgggaggccaaggcgggcggatcacaaggtcaggagatcgagaccatcctggctaacacggtaaaaccccgtctctactaaaaatacaaaaaattagccgggcgtggtggcaggcgcctgtagtcccagctactcaggaggctgaggcaggagaatggtgtgaacccgggaggcggagcttgcagtgagccgagatcgtgccactgcactccagcctgggtgacagagcgagactctgtctcaaaaaaaaaaaaaaaaaagtaataaaaaataaaaaaggaaagtaagtagatggttatactcaagtttgggttattcagaaattacccaggatggaggaagaaaaaggtgttcaaattcctaggttctgagagtatttatcttcaggtcacgagcatgaaaggaagtttcaaagtaagtgaccctttcataagatttaaaccttcttgtcctttttcatctagaaactattagtttttattgtctttttcttcagatgatagaagatgttttgggagaagggtcagtctctgccagtcggttcagtaggtggttctctaacccgagcagatcaggaagccgatccagcagtcttgggtcaacaccacatgaagagctagagagacttgcaggtaaaatggcttcagattctgcccttgaaggtaaacctgggtttttccctgatatggttcattttatcttcattagtcaggagtcaattagggtcaaagggtctctggacaactgaaaagccttcaatttgtgtccttttaatattgttgaaggggccgggtgcagtggctcacgcctgtaatcccagcactttgggaggccaaggcaggcagatcacaaggttaggagtttgagaccagcctggccaacatggtgaaacccccatctctactaaaaatacaaaaatcagccaggcgtggtggcgggcatctgtagtcccagctactcaggaggctgaggcaggagaatcgcttgaaactggcaggcggaggttgcagtgagccgagattgcgccactgcactccagcctgggcgaaaaagcgaaactccatctcaaagaaaaaaaaaaaaaaaaagaaagaaagaaaaatactgtcgaaggcatgtttctttactggaacagattaattttgagtatgtttatttgcaatatcaggtctggagcaagccatcctctctcctggacagaactcggggaattactttgctcctataccattggaagaccatgctgaaaataaagtggatattttagaaatgctacagaaagccaaagtggatttgaaacctcttctttccagcctttctgcaaataaagaaaaacttaaagaaagctgtaagtgtttatgaatatctgttttagatatctgaaaaggtctagatgttcagtcttcargcagttgggtctaacataacctctgtttcataaaaagtcaaatatatattgggtttttgtttaatgttcttttttaaaaactcatttcatcaaacaataccacctctttgagaatctcacagtgggtcatgagccctatgagaacttttcctgtaagttcttacctagggtctggttgtaataatccagtgaatgttgaaaacaaactccagtgaatgttttattcctccagagcataacttaccatttcctcacaaatctgccctagtcttccatgttcttgcttaggctataaattctcaacataaaaacttagtgatataatgaccacggtgcaggcagcaatcttggcaatgttgggctatctgggattcttgtcccaggtaacaagtctcccagaagactcatatccttctgcaggatgcacagcaggagcttgtcaagttttaaagaatagcacttcatagttgtggtcccccagtttctagcatctaaacattttaggtttagtttatgccatctcttagtacacaatttgattttaagtgttattagtttatttttggtgtcagtcttttctgacagtctcatctcaattttgaaataaattattttcatcttatctgtcatactagccaaagagaattcctaccagatatctctttgcttgatttaacctggacgttctcaacttctcagcacattcaggggttgtgctttcagtggaggaggtagaagcaggtctgaagggcttgaaggttgaccagcaagtgaagaattcaactcccttcatggcagaacacctagaagagaccttgagtgccgtaaccaacaatcgacaactgaagaaagacggagacatgactgcgttcaacaagctagtgagcacaatgaaggcaagtgggactttgccttctcagcccaaagtcagcgtaagtatctgacacaaaccccccacccttttctcctttttttttcttctttttcccaccacaataaaaggatttttaaaaaggtattctgagtaagttggaaattctttagtagtcatttggtccttgatgcttttgtgtgttccttaattattgatatgctatttgttactggaaaaagcaggcttgtggttaatttatatgtattgtgggtgacagtataaagattaaaagattcagtcttaatggtaatgcctgtataactttaagtcactgctaaaatgaggtataaaactatctttttggatgaactccagagacaattttcttgttattcagctacttaagttcatattctttaccatatttgtatagtaaaatctttattcacatcttctaattattcccagataccagggattacctgcattcttgcagtcatacaaatcatttgtaaagtatctaagatggggctgagcacagtggctcacgcgtgtaatcccagcactttgggaggctgaggcaggcagatcacctgaagtcaggagtttgagaccagcctggccaacatggtgaaacgccatctctactaaaaataaaaattagccaggcgtgggggcatgcgcctgtaatctcagctacttgggaggccaagacaagagaactgcttgaacctgggaaatgaaagttgcagtgagccgaggtcacgccactgcactccaggctgggcaacagagtgagactgtctccaaaaaaaaaaaaaraaagtaagatgggtttgtcaggataattacattctgtcaatttactaatggaaaaagttgtggctccaagttaaaaacaaaacttgtaggcatgaagttaggttacaaggtgacacaactgcatatcaccttgtaaatgcaaatgtttataatatactggttctttgtcctaacaattttgagagggtagttcttacccatagcctatgtgttaatatcactatctcttgatacaaactaatgtggaagcagggtagatatgaataataaaaacataaacatggacttattctagttgctaagttatagcaaatttaccaaattgagttttctctctttttttcctgttccctgcttgcctgggaacttaccagttagccaagatgcaagtagcaatagctgtttgaatcattatgtcttataccaaaagaaagcaactgacttttagcattccttatctgaccaataggacagacagaggttccattattccttagtgccaggactgacctacacttgaaaggaggcacctcagataggtagactgacttctttgtatctgaccacaccataccagttgcaggagaatgtccctgtaaaactgctttagagttacttttatacaaagaattattagatacaaatgctttcaaatgaagatcagactgaaagatggtagactatcctattttcctttctcgttacatttgtgtcttggtgattgggtgctgactgcaatgstgtggttcatatcttataattagcttctttcttttggtgtgagcaactaaaaatatggaakggggcattcagcagtttacctgatgtttttccacattttattgcagatatgattctaggatttgatattaacacaatttactcgagttgtaagggcagttggtttgatgttggggttttagcactcagaagtgtatctggttttagctgagcaaatgagcctcaaacacctgccaaacggatggatgacacattcaagtggctaggcaaaggctaagacaaactcagctagcaggaaagaatacaacaaggaaagtaatggagtaagaatagcaggtgttatctcaaaatattgctcaatttgcatgttgttaagtcatggtttactttttgaattcggtgtctttaattactactgctgtgtatgttttgtatactatttctgatctgcctccatccatttaggttgtcatattggttcatccaaaaataatacatgctggttcaatctaaattctgttttaaattatagattctatcctccaagtataataagccatgcagtataaagttgtmtatttgtttttattagatggaagtaaatgactcttaaagagattacttataaaatcatctgcctttagtcccagttccaaaatcaacaataaaatacttgggtattcttgagctatttgtcatgcctagacactgctttggactttgacagctccatctagtggaagggaaactacaccagagaaagcacttcacacagagctaaatgggcatagggatgtcctgaaatgcaggaggggactccaggttggatgcacaaaatgtaaccactggccaggcctggtggtgtacacctatagttcgagctacgtgggaggccaaggtgggagggttgcttgaacccagaagttcaaggccagcctggagaacatagacctgtcccaaaaaaaaaaaaaaaagtaaccactactgctttaagagtggaggatttgaattttgccctgtatgtgatacccattttggaacagctcgtttaaaaaataataaagttgccgggtgcggtggctcatgcctgtaatcccagtactttgggaggccgaggcgggcagatcacgaggtcaggagatcgagaccatcctggccaacatggtgaaaccccgtctctactgaaaaaaaaaaaaaattagctgggcgtggtggcatgtgcctgtagtcccagttactcaggaggctgaggcaggagaattgcttgaaccctggaggcagaggttgcagtgagccaagatcgtgccattgcactctagcctggtgacagagcaagactctgtctcaaaaaataaaataataaagcttaaatttcctgaaatatgaaactctgaaatataacaattttggccaaacctgcatgttgtttactaggattttaaaaccatatgtgtaggcagggtgtggtgggtcacgtctataatttagccagcactttgggaggccaaggccagaggattgcttgagcccaggagttcaagaccagcctgggcaacgtggcaaaaccccatctctacaaaaaatataaaaattagttgggtgtggtggcatacacctgtagtcccagctactcaggaggctgagatgagaggatcgcttgtgtctgagaggtcaaggctgcagcaagccatgattgcaccactgcactccagactgggcaacagaacaagaccctgtctcttttgtgtgtgtgtgtgtgtgtgtgtgtgtgtgtgtgtgtgtgtgtgtgtgtgtagtatatatatatgtgtgtatgtatgtgtgtatatgtatgtgtatgtatatgtgtatatgtgtgtgtatatatgtatgtatatatgtatgtgtgtatatatgagtgtgtgtgtgtgtgtgtgtgtctccaataaatcttgttaaaggtaatgggtagcaagagttatctcaagtaagtgttccccggtttcaccatttttcccccttttggtcacagtgttagaaacagggaaatggacttaggattagcatagtgaggatctctgaggggactttgcatgtacatgtgaacggtctttccatccccagatctttgagacctgtgtgatgagagcggaacacgttggtctaagttttctgtgacttgagtatcattctgctrttaactccctaggagtattttatgctttcttgtggtccccaatcaatctgtaagttaagtgagttaagaaagttaaaaccagttttcttttgactcttttagcgaaaccttgaaagccatttgatgtcccctgctgagattccaggccagcctgtccctaagaacatcctgcakgtacttcacaatcttatactgaggccttggagtcttgaacagtagtcttctgaaccagttttgcttagtggtccaactttgggccttagaaaatgatctgtgttgcctggcaatcagagaggtgatattgttgcctgacatagtttggtgttgcttttaatctcaatgggcaggggataggggatggctaaaaaagttgacaaagtaagccttgacttctagtttcctttgcagtttctgtgaaacttaaaagtatctagccaggcacggtggctcacacctgtaatctcagcactttgggaggctgaggtgggtggatcacctgaggtcaggagtttgagaccagcctggccaacatggtgaaaccttgactctactaaaaatacaaaaattggcctggtgtggtggcacatgcctgtaatcccaactccttaggaggctgaggcgtgagaatcgcttgaacccggtaggcagaggttgtggtgagccgagatcatgtcactgcactccagcctgggtgatagagtgagactctgtctcaaaaaaaaaaaaaaggaacctctatttatagcactaacttagagcatatgttgctagctgaacattcagataaatgtgttgcatgtacacatgccaagtccttcagttgagcatgagggagatccatcttgtggctctcaaaagttaatccataattcacagcctctgagtagaaggaataactaagttcacagggatttggcttttctgcctttaggaacttctgggtcaaccagttcagagacctgcttcttccaatcttctgagtggccttatggggagcttggagcctacaacatctttactgggccaaagagcaccctctcctcccttgtcacaggtgtttcaaactcgagcagcctcagctgactaccttcgcccaagaataccatcaccaattggtaaatatacttatttgtcaaaagaaatatgaatttatggccaggcacggtagctcatgcctgtaattccagcactctgggaggccgaggtgggcagatcacctgaggtcagaagtttgagaccagcctggccaacgtggtgaaaccccatctctactaaaaatacaaaaatagccagacgtggyggtgcatgcctgtaatcccagctacgcaggaggctgagacaggagaatcgcttgaatctgagaggcggaggttgcagtgagccaagatcacgccactgtactccagcctgggcgacagagcgagactctgtctcaaaaaaataaataaatatacttttgggggatggggtaccaaacgtggaagataccagctgctcttctaggtgaatatgttcatgttatagattttttttttattgaaatctaactttgatctagctctttagtcttattccttattttgggaattcaatccaaaaaaagttaatttggcttcttaagtttttctttgatatagtagaagtcagtgtagtggttatctatgaagctattgagttttgatagacaatctgctgttaagtcttatggctaattcagaatgtgactgaaagaaaagttccagaaagtgtcttagcaaagtatttacatggaatgtcgtagtgttcctgctatcctaggccactttaggctgctggccactctggctcctgccaaacaaaccttgagaggcattttttgaaatcttctgtccacagtcaaacaatggagagaatgtgtattctcagagcaatggtgtctattttaataccagctggcttagtgataacgggacaaactgctggctaggaaagctcttctctcccagagagaggtcttggctttaaaaggagcaatgctgatggcttagttgagaagcaatttggacagtgctctggttgaggtccacatagcccackgttggggcacagagggagagggacatctgtcagcccaataaatcagtgctttccaagagatggcgttcagcaagaaatgkcatgcattaatgaaaatgcctccctgatgcacacataccatcttggtactcactgagactaactttcccgacaggtttcacaccaggaccacagcagctactcggagatccattccaaggcatgcgcaaacccatgagccccatcacagcccaggtcaggctgagctttctcaaactcaatctcttgcttgcccttcaccctcttggtgcatggggagtggagagctgaactgttgtgattcttaaaaatggttttgaggccaggcatagtggctcatgcccgtaatcccagcactttgggaggtggaggcaggaggatcacttgagcccaaaagtaaatttaaaaaatgagccaggtatagcggcatgcatctgtagtcccagctacacaggaggctgaggcaggagaatcgcttgagcccaagagtttgagactgccgtgagctatgatggtgccactgtactccagcctaggtggcagagtgagaccctgtctctaaaagaaatggttttgatctatatttcaagctcagtgaaggttagacaatttgctgaataattcaagtaatacttaaattgttaatcttgttcactgcgatggcagcacaatctagtcagtttcgcagtatctaatttttttcagcttctgcttaacatacctttctaagagtgaagagaaacctttgtagaaagtgtggtgtccttactcttctcctgaccctcccstctccttttcagcagatgagccagctggagttgcaacaggcagctttagaagggctggccttgccacatgaccttgckgtacaggcagcaaacttctaccagcctggttttggcaaaccacaggtggacagaaccagagatggattcagaaacaggtaaattactaatcctgctcatgtggagatttacggataagttttcctgaaactaataaattacttatctgcagtataattctgttgtacatactgtggtatgttcagtatgtggtagaaattccatcccaatccaaatcaatagaagaaatagatttaatagcggaaatatgattaaattstactgcaaggcatagggctttcattctatatggttttatttccgttcttgatttataaattactttttttccttgagtttgctaattagccatatggaagggatgctgctcgcctaatttacctcacaagattgttatgagtaaatatattttaaaatcttaggatgtttctaccagttaaaccattcatttttacaaatgaaactagcatagctccttattcctttccccacagattcaatgttcttatcaaactcccttgatgcaggtttgctacatcagcagttttttggccagagctgacaggtttgttgatcagagctgttaacaagtagagtactgagttcactcttctctttttcgatagttgcaacaaatggtaaaatgaaattaatcataagttagggagaaaagggaaaggagtggcaatattattttattgtaaaataaaacagacaaaactatataaaacaaatgtgtagcttattataaggcaaacttccttgttaactactcagagggcctccatgtgccctgtgccagtaataccccttttcctcctcagaactctccactgtccagcctttaaaagtaatcactaccttaattaaaaataatttatcaccaaaatgcacatccctgaacactatagtttagtctacctttaaaatactcrgtacttaatgttttgatgtgattcttaaagttactaccacagtgcctcagtgttttgcttcagctggttttacctgttaaccctttcagaagatactgagaccaggagatagccttacacaagcacatcctatttatagcacccttccaccgaaacagagagctccagactggtctgctgaacccctctcacgtgctttctgtctatagcataatgcagttacctagtattcattgatgtgatttgtgactttcacagtacttttaactttttttttttttttttttttggagacaatctcttgatctgttgcccaggatggagtgcagtggcacaatcttggctcactgcaacctcctcctcctgggttcaagcagttctcatgcctcagcctcccgagtagctaggattacaggagtgtgccaccacacccggctagttttttgtatttttagtagagatggggtttcrctatgttggccagacttgaattcctggcctcaagtgattcacctgcttcggtccccaaagtgctgggattacaggcatgagccaccgcacctggcccagaattttatatgatcttcatatcaaccctgtgaggtagatggggggggggggcggtacgtaactgcattttacagatacagaaaacaggtttttaaaacatggcttactcaaaactagcaagcatatttgagtcatttcagtctagccttcatgttttggatcagcatcagcctcttaggtcctccctgtgtacagttgtgtccctccaacaaacatgcctttccccttaccttgcttttttwaattgtattcatcactgtctagcatattatttattgtttgtctccctgcctgtagtaaccccactccatcctgcagccccaagaatgtaacctccatgaggccagagattatttttcttttattcactgctgtattccaagaacctggaacagtgtctgtagcaggtgctcaaatatgtttaccagaaggaatgataggtcatgtgggaccctcaagtttggggttcattttttagtcactcagaatagtactgatctgtctgcccatgttgtcatacacacagtcacagcatggcagcaatggggtactaactagaaagaagccatgaatttaggttttccatctatctgtgattcagagaacttcaggtcagtgactatacttgggccttgacctttgaggcctgaggtcaatcttgtgtagaccaagagtggtcctaaaatagctgaaactcttgattctgtatttgatttgaacgagtgtcacacacagcatcagttctgtgccaggcactgtgctaattattgccgctccctgcccagtgaagcacaggcagcccaagaatgaaggccctccctagcgcacctcactggtgtagtctgcagtaaactatacaccagctctggataaccctacaactcccaagttcctgtacctattctgtctacctgaactgttgttctctagcttcttcttgatcgcacccaatggaatgcagcttcttccccaggaagcatccctgcagtgccttgttatttcttctaacccctccattttcccattgtactttgttggtgcctaatatctacatgccttggtttgctctaggtgattgtctcccccgctagactgagagctcttacaagactgggactgtgtttcattttccttttgtcttccctcagagcttagcatgtgcttttgtgtrtgttaggcctaaatgcttgggaaattgaattggataagggaaaggggatgttaaaacttctaggctggtcttgagtattatatggttttaagacttgaagttaagcagattggggttcatgctgataattggtttgttcacaggcaacagcgagtgaccaagtcaccagcacccgtgcatcgagggaattcctcttcccctgcccctgctgcctccatcacaagcatggtcagtgacctttagtaactgtgaaggactttaaggcttctccctgtttggttgtgcatggattgtaccactgtgtgccctaaatgtccttgagttccttccacggaaataactgacctagtagtttttcataactgtctattaggtctttcccttttaggacacagtctaagtcttaggattttaatgaagcccctatattggggaaaatatgttccagcagagatgatcatgggccagggcacacgaggtgatatagtatgttcaaagaaatgaaccaggtgtggggagacaggaggacgatagtgagagacaggaggtgaagtggacagaggtgactgggtcagacagtggggagtctattgaaacttgcaggggagttcacaaattcggattcaccacttcaggtctcagtgatataaactaaggctggaacagaagggtttgcttatatgcagtgagaagtctagttttataactatcattactttaaaaaatgtttcattccagctgggcgtggtggctcacgcctgtaatcccaggactttcagaggccgaggtaggtagattgtttgagttcaggagttcaagaccagactgggcaacctagtgagaccctgtctctacccctaatacaaaaarttagtcgggcatggtggtgcacatctgtggtcccagctatactcgggaggccgaggtgggaggatcacttgagtccaggaggcagaggttgcagtgagccaagatcgtgccactgccctccctagtgagtccccgtctcaaaaaaaaaaaaaaaaaaggttcattccccacaaatctttatcatctaatcaaagccgatagagaagaaggaaaaaaaaaaataactttgctgcgtgcttcagaaccccacgtgggtctttgcaccggtgaccttgaaggcagcagggtttggaaagaacttttttgtttataagtcaagccctgtctcctgccatcaaagatgtggggttgtttggtgagaaaaggcaaatgcataataaaatcaccaaggtagaaatagtgaagaggtaagaaatgactccaaatgattaatcctgatggctgaggagactattgagataaatttgacttttctggtagccaagttaagggaaatattaggagtatggagtaattctggttttgatgttatctttgaaatgtcctttcgcagaaggaaggtctgttgctccaagttatatttctggccatgttctttctcttgccagcctaatcccaggctgggaaatctgtgacgcagaggctgcataggcatgtccccattatcacacagttgtaagcaagggataatgtacttgggacactgcctatttgccccattctgtttttcctccagcagctacagaacagaatactacagttggcctatgctaccaatgtggggactctttgttgagtatcttgacaagttaatcctggcttagtattagagaacggcacttagagaatgtgctaatgccaattgtttttctctgcagctttctccttcctttacccctacctcagtgattcgtaagatgtacgagagcaaagagaaaagcaaggaggagccagcatctggaaaagcagctcttggtgacagtaaagaggatactcagaaggccagtgaaggtactgcagagctgttaagggcactgctcaagaaagtatgtgatggagaaaacatgggcctgagcgctgaccagcctgatattctatacaaagccctgggcaagaccactagcttctctggactatggttctgtgtcagtgagaaggttctgtgtgacagtgagaagaattgggccagctcacaattgcttggttgcttgaaatttgaccaatctaagagtgctactaccagacgggtagaatgagtgttagtttagaatccttagttaggcttcaaagttaataattagtatacttatttggcaaattaatataattcagcgagttttacttctgaaagattatgtccagcctgtggagacttaagtgtccaacatagaaaatatgtgagaggcttttaggagttgcacagtagggattgtgaaggacrtggtaacatgcggattccaaattagggtttacagaggtgttaaaagtacagatctgagagatttttgcctgtgtttgagaaggcttggggtgggtggtggggaggaaatcctgttggtactattaagacagtttgggttctttgaccagactctaattgccatttagattttctgttgtgatagatttgcataatctaggccacagccatttgtgcagagaagggtgcccaacaattcatcttctggtcctgtttatgaagcaaacgatggttcctaccgtgtagtcctctaaacttgttaagggtatcagataagaattgtgaccttaagaaatgagatttattagaccagtgggaggccacaagtgtttgggagaggtttgccaaaatattttttgtttggttcctcacagaaaacctcctgtcatccagytctgtacccagtgccgatcgagactcttctcccactacaaattccaaactgtcagcattacagaggtcttcgtgttccaccccactgtcccaggccaaccgttacaccaaagaacaagattatcgacctaaagcaactggragaaaaacacccaccttggcatccccagttcctacaacaccttttctccgccctgtccaccaagttccccttgtcccccatgtccctatggttaggcctgctcaccagcttcacccagggttggtacagaggatgctggcccagggagtacatccacagcatcttccaagtttgctccaaactggtgagtttccagcctgacttgggtgtcgtcagtttgtgggcctaggggacaattgttggcactgatgaagtgctataatgtgggagatttccatccctagaaagatgttactagattctcccatctaactggcaggcagtgggcccaatccagtcaatcccctagtcctttaaaagattaggaacctagcttgaagattctttttttttttttttttttttttcctttttgtagagacagaagtctcactctgtctgcctggctggagtgcagtggcgcaatctcagctcactgcaacctctgcctcctgagttcaagcaattctcctgcctcagcctcccgagtagctgggactacaggtgcacgccgccacacccggataatttattttgtattttagtagagacaggatttcaccgtgttgcccaggctggtctcaaactcctaagtttaggcagtccacccacatcggcctcccaaagtgtcaggattacaggcgtgagccagagaattcttcattcttttttgagtctcgctctgtcgcccaggctagagtgcagtggcgcgatctctgctcactgcaacctctgcctctcccgagttctaggtccctgcctcagccttccgagtagctgggattacaggcgcctgccactacacctggctaatttttgtatttttagtagagacagggtttcaccatgttggccatactggtctcgaactcctgacctcgtggtccgcctgctttggcctcccaaagtgctggggattacaggcgtgagccactgcgcagagcccttcattcttaacaaacttccagatcagcaaaactgtacagtgaagctggaaaacttccaggtaacattaagactactcagctgcttgctttttctgctcaacaggtgtgcttcctcctgggatggacttgagtcatttacagggaatatctggccccatcctgggtcagcccttttaccctttacctgctgctagtcaccctctcttaaaccctcgtcctggaacacctctgcatctggcaatggtgcaacagcagctacagcgctcaggtaggttcaggaatgtgacaggtgagtttgggacggacttagggagtcttgaagctttgaggactagtttccagtggagatgaattaacactttcattctttaacttgttctaagtttgggacaaagtgtaaccagataataagatgaagtaaattgacctctatgcaatttgggattactgttcctgcaaagtcagtgggaaragccaagtgttttctggctttttcctttgcctgttaggagagagggctgagaatccaacagaggttcagcatccggcctgcccagggtatataccccctcaccagttmatgttgctgcttctgtgatgtggttacttagccatgagaagtagcggtcatgtcatccagggtgggttttcaatactggtagcttctgaatagctcagctttccatggtactgttttctggcattgttggtattttgcaaaggagtttctaaagaagccctagaaaaaatcctctagtaaagacttttctttggatagggtttgaatgaagcagggtctaataaactttccttctcatgctgtgaatgataacccttcttatctccacagttctgcatcctccaggctctggttcccatgcagcagctgtcagcgttcagacaacccctcagaacgtgcccagccggtcaggcctgccccacatgcactcccagctggagcatcgccccagccagaggagcagctcccctgtgggccttgccaaatggtttggctcagatgtgctacagcaacccctgccctccatgcccgccaaagttatcagtgtagatgaattggaataccgacagtgagcagggcaggcagactcaactaagcccggacctgtggtggcacactgggcaggaccctgcttcatctcgggttggtttatgggcttttactttggagcactctgtgtgaagctgtttggtggaacccatgcatcyggtgtggtccgcattatgatggaaggatcttaaccagtcgagtggagtgtacattgtctgaatacaggatgcacaatgttgtcaatcctggaaatggtctttcttttttgtaagatatgtgaatgaagtgttggtgtcctcaccaagaggtggcacctaagggttctgaggaaataaatgtatagacccttatgtacagacctgtgtataaacaacttttgtatatacatataggatagcttttttgaactatacagctgtacataaaagtagctgatattagttaggcctgtgtcaacagtttggatttttttcacttgtacatttgggattttcttttggttgattaaaattgcatatgctaagtgtgtgaatgaagtaactgacattgttgtgtttatttcctctctgaaacccttcctaattttgtttggagacagggtctcactctgtgtcacccaggctggagtacagtggtgcaatcgtggctcactgcagcttcaacctcctgggctcaagcgatcctctcacctcagcctcccaagtagatggaactacaggcacatgccactaacttttttcttattttttgtagaggcagggtcttaccatgtagcccaagctagtcttcctaatttctaaccagccaagctatgctcagtatgttcctttaaggaagtgatctgaagtttaagtaagttaagtttttcttgaaaacccatggaaattgggcactgtggctcacgcctgtaatctcagcactctgggaggcagaggcaggcgaatcacaargtcaagagatcaagaccatcctagccaagatggtgaaatcccatctctactaaaaatacaaaactagctgggcatggtggcccacacttgtagtcccagctactcgggaggctgagacagaagaatcgcctgaacctgggaggcagaggttgcagtgagctgagatcacgccactgcagtccagcctggcgacagagtgagactccatcttaaaaaaaaaaaaaagttaattggactctatcttgatttaggagaaatcaactatggcctttttccttgagctttaaagaccccaacaggtcagtttatactggactgaccctatagatagcatagccttgtggctaataccaggatatctatagtgtaatttccaagattaaactgacctagtgaaaacagtttattgaggaatcatctattacatatggtagtttctctcaaacaaatcatgtttactggggcatcctgtttctctaagctcagagttctgagcttagacccactgaagtctaagaatttcccttaagactcatgcattaattgactccttgtgttctgtatcacattccttagctcacaattgttttattattcaccttaactattagtatatacatagcacttacggataaagattctacagaatacagtacagttctgagtcccctttcctaactggaggtttttcagtcctgctatgaggtgatacttatttcccatgctactcaagttaatytaccagagttctagatatttgtccattcaggaccattttaggactccatgctaaagggtcagataatgaggtaaaggtcaaggtggttggatttttgactacaagggtagtagagtcttgggcagcctaagtcttgaccgtttgttagggaataatgactataagcctggaactgcccaccctgccgtgtacttgcaggaatacaagaaagcaggtcacctttcaagaaaacctggctttatggattatgcatgaagtcagtctcttcctggtacttttctttcagcctcattagtaatccccttcccccatgctattcactccatgtgattcctcagcttcagaaatagaccctctgtttagaatttttggcaaatgctttctggtttccacaggtggaagctggaacgcagtcccaagtgtcaatggcagaacacagayacctgaatccagttccacctttcctgtgtatcctcttccacttatcttacttccccttcatgttgaaccaacgttaataggtgcaaggtaaggaggactgggttgaagctgctagtaaaggcttccttttcagactagaagctagtaggacagaaacaggtaccatgcaaagagcaaagccattagctggtgattggcaaatggcgccagaaggaaataagggagtattgctaagagtatcagcagaagctagacatacaggttttagcaaaagtattttggtaaacacaaggactagaggaagcgggagggtgggggggggatgaaggcaaaagacacattaatgcagtcttcaaggagctaagaccttgatataggatgagggcagagaggaagggatgtctttggagaaacttttgatgtcttgcaggcacgagatgagttcacaagcaatcagtgctggaaggatgtgcaaaataaaagttaagagaagctgaggatatagaaggcatcctgaaagtaaaacagctgaggaccacaaagcatatcatggaaaatctgttaagcaggggaggtcaggtaggagaggaaagaatagtccctcccaaaggaagcagttaaataagtctgtgggaggtcagtggtaaaaggaagtgggaatgaagtgaacagagagtgcagctaggccttcccctaggagatagctactgagtgtcttttaagccagactctattaacagggaagggaagtgggaggtccattggcctttgtgaactatgagcataaacacaaaccaagaatgacgataacttacagggttaaattctggttcttcaataattctattccctttaccaacaattgattcaaaaatagacatgtgacccaattttaggccacgagacaacaaactgggtggcttctggaaaacagcttcccaaaaaggtaagaccaagttcccttccatttcagccgcttaagttagcactttctgctaaatgcagctaaacgtgttctaactagttaaatggcacagaacaatggatctgtttacttgtaataaagtcaggaaagaaacatggaatatgtaaaagcacaggaaattcaaatcatgctatgacagccaaaccagtaaagtcttagagttaatgaggagaaagcctttagctgtacctccacagtggccataccctaggcagcattcccaataccaaacatacccctctcccagaactgctaagtctaagcccagaggagaaagggaaaggtagggtaattctctcctcaaggagaccaggggtccctggaccaagccatggggagggtgctaaatgatggacacaaagcctattcacagaacatcctgaggccttaggatgaactggatttcagcaaccttctctccccaacattctggcagtgctaaatgcttgctcaatgaaagtgaattttggcaagaagagtccccagaaacccaatatgttctggctggagaacaaaccttcctggaaatcccgtagctcagaaagccaatgtttccctgttcccctgcagggttggggcaggctctagaccacggcctctatcatgaatgcaccagtggtatcaaggccgatattctgaaaagtaactagcataccaggcttcaggagcttaccttccaggtctggggacagtgacaagcccaagctccaggaagactatcaaagggaaacaactgctattagggcagcaggagaaacaagcactggagagaggctgagtatgtgaataatcccacactgtgatcactcatgacctgctaaaagctctggcttgcctcatttgaagaaataatcaaattctgtcttgctgcaaacctattcttcctgattttctcagggactactccatccatactgaaataatgtttgacttcttcccaagagcaagttagttaacaagtttaagatttctcccccatacttacatgtccataccctcccttctgcccatattctttaattatttaatttttatttcttggagacagggtctcactctgtcacccaggctggagtgcagtggcccatcttagctcactgcagcctggacctcccaggctcaagcagtcctcacctcagcctcccgaacagctgggactgcaggcatgcaccaccatgcccacctaattttttaaatttttttgtagagattgggcctcgctatgttgtccaggctggtctcgaactcctgagctcaggcgatcttcctgccttgacctcccaaagtgctgggattacaggtgtgagctactgggcccagccccctccgtccatattgttacccaccacaccaagattttcatcaaccagtttcacataatcagagcaatccccttaaattcctatattcctagtcccccaaatatctgattatgtccttagcatcctctcaagtagtcctgacaccaagcctcctcctaaaccgcccacctccatatatacacatatgtgaacacacaaacctgctttgatcacaccagttgcctcacttgcaatgcaccttcgcccaagttattggctgaagccaggactttcatggggattcaagcagaaagtctgggttatgggaaagaaggcatttagttggccgggcacggtggctcacacctgtaatcccagcactctgggaggctgaggcaggcggatcacctgaggtcaggaattcaagaccagcctgaccaacatggagaaaccccatctctactaaaaatacaaaattagcggggcatggtggtacctgcctgtaatcccagctaatcaggaggctgacacaggagaatcgcttgaacccgggaggcggaggttgcggtgagccgagatcatgccattgcactccagcctgggcagcaagagcgaaactccatctcaaaaaaaaaaaaagaaaaagaaaaagaaaaaagcattttagtggcccaggtggcaacatagttcagctcaacattcaacccaacactgatgatgtacagctgtgctctgcatagggcagacagcccagtaaaaggctcggtgcaacaaaagccaagagtcattgagtacttacaaattgcttagcacagtatttgacatataagtaccatctccctccattactaacaatcaccaccgcagaaagtaagtgctattactatccccatgttacatgaggaaactgaggctcataaaggttgggtaatttgttcagggctccacagctaactagaggtggacctgcaatttcaaaccctgatctgcctggtcggagtacttaattacatgatctcccaaaataggttagccttgcggggagtgatcagttaacttacataaagtccttcctctctccagtatcatgtgggaaagactacttgaaaggactgaaagccatatctagtttggaaggggttcccataagtaaacatcaagtaagatgcagcatgtcatatttttatccatttcacactcaagatgaagttcccaaggatcccttctgtagctgcttcaccgtatatacccttcctcattcagcccatcccaaaacaaattctgacaatgacacatgagctgcatgtagctgaccagcctaccagatcttttatgcagttcgacatacaaggtgacaccaaggtaagacaaatgaagttccagtttgggtgcctccatctccctcccctggatcctgatccagtgactgccaaaaccagaaagaactggggtagggtgcttgatcatggggaacgctgttgtggttcgtccggcagatgggaaaagggaaaggtttcacttcttcacaatttgaatgacatcctcatcctccaacgtatggtctttacccactttctgaggattgtgtttcacagagagaccccagaccagagcactgcatggaagggaaaaagaacagtcagtgtaaataataacctagcttctgccctatttgcctggatgccacccttctgctcagatttagtatcatacccttaagaaccatagacctacaaaagctttatcttccctagcagcatgagacactgaagccttaacataaaagccggtaaagacttctggaagttgtgtggttcctcttattgcagaaagtcaaagacaaaaaacatgtttagtataaagagcctagtttaaaattaaaagaaagcatggatttgttatagagaaatactctgggccgggcgcaggggctcatgcctgtaatcccaccactttgggaggccgaagggtgtggatcacctgagatcaggcgttcaagaaaagcctggccaacatggtgaaaccccgtctccactaaaaatacaaaaattagctgggcatggtggcgggtgcctgtaatcccaactactcgggaggctgaggcagaagaatggcttgaacccgggaggcggaggttgcagtgagccaagatcatgccgttgcactccaggttgggcaacgagcgaaactccgcctcaaaaaaaaaaaaaaaaatccgtctttaatcttcatagagaaataccctgaaaatttcagactgattcttacagatacaatatcacttatagactgttagagaatacctgtttttgctgggtttcctgaaaccatcagtgggtactgacaagaaattagggcctccctcttcagccatgccaggaaaatcttcctccctaaccagaaactgtaattgatatgtcctcccgatttactggaatatgtgaaggtaatttatatccatgggcctccaaacttaagaatatgttgtgctagagatgaaaactggtgaataagacaccgagacctgcctcacagagactaagaactatgtaccaagagtaaaaaaggtggccatattgttgttatattatcattgagtcaaaacctctttaaaaaatctatattccaggccgggcacggtggctcatgcctctaattccagcactttgggaggctgaggcgggcggatcacgaggtcaggagttcgagaccagcatggctaatatggtgaaaccctgtctctactaaaaatacaaaaattaggccaggcgtggtggctcacacctgtaattccagcatttgggaggcccaggcgggcggatcatgaggtcaagagatcgagaccatcctggccaacatggtgaaaccccatctctactaaaaatacaaaaaaattagctgggcgtggtagcgcgcacctatagtcccagctacttgggaggctgaggcaggagaatcgcttgaacctgggaggcggaggttgcagtgagccaagatcgcgccactgcactccagcctgggcgactgagtctctctcagtctcaaaaaaaaaaaaaacacacacacacacaaaaaacacaaagcacagagtaagggatcagtgtggtcaaggacatgaaggaaatggaaaagggataaatgttataattaattaggcctgaagatgaaagttttctattattaagagagttgtaccagtctgggcagcatggagaaaccctagctctagaaaaatagaaaaaattagccaggcatggtggtttgcacctgtagtcccagctatttaaaaggctaaggtgggaggatcgcttgagcccaggagttcaaggctgcagtgaaccacgattacgccactggactccagcctgggcggcaacagaacaagaccctatctcaaaaaaaccaaaaagatagttgtgcaataattaaagaaaaaaaaaaaaacagtaaaataagagcaaataaaatcctgtttgcttcgatatgtttcttatctgagacatttttctcccctttttaattccctggtaaatttaaagttctgaaggttttgaacaatgttttgccaccatagaaggaaagagctatatataaatctacaaagtttgaaaaaggacagtgtttaactttttacaaaagtcatctttaccagttaaagtaactgccaaagcataatgttttgactgtggtggaaattagcacttacatgtggaatatagttgttttatatgtaaggatctgaaggtcaataaaggacttcactctctcagtactcttaggatcagaaacaagttttttctttctttggttggttttttgaggaagggtctcagtccgctgcccaggctagagtacagggggcatgatcattatcttggctcgctgcaatgtcaacctcctgggctcaagcaatcctacctctgcctcctgagtagctgggaccacaggtgcctggtaccatgtctggctaatttttttatttttgataaaaacggggtctcactatattgcctagtctgatctcacactcctggactcaagcagtcctcctgccttggccacaaagtgctgagattacaggcgtgagctaccacacctagccctattttcttcttttgtttttaaccctttttcctattcagaaaaaaaagtgcggcgggcacagtggctcacgcctgtaatcccaacactttggggggccgaggtggacagatcacgaggtcaggagatcgagaccatcctggctaacatggtgaaaccccgtctctactaaaaatacaaaaaattagccaggcatggtggcaggcacctgtagttccagctactcgggaggctgaggcaggagaatggcatgaacccgggaggcggagcttgcagtgagccgagatcgcaccactgcactcagcctgggcaacagagcaagactccgtctcaaaaaaaaaaaaaaaaaagcgggggggggggaaggccgggtgcagtggctagtgtctgtaatcccagcactttggg

SEQ ID NO: 98217 - DNA, 15245 bp, Homo sapiens
tagctgctatggaaaacagtccggaggctcctcaaaaaaaattaaaaatagaactaccgtacaagctagcaatcctgcttctgggtatacatccaaaagaattgccagcagtgtctcaaatagatatttgaatacttatgttgatagcgcactattcacaataaccaggaggtggaagcaacctaaatgtccatcagtgcatgaatggataaacaaaatgtggcacatacatacaatggaatatttttcaaccttaaaagaaggaaatcctgtcacatgctgtaacatggacgaaccttgaggatgttacgctaagttaaataaaccagccacaaaaagacaaatattgtcattacacttacatgaggtatctgaagtagtcaaattcatagaaacagaaagtagaatggttgttactaggtgtcatggggagagggatagagggaattgtttaatgggaacagaattgttgggaaaagtatggtgaagtgggcactcagagtactgagaggaatgtaaattgatataattctgtagggcaattctgcaataagtatattttaatgtaaagtcatgtatactttaatattttgaacaatgatttttatattttcaataaatatttttaatctctttttaaaagtctaatcctctgacctcacaattcccctatcccaaagaaacattttgacaggtaggcaaaattatgttttcaaaaatgttcattgcaggaatgtttatagtaatgaccaaaaaaaccacaaacaaacaaaaaacaaaacaaaaacccagactattccagattaggggttgagtaaagatttatgcacactggaataccagccattgaaaataatgatgtagatacactagaaaacattcccaatatactggcaaatgaggaaaataagttataaagcagttggagaaaaaaactgtttatttccatgtggaaaagtacagaaggacatataccaaaatgcaaacattactggtaaaaatttgggataacagattttttcttctgatttttctataatgacaggtttccagcacacgttttaacaatgcataaaataaaacaactcaatgattcccattttacagtagagtctgtcccatatgttcatgacttctcagctggggtcagaaaaaatctctacaaaacacagcaagctgtgatcaatttctcaactgtgtattgtgaataggcaagaggagtcaaaatataatgggaactccgaacagttcatggaattaaaagataaaaacataaaccttatttctcaacataagttccaacaagttcaagacactttagtaagctatgacacaagccatttagtccatccctaaagaactgagggtcctggaaatgtaatcatgccaaggcagtcttttttacatttttaacagaagaaaaatgggtgcccaatcaggatttttaagattaggaaacaaagccggctgggagcggtggctcacgcctgtaatgccagcactttgggaggctgaggtgggtggatcacgaggtcaggcgatcgagaccatcctggctaacacagtgaaaccccatcagtgggtttagtctctactaaaaatacaaaaaattagctgagtgtggtggcgggtgcctgcagtcccagctacttgggaggctgaggcaggagaatggcgtgaacccgggaggcagagcttgcagtgagcggagatcgtgccactgcactccagcctgggtgacagagcgagactccgtctcgaaaaaaaaaaaaaaaagattgggaaacaaaataaattagaaggagcctaatgatccatgaatgcctaatgatttcccatcaaaacccttgcaaaattgcctttgtttgatgagaacgatgaacaggagcattgtcatggtggagaagaactctctagtaaagctttcttgggtgtttttctgctaaagctttgcctaattttcttaaaacaaagcagatgttaccattctttgaccctccagaaagtcaataaagaaaatgccttgagcatctcaaaaaactgttgccatgacatttgctcttgacctgtctgttcacttttgctttgagtggaccacttccacatctttgtagccaccgttttgattgtgctttatcttcaggatcatactggtaaagccatgtttcatttcctgttacaattctttgaagaaatgcttcaggatcttgatcccacatatttaaattttccactgcaagttctgctcttgcatgcagctgatctgggcactacacttttggctcccattgaatggaaagtttgctcaactttaattctgtaaactgaaccaaatgatatgtgtactgtattggttattgtttctgctgtcaatcatgaattctcttcaattagggcatgaacaagatgaattttttcctcacaaattaatgtggatggtctgccaccacaggcttcatctatttatttatttatttttgagacagagtctcactcaggagtgtcacccaggctggaatgcagtagcgagatctccactcactgcaacctccacctcctgagttcaagcaattctcctgcctcagcctcccaagtagctgggattacaggaacccaccaccacccccaactaatttttgtatttttagtagagatggggtttcatcattttggccaggctggtctcaaactcctgacctcaggtgatccacctgcctcagcctcccaaagtgctgggattacaggcgtgagccaccatgcccggcctatttatttatttcagacagagtcttacactctgtcacccaggctgaaatgcagtggcatgatcttggctcattgcaacctccgcctcctgggttcaagtgattctcctgcctcagcctcctgagtagccgggattacaggcacgcaccaccacgcctggctaatttttttatttttagtagagacggggtttcatcatgttggtcaggctggtctcgaactcctgactttgtgatctgcccaccttggcctcccaaagtgctgggatgacaggcatgagccaccatgcccagcctatttattttttgagacagagttttgctcttgttgaccaggctggaatgcaatggtgtgatcttggctcattgcaacctcagcctctcaggttcaagcgattctcctgcttcggcctcccgagtagttgggattacaggtatcaccaccacacccagctaattttttgtatttttagtagagatggggtttcctcatgttggccaagctggtctggaactcctgacctcaagcaatacacccactttggcctcccaaagtgctgggattacaaccgtgagccactgtgccctgcccaggcttcgtctttaacatcatcttgtcccttctcttttttgagacagggtctcactctgtcacccaggctggaggctggagtgcagtggcacaatctcagctcactgtaacctccacctcccaggttcaagtgattctcccacctcagcctcccaaatagctaggactacaggcacatgccaccacatccaactattttttgtatttttagtagagatagggttttactatgttgcccaggctggtcttaaactcctggactcaagtgatccaccgacctcagcctcccaaagttctgggattacaggcatcagccactgcacccagcccttgttccttctttttaaattttatttatttacttattttgatatggagtcttgctgtgatgcccaggctggagtgcagtcacgtgatctcagctcactgcaacctccacctcctgggttcccacaattctcctgccttagcctcccaaatagctgggattacaggcatgtgccaccacgcctggcaaattttacgtattcttagtagagacagggtttcaccacgttggccagctggtctcaaactcctgacctcaagtgacccacctgcctcggcctcccaaagtactgggactgcaggcgtgagccatcgcgactggcctcttgtcccttcttattatccatttgtaaactgctgatttatttgggccatttccccataaacttttcctaaagcatcaatggtttcaccattcttccacccaaggtttaccataaatttgatgtttgttcttccttcaatttaagcagtatttatgttgctctgataggagccctttttcaaattgatatcttatctttcttagtgcctcaaactaaatcctgttcagtcatgttataacaagttagtatgagttaattttggtggaaaaataatctggaatccatgcatagttttttcgcaacccgtattttccatgatctttttgaagactcctcatagaatcaatcttctcctgctcaagtttttttagtttcttttttttaataacatcttttatttgtatacaaagtacaaacttgctttattcggatttttctttttttaaaaaaaatttatttttagtcaacttactcccttttatttatcagcagtttgctctgacagaataaattacaaactgttgtttcgattaatccttttaatcaccatgtcaggcacacaggttggaggatattagctcccattttacaaaaactggaaacactgtacccacatttagtgtaagacagagctaggatataagccttgggcttccatagtcacaattgcttttttccataactttgtaatacatcatttttaagcaatctgatttcacaatgttttacagtataagagtaacatctatagcatctcttcttggcaggttacctctggagagaaccaatgtaattacctcataagctggcacttttttttttttttttgagatggagtttcactcttgttgcccaggctggagtgcaatggcgtgatctctgttcactgtaacctctgcctccttgggttcaagcgattctcctgcctcagtctcccaagcagctgggattacaggcatgtgccaccatgcctggctatagtttcttttttttcttttcttaaattttattctgtgagatgaggtcccactattttgctcagcgtggtcttgaactcctggcctcaagtgatcctcccaccttagcctctcgaataggtgggactacagatgtgcaccactatctctggttctttagtttctatccaggaagctagggtactaataggatcttctttggtgagaagaaaacagagaaagagtccttttctttctagagggacagctggagtacaggagtttatgcacagtacctaagttcaaatccaaatccaagctctcccacatgcgctttaagcaaatgacttctttttgttttcccacctgtgaaatgagggaaaacagtactgatcttcactgtagatagactgagtttttttattttgttttgttttgagacagagcctcaccctgttacccaggctggagtgtagtgtcatgatctcagctcactacaacctcccctctgcctcccaggctcaagcaattctcgtgcctcagcctcctgagtcgctgggattacagacgtgcaccaccatgcctggctaatttttgtatttttagtagggacaggggtttcaccatgttggccaggctggtcttgaactcctggtctcatgtaatccactggccttggcctcccaaagtgctgggattacaggcgtgagccaccacgcctggctggtaaagtggttttaactacagtataaagctcttagaactaagaacagtacttgaaatagtgttcgataaatgctattaagtattcaggagcacaaaatggatcccataaaggtaattcaaaggaccacaaaaatcagtgtttctgtgttttgttttttaaaacatgcttccttccctttctccaacacacaagcagtgaagtagagagacacccatagcccgagtgagaagacacccaaacaccaaattagaaatgacttcacaatcagccccggagtcaaagccgattctcggaccagtcccatcccacagcagcctgcctcctctttcgacatcacagaggctgctgtgtccttcgccaaggactccctggcaggtggagtggccgcagccatctccaagatggcggtagcacccatcgagcgggtcaagctgctgctacaggtgcagcatgccagcaagcagatcactgcagataagcaatacaagggcattagagactgcatggtctgtattcccaaggagcacggagtcctgtcctggtgcggtaacctggccagtgtcatcagatacttcccccacccaggctcttaacttcaccttcaaagataaatacaagcagatcttcctggatggtgtggacaagagatcccagttttggcgctactttgcagggaatctggcatcaggcggtgccactggggccacatccttgtgttttgtgtaccctcttgattttgcccatactcgtgtagcagctgatgtgggcaaagctggagctgaaagggaattgcgaggtttcggtgactgcctagttaagatctacaaatctgaygggattaagagcctgtaccaaggctttaacgtgtctgtgcagggtattatctaccgagctgcctgctgcctacttcggtaactatgacactgcaaagggaatgcttccggatcccaagaacactcacattgtcatcagttggatgatgcacagactgtcactgccgttgctgggttgacttcctattcatttaacaccatttgctgctacatgatgatgcagtcaggatgcaaaggaactgacatcatgtacacaggcacatttgactgctggaggaagattactcatgatgaaggaagcaaagctgttttcaagggtgcatggtccagtgttctcagaggcatgggtggtgcttttgtgcttgtcttgtatgatgaaaccaagaagtacatgtaagttatttcctaagatttttccccctttgaaaaggcatgttgtattatatgacatatcttgagcattctttttttttgagacggagtctccctctattgcccagggtggagtgcagtggcacaatctcggctcactgcaacctccaccttttggtggagcaattctcctgcctcaaccttttgrttcaccttttgggtgattcaccttttgggttcaagcaattctcctgcctcaacctcctgagtagctgggactacagacatccgccaccactcccggctgtttttttttttttttgtatttttagtagagatggggtttcaacatattggccaggctgctcctgaactcccgatcttgtgatccacccacctgggcctcccaaagtgctgggattacaggcgtgggccaccgcgcccggctatcttgagcattcttgacagactcctcgctgtcaatttatcagtggcaactattcactggttggaaatgggaagcaataataktcatctgaccagttttctcttaaagccatttctatgatgatgatgatgatgggactcaattatgttttttatttcagtcactcctaataaataacaaatttggagaaataaaaatatcttaagaaaagaaaaaagaaaagaaaagaaaggcttcacaccatggaatgacaagtgctcaaatggctctcagtaagtgctcacggggacaccactgtcagagtggtgagcaatcatctaccacaaaatggaacaaagcagcagaggtacgtaggaagcaggtgagaacatacaacctctaaggcccatataaatctgtcaagaaaactttctggaggaaggaaagatagaagaaagacctggatatcagcatttggtaacgtctacttcgatcttcctgacaactacattcaaactgacytgagtgtgctggccccaagcacatcatccagcttgagtttcaatgctggttgggagaaaaggaaattgagggcaagtcagagcccagaaaggagcgcaatttagaactgcacagcgggggagactgagtttgagtgtaggaaacgggaaagggggcgtgtggggtaaagaggtgagcgcagtggagtcargccttagtgaacaagtgtgcttgaaggtggagatgggcacccctctggctgagtctgctccagtagagagctcaggggccagcagcaggcaccgcaaggagcaaagcaactggtgtaagccccacagcttcctgcgaccaacagtgctttgttgtgcccaggcatctgttcagtcccatcttttattttaagacaggatctggctctgttacccaggctggagtgcagtggtacaatctgagctcactgcagcccaaactcctgggttcaagcgatcctcttaccatcgcctcccaagcagctgggattatgggtgcacaccaccatggcccactaattttctactttttgtagagatggggtctcactatgttgcccagtcttgtctcaaactcctgggccacctcagcttcccaaactgttgggataagaggcatgagccactgcacctggcctcaattttttcaattttgtttttaaaagcagacatctccctggttggagcaaggaggaaacatggctttagaaagtttccaggtccaaggagaagccccacaacagtttgagatctttccagaatgatccacactcgacctcctcatccctcttaccaaagagcgacaccttgttcgtggaagtaggaggagatacacacccagtacctgtcctcatccaacaaagtcgcaggcacccaagggcagccacgctgccaccgaasgcccccggctgctcacaaccgccggtcagctccggcctctcttcgaaggacacacgcgtctcgcaccccctccccgccccgccctgaggagacatgcgtctgggccccgcgccttgaaaaggcgcattcccacccccacccctcaaacgcgcgaggccacgcgttccggcctccgccacctccacatgccggaacaccagtgaggggcgcgcgctcccaaaggtcgggggcggagctaagagcgccgcgcccaaaaaaggcggcaaagtccctgactcgctgagagtttgcgagccgccatgtctatctcattcgtctcctctcctccgacagcacgccgtgcttcccctcaggcacctttcaccgttagggatgagggctccgcggcggttctcggtgtggctctgattcaccgccatcttgcttcgggcctcctgccgccccgtagatggaaaggggcgggacctgcgccgagctgtggggcgcggttctgaaggggagggcggagattatgacgtaaggaggaggaggaggaggagcgagaccgggtcacgtggtggggcagtgcccggggagcggggcggagtcagggtagaggcccccgccgagaaaggggagaaagaggcgggccctgagaattggctcgagcgcgaaggggtgagtgataggtgagtggcctcccgacctcacctgcccccttagccccctgcctttaggtatggacttgggttggtcctgtcaggaatgatctcagctcactgcacctccaacctcccatgctcaagccatcttcccacctcaacctcccatccattactcactttggttatgaaacactagaaaataatgactgaggcccgacctgacgccaactgaagatgaactgacctcacaaagtgttttcatctctaatatctgtggctatttcttaccaagagagtctcaccctccacacatgggtgagatgacataatggctgatttggtcaaggagcacaaataagacaggccaggcagttactgttcaaacagcaatgtttagttgtacaacacataaagtctagcaacaattacaggaccagtttgagtgtctgtttgcttgttttcaattgggaaatttaactgtaatgtcaccgtaagattggctgggactggtaacatttaagaaacgggttgttcttgcatcccctaggcgtgggcctcttgctccatcaggacttggttgtagatgaatggcccacaagtcaccagcctttgagcaagttgtgtccaggtggagacaggaagagggtgggcaaaggggaattctataaagacacagtgtgtggggcagtggcagtcaacattcgcaaacattcatgcatctgatggggggctttgccctcccttgggtattttccattagcctacagtgaccacctgtggtcaggctaattcattactcacattaatggggaagggggttgggggtaggagtaggtagggtaggtgggaagagatccctcttattgctgagtggacagaagggtgctagtttttccttagcgtgtacatattgtgggtttctgggggtttgtgtgtgtgtttagtttttgtttgtttgtttggacagaagaaagtcaactccagcaatgtcttcttaggaaaaccactcttcctcagtggctgcgttatgaggtggggaggatgtacaaccgcactctgggacagccacaagtggtgattttttaaaaagtgatcctagcccttgctccccaacatctgtagtgacccaccctcatgaatatctttaagtaatgaaggagacacccttgtcccactttggggctcacacagctgatctcaatgaatctagtaagcagaaaaattgctttcttgaccctttaaggaagccaagagtagctcatgcagatgaatgggtagggagcaatgccattgcccttagagatggttacaagtagctgggatgggcttacaagggcagaaggagctcttgatgagttctttcaccctgcagatgggctaggaccggctgacgcagatgatgcagtagggctgtactggcagaaccccactccactgggaggagaggagtggtttggataaatggaggatgcaactggcctaaagaggcagctggcccctcccacctactgagggctgagaggggctgtggtggtgagctggacgagcacagcactaaaaagggcttggccctgcagcaataacagctgagaggaatggagtgagaagcagcgcttgaaatggccttcattcagcagtggggcagggggtggctggcacaggtggaaggacagtgcccaggaggccttctccctgcaggggggttgagaacggttgagggtgtggagaccagcagctggcagcagacatataaaataccttctccagggaggctcagatcatggttcaggggtgccaggcaccattcctactcagcctttccaacgcccacctcccatgcccatagatcttcccctgctggtccaaggtctccatacaggactgcttctacagtagccaaggatccctgttctgttgaaatgtataacctctgggctgtagcgctgctgctgttctgtcctgacaggtgcctaccctgtaactttgtgagcaagggaggatgagggctgggttggcagcctccaggaaagaccgagaccataggttggggtcactggtgacctgatcaccgcccccctttctcctggtccattgaatcttgggtcttgagtctatgttttttttcctagcacctgagtgataaaagactgggattataagtgctgggattcatagaggaccagtgaaacacctaggctgaaccaggagatgggacagaaggttgtatgaggttattgtaaacagtttcacttagtgttttcccttccctaaggctaaactgtttccctggccccgaatttcatgaatcttacagattaaaggaaaagagtaacttacttgtacaacaagcaggggaaatatatgcattaataaatacagggcttcagggaaaggcaagaaaagcctaaatgtatgacggtgggtatcattgggaatgtctacaggagtcaggaggagagggaattagggaaaagtagagaaagacagacataaatatgattagcttcagcacaaaagtgatggggaatagaaaagagaggtcaagtatgtatgaagcaaatggagcaacagagaagcctgcttagaagggagagaagtctgacggagaaaacggaggtgtggtcaaaaatttgtctttgaagccaaattactaagaaagacaaattatgtatattgtttctgatacttctttagaattagttctagaacctgatgtcccaataaaaggttgtctcacatgactagcatgtgtgcttcctttaactggacactgggaactgcataactcactgtgtttccctctttacattggctgcctgtgagctcagggcctgttcaggtgcttgactacagaaactttctttcctattcctttctttgacccagatttctctggcaatctgtttgtactgtcctgtagttttgtgattttatgtgaaaggcagtctaaagtcatttctggaagtagactgggcataaatgctaaatataggaatgaacctaaagtagattcatctaaaaggaagtgagagatgtcagagacacgcaggagagggagagaaagcaatgtatgagggaaggagggaaagggagaaagaagacaaagtcggaagcagagacaggcagtggcctggcagcagaggccagttgagtggagagcagcagtaggctctggtgacaggtggtagctttgtgacactgaacacgacacagactgaagggtggagctccatttgtaggcactgatgctttctgcaagaacccagctctggcctacttctctgccttctcatggccttccttttcccaggaagccccagccttacccccagaccacccccaacttacaggagggttgtcctgaactccctgccccctactcaggtctagctccactgccatctgtccttggagaatctctgtagccccagtttgtgtgcaggttccgagagaagagttgcctgtggctcacctgctcccagcacttttaaatgaaacctcccccagatctcctgagtgaggcaaacagctttgttttgggacacaaggaaaggagacagataatggacaggcatggaggagccaaacttacaagggactctccagggagggcagtgaaaatacctcacccctgcatgcacacacacaggctctctcgctctctctctgtcacacacacacacacacacacacacacacacacacacacagacaagatgctccacaaataccagacaggcctgtgggacagagttgagaggaagaaggtggttggtggtggtatttgggatgtgtgtgtgtgaagtgggtatgtgtgatgacacagagaagtggtcgtcatgggttactgtcgtggctttcctctgtgtccacgctcaccggagggaggcctccattgtcattgagccgcttggccctgtaagtctcatagtggatgttgtgtgtcacttccttgaggtcctggaggtgggtcctagaggacacagggtgagaagaagagggctgcaattaggggcaggaagaggaggcggtgacacacatcacttcgagggactggacccagtgaatgggaaccactcccaggagctaaggattcttctacagcaccttccattttgcaacaggagctggaactggggcagaaagctctgtcagagagacctggagatgcaggaggtgaatctgaacagatagaccctgaccccaaataattcaacctgctgtctggacagctggaggggagacatcttacctgatgacaaagtctcgaagcagggcaaactcacagtggttgaggttttccactatgaacaaaacaaaacaaagcaaaacaggtagtcagttcattaatacagcaacacccaggaggtgagcttctgtttgggtcacggaggcatttaggagaaagctatgggacaggtcattttttgtaacccttccagagatttgctcacttgggtgtactggatttgattcattgaacaaatattaagcagctacaatgagcacgacatccttctagacgctgtggcataatagccaagagggactataatttttaccattttatagaagagaaaactaataccaagtctgagaaactggccaaggcctaagatacacttcccattcttcagaagcttataatccggttggaagtaacacagagaaaataataattgagccattttaaaaaggtcatgcactacatgacaaatccaattcaacatatattgaatacctagtatttgcaaatcattggccaagcactgttggaacagaatgaggattaagacatggggccaggcgctgtggctcatgcctgtaatcccagcactttgggaggccaaggtaggaggattactggagcccaggagtttgagatcagcctgggtaacatagtgagacccccacctctattaaaaataaaaataaaatcaccaggcatggtggttcacatctgtaatcccagcactttgggaggccaaggcaaatggatcacctgaggtcaggagttcaagaccagcctgaccaacatgacaaaactccatctctacgaaaaatacaaaaattagctgggctaatttttggggataaataaaaaatacaaaaatcggggtccgcacctgtagtcccagatacttgggagactaaggcagaagaattacttgaacctgggaggcagaggttgcagtgagctgagattgcgccactgcactccagcctggatgacagagtgagactccgtctcaaaaaaaaaaaaaatctgagtctgaaatcaagtttcaccactaacaagttatgtgctttggacaaggcttttaacctgagcttccggtgctttggtagcttatactctgagaacaggagcacccgctctcctcccttcatagggttatcatattgaatgaaatcattaaagtgattctttgaccactttcagaatcatcaagacccgcccagggtcacatccattcataataaaatggaaatggcaacacctgaacaaccctccggcagtttgtcagatcacatcccccttcctatgaaaacctttctccagtttttccaggccttactaatctctccatgttctgaactcctttgatgcgctaagtcagtgccacccagtcaggtgctaaatcagtctcttgttactcctgcctgtgagcatcgtcttctcaatgagactgtaagctccttatgggcagaatctggctggcattcatttcatatgtcctgagacagtgccttgatctatagatgcttaataaatggtgactggataactgatcagcaaccagttcttccagaagatgcagtgaattaccttcgatgatccccca

SEQ ID NO: 98218 - DNA, 35052 bp, Homo sapiens
aattaggcggggcacagtggctcatgcctgtaatcccaacactttgggagaccaaggcgggaggatcacttgagatcaggagttcgagaccagcctagccaacatggttaaaccctgtgtctactgaaaatacaaacattaggctgggcgcagtggctcacacctgtaatcccagcactttgggaggccgaggcgcgcggatcacgaggtcaggaggtcgagaccatcctagctaatacggtgaaaccctgtctctgctaaaaatacaaaaaaaaattagctgggcgtggtggtggacacctgcagtcccagctactcgggaggctgaggcaggggaatggcatgaacccgggagggggagcttccagtgagccgagatcacgccactgcactccagcctaggtgacagagtgagactcggtctcaaaaaaaaaaaacaaaaaaaaaaacaaacaaacattagccaggtgtggtggtgcccacctgtaatcccagctaatcaggaggctgaggcaggagaatcacttgaacctgggaggcagaggttgcagggagcagagatcacaccactactctccagcctgggccacagagcaagactctgtctcaaaaaaataaataaaaaataaaaaattattttggctgggcacagtggctcacgcctgtaatcccagcactttgggaggccgaggcatgtggatcacgaggacaagagattgagaccatcctggacaacatggtgaaaccccatctctactaaaaatacaaaaattagctgcgtgtagtggcgcatgcctgtaatcccagctactatggaggctgaggtgggagaatcgcttgaatctgggacgcagaggctgcagtgagccaagatcgcgccactgcactccagcctgcgtgacagagcgagaacccgtctcaaaaaaaataaaaataaataaatggccaagcacggtggctcatgcctgtaatcccagcaccttcagaggccgagacatgtggatcacaaggtcaagagattgagaccatcctggacaacatggtgaaaccccatctctactaaaaatacaaaaaattagctgtgtgtggtggcgcatgcctataattccagctactagggaggctgaggcaggagaatcacttgaacttgggaggcagagattgcagcgagccgagattagtcactgcactccagcctggcgacagagattccatctcaaataaaaaaataaaattattgaattaattattttagaaacagtcttgttctctcacacaggctggaatgcagtggcgcaatcatagctcactgcagccttgaacttctgggcttgagcgatcctctgccgtggcctcccaaagtattgggattacaggcatgagccaccttgcctggcctgccgattgacctcttttggtgtagattaacagagtcctctgtccttcctactaaggacctagagaggcttaatctgattcaggttttctttcttcagcatgactttatcataagtaacatattttttcctaaaaaggtatataatgtctggtcatctccaagtagctgggattacgggcatgtgccactatgcccagcaaattttctgtatttagtagacatggggtttcatcatgttggtcaggctggtctcaaactcccgacctcaggtgatagcctgcctcagcctcctactcccaaagtgctgagattacagccgtgagccactgtgcatggcctgctgcttcttaataagtttaattagctgtctcctggagaacaaaatggcaatgtgtgtcaagaaccttaaacatgcgatgacgcgatcttggctcaccgcaacctccacctcccgtgttcaagcgattctcccgcctcagcctcctgagtagcaggattacaggcatgcgctaccacgcctggcttattttgtatttttagtagagacaggatctcaccatgttggccaggctggtcttgaactcctgacctcaggtgatctgcccaccttggcctccaaaaatgctgggattacaggcatgagccaccgtgcctgacctattttattttattttattttatttttgagacggagtctcgctctgtcgcccaggctggagagcagtggcgcaatctcggctcactacaagctccgcctcccgggttcacgccattctcctgcctcagcctcccgagtagctgggactacaagcgcctgccaccacgcctggctatttttttgtatttttagtagacacagggtttcaccgtgtttgccaggatggtctcgatgtcctgacctcgtgagccacccgcctcggcctctcaaagtgctgggattacaggtgtgagccaccgcgcccggccttattttttattttattattatttttttgagacagagtctcactctgtcgcccaggctggagtgcagtgatgcaatctcggctcactgcaagctctgcctcccgggttcacgccattctcctgcctcagcctccagagtagctgggactacaggcgcctgccaccacgcctggctaattttttgtatttttttagtagagacggggtttcaccatgttagtcaggatggtctctatctcccgaccttgtgatccacctgcctcggcctcccaaagtactgggattatagaggtgagccaccgcgcccggcccctattttattttttttgagatagagtttcactctgttgcccagactggagtgcagtgttgcaatctcagctcactgtagcctctgcctccccggttcaagcaattctcgtgcctcagcctcccaagcagctgagactacaagtgcatgccaccacagactcagctaacttttgtattttttagtagagatggggttttgccatgttggccagggtggtctcgaactcctgacctcaagtgatctgcccgcctcagcctcccaaagtgttgggattacaggcgtgagccaccacacccagacaaattacagtatatttattgagattacaagtgtgagccaccacacccggccaaattatggtatatttaaaatgagctataggccacgcacagtggctcacacctgtaattccagcactttgggaggccgaggtgggtgaatcacctaaggccaggagttcaagaccagcctggccaacatggtgaaacactgcctctactaaaaatacaaaaattagccgagtgtggtggcgcacacgcctgtcatcccagctgcttgggaggctgagatgggagaatagcctgaactggggtggcggaggttgcagtgaaccgagattgagtcagtgcactccagcctgggcgacagagcaagactctgtctcaataaataaataaatgtatatgcactatcgttacaatacaagaaatcagataggccaggcgcagtggctcacacttgtaatcccagcactttgggatgctgagtagggcggatcacaaggtcaggagatcaagaccatcctggctaacacagtgaaaccccgtctctactaaaaatacaaaaaactggccgggcgtggtggtgggcgcctatggtcccagctactcgggaggctgaggcaggagaatggcatgaacccgggaggcggagcttgcagtgagccaagatcgcgccactgcactccagcctgggcgacagagcaagactgtctccaaaaaaaaagaaaaagaaatcagatacagtctgggcatggaggctcatgactataaacctagaactttgggaggccaaggcttgggggtatcgcttgaggccaagagtttgagaccagcctgatcaacatagcaagatcctgtctctacaaaaaattaaaaaattattgggagttggcggcacttgtagtcccagctactgaggtagctgaagcaggaggatcacttgagcccgggagtttgaggttacagtgagctacgatgatctcaccactgcactccagcctgtctctattaaaaaattaaaaaatatatatatttcattaggaaataaatattgaaagatacttgaaagaaaaatacaaaaatgtcaaaatgctggtagtggttgtgttagagtggtagattatagcaaatttttttcttttttgtatttcctatgtttctcacttttttttttttcctgagagagtctcattctgtcacccaggctggaatgcagtggcgccatctcggctcactgcaagctccacctcccaggttcgcaccattctcctgcctcagcctcccgagcagctgggactacaggcgaccgccaccacgcccggctaattttttgtattttttttttagtacagacggggtttcaccgtgttaaccaggatggtcttgatctcctgacatcgtgatccgcccgcctcggcctcccaaagtgctgggattacaggcttgagacaccgcgcctggccgtttctcatttttaataaaaatattcaaaatttttctgctcaggagttaaattaaccagtatgaagattacatgtacccctatttctcttcctttgttttatgtgttactgtgttgcctgcacatacactcccaaacgtggaggctatagtgagggaatcaatcactttcctgtaactgtgttgcttgcgtttattctttggttggtgtagttattgcagggtgggggcatttttacactgaggtcctggaatggtaacactactttcctggatgagaagggtctcacctgaaccacttaagatgacaaaaaatacctatggtcatggccatttatcagggaccaaaagatgtcaaactaccagtgtccaaaaaaaacttagggcacactagagtaagatctgcatataagagcctagggtagctctgcgaagttcaaaggaagaaaagaatttcagaattatctgggaggagaagggcaggccatcaaacagcaaagtccatccagcagagataggcagggaaggtctttcttccacacaccgaatggcactacatgctgaagtcacttaccacttgcttcaaggttctcttcttgttcttcctctgcttcttcatcgccctcggttttgtaatatgactcccaccctgacatgttggctactgctcactaggcgaaagacgttaacgtcagtaacaggcaaatttaaatcgaaaaaataccgacctctaggttcttgtgagatctgttctaaaagcttggttagtagtgaggaatgtggacggtaaatcctgctgcctcgaaagctcggcagtcggactgcatgtaaatgcgcatgggggccatcccagtagctgcctcatctcagctatccctcacgtttcagggccggcggcggcccgcggaagccagatcccggaggtcccgcccccgacgccatttagacggtgagggattcccgctccaggattctatgctgactaacggaccccctcgtcctcaataccgcccaaaaacctccccaaattcctcaatcacgcccaatgagatctcaaacgcagacaggcctcaagcgcaggcgggccgcaagcgcaggcgggcctcaaacgcaggcgggcctcaaacgcgaggtgccgcctccttcccgaggaaggagcgtggtctcgagtctgtcgctgctcctcggattcgcacacttaaggctaacgctaaccctctagcaaggctatgggggcgcgcgagaccgaccgagcgaagcgggacgaggccaggcctagctggcgaacaacacaaatggataacggcccgcttacctttggcgcagggaagcgaccaacttggacagaagacgacaatccacgcatgcgcgggccctgtactcggtcccaatcaacgccccctacgtcatcacgcatgtgcgcactatatcgcgtcaggctggcacgcacactccccaaccagcttctacctatgtccctgacgaaagccaacccatcagcgagagccccgcccccttcggcaaagccccgccccttcctacgtcaggactgtaagcacatgcgcaaaagtgcatccctgcccccgccccctcttccgtgtgggscctccctgtcccctctctgtcacctcacagtagtcgttgccggtagcgggtgtgggggcgcgagcagcgcagggcggcctctcccccacccctcagcccgggcccgggctcggtccccccctctccctccgcttcgcactcccgtcgggtacgggaaggtccaagccgctgccgggtgcccgagggccgtcgtggccgccgtcgccacgggtcccaatggagccgccgaatctctatccggtgaagctctacgtgtacgacctgtccaaaggcctggcccggcggctcagccccatcatgctgggtgagggggaaggggccaggtgggcaggagggcgggagccaggccagagggtggcgsctggccgaggtggggagacttgggccacgactcacggggagacacatggccaggaggatggaagaaaagccgagtggagaagagagtggtctgaagtttgggccatctgagccccgctttagcytcgcagataccatcctcacgtttgaattcaaggggaagggatggaggagtcatgcctccaccttgcagggggcttgggcagaaaccgagccctcgagagccccttcgacgagggtgtggggtaaaccagcgctggatcccggcgggttctctgcctcgctcgggtagcccagtgcactcctgcctccttggcgcggtgtaggaaaggtgaggatgcctgccgcgcggtgcccctcgtggtgacagagacactgcggaggtcgggtggctctcggagaaccttgtctcagtgccaaaaggaagctccctttgcagtcccagggataggtgggatgggggagatagagctgcctagggacccagccatcgcccccaggtaggtcaagtcaggataagaggagccccgaactccagaattcaccaagcagtcttctccccacagtttctaagttaattgcttttgctcaaatggcaagaaagcagttttgggggaagtttggatgaggctgtgtgaataaggattagtaaagaaagtatttcggttgtgctccattaaactacttaactggcaggagaaaaaccagccctcattcagtgacgatcacaccttatttcaacttaaatacaggaatgtcttgtgtaacacaggaattgtcaggtttgtaatttcgggtaacaatgagcaggaaagaattccaattattgaaaattgaagctttgacagcatccatttgaatggctagtttttcctggcttctgtggagacactggcgaatgatttagttcatctctgtgagacgagggggcagaaatcaagtaagggaggctacttttgagggcatccttcaatgtccttgagtttctaatatgtcgtagtgaattgaacttaatctcacaaccgtgggtccatgagttgtttctatatttggcttcacatcaaaatcatctagggtgcttgttaaaaatgcagataccctcatttccaacatatattgtaaatgagattagaaaaaacaaggttagaatagctctttaaatatgcaaatcaaaggatatatatgtgcttgcttaggcaaataattatccgtaaggatacacaagaaattgataacagcagtagcttatggaaaggggaacttgatgccaggggaacaggggtagaagagaaactttgctgtaaactgtttcttacctctggacctgtgtattacatacacataatatctatttaaaatgagaaaattttaattatatggattctaaggcttcacaaatactaaatcagaatctcctggagttttggtccaaaaatctgtatttttaatgagcttatcagctaattcttatgtagccaacccattatttgacagggatttgggcctagataaccagttgttaaaatgattgaggcacatctgaaagcaaaacttacaaagtcactgaggaagctgttactcattaatagattacatcagtcaagtgttttttttttgttggtttttttttttgagacggagtctcgctctgtcacccatgctggagtgcagtggcacgatctaggctcactgcaagctccgcctcccgggttcacgccattctcctgcctcagcctcccgagtagctgggactacaggcgcccgccaccacagccggctaattttttgtatttttagtatagacggggtttcactgtgttagccaggatggtctcgatctcctcaccttgtgatccgcctgccttggcctcccaacgtgctgggattacaggcgtcagccaccatgcccagcccacatcagtcaagttttaactaaacttcttggaatggagccatttagttgtttgtttttttatcatagtgaggaatcagatatttcctataccccacgtaaaacctccccctttacactgggtattttttatcctattacctaataattattgggcagctgaaaggagccttaggagtcattatttcattcattcagcagatgtttattgagcgtctgctctatgctagtcaacgtgttaaggtaaatgaggttgatataatgaacaaagatgttctttgccatcatggagctatctaatgggggagacattaaaaataaatacataaataattagttacaaattgcataagtgccttctgcacaggaagcacactgggtgctgtgatagaaaataacaagagagacctttttttttttttttagacgagtcttgctctgttgcccaggctggagtgcagtggggtgatctcagctcactgcaacctctgcctcccaggttcaagtgattctcctgcctcagcctccagagtagctgggattacaggcgcatgccaccacacctggctgatttttatatttttagtagagacagggtttcaccatgtttgccaggctggtcttgaactcctgacctcaagtgatccgcccgcctcagcctcccaaagtgctaggattacaggcatgagccactgcacccagtgaagagacctattttaaataagggtatcaagggtagtgactttgaaagtgggaatttaggatgaggaagaagtagccacaggagggtagtaagggagtaacagtgttccaggtaggagaaagatcaacctgccaaagccctgagacaggaaagagtctggcctgatactggaactgaaagaaggcttttgtggagtgtagtgggtgaaggggaaagtgctgtaactgaagatggagtaatagacctgcccccttcccactccccgcccttttatatagatgtaaagtcctggaatgcctcagccaaacatgggaacatcacccattcattgggcacatcagattctgatctgaggaaatcaccttgtgtgctaatctacttctgtcttctctacctcttttttccatattgcttttataccttttgcaaaattaatgaagaaagaattagcaaagctagtagtcattactttctagagttgaacacttaaggaaaataggcatggtcttactgattcatcccattcagacaacacaaatcttgaagttgggtatgtcccagtkctataagtagccatatattgatttcccattcctaaatacatttgaacctttaaaaaatcaatttgtttcctgatttttatgatgaattctagaagtatattaatagccactatttattgagagcttaccatgtgtcagaccctttttttctgagtactttgcgtgcattataatcctcaccacaactttgtgagataagtcctgttattgcctccattttcttgattgaagaacctgagaagtagagtgttaaggaatttgccccaggtcccagagctactaggtggtagagctgggttatgaacacaggcagtctgacttccagagctcgcgttctctgtcattttgagataccacctctgtgtaatacgttcctttaaaattgaagtaaagtagatgccttcctgaagtttgtaaaggcatcctttgccaaatgtttcaagtttggatgagaaaaaaagctgggttcaatgtgtatgtgccacttacaatctagatttatgatcatgcctcttagtctccattttcccaaattaaatccatgtgatctcatctgcagtaccctctcaggcttcagttatgtcagttctccaatgggagacctcatctagctctgtcgcagttcaggattagactagataaagcccaaggtaattcccctttcctgaagcaatgtaaattccgtagttttagcctgtcctgttttcagcctcctggaattgcctcaagtgaaggcattactgttctatagcttttcattcactatgaaaaatggtcccaaaattatcttcagcattctaattgagcagatagcctcattgcaccttttttcatagtcaccaattgcctaaaataattagctattataagtgtccttcagttcctcctcttaataattttggctgctctttaagtttcttgacctctttttgtgccacagtacatgcagaagtgtgtgtgtgtgtgtgtgtgtgtgtgtgtgtgttttaattgtggtaagaagtacttcatatttgtttattattttctgatcagaagtttcgtgtacatgcatcacgtttatttttctttacaagcccatttcaaaactgttttcagacttaaagatttggagacatagaatatataaattgcttggcagaatgaattctaatgaatattagagattttacactatactcaattctttacttcattttgtagtacaaatagtaatgaaataaaagatatgacgtgaactctgtcctccaggaatttttctttttttgaggcagagtttcactcttgttgcccaggctggagtgtaatgacacgatctcggctcactgcaacctccgcctcctgggttcaggcagttctcctgcctcagcctcccaaggagctgggattacagacatgtgccaccatgtccagctaatttttctatttttaatagagactgggttccaccatgttggtcaggctggtctcaaactcctgatctcaggcgatccacccaccttagcttcccaaaatgctgaacaaacccccctcccaaagtaaggcatgagtcaccatgcccagcccaggagtttttcttaaaatattattttcctttaaataatgaatgtacacatataacatttgataacaatataaaacagattatgattaggtgccaaagtgagtgagtggtgcatgaactatgttaggctttgaaataagagaggccatggtgagctgagcatgtcagagaggctttggcaagagcctggagctcctggagggcaaggactctgtccccttcctatatgtccccagtggcctgttggagcaggtgttcagtaagtattgattatagaaatgattgagacttgaacttaagcttgaagattaagtaaaatttattcaaatctgagagaggttttttctgttttaatgccatctattgtgctttgtttttgatttttgttcactgtgtgaactgttttatactcatctaatgaattaatttaataatcattcaatttctttaaggcaaaatggaaaggaatatggcttacaaggccctgcgtgattctgcttttttaaattttctttttttttttgagacagagtcttgttgtgtgcccaggctggagtgcagtggcgcgtgcctcccaggttcatgccattctcctgcctcagcctgctgagtagctgggattacaggcgcccgccaccgtgcctggctaatttttttttttttttttttttttaatttttagtagagacggggtttcaccgtgttagccgggatggtctcgatctcctgacctcgtgatcctcccgcctcggcctcccgaagtgctgggattacaggcttgagccaccgcgcccggcctgtatttttttttagaagagacggggtttcaccatgttagccaggatggacttgatctcctgacctcgtgatccgcccgcctcagcctccaaaagtgctgggattacaggcgtgagccactgcatgtggcctgaccagtggttttcaaatgctctttagctgtgaaactcttccttgaaatgaaatcttctgcagatatgcatgtggaaaacaggtgaaaaggaacttttttgttaaaaaaaaaaaaaagaagaagaaaacaaggtggggtgaggtggcttatgcctgtaatcccagcactctgggaggccaaggcgggtggatcacctgaggtcaggagtttaagaccagcctggccaagatagtgaaaccccatctctactaaaaatacaaaaattaactgggcacggtggcgcatgcctgtaatcccagctactcgggaagctgaggcaggagaatcgcttgaactcggagggcagaggttgcagtgagccgagatcatgccactgcacttcagcctgggtgataragtgagactccatctcaaaaaaaaaaaaaaaaaaaaaaaaggatgtaggccgggcacagtagctcacacctataatcccagctacttgggaggctgaggcagaagaatcacttgaaccccggagacggaggttgcagtgagccgagatcacgccactgcactccagcctgggaaacaaagtgagactctgtctcaaaaggaaaaaagaaaggatgtaaattcactcaattcatttttaatgttattgttggctccaagtgtttggtggatgaatgaataagtgaaagaatgaacaggctgggtgcagtggttaacccctgtaatccctgcactttgggagaccgaggcgggtagatcacaaggtcaggagtttgagaccagcctggccagcatggagaaaccccgtctctactaaaaatacaaaaaattagccgggcatggtggcgagctcctgtaatcccagctactcgggaggctgaggcaggagaattgcttgaacccgggaggcgggggttgtagtgagccatgattgcaccgctgcaccccagcctggacaacagagcgagactccrtcttaaaaaaaaaaagaaagaatgaataaataaggggatcttttttctatagtccctatctccactctatgaatggatgagatcctaagtgtaccttgatgcagttgaataggaagtgtggcgtgtagcttacaggcaaattcagtgatgatacaaaggatataaaggagaataaagtagggtttgtatcctgcaacttttgagttgtttttcaggtgtgaaataactgaggcccctcttcaaaaatctgtttagtaggaatgggtttgagctgatgatacatccatacctgccagctgtactcctgagtcagtgagcatgcgcatctgagaagacagcagtagactgggagtgcagtatgccagggtggcagagtcattgcaataacaagccaggcagcccagattggggttaggaactttgtcctcaatagcactgtgtgtcaaccaacaaagctaactaaacagaacagctcatctcaacagatgttcatgtcacatctcaggaccaggtcctttgctaggtgctggagttataaagatrcataagaaactgtcctggttactgaggcaactgtagtctaactggggagaaggacacgtgaatagtttcaataccagggtactatgagaacaactataaaactttcaaattataaaccctagaagaaatgagttagcctttattgggcatgtattatgtcccagaccctgtgctacgcatgtgtcatgtatcgtctcttttaatcctggaaatgttatgaggcaggcagtgttattatgcttttttttacagaataggaaactatagtttaaacagtgcgtccaatagaactttctgcagtgatggaaatgttctagatctgcactgtccagtargtaaacactagtcacatgtggctattgaatacctaaaatgtggttagtggaactgagggactgaatttgtgcatttatttaacttaaatagccacatgtggtcagtggtcaccatattggacagctcaggcttagtgttctcagcctctgcagtgttctctgtgatctggtcctccattacctctggtcatcttctacttcccctcctcacccattctaacttcactggcctccttacaggccttcagataaacctggcatgtcattgcccctgcatccctctttcccttgcctcctttaaatcttggctcaaagctgggcctggtggctcacgcctggaggtgggaggatcacttgagcccagtagttcaagtccaggcttgacaacatagggagacgccgtctcaaaaaaaaaaaaaaaaaagtaggcctgggtggtacacatatagtctcagcaactgggaagctgaagtgggaggatcacttgagcctgggaggtcaaggctgcagtgagctttgatcgcgttactgcactccaccctgagtagcagagcaagaccctgtctcaaaaaaaaaaaaaaaatcttcactcaaatatcacattctcaaagaggcccaccctgatcatccctgaaactcccttaacctactcttttttttttttttctttttttgagacaagagttttgttcttgtcgcccaggctggagtgcagtggtgcaatcgcagctcactgcaacacctcccgggttcaagtgattcttctgtctcagcctcccgagtagctagaattacaggtgtgtgccaccatgcctggctaatttttgtacttttagtagagatggggtttcaccatgttggccaggctggtctcgaactcctgacctcaggtgatccgcccgcctctgcctcccaaagcgctcggattacaggcgtgagccactacgcccagacccccttaacctactcttgttcgttctataccattcactattgctaacatgttatgacttattatcatcattattattattgactgtcccctccccccacctagtaagtgtcatgaaggaggtttttgtttactgatgtatccttagtgccaaggatagtgccyggaaggtagtagtcactcaataaaccattagttcaccgtttaagccagtaggattcacacccaacctgtctacaccagaacctgtgttcttattcactatattgtacttcctccttgtaagcgtagcattcctcacaaagtaaatgagaaaagcttcatttgaaaggaacaggggccaggcgcggtagctcacgcctgtaatcccagcactttgggaggccgaggcgggcggatcacgaggtcaggagtttaagaccagcctggccaacatggtgaaaccccatatctactaaaaatagaaaaattagccaggcgtggtggtgagcgcctgtagtcccagctacttaggaggctgaggcaggagaatcacttgaacctgggaggcggaggttacagtcagccaagatcacaccatcgtactccagcctgggcaacagagtgagactgtctcaaaaaaaaaaaaaaaaaaaaagaaggaacaggtaagagaaagcaggtatccttaatttctccagtttcactgaactattaaatgtcttcacgtaaataaacaaattgcagccatttaaacagctgatttataaatgacagttcagaagggcacatcagctctatttaaaatgcagtgttaggccacatagagtggctcacacctgtaatcccagtactttgggaggctgaggagggcagatctcctgaggtcaggagttcgagaccagcctgggcaacatggtgaaacccaatctctactaaaaatacagaaattagctgggcatggtggcgcacacctgtaatcccagcctgtacttgggagtctgaggcaccagaattgcttgagcccaggaggcggaggttgcagtgagccaagatcgtgccactgcactccaacctaggcaatagagtgagactctgtctcaaaaaaaggaatgttagtctccccattttacatatagtaaacaggaaagaggagatttagtatcttatagcccagtggaacccagggtttgaagatgctcgtcctaaatggattaccactcccctttggcatccagtctggttctcatcaaccactgtgaaatttcacctcagtttggataaggtcagaacctgcctcacattctttagggtgctatccccagaaacccctggctaggatccctctatccacttgtggtctttttttttttttttgagacagagtttcgctcttttcacccaggctggagtacartggcgccatctcagctcgtcgcaacctccgcctcctgggttcaagtgattcttctgcctcagcctcccaagtagctgggattacaggcgcctgccaccacgcccagctaatttttgtatttttagtagagacggggtttcatcatgttggccaggctgatctcaaactcctgacctcaggtgatccaccacgcccggcccacttgtggtcttccgggccagagcagcagatctcttggtgaaaagcagactgatctctggaattggaacagaggcagaagtactccgctacatttcattttcttgttattccatttagcctgggaacactaacagcaaagaatggaattttacatgtaaaatagatatagcatttcatattaatttgctggatgttgaaatctgttcttagattttacttaccaatactgaagtagaattttttttttttttgagacagagtctcaccctgttgcccaggctggagtacagtagtggcacgatctcggctcaytgcaacctccacctcccaggttcaaacgattttcctgcctcagcttcccgagtagctgggattacaggtgcctgccaccatgcccagctaatttttgtatttttagtagagacagggtttcaccatgttggtcaggctaatcttgaactcctgacctgtgatccgcctgcctcggcctcccaaagtgctgggattacaggcgtgagccaccgtaccttgtcttttttttttttttttttaagatagagttttgctcttgttgcccaggctggagtgcaatggcgcaatctcggctcactgcaacctctgcctcctgggttcaggcgattctcctgcctcagcctcccgagtagctgggactataggcatgcactaccatgcccggctaattttgtgtttttagtagaaacggggttgttgaccaggctggtctcgaactcctgacctcatgtgatctgcccgcctcggcctcccaaagtgctgggattacaggtgtgagccaccacacctggcctattttttgttttatttgagacagggtctcactctgttgcccaggctagagtacagtggcgcaatctcggctcactgcctcccaagttcaagcaattctcgtgcctcagcctcctgagtagctgggactacaggtgcatgccaccacacccagagagtttttttatttttatttttagtaaagactgggtttctctgttggccaggctggtcttgaactcctggcttcaagtaatctgcctgcctcggcctcccaaagtgctgggattacaggggtgggccactgtgacatgtctgaagtagaatttatttttatcttctggaagtctttacccttttccccaaggaggtcattgtacctaataagagcctccatttatcagacatctgtatatcacatactgtgaagctttctatacattaacattaccagtcacagcaactctgaactggagaaacagacttaaacaggctgggtaaacttgcccaagatccaccactaggaagtggaaaatccaggatctgaacccatatggtccccttaactatctctgaggatgctatgccaagtgtgtggtggctcatgcctgtaatcctagcactttgggaggctgaggcaggtggatcacttgaggcgaggagttcgagaccagcctggccgacatggcaaaatcctgtctctactaaaaatacaaaaatcagccgggcttggtggtgcatgcctgtaatcccagctacttgggaggctgaggcatgagaatcacttgaacccrgggggcagaggttgcaatgagccgagatcacgtcacttcactccagcctgggcaacagagagactctgcctctaaaaaaaagaaaggcacagggcaaacagcgaaggtagcagttagcaatcagtaatctgccatgtcgccgtgtgaagtgataagcaggagtgagtgggtgatgtttgctgacactccacgtctttcaatgcccttcctctgcctcctgagcactgctgtagagtatctctcatggactcttgtgatggtctgcttggtctgctctcttccctccaattcatctgctatcccacaactacagttatcttttccgaacatggatctgatcaaggcactctccagcctcacagcctctttgagtccaggcctgcccgctttgctggccatcctgttggccgctcctccccttggcaccatcactgcccccttcactctgccctgcaggctttagacttcacagccatgcatgtgcacatcttgttctctcccacagaaatgtccatccctgcccttacttgtcattggtaatggaagctcacaaaagtagtttattatatttagtaccttatttttaccactatgatacagcatattaacattgtgttttagttaattatttgtgtgtctcagtccatttgactttgagcttctcaarggcaggaaagtgatacgttcctgtttgcatttccacacctaacattgtttctggcacatagaggtagaataacgtgctttaactatttaaatggatagcatttgcaaagttttatcctatcagtttctgaaggatttcacctcaatgaagaaatgagtaataacattcattgtattactatagtcttactgtacgtgagacagagaagttaaaaaggcatagctgaattgaccccaaagaggaaagaatagcagacataaaactggggtacctttatactagtgtttttaatcttgcattctgataaaagactctcattacttttcaacttacttacactctgtcacaacctaaagaccttactggaggggacttgcattcctagaaagtccctcaagaggtttatgacaggttaccctgggtttgagtgatgtcatgaatttaccaaggctgaggggccacttattctagtcccaagtggctaaatctcttcttctctccacagggaaacaactggaaggcatctggtaagttgggtgggtctccttactttgactagttttgaaacaaggcagcactctatgcatttcaggttctagtctgtggcttccagcakgaaacctagctctccatgctataaatcttcaagccctaaagcagtgcttctcatcagttcttttgctctctcaccctgggacatttggccatgtccagagatatttttggttgtcatacagggaggaggatgctactggcatcttgtggatagaggcagggacgctgctcaacagactagaatgcacaggacagccccacacaacaaagaastatccagcctcaaatgtcaatagtgccaagattgagaagccctgatctgtggtatttatcatattcatacctttggtttgttggttttataagactggtccccacagtcctatccttgggcagaaattactctcattgcattatggtgtttgctttttctcaaaagtttaagttttctggcttactgtgtctctctctgtgtgacaggcacacatccatagttgtgcacaaggatgagttcttcttcggcagtggtggtatctccagctgccccccggtgagtgtcttcccctacactctgtcctgcagtctcaggttcctgggggctcctgtagaccaggagctttgcttctactatggacttctggcattgttcctcaaagccacctgaagacttggctcaataaaacctttcccagacaccccagccagttcctctcctctctgttcccatggcacgtgtgggtccttctgtctcacagagagcatgttatggtgaaatgagctgtttctggttctccacagggaactgtgtaagctccttgcgagctgagaccttccatctccatcccctgcacagtgtccggctcatcctaggaacgcaactgatgttaagctgaatgatgagggctctgagaagcatcaagacttgcccaaacttaaacagccaataagggacaccagtcctagaacccaggattatcacactaaagcccacacccttttccgaaaatttcttttttttttttttttttttttttttgagatggagtctcgctccgtcgcccagactgaagtgcagtggtgcgatctcggctcactgcaagctccgcctcccgggttcgcgccattctcctgcctcagcctcccgagtagctgggattacaggtgcctgccactacacccagctaattttttgtatattttagtagatacggkgtttcagcatgttggccaggctgatctcaaacttctgacctcgtgattagcccacctcggcctcccaaagtgctgggattacaggcgtgagccacagcgcccagccttttccaaaaatttctatcagctatccaagtgttgtcacagtaggtgctcaagcaatggccaagcagccattcattttggttgtgtgtttgtttgtttttgctacatcctacaggaaggattttttttttttttttgagacggggtcttgctctgtcacccaggccagaaatgcagtggcacagtcttgcttactgcagcctccacctcccaggctcaatgaatcctcccacttgagccacctgagtggctaggactcagcaccaccacgccctgctatttttttctatttttttagagataggatctccctatgttgcccagactgatctcaaactcctgggctcaagcaatctactgcataagccagaattctcccattgcttttggaataaaagccagaaaactcagcatggcctcccaggacctacctgatctggtctctgactctgactctggccagcctcttttaggttgttccctcccaaccctcactctcttctcattctttgaacacaccgtagacattgaaacctgcactctgacatcagtacaccttcttgatccttcacctggttacgcctctccatccttcagatttgagttgtgtcactttctcaggcaagtcttccctgatccctcagaccgggaaggtctcctgtcatacgtactgttggcattctgtacttttccagcctccccttaattgcagctcataattatatactggttaaggggatttttcagtttcccttccctgctacactaagcttyttaacggcaagaatctcatctattttgtccacaccacagccccagtgcctagcataaggcctgacacataataagttctcaatccatagttgttatatgagtgaataagaggggtcaaagagtgaccttttagtttcttacaactctgagataattgttctctgcctaccatggttatcttgctcaccatgctttcctcagtgcccagaacaatgtcagctatgtaggaggtgctcagtggctatgaatgaatgatcttttcagggagctctgttctggagtgttatcccttcccagatttgttctcctgctgatcccgttgcttccccagtggctggtttccccactcaacctcagtctctccttcagttttctctggcagtctgttaaccacatggctgagggttttctgtaggcctttcgggagccattaactcccttgccctatgatggtgatagggcaaggattaggctcacagatccaaaaagaactgaattatggaaatatctgccagcctgccagatttctcaccgtcctcrtttttccattattacacgggatatcaagtatatcataagaaaaactggctgcatactttatgcaaataggcatggagagatggcctgtgaagtgtgagccatttctgttgtcctgttctgtcctcatgatgagacatactggggacaaaagtagacttcagattctgggtttctctttctcagctgagtaagtggacagcatcaggagtcagagctgcaagagaatcagcttcccagggccccccctcccctctagaaacaagaagtccgactcctaactatgctgccagcacatggcaatgaaaagtgaccagaaagctctaagccaagcttgtccaacctgcagcctgtgggccatacgcagcccaggacagctttgaaagtggcctgacgtgaatttgtaaagtttcttaaaacatgagatttttttatctttttttttttttaagctcatcagctatcattagtgttagtgtattttgtgtgtggcccaagaccattcttcttccagtgtgcctcagggaagccaaaggattggacaccaatgcttctaagctattgcatccttgatacaaatagcaaatcacattcttcatctgcccagggtgctctgcaagttaaatatgaagtcaggctgggcgcagtagctcacacctgtgatctcagcactttggaaggccgaggtgggtggatcacttaaggtcaggagtttgagaccagcctgaccaacatggtgaaaccctgtatctactaaaaatacaaaaaattatctgggcatggtggcaggcacctgtaatctcagctacttgggaggctgaggcaggaggatcacttgaacccgggaggcggaggttgcagtgagctgagattatactccagcctgggtgacgagagaaactccgtctaaaaaaaaaaaaaaaaaaaaaaagtcagaacagagtgtttgtggtctactgtgggaagccacattaaaacattcagtggagatggtaacttaatgacttcctttgggttggctcttttagggagggacattgcttgggcctccagactctgtggttgatgtggggagtacagaagtcacagaagaaatctttctggagtacctctcctccctgggggagtccctgttccggtgagtggagacaggggtggtggttagttgtgtctgtctccccagctagataataacccctggaggcagctgccatgtcatatcatccttatcactcagcacaaggcctggcccagttttttgctgaattaacatgaagaaaaggcagttatgctacaaaaagctctaagttgttctgatacagatattccttcaaacatactttctgccgaaatttttagaggaaataagggcttttcattccttctgattaaaatcggcaagcgctgttctcaacctgtattggccaagtttgcagaaggaaaaacagggtttgcagaagggttgggatgaaatacaaacttgagcagattttctctgaaagaggctttagtcagtttcagtaagggggtaaactcttaacaccagagttctgctttcgtgaatgtaaagattctcctgaaactgtgtaggagccatgtcttttcagtttctccttcccttaaaaatcagttattaatggccagaatggcaaataagcagtgcttttctggtgtatgagacgggggaaatcgcaatcctcacattgagctgtgctcaccattccactgcctagcttgagttattccacatagacgcttgctggtttctcatatatgttctgcaaacctttcaatgtacagaggtgaggcctacaacctctttgaacacaattgtaacaccttcagcaacgaagtggcacagttcctgactgggcggaagattccttcttacatcacagacctgccctctgaagttctctccacgtaagtgtggcctctgtccctgcccctgccttggccaaccttgaaaatccccattcacggtcagtgcccttcctctggcccccatctgccctcccaaccaggtgggcctgccctgatggcagattctaacacagaaggctgccattctctccacccactgatgcgcacctgtattacctccaccttcagagctagaccagctctgccctggcctaagtgcaaccacagaacttagacacccacttgacactggcttcagtacttgcacaaaattctggcgtctgtccttcccattgtgctcgaagcatgccactccccagaagcacccagttaaaatgcaatgttagacaagcagagagggggtcagaaaaatagtaggggggcttgttttgtagctgttgatttgccttacactgcaccatgaactctttgactccctcaacgactatgttctacttgccctcatgtattacagcacagtcttcaacagatgttttcttcaagaacactctgcagcccgttctgtcctgatgtgccccaagccttggaagagccttgcaggccatcatccaggcagtataccccgaaaggacacaacacccccaaagccatctcacctcctccctcttgtcgttgattgcattcaggcagcctctgctcattccaggaccatgtctatttgcttattctgactcagtttctcctgaactatggccttatttaacagagatcctggcaggtttcgcaggcccagcaaggtgggctgttttttatatctgaggaagcacctcccaggaagagcttgcataggaaacaagactgctgtggcaggctggtgaggagccccagtccgccagccctggccctgccttcctatcattcgatgagtttgcagtcccacagctctgctgagggatctaggttatggggccctgagcaaactggagtagccagaatgtgcttgctgttattattttatgggtggagttcctggaattgtctgaattaggtttgatatttctaggtttcatctgtctatactttggagtacttcattcctttaaacttggagatgattttcaaaaatggcagtatccactgaagaaaaagccagtgacttaaaagtttctgggcaaccttatttatggttgtcgtaatcatggaaaatctccaaactccagtatttgtagttttttttccatctgttactatgagagcaacctaggagccctttagaaaggcattaatggctgggcccagtggcttatgcctgtaatcccagcactttgggaggccgaggcaggcaaatcactaggtcaggagttcgagaccagcctggccaacatggtgaaaccccatctctactgaaaataaaaaattagccaggcgcagtggcacacgcctgtaatcccagctacttgggaggctgaggcaggagaattgcttgaacctgggaggcagaggttgcagtgagccgagatcacgccattgcactccagctctaggctagaggtagactctgtctcggggtgaaagaaaggcattaatactggcaacctagcatttgtcatttttccagaatattccctgtactccctggcagacctctgttcctgaaaaaaatccagttgtttgctgtcctcacccctttgtcttctttttcatatccttcttcttttgcctcagtttccctgcttaaatttgatcttttccttgctcacaagaattaaagacacaagcacatagagcacagaaagttctagttctctgtatgtagccagcctactcaaaccacagctaaccaggctctagaggtgaggccctgaggagggaaccccaggaataaaaatacagagcaggctatttcggagatgccctccaagaacactggygtgtgaggcaggtgggaaacttaagtgaggtgacgaggtgctctttccttctctgctggtgctgcttctgctgccaccagcgcccactcctcctccctacccgtgggcagcacagggtgtgtgacagcaggccacatcccagagcccacccctctcatgtctctgtttccttgcaggccctttggacaggcacttcggcccctcctggactccattcagatccagcctccaggagggagctccgtgggcagacccaacggccagagctaacaggactgcctgggaccgccctgcctcaccagggcttttcctttttaaacaaaacaaaccctaccagatttytattttataattttacatcagagctaacaaccaggggacggctttttaaatttcccagggaaggagaccgtcaggccgcatgtagacaatgctgctaagaaacagaacaaaatgccaccccttctaatagtattatactaatttattaaggctgtcttgtctgtgcgttcacttcggatgctgtttcctaagcgtcctccacactggagaaagggaggggctttgtttaaacagaaagcgagtcacagtttgcgggagccccaacctagaactctttccagagaacactcacgctctacccaagttgccaacacctgtgggacccaggtgagttttagaacatccgtgacccagaaagttactctagtgttaaatgaaccaaaggatttggtgtacatgggaccggtttcaggatgactaacctaacctaagtgaactctttagccacaaccctcaccttccctcccttaccccaagcaaggccagtgctggagcagccattgcctccggatcaagggagtaacagcaagtatcaggccggagaaaacaggataaagccattcctccttccacctagatggattgccaatcttctgccatcaattttgggaaacctgcctttgtgcccccgaggctgcctttcctcagcatagctgacttgtcatagtggatgaggtctgggctggagcagtagaagccaaggccttttttctgcaagtaatgatgtaggttatttgcagtctctgtaaccaccatccaggccagtacgcagtatttagctggggaccaagggatgggattccctactctaagaaaatacctttattttaattattattattttttgagacggagtctcgctctaccacccaggctggtgtgcagtggcatgatctcggctcacagaaacctctgcctcccgggttcaagtggttctcctgcctcagcctcctgagtagctgggattacaggtgcgtgccaccacgccaggctaatttttgtattttcagtagagacagggttttgccatgttggccaggctggtctggaactcctgacctcgggtgatccacctcccttggcctcccaaagtgctgggattacaggcgtgagccaccgctgcctggccagaaaatacctttgatatggaaagaataatgatgtgaggcctggcgcggtggctcacgcctgtaatcccagcactttgggaggccgaggcaggcagatcacttgaggtcaggacttcaagaccagcctggccaacatggtgaaaccccgtctctactaaaaatacaaaattagccgggcatggtggcgcatgcctgtagtcccagctactcgggaggctgaggcaggagaatcgcttgaacccgggaggcagagattgcgatgagccgagatcgtaccagtgcactccagcctgggcgacagagtgagactccatctcaaaaaaataaaataatgaagtggaatcaaggtggcaagaaaatttagaatcgtttctgatagggactttcccttatcctaaatgtgttttgaaggcacacgttatttccattgtcattctgactttagaaaggcaggttggggcatgagtgggcattttcctaatgacttgctgctaggaggttataggcagggaacagtctgggagtctctaatccagagagactttcagattccctctcttcacatgaacctccattagttagattttgggaaagtgagcatgaagaagggactcagagctgccaggtacccgagtctcaggtctgacatccttgggccccttctgccacaacttcttgccacttcacggacttgaattatgttgcttcttcctggaagtctggcctgcagcacaggcctttcctctccaaaaagctgctgctcatttctggccccatctgctgctatctttgccatcagccatcacagtttggcatcatcagagtctcagctagaggagctgtcattctgccttagtgtttgcctgcgacctgaccaggggcatgaccagctgggatgtcaagtgacatttgggaacttgtagaggccaaatgattgaaagtttaattcttctcaagacccactgatttgccagtgtgcatggaaataatagattagagcagaaactagcagggactgttgtataatcgtgatctactagcagaattgggcccaaagagaaagaatttctgaggctgggtttcttctgggagggtagcaggttggtcttggccagtgctctgtttcccaccagtgttgttcccttttccagcttgcctggcccggctctgtcttccagggtcctgctccagacccctctgcctggggtctcccctccatccagggggttctgggcatcacagctcctttttttcctttctcctcttccagatccagtttcagctggtttgcttcttccagcaggcacccttaggcccaggagcagctcccctgagagaatttgagtcactcatttccttgaacagcacccccctttatactagcagccatttgtgccattgcctgtgccctagggtttgtggggagagagcgagggatcactgagcagttttcccagagctccatgggaaggcaagctctccctcccaatgggagccccactgtcactaactgtaaactcaggctcaggcttcaactgcctacccccatcctcatatttctgtctgtcccagcacctcaggagcattctcattgtggccggctaactccgcctggatgtgaacaggcaagcacagtgggaaatgagtcacgtacttgtattgcacagtggacacctctagaggtccattggtttaaagggatagggaaggaggagggatgagaccatcmccccctcccagaagtaaatytagtatytgagttttctttatgcccttgagtcaaactaataactgtctagtacggaggtgtttgctggttttcttcggtgttttttctaatgcaataaactcatttctgcctgctgcatttgtgtggtgcctgaatcaggtctgcacatgcatccaacatgaagcgaccccaggcttttgggtcccttggagcttaagtctgcggggtctggatgtgtctcctttgcatggttgtgagcctgtagataagaagtgataacagggaaggatgtctgaatttcaccactggtttataaagatgggggaagggcccagagagaatatcacttgcccaaggtcaccttgcagctggtgcagctcaatgctttgtctgataacttcaaattctgtagtcttcctctagctatcaggagtgtctgacctcaccgaaaagtgttcacttctactttcaacttggctctaggttgggtctgtggctcctcatgcccagacaggctgtagctgagagggcacgcaaggagcctagtgggggcctggcacaccactgaatgtgagcccttgaccacagggcctggctgctcttgaaagaggcagagtgtgtctgggacgaggctgccccactggttcccaggttggagagccaggcaaggtcacgctgcagtgagagtgatggataccaggtggcgctgtggccctgcacaccaggcccagcctactgcccaacgcccaatgccaggctggtcttgggtaccctcggccacctcagtaagctcgtccagctcccctcagcccgtgtggacccctacgagcccatggggtaagagccaagctccttgtcctcatttatcaaggcccttctcaatcttgtccttgaacaccctggtcctaccccacaccctgctgcaagtgccagtcccagtccctgtcacttctggtggtttcacacctccaagcctcggttcaccctttgctccacctggatcccctttccccaccccttgttcagtgctaaaggcccagttccagcatgtcctctgacctgtccccacccagagctgactccttgctcccatgggtacctccaacgcactcccaccagcccagtacctcccagggcagggcctggcatggggtgagccccagattttgagaccatgacaaaggccttggatcctttctaagtccctcccagtatgactccgctccccacccctggcttgcaaggtcaggagagagacttgcccaagttctcacagttctgggctgagctctgacctgcagagcccactgaccccagctgtcaggctgccgctcctgttccacacccccaggtggaacagtgttgtggcctgggccatatctgtccccattgactttgtctgagagagccccagagggcctgagccaacccagcaacagcctccacctcctcctacaaagccatctgagcatgcgcccttcagcttgtttagactcaatggacttgcttattatgaagacaatgtaagcactgcaggcattttgaaagttaaaaaacaaaacaaaacaaaaaaacaggctaggcgaggtggctcacgcctgtaatcccagcactttgggaggccgaggcaggtggatcacctgaggtcaagagttcaagaccagcctggccaacatggtgaaaccccatctctactaaaaatacaaaaatcagctgggtgtggtggtatgcacctgtaatcccagctacttgggaggctgaggcaggagaatcacttgaacccacgagggagaggttggattgagccaagattgtgagatggtgccactgcactccagcctgggcaacagatctaaaaaaaaaaaagaattccacagtctcccccaacctcagcacacagcacacctcccctgctgcccctaggcttcttaactacacagcctttaggagggtgttgaccccatttgtaaatgaacaaccacctcacagagtgggacggacctgcccaaagtcactagtgggaggagaactccaggaattgtcagcctgcctgtaaaccccactacacagaggctgccccttgggcctggaccacccatacacaacaagtcacataccaggtacagaaaaagagcattgacagccccggtacttggacatactgacacatggcctcctaccaatagccaggagccagggaaaagcctgggttttggcaagacgggattgaggaggaatctcgactgtgctgtgtgaccctagaaaagccgttgcacctctctgatgtcagtacctacctctggaaattgagtataagggtactgtcttcagagatgtgttgggaaaaataagtgaaatacccaaaccaaacatgaaagtcactaacctccaaacttcagccacacgtctggcccagaagagcccagggtcttcccttcatagcagaatcctgccaggctcaggtctcaggccctccactttcagtcctggctgcttctgggtccctccaagtcacctttctgtccagtcttccctcccaccagtcctgctcttttctccccaaggcctcccctggtccccatctgagcaccagttgccagggataagccttcctcttaaagggacatagtggtggccacaggtacccccctacctggtcctcctgggtctgtacctcagggcaaataactctccctctctgggtttcagtggcctcatcatgtggaaagggttgttatgagaatttacggagagactgtaggaaagggatttgtaagcagcagcccatttgttaaggggccaagggtgcttatctctgtttttagaaaagtagatccagtccataggagacaaacacccctcctgcccagtgggccaccttccagatgttctggatccaagcactacgggtagggcccaggaattcgcacttcatctgtttctaggaattcttcagtcatggaacaggaaaatgaagatacctggtcaagtgtcctgtgtggtggtcagcccatagtaaaggaataagcatcagtttggtttttttgttttgttttgttttggtttttttgacacagagtcttgctctgtcacccaggctggagggccgtggtgcgatctcggctcactgcaacctctgggttcatgcgatgctcctgcctcagtcacctgagtagctgggattacaggcatgcgccaccacgcccggctcatttttgtatttttagtagagacggggtttcaccatgttggtcaggctggtctcggactcctgacctcgtgatccaccgcctcggcctcccaaagtgctgggattacaggcgtgagccaccgcgccggccgtgttacagttcttaaaggtggcgtgtccggagtttgttccttctgacgttcggatgtgttcggagtttcttccttccggtggcttcgtggtcgcgctggatcaggagtgaagctgcagaccttcgcggtgagtgttacagctcttaaggctgccagtctggagttattcgttcctgctggttgtgttcgtggtctcactggcttcaggagtgaagctgcagaccttcgcagtgagtgttgcagtttataaaggcagtgtggacccaaagagcgaaagaacaaaccttccacgttgcggaaggggaccccagagggttgctactgctggctcctggcagcctgcttttattctcttatctggccccccacccccacccccgccaccccccgcccccaccgccccccccacccccgccaccacccccgcccccacccccacccccccaccgcctcccccacccccccaccgcctcccccacccccccacccacatcctgctgattggtccattttacagagagccaattggtctgttttacagagagctgattggtccgttttgacagggtgctgattggtgcctttacaatccctgagctagacacaaaagttctccacgtcccaactagattagctagttacagagtgcggacacaaaggttctccaagtccccaccagagtagctagacacagagtgtcgactggtgcattcacaaaccctgagctagacaggctgctgattggtgtgtttacaaaccttgagctagatacagagtgccgattggtgtatttacaatcccttagctagacataaaggttctccaagtccccaccagactcaggagcccagttggcttcacccagtgcatcttgtaccggggctgcaggtggagctgcctgccagtcccgcgccgtgcgcccgtactcctcaacccttgggtggtcgatgggactgggcgccatggagcagggggcggcgctcgccggggaggctctgtctgcgcaggagcccacggcagagggtaggctcaggcatggcgggctgcaggtccgatccctgcccagcggggaggcagctaaggccctgtgagaaatcgagcgcagcgccggtgggccggcactgctgggggacccggcgcaccctccacagctgctggcccggctgctaagcccttcactgctcgggccggcacggcctgccgctctgagtgcggggcccgccaagcccacgcccacccagaactctagctggcccgcaagcgccgcttgcagccccggttcccgcccgtgcctctccctccacacctccccgcaagccgagggagccggcgccggcctcggccagcccagagaagggctcccacagtgcagcggcgggctgaagggctcctcaagcacggccagaatgggcgccgaggctgaggaggcaccaagagtgagcgagggctgctagtacgctgtcacctctcatcacctttcatagttctatcacgtggggtttatatcctcattacatataaagaaactgaagcccagtgaggaaaggtgacctgtccaagtccttgtagttagccaggaccaaactgcagttctcctgattccaactccaatgatctctccaggacaccatagctacccagtcagaaaaacaagaattgtgcctggggatctggtgcggtgggtcaggcctgtaatcccaacactttggtcacgcctgtaatcccaacactttgggaggctgagtcgtgaggaccatttgaggccaggagtttgagagcagcctggacaaaatagtgagaccctattctacacacacacgtgcacacgcacacaaacacaatgcagattttcatggcttcgtagcatttcatcttctagatgggtcttagttcatttaaacaattccatatatttttccttttttctattttcttttctttcttttttttttgagacggagtctgctctgttgcccaggctggagtgcagtggcgtgatctcggttcactgcaagctccgcctcccaggttcacaccattctcctgcctcagcctcccaagtaactgggactataggcacccgccaccacgcccagctaattttttgtattgttagtagagatggggtttcaccgtgttagccaggatggtctcgatctcctgacctcgtgatccgcccacctcagccttccaaagtgctggattacaggtgtgaaccaccgcgcttggcctttttttttttttttccgagtcagagtctcgctctatggcccaggctggagtgcagtggtgtgatctcggctcactgcaagctccgcctcccgggttcaagggattctcctgcctcagcctcccgagtcgctgggactacaggtgccgccactacgcctggctaattttttgtatttttagtagagacggggtttcaccacgttagccaggatggtctcgatctcttgaccttgtggtctgcctgccttggcctcccaaagtgctgggattacaggcgtgagctaccgcgctcagcctcttttcctattttctaaaagttgaattgctgactcatatgatctgcatctttttttttttttttcttgagacagggtctcactactgttacccaggctggagtgcagtgggaagatctggttcgttgcagcctcagcttcctggtgattctcctactttagcctcctgagggaccacaggtgcctgccaccatgcctggctaatgttttgtatttttagtagagacagcattttgccatgttgcccaggctgatcttgacctcc

SEQ ID NO: 98219 - DNA, 67335 bp, Homo sapiens
aagtagctgggactacaggtgcccaccacctcgcctggctaattggtttgtatctttagtagagacgggtttcattgtgttagccaggatggtctcgatctcctaacctcatgatccgcccgccttagcctcccaaagggccgggattacaggcgtgagccaccgcgcccggcctgatttcttattcgtttatttagacattgtctggctgtgtcaccgaggttgcaaggcaatggcacaatctccactcactacaacctctgcctcctaagttcaagcaattctcctgcctcagcctcccaagtagctgggattgcaggcgtgcaccactgtgcccagctcattttttgtatgtttagtagagaccggtttttgccatgttggccagactcatctggaacccctgacctcaggtgatccgcccaccttggcttccttaagtgctgggattataggcgtgagccaccacgcacagcctgatttcctgatttaaacggcacacaggaccctgactcgtcttccattcccaaggcctttccttctggtgtcagcagaggggactttgtgctcctaacatatgctgcccaatgggcttgcacgcccactgccaagtccagctccacctccaggcccttgccctactcttccttggcctttggaaaatcccatctttcatgccatgcataaatgccctcccccaggaagtccctcaaatctgcttccccttctcagcctggcttcttgtccagactgtggctccacccaccacccatgtttgctggtggtgggggatcctcaggacctcctccctcacctggttgaaggtgtatatgttctggaagtccacatgcagcaagttgcccagcccgggcagtggcagggggcctggcgggtagcgtgcagtccagcgttggtgctgctgcatcaggtccaccaggagcaggaagatggccactgtcactgccaggggcaccagtgcatccagccccatggctgcctcactgcccattgggctcctctggacacacctggcacctccaccccaccaggcacagaggaccaggcaggacactctcagcacacccagtgcatgaccgttcccttataaagggagctgatgatggcctttgccttctgctgtgagccaacctgctgtgttgactgtgctgccagtgggtgcagggtcaggccagggcgggtatgggctgctgcagaggtccttgcccctgctcgctctagttgcctacccagattagggtggtgggcgagaggtggcctggcatgggagctccacccaagttggaggtatggattgtactgggtgctgggctgtgtactgggagcatggtggtaaggctgtgagtcaatgccccaacgtaatgatgaccacggggagtaggaaggtaacatagctgacatgacaagccagcagtgccatgagggtccatggggacgttgtcccaggctggaacaggactttctgggaaggattcatggagaactttgtctagctgactgaggggctgcctagcactgtaggccacggcactggcagtgggaccaacccacccctggaatttcctgtgcaggtggcctgaggggcagcaggaggccagcagctggagcctgggtcttttcaggtctggatgaagactggatctggggaacaaaaggcagggagaacagtttatttaaaatttaaaaatatatatatattttttagagacaagatcttgctctgttgcccaggctggagtgcagagctgtgatcatagctcactcaaactcctgtgctcaatcaagagatcctattttagcgtcccgagtagctggaactacaggtgcacatcattacgctcggctaatttttttgttgagatgggtcctcactatgttgcccacgctggtctggaactcctggcttcaagtgatcctcctgccttggcctcccaaagtgttggaaatagaggcatgagccacctggcccaacagaagttttgaagctactcaactgacagagagagcaagacccatgcctatctggggacttctcagatctggcttgtggtctcccaaactggcctcagctgaatgaatgttcctgtcctacatggcagcactgttctatttgggactgtgagagaatcaaggtgcagggacagcaggatggtctgggtgcttgttacatggtggccctttatacattacctgtatgcactcttggccttttgaggtgtcaggccctccccaagcagtcatcatgaatcatgatgggggtgtgaagggcagggacaggcatgcctgcaatgtgggcagtgtcctcccgagtgccctccttaccagccagaggcctgtaattcaagatatggcagcatgaggaaaacatttaataacaatgcctgtggccttttccaatcattgtgcacctgtggcttccattgatcgggcacttatgtgccagaaactgctggtcagactgtgtgctctagctcattaatcctcccacagccccctaaggaggtggttttatggtccccaaggcacagagactgaggctcagagatcacataacaaggttcaagtcacacagcggtgttaggagtccacatccaatgtgtatgctgagctactattctatactgtttggacattacattctattaatggtcagtatagatgtttctgggatttattatttttaggaaacagatccaacctgccttccctgaacagtggtactgctgtgtcatggtaaaaagtgcactgtgccctggcaggccctatggacgttgccaagtgagatggtgtgaaaatatgtcagcaagtggtagactaggaaactgcgggctctcgttctcctagagagctcaatgttaaagctataggagaccaaaacatcgtgagaattctagaaactagttaggatgctgcaatgccagctagtgcagagccagggagggactgcactgggaagggtagtcaagttggagcattttgcttgttcttgcccttccccctgccaggcatagcaatgctactgggagagaccctccaattcccagctcctcccatgggatgggtttctgctgggtccgactcaagagtgctgagtggtggggtctgtctgccctcagagcagcacctctgcgtttccacagctgcaaggggacggggttatgggcagtggaatagttgtgtctgggtatcctggaggggattggtgccaggacccccggtaaataccaaaacccaaggatgctcaggttccttatgtaaaatggcatagtatacctatgcaaatgctcctgtatactttaaatcatctctagattatttgtaatgcctaatacagtgtaaatgctacataaatagttgctatactgtactgctcttatttgtatttttagttgttatactttctcaagttatctttgatgtgtggttgaatttgtggatgcggagcctgtgggtatcgagggctgcttgtaccctagaaacagaaatggaaagctccaggggcagggccagcctgcaggggggcagtttaatgggtaaagcttccgttttataaaatgaaaaattctggagattggttgcacaacaatctgaacacatttcccactaaactgtactgtgactgttatgatggtacatttttttaaccacaatttaaaaactttatgagtattaaaaaaataaatggctatatacacacctattagaatggcttaaatccagaacactgacaacaccaaatgctggcaaggatgtggagcatcaggaactcattcattgctggtgggagtacaaaatggtacagacactttggaagaaagtttggcaatttcttttccttttctcagttttttttttttttttttttttgagacagagtctcactcactctgtcacccaggctaggagtgcagtggcacgatgatctcagctcactggaacctttgcctcctgcgttcaagcaatcctcccacctcagcctcccgtttagctgggactgcaggcgtgagccaccatgcctggctgatttttgtatttttagtagagacagggtttcaccatgttggccaggctggtctcaaactcctgacctcaggtgatccagacagtttggcaatttcttacaaaactagacatactcttaccatacaatccaccaatcgtgcttcctgtacttacccaaaggagttgaggccttatgtccacacaaaaacctgcaaagggatgtttacagcagcttcatttgtaattgtcaaaacttgaaagcaaccaagatgttcttcagcagttgaatggataaactgtggtacagccagacaatggaattatttatcactaaaaagaaacaagctatcaagtcatgaaaagacacgggtgaaccttaaatgcacattactaagtgaatgaagccaatctaaaaaaggctacctactatctaatctcaactatatgatactttggaaaaggcaaaactttgcagacagtaaaaggctcagcggtgagggactggggctaaggaggaatgaacagtgggacacggaggatccctggagcagtgaaactactctggatcatggtgcgtcctcgtctttttgagacaggattttgctgtcacccaggctgaagtgtggtggcgcgatcacgactcactgtagcctcgacctcctgggctcaagtgatcctcccatctcagcctcccaagtagctgagactacaggcatgcaccatcatgcctggctaatttttgtatttttatgtagagatggggtttcgccatgttgcccaggctgttctcgaactcaagcgatacacccacctgagcctcccaaaatgctgggattataggcgagagccaccacgccctgccagatccaggtctttatacatttgtcaaaggccataaaatgtacaccaccgggagtggcccctagtataaactatggactttgggtgaaaacagtatgccaactctggttgggatgttgatagagggaaaggtatgcatacggggggaaggggttatatgggaactgtctgtaccgtcagcttaatccttctgtgaacataaaactactttaaaaaaatcaattaagacaaacactaaaggaactaaaaggcacttgagcagttgaggagaactgcagaagccagaaactggagtcaggaggcatgcgtgtatcactgccactccccagtgaaggtcattactgaagccaatttaaggaaagacctagaacaatcacaagtgctccactcaggcaaatcaaaaggggacaaaagaataaaagacaaaatgacaaacatttgctgtcaggaaaatattttcctcaagatacatatttttcaagttttgtggtttagcccttgacacctgaagtctatccatttcattttaactgtattaatgccaagtcaagaccagaatgagacaacaactagctcaaaaaagccatcatttctgtgcaggtcctgttcagttgcctaagcttggtcctacggccggcacggcgcacccacccacacctccatcctggcggagtgaaatgagaaatggactgcttgatgtagccattaaaatacaattaatctgccatttctgctgccccaaattgatgaacacagaactcatttataattgcttatttctgcttcacaatattccttccagtatttccattctctaaaaaagtccattaacattccattatttttttataacccttaatgttgattggaaatatgtcttcatatcaacttgagtaaatctgactgtccccatacactggccacactccacctgcccagaggagtggcagaagaaccctatattttgtttgcttcccggctgcgtggccatcgagaggccaggaatgggacagacaggttctgatcatggcctcctctggagaaccagagctaccctttgggggttagaatgggagaaggaagagacgcattcactttaaagtaaacagaagaggaaacaaggttaaaatgaagtttattatttttttgattttttgattttttttgttttttgtttttttaaataaaactgtttgtgaaacagctattttatccccatggcagagtgacccctgaaagatgcactaaccccttcttaaggccataacaagatttttttgtacttttttctttttttaaaactcagatatttaaaaattatacaatttacaaaacaaaacaacacaacataaagaatcacgtagcatggggctgcctatctgacaggtcctcttttcctttataaaaatgaaagcaaaaagaaaaaggggttaaatgggtgttcctggtcagcttaacccactctgatcacagcgacagtccctccccgtccctgcctacagctcacactgccagctctggcaacacaggcctggacctcctcccatccccacgggtccctgtgggtcagggcacagctgcctggaatgtgctgaggacagggggccccagaggagggtcatcccttgattttgctgctgctgtgtacacttgatggggtccttgaggtcctcaccagccacagtgacccaggacacagctatgacctcaggcatctgccaatttcacccccaaaaagaaaaaattaaaaaaaaaaaaccataaataaatagtgtttctggaaatgaaaaaaaatttatttttgtgtttaaacatcattcccctactcttgaaaacatggaccatccctgtatttccccctcccccaaaaccttcccactttgagacaaattaatgacaaaaggatggttctgctgtggtttgctttttcaatcctgggtctagtgttttctgaactggtgtgagacaggmtaaagatcaacgccacacacacaccccgtccttcatgagatgagggtttgttcagttcaatctcacatttaaatttcacttgtcatcggaacaaatttggagatctttaacgagataattttaaaacagaatcaaaagggatagcgcacctttcatttaaacaaagtctttccagactaaaaatagatttatatatatatatttatccctccyttttaattccccccaccctttccccatcatcccacccctcccccctccccccacattgtcactatggagattgtgtccatggaaacagccattccaacgtcttgggtctttctttcctgtggtgtcactggtttgagtgtgatgtgagaacttaasgaagtgctggcatgggcaggcacgcgggcggggcggggcggggcagggcagggtgtggctgcacggtaggacgatttccattccatcacgagtgtccaccaccttctcatctccacagtctcacctggaagacaagggacacacagtgaaggccaggagcctccacagggtccaccaccaacagccgctgttccgtggtacccctgggagctttcagcagggagcctgcactcacrcccctctgcagatgtgctgctgatatgggacacacccgagaccaatgccagggccactgtgtggctctggatctggaatgtgattaaaggcagcaatgacctagtgggggtgctggggttggactctgagggctcctcagggcatgtctgccttcctagtgcataaaggaaccagtacagcagagaactccctgacctcagggcaggccccacttgtggggcagctggtggggctttgccagtgtcaggaccccagttgtgactgaaacctacagtacctggtcaatctgtggaagaaacttctcgaagtccagccttttaggacagtttcacagctgcctctagtcaacacagctagttgtttgtttttgagacaagacatcgctctgtcgccttggctccctgcagccttgacctcctgggctcaagcaatcctcccacctcagccttccaagtagctgggactacaggtacacgccaccatgcttggctaatgacagtcttttttttttttttttttttttttttttttttgagacagtcttgctctattgcccaractggagtgtagtggtgtgctcttggctcactgcagcctctgccccctgggttcaagtgattcttgtgcctcagcctcccaaatagctgggatcacaggtgcacgccaccacacccggctaatttttgtatttttaggagagatgtggttttgccatgttaggctggtctaraactcctggccccagctgatctgcccacctcggcctcccaaagtgttgggattacaggcgtgagccactacacctggcccacagtcagttcttcatgcttaaaaagaacactcttcccatggcctctaacagggagggcaggttttctgaggctcagacagagctggactatgttamtcctttcgacctctcaggaacctgagacccctaggtctcccatccccaggctggagggcttctctcctcttccagcccatgtgcagaaggggattctgatggcccacgtaggacagatggattgtaccaaaggtccctgtggaacgcttcatgggccatctgatgtggaaaggtctcaaagacaaacagcagtttcctaggaatcagtccagtaaaatttcaccagaagccagaagtggtggcagccttgcccctccttcacttgctatctgccaatcactgtgcttaagactgtcactggggctcacctaactgcttcctcaagaccaatttggtgccctcccctgacaaaccccaagaacccaagtgtcaccagccctttctgcttccataaagttcacacacgcagaactgctaaggcggctggggcctgcgggagctaagattgagctgttcccaagcacgtacatgcacatgctcttgcccaaggaggttcctgactacttggcagaaaacaccaataagcaggaacacacacagaggccatggcacaacatcaccacagacaagtaaaagcaagccctgggaatgcaggccagcagttgagctaatgggcacctacctccaagaacacagaagggtgtcatcttgttggggctgcaggatgcccgtgtgaatcaaggccaatgcccacacgtaccctgccaggctctgctcaaggaggggacagggcagggtttgccctctttaccaatacacagcagtcttgggcctgcaccccaatcttgctcattactcagaagaacaggaccccacaccagctccccagtgaagaatgaagcacatgtcagcagccagggtctgcctggccagttggctctgcgagctgctacttgtgggcccctccctggggcgcgtggtggcccaggcagcggcagttcctcagcacctgcagcctggggctctgccctctatagccttcgtgttcctcaggtctgatgactagaccagcccaaacacacgatatcctgaatgtaatgggaccctaacttttcaagagttactttaaaaaagttgttccttcagtagggaaattaggaaggaaggaaaattctctaagcactatgtgccaggccctgggctagaagctttacagatattatatcacagtaacgtggatctgcctgacccccatcttcaagagagctaaagctcaggaaggcgacacatgtagcccaaagcgacgtggccagaggtgggactggggctttcccaactgggccctaggggctgcgtatgctagggcatggggtgtggctgagagacggctgggtccccgacagtgagcctgggagcagccctggtgccagccagcctgagcagcaggagcgacctgccgcccctgtgctgaagactgtgaattctcttttaaagaacatcaccttgctccccagctgccagcatccagggtttcgtcttgggccaacaccttcccaggctccctcacttgttccctcccttcccttctcgctcacactgtcctttctgctcccctttggcctcatccgtggcctgaacccgggacgccatcctcgcgtccttccacatcagactccaagcctgcctttcccaactgcagcaaaaactcatcatctcaacaccactcaccctggccaggattcgcccagagcccatttcctcatttctaaaacagacactaattccgactagagagggaggatatgaagggaaacctaattctgaatctatactgattaagggcaccgatggtcagggtccaagagcccttttttccctgggatgcactcatttctttcttttttttttttttttttgagatggagtctcactctgtcgtccaggctggagtgcagtggcacgatctcagctcactgcaagctccacgtcccgggttcatgccattctcctgcctcagtctcccgagtagctgggactacaggcgcccaccaccacgcccggctaattttttgtatttttagtattttagtgttttaattttttgtatttttgtattgttagccaggatggtctcgatctcctgacctcgtgatctgcccgcctcccaaagtgctgggattataggcgttagccactgtgcccggcctgggatgcactcatttctttaacacagactcacttggcactagcatagttacatgccccgctctgggctaggctttgatggtgcaaagacagacgtggtccctgccctaatggagcttacagtctagtggagagacaggtagtaaacaagtaaatgatctgaaattgtggtgatgctaggatggctgcaagcgaggaggggggcaatggagacaaggatttagaaagggaaaggcttctctgaggaagtaggatttaagctgagacccaggagatgggagcctgttttcaacatgaagatggggagccaaagtgtttccagcacaaggaactgtgtgtgcagaagcccagaggaaggaagcctggtccctgaggagctggaggcagccaggggcctggagagtcacctgagacttccatagggctctggaaggcaaggtgagatgtctgggctttgtgtggaagatgacaagaatctctgacgtagagaagggacaggactggagggaggcctaatgaagattgcacttggctgctgagcagtggcagggaggcgggcactatagcagccacaatgcctgggctggggctggtggggaaggaaagtggacagactcaggctctcctctggaggtgtaaccctggactgcctctggaccagtttggggaaaggggaactctagaatgtgacattcatgcatacacacaaatggactgtgtgatgtccagctccaggggcaggggggccacgccccgttccctgccttgctcagcgtccatccatggctgttctgtgcagggtacatagcatccaggatgcagcattagccctgatcaaggttatgcttcccatgtgctggaccacagggcctgttagggcaagctggggcctccttgtttaattcacgacaggaggaagagctgggtatagggactccactgtcaaaagccctgccaaccaatgacacaagccagcaaggcaacccccttggcacaaagagacagtgggcaaccacgggcctgcagaaggacttttcccctccgcactcctggcgagggtcaggtaccagatacctcacaggctgggaggcaggggcggcatcttttaaccccaagccttgggtattttttgctataagagacagctgcagggtccaatctgctgccttgacccctccaactcccaagagaaacccacagctaggcatggcagatcaacgggctgagagccagtgtgctgtgctggcacttagagacatttcccaatggaatctcaaaaggttggcactgctattcctgtttttacagaagaaaccgaagtacagagacatggagtagtctgatcttagtcacacagcacctatcatatcactctgtcagaacatggcgcactaggaggcagacacacasgcacattcgctgtctgttccctgccttgtcagggcacccaataatggtggctctctgtccccagcatggggcccaagatgagtcctcctttagtcagaggtgtgattctatccccagtcaccagggcttctaccacaaatgaaggacggtgaccaccctcaatgtcactgctgaactgggaaaccaggaaaagctatatgccttgtgggaacagcacataaaaaacatttcagatggacaggactggatgcagtgagtccatcctctccctccaagagctgaatggaatggttcaacctcaatggacctgagacgactctcttcaatgggtgaggccacttcatcactgtgcttcaacccagaaggatgaagctcattgttctgttcaagagttggccgggcgccgtggctcacgcctgtaatcccggcactttgagaggtcaaggcgggaagatcacttgatgtcaggagttcaaggccagcctgggcaacatggtgaaaccccatctctacaaaaaatacaaaaattagctgggcgtggtggtgcacacctgtagtcccagctactcgggagggctgaggcgggagaatcgcctgaaccccagagatggaggttgcagtgagccgagatcgtgcccctgtactccagcctgggcgacaaagtgagaatccgtctccaaaaaaaaaaaaaaaaagagtcaagggccctgacagctaggaaggaaggcccaagaatgactagagaggaacagatgaacaaaatccccaggagatttgtccaccaggcccagggcctgaactttctttttctcaaacacagatgcaattccaggacaaaaacaaaaaacacttaagctctttccttaaccaggtcttctaggacacattccaggaatacgcatcgtggtcccctacagaacttgactctaaccatcttggcctgtgctggcacaggggtgacaatgggaaggcacagtgacaccctcaggagcgtagggacatgcaggagggccaacagaaacagtcctttcaaaaccacgcaatgcaatggctgccttgtcctaagggctaatcccaggaaaaggagcaggcagtgctgcccagcaggttctggaaaaccagcagccactcgctgatggtggcaatgtactccaagtccaagaggcttcatttgctcatctggttcctctgacccaggaacacatggaatggcttccacccacctccccactttgctctgatcccttcactgccagccctactccccggaagaggaaagagaaaggcaccacactcaacgctctatcaagaaggcactcagcagcccccacttgacttctcaaatggcgtggcagccgaggggccttctcyggaaattagtagtggtaacaaggaggagggcacgttccagaaggtggtcaggcacatggtggtgccggaagggacacgtctagcgtagctgtgtgagtcaaactcctgaggtcgacacagaagtcctcccatttgagagaaatgacccctcaatgaatatttctgagacaactagtcctcctgccccatcctgtagcagcaagtgccacaaggtacattttggkttttcttttctttacaacctatttcccttcatgcctcagtgacgcagggagggtgaaggagcagcatggagctcagaggcctgcagcttctagagaccccaagtcctatcatcctgttttcacagatgcctgccaagagggccgtgaccacaataatcccacacaaactcacagcaagcacaactcaatcacaagaattttttttctttttttgagacagggtctcactgtggcccaggctggaatgtagcggcacgatcatggctcactgcagcctcaacctccaggtttgatcaagtgatcctcccagctcagcctcctgagtagatgggactaaaggcatgtaccaccacgcacggctaatttttttttttttttttaatgtagacacagggtctcactgttgcccaggctggtcttgaactcctgggcttaggcgatccttctgcctcagcctcccaaagtgctggcattacaggtatgagccaccatgcccagcctcgagatttttaagagtaaaattaaatcagatgctagagtctactaaatctttgaggatttttctttcctttgtacttctgcaaaaaggaatccttcataatactggaaaaaaaagatttctaataacaaaacccaagagttctgttgttttcaaaggaaaacacaccataagctttacagaaatgtagtaaattaaaaagaagagacctttgactggaaccctttctgagacgggggaaagagcaggggctactggcaagagatgccctgcccaagaaagagacctaaaagcctgttgtgtccactcacaaggccacccctggccagctgtgccctgaagggctgccttcaggaacagtcaccctgcaccccattggcagtggacagtttagaagcccccactcctttccacagataatctggggagctaagtaaccaatggaagaacactgcatccacctggcgttgtcatccacaggatgaaatgctggtggcagagcatagagcgagcaggagggcagaggcaacgacgcctgctgggagccgggcaggatgcagggagcccggtggccccgactcacctgtgcttgctgtcctttccattcccacgagcacactgcccccctcacccccgctccgactgctctgtgctgaggctgcctttcgcggtcttgttctgcaagggggggagagggcacggaaggggaggctgacacgggcaaaaccaagaggagacagacaggtgggagaggacagtgcagaaatcagggagggcaaagggaggacaggagtggcacatggaaaaggaaagaaaaggcagagtcagtcctgaccgacaaacaggagacattcagacagggttttctgaggcaaaatgtgacccttaaaaaggggagttctaaaaataacatgcaaattaagtaaaaataaagagaatataagatcctgtgaccactccccgcccttccccagaaataatttttaaagaaaagcataagcaagcatctttcaggagcattttgagggcagacctctctggacaacctccttctagtactttcggccctactagatttaagactgcgagtgaccagtgaccaccaggtgtcagtgtgacctcagccagagacacagtgcagcccctgcaggaaacatcaggtggcagtggtctccgttctgatcctttcttggggctccttctccatatacaccctccccacacacatatgtggtatccacaaacagaccattcaccccttacctcccaccctttcctaaaggaagcgaccacgagaccacctcctaaataaactgggaagtggagcccgagacagcccatccactgtgcatcaggctgcttctgcagaagcacaacctggaagagactgagcttccccagagccttgtggtcagctcgacttctagtctgggaagatgcctttgcacaggcctcaaggcctagaaccagacttaccaaacgccaacctgtgaattggggttctattcacctcaagtggaaatcagtggcttgatcgagttagatattctcacctctcttaatgaacagacaaacaccccctctcccaaaacacatttctcctgggatcctcataatactccgagtgctggcccccatgccacgggtctcccttcagcatcatgcccctccaccctcccagggccaggaggggactaacagccggaggcacaggtggggacaggtgtgggtgaggcccaccaacacctggtcttcaggtctttcaggaggagccaccctcgatcccatccctgctggtagctcttggggcctctgactcaccttgtgcttagggcacctcaccgagaagttctcctcatgtagcaaacaatctggaagacagaaggggacagtcagatggagacttcacagctggacayaggtgtggtcatgctggctgggattgacagggtcagacataaaggtagcaggtcgctacacttacttctaataggaaaacattagagacaacccaagtaagctatgataccttaacatgatggatatcggtcacttaaaaattaacatttgaaaagagttaatggtatggaaaacacccatgaaacaaaactgcttgaaaaaaccaggatgtacaaatgtataaatgtgctaattttattaaaatgtttctacgcattaaaaaaagacttggggctgggtaccatggctcacacctgtaatcccagcactttgggaggccgaggcagaaagatcacttgaatccaagagtcaagaccagcttgcgcaacacagtgagatcctgtcactattaaaaaaaaaaaaaaaaatactgaaaggctgggtgtgatggcacttgcctatagtcccagctacttgggaggctgaggtgagaagactgcttgagcccaggagttcagactgcagtaagctactatcacatcactgcactatagcctaggcaagcaaaactgtcttaaaaaaaaaaaaaactacttgggaggctgaggcaggagaatcacttgaaccagagagtcggaggttgcagtgagccgagatcacaccactgcactccagcctggtgacagagcgagactccgtctcaaaaaaaaaaaaaaaaaaaagactgaaaggaaatctatgaatatgtaacaataattctctttgggtaagaagatacagctgatttaaattttatcttttctatattcccacgatatcaccaataaatgctattttaaaaatccttgattctaggctaaccccatttctcaggctcaagccaaagcctccttgtaaaaacactttaaaatctagacgcgtattttcttctctgtacagagaatgcccaggtgtctgagacagaaaggtggccaggcccaagagccccactgtcacctttgccccacgacccacggagacacagaagcctccaacacaaatcacataatccacactaaatgcttcagaggaaggtaaaatcccatgaggatgcttttaatccttggaggaaaaatgattcattccaacttgtaacatgatgacagcatcctggatggcagcaaggacacatctgcctccaggtgagctgagctctcacacaagggtagtgcatggatcagggcaaggaaatctaattaatgagttcactctgcacaccacagctcctggagaccgacagccaggtcactggtgcaaaacgcggtggcagaatgttaataaatattgataacacattctcagagagctcccaggcaccatggcaggaggcagccacggtacttatccttgttaaatttaaactgagatccagactagcagcctgtgcacccacagatttcaagtgcaatagtaataagcaatgaacatacacatgaaaacttttcaggtcccggtatcctaaaacaaatcaaraagacccttttatatttggccagacctggaacatcatagcctgtctttcgttggagcccatgagtatctaagagagtgggcggcagccttcttggctccgtgggcccaagagctcagcaacttactactaacctccaagcccctcccccagcaagcaactagcaaggcaataaatgaaatgtgttaatttaaaacccacaagtacatagtgtgaccaagactcccgctgctccaatctgccagagagtttataaacagcaggagccagacaactggagctcaggggatatgctctcttcttacctgggctctggcagcaagcactatgctggcttagtctctagtttgggccaaacagaaacagtacagcacacgtggggctgggccacgcttacgccacaggggtttataccagtgaggacagggaccacacgagcagcaaagggtgccatcagaaaggcgcaggtggctcagttccctcacggccacagaacagtgaccagctgtgatggaccattaataaaacacgcctcatgttaggaaatgcgttccctctgagttagaagcagaaaagagtaagacaytatgaatgcacgctaacgacaacttgaaactaatgccagatacatctggaaatgaagtctcctacagcaatctgcctgaggcagtgtccatctctgacaaggcctcccatgcaggaacactgtgcagacaatgccctcctctgttctcatacatgtccacaggccgtcaggaagcacaattcacgttcctggcaggggccagaaccacagctagagagctcagaaacctggagggcacaggggagcttctcctcttaccagtccctgctgggagggaagagtgaagagcagtaggtgtagtaaaacctcttctgaggactctgaacaggcaactgcacctacatggccagccagtcaaggtctctcaatctgtgttcttcaaggcccaggcaccatcctacactgtccagagggcgcagtcagcacttctgcatagtgaagtcaaagtaaacagcttgcgagatcatcatccaagctcaaaaagacctacaaggtggcctagtcaacaagatggcttgcagacacaaacatcaacccccagaagagaaggccactttcatttccctcttcaagctcaaaggcagaatggatttactaagctcctcattataagctctgtgaagcttcagatacccacatgcatccacatgctcccaggctgaggatggtgggctcaaggagggaggtaggaaaaacaagaagggtttaatgtcctttggatctgttgtgtagcagacacagactccaattcacctacactctaccccagtactactgttattccttatgttggcacactgcagggcttgggacacaggggcctgccagccccaccctgccttgccgaagggtaggctcaggctcctgggccataaggagggaaatatggggctcttggcactgggactggctcctgtgaggcagacggctgtcccccggggaggagtcagactactggcatttcctaatgacccatccagggctctgayggcaccagcaagatcaaagtctgcagcagagatagcagctttaaaatgctactgcaacgagagctgcagaaagtagaattcccagctgttttttcatgagagtagaagaaaaaaaaaaaaccctccacacaaggttctttacgcacagtggaattattaatgagctaccacagcctttttttctcgtcttaattgttgtggctcattgcattaaatacattaattaaaaaaaaaaaaaaacagagctcatgctcttattactgtaacccccccmacctggagccaaatcctgtgcctatgacataacaagcaacacaaaacagctgaccatgatgtcagaaatgcagggtcaacatcaggtgggggggaaggtggcaggagtcacagatcatgaaacaaagattctgtttctatggagatgtcccagtaataaaagtcttccctgagacatcaacagctctttaaagatctgggtgggttgacagcaaggcagagatgaaaatgttaaactgctctttactccataagggaggttagggattctcaaaccaaggacttatttttgttatgattagaaagaaaagtccatcaataaacttgtttcctggatacaaagttacatcatacacagagagcaatttccaagaagactgkgtggaataatacaagcgtccatccccacagagcagtgcaggcctctgggtcactgtgacttgggtcatcaaaaagaccgcaatgaccaagacatggtcatcttgtgaaactgcctctgggtcccaggtctccacatgaaggagcaaagtgcacagcagcagaggcagcaaagccagaggccgacagccctaycctcactcctcccaacccagacccctctgtcttgctggacacgcggccaccaacttctgttaaatagagatgctaccagcttaactaggcaggctaccaagatgggccccaaaacagaaaatgacagayaccatttactcacaagtcctcagctaataatgagggtcctgcgcttctctgctggtgggctggggtgacaacctgggcacaagcttccactagaggagaggatgttccagtgctctatggccccttccaaaaaatcccaaccatattgcctgaacttgggttgaggagggtagctctaagcctgtgctgttcagccactagccatacatggccacttaagtttacattaaaaaaaaaaattcatttcctcagtcccactagcactcaatgatcacatctggtttgtggttaccacattggagagtgctgagctagagcgtttccatcattgcagtatgttaggctgagctttgctgcttgacatcttagaagctggaccagaaggcaggctatcagcagaacgggggcagcctccaggggggcccttgctgaagtgtgctcgggtgggatgtggcaccrgcctgtcagcacaccctaatgtgtccctgaacacagcctcagtgggggaccacttcttacccagctgcgaactgggagagccaaaactcacagtattcccaatataaaactaacaatcaaccataaaaaaacttaatacttaaaaatcctcatatatagctgggcataatggtacatgcctgtattcccagctagttgggaggatcgcttgagcctaagagtttgagtccagcctgggcaacacagtgagaccctgtctcaaaaaaaatttttttttttttcacttaaaagccattttcttggccaggcgcggtggctcacgcctgtaatcccagcactttggggggccaaggtgggcagatcacaaggtcaggagatcgagaccatcctggctaacacggtgaaaccccgtctctactaaaaacagaaaaaattagccgggcgtggcggcgggcgcctgtagtcccagctgctggggcggctgaggcaggagaatggcgtgaacccgggaggcggagcttgcagtgagccgagatcgcgccactgcactccagtcggggcaacacagcaagactctgtctcaaaaaacaaaaaaaaaaagccatttttttcaactagaaacaaaactttatattactgctccccctctttcctggccactagactacagggaagaaaacacaatattacgatgtaactagaggtaatgaaaatgagaaaaggcaactggttggctcttttaaaaacttatttttatttgaacagacctgttcttgctatgttatccaggctgaacttgaactcctggcctcaagtgatcctctagcctcagcctcccgagtacctgagattacaggtgtgaaccaccatacctagttaactggttagctctctttctttttcttttgagacagagtctcgctctgttgccaggctggagtgcagtggcgtgatctcagctcactgcaacctccacctcccgggttcaagcgattcccctacctcagcctcccaagtagctgggactacaggcacgcgccaccacacctggctaatttttcatattttagtagtgacagggtttcaccatgttggccaggctggtctcaatctcctgaccttgtgatccgcccacttcggcctcccaaagtgatgggattacaggtgtgagccaccgtgcctggcccaactggttagctcttgaaagagaaggatttaacagctgtactacagaatatggcagaccatgacccagggtaaattacaccttagactcaacatgaaaacatttggaggaaaaaagagaacagaagggatggactaaaacccaaactccctgaactgacatttcaaggctacttcatttttgttttgagatagggtctcactctgttgcccaggctggagtgcagtggcccaactgagggtcatgcagcccctcctgggtccttccatctcagcctccctgggtagctgggactacagacaagggccaccacgcctggctaattttttgtattttttgtagagacagggtttcaccatgttggccaggctggtctcgaactcctgggctcaagcaatcctcccacctcagcctccgaaagtgctgggattacaggtgtgagccaccacacctggcactctgtttctgattccctatctttccgttgatcaaatagtgccttggccatcaagctgcctttcagtccacatgtacgtgtgaatacacacacttttgtaatagtctaactggcatcagcattatcttctctacctctcttgttctttttaactgtttctcctacagaagcttggagagaaaagagggaagggggaggtaagggcaagaaggatgtgaaaggaatggagacatatgcttaaacaaaagtcaggagctgcaagcaactgctgcgctggaaggaagggggggcaggatgaattctgagacctgatccaagtctgttggccctgctctgtgtatgttatgcctcacgcctgttcccatcatgcagtcagccacgccctcttccccttcccatcaaattcaaatcaaaccccgcctcctatggacagcgtggctgcctccgtggacagccctgcttctctcctggggaagcacagagagggggcatgcacatgacaagcaccatgctacttgctgccttctctcaccacttttcctcaaacgtgaccacaggcattatgggggctgcctgggtgatggtcttagatacatctaatgctcaagtaactagaggacattatgtcaagtgaaataagccaggcacggaaagttaaaagctgcatgttctcgctcatgtggaaatttaaaaagctgatcttacggaagtattaaaaagtagaacagaggatactagaggccaggaaggggaaaggaaaggaagagataagtagagatttgttaaagaatacaaaattacatctagatgggagaaataagttctagtattctgtatcactgtaggataaccacagttaacaacattatattgtatagtttcaaatgactagaagataccaaatgttcccaacacagacatgttgtttgagacgatggatttgctaattacctaggtctgatcattttatatatatattgaaacattactgagcaccccatatctacaattactgtccattaaaaaaagtaaaaaasgctgggcgcggtggctcacgtctgtaatcccagcactttgggaggctgaggtgggtggatcacctgaggtcgggagtttgaaaccagcctggccaacatggcaaaaccccgtctctactaaaaatacaaaaattagccgggcatggtggtgggcgcctgtagtcccarctactcgggaggctgtggcaggagaatcacttgaatctgggaggcagaggttgcagtgggctgagatcatgccattgtactttagcctgggcgataagagcgaaacttcgtctcaaaaagaaaagtaaaaaacttaataaacttgaaattaacacccaccttgccgccaaaaaagtaactggggaaaacacccactgaagggactaaaagtctagagtaagaaaggtgattttcccaggttatcgaagctctgagtcaaaactcaagtcttctgcgtcactcattggatggcacttctttaacaaaatgtttcccttctttcaacagttaacacactgcaaaacatccccctatcatctcagcaaagaaaatacaacactctattgtatgtatacaacgtactgtgatttagagtaagaaatacatattttagtcttcatccctgattcctggcacagacctcctaaaacccgtgtaaattcctgagcaattaggggtgctaggagcatcttttcttctaatatttggtttttgatcctggttcctgacatggagctcctaaacccttggaatttcctggataggagcactttttgttctaaggctactcttggtggttcctggatgggggctgggcaccagagagacgaagctgtgattagcagcttggaactgttagctctacccaccccactccaggaaggacagagggggtgaagattgagttaataattgattatgcctacatgatgaagcctccaaaaaatccgtgaactactggattcagagggcttctggactgctgagtagatgaaggtgcctcaggggtggtgcccctggagagagcatggacgctccatgcccctgcccacacatctggccctatgtttctttcatgtggctgttcatctgcatcctttataatgggtaaacacaagtgaagtgtttccgtgaattctgtgagccatgttaaacattaatcaaacccaaggaagcggtcttgggaaccccagtttatagttgatcactcagaaacacaggtcataacacagggcttgagattggtatatgaagtggggagcggtcttgtgggactgagcccttaacctgtaggggctgcactaactctgcttagtatcagaaccaagctaaactataggacacccagttggtgtccaatggtgaattacctgtgtgatgctatcaagaaaagaaagtaaaaagacaactcagagaatggaagaaaacatttgcaaaccacatatccagaattacaaataattcttttttttttttttttttttttgagacagagtctcactctgttgcccaggctggagtgcagtggcgtgatctcgcaacctctgcctcccgggttcaagtgattctcctgcctcagactcccgagtagctgggactataggtgcgcgtcacatctggctaatttttgtagttttagtagagacggggtttcactattttagccaggctggtcttgaactcctgaccccatgatccaccygcccggcctacaaataattcttaaaacttgacattaaaaagataaacaacccaattttacaatgggcaaaggatgtgaatagctatttctccaaagaagatgtacaaatggccaataggcacaagaaaaaaatgctcgacattagccatcagggaaatacaaataaaaaccacaatgaaataacatttcatacccactgggctggctacaattaaaaaaaaaaaaaaaaagaaacacatatgacagcaagtgtcagggaggacctggggaaaggagaacactcatgcactgccactgagaacgtaaaatggggcagccattttggaaaacagtctgacagttccttaaaaggttaaacagagttaccatatgatccagcaattctactcccaggtacacatccaagagaactgaaaacatgttcacacaaatgcttgcatgtgaatgttctatagcagcattattcataacagtcaaaaagtggaagtaacccaaatgtacagcaaagcccacagagatagaaaggattgagtccaacagagcttaaagggaaaaaaaaatcataaaaatttaaaaaagaaaacagaatagtggttgccagggactggagggaagggaagggagatgagtgctgctaatgggtgggaagtttttttatgaagtgacaaaaaaaaaaaaaaaaaaaagaaaagaaaagaaaaaaaacaacgacaacagagagaatcwaactgtatgtcctaatcctttggatgctctggacaagggtctgtggtctcctcttacctgcatcaatggcacacgggtaatggtatcggaaggagcagcctttgttgtagcagcccaaggtggcgcctgcctcctggcagtgggaacatttctgaaaggaagggaaaagtcaggcatgtcagtatcccagatttggccctctcctccaggccttccctggtccccatctgttagacctcagcacgtgtctctgtggttagaggagtccgtggtggcaggatgagctggtcaatttctaaatgccattcactgaccacaccatgggaagggatccagcaataatgttttagaccaagcctcacaaatgttctcaaatcaacaatacagcagggtgagatgagcaatccatgtcataaaggacatgccagagtggggtccccagccctgcctctggtacccccgccatccacccacccacacactatgccaggcatttccttgctgctatcgtgagcggcctgcagatcttccctgtttacttctgctgtgaaaatctggggtaagagagggtaaggtagtagagttatatataaaccttttagaattagaagtggaatttggtttctagttcttgtatttgtaagaagattttatttttatttttgatctacttaccccaaatgcccaatacatttcccttttcagaaaatatgggctcctgtgtgcaaatggtatttttatacatgaatcttattttaaatgcaccagaaaacctgccatgaatttctggctaagtgagacattattttgtaattgagacactcctccttatatggtcaggttttcttaaagtggggcacatctctgtcagccctgtgatgtggctgctgtgagtgctcatcctgtcaggtaagaaatgtgtcctatcagcaacaaacacattcataaaactcaaccacatgtgaccctactaaggatgctggctcttcagatagcagaggcacacaaccagcaagactagctggaagagacagaaacttgttcctgcttctatgaaaaataaaagtgttccctaagcaattacactgagctggctcaggcccccgacacagatactgatggaaaactacactaacgccagcaacagcaaagcccaagcgctcgccacgctcagactgaatgatctcatccagccctctgcactattccacctggcaggcactcctaatgcttcacgtgaaactcttgagacaccaaagggaaaataacttgttccaggtcagagctgagattctggatgatcatctctggcatcctccagagacaaaagaggtaggaacaagggctggaagagattagtccttcaaaagctttgccctgctctcagaagatcaaggtccttctgggtgcccataatcagtaaatgtttatcatgtgccctcgcacccttgttaagagagaaaagatcatttggtctggagtaaaccaaggacaagttcacagcatttctagtagccctagactctgtcgacctttgtcagtgccacagagcatctcagaatcaaaaggactatcaacttcagagaagggagtgtgggtagtccatcggtggccaacctgcagccatgtctgctgccactttctttttttgagatggagtcttgctttgtcgcccaggctggagtgcagtagcgcaatcttggctcactgcaacctctgcctcccagtttcaagccattctcctgcctcagcctcctgagtagctgggattacaggcgtatgccaccacgccaggctaatttttgtatttttagtagagatggggttttgcatattggccaagctggtctcaaactcctgacctcatcgcatctggcctcctgctgccactttcttactcaagaggcccgaagatatggccctccctaccctgggggatgaatcacagtgagtggtggccatttaggaatgggtatggtcaagcatttctggtaggaaagtctgcaggaaaaagggcttctgaaaacattttgcactccccccaacctttttttttttttttttaatatattttgagacgatgtcttgctctgtcacccaggatggagtgcagtggcacaatcatggctcactgcagtctctacctcccaggctcaggtgattctcctgacctcagcctcccgagtagctgagactacagggtgtgtgctaccacatccagctttttcaaaaaatgtttttgtagagacagggtctcactatgttgcccaggctgtccttgaactcctgggctcaagcaattctcccatctcagcctccaaaagtgctaagattacaagcatgaaagtttcaccctctcaaaaagagacaagagggaggaacaggtaatttttcttgcgcagcctctgtgaggattagacagtgggatctgtggcagccacagtatcaccatgaggggacagccctgaagacaaagccagcctgctgaggacagaagagtggcaagatggagagacctgggcctaccatgacactgtcaagcactaaatcacccaaacccaggaccaggccacctctagccttgttacaggaaacttgggtgctgctgtagaagggttaagtatgcatgctctggaacctaaataactgcctggtaagtggctccactttctagctctgccttcttggccaaactcctaacctctgttcctcaacctacagacgtgggactaataatagcactcacctcatagaaatgtcataagggttaaatgaattaattcaggcttaaaacagtggctgggtcaaaagtgctaagtaaatgtgacccaagatgaccatgtgtcagacatatgctagataatctacaaagaccatctcatgaaaagcaaccacacagcaggcctcatcaccatcccggtttacaagaggaaagagaagacgtggagcttagatctgaacaatgtccatttgcttcctacctcaactccacaacctggcaagcagtgtgcaaactccactatgattaatttataacattgcatccaaaggggaaagactctcaggctgtattagggacttagagaaagatccttaaagacagtttagttcagtggtttttgaagtgtggtcccctggaacagcagcatcagcaacactcagggacttgtcagaaatgcagttttgttttttgggttatttttgagacagagtctcgttctgtcacccaggctagagtgcagtggcacagtcttggctcactgcaacctccgactcccatgttcaagtgattctcgtgcctcagcttcccaagtagctaggattacaggcatgaaccaccacacctggcaactttttgtttttttactagagacggggtttcaacatgttggccaggctggtcttgaacttctgacctcaagtgatccacctgccttggcttcccaaagtgctgggattacaggcgtgagccactgtgcttggcagaaatgcacgcttttgagccccacctaaatctgtgttgtgagaagtcctccaggctattctgatgtacaatgcagtttgaggaccactggtctaattcaactccccaacttttcagatgcggaaaaaagaaacccagagagacacaatgactgggtgagctaggattactggattactggtttcctgagagccattcagtgttctgtctcctacagagcaatcagatcttgggatatggtaggcagaatcccaagaacctgtgatcttatatacaaaatcaactttgtggatgagattaagtcaaggaccttgagatgggaagaatatgctaggttatccaggtgggcccaatctaatcacacaggcccataaaagcaaacgattcccccccagagggagttacagttgtcagcttcagggagacctgatgatttgccagcagggtcataggtgcaatgctgctggcctggaagaygggagaagggacagggcggcagctgcagaatttttaaaaggcaaggaagcatgttctcccctaagactctggacttttccaaagcccagcccacacctcaattccagcccagtaagacacctgtgttggactttgaacctacagaactgtaagcagaactgtattaacaagtttgtggtaaggtgttatgacaatgatagaaaactaatacacggggatttcccaagactctcaagtgattgttcattttccttttaggttctttttttttttttttgatggagtttcgctcttgtcgctctggagtgcaatggcatgatctcggctcaccgcaacctccacctcccgggttcaagcgattcccctgcctcagcctcccgagtagatgggattacaggcacctgccaccacgcccagctaatctttgtatttttagtagagatgaggtttcaccatgttggccaggctagtcttgaactcctgatctcaggtgatctgcccacctcagcctctcaaagtgctgggattacaggcatcagccaccgcacctggccttaggttctttaatgcaacagatttctccctcaatttgcctagtgaaacctacaatttcactaggcaaattgtgacatcaggagatcaataaagaaggaactctgggtctgtcttcgacatctgtttttcttgtagaagaaacaagaggctaaagcaaagtgacctgctaaagatcacatagctagtaagagaacttagaactttacctctttttcttctgaaccccaagttcaactttcttcataccataccatgacgcctgttagcccccttcattcactcaactatccaacatttgaaaagtactttctaggtgccaggtgccaaagatagaatataaatacttatctatagtatcttccatgtgtaaggttttcccttctacccaaaaatcaatacccaggccagtacaatttctaattaaatttttattctatactttttacctggagtagctatttgcattatcatcctcctatgctacaaataatatattaaagtcactgcacagctaaatgtcctttgtttttgaccacagtgttactacattcactccaagcagaggtaagtccatacaatactgctccccaggaagaatgagacacattgggggctccaagcatgatttctaaattaagacacattttaaaaataaggaatggcccaaacttcaaaatcttttaatagtaaattttttattatggaagggaataaaaactatttttaaagaactctaataagaacctcacattttttgatactctaaacttgggaaataaattataaaaggtattattagttttgggacatgttttaacggaaagtggcccagatacagagcttgaacctttcaccagactttgtcactgtctcagaggcagggctcgctgacttgaggtggcaaacygcaaggactgagtcaactagcgttgtttaatccttatctgagggaagctttaagggagccttctccaagcctgatgcctgctcattcacagaaaggctctttcttatgagatataacagcaacctgaatcatcatcctgtttaattagcatctcagagcagcctcagaacaccaaagcaactgggtcacagtagtattatagcacactgatgacaactggttttgttcaagccttgcagattaccctccactactgtgcctaagayggctcttatccagcatggcacacacttctgctcatgctcacaatatttacttactcatgtttgtccatctcccctaaactgtgagacttgttcttgcaccccccaaggactggcacaccataggcactgtaaatgtgggctgatggaatgaatgcaatgtctgacaaacttgagagcctgaagacaactaatgaggatactcttcaatgagttacaaaactgatgctggtggagcttggagaatgtggaacaaggtatgtgttcatttttggccaccagcaaaaagttttttgtccttttaattatgcctcctacatctaggatggaagccgctgtcctcccagctatcaatgccaactacgtggcagctagatgggctacatacaaggagctacccttcaaggccctgtgagcatttctttgatgcaactctgcatcctatcaagcttcttaaagactacttcaaagtgttagccaaagcaatacatacatagccctaggtgttttggtccttacttccttagagctagacgatctccttacgtttcttcatgaaaagctcatgagactggctggagaacctttaacttgccattaacacaaagactgagggaatgggctctggcaccagcctctgggacctgcaccacggcccagtaccaccaaggcttcccagtcaacctcagagggacagagacttgtccagttcttctcaggtccatttactcagtgctactcaagttatggtacatggatttagaatctgcacttatgtcctacagctgctccggcaaaagtgccagtttcagaaactgaatccattaaatacacacttaatcaattatgatgtcagtatgaaacatcagccagccactcactggctaagggctaattgtgtgtacttaagacaaaagttccaggcttgactagctttttagaataaatgtggttggtctaatgtgcatactgtccaggtatgatgcagcacagggctactggagaaaaaaactgagggtgtcagcacacgtgtgaaagccaaaagtcaccaggtcaattttatcatctgtaaaatggggataacagtatttgctttgccttctgcctaaagctgctgtgtaaaataaccataaaagtgttttacaaactagaaagttatgtaattattagaacttttaaataaaaattacataaaacatacattcatctctgtcatactttggcaattactgatatcaaaatcagatataatacaaagtacagtctattaaattaagacaaacagtttaaagttaattttttgttaagtaatttctctcctacaatctgccttaaacaagcagaccctgcatgggtctggacacctgctgctggtcgtttttttggtaagtctagctgctgtatgtttcagtaatgtttcatctccgacggtgtggaaggtcagttcttggccaagtctctggacacttcacttcttagctactatttactattactttcattgtatctcccctctcaattctcctatctgggaccaatacaaactaaaactatttttaaagctttctaaagcattttgcattacaagaaaagatgttaaataaatggggactaataatgacacacaactgcatacaaattaaattctagcaggatttcgaaagcattgaaaactgccccaaaatggcatattgagcacaactagaatgagaaaaaccgcctcacaggcttgcctgttgtactctacagacagtgccctctgttatgtggagagcagacctggaaaccaatgactcctttgctgcctgcatcagagtcacctgccaggtgctcctagccatacttctccaaacctgtccctactcacattaatctagaataatctgctgtggctgattctggaccctctgctgccatgtggatcttaggtccaacagatggtactattccttacaacacacttagggcccaatagttcatcttctctgcctcctgggacccagtcatctgcttccctccaatacaagcccatgaaaacactcacacaaactttctttaatctgatcatctttcaagcataatttgaaataaaattatatatttagatcaccattctcctcccataaaagccccaatcaaaacatggctctgctacagatcctgacaagtatttgtttctttgggaaaacctttcaagtcaaattataaacctgtaataagtgtctctgtggctgagtggtggttgggtggtagctggccccagaagtggtacaaaacgcacagaaagcctgacccaggtccaaatctcttgagtgtggccgttttggcggcatctaacagctacatccttggattctgttttgatccacaaagaaagcccgttcccttatttcccttccgatgtctttgtgcccataaggtgggaccagcctgtctgcagtttatagtaaagttatgatgttttccatcaggttagaaaggttgggattaaaggacttttctccttcattaagaatgtccttctttgtctttctgtacttcatctaccaaacagaggatgtcagaaattagccacaatcttgagcagataaagaacatattcagaatacacacagctttatacaatggacttactcattttaacactgagcaaacaaataatgagaagttagtaggtctaagacgcagctggggaaggaggtcttttctccagaagattctgtcacatacctctttttatgccattgttgctttaaaaaatccagattctcaggccgggcatggtggctcacgcctgtaattccagcactttgtgaggccgaggcrggcggatcacctgaggtcacgagtttgagaccaggctggccaacacagtgaaaccctgtctytactaaaaatacaaaaattagctgggtgtggtggtgcatggctgtaatcccagctactcgggaggctgaggcaggagaatcgtttgaacctgggaggtggaggttgcagtgagcgagatcatgccattgtactccagcctgggcaacaagagtgaaactccgtctcaaaaaaaaaaaaaaaaaaaaaaaaaaaaaaaaaaatccagattctcacccgtgagctgtgttatgaggaagggacctctgcaataatgtgaaggtaayccttgrctaacgaaagtaaaaacaccagacccatgcttcttcagaatcataaagtgtaagttattctactgaatgtcaagaaggcagtttgacttcctaacgagctgttctctgggacttttaatttgccttattaatgtgtcaatcctgattccacagcataaaactgcatgtccagaaagtagaaacatgggttggatgaaaattaataagaacttgatcmggctggtctttccccttgacatgcaggtttctctaaaggttgtaagacactgtgtgatcaaggtgccttttattctcagggctcttttctttgatatttaagttcccttaggagttgatggtatcgacttcagaagtataataatcttttctttttattcattctacaaatttttattgcatgcctgtgtgcaggggctgaaatggggagccaaaagttcacctagtgtctaccctccaggagctcacagaatgatctgggggtaaagcaaaatttaaacagtgatgtaaacagtacttcagagcrcagacttaatgccaccaacctagttaaggaagtcaggaaagcattcttgagggagtgtagcttgacctgagtcataaagagtgagtaagagctacctggggggaaggggaacaaactgctttgtggagggacaagcaggcagggtgtagggaaccaacacagtggagcacaactctgagagggtgggaagctgatatgcaggaacccagggccaacaatggctgttgctgggttagggatgatatggaagagtttgggtactggtggtggaaatgcatacaagaggcagcatagacttcgaaggtaaaaccgacaggacttgatgctgacacatggccagggggtctgtgagatgtgttgcagtgagcctgagtgtgtggcagtgtaaatcagcacagtggacagggagccctctggatgccagcacagcaggattctgatgaggtgagcacacacgtggcacctgctctaaatgctactttctcctagaaagattccatttacagaagagaatgttttggactgagagcaaaatctcaactggtcaggaatgggtttaattccaaatgacattttatgggtaactacgagaaaccttttatagaacacaggctatcttcctgctttagtaaatagctcagggttttgagtaaactgattgttttccgttgtcttagagttatgattctgtattaagagtattcttgtaagacacgaggaagagactaggctttatcaaagtgatcccaggacatagcctaaaacttgctttttaaaataaatccctgctagcaagctttttttccgtatcattttacttctcctaaagtagaggacaacaacgacaaatctagtcaaagaaactgttccagttagtttaactgacaattcctctgtgtaccttccttatattcagatattccttatcagaaatcttttttgatttttacctcaaatttaggcagtctaaaaacaaagacaagaaataaggaaaagagagaaagctggggcggagaggaagttctcggagtttttcactggagcggagctgtccactgaagctgctgatctggaatagcagcagggctaaaagaaacttatacttggccctgtctctcactggtacaggagcctaggcaagttaatttaagtctygattttctcaacaatacattggggataatacccagttgggaaaaaagggcacggtgggggtatcttctgctacttaaagacactgatcagggcaaaataacctgaacagggccaagtaaggtggcccatgtctgttatcccagcactttgggaggttgaggtgggaggactgcctgaggccaggagttcaagattagcctgggcaacaaagaaaggccctgtctctacaaaaaataaaattaaatttgctgggtgtgttggcactccctgtagtcccagctattcaggaggctgaggcaggaggactgctcaagcccatgaggtcaaggctgcagccaactatgatcacaccactgcattccagcctggatgacagggcaagaccttgactgacacacacacacacacacacaccctgcacatacttcccaggaagtaccagcactgatccctagtcattttgttactctctagtcccatgtggaatggatggtcccttgaaactacaaaggccgtctgtgcttgtctgcaaggctatgggcagcagcacagacatccaggaggagttaaagctaacaatctactattgctactaaaccaaacccagctatgctgccacacaaaggggttccttttgtctatttagagcgtattttacaggtcagacacagtatttaaccacttattccccaccctcagctatctgctttactatgtacactttattgatgatgtttaagtaacatgtgaaaatatggcaggtgatactaataatttctaccaaggtgcccacaaaaaagaaagttcgtaattatcacacatggtatgaacttcaactgcagatatggtaggcagatatcagccacttgctgtgggtttttaatgttctgtaacactgtaactctaattatcctgggtttacagccttcaggttctgcattaataaatttatggaggcaaaacaaaggaggaacaaaaaacaatttcccaaataaaatacatccatttgcctcaatttaagttaaatccaatctatgtcccccttctggaaaattaaagcattactcaagaaggcctggtttagtaatttttctcttgcacaaaatgtatacgtagtttgttataatgttaatatgaagtctcataactcagaaggccaacacaggtgtcactaatgatgtttctttgtgctaaccaaacttgcctttttttctgaaacacagtttgcattttattattattttttagatggagtctcactctgttgcccaggctggagtacagtgacgagatcttggctcactgaaacctctacctcccgggttcaagtgatgctcctgccttagcctctaaagtagctggattacaggcacccaccatcacgtccagctaacttttgtatttttagtagagacggggtttcaccatattggccaggctggtctcgaactcctgacctaaggtgatccaccctcctcggcctcccaaagtgcggggattacaggcatgagccactgcacccagcctgcattttatcttatctacagttatatatactccattaaaataatcctaatcagagggtttcttttatagccccaaaagaaaattgccactgtgctgaaaaccttatatattttgtctaacggagtttttcctatgttaaaaggagcttgtgccctttaagaaattagaaaggaagggcacagagtgctagagtccaggactaggtataagccattgattagcacttttcctctgaataaaagcagagaacctgagaaaaggctgaacccagcaggagtaggagacctgcggcagccctgtgatgaagaaagagaagagctttttctcaagtacagggagagaaatacttacatagtttgaaacactgaaattgaagttgcacaaggtcttgcactagcttatttttattttaccctttgctcaaacagtggattagcttataaagagaaatgattacattttgtgctttctgaatctaaaaaggcatctttttaaagaaattacactccagggaagtgactcttggtgtaagctgcttctctccatggctcatcctacccaggagttgggtctgtgcttccagaaagccaattactggaagctgcttattcacaaggcacccatactgaaatgtttacagtttcagtgcagaaacgacaaacctgctgccacaataggactcccttaacaagatttcaaatctgtgaagatcatactgaagcggaaatctccaaagctgttccaaacacttggctctggaggtctttctcatttttactcctttcttcctacttgcattcatattaccttcctctttcgcacccggagccactgccatctcaccaacgctctcgcctgtccatcttctcaaacaggttgaggtattgtcaggcaaagccaccctattcctggaagtggcaagtttttcaaaggcaggggcagcctgacaggacagacactggaggctcaggaaatagcagagtcccagcagaaaggaactttcaaaaacgaggatatcttgatatactgaagctaatgccaatgaaactaccacaggatcactggtcctcaaatcctaagccagcccctgccacctctcagccaagcttcagtggggtcatttaatttggcaacaacatgagacatagtctcacatctcatttcaggtcactcccacaggtcatgctcaaaccggggccttttcttcctggaaacctactggaaggaaaaactacgtccacactagaatggaaactttggcacccaaatctgtgactagcttatgaaccttcagttttcagaattgatttttgcatttctcaaagggtaactctgccacctgcaccagcatggtcctaagcttgagttaaaaaacacagactgaggacactgtcccagaagagactgaatgggaagcatcccaggttcttatcctcaagaaagttttagaactattggttcaattcatcttcatagatatggaaattttcttctacatttctgtttcagaagattcctaccagattaggaagatactcagcaagagtacaatcctcatttcaacagaaaaggaaaaaggaaaaaaagaaaaggaaactccaagagtctccatgaagaaaatagagatctggaagtaatataaccaagtttagaaatcctgcataattcctcaatacatctcctcctcctccacctacacttttttttttttttgagatagggtctcgctctgtcactcattcatcaagccaaagagtttgaggttgcagtgagctttgattgtgccactgtactcatagtggaacaatcagagctcactgcaacctcaaattcctgggctagaggaatcctcttgcctctacttccttagtagctgggaccacaggtgcataccactgcacttggctgatttattttttgtagagatggcatctcactttgttgcccaagctggtctcaaactcctgggcttaggcaatcctcctacctcagcctcctgaagtgatgggattacagatgtgagccaccatgcccaggcccaagatttaagtgtctattgttaggacagatttcatttatccaacaccttgacaaggcagtccagttattaactccattttacaggttaagaaattcagcttaggggctaagtgatgttatagtttcccaagaagccaactcctacagatgtctggatgaaggataaaatatgacctaaaagattctataattatgactctttgccaacaaagaccgtccagtaaattcaagagcctctgtgctctcctttgggccttgtctctgggcagtgtggtggtcgtataataaaaggtggttctatcacatgacttttctttcaagagtgagattagaaaaaagcaacaagtagaggatgggactggtcagattattgaaattgtctgaaaatacaccaatgactaagggatttcagagttcccaagtcaaattaaggagctaaaggcaacaactgggtgtttgctggtggtttcagagctccttgggggtccgtgggaaaagtgagtctttatgtggctggatcatttcctggggttctctacagctaatttggaagatcttaaacagagaatcttctggagctgagcaacaagattttttgttggcatattcaccttaaatggagcttttttccaaaggtgggaagggatgaggtaggtctgagagaacagaatgctgggtcagcaagttagtgagattccattattgggagatgatttgcttcaatgaagaacggtttctgtggcactgctaaaaccctcgccctgccaggaggcgaaactaaaacattagtagttgatacagatactatcaacaaccccggccgccttgcacaatgttcctcaggtctctaccagggatgcttaacgcttatccctgtcctgatgtaccctagtgaaggaacaagttgtcacttggcccacagtgagagggctaaatactaatgactctgcttctgcctgggagagtgtggggtgggggcgggggtagcggtagatggtgttactgagaaagccaggcaaagtggttgttcagagcagagaactaagagagtgctcttggtggactgtgagtttcacagggcatggtggaggagactggcaaagcagcagagtgtggttcttgacatgtgcctatttcccctgccactcacgcttcaaaccccccaagtcactctagtagtggcaggtccaagtgccacatggggagggcaggcctctgaggccttactgactcagccctccctttggccgagttaggtgtagcttctccacacttacacagacctcacagtatccatagaccatgcctcccagcacttacacaagtgctcactgaacataaggtggggctgcttttacctgctaaaaactatccactggaaattccttcattctgaaatggtcattgtgcatttcaatgtctaggaggcatctcagacttaacatgaacaaaatacaactcctgaatccccaccaaacctgttctcttgggagaccctggaggaagaacaggtttggtggtgattcaggagttgtgtttttcaacattcaggtggcactacattcacccagtggcaactcacatttttgtccccagagacatacactgaaactcatgaacaacaaagcctcatacagatgccctctataatgaaggcaaaacctgttcctctgccttacaaagaaccacaaggacaagaaattaagaatgctgctggtcatccatctctcatcatttttttccccaaaactataacaggaaaacaaaaatcagtctcactaccaaaacacattttaacatctccttaaatttttatacgtagattaaaattctgaccagcatattcacaaattatttccaatattacatactttttttttttttttttgagatggagtttcgctcttgtcacccaggctggagtgcaatggcgcgatctcagctcactgcaacctccacctcccggttcaagcgattctcccgcctcagcctccccagcagttgggattacaggtgcccaccaccatgcccagctaacttctgtatttttagtagagatggggtttccccacgttggccaggctagtctcaaactcctgacctcaggtggtccgcctgcctcggcctcccacagtgccaggattacaggtgtgagccaccatgcccagctcaatattacatacttttaaacatacatatttaaatggcatccaaaggcccacctcttcccactggaggttacattgcttctacgtgtctcttaaagaacctgtcagtcacaaatttaccctgcactgatcaccccccatgccaggcattagggtgggctctggggccaactcagcccttggggagcctatctggtgaggacgacaatcagataagctggtagtcaccccaagagcagctccagcttagctgggcatttgcataagtgctgggaggcataggctctgaatactgttgggtctgtgtaacctgcaaagggaaggctgagtcagtaaggtctcagaggtctgtcctaccctcagtgaggaggcactcagacctgccactattggagtgacttgggggatttgacccatgggtgctaagtggtgtaataggtaaaatgggagtgcagctgggcagcacttgctgcctggggaatgaggtgacaggtgagctggttttaaatcgatgtgcttttcacaaataatagtggattaaaatgcccaggcctgctctctgaagaggagggagacacaaagtcttatatcagcaaacaaatacatttcatttttgaggggttgccctttcaaagcattagtatatttttattacttcaataaagaaccctacctagaaacaagcaaacagaataatttgggaactgtcctatcacttatcctaatgaattacactattatcctagcaaccagctttgtatgaaaaaacaaaaataactttcaagcaaaccagaggccttcacctgacatgtgtctgaactaagatttaaggttcacaatcacagctttcaaagtctggaaccacatggcacccctagggagccagccacaatgaataggcctgagacttgttagatgaatatacattttactagaaacttccactagctgctccgtgagaaacacataacagagatgaaatgcctccaccgctgaacaatgtcagggcacccaggtcccactggtggtgctagtccatcagaagggactagcaccacttcagatttgagttcggctggaaatttgttattctgttgaccctggtattgtctatctgcctgtgtagcagttcttcaattctattttcataaggcacgttaactgacagcagtatgctgccaacatcttcaaattaagtgtcagctcttaagtgcatacaaccaaaatcactccactattaccaggtttacgtggacagcatcagatagggctgaattttctcttcagtttaatttccaccaataagtttagagacaggagggttatctttactaaaccaacacatgaggacacaattctaaggctgatgctaggtagctcataatatttgcttcctttaaaaccacatcaactcaaaagcttccaggaatagtttagcctccaccaaggaggctacttgatttccagcaaagttagttttatcctttacagtcctctatcatcatctaatttacagatgagaaacttttttttttttttttttgagatggagtctcgctgtgtcgcccaggctggagggcagtggcgcgatctcggctcactgcaagctccgcctcccgggttcatgccattctcctgcctcagcctccagagtagctgggactacaggtgcccgccaccacgcccggctaattttttgtatttttagtagagacagggtttcaccgtgttagccaggatggtctcgatctcctgaccttgtgatccgcccgtctcggcctgccaaagtgctgggattacaggcgtgagccaccgtgcccggctgggatgagaaactttttaagagctctactaatgcctaatttaggggcacccctgaagaaaggagttccatacatctcaattttccagagaagtgattcaggctatgagaaataggtacagaaaaacaaattgagaataataaaattccaaattaacaattaatggacattaaacacaaaattaacagggaacaacattaatatcactaataaaataaatgaaaaggaactaaaagtttaaaaagaaggtccaatgccactgaggtagcagtaaacaggctcacctgtcctcatggatgctcatgccttgttatgaccctttgttgattaaaccacaagacaatgcctatcaaaaaccataacaatgttggcccttcttgacctagcagttcaacagccataaatttttctttaaatcgaaaaataaaaatgcttattgctccatagaaagtagtaaattaactggaaaccacctcaataaaagtgcggtacttgaataaattacattatactcacgctaaactaagaaaaaagaaatcacagattagaatgaaaattaaaattacaaaataaagtaaaaaaagcaacacagacttgtayctacactgtgatgatggagactcacaaggtttgaatcctgggcaagctcctctctggacctcaaatctcacctggagtgtgatgagacccaccagaaagggttggtttgaggtctaaatgtggtaattcacgtatagtgcttagaaagcattcagtacatgttagcagtcattacagtcattcctggcatccatggaggactggttccaggacctctgccaataccaaactccacggatgcccaagtcgcttatataaaatagcacagtatttgtatataagctaagcacatcctcctgtatactttaagccatctctagattatgtatgatacctaatatgatgtagctaatgctatgcaaagttgttatactttctcatttagagaataatgacaagaagaaaaaagtctgtatatattcagaacagatggaatttttccaagttttttttttttttttgagacagtctcgctgtgtcgcccaggctggagtgcagtggcgtgatcttggctcactgcaagctccgcctcctgggttcacgccattctcctgcctcagcctcccgagtagctgggactacaggcgcccgccaccacgtccagctaattttttttgtatttttagtagagacagggtttcactgtgttggccaggctggtcttgaactcctgacctcaggtgatctgcccaccttggcctcccaaggttctgggattacaggcgtgagccactgcgccctgccccctccaaatatttccaatctgctgttgattgaatctaagaatgcagaacccatgaatatgggaagctaactgtattatactattatatctagtgaaataatcagcacatggacaaaatctagaagagtcagatatgttgggttatcaggattgcggcattcttctacgaacagttccattagttttacaataagaataatactgttatctttatgtaaataatatgtaaatctttttcatgactcaggagttcaaatgggaaccctgaccagcacagatggtgccagcacctcatctaaaccctgtggccaatttttcttttcttctgccttttcccatgtttcttgctccttcctatgggcagagcgacgattcccacttcagagcccatttcaccatagagtcatgtggtagcactttgcctagcctcaattcagtgcataaaggcacgaggctgcattytgaaactgaggaaatagggtacaactgtgcacaacagagaggttttcttcaggcccataaaaatgtttgacatgtgctctttctcagtgtaattaaatacagtcttggtttttcaccacattgtcagtatcttgggaaaattattttaaaagtctaaacaggccaggtgtggtggctcaggcctgtaatcccgacactttgggaggccaaggcaagtggatcacctgaggtcagcagttcgagaccagactggctaacatggcaaaaccccatctctacaaaaaaaaaaaaaaaaaaaaaaaaaaaaaaattagccagatgtggtgacaggagaatcgcttgaacctgggaggcagaggttgcagtgagctgggatcgcaccactgcactccagactgggcaagagtgactctgtccaaaaaaaaaaaaaagcccaaacagcaagttatcctttctgtttccccttccaattacattttaggaataattatgatgatagcttaaatttttttggtatctttttgggattctctgggttttttcttttttataaacatgacacagacctcatgatttcctatttttctctccactttctttcaatttggatttaaaaatttatcagtttacatctatttgaaaggctaaataaaaagcaagcagttatttaaaatgctgtattagaatctagtgttgacttatctaaacatgtatattaggctgaactgccttcatatctaatattttcttgtctaatacatattaaacgcaaacctaaatttcttttcttcaacccttctttctgttattggtatgttgatgacccctcacctcgcccactgacttgctggagctagaaacctcaacttcatccttgacctctgcctcctcactttcccaaacctgctgcatctagtcagtgtttaaaatctatcaactttagccgggtgtggtgactcacgcctataatcccagcactttgggaggcaggtggatcgcctgaggtcaggagttcgaggccagcctggccaacatggtcaaaccccatctctactaaaaaatacaaaaattagtcggcatggtggcacatgcttgtaatcccagctacttgggaggctgaggcctgggaggatgtttgaaactggggggtggaggttgcagtgagccgagaacgtgccactgcactccagcatgggtgacagagcaggacttcgtctcaaaaaaaaaaaaaaaaaaaaagtctatcaactttgaatccctaaaacgtttctcagatccatccaatccttctgactcccgtttctaccacatactcggtccttaccagctcttgcacaaattaatcccacagcctctcgaatgacctgtctgcttctgatgtctccctacttatttcctgagtttcctttataaaacacaaacctgtacatgtgacttacacgcttagaaatcactaatggttttgcactgcccgtaaattaaaggctaaatccttcaaatacaatagatccctgatatggtttggatctgtgacttcaccaaatctcaggttgaactgtagcacccaatgctggaggcagggcctggtgggaggtggctggatcatgtgggtgctattcctgtgatactgagttctcacaagacctggttgtttgaaagtgtgcaacacctcgcacctcactctgtcttgctcctgccatgcaagaagccttcctgctccccctctacctccctccatgactgtaagtttcctgaggcctccccagaagctgagcagatgcaggcatcatgcttcctatacagcttccagaactgtgagccaattcaacctcttttcttcatacatcacccagcctcaggtatttctttacggactaatacaagccctctggagttcacatattctcagtatattcactgttttaggggaggaggtggaatgctatagggaagtatttgtcctgaatcattctgtggatacaccacacaaactcagaattcttaattattttgggccttttagtgctgacatgttaaaaagtttacttaaaaaaacaactttagaccaggcgcggtggctcatgcctgtaatcccaacacttcgggaggctgaggcagacggatcagttgaggtcaggagttcgagatcagcctcgccaacatggtgaaaccccgtctctactaaaaatacaaaaattagccaggcatggtggcaggtgcctgcaacttcagctactcaggaggctgaggcaggagaattgcttgaacctgggaggcgaaggtttcagtgagccgaaattgtgccattgcggtccagcctgggggatagaggaagactcagtctcaaaaaaaaaacaaaaccaaaccaaaaaaacccaactttactaccaggcagattcttttctttggctttagataatcgctatcaaaactttgtcatctcactagaatgttaatgcttttacttaacatgcaaggtagattttagtccctcccttttgccttctgtcttttgagagatataattcctgagtgtgttcgtgttggctgatgctatttcataagacataatattaatactgcacctgaaatacctcacaccctgccacccttccccccgcagcaaacttgagtttccaacaagagtaaaaaggagataatgtttttatttccaccaaggacaactttcaaagagattaagttctgaacacccctggcaagatgagctagctgcactatgatggaactacaacataagctatagagtactgagtgagcttgctaacaggaacacatctttactaagacaacaatgagggaggacaccatctgagggcggtcaccagtctgcagcttgcatttcctctgaaaccacctaactgttgaaatgtgccaaacactgctctaagcactttccaaagagcaacacatttaatcctcctaacatacctctttactgtaggtgctgtcagttttcatactttgtatggtaaggacagtgaagcacagaggttaagtgacttgagctagtgacctcgcaaggaaacaacaagtcctggaattcatatgaagcagtgtgactctggggctctcacccaggcctcccctctacacagctgttgaggagaacggcaaaagccaggaccttccggggcaagtgtttagctgccttgattttctcttctcatacgtttttccaataaattggacgaatctgatctgcagtagcaagccttgagggtcccgcgaaattggccttggcttggggtgcggaggaggaacctccattttcctgaaacagtattggatgaagcaagccgtatcttttggaaaaatcgaagccctagtgcaggacctgtgtgcggcaaggcattgctttctgcagaatcacacaaactttcctgcatgaagttcagaagccttgacatagagcttctctaaccacacaccagctaaggggccgaggctgaggctgagtcaccctgcaagttccctgacaggagtttaacttcacatttcaackggttttccagtagagactcaagatatttgttgaattgaaagggatgcctgcttttacatactatttgctgttagctcttttaacagattagcaataactagtttaacatcccagggatgagtaattaacatataataacttgtgtgttgtggcttgtttatcaatatttttgtttatggtcctttgggatttttttgaatatttttctctacttatttattttgagactaggtcattaagactggctaattttcgtatttttggtagagacagggtttctccatgttgcccaggctggtctcaaactcctgggctcaggtaatccaaagtgctaggattacaagcataagccaccttgcccagccttggccaaagaatcgtgtactccttataaattttactttaaaatcaagtgtaatgctccccacatcatccccctacctctagagagaaaaaaaaagtcaagaaataaatcgtagtaaaatttgagtcctycaatttgtcatgatttattctgtaaggtaatatatgcaataaaattcaaaactgaaaatttcacttgattccttagaatttggacgaaatcctgaaagaaaatgaaccttttctctggaaatttagtgtcaatgtcatcatgcagtgatataaaaagatataccacacagtgttaagaaaaacaggtaaattagatacaactctctgctatatactgaaagccatgggaacagggcgccaccgcctagagagtgagaaatgaagatgggtcccagcagaagtaacaaaaagcaagtgcttgccagagagagggggctgggagggagaggagaatggagaaagggagtgtgggaatgtgagaaagggcagttgtagcaagcacagaggaagaacaatcaggtaggggtgggggtgaggtactggagttaggagcagagaacaggagttgaagggagccttcaccaggatgggggccttgccaggccctggaaatgaccaccttcaaggaacatatagttgagaatttagagagcatgtagactggtggctctattttacagttaaactagagagcctacctttctgacttggctgttttgatgttttaatatgtgatttcattttcataatgtaatcaatctattttatattttccaaatcatgttttccatcacaatttaaagtaaatttaagaaagatgtgagtctgttagatgggggaagtaaataattatccattatttaaacttgtattaaaaataagcccctaaactggccaggtgcagtggctcacacctataatcccagtactttgggaggccgaggagggtggattccttaaggtcaggagttcaaggccagcttggccaacatcctcaaatcccgtctctactaaaaatacaaaaattagctgggtgtggtggcacgcacctgtaattccagctactggggaggctgagacaggagaatcacttgaatacaggaggcggaggttgccgtgagccgagatcatgccactgcactccagcctggacaacagagtgagaccctgtctcaaaaaatcaaggaaaaaaaaccctaaatataatctttaatatattgattcagaaatttaaagaaaattggccaggcacagtggctcagacctgtaatcccagcactttgggtggctgaggcaggtggatcacttgagatcaggagtttgagatcagcctggccaacatggtgaaaccctgtctctattaaaaatacaaaaattagccaggtgtggtggtgcatgactgcagtcccagttacttgggaggctgaggcaggagagtcacttgaacccacgaggaggtggttgcagtgagccaagattgtgccactgcactccagcctggcaacagagcaagactcatctcaaaataaaaataaaaatagaaaataaaaattaacctaaaaccagttaacatatactgtcaggtaaaaaaaaaagattaaaagtttcccaaggggggttggaaaaatttgggaggggcaccttctatgagaggggaacaagcaaagactccccgactcccccactagtagggctatccagcctcaagggatccatggccaccagatctaccttctgtcacatccctgcacgccttggcattccttaatgtctcaaaggtgatttgtacataccaagttatatccatacccattcagaggcaattacctctgtaatatcattcatgtcagaggtcattgtgattctcatacacaattataccaaggcaaacagtggtcaatgttggacagaagcaaaggggacttgtgctgaaatgaatagattcacaagtsccacacttgtgggaagggaaaaaggaagggaaaaaggaagggaagtaaacaccatttttaaatatagaaatgttctagttttcggcaattttcagagtagtgtgacacagggagaggagcaatgtctcttgaggacttcccaatattttaatataacatcgtgcttgtcaaaacacctgataaatacataggccaaaatggatctctaatgaaatatatgtgactttatcttacatgataggattaagggcatgctcattaagcaagaccaaaactgaatgcatctatctgctaaaacctagtaagataaaactagactcaaagtatcctggacaattgaaacatcatctgtcaaattaaataaaaggcaagttagtgtaattttaatttgtccttgagtgcactgagaaaagtagaataaaagctaggtaaataaaagctagaaacggatcttatagtgatagtggtacatcagctcaaagagacaacaagcctaacttttttcttattttttttagagattgaatcccactcagtcgcccaggctagagtgcagtggcaccatcttggctcactgcaacctccgtctcctaggctcaagccattctcctgcctcagcctcccgagtagctgggattacaggtgcctgtcaccatgtccagctaatttttgcatatttttagtagacacggggtttgaccatgttggccaggctggtcttgaactcctgacctcaggcgatctgcccacctcggcctcccaaagtgctgggactacaggcgtgagccatcatgctcggcccaagacctgaattgagacacaggatctagagatttgctggggaagatttagcctgattactgattatcaattattgctatagaacacctaaaagtttacacaaaaaaactgggctgagatatgttaataataaatgttgaaataacgaaaacactgtcagatggtcacatacacatatgcacatcaaaaagcaataaacaggctgggcgcagtgacccacacctgtaatcccaacactctaggaggtcaaggcagatggatgatctgaggtcaggagttccagaccagcctggccaacatggtgaaaccccacaacaaagtgagattctgtctcaaaaaacaaacaacaaaaaacccaccaaatactgtgactttccaaggaaagttgggaagcaagaactcaactttgacaagaggatgattaacggattattttgagcgctcaaatttgactaaagaattttgtacttgagggtcttaaatgttacatcctcctaggatctttgcattttaaaatgtcattgtgtataaacttcttaggggaagtgaatcttctacctcaaacttggagtttcaccgtgatgttaataatggagacagggaaggaggcacaaagaaaagaccrtaattgggagataggggacatgataagagtaaagggcaagctccttgcatgactgaattaaaatgttctaatttcaaatatatatttcacattcaatataatttttactatagtctatgggcacttctttttgccagaaggttataaataatatggtagactactaaacatacagttgtacatccatctgatcccttcccacgaaaaagtggataaacttgcaagataaactcatgacaccatgagcaatgggaagctggaaacatgagagatgaagtgagtgacagtgattctgtgcactgcaaggaagcagacagtaatgatgagtgcagtggaggagcccccagaaagccagccactttagggcacagagcttggggaggcctcagtaagtgggggtgcaacatggggctgaaaaatagagcattagcccaaagtttctaagaggagttagatccttaacccagttcaaccaggtaactgttctcatccactgaaaacaggcgggagattgtcaaagtccgcgcactgaatcatgagcccatatccccacccacacaaccctaccatcctcttctccacttggcttttaggacgctggcagccaagcttgcatctctagacaggaaatctcaagatttttctctggaacaaaaaaaaaaatgtttttttttcctctgggaaaactcaactcagaaaaaagacccatatgctggctggctgccttattattctacggagaggactacaggctagcaagcctggcccatactgtaacagagagcttcaagtcattttttaaaacatctctttctctcttaaaaatataaatcaaggctgggtgcagtggctcaagcctgtaatcccagcactttgggaggccgaggtgggcggatcacctgaggtcaggagctcgagaccagactgaccaacgtggagaaacctcatgtcttctaaaaatacaaaattagctgtgcatggtggcgcatgcctctaatcccagctactcaggaggctgaggcaagagaatcgcttgaacctgggaagcggaggttgcggtgagctgagattgcgccattgcactccagcctgggcaacaagagcgaaacyccatctcaataaagaaaaaaaaatcaagacatctgaagaacctctaacaagaaagagaaaataggaaacagacaaagatttttaaaaattatagtacaggccaagtgtagtggctcacgcctgtaattccagcactttggaaggctgacgtgggaggattgcttaagctcaggtggtgagaccagcctgcctgggcaacaaagtgagatgctgtctctacaaaaagtaaaaaacttagccaggtgtactggcatgcacctgtggtccagctacttgggaggatcccttgagcccagtggttggaggctgcagtgagccatcatcacatcactgcactccagcctgggtaagggcatgaaactgaaacaaaaacaaaaacaaaaaatacgttataatgtattcaaaaagcaagagaaacgattatagccatcaactaggctctgattattctttaaaagtcagtacattcagagaaaaaaaaagctcttcaaaatatcaagaaaaaaaataagtaaataaaaggctagaaggctgggcactgtggcttgtggcacatgcctataatcctggtactttagaagaccgaagtggaaggattgcttgagtccagcagtttgagaccactctgggcaacacagtgagaccttgtttctgcaaaaaatataaatattagctgggcatggtggcacacacctttagtcccaggtaccagggagccccagagttcgagaatgcagtaagctgtgatcgcaccactgcattccagcctgagtgacaacaaaacaaaacaaaacaaaacaaaaccaaaacaaaacccacatacaaaaaagattagatgataaagctgaagaaagcatagagaaatcagaacaaaaagataatgagataaaacataaaacagaggagaaaagataaaaacagcggatcaatccaggaggtaaaatgccttatattaacaggaattataaagagagcagagaaaatagagggaaggaaattttcaaagaactaccacatgacaaattgcctgaactgaaagacatcagcgtacataagatctcatagagtagccaacacaaccatgaaatgacctagtcaagacctatcattttgacatctcaagaccctagggaaaaggagaagatcctcaaactttccagaagaaaaacagaacatgcatcaagggatgaaaaattagaatggcagtcttctcaactgcagcactggaagctagtggacaaaccaggaagaacgactgcaagacagtgagagaaaaatcacttccaatctagaattccacacctagccaactctcaattaagcatgaggctaggataaagtcatgctcagatatataggatctcaacatttttacactcccacacaccctttctcacaaaactactaaaggatgatgcacgcccttaaatgaaggctcactttaagaatgaggaagaaatgggattcaggaaacagaacattcaatagaggagagaaagaaatgaagatgatgatgttgatgatctgccccaggataagttatgaaacagatccaaagaataaatatcctaactggaaagtgtgcgttagaaaagatgtggcccaagaaacttgaaatataataatatgcttcataagcattatacatttcaaaaaatgaaaaacgattttagaagtctatacaaatcttccaaattacctatttcattttctgtccatcacatgggcataggcactttaatttggaggaataatcatgtgacatgtaagaacaaaaacatgcaagaaaaggaaccaaatgaaataaaaatcccaagctggtaagagatttctcatactcaccatctctctggctatttccagcgcttcctgcaggccatagagcctgccacaaaccaggtagattccattggcccagagaatacaaccctcatggacccaaaattcattgctgtcaagaggtagttcagggatttgtaactccagctcagggccaccttctgaagtggtgggcacggagggcttcgagtccaaaacagtcttttcactgctgccctcagtggctgcttttttacaagggagccccctggacagggaccgagggcctccaccacagtcttcygagcggtggcgccgcttaaacctggggtgtgcggccaggcttctctgctccttctgctgctgctgctgctcttcctcctcctcagtgtccgtcttggagccattagaagcacttttgtgccgtaccttaactttgctctgcatttctgtggccctcttaggaggtggattcttcgggagagtggctgcataatcttggggataaaaaggtccaaagaggtcacccatgttccggtaactggcccacttgccacacagacagcaaaccaggtgccccataaccgaagactctgtcacaacaggtccctgcagcataaaggaygaggccgggagcgccttgctttcagtgctgctaggtggaggggtcagtgacctctgacccttcctgcccctcactaatttggtctgttcttcttcctcagcattgatgattgtacaaacggctccaagttcacacttatttactacatggatgtaagggtaaaaagacttgttcttggcatcagttttatccagtggctgggtggcatattttartttgatctcaggttcttggggttccacaatgggaactgcttgtttggtttttcgcttcctcggctgggccccaggcttccttctctccctcctttgcctctgtttttttggctttggctctccatctgcagaaccttctggtatctgtgggggctgagggggtggaggcggtggctgctgctgtttcttttgcttattcacactaccaatgggtctccccttcttctttcctgatgggaaatatccctttggagggaaaccctcttgcttcggtgaaatcgtcactgtatcgttctccttctcttcwgccttggggtttgcctcaggggccaatatgcccactggaggtacattctttgagtctggaaagattaaaggtgctgttccacccagggaaccatctggtctcccttggttactaccaggcttctgtgaggttgtggatgtcatggcaccagggggttcctttccggcagtaactgtttctgcatgtgtctctgtcttcactttgtcatccacgctgccacgccactcttctgaagaccttggaagaggtttctctacgtgcaactcctggtttgctggactgactaggtccgaagccacctcaccttttctcttctctatgtcagcatcctgaacagcaacactcccaccttcaggaggaccactcttcaaagacagtatatcatcaagcgtaaccgtgtctcccccagcctccgcactgttcgaagatgcgctcctcctaatatttggggatgtaatcttctgaactatagcttccaatttcaatccccgtcctttccgtgggggcagtattttggtcttagcagggcttgtgagggtaacagcagggcagtttctaytatctggacttggaaggtccttggaggaatctctcttagggatagacttgatatcctgactgtgagaaagatgggcataggaattgaatgctttatcagcgccttcttttgatgagtgaaggaggcgacctttatcttcagtgctactgttctttacatcttgtgactgtctcttactgggaatgggagagataaaagaacgaacacgcctcctcatgattaaggggttttgagaagaatgatcctcctggcctggaagtctcagcataacactaccaggtttggatgactgtgtagcctcagctagtccatgtccatcagtctcatggggcggcccataccttttttgactggacattcctggaggaccgctgcttttggctggagaagtttgccgagaaagatcccaacaggattcttgtaacttctgggagccatgctttaattccatgcccttgttaggcagaccatcactagayattaggcagcgcccagcctcctgggcactggggtcatggtaagtccccactggtgggccatacatcataccatctttgtcatttttcagagggctccgtactctgtcaagaaactgctgctgccttggactcttccgtggcccctcctgcctgtgctgtgctgcagcaattactccctgagcagaaccgctgctccagtctttatactcctctggttgctgttggtacatctgtctcttataatgcagctgagaattcaaacctgcgttagggtccccataagcatgagcccgagtatttgcatgataagcagaggccagggtttctgagttgggagaaaagggagtgtgtaaagaactccggttagccctctctgaaaaggtcatgtgtggattcatgtgatgagggtctccccctgggcctctgctccgcccaggagacattttcaatttttctgcaaagtcatgatattgagaaggggaccgacccctcatgccctcccgaccaccaactctgccagggacccgccgcattggcgtgggtctgctgtcttgcgggccatagtctgaaagggaatcatgggttgctgctccagggctggcattgccgcggtaagactcatgcttgatgctaggaggatggcagtggtctccagatttcttgttgttgaaactagcttgagatttagactgttcaaagtcttcctcttttatctgcccgctctgggatttcagcttggtttccatggacaccaaaccaccaggaagaatgaccgactgacttaaagttggattgagacggtcattcctcccaattctggtgtcggcactcatgtgtcccagtgagtgagcccctgggtccctgacaatctgtcttagtggagaaatatcacagatcactgatcttctttcagagagggaacccccaggctcatgtgctgatgactgaggctctatttcaaactttctgggaattggatagtcagtcaaattgatctgtttcatttcaggagctgtgctgcttgatttcctttcccaggggccccagtggggattttctaatagagacccaatgcttttgttcagaaggcccctgctagctaattcattggtttgactaaccaagacattgggccttgtggttccttctaggctaccagccatcccctgatgctcttgagtactcctagaatatctcctgtcagggtggtggtggtaaccctgaagcacttcctgcaggaggcttgggaatttttcatttctaccctttcgttccccatggccagtgaaatctcccttttcttgccctgtaggatactgaggaaagccacygacatttcgtggcacggctgacccgaaactatctttgtaactatagcgcagacttccaggagatttgctaggctcagttctgctcgtaaaaccagggcccgctgcagagtggccactctggmcatttccttctccattatggttggagttgttatcgccattcttgtttcctttgctccctcctcctcctggaggctctggctggggaagtgatgcatgactggtttcctttgccccaccattgctaggtggcctttgagtggctgcaggatcatcctcttgggagcctttatcttgtccaccaggcttttctacccgacctgtcatggcttcccgggagacaatcaccccaacagtcttctcattaacctttgggttcccgtcggatgacaatggcatgtccttagcgcctggtgaggtggcctcttctcttgcggcaggactagcattgagtctggggggttcattctgagcaccttgtgccggtgaggagccagctttctcagaggctccacccttgtaggtggtgtcagagctggtgctctggccacttagttgccgcactctctcgccttgatcctctgaactgctggagcagcctccatctaatgactctgccataggggacttcagctgttcttcaggttgtgaggagccttcagaatttgtgcagctatctgctttcttggaagatgagggcctcttggaggtcttcttctgaggmgtcagggcatcagaaagtaacatgtgctggacagtgttaggaagattggccacttgagtactcagagcactcaaactactcaacccaggatctgtcagtcgcttttctggtaccccttctagtccaaaccctttgaagcctgcagcatgagaattaggactgggcatcattgatggggttggactgagttgaggcattaactgtaaaattctgtttctggaacccayaggcacactgccttgcccacactggagattctccccagtctgcatgagaggagatggggtagaactacagcttggagactgaaccacagaggcagctggagaagggttagaaatggggctgaagttctggtgaaactgcatgggggacctcacaggaacctcaggctggttgtactgccccacttggctttgcaggggcagcttggtggcagcgttagtatactgcatcacatgctgagaagggtgttgttgttgctgcggttgctgctgctgctgcccctgttgggtcccttgtggaatctttgcctgttcaaaattcttcatagattgaggctgatagctgtaattggattgtgttccataagcctgtgcattagaacccacattgtgtccttcatactgagatccagcattcacattgtaactgccatcatagctctgtccagactggctaaaacgctgtggtgaagggaaggaggaggaggaggaggaggaagcagaagactgatagtgttggccaaactgacccactcttaactggtaaccagcagcagaggatggcagagttgagggccgctgcattggctgtagatgggatgagctggatgctggttggccagtggcctgtggcaggggctgatgggactggtaaagctgttgtctcaactgctggacttgctgctgctgctgctggctggaagcctgctgttggtactgagcactccctggagagaaaggcccagtgtaatcctgctgataatgtgacacaccgccaaggccagagtgctgtgcttgaaactggcccacatgaccctcactcccatactgattgccaaagctgctcccctgggggggtccrtagctctgcacaggcccagaaggccttcgctgaggaggctgtggggttcctgtagtcacggggtctttgttgcctgccatgtagtaaaaatctccagcctctttcctgaaaccctggtaaccttgatggccagaggtctcgctagccatcgctgccgcagcagctgctgctcctcgtcgtccaccaccactgccactgccactgctgccactactrccacctgtacctccaaaattctggaacatctgggcctgacgagggctgaactcttctagccgggatgagccgtgtacctcctgtgggtagctttgctggtttccgtggtaactgctttgctcccgaaaggactgcatactgttcagcagcacagcagcaggccaacagccctcctagaaatagaagaaagaaaaacattagacacgcatctccttggtacaaataaaatcaagtctagatgatggagggaataaagatgaatcagaggcccagatgaagctgactggtttgaatttctattttttttttttggttttttgagacaagagtctcactctgtcacccaggctggagtgcaattgcacgatctcagctcaatgcaacttctgcctgcagggttcaagcaattctcttgcctcagcctcccgagtagctgggactacaggcgcatggccaccaggctcggctaattttttgtatttttagtagagacagggtttcactgtgctggccaggctggtctcgaactcctgacctcgtgatccgcccacctcggcctcccaaagtgctggaattacaggcatgagccaccacgcctgaccttgaatttcatcttttatattttatcctatccacttctgaaaatgcacatatgcagagaaatggcctaaagagtgaggcaagaatctgtagtagaatgaaaagcagcactctgagtgcatacaaacccaatacagcaaaaacatgtatgtctcatatatctaataatgccttattagacaaatgagcccccaaactcaaccagattaaaatatggggctgtgttattactgtcaatgaaaaacagcaatttttcaataagcctcccagttatgcgggggagggggtgtggggtaagaaaaaccaaatcctttttttttttttttttttttttttttttttttttttgagacaaggtctcactcttgcccaggctggagtgtgcaggggcacagtcgtagttcactgcagcatcaaacacctggcttcaaatgatcctcctgcctcggcctctcaaagttttgggactacaggcataagccactactttcatttctctgctttcatgtattagggtgatcactgaactgcgggttttaacactggctgctgatcgccactccccaacactgagaaacagacctggccagagaactgcagccaattccttatgtccaagtgcaaatttttgcagctttactataattgccaactacctgtgatgactggtgactccaggacactcagcccatatgggttccacacaaactttggagtcaacctcttcttggcatatgactgtgtctacagcacccctctctccaccactctccttcaattcccaggtacaaagggctagacttaagccagtgaatagcagtgactattcttccagattattttgggaggtttccaagaagttccagcacctttacccgccatgtggtatttgtatttgccagttttttaaattcacagttattactggccattactatgaaagaattagaagcaatcatcttggaggacagcaaaaaacagagaggaaaataggaattcatcaagcctaggacccagactctttcaaagttatctgactgagccaccactttgtattacctattataatccctcttaatcaatcaagctgattttttcccctttcacctgggcctgtctcctcagagtcagagatgaaagggacaaggccaaattgctccaagtgactttagaaccaattacttaaaaaaacaagttccaaaatacatatagggtaaagtgaggtgtaatagacagtttagtttagttacaatggtttatgaagctagtttcctagttcccctgaaggggagctgaaaatggagttgcctgcaggaaagtcaacaacctttttaaaggtaagtcagatttatcctctccaatccctggagtggctcccacctcattctttgggaaactggtctcaaaggcccctgctcccacccccttgacctctctgagctcctcccctatcactctctgctctagccccacagttgccttgttcctggaacaggcctaccacatatctacataggaactctgttctcacctgcacgttcttctcccagagccagatagcttgctctccttccagtctttgggcaagtgtcactcattccctggtcattctagtaaaaacagccagctccacaccttttccctggctgtaactccctcccctgttttatcccctgcctggccccatacttactccaaacagacacatatatgctacttttttactgtctgtctctcctctgactaaaatgtaaactccttaaagggcagaaactgactgttccttgctgtaatcctcacgtcatcacaccggagtctgtgtgaatgattaaatggtgtaagaactaggccttagagaactaggctagaactcacatattcagagatggtgctgtgggagtgacatgagagaattatagaaagtgaaaatagaatatgatcaacctaaaagcagagctggaggatgctgaagaccttgcctgtaaaatcccatgagtccggttctaagggaaagacccagcttgagtccacatgagaactgaggaaagacttcagaaagtaaatattgattagagcagaagatggccagtaaccccaaattctaaaagcttgacccatatcttgaaatatcgtaagtctaaaacagctagacaagggtctacttccttaagcttgattatatagtcatgtgacccaaaacaatcgctaaacattcatgtgcaaataatgtcagaatctaaaggaaacttctcatcctattcaaaatgcctctgttgctttgttccagtgaatctgcagggcagtaggtaatagctattcaaatggtgatgatgctgcttgacactgttccagcacttcacatacactaactcatttaatcctcacaacactagcacgctccttttacagatgaggaaacagaagcagagttcacaaagctcctaggcagcagggctgggggcaggacatgtttttaacattacattgcccagagggtcttccacatggtcagtaaaaaataccagttgtcctgtcagtttggccttgaaagtgggtagccacccacaataaatctgtcccttcactgccaccctcttataaggacctccatactgttccagctggctcttcaccccctccccatcattcttagaactatcaagagcaattctgtctacatgagtattaattttttccccttgtgatgtgctcctgctctactcctcagtgccagtggccttctctagataaaacaaggctgaatgggggctaaattgaacaaaaacattaaagctagcagtttaaactaatgaaaagccttctcaagagatattctctataaaaagctatgttacatgttgtttaattaatccttctggaaataaaatcaggcttctgaagatctgagtgtataaacaatgttgccacttgctccatattcttcctaaataggagccaccaagagctaaaggccactttaaacatcagggtatcaggcctgaggctgccctatctccagacagggaaaacagatacaggaaggactccttcttaggtctgttctcagccttcccctgcagattccctgtcctgtatgatacccctttccctattgttatggttctactttatgaaaaagaaaaaaaaaaaatccaaggccaaatacctcctgcagggttccagtcatgctaaatattcttagtatacatgaagcacctgagtaggagaaggtggttgcccaggtttatcttttttaggaatgccaagtaaaccaattaagaaaaccaagtagcatataccaacgacagaaaatgtaaacctggagctataaaataagtaataggctgggtgtggtggctcacacctgtaatcccagtgttttgggaggctgaggtgtgaggatcgcttgaggtcaggagttcaagaccagcctgggttaaaaaaaattttaaatgcacagtgtcatgaggtgtgcctacagtcccagctgctcaagaggctgaggtaggacgattgcttgaactcaggagttcgaggctgcaacgagctatgaatgtgccaatgtgctccaccctgggtgacagtaaccctgtctcaaaaaaaaaaaaaaaaaaaaaaaaaaaaaaaaaaaaaaaaaaaaaaaaaaaaaaagctaatagagataattccaattttatcccatcatcttaaaaaaagcatcagtgtagtcagttttaaagcactgtgattagtaataataagtgcctgaattcctttgtttaaatgaatacaaatagtaaggaaaatctgatacctcaaaggaataagtcacctaaggaacttgcatacacactctaaaaaagaggctgggcacagtggctcacccctgtaatccctgaactttgggaggtcaaggcgggcagatcacttgggctcaggagttcgagaccagcctgggcaacatggcgaaaccctatctttataaaaaatacaaaaattagccaggcatggtgatgcgtgcctgtagtcccagcacctcggggggctgaggcaggaggatcgcctgagcctcggaggcagaggttgcagtgagcagagatcgcgccactgccctccagcctgggcaacaaagcgagattccgtctcaataaataaataaaaaagaggcctaccgatgtacttcccatccataatgactctccctttcctgtttttctcctatattcctaactttctgaacagtttcagaagggctgtggaggtgtattagtgaggtccagaactctgtgcctaaacattccagagtccatgtgccgacctcacaaactcactcataaccagctgcagacttgttctccccatcctattagagggctgatgaccttgccctcttatagaaaaccaacattggctttctctgtccttcttcctccatatgtccaacaacatcccacttcccaatccattctcttttttggaaagagagtctcactctgttgcccaggctggagtgcagtggcatgaccacaggctcactgcggcctcaactcccagctcaggcaatcctcctgcctcagcctcccaagtagctgggaccacaggcatgggacccctggctaatttttaaaaaataattgggactatggctaatttttataatttcttaaaaatagagacagagtctcactgtgctgtccaggctggtctcaaactcctgggctcaagccatcctgctgtttcaacctcccaaagtgctagaattcagccattgtgcctggccccagctaattttttcatcctctgtcatgattttctgcttattctccttctttgcctttaaatcctcaagacattgacaatgatgcatctagttatagcctgtgtaagggatattccctgtttgcccccacagcctctcctcacccatctccaccctactctatgccctagaacggacaatggaaggacaactgacaggccccaccacccttgccttctgacccagtttggctggtaagaggcaggagaggaggaaagtgagaggaacttactctcctggctcccaccccgaggttactgaggctggctgagaccctccaccaatggctgcagctccatcgggcaacctcaacatatagccactttctccaaactccaggaaccacttcatcctctgcccttcaggtctagaaggcagtaggtaacaactccctgctactgctagcacagaagacttcactttcctgttggcttccccaaaccctgctcaccctttccagtccctttattaatcttctgcattgttgtcaactcagcatcgtgaccaccctccttccaagctctcctctgcagatcagaagctgagaacttccgttccagaaccctttagcagcatggttctgggttagagtttgcaatgagaagtgcaagagagatttagaaggcaaaataaacgtagaggttgatgatattccctggaggtagatgcagcacacgtggattcatagcggcttccccatgagctcacgagaaccattcactatgacacttcagtatgaaatcatcaggaaccttcccaattccagttcttccagg

SEQ ID NO: 98220 - DNA, 20979 bp, Homo sapiens
caggagaatggcgtgaacctgggaggcggagcttgcagtgagccaagatcgcgccactgcactccagcctgggtgacagagtgagactccgtctcaaaaaaaaaaaaaaaaaaaaaaaaggctaggcgcagtggctcacgcctgtaatcccagcactttgggaggcagaggcgggcggatcatgaggtcaggagattgagaccatcctggctaacacgtgaaacccgtctctactaaaaacacacaaaaaattagccagacgtggtggcaggcgcctgtagtcccagcaactcgggaggctgaggcaggagaatggcatgaacccaggaagcagagcttgcagtgagccgagatcgcgccactgcaccccagcctgggtgacagagcgagaccctgtctcaaaaaaaaaaaaaaaaaaaaaatgactgcaaacacacgaccactgaattcaatcaagctcacccatccctcagttactaagaccccaaacccaggagtcacccttattctctatccctcccatgcgccaacccatctgcctccaaatatatcccaattttgaatacatctcattatctccaccccccagatccctagtcccagactcctctgccattcctgggatgactccaacagtcccccactggtctccctgcctcctccttttgaccctctatggtccatcatgcacgcagcagcccagatgatcagatcacatcactccctggcttaaaatctcccagttttcactacacttggatttccttaccgaagcctgcctgaccctagccccagcctcttgttcagacctttcgctcctcaggacactgtagcaacactggccttagctcttatcctcaacacactcagctcatacctaggtgggtgctctgcacatgctccttctatttgaagtctcctccaaaaatggtaaacagctgcgttcgtatcatttaagtcccagttcagatgtcacctcttctacgaggtcttccccaaacaccccagttaaaaatgccatgttcccacccctattctctctaccttatcttccccacaacactcagtaatacaatattcttatttttctacgtaatttccccaggacaacaatttaagccccactattcttgttcactactgcacccccagtgtctagaacaatgctaggcagtgctagacattaagctttttctttctttttcttgagacagagtttcactcttgttgcccaggctggagtgtaatggcgtgatctcggttcactgcaacctccacctcctgggttcaagtgattctcctgcctcagcctcccgagtggctgggattacaggcatgtgccaccacacccggcttattttgtgtttttattagctattgggtttcaccatgttggccaggctggtcttgaatttctgatctcaggtgatgcatctgccttggcctcacaatgtgctggaattacaggcgtgagccaccgagcccagccaaagctttcaaagaacactgtgaagcagttggtttgaaaggtaatgctgtgctcccttaatcctcaggatggtgtgtctgttccctctgtccacatctaagatggaagcttatttaccaattcattcactcaattctaataacaactgatatctgcgaaggttatcacagtgaccatacaaccagaatcatctgtttcacaattcaaaccaagattttattttaacatggcacagagtttctgccaaatatttttgtagttaactgccatcacaaatttatatgcaagaggttacatgacttcccccaaggtcacatgaaacctcagcaccccagttatctcaaggcaaaaccaaacacctaataaacatacttgcaactgctcagcccctcttgtgtactactcagtcatatgcacaaaaataaatgctaaaaaccagagaataaatgtggtttttcaaaaatctcacctccttagctggttgcagtggctcacgcttgtaatctcagcactttgggaagccaagccaggattgcttgagcccaggaatttgagactagcctgggcaacatagcgagacccccatttctttaaaaaaacaaaacaaaataaaacaaaacccacgttctattttcttatttctaatcttactacctggtagcaggtactgtcaaacgagagtacacattcaacttggcactgttctgaggttatggtgccctgatccacaggctgagctcgatgccaaagggaagcagcatagtgccagttgctaagccctcaggcttcggaatcagacatgtccagattcaaaccatacctactaacaactactgataaagccccaggcaattttttttttttttttttgagacggagtctcactctgtcacccaggctgtagtgcagtggcgcgatctcggcttactgcaacttccgcctcctgggttcaagggattcttctgcctcagcctcccgagtagctgggactacaggcgcctgccaccacacccagctaatttttgtgtttttagtagagatggggtttcaccatattggccaggctggtctcgaactcctgaccttgtgatccacctgccttggcctcccaaagtgctgggattacaggcgtgagacactgcaccctgccacaaatttatttagcaattatatagcccttattaagtaccaggcagggttctaaatactttacaactattacatgattgaaacagacatactattattattgtatctaaaggcaaggaaacaggtgcagagaggttgagtaacttacccaaaacacagctacatgagtgttagagtcattacggtattcaaatctaggctgcctgatgccagagtccatgctctcaaccataacactatgtttgctctctaatcctgtttcttcatctataaatcaggctaataggcctgcctcatctcacagagtcatgtgaaattagtcatacacagtaagataaatgttaggtactcttagtgctgggagtaacacccatcattctattatctaccttcacctttggtccagccaaggaaagaaaaatactatatttggctgagaaagatctccaaggccctctgcagtcaggtacattagaatacagtggaagctccacgagaacagggactgtctttgcttaccacggtatccagaacaagcattgggcgctcagtaaatatatggtgaatgaggtaggaatgaattgactacaggcatagggttttgcatacatgactattaaggtagtaaccatcacttctcaaatgtatctaagcacaaaaggggtaaatatacaagcttctcagagaaaccgtgttagttggttatttgagacagcctggttattgggaggcagtgtgcaaactgcataatattgttcattcatcttagctgaaggaacaaacaaggagaccaggattttaatcctgactctgctactggaagtcacccaggctctcaaggtcttagatttttccacctgtataagaggttagtctacgtgatggttgtaaactcattctacttgctcatcactttctaacatccacttgctgaatatacatttgttcaatgaagatcatctccaatggacagacaatggattcaggaagtaacttactcaaggtcacaggatcaggaaagagagcccagatctccttctacaccagtctaatactcatactttccaagatccttttcggttcaaaatggtgtgatactattcttctcttccaagttcaagaactctataatcatttatcttaccaaataatcttgcctgactcccttaaatcatgagacaggaagaaacaactatttccacatcattaacctagagaatcaaaagacgtgaagaggccaggtgtggtggctcacacctgtaatcccaggactttgggaggccaaggcaggccgattacttgaggtcaggagtttgtgaccagcctggtcaacagggtgaaaccccgtctctactaaaaatacaaaaattagccaagcatggtggtgcacacctgtaatcccagctactcgggaagctgagggcaggagagtcacttgaacccaggaggcagagttgcagtcagccaagattgcgccattgcactccagcctgggtgacagagcaagactgtctcaaaaaaaaaaaaaaaaaaagatgtaaagagataattaggtgcaaatcctttcccttagcccggaattgagatcagaaatattttctttcagataaatgatgattttactttaaaccatatggtttcaatttaagcaatgtgatgaaaaataagttcaagtttaaatttaagcaatgtgatgaaaaataagttcaagtaccacaagcttcctgagagtacaacgcataacaactcgtaaaattctattatcaaagttgcgccacttgatccaaaaggaattcacaaagttaaatgtgaaaggttgacagagaatgtctacagatgcttgcttgatttttattaacaaagtacacatttgacattgaacctctgagtataacaccttcccagggctgtcaagttagaagtgaaaaaatcatctggcagtcagtcagctttctagatagctcctaacaggggagtcaaggtcaaactggagtctccttatcctcccatatttgacaagcaacttattgtgaggctcaaaatattcgtactgcattctgacaaacagaaataattgcaccgtggttcataaagttctgtgagggcaggctgacataaacaagaactgagtggtggtagggcccatgcttctgccacagcacttcggtgacactcttgagaatcagaactttcacctactttctaccagctttatcatcaaatgagaaaaaccacctcattcctacgattacatgaatcaaataatattatgaagaattaaaacaggcctcaaatcttgtgcaaaggtgagagactattattatattatttactacgtatgggcccagaagaccgcccccctccccgacattccacgttccgcagggtcctcaaaaggtggtacagggtcctagtttcttctccagactccaggcctggcaaccgtagatgctgtcatgcctctgttgctaagagatgggaagtgaggcctcaggaactgggcctagaagactcaacaacgaccgcgccccctagtcaccttgtcctcaccttgaggaatggaaacacaccccacgggagcaggcaatgctgtcctcaaaaagaagaaagaggtgcctccgctcttcacccggccgccgctgcttgggcccacgcttcttgcgaggcagggacagggccaggaaagctgactgtgccggggacgccttgacctagggcaccagagaagcgggcacgggtgccgggcccacaaccgggacaggtacacgagaagttggccccaggttgggcccgcctcgccctgcctcgcccacagccgccggcacagtaggaggcaccccgcccccgtgaacccagaggtccctgagctcgctcacctgcagccgagtcaccagtaggctgtagggcgccattttgtgcactgacaaagatgaggtcgcattaaagtgacgtcccacacggcgcctttaaagcctttgggcaggggcgtgcccggaagagtggggcgtcacggtgaaggcgaggcctccctagaggcgccagaaccctgtgaacgcaatgggcggagctcacgtgcaacgaacagacacgcaagaggaaatcggactgcccaaagacacttgcagaaatagataccaagcacaaagatgttttacccaagaacaaattttagttatctccgccatccaaatctgggagagtttttaagagtttcatgcacctgccaggacctggccgcccagcagcgacaaaaactcgcgcgagagcaagacgggcctggtgcaaggattgtaaactgacggaagcttagagaaccaatcacagcgacgtggaggcaggaacaatgggggttaaaggtcggacggaagttcccgaagcttccggtggccggcttagttaggagctatggctaaacatcatcctgatttgatcttttgccgcaagcaggctggtgttggtgagactgcgccctacccctggctgtctgggcaggggtggtattaggagctgrggggtcgggggttcccgtctcttccttaggggcttgcctcgcaggcgccacgtttcccgcctctcaggcgcggggtgttgtaggagcgcgcaggtttgtggcctctgatgagaagagggcgggggtgcgcgtrctgggagccccaggcaggtatcggggggtggggtctgaaccaggtccagagaaactctgagcttgcccagggcgttggaggagattcaggagggtgcttggatgtaggtttggttcatatggaaatttgtaatgataaaatggctatccgcaggtctcactcactgcagtccttactcatgtccctacccccagctcgaggakgtacttctcctctttctcaaaacctwtattctaattgtactttttaccatctttcatcttgcagccatcggaagactgtgtgaaaaatgtgagtggaacacaccgtcccaacaacccacccttcccactcccagttttctgtggaaccagcaaaagtgccacaragagggctttgagtagatgtgcctggaagtatgtgaacactgaatgctgcactttagccaaaggcccctctaactccccactgccgcttgcacatttaacgctgtatctctctagttttcaacgggaagaatcgccagagtagcatgacccctccccaacacacagcactttgccagcaattatacaggcttatcatctccgaggtgcttttctaagctcttcacatatgttaattggtaaacttttgtatgtgttgaggggcttgagatggacmctgkggaaaccaagttttgtgatgccaagaggagggccctaaagtcactgtcaaaaggagactagtgtatttcccaggagactagtatatttccccatggcaggagatagcagaggactgaagaacttgtgagcatgactccattctcttccttacaggtgatggcaagtgtgtgatttgtgactcctatgtgcgtccctgcactctggtgcgcatatgtgatgagtgtaactatggatcttaccaggggcgctgtgtgatctgtggaggacctggggtctctgatgcctattattgtaaggagtgcaccatccaggagaaggacgtaagtgtacagctttccatctgaycttycctccttttgtttagtaacactttgccatccactgcaatctcctatggtctatggagattactgtgttcatctagtcatctaggttataatttcttcaagttctgtgagtcaaactgggtgtagtccaataaaaggcagttattttgcatcaaggggaagaatgcaagggaagcaaatctttgtcaagaccagcaatttggagagccctctcattcatgtctctgtggttattcttattcagaaatgacatccggctgggcgtggtggcccacacctgtaatctcagcactttgggagtccaagttaggaggatcactttagtccaggagttaaagaccagcctgggccacagagcaagatcccatctcaaaaaaaaaaaagtgttttgttttttgttttttgcttcttgttttttgtttttttgagatggggtctcttgctctgtggcccaggctggggtgcagtggcatgatcatgtgcaaggctcactgcagccttgaccccctgggctcaaacgatcctcccatctcatcctcccaagtagctgggactacaggcatgcgccaccatacctggctaaattttttttgtagagacagggtcttgttttgttacctaggttggtctcgaactcctgggctcaagtgatcctcctgccttagcctcaccaagtgctgggattacaggcatgaaccatcacgcctggccaaaaaaacatatttttcattagtcaggtgtgctggtgtgtacctgtggtcgcagctacttgggaaactgaggcggatggatcacttgggaccaagaggtcaaggctgcagtgagccattttcacgccactgcactccagcctgggtgacagagaccctgtctgtttataagtcctgtacagcccatgttgtgtcatagccacttaaatctatcattaagcactatttgggtgtatatcgtgacaaagttgaatttgggacaattcaagttgacttcagctttaagcaggtaacagatgcctttggtttaatattgcagaaatgattgtggacctgcatcgtgattttttttgtcccttgacactgtgtagtggcagtggctactttctattcaactctgagccaaatgccaggagagagagcttatagactagtgctacaggcaagatttaccccatttttttcggttagtattggcagcagggttctttgtgggagaaaactatgaatcagcttgttttcttcaaaaaacaaaaggaagtatgatacagtctcactaggttaatgatggtacctagttatctaatttaattctaattcagaataaggcaaaagatgcgtaattcttcatattcccatgagcgaagaataggtcttttatagatgttatcacaccttgttcctcacaataagtttgtgaaatagggattattattatgatgcccattttgtagttcctctgacaagcccaggctgttcaactaaaccttgtagtgtccttatttcactatgttgtccttttatttatttatttatttatttattttttgagatggagtttcactcttgttgtccaggctggagtgcagtggcgccatctcggctcaccacagcctccgcctcctgggttcaagcgattctcctgcctcagcctcccgagtagctgggactacaggtgcatgccactatgcccagctagtttttgtatttttagtagagatggggtttcactatgctggccaggttggactcaaactcctgaccttgcgatccacccatctgggcctcccgaagtgctgggattacaggcgtgagccatcacgcctggccttatgttgtccttttacaagtgtttctgggatgtgcccatggtgaaggcagtaacgccagtacctcatttcacgcacttggatcctgcctacccccagtaagtgggagagattgggccagataagaccacaccattgggccaggcacagtggctcatgcctgcaatcccagcactttgggaggttgaggcaggtggatcacctgaggtcaggagtttgagagcagcctggccaacatggtgaaaccccgtctctactaaaaatacgtggtggcacacatctgtaatcccagctacttgggaggctgaggcaggagaatcgcttgaacccaggaggcagaggttgcagtcagctgagccgagatcacaccattgcactccaatctgggcaacaagagcgaaattccttctcaaaaaaaaaaagtgagtacaccattgaatcttctgttgtttagggagatgagaaaggtcctgaagtaccaaaaacataatgatttggacctttctcttgtcctcaactctgatttgcatttaccttcaactatcaagtcacattctgctgtccgaaaatccaaatctagtctactagctagattacacttcattagaggcaggactttggtttgtctatttgcctctccttttctttaggtcatgatacagtgcctgacatgcggtgcaagcatggtacttgtattttggtgctgtccctgtaagtcatccagaggtatcccctgtaggktgtctagcacatagtaggtgtttgttaattacttctggtctataagcagtgaaagcatgataaggtaacagcagtgaagaaaagtaacaaacagttcctaaactagatacaggatatctgtttaagccatttaagacagcattttcttgaatttttgcatgggtctagctagagttcttatgtagcgtaagcttgcaaccagagaatgcttaataaatgttaattgctgtctgactcctctgaatgtggtgtgtgaactgatacctttggatcctcatgcctcattctgtccctgagacttattctagatgtcacttcccctacttcacattatacacgaatgttctgaggacatttgagatggaatctagctcacattttcagcmctagtttccaaggaacacaaagaagtccagtgacatgatccaggctctcagccttacagatcatcatgtagattaagtggccgaggctctttcctatgcagaaaccttcctacaaccaaggtaccccttgttattattgtcttcctgcaactttcataattgataagggaattagacaggtaagctaagctaggtattctcatttataatttttcaaagccacaagaataaccaggagacagggatgatgtctatggacattgctaccagaggactgatttgtaggttcttatggtgccacatcatgtaatccccttaatcttgattcctttattccttttgtttaccattttcctcagttcgcccaaccagaaaataagaaaaatagcactaacatttatgaagctcttaatatatgcaaggtacttagctgaacattgttttccaaaagttctgtgtgatacagatgaggatgctaaggcttagagatgttaagcaacttggttagcccaaggtcacgtggctaataagtgacagacccaggactagggcctaggtggtctgactctttttttttttgagacgcagtttctttcttgtcactcagactggagtgcaatggcacgatctcggctcattacaatctccgcctcccaggttcaagcgattctcctgcctaagcttcccaagtagctgggattacaggcacatgccaccatgcctggcttttttttttttttttttttttttgagacagagtcttactgtgtctcccaggatggagtgcagtggtgtgatcttggctcactgcaacctaygcctcctgggttcaagcaattcttccgtctcagcccccgagtagctgggattacaggcgtgcaccaccacgcctggctaattttttgtttttagtagagacagrgtttcaccatgttggctaggctgatcttgaactcctgaccttgtgatccacccaccttggcctcccaaagttgctgggattacagtcatggaccaccgtgtccagcctaatttttgtatcttcagtagaaatggggtttcaccatattggtcagcctggtctcaagctcctggcctcaggtgatctgcctgcctcggctttccaaagtgctgggattacaggcgtgagccaccacgcccgtcgtgactcagtgtttcttaaccttttattttttttttctcatcattgcacccctaaggagaaaggttaaaagttaatgtaaattaattaaattttggggctgggcaggagcctaccatcttaaagctaagctgtaagtaggccaggggcagtggctcacgcctgtaatcccagcgctttgggaggcccaggtaggcgaatcatgaggtcaggagttcgagaccagactgaccaacatggtgaaaccccatctctactaaaaatacgaaaaccagctgggtgcggtggtgggtgcctgtaatcccagctactcaggagtctgaggcaggagaattgcttgaacccaggaggcagaggttgcagtgagcccagatagcgccactgcactccagcctgagcgacagatgagacttcacctcagaaaaaaaaaaaaaaagctaacccgtaagtaaagaacagagctgtgcagattggaggattgggtcataccattacttggtaccttccaggaatatttgggtatctataaggatagtttgtaaaccttgacctgatccagtcttcttcttttgcagctgaggagtaatataagtcccaagagaagcaacttgcccacatttgcacaagtcagtaaggcacagtttaagctatcatcataccatgagtttcatagcctctctaaagagttgagagtcctgttattatgtctaatatcaggcctttgtccaggagaggcagctagtgcctcatttttacgaggacatgaaatatagattacgttgcttacttgggttcacctagcaagctattggtaggcggcttccttggtacaccaggcttcagagatggaagtgctcaatgtaatgactcgatacttcttttctaggagatcctaaaatgttagtgttagttgcagagatttttgtagttgttgatgtctgcccccaaagaaggatattagttgagttagaaatgagatggctaaggacttgattaattcatactatcacctaatatcacaggactcaaactctgacatgggtgtttaataaaatcaacagacctgtaagggttttccagttacagcttccccggtttttctcccatcatccctaatcaactgatggagtcatcatttctatataacacagcttcccaggggcttcactgaaagcactcaagctcatcaaatggccagggcagcctgtcatgacaaattagtgcatggtctgtcaacagccatctatctctagccagtagtgctctgtacccccaagaccgtgtgtcaaattaagtgaattaatgaagacacataaaacccattagtctcctatggtatttaaaatgtaagggccaggcacggtggctcacgcctgaaatcccatcactttaggaggccgaggtgagtggatcaggaggtcaagagatcaagaccatcctggccaacatggtgaaaccccatctttactaaaaatacaaaaattagctgggcatggtcgcgggcgcatgtactccccactactcgggaggctgaggcaggagaattgcttgaacccggaaggcggaggttgcagtgagccgagatcatgtcactgctctccagcttggcaacagagcaagactccgtctcaaaaaaaaataaaatataaggtatggccgagcactgtgactcacgcctgtaatcctagcactttgggaggctgaggcaggcgggttgcctgagctcaggagtttgagaccagcctgagcagcatggtgaaaccctgtctctactaaaatacaaaagaaattagccgggcatggcggcgtgtacctgtagtcccagctactcgggtggcggaggttgcagtgagccgagatcgcgccactgcactccagcctggcgacagagcgagattccttctcaaaaaaaaaaaaagagtttcatagtctacctcaactgtgtcatagcagcagacatggctgagaatccagcattctacatgaattgcaagtcattggatagagggtaggcaggccctgagcacattcttaggtgtttagtaaattattgatgatagatcaaataggataattggtaagataaatggctaaaccattaatccaaaggttataaaatggtctttttttctttttttgagatggagtttctctcttgttacccaggctggagtgctgtggcgtgatctcagctcactgctacctccgcctcctgggttcaaacgattctcctgcctcagcctcctgagtagctgggactacaggcacgcaccaccacgtctggctaatttttgtatttttagtagagacggggttttaccatgttggccaggctggtctcgaacttctgacctcaggtgatccacctgcctcggcctcccaaagtgctgggattacaggcatgagccaccgtgcccggcctataaatgatctttcataagtgctaagagatagggaagaaacagtgctgatctgggcctcccaattaaggagataactggtgtttggacacatttacaaacccatttattgagttcttcaaatactaagatgagaatttgaactctgtgaccaatttttttttttttcaagagatgggggtctcgctatgttgcctacagtggggtacagtagctggctattcacaggcatcatcatagcccactagtctcgaactcctgggcttcagcaatcctcctgcctcggccttcgagtagtagctgggactaaaggcacatgctaccacactgggcttaaattttttatcttaagtcactcttggttcaggcycaaagacttaacaacttctctgttctgttttccagagagatggctgcccaaagattgtcaatctggggagctctaagacagacctcttctatgaacgcaaaaaatacggcttcaagaagaggtgattggtgggtggccccttcctccccccaacatcagtctgctgcagctgccagaaaacatgcctactactaccagcagaaagggagcagagcccagagcatcaccaggagtgcctgctagtgtactggcagcttgccamcccytcctctcccttcacccagacacgtggtagggatggaaaaggattcttcacagagcactctggcacacyrtatcggagaaaamttgatagattagttaatggtttttcttgaattygagaagcawagatctgttctccatattgrtatgttctccctcaaccaagatcttctaaaaagaaataatattttagtcttctrcttgaggaactgactgtgaagcgacgcccagtgaaaaacatgttcttgcagcagctctggtggcagctgtccttgaggaacctttggtgtgtggtgggaagctatcagaacaaraaatgtaggcatttcccgtttttttkggggggggggtgggggggcagggctctgccctcttgaaaggcatttacttgtttaacacttgtccagctacagtggggtacagtagctggctattcacaggcatcatcatagcccmctagtctcatattattttccttttgagaaattggaaactctttctgttgctattatattaataaagttggtgtttattttctggtagtcaccttccccatttaactttaactctaggaatttattttagtcacccaggaatttgtgattcaaaacagaggtagtgggattggttaagtactttgtcctcttattaccactggaaggaattcaaaaccacccatacctttcattatagatagatcaaagtcatctttagaaacgtactattttttccttcctgtccaactttaattttgaactgaagagatagcttccagttatggtggaggctgggcacagtagcccacgcctgtaatcccagcactttgggaggctcaggcaggcggatcttgagcccaggagttcaagaccggcctgggcaacatggcaaaaacccatctctatgaaaaatatgaaaactagtcaggtatagtggcatgcacctgtagtttagtcccagctactcagaaggctgagatgggaggatcccttgagccttggagattgaggctgcagtgaacagtgatcccgccactgcacaccagcctgggtgacagagcaagactgcctcaaaaaaaaaaaaaaaagatgggctgggcgcggtggctcacacctgtaatcctagcactttgggaggccaaggcaggcggatcacttgagcccaggagttcgagatcaggctggccaacatggcaaaactccgtcactgctaaaaatacaaaaattaaccaggcatggtggcactgtgcgcctgtagtcccagctactcgggacgctgagacaggagaattgcttgaacctaggaggcagaggttgcagtgagccgagatcgtgccattgcactccagcctgggcagcaagagtgaaactccatctcacacacacacaaaaaaaggttccagtataacccagaggatgcacaaaggaagggttctaggcctagcttggaggtaccacaggaaggcaggggaaggccatggccataggactacagcactttccgggcgcttttggccacccctttctctgcactgcagccataggctccttttcagttccacaactgctgctttccttttggcttctgctttgggtttatttttaacatgttgatccctctagaatgcttgtgcccccctcccttttactcagctaacccctactcccttctgaccttagccaaatatttcctcaaagatgcctctccggacccttaatctaagttccccttgtactcccacttagcatcctatgtggttttttggtttggttggttggttttgagacggcatctctgtcacccaggctggagtgcagtggcacgatctcagctcactgcaacctctacttcccagactcagcaatcctcccacctcaggctctggaatagctgggactacaggcatgcaccaccctgcccagctagttttttgtttttgttttcgagatggaattttgcactgttgccctggctggagtgcagtggcgcaatctccgctcactgcaacctccacctcccagattcaagtgattctcctgcctcagcctccctagtagctgggattacagatgcacgccaccacacccagctaattttttgtatttttagtagagatggggtttcactgtgttggccaggctggtcttgaactgacctcgtgatccgcccaccttggcctcccaaagtactgggattacaggcgtgagccaccaagcctggcctgttttttgtattttttatagagacaaggtctcgctgtgttgcccagactggtctcaagctcctggattcaagttaccctcctgcctcagcctcccaaagtgctgtgaatacaggcgtgagccaccacacccaaccctatgtgttttcttaaagcatttggtgattagtgaaagtaacctacgaccgtgtctacaagagcaggaagcaagtttgttttgcccagtaggtagcaggtaggtgttcagtattgaatgaatgcttgaagtcaaggaaactggataataaactggactttgatatgtcagaacctacaggcaaagggtgcagtaggcaaataagggcatttgttggggggggcatcaacttgagcaaagacagtcgtgaacagggtgatatgtattgattcggatatggtctcactttgtcccccaacctggagtgcagtgtcatgaacacggctcattgcagcctcgaccccctgggctcaaacaatcctcccaactcagcctcctgagtagctgggaggtgtgaaccagcatgcccagcttttttttttttttttttttttttttttttttttttgtagagacagggtttcaccatattggccagactggtcttgaactcctgaggtcaagcgatctgcctgccttggcttccaaagttaggataataggcatgagccaccacccccagcctagggcgatgtgtgtagggagctctgagcaattctaatgcatcagtgaggtgattgctatggtttgaatgtttgtcccctctaaaactcatgttgaaacttgattcccaatgtggcagtattcagaagtgggaccttcaagaaatgattgggtcatgaaggctctgcccgcatgaggggattcatcctttcacttttttttttttttttttttttttgagccggagtctctgtcacccatgctggagtgcagtggcatgatctcagctcactgcaacctccacctcccaggttcaagcaattcccctgcctcagcctcttgagtagctggaactacaggcacgtgccaccatgcccagctaatttttgtgttcaccaccatgcctggttaatttttgtaattttattagtgacagggtttcaccatattagccaggctggtcttgaactcctgacctcaaacgatccactcacttcggcctcccaaagagctgggattgcaggcatgagccaacgcacccagcccatcctttcactgttaatggattaatgggttatcatataaatgggaccgatagcccaaaaatagctgtttggtggtggtggtggttgtttttgagacagactctcactccatcgcccaggctggagtgcagtggcgcgaactcagctcactgcaagctccacctcccgggttcacgccattctcctgcctcagcctcctgagtagctgggactacaggcgctcgccatcacgcccggctaaatttttgtgtatttttttagtagagatggggttgcaccgtgttagccaggatggtctcaatctcctgacctcatgatccacccgcctcggcctcccagagtgctgggattacaggcgtgagcccccgcgcccggccgggaccgatagctttgtaagaggagagactgagccagcactctcagcccctttgccatgtgatgccctgtgccacctcccagcaagaatgctctcactaaatgtaccccctcaacctgggacttcccagcctccagaattataagaaataaatttctctttttataaataacatagttttaggtattacaagcaaaagaaaactgactaaggtgtggtagctcaaaagaggtagagagaccagatcattttcagactgtaattagaatgtgcaaaaaagcaaaaaagccctagttaagaataaaaaatagtccgggctcatgcttgtaatcccagcactttaggaggccgaggcagacagatcacctgaggtcgggagttgaagacgagcctgaccaacatggagaaaccctgtctctactaaaaatacaaaaattagccgggcatggtggcgcatgcctgttaattccagtactttgggaggccaggagtttatgactagccttggcaacatagtgaggcccctgtccctacaaaaaaaaaaaaatttttttttttgagatggagtctcactctgtcacccaggctggagtgcaatggcatggtctcagctcactgcaacccctgcctcccgggttcaagtggttctcccacctcagcctcgcgagtagctgggactacaggcatgtgccaccacacccggctaatttttgttgttttttttttgagacgaagtcttgctcttgtcgcccagtctggagtacaatggcgcaatcttggctcactgcaacctctgcctcccgggttcaagcgattctccttcctcagcctcccgagtagctgggattacaggcgcctgccaccacacccagctaacttttgtatttttagtagagaccgggtttcaccatgttggtcaggctggtctcgaagtcctgacctcaggcaatccacccgcctcagcctcccaaagtgctgggattacaggcgtgagccactgtccccagcctaatttttgtatttttagtagagacagggtttcactatgttggccaggctgacctcgtgatccgcctgcctcagcctcccaaagtgctgggattacaagcgtgagccaccgcgcccggcctaaaaaaatttttttttaattagccaggtgtggtggcacgtgcatatagccctagctacttgggaagctgaggtggatcacttgagtccaggagatcgaggttacggtgagctacaatggcaccactacactctagcctgagtgacaaaatgaaaccctgtctcttaaaaaatgaaaccttgtctataacaacaacaacaaaaaaaaattaacaaaaatttttggccaggcgctgtggctcacgcctgtaatcccagcactttgggaggccgaggttggtggatcacctgaggtcaggagacattccagaccagcctgaccaacatggtgaaaccccatttctattaaaaatacaaaaattagccaggtgtagtggcgaatgaatgcctgtaatcccagccactccggaggctgaggcaggcgaatcacttgaacccaaccgagaggctgaggttgtggtgagccaagatcgtgccactgcactccagcctgggcaacagagcaagactccgtctcaaaataaataaataaataaaaattagccatgtgtggtggtgaaagcctgtaatcccagctattccggaggctgaggcaggaggatcacttgaacacgggaggcagaggttgcagtgagcagagatcatgccactacactccagcctaggcaacaagagcgactccgtaaaaaaaaaaatttaagttacttattaactgctttggtccacatgacatcttgtaactacagatgtttcaaaaactattccttagtttcatcaaaacatcaccttaactgcactccatcagcctctgtacgtataagattaatgccctgtagcatctcaaatcagcagttcaacctcagtcaagtgaattccactgaaacctgctcctctgtcaatttcataatcccattcttggcttttttttttttttttttttttttggagatgaagtcttgctccgtcacccaggctggactgcagtggtgcaatctcagctcactgcaatttctgcctcccagattcaaccgattttcctgttttggcctcccgagtagctgggactacaggcatgggccaccacacccggccaatttttcatattttagtggagacagggtttcaccatgttgcccaggctggtctcaaactcctgagccatggcctcccaaagtgctaggatcacaggcttttttgtttttgtttttttttgagacggagttttgctctgtcacccaggctagagtgcagtaacaggatccgggctcactgcaacctccacgtcctgaattcaagcgattcacctgcctcagcctcccaagtagctggaattacaggcacgtgccaccatgcccagccaatttttgtgtttttagtagagacagcagtcagcctcccaaagtgctgggattgcaggcgtgagccacctcgcccagcttttttttttttttttttacagaatcttgctctgtcacccaggctggaatgcagtggctcaatctcggctcactgcaacctccatctcctgagttgaagcaattctcctgcctcagcctcccgagtagctggaattacaggcatgtgccaccacgccc

SEQ ID NO: 98221 - DNA, 32821 bp, Homo sapiens
atcccagcactttgggaggccaaaacaggtagatcacaaggtcaggagatcaagaccatcctggctaacatggtaaaaccccgtctctaccaaaaatacaaaaaattagccgggcgtggtggcgggagcctgtagtcccagctactcaggaggctgaggcaggagaatggcgtgaacccgggaggcagagcttgcagtgagccgagatcgtgccaccacactccagcctgggtgacagagcgagactccgtctcaaaaaaaaaaaaaaccaacaaaaaaaaaaccaccacaagtggcttcattttcaagctccgtgaccacagagcttctctacctattgcgtccctgcatgtgctctggcctaacccagtgtctgatacatgttatttgaatgaacaaaataataataaaagaattggccgggcgcagtggctcacgcctgtaatcccagcactttgggaggccaaggcaggtggatcacaaggccaggagttcaagaacatcctggccaagatggtgaaaccccatctctactaaaaatacaaaaaattagccaggcacggtggcatgtgcctataatcccagctactcaggaggctgaggcaggagaatcgcttgaacttggagggcagaggttgcagtgagctgagatcatgccactgcactccagcctgggcgacagagtgagactctgtctaaaaaaaaaaaaaaaaaagaattgctgaaagtataggagtgagggagaaatagggctggaaactcaccaaggcaggagaaagagagtcactcaggatgactaggagcatagcatttccatgccacagcacacgagttgagcacctgcagggatgcccatgaccctctcagtgccccacggcctctctgtaaaagggaagcagcaatagatcccatctcaaatgactgtccatcagcagagtgctggctgaaaaaaaaaacatggtacatcacataccagaaaaatgtgaagccatgaaaaagaatgagaatgtcctttgtgtattgatatagaatgatatttaggatatattgttaaatccaaaaatacaaggtgcagagcactgtgtaatggtgtaatgggatgttaccatttgtgtaaaaaagggagaaaaataattatctaatattattttatgcagaaaatagctctgaagggttcataagaagtggattacactggttgtctccggagtaaggaatgaacagctgaagcggggtgaggggcagtgggaggggagagaattttttcctaaatgcactttggaatctttttttttttttttttttttttttaaagagacaaggtcttggcccggcgcagtggctcacacttgtaatcccagcactttgggaggccgaggcggctagatcatctgatgtcaggatttcgagaccagcctggccaacataccccatctctactaaaattacaaaaaataagccgggcatggtggcgggcgcctctaattccagctactcgggaggctgaggcaggagaatcacttgaacccaggaggcaaaagttgcagcaagccgaggtcatgccattgcactccagcctgggcaacaagagcgaaactctgtctaaaaaacaaacaaacaaacaaacaaacaaacaaaaaacagagagagagagagacaaggtctcactctgtcatccaggttggagtgcagcagtgtgatcatagctcactgcagcctcaaactcctgggctcaagcaatcccccagtcttagcctcctgcatggctgtagctgtgtactataggcacgtaccactccacccggctaatttttttattttttatttttgtaggaatggtgtctcactatgttgcccacgctggtctcgaactcttgagctcaagtgatcttccctcctcggcctcccaaagtgctggcattagaggtgtgagccattgtgcccggccaggaatcttctttgtgtgggatcatgggactatattacctgttcaaaatgaataaaacaaaatttaaaaagcaattaagattttttttcacatcttaaaaaaaaagcttctcttggccccctttcctggctcccttttcctccagtgaatgctccatttttctgctccctttactagcaaaactgcttgaaacagtcgtctgtacttgttgggtcccttccaaacctctcttctctctccgacctgcttcagccagggttctgcccctgctgctccagggaatatgcttcctgagggtcattaatggactccgtgttgccaaatcagtggtaattctgtcctcagtggcagtttttgtcccagaaggtcagacaccctttcccctgtggcccagccatgttctccacccacctcacagactcctctctcggcctcacaacactggtgggccttgggctcactttcggttctgggtacactcctgcgggtaccatgcctccacacagcacctgccgctcatgtctccaccccttcctgccagcctagcctctctccctgagcacggactccacagctccatctggtcactcgagtttaacatgcgtcacagtgggactcctggctggccctcccaacaaacctgctcttattcatcttccctgtctctttttttttttttttttttttgagacaaggtctgtcgccaaggctggaatgtagtattgagatcacagctcactgcagcctctacctcctaggctcaagtgatcctcccacttcagcctctccagtagctgagactacaggcgtgcaccaccatactcagctaatttttgtattttttatatttatttattatttatttatttatttatttttgagacagagtttcactcttgttgcccaggctggagtataatagtgtgatctcggctcactgcaacttccgcctccagggttcaagtgattctcctggctcagcatcccaagtagctgggattacaggcatgtgccaccacgcctggctaattttttgaatttttttagtagagacagggtttcaccatgttggtcaggctggtctcgaatccctgacctcaggtgatccgcccgccttggccccccagagtgcagggattacaggcatcagccactgcgcccagcctcatttttgtattttttttagagatgaggtcttgccgtgttgcccaagctggtcttgaactgagctcaagcaatcctcctgcctcagcctcccaaagtgttgggattataggcgtgacccactgcgcccagcctcttccctgtcttagaaaatgacttctccactcttcgttgctcaggtccaggcttcagaatcattctccactctttgtctctcacactctttgtgaatccctgagcaaatcctgttgttgctgtctccaaaatgcatccagaatccaacctttctccatcaactccactgccatttttgggtcccagccaccctcaatcctccccgggccatcgcagcagccccagtacaggtttccaggttcctgtcctcacgccctgccgcctacaggcaacacagaagccagagaattgctgtttcagtgtcagtcaggaattttctctcttcccctgcagactgtgcaacaccccatctccctagaggaaaaagcccaggcctcaggatggccttcacagcccttggggtccccctgccccaggactcctccaacctcatgccccactcctccgcctggcggctgtttttcagacaccccagacccacccccactcaggtcctccacctgtgccgtttcctctcgctgaacacccttccagtcacctcctccagctccttgctgtaacgtcaccttggtgaggcttgccctggccccctgttttatttttgtttatttattttgtagagacaaagtctcattatgttgcccaggctggtcttaaactcctgagctcaagcgatcctcttgcctcagcctcccaaagtgccaggattacaggtgtgagctaccaagcccagccttgaccccctggtttaaccactcaccaccatccccacacttccctgtttaattttccctggcattgcctaggctagcattcctagtcttccaacatgacattatttatttattaagctatttttgtttgttaggcttttttttcttttttcgacaggtcttgctctgttgcccagcagagtgcagtgaattcctgggctcaaggaatcctcctgtctcaacctctccagtagatggaactataggcacttgtcaccatgtccaactttttttttttctttttgagatggagtctcgctctgtcaccaaggctggagtgcagtggcacgatctctgcttactgcaagctccgcctcctggattcacgccattctcctgcctcagcctcctgagtagctgggattacaggcacgtgccaccactcctggctaatttttgtatttttagtagagacagggttttgccatgttggccagcctggtcttgaactcctgacctcgggtgatccactcgcctcagcctcccaaagtgctgggattacaggcgtgagccaccgtgcctggccttatttatttgggtacttttaaaacctctctcacacacctataatcccagcgctttgggaggccgaggtgggcggatcacaaggtcaggagatcgagaccatcctggctaacacggtgaaaccccgtctctactaaaaaatacaaaaaattagccgggcatggtggtgggcgcctgtagtcccagctactcgggaggctgagacaggagaattgcctgaacccgggaggcggagcttgtagtgaaccgatattgcgccactgcactactccagcctgggtgacagagcgagactccatctcaaaacaacaacaacaacaacaacaaaagtccctgcatggaggccaaggcacaggcagaagtgccactgggaaaggagattctagaaaaggcctaaacactagacatcctgggccaggtgcggtggctcacacctgtaatcccagcactttgggaggccgaggctggcaaatgacttgaggtcaggagttcaaaccaggctggccaatatggtgaaactccatctctgctaaaaatacaaaaattagccaggtgtggtggcaggtgcctgtaatcccagctgctcaggaggctgaggcaggagaatcgcttgaacccaggaggtggaggttgcagtgagctgggattgcaccgttgtactccagcctgggtgtcgcagcaactccatctcaaaaaataaaaataaaaataaaaaccactagacatccagatgtcacccaggatgctgctccctggtttggcttgggccaaaagtgaaatgcagagagtcaccaggtatttggtgagggcctcagaggccctcctatagggtcctgtgctctggggggactgacaggaaatggaaatagacacgtagggagatcattccaggtggtgccattgagagggtcacatggataacatgatggggcataactagagaccactgccctcaccagggcaccagctatagctttgttcagaaggtgaggacgaaggggaaccctcagcattgagaaggctggaggcctatggcccagagggcccaggagtgtgtgtgaatggatggatggctgagggagacttggctcacagcccagaccagccctggagcagccaggagacagactgctaccccagcctcaggatctcagggcagggtgcgggggaggttgactgggccagagcccgctacccatcacagagagctactcccacggacctgggaggaattctggaaggagtctgagcagcagctgcagaaggagaccctgccccacggcccagggacctcagctgggggaaccccctcacctcccccattcttctgcctgcagtgattgctaccccagacaagggtgccaagctctgaagcctgctggccacaaagaggctctgccaggttgccagctatgctgtttgttggcagaagcatgtcattctttcccctctcatttcagatgaggagcagacctctcatcaggtcccccaaatcccatacgatgtggctgctgcccttctcctacatgctgttccagccacatctgcaatcgtaagttgcttgaatgtgcagagttgtttctcccctctgggtgttcccttccctgccttttttttttttttttttgagagggagtctcgctctgttgccaggcgggagtacagtggggtgatcttggctcaccgcaacctctgcctcccgggttcaagcgattctcctgcctcagcttcccgagtagctgatactacagggacacgccaccacacccagctaatttttgtacttttagtagagacgaggtttcaccatgttcgccaggatggtcttgatctcttgaccttgtgatccacccacctcggccttccaaagtgctgggattacaggtgtgagccaccacacccaacccccttattttttatttttgtaacttgtgattctacatttgtctgtggattttgtatcatctgtatcatttgtagatgagatgcgagctccatgaactcaaggagctcacctgcgttgtctgccgctgtcttcctggagccttggccatctggtacatggtaggcaggcaataaatatttgctgaacgtatgaatgaatgcacaaatgatgtggtcagatctgcaggaaaagatcttccctggcagaagggtggtagtcggattggaggagacaagtgggagacaaggagagaggaaggaaggaccactctgatttactgagtccaggttggaggtgagtcccactgtaggggagatgggcatctaggggattgaaaagacatttcaaagacagtgtggcatggcaggaagaataggaatgtaatgaagccagaatctctgtgtgtgtgtgtgtgtgtgtgtgtttgaaacggactcttgctctgtcgccaggctaagagtgcagtgccgcgatcttggctcgctgcaacctccgcctcccgggttcaagcgattctcctgcctcagcctcccgaatagctaagactataggcacttgtcacaatgcccagctagttttgtacttttaatagagacagggtttcaccatgttgtccaggatggtctcgatctcttgacctcgtgatcctcccgcctcagcctctcaaagtgctgagattacaggcatgagccaccgcgcctggctgaacctctgtgttttaataccagctccatcaccagctgtgatgctctgtgcctgagcatcctcatcatcttgtcacacggcaccaacaccttagaggtgtatgtatctcaaagggatgtggattcaatgccacataggtccaggcctggccaccacaggtgggctgaccgtcgataacaggagtgagaattgtaattcaggtggaatcagtagtcgcaggggctatttggctctaacccacctcttcggcttctccaaggcaagggaggctttcgaggagatgagcttttgaattctcagcttttcacaaaaatagcctccacgccggagcccctggtttcagccagacgatttctttgttactcagctgctggtgggtgggtgggtggggctgcggctgctctcttcctgaatgaacagctgtgccctctcatcgccggctcaggaataatcataacactgcttcaatgctcggcccagcctccttcattcactgctctctggctgcctggcagctctgggcacatgttcaacagcccatgggaggggccaagagaaaggagactggacgtgaagggaggggtcagggccttggccacagcagccgggcctcagcctcctgagagctggcctccgggaccctgcctcatgttccgcattcccttccctcaccctgtmccctgacactgcctcctttctgttcctccgccaccccaagctcatatacagccaagggccttccaacctcccgagcttcttccctctcgatgtcttctctctaggtcctgacaagctgggtcccgaggtcacctggagtgcagaaatgtccgcccagccactccccctctgctggccaatcagcttataacccatcactcaaacaacatgggggcccccgggagaagggccagcctgggcatccacattccagctcaagtcctgatgccagttctggttggccaagcctgggccagaggtcctacagaccaagagaggggagaggtgattccccaggtgacaacatcaaggcagttcccagcaaacaggatagtaagggtggccagggaaaactgccagcgtccaccatggctccagcgcttctgctgggagggcaggttggtgtgtttgaaaaacataggtccaccgggcgcagtggctcatgcctgtaatcccagcactgtgggaggccaaggtgggcggattgcctgaggtcaggagttcgagatcagtctggccaacatggtgaaaccctgtctctactaaaaatacaaaaaaagtagccggacgtggtggcgtcctcctgtaatcccagctattcaggaggctgaagcaggggaattgcttgaaccaggggtgtggaggttgcagtgagccaagatcgcaccactacactccagcctgggcaacagagcaagactccgtctaaaaaaaagaaaaaaaagaaaaaaaaaacataggtccagagatcaggcttggggcctctgctccagcactcctccacttcggagccgcgtgactcagtggagccccacgagctctctgagctgtttcctcatcccaccgaacccgatagagctgtcagaagaagcaggcaaggggctaggcgcagtggctcatgcctgtaattccagcactttgagaggccgaggcaggtggatcacctgaggtcaggagtacaagaccagcctggccaacatggcgaaacctcatctctactaaaaatacaaaaattagccagatgtggtggcacatgcctgtagtcycagctactcagcaggctgaggcacgggaattgcttgaacccgggaggcagaggttgcagtaagctgagatcacaccactgcactccagcctgggygacagagtgagactccgtctcaaaaaaaaaaaaaaaaaaagaaagatattattgctggaggagaggaaggcaaagaagaaagaagagacgatgttatcccagcactttgggaggccaaggtaggaggatcgcttgaggccaggagtttgagactagcctgggcaacataatgagaccccatctctataaaaattttttgaaaacttagccaggcatggtggtgcacccctgtagtcccagctactcatgaggctgaggcgggaggatcatttgagcccaggagttggaagctgcagtgaactgtgattgagccactgcattctagcctgggtaacaaagcaagaccctgtttcaaaaaagaaaaaataaataaataaaaaggaggaaagagagaggagaatttaaaggggaagggaggctcctctgggtagagttctcaggtggggctgtgaaataaaatcagaaccctggctgggcgcggtggctcacgtctgtaatcccagcactttgggaggctgaggtgggtggatcacgaggtcgggagatcgagaccattctggccaacatagtgaaaccctgtctctactaaaaatacaaaaaaattagctgggtgtggtggtgtgtgtctgtagtcccagctactcaggaggctgaggcaggagaatcgcttgaacccgggaagcggaggttgcagcgagctgagatcaagccactgccctccagcctgggcgacacagcaatactctctaaaaaaaataataataattcagaacatccccaggtaaccacaggcagcatttctcaacagtctctcctgcagaaccagaaacccagactgtctgagcctgattgtcctgagaggttctggaagggcaggggcgtgtggtgacactgggtgctcctgggttccagtacctctctagccagttggaagaatataggcaagtcaagtccttcctcctccctgagcctctaattcctcaccggtaaagtagggatgataaaaataaattattaaattgttgtgaggtttcaatgagggcaaagcttgctgcctgaaacagagcaagctcttgtggcgtcttagctatttgtattagttacttgtatttttctctgcggtttcccttttaactcccacctcctttttattttaaaaagactccttttgaaaatgccagcctgcctcagtagtaccaggagacaccagggaaaggcttccttctttccaagctgaggctgagaaggaatgggaagaacgaagagaagcacctttgtggaggcctcctccagctggccctgggtttaggaacatcacacactcaacctccaaaggccctcaggggctggcccaaggtcacacagcttgacagtgcggagcacttcgaagccagggcgtgtggtgtagaacaggctgggtgcctgaattcaatcagccctctctacttctctactcagagcctcccaggctgtggggtgttcacctgtgcaccttcaagccgatcacttccttggggtcctcgtcaattcaattccatggaaatattacaaggggtagacagagatgagccgtgtcagtgtctgtactagcagagggcaggaccactgagcgtccggaggggagacgagtgtytgggtgtccctgggaacctggcttgtctcgacccctctggggggctcctcttggctctgacctccattctcccagactcacccccactcatgcccacccaccccgaggggccccccagtgtgcactcacacactcacactcaaactcaccaccccacttgctctctaattaccaggaacgtggcgctgtctcaggttcttcctcccctgcattcctcagcagctgccctcactgggcagggcaaattataccgtggcccgaccataaaagccactttccaaaaaaagaagctttaaggcccccgagagacgcagctgagcctctcacctggcagtgcctgactcaggaggtgatgtctgggccatgagccacagagcctggtgtccctttaagcagggagtacaaattctcatccctccctcctgctctccctgacgtcagctggaaggcgtgtgagtgagtgaggggctgaggtaccgcccgcgcgagcacacacagacacacacacacacacacacacacacacacacacacacatcttccagacccatcccctgcctgccagctccacgagccagagagagacagagcgcggacgccgcaggaggcagtgcctggaccccagctgcccaggagaggtgaggggctagatggggcctgaggacastgtgccagaaactgtggctttggccaggccgaaggagagaggtacaacgtgaaggtgggggctggatcagcccagttcagcttacagatagggtgttgggggtatagaggataccacctgtctctccctccctcattctctccccgtgacccccaaatgaggtgaggccgtgtggctcccgtgggagcatgtctgtgtctgtgtctgtgtctgtgtctgggacctgcgtctggctcaggaggcagagagcagcagatacctgccaagccgcagcctcctgtctgggaagcagcgggagagaggaccgccttgaccagagaaaccccagtgccgcttccagttgctgaaagcagagtgcagcagggacccttgctggtccttcccctggaatgtygggctgggaagggaccggctgggaaaggcagacagttggacctggagcagctgtcttatcctgactctattttttccccagtgtgatggggataattgtgttagttggcttagagaggtggctccgtgtggttattctcttcccccaggtaccaccccaccccgagcccttgcttcttgcctgcctgctggtctgctctgacctccacccttgccagggcacagcccccggagggcaggggtgataagtcagggcctgccaggcctctatcttgggatacagggacttagggtggccttggctggtgccaagcccatgaatggcctgaccctggcacaaggagtccaggcggagataaggggcgacgctggcacccacaaggagacagcaggttcctgccaagctgccagcctgcaggctcttcccagggagaggggagggggacacagagcgagaacaataataaatacagagtgtgaactgctgcatccactggggctggggtaggagaggaggaagtatgcccagtggggggtgggcaacctctctgagagcctggcatcatgctgcctggctgtgatccggcaggggcctctccctgggaaagggggtctccagctttctgggggatggggaactggtttcccaaacctgactccatcccagagtcctctggaccctccaaattctgaatgtttcctcctcccagctttgccctgccgccccccatttccttgaagtcttctccaaaaatgtctgttttctgtgtctgcccatcttgacccatcctcacccccttcaaaaaaaaaaaaaaagacaggtatagacaggaactgcctgcccgtgtcctgggaaaggccagaggacagttttggccacagatggctctcccaggcttggagagacatggctaggcaatgttcacggatgcgcagggggattccctgagggggacttggggacactctcagatggctggtggggaggggacacctgccagccagtctggagtagagccccctagggggtagagggcgctcaggacctggctgagccagtcatgtccacggtcacaactggggcagccaggacccagagccttgtaggaatggggcttggggcagttcagacctttgtccatgctgagcagcaaaatgggaggctaaaagtagtagggagctcttctgccccacagccagcaaaatgacactcctgggctggggggctggcatggcacaccagaaagctgtggggtcacactgattggagttcaagttcagatgctgtatgtatgtatgactttgaccagtctattcctctctctagggggtctcaaaatgggaaagtgacttgcctagggtcgcacagccaagcacaggtgggactggggtgcgtatttggctctcccagtgccgtcctggtttccccaccaccacccaagccacagaagcccaaaggccttaaccacagcagttccccagggcagcctgggcatgtgacaaggaggactacagggtctcttaaataattaagctcaagtattggctggggcagccctcatgcacagacgcaggcacacaggctgtgtgggggaaggaccaggtttaatcaggtcacctcaggctgcaagagcagttcaggcactgatgtattttaaggagcatctgggaggctgggggagggggaggagccagggaagtgtcagctcctgcccgggggtcctgagtttgttttctcactctcccagggcccaccatgcacaagctcccgatgttcgggaagcccttccagcgtcatccttgtgttccccgtcctttctatttttaaaccaccgtacccattcctcccatctgctcccctgtgatgggggcttggggctgggacatttttattgggggagttgtttttaagcttagcagagttggtgagtgactcacccaaggtcatggtctgagtcagcgcaaagccagaaataaaagccccagtcctggctccccaggaattccacacccgactcctccttctccaggggagggtgggcgccaccctcaaggaatggctggtcttcacctccccagacatctccagagggcagatatgctgcacctgacctgctgtgagagctcagcgaggctcttcacctctctgagcctcagtttactctttagaagatgggtgtactaagccaggcgcagtggctcatgcctgtaatcccagcactttgggaggctgaggcgggcggatcacgaggtcgggagatcgagaccatcctggctaacacggtgaaaccccgtctctactaaaaatacaaaaaaaaaaaaagaaaaattaaccgagcgtggtggcgggcacctgtattcccagctactcgggaggctgagccaggagaatggcgggaacctgggaggcggagcttgcagtgagccgagatcgcaccactgcactccagcctgggcgacacagcaagactccatctcaattaaaaaaaaaaaaaaagaagaagaagaatgggtgtactaatggtagttactgcatcgggttcttatgagtacgaaatgaaaaaatggggcaaagggcttggcacatggtcagtatcaatagatcactagatggtggctgaggctcacatcaggacttccaatgctgcttttttaaaattattattgtttttgagacagagtcttgctgtgtcgcccaggctggagtgcagtggcgcgatctcggctcactgcaagctccgtctcccgggttcacaccatcctccggcctcaggcctccccagtgactgggactacaggtgcctgccaccacgcccagttaattttttgtatttttagcagagacggggtttcaccgtgttagccaggatggtctcaatctcctgacctcgtgatccacccgccttagcctcccaaagtgctgggattacaggtgtgagccaccactcttggcccccaagctgcattttaataatctgtttctgttccccccgctggactggggtgctctaaggacagctgttgccccacgtttgttgttctggtgcctgcactcagtttgatttcatttacatatgtgtttttgaaaacctcggaggagaattggcctgaccttcattagtcatctggaccaacgatgattcacgtagctgaagagaaaggtgaggtccagagaggagcaggtgcctgccccaggtcacacagcactgggtggctgaccaggctgcctttccctaatccgctcagactgagaggactcatggtcaagagaagaccatacagtcaggcgcggtggctcacacttgtaatcccagcactttgggaggccaagggggttgatcacctgatgtcaggagttcaagatcagctggccaacatggtgaaactctgtctctactaaaaatacaaaaattagctgggcatggtggtgagcgtctgtgatcccagctactcgagaggctgaggcaggagaatcacttgaacccgggaggcagaggtttcagtgagccgagatcgcgccactgractccagcctgggagacagagtgagactcaaaaaaaaaaggatgggtgcggtggyttacgcctttaatcccagcactttgggaggctgaggcaggtggatcacaagatcaggagtttgagaccagcctggccaacatggtgaaaccccatctctactaaaaatacaaaaattaatcrggtgtggtggtgcacgcctgtaatcccagctactcaggaggctaaggaaggagaattgcttgaacccgggaggcagatgttgcagtgagccgagatcatgccactgcactccagcctgggtgacggagtaagattccatctcaaaaaaaaaaaaaaaaaaaaagaggactatggccaggcacagtgactcacactgtaatcctagcacttagggagactgaggctgcagtgagccatgatggtgccactgcactccggcctgggtgacaaagtgataccctgtctcaaaaaattaaaaagtaagagagaaccatsacaaccatttcctgccccattctgcatccttttaggggagctgagaattggagcagagtcccagcatgggctgtggttcatctgccaagaaggctgagtcaccacccagagtgccccatgacactgcatccagcctcaggttatctccaaacagcctgacatttgtgtttacttctaggcccctttgtctgcagagtcagtcatttggggtctggccttctgcagggaaatgaagatgagcttggctcagagcccaaactcagggccgggggacagggggatgcacactygccggggggcctttgacacagctctgtggctcctcccgacaacctgggtaggatgttatgatcagccccatttgacagatgagggatctgaggcacaaaaagggagagttggccgggcgcagtggctcatgcctgaaatcccagcactttgggaggccaaggcgggtggatcacctgcagtcaggagttcgagaccagcctggccaacatggtgaaaccccatctctgattaaaaaaaaaaaaaaaaaaaaggctgggcgcagtggctcacgcctgtaatcccagcactttgggaagctgaggtgggcggatcatgaggttgggagatcaagaccatcctggccaacatggtgaaaccttgtctgtactaaaatasaaaaaattagctgggcgtggtggcacacgcctgtagtcccagctactcaggaggctgaggcagaagaatcgcttgaaccccacaggcagaggttgcagtgagccaagatcacgccactgcactccagcctgttcacagagcaagactccatctaaaaaaaaaaaaaaaaaaaaaaaaaacacacaaaaattagctgggtgtggtggtgggcgtctgtaatcccagccagctacttgggagtttgaggcaggaraatcacttgaacctgggaggcagaggttgcagtgagccgagatcacgccactgcactccagcctgagggacagagtgagactctgtctcaaaaaaaaaaaaaaaaagggggagggtcaccggactcagtggctcacgcctgtaatcccagcactttgggaggccgaggcgggcagatcacgaggtcaggagatcgagaccacagtgaaaccccgtctctactaaaaatacaaaaaattagccgtgcgtggtggcaggcgcctgtaatcccagctactcgggaggctgaggcaggagaaaggcgtgaacccgggaggcggagcttgcagtgagccaagatcgcgccactgcactccagcctgggcgacagagcgatcctccgtctcaaaaaaaaaaaaaaaaagggagggtcacaaaactgggttgcagtggaacaaggatttaaactcaggcagtctgggtctcaggctgccctcttacctgactgctcgttctgaagggcattattcctggcaggagatggccccagaaggacacacgaaatccccctggagctggcctttagctctgtttgagtggaaacaaatgttctagaaacatatcagtttctctgctcttgggggagtttattttcccatttagtttctcagggaaagttcttttggaaaaactccagcctcatcttggctgaaccaggaacagaatttatattcacaggaagagcactggtttactgttagacagatctgggactctgtcacctgctgtgtgactttgggcaagtcactcaacctctctgagcctcagctatctcatctgtaaaatggaaaaattgtaatttcaactctatagggtaactgggaggttgaaacgtagaaaataatttctgtaaagacttttgcacagtacatggcattcagccaatgaaagcctcattttcacttgccctctttggcagcaatgctctggagagggggtctgaactggagggttgctccgtatctccatsttcccttctctctggtctctcgggctgctgggcattgtacagctcctccaagcccacgccctggcagggcccagagagggaaaggccctgtaccagctcacacagtaggtcaatagcaatacagagcctggacacaggactcctgccttcccactggaaggctccagatcatactgattcaaattctggctcagactttgattggtgtgtgtccttgagtgagtgatttaacctctttgagcctcgattttcttgtctacaaagtggggtaataatagcaccagccttgaagagcagttgcaggaattaaataaaacaagagactgtggagctttgaggggtgggcgatccttagggaagaagagaggatgaaagtgaatggtgggcttggcccagctcggctgggtctctccttcccccactccctcttccctcaacacccaattccacagccttgtctaggaggggcaggctctcgcccagcgcccagcgcctactcagtgcttcccacatcccacctcaattctcatttcatcctcaaaagagcccttggaggagagagtcttttttttctctctccctctctttttttttttttttttttttgagactgggtcttgctctgtcgcccaggctgtagtgcagtagcttgattaccactcactgcagccttgacctcctgggctcaagcagtcctcccaccttagcctcctgagtagctgggaccacaggcatgcaccactacacccagctaattttttttttaagacagtgtctaactttgtcccccaggctgcactgcagaggcgtgatctccgctctctgcagcctcgacctcctgggttcaagcaatcctgctgcctcagatgcccaagtagctgggactacaggtgcgccaccgccatgcctagctaatttttgtaatttttatagacacaagctttcaccatgttgccccagctggtcttaagctcctgggcttaaaagatcctcctgccttggcctcccaaagtgctgggattattggcgtaagccaccttgcctgttggaggaggaattcttgtgatccccatttcccagataaggaaactgaggctgcaatgggcgacaggggagaagcctgttctctctgccttgtggaagctgcctgtctcctgcccctgcctgagctcttgccctgaggccaactcgctgcctcctcttggtcctgtctttgctgtggctcttctgcctcccttctgctctctggtctctctgccacctgagagcccatcatggggaggctgccctcgaccctggcccagaatcatcagtgggttcttcccccatccctgcagcccacttagcatgaggccctggagccgcacagtcacttgggtgggaggtctggctggccagagcaggccccagctcagccgcgtctccctggtaaccaccatgagctgcatctccccctctccatcctcctcttccctccctgcccctccatggcctcccagcactggctgtcactgccaagcacaataccaggcctgggaaaactgcagttgggaggccaggaccgccctgctccctagagagagggaggcagggcctctgtccccatcgcctgccaaccctcacccaggtggggcaggtggcactcaaggagtgcactgcagggcgtctggtgcttcccagctgtgtcatcttgggtaactttgctgccccgtcttcttttttttggtaacagctttactgagatatcgttcatataccataaaattcacctgcttaaggcgttcagttcagttgtttttagtacattcacagagttgtgcagccatcaccacagccaattatagaacatttccattccccaaaaagaaacgttctacccattggcagccctcccctctccctccttcccagccctggtgaccaccagtggactccctgtctatgaggatttgcctcagagatggaatcatgccctctgtgtttttgggactggcttcttctctgtgaccttgcaaacattctcgcataatgtgtgcagggttcatctagggtgtagcgtgaatcagtatttcttcttttctttttcttatggccaagtgctagtctaccatgtgtctagaccataatttattatccattcatctgctgatgggctcgggctgttttcacttgttggctgttgtgaatgagcactggtgtgaccattcatgaacatttatgtccaagtgtttgtgtggttgcttttttttttttttttttttttgacagagtctgggtcagtcacccaccctggagtgcaatggtgtggtcttggcttgctgcaacctctgcctcccgggttgaagcaattctcatgcctcagccttctgagtagctgggactacaggtggatgccatcacacccgattaatttttgtatttttaggagagacggggtttcaccatgttggccaggctggtctcgaactcctgacctcaagtgatctgcccaccttggcctcccaaagtgctgggattacaggtgtgcgccaccacacccggctgtttgtgtggttgcttcttgaagcttccgtattcttctctctaaaatgaggataatgggtgaaaaggccaaacctggtttgccctgccaacctggcatgagcttagacagaaaagccccacttcagccttttcagggttgagggtctgtgaggcaagccaagcccggggctccagtgccttcctgactggagggggagggttttgggaggagggaggatactactccacctccacccctaggcatggcagagccagctcagcatcttggttcagaaaaattccacttgctgtataatcttgagcagaggccagaagacctgctccagtggactcctggactcatccaggcctgccatgcagggtgttcaggctttctgagctctggactccaaggaaccttacaggaaccttgtgggtgattttccttccctgggaactccaagctctggggtgggaggggtataaattggaggccacaggcctgtaaccccagcattttgggaggccgagggaggtagatcaactgaggtcaggagttcgagatcagcctggccaacatggtgaaaccccgtctctactaaaaatacacaaattagccaggcgtgttggcaggcacctgtaatcccagctacttgggaggttgaggcaggagaatcacttgaacctgggaggcagaagtgacagtgagccgagatcacaccactgtactccagcctgggtgacagagtgagactctgtctcaaaaaaaaaaaaaaaaaaattagctaggtgtgagggtgcatgcttgtaaattccagctacttgggaggctgaggtgggaggatcgcttcagcccaggagatggaggctgcagtgagtcatgaccatgtcagtgttccccagactggatgagaccatgtctcaaaaaaaaaaaaaaaaacaaaggatcaatgctagccccattttacagaacagaaaataagagtcagaagttaagagtgttgaccaatgcgctggacgagttggctcatgcctgtaatcccagcactttgggagaccaaggtgggcagatcacctgaggtcaggagttcgagacctgcctggccaacatggtgagaccccatctctactaaaaatacaaaaaatcagccaggtgtggtggcaggcgcctgtaatcccagctactcaggaggctgaggcaggagaatcgcttatacccaggaggcagaggctgcagtgagccgagatcgtgccaatgcactccagcctgggcaacaagagtgagactctgtctaaaacaaaaaaaaaaatttgaccagagccaaggctatgtagccagaaggtggaggatgcaggattcaaacccaggcctgggtgtggagcccatactcccacctgccatgttggagctgatgtgtggcttggcttgcttgaagtcaccaagttgtaggtgacaaagctaaggtttgaacccagatgtgtgactctgaaacaactgacccttatgccgaaccatattctagaccatcactggccaccctacccagccacctcccaggcccctggagttaagagaattgaactgcaaactggaaggacttaggggtcatatgacccctagttttgtttttctggtgaggactctgaaccacgatggggtcgtttgtgacttgaagtaacgccgtgaggatagcaggtgggaccagccctcctcactgtggccagggttcaggagctgctcccctggactaggctcacctgtgcctctttcttcctcttccagacggagcccgtggctggtgaggccgcagagcagggccaggccgggccctgcccgcaaggacgaccaaacccctcaccggcccctgggccccagagcccaccaggctctcctgctggccccaccatgacttcagagtcgacgtcacccccagttgtgcccccgctccactcccccaagtccccagtctggcccaccttccccttccacagggagggcagcagggtctgggagcggggtggtgtcccacctcgggacctacccagccctctgcccaccaagcggaccaggacctattcagcgtgagtacctgccccttgcccaggcccctgacccttgtcaggacaggggctgaccatccccatcctcttccaactcctgttgtcctcacctgggacaggggaactgtgtgtggaccttccagtaactggatggatgtttgtcccatacatccattcatccatccacccatccacccatccatccatccatccatccatccatccacccacccacccacccacccacccacccacccacccacccacccatccatccatccatccatccatccatccatccatccatccatccacctgtccatccatccatccatccatccacccacccatccatccgtccatccatccgtctgtccgtccatccatccacccatccattcatctatccatctattccacaaagatttactgagctcctgaccagtcaggatccataagctgcttacaatccagagggaacttgttcaccatccattaccacccagcagggttaggggtgaggacccagcatggggtaccagaggagatgatgtcctggttgggtatggaagatgtatcaggtgaagaagggagctggcgattctgggcagatggtacagcatgggcaaaacccaagacacggagttaacctttggagaggggtaggtaggcgggacaaagactaggcctgggcctttggggtaggtcaccgatgaggtggcataggggagtaatacgggtccatatgggggaggccaaaggatcttttgggaaggacagggtctcgctctgttgcccaggctggagtgcagtggtgcagtcatggctcactgcagcctcaacttcctggccttcagcaatcctcccacctcagcctcctgagtagctgggacgactggtgcgtgccaccacccccagctcatttttttaaaaaaatgtttgggccagacatggtggctcatgcctgtaatcccagcactttgggaggtcgagacaggtggatcagttaaggacaggagatcaagccagtatggccaacatggccaaacactgcaaaaccctgtctctactaaaaatgccaaaacttagctgggtgtggtggtgggtgcctgtaatcccagctactcaggaggctgaggcatgagaattgcttgaacctgggaggtgtaggttgcagtgagctgagattgcacccctgcactccagcctgggtgacagagaaagaccctgtctcaaaaaaaaaaaaaaattttttttgtagagatgggagtctccctatgttgtccaggctggtctcaaactcctaggcccaagtgatcctcccgcctcagcctcccaaagtgctgggattacaggtgtgagccaccgtgcctggcctcattatcgttgaatggggatgactgtgtggtttctggcctgggtcaagtttctcacagccctgaggcacgctcagcagaaagggcccagaatggctgtagggatccggggaggagttcctcaggccacagctccaatcccactaccctatctccaggacagcccgggcctcagctggccccgtgttcaagggcgtctgtaagcagttctcacgctcacagggccatggcttcatcacccccgagaacgggtccgaggacatcttcgtacatgtgtctgagtgagtcccctccacctccctgttcttggcccctgccctagtgtccccartggtgcctcaaaaatggctctccaggcctctcctctcactggctgaggtctgtattcatggtgccttttctgtcctctgagtaggggctgagggtgcgttgggagaggagggctggggccagggagggagtgggcacgcagaccccagaagcctgggagccagcggctgggccctggatcctgttacagcatcgtggaggtctgagagggctaggccagctcctgagcctcttggcctggaaagggccttcatgtgggtgggccaggaggtagagatggatatcatgtctaggcctggccccacccacttctaatgccaggaggaccgggggaggtcactgagcttctcagagctttagggacctccccgtgccctttcacatctcggtccccaagggacccagaaagggaggtacagtttatgagtcccattttattttattttatttattttttgagagggagtctcgctctgtcgcccaggctggagtgcaatggcacaatctcggctcagtgcaacctccacttcctgggttcaagcgattctcccacctcagcctcccaagtagctggaattacaggtgccagccaccatgcctggctaatttttgtacttttagtagagccagggtttcgccatgttggccaggttggtgtcaaactcctgactcaggtgatccgcccgcctcagactcccaaagtgctgggattacaggcgtgagccactgtgcccagccatgagtcccgttttacagattcgagagctgaggttctgagaagcaaggcctggccaggcctcctggcctagggaggcttagggccaggctgcccccaaggccaggccacaggattgtctggggcacagggcctgctgctgggctaatacccctcttcctgccygccagcatcgagggggagtacgtgccagtggagggcgaygaggtgacctacaagatgtgccctatccctcccaagaaccagaagttccaggccgtggaggtggtgctcactcagctggccccccacactccccacgagacgtggtctggccaggtcgtgggctcctaggctgagtggytcacaggccagctggccgggggttggggagccacacagggtgaacgggcagcagccggctccatgccccactgccctggctgatgagtccttcggtggcctcagtgtgcacgtctgtctgtccgtctgtgcttgtggctatgagcgtgtgcctccacccaccccacgacccgtgactactgtgcaagctggccaggaggtrggtggagggcaaggccaccagacctggcttcgcgctgtccactgcctctctcctcccctccctgccgcagacacgcaggacccgctcgccctcctgcttacccgtccccacrgtgactgagctgcgagagcctgcgctgggctcactccctggcctccgcccctgagctgtcccgtgtcagtccctggcccggagccaggctctctgtgctacttacatctccctcccttggctgaggtcccccgccacagcctggacccttccctcagaagcctggccgatgggtgcttttggggagcctctcagcctctggcaggggaggaggactgacacggaggcacacaggcytctcactgccgaggccagccttccttcctgctctgctctctcagtgccatggagaggcaggaagaggggcctgagggcggaaggggtttggggctcccatttcgccggccagtccctcctcctcagcctggcagtggcgctgggctccttcccctgggctgtactgagccgagcccaggggtttgcagagggtgggggtccatctctccagcttggctgcagacctcctttaccctgactcacaagccccactgatgctctgggccatgcccggctgacggctgctgtggatgccgcgagggacggacacacgtccggggcacccacgaggagggcccccagcctgggagactggccctgcggcctccacgtcaaactctcttcccaaagccctaacagaccagtggccgaggtgtggctcttattgcatccatccctgaagatgtgtggctgttgctgtcacctggagtccttttggggccaagatgtgtgtgcacccggggtcgtggccattcactcccaggcaggggtgagggtggcctggcccaggaggccaggaaggagggccctgtcygcctccacctctgggtgcaccccctgcctaccaccctcccttctagagagcacatcgcctgaccggggagaagtggggccgtggttcgagggagggctggccaggggtgggacccttatgagactcagtctgtgagtaaaactgggggctcaaatgcccaggatgaggggatcagtgactgtctaggaggatcccttgccttgtaggtgccccaagaccgcagggtagaaatcagccgggatgcctgcatcccacccccggccccagggcccaccacataaaatctgggagcccagagctgctgaggtgtggtcagctcccctaaaatgggcacggcccagcctgtcccatgaggaataaaggcccctggcccccttgagagagggcttgttggtgagggctgactcctgggggcccccaaggctcccctcctgtggggaggccaccttttaaggcaccactagcagtcaggatatggtggcatcagccctggggcctcctgggtggcaggggggcagcagctctcctccccactcacaggccctgcagtgctcatttggaattcctcccaagacccctggccacccagaccccccattcttcctaacactggcaataaaccctcaactgtgacccaccgtggcctgaagctgcctctgtgtcagggtccccaaggaaggggctgggggtggacacaccaaaccagctcttctttggggattcaatggccccctcctcgactgcatcagacttcctttgtgacctgggccaagtccctgccctctctgtgctgtttacttgtcggcaaagtagtggctgtgacagcatgtgactggggccaattatccattcagacacagctgacacctactttgttctgggaactttaatactgtgacaaagttctctaaaataggcaccttccccaccgtacctcatcgcccagggcaggcaggcagggcaggctagatctcgtaccgatacttgagcacgcctcctcctggtgcagaaagaaacctcttctgtaccgaaatacaagcagcagctgtggcctgggccaccaggtggagcatggggaacactctgggccctgggaggacgaagccagtgccactaggagcagactggctggggacggttgtccacacagactctggccccatctgggtgggcttgcagcaggcgtcctgggccagaggaggggccctggcatctatccaacaccaggacctctctttaggcctaggccaaactcttcagaagtcacgacacacagatgtgggccccggtcacgcctcatgagctgtctctgggaagaaaatctcccggcatcgctgcaccgtgtcctgaggagacaccacgctgtggccaacagtccgggggtcggcaaagatctcaaagtcgttcccaccctgcacacagaggatgggcagaggagggatatttaggtggagtccctctccacattggctgctacggacctgcccctcctcctgccccttcagaactgccaggaagcccaccttctcaccccttgtcagacctgccctgacttgctgtgtgatgtagaacaagtgcccagcctcttggggccccagctttccaatctgtgtaacggggctggtgagcaatggttgttctccaggagccccctaagaggtctgttgtgttgccccatgttctggccttgacctcaggtgatttgcattggagaagccaccagacctggcttctcactgtccactgcgttaggggaaacctggggtgggccacactcacagggctagtctcgttcccaaagaagtggatggtgtcgaagctgtcctggtccaggctatccaggcagtagcgcttgtcccagccctcggggaagacgtcaaagctgatcatgcctcctgtgggcaggggtggggactgttattccctgctgggaggggcagacaaggctaacagaagggctgcttgttcattcattcattcaacaacccttgagtgcctactgagggccaggaataggacacgggacagacttaggatcctcaaggaagttatgacacaggttggagaatgaacaagaccatgaagtgggtgggggaagctcatccggccagggtgatcaggggagacctctgaggaggtggcaatgagctgggacctgagccgagtggggatggctggggcgcaaagtacagcccctgaggcagggaagagaacgagcgtcccagcaacggaggaggccaggagaggtagggggaggacgggcaggccctgggcatcacatggagagggaggaagagcctggggaggactttgggcagaggcatgtcatgactccagctccagcctctctggccactggggaatgggtgaggtggcagaggggagcccagttgtgtcagggtcagttggagcctgggacaagctgctggcagtggaagtgtgagcaccggtgggattccagacagggggccctgtgacttctaggagtttggacttgggaaggggtgggggagagcattcaagggagaggctctggttttttggcctgagaaactgggtgggcatggggcgtttacctctgaggtatgaggtggggaaaactgggggccagtaaacactgaacccctttctgcatcgggctcagccaccctctctgccctgagccggggaggggctactaaagctactgggggccacagcctggtcttggcaggggcagatggtttgaggaggggccctgtaccaggcctcccaggtcctctgcagggtggacgtacctcgagagaacctcagccctttgccagcaaactctgttttcagggcttccacgaacttctcccggatcttctctttctgcagaggggagggagcggatggcagctcagaggacctgctgtgtgccaggccctggctgggcacacagtccacgtgagcgtgctgagcattctaggtgggtaggacccccaactgtgcagatgcgcaaactaaggctcagagaggggttgtgccttggtcaaggtcacctagccctggtggcagagccagggcctaaatccagaagggatggggctgccaatggggctgtgggctgggtcttctgaaggagacctcagaggagagacacgagtaggaagggcgaggagacggggcaatctggatcccacatcagtgtccacctcagggcagggctcgatcctgttatctgtaaccagctcaacaaagcaaatactcagaaatgagcatgggagctgagagcaggagacctgtgaggaggtggctgtgggcattcacagagggcagcaggatgccaggcatggcagagcacccagcatgcaaagacgcggctgggctggggactaggtagtgcccaggccggccccgtccctctgagcaggaactctggcagcagctccgcaaacgtggagcagggggacattctccccgccagcccccaggatctccatctcagagggccacaaaggggagcagctatgcccagtctgaggggcagctgaacatctaaaccagccagcaggacattcagctgacagagggtctcgagaccgggctgggaagtctgaccacatcctgggggaccaagaggcgctgaggattctggagcacaggagtggggtggctggtatggccctgtagtcagagccgggtaggactggggcggaaaggcaggcagtggtcagcagcatggagcttggagaagtggcccagggaggatgtcagatataaagccagacaccccctagcctgagatctgaaggcaagtagccaggcttggctactgtactcctcagctgtgtgaccatgggcaagtcacctgacctctctgagcctatttcctggactaaaggacagagaagtaatgaatgacccctgcctgcttccctctcatggaaaagcagagataagggatgtgagccccctgccagccttggcctggctttccagcaggtaggtgggccccagggaggccagagtccccaccagcgtccactctgtaggcccagggctaccactaagactgccccaggctctgaagaaatgtttccacatggccgaggctggctgcacctcccttctctggagaacaaggctggtcactagacagccccatgtgcaaggccagcctcagcagggaccggcactgtgacctcgagctggttactcaccctctggcctcagtgtcctcatctaaggaagggaagtactcatccccgcttcagggttctggaagatgagctgggttaagcatttatttacaccagctctgggccagggcagggcgcacagatcaggaaggttcatgctcctccagtgccagaagggagcaaacaagagccaaaaatacttgagaaggctctggggtggggagttagggtgtggctccccaactccatgccaggtggggtccatgtgccacctcatccagtgctcatgacagcccatgggatgggaactgctattacccccaccttacacataaggaaactgaggcacacgttagtaaagatgcttttccaggttacaaggcaaatgggtagagctgggactgggaacctgggtggacaggaagggataacttctcagcacgtgtattgggggggaagggttctttgcctaagaccaatcctaactaccccaaaaaaaaagtccccgtggccgggcgcagcggctcacatctataatcccagcactttgggaggccaaggtaggcagatcacttgaggccagggatttgagaccagcctgaacatggcaaaaccctgtccctactaaaaaatacaaaaattaggccgggcgcggtggctcatgcccgtaattccagcactttggaaggccaaggagggcggatcacaaggttaagagatcgagaccatcctagccagcatggtgaaaccctgtctctactaaaaatacaaaaattagctgggcgtggtggcaggcgcttgtagtcccagctacttgggaggctgaggcaggagaatcgcttgaacccgggaggcagaggttgcagcgagccgagatctcaccactgcactccagcctggcgacagagtgagactccatctcaaaaaaaaaaaaaaaaaaaaaacccaaaaccaaaccaaaaccaaaaccaaaaccaaaaaacttagccaggtgtggtggcatgggcctgtaatcccagctactcaggaggctgaggcaggagaattgcttgagcctaggcagcgaaggttgcagtgagctgagatcatgctactgcactccagcctgggtgacagagcaagactctatcaagaaaaaaaaaaaaagtccctgtgcctgtgggcactgcctcccctaagcctcagggcacaggtgggagtcaggagtcactgagctgagaggcaccctcagggaggcaccagagggccaatggcaaaatcaaatctttgctctgcaaccaactccctatgtgacctcgggcagggcccttctcatcgagccttggtttcctcatttataaaatggagataatacagctcatttcattcattcaaaaggtatttcttgccgggcacagtggctcacacctataatcactttggaaggttgaggtgggtggattgcctgagctcaggagttcgagaccagcctgggcaacacggtgaaaccccatctctactaaaatacaaaatattaggccgggcacagtggccacgcctgtaatcccagcactttggcaggctgaggcaggcggatcacgaggtcagaagatcgagaccatcctggccaacatggtgaaaccccgtctctactaaaaatacaaaaaattagctgggcattgtggtgcatgtaatcctagctacttgggaaggctgaggcagaagaatcgcttgaaccagcgagtcaggggttccagtgagccgagattgtgccactgcactccagcctggtgacagagcaagactctgtctaaaaaaaaaaaattagccgggcgtggcagcatgtgcctgtagtcccagatacttgggaggctggggcagaagaattgtttgaacccgggaggtggaggttgcagtgagccgagattgtgccacagcactccagcctgggtgacagagcgaaactcagtctccaaaaaaaaaaaaacaaaaaagggtatttctttgcgaggtgcggtggctcacacctacagtcttggtgctttggaaggctgagggagaaggcccacttgaggctaggagttcaaaactggcctgggagacacagcgagatcccatccctacaaaatattttaaaaattagcctggcatggtgtaatgcacctgtggtcccagctactcaggaggctgaggtgtgaggatcgcttgagcctgagagatcgaggctgcagtgagctaggactggatcactgcactgcactccagactgggcaacagagtaagaccctgtctcaaaaacaataacaacaaaaagtatgccatgtgccaagcataggggatccagaggagaacaagccgcagaaatccctcatggagcttacagttctgggacagggacagacagtaattcggattttaaaagtagatgatgaaagttgtccaaggctacttggggagaaataaggtaggggaaggaggaggaagtgcagcagtggat

SEQ ID NO: 98222 - DNA, 114628 bp, Homo sapiens
  misc_feature (1)...(114628): n = A,T,C or G
aatatcattatggaataatttatttttttcattgattcagtgtggtttctttttgtgtggtttttgggttcttttttttagacagggtctagctctgtcacccaggctggagtgcagtggcgcgatctcagctcattgcaacctccacctcctgggttcaagtgattctcttgcctcagcctcccgagtagttgggattacaggtgcctgccaccgcgcctggctagttttcgtatttttagtagagacaacatttctccatgttggccaggctggtcacgaacccctggcctcaagtgatccacccagcctcccaaagtgccgggattgcaggtgtgagacactgcgcctggccctgaagtcagtttcgaagtcagtaagactccatgacccattgaatctgtggggagaggggctttgtggtggtggtctaggaggcttatagcttgagggagagtggatagtaatgtcactaagagagacaaataatgtgttaaatatacagattttgaggggaagatcataaatttggttgtgaatgttctgggttttaactttatgtgggacataacaggtggaaaagtcaagtaggcaattgagattcgatgctaggaaccaggacaggaaaaacagatttggatgccagtcaccaggatgtagaaaatctccctagcagggtgcggtggctcacgccagtaatcccagcactttgggaggccaagacgggcggatcatgaggtcaggagatcgagactatcctgtctaacacggtgaaatcccatctctactaaaaatacaaaaaattagctgggcgtggtggcgggcgcctgtaatcctagctactcgggaggctgaggaaggagaatggtgtgaacccaggaggcagagcttgcggtgagctgagattgtgccactgcactccagcctgggcaacagagcgagattccgtctcaaaaaaaaaaaaaaattaaatcttcacaatttatgttcctctgccacggctccagccggtccctccgtttggggtccctgacttcccgcaacacatctccagaactcttttcaccgtgttgcctgtgcttttgatgtcatattcaatatattattgccaaatctaaggtcatgaagattttcccatatgttttcttctaagagtttattattattattattattattacttttttaaagacaaggtctcactctattgcctaggctggagtacagtggctcaatcatagctcactgcagcctggaactcctggggtcaagggatcctcccatcttagcctcctgagtagctgggattataggtgcacaccaccatagccagctaaattttaaatgtttttatagagatgtagtctcactatgttgcccaggctggagtatagtggctattcacaggcatgattatagtgtactacatccttgaactcctgggctcaagtaatcctctcacctcagtctcctgagtagctgggactactggtatgtatcactgtgcccagcttatagtttattcatttttaattacacagtagtggttctttttttcttttcttctttttttttttgtgacagggtcttgctttgtcacccaggctggagtgcagtggaacaaccttggtggctcactgcaacctctgcctcccgggctcaagctatcctcccacctcagcctcccgagtagctgggactacaggtgcaagcccaagtccagctaatttttgtattttttgtagagatggggttttgccatattgcccaggctggtctcgaactcctgagctcaagtgatctccccacctttgcctcccaaagtacagggataacaggcataagtcaccacacttggcccagtagtggttcttaaaataaaatcagagcattacagatatattaaggtttcttttgtccactcccaattttgtacctccagcccccttttgaaaagcatcctctggccggacccggttgctcactttgggaggccgaggcaggcggcttacctgaggtcaggagttcaagaccagcttggccaacatggtgaaacccaatctctactaaaaatacaaaaaattagccaggtgcagtggcacacgcctgtaatcccagctactcaggaggctgaggcaggagaatcgcttgaacccaggaggcagatcatgccattgcactccagcctgggcaacagagtgagattttgtctcaaaaaaaaaaagtatcctctattatgtgtttattatatatccctgtatcttcctaggcctatgggaatacttttagatatatttactaccttcaaaaacatgtggtattatttgcataagaatatgtgtgtttacgtaaatggcatcacaatgagcatatcattcatctttctttactctgtgctaggcattgttctaattttgacgacacagcaatacacaaaataaagtttctattctcatggaccttacattatcctgccacttggttcttaaaattaatatcatgtattgaggtctatgcgtgatgatacatgtagatctgtttcatttcttttttctgagacagggtctcactctgtcactcagtttagagtgcagtggtgcgatcatagctcactgcaacctggaactcctgggctcaacagatccttctgcctcggcctctcgagtagctgggactacagacacacaccaccacatgcggctacttgtttgcttattttttttttctggccacacggcatctgtataattttttatttttaaatttaatttaattttttgagacggagtctcactctgtcacccaggttggagttcaagcaattctcctgcctcagcctctcgagtagctgggacttactggcgcgtgccaccacgcccagctaatttttgtatttttagtagagacggggtttcgccatgttgaccagactggtctcgaactcctgacctcaagtgatccacccgcctcggcctcccaaaatgctgggattataggtgtgagtcaccgtgctaggcctgtttttatttttagtagagacaaagtctcactgtgttgcccaggctgatcttgaactcctgggctcaagtgatccacccacctcagcctcccaaagtgtgtttcatttattttatttagtttttcatttcttaattgttgtatgttattctatgaatatactatataatacatcattctcttatgatggacatttagttttatatcaattaggatgttgtctacttcaggtaacagaaaaacatgactcataatggtgtaaatattaaggaaacttattatttcacatcatagaaaacccagaagttgaacggttgccaggtatatatgattagggtcctaactctgctattttctgttttttttttcctctcttctaagctctgaaataattatatgtttttatataacaaattaccccaaaacttagcggcttaaaacataggccaggtgcagtggcttatgcctgtaatcccagcactttgggaggctgaggcggaaggatcacttgtgcccaggagtttgagaccagcctgggcacataatgagactccgtctccacaaaaaaacaacgaaaaaatagctagccacagtggcatgcacctgtagtcccagctacttgggaagctaaggtgggaggatagcttgagctcaggagtttgaagctgcagtgagccctgatgacaccactgcactccagtacgggtgacagagtgagacctttaaaaaaaaaaaaacaccaaaaaaccataaacatagttttcataggtcacgagttgggacacagcttagacaggtctttggcttaaggtctctcctaagatgtgatcaagctgttgccctgtgagtctttccatatggctatttctcacagtatagcatttggcctgagtgagcaaattgagaacttgagatagtacccaagaaggaagccatagagtttttatcacccactcttggaaatgacatgccatcatttctgccttattctattgtttagaagtgagttattaagcatagcccacacacaagaagagagattacacaagagtgtggttgccagcctgtgggatctagggccatcttacaggctgcctgccataggctgtctgtcctcaggtttgcagaatggctgccaccaccaatgcatcaatagtcttccctgaagtaagatgccctaaaaggatctttttggccctgcactgaaaccttttctgatctccccactcctcaattcaattcaatcaacattttttgagtgtttgctttaggacaggcccattgctacttgtgaggattacatggatcatgtcttcatagagctcacaagtcttatagaagagatatagactcatagagcaaagaattgtagtatactgtgggagatcgaatgtcccagcagctgaggaaggatgcaggagaaatgaactgaggttcaaggaagcagtggaagaaatggttcaggtgggttttggaggatcagttggaggtaggtggcatgggggagatagggcaaaggcattccagaatgtaaatgttacagaaaagtattaagaataatgtgcctgtagttccacgttcgattaccctactgttaacattttcttacgtttatttttaggtctctctctctcttttttttttttttgagacagagtctcactctgtcacccaggctggagtgcagtggtgtgatctcggctcactgcaacctctgcctcccaggttcaagcgattttcctgcctcagcctcccgaatagctgggattacgggcatgtaccaccacgccaagctaatttttgtatttttagtggagatggggtttcaccatgttggtcaggctagtctctaactcctgacctcaagtgatctgcctaccttggccccccaaagtgctgggattacaggcgtgatccaccacgcctggccaggtctttctttttaatagaaatcatgacagatctatctgaagtcctgtttgcttctccccacattttccgctactccttctttcacccctttaccattaccatggtatccatctagttcatcttatatacttttacacacatagattttctgtaaacagtatatactgttctaatttacctatttttaaatttatataaatcatttcacagtgtacatatttgttggcatgtcgctatttcaataacttaagtagttgtgacctagcaaatgttgacacatataggattcctttgttttatttgttgtagtatatcactgtagggacatttggtgttttatttatgcgagacttattggacatttctgctgttcacattttccgccaggaagctggcctccttgaacatgtcttgtgcacacctgtaggagtgtctgtatttttcttttctttctttccctttttttttttttttttttttgagacggagtctcgctctgttgcccaggctggagtgcagtggcagtgacctgggctcactgcatcctccgcctcccggattcaagcgattctcctgcctcaggctcctgagtagctgttattacacgcacgcgccaccacgcctggctaatttttgtattttagtacagaaggggtttctctatgttgaccaggctggtctcgaactcccgacctcaggtaatccgcccgcctctgcctcccaaagcgctgggattacaggcgtgagccatcgcacccggcatttccgtatttttctagacgtgaaattgctgggtcataaaatggacattttaaatttcatcacacggaattgtcctcaaaagtggccgttctatacattttgccccacagctatctctgagtctgttgttactccttgctttcccccaaagcgcaagcaactgagaccgcgcaaggtgcgagccggctcacgggcggtcagcgcctcccgcgcagttggtacgtcccggatggctcccccgcggcgggggttggttaagtctccgcgcgctgcgcctgcgcccgccccgagagcgtgtctctggcatcggacgcgcgcgcccctccccctccccccgcgctcccaacgtgtggcggctcgcgacccccggcaacccggagaaggtctacagagcggcctgcgccagcgagtgagtacccgccgcctgcgcacagmtccgcccacccctccctgcctccttttcttcctcagcgggtccgcggcccgctactctccgggaggggcgcttcccgacgccaaggtaggcctctcccgacgccggggcggcccttcctgatgccggggtgtgtctctcgcgacgcgggggtgggctccggacgccggggctggccttgccgaagtcgggggtgggtccctccggacgccgaagtgggctcgggatgcggggctgggaccctcccgattccggggcggattccggacgccgggaccggccattactggtgccgggttgggcttctccagatgccggggctgggtccttcccaaggttgaggtgggttcgggacgcgggttgggtctcccctgacgccacgcagggcccctcggaacgccaggttgggctttgcaccttcggttgccgggcgggtccctttcacacctggggggcggcctgcatcctcccgggcgtcgggcgagcgccgagctccctcagccgtggtccgcgccgcctcacgcctcggggcgccaggcccgcgctccttcccgtgccgggttrctgttttgttgtgtgatcctcgttttctctaattatttgccccgaaaataacccccagcgcactccttggagatccctatcgtcctagacgatttcgcccccgcagggccggcgcstttccaggtgcttaggcagcgccgcaggcttctcgagcgccacagccggcgggctggtgccctgccgctcagttaacggggcgcgagtcccgggcagtagtggagctggatttgaatcccagcagctggactccagtgttctttcatttaatcactacatcgcaccgagatatagaaatgacacccggaaraagtgaaaagtttatgcttctgtctttattgttttcctgtcaagggaggcagtgccttgtagtcgaatgaaagtgtgtttttggaatcagatacattcagcttcaactctcagccctttaccagcttatccgctgtttgcgttaagtttcctcatgtggaacatcgtgatrtgaatacctacgacgcagagttgttgtgatactagatactaaagtgtttggattgtattgttacacacttgtcctaaactgaggctgaatataaactgaaaaaatggaaaatgaagtatcagggatgtatgcgtgtgtaggtatgcatttacctttttacaaaaattacggaaataagttcattgtatttagttattagagcgcttggtcgacgggcctggtggctcactcctatactcccagcactttgagaggccgaggcagaaaaatcacttgagtccaggagtatcaagacccgcctgggcaacataggagaccctgtctctacaaaaaataaaaaaaattattagagtgtggtggcgcctgcctatagtctcagctactcaggtggctgaggcaggaggatcccgtgagcccaggaagtggaggctgcaggtgagctatgatcgtgccactgcccttcagcatgggcaagagagtgagaccctgtctcttaaaaccctcaaaattaaaaaaaaaaaattagctgggcgtggtggcgcgtgcctgtggttcccagcttctcgggaaactgaggtaggaggattgcttgacctttggaccaggtcgaggctgattgccctactgcactccagcctgggtgacagagcaagaccttgtctccaaataaagaaagtgctaggtacctatttaggggtaaaagtcaatcatttataaaggattgttcttaaggtccctgtgcccccaagctttcaaagcaattttgacaagtttggtacccagactgtcaagattttaaattaccttgtcagtgatttttcttcasatagatcaagacgatggatgtgctgaaataaaatggcaaataatatctgaaattgaggattttcaaggacactgcccaaaatgttacctgtgaaataaataagtctcattactggggcacctgtcctgcttctgcatctttctggagacattttgttccttaattgtcattaagaagctgctgttggcatccagacttgattcctccttcattggcagttagtggtaattcattttagctttagttcaataagtgaagatagaccattattttagtgagttcttcatctttgaagggtagtaacttaaaaaaaaatagtagttgaactgtatacaggcttgcttgtttaaatgaactgatcagggacctttcttatttacgtttttagaattactgtggaaaacagtaatttaatgtggctaaatctcatgaagcactggaaattttggaatttgtatctgtggggagcctgtacttaatgcttcttattgatccatcatctgctgtgattctttgaaaacccaccttgagcctgcagtggttctatgctgggtttttatttatttacatgccttttagaaattagacatattttgtggtatagctttgtttgctatcaaatttgagcatattggtttaagtatatggtacatgtaatcccagcactttgggaggctgaggtgggcaattgcttgcacccaggagctcaagaccagcttggataacgtggtgaaacccagtctctacaaaaaatacaaaaaattagctgggcttgttggcacatgtctgtagtcccagctgcccaggaggctctggtgggagaattgcctgatcctgggaagtcgaggctgcagtgagctattatcatgccactgcactccatcacagagtgaggccttgtctcagtaacaatacacgtgcacacacggtacaggaaacatttaaataggatggaaactactctgtgtgagaggttttcccagtgcattacgcttctccagtcttcccccatactcatctctgctgccaagtactrctcatgctatactcttagatttaaggattaccttaagttttttgtttgtttgtttgtttgtttgtttttgagacagagtctcattctgtcgcccaagctggagtgcagtggcgcagtcttggctcactgcaatctctgcttcccgggttcaagtgattctcctgcctcagcctcctgagtagctgggatcacaggcgcgcaccaccatgcccgggtaatttttgtatttttagtagagacggggtttcaccctgttggtcaggctggtcttgaactcctgtcctcgtgatctgcctgcctcggcctcccagagtgctgggattacaggcgtgaaccaccgcgcccggcctaccttaagttttatatcctccatacaacttttttcagccatatccttttatattacaattactactcaaagtatgtttgaattctgttgttacacacctgtctcaaattgagactgagtataaactgggatataaaatatcaagggtgtgtgtttatatgtgtgtgtgtgtgggtatgcatttacctattttttaaaattatagaaataagctcattgtaattagttgataaagtgcttcgtggcactttaattttttttacctttaattttatcctgtgcgttaaatgcatatatagcatttaataatttaaatatacactttgtgctctttattcactcagcaaatatttataggtgcgtatcctgtatcaagcagcagttttagttagaggagatataagtcatggaaattggagtccagttttcatgtcaggagacaaaagtgcaagtgcctactgtgtttgggcaagttrcttttctgaacctgtgtttcctcataatgatatattctggtttcttaggatttattgaaatattcactcatcaaatatttattattattattattatttttgagacagagtctcgttctgtcctgagctggagtgcagtggcacgatctccgctcactgcaagctccgcctcctgggttcatgccattctcctgcctcagcctctcaagctgggactacaggcgcgtgccactacgcccggttgattctttgtatttttagtagagacggggtttcaccgtgttagccaggatggtctcgatttcctgacctcgtgatccacctgcctcggcctcccaaagtgctgggattacaggcgtgagccaccgtgcccagccatatttattatttttaaaaactttttattaagatatcatttatatacagtagagtgaacccgtcttaattgtacagttcaatgtgtacacccgtgtaagtaccaccaaggtatggaacattttcagaaggctcccttgtgtctttcccaatcagtaccctccagaggtaaccgatgttctgacttggatcaccagaggttaattgttttattttttatttttatttttttgggaaaaggtctcactgtcaccagtctggagtgcagtggtgcaatcatagctcaccacaacctcgaactcctgggctcgagatcccttctcctcagccttytgagtagctgggactacaggygcacgccactatgcccagctaatttttttttttttgttttkttttttttgagacagtcttactgttgctcaggctggaatgcagtggtgcgctctcggctcactgcaacctctcccttytgggttcaagcgattctcgtgcctcagcctcccaagtagctgggattacaggtatgtgccaccatgtctggctgatttttttttttttttttttttttgggaaacagagtctcgctctgtcgcccaggctggagtgcagtggtgtgatctcagctcactgcaagctccgcctcccgggttcacaccattctcctgcctcagcctcccaagtagctgggactgcaggcgcctgctacctcgccccactaatgttttgtattttttttttttttttagtagagccgggttttcactgtgttagccaggatggtctcgatctcctgaccttgtgatccgccccccctcagcctcccaaaatgctgggattacaggcgtgagccactgcacctggccctcagtttattctttgtcaagattgtttaaactgttctggggcccatgcctttctatatacatttagaataagcttgtttatgtctactaaaagtcttagtgggattcttataggaattgcattaaacctaagataacgttctgtgctcccaaaggttgaagaaaaaaaacaacaacctaggatcagtttggggagaattgatatgtttactatgttgaagcttccaacctgtgggcatggtatgtctctacttatttagatctttgatttctttcactagttattcaaaaaacaaaaccccataaaacaacttacgtataagtctatccacacacctgcagtgaactcattttcgacaaagttgccaagaacatacactggggaaaagacagtctcttcaatagatagtgcttagaaaactggatatctatatgcagaagaatgaaactaggcctccatctcttgccatatacaaaaatcaaataaaaatgtattaaatgtattaaatctaagacctcaaactatgaaattactacaagaaaactttggggaaactctctaggacattggtctgggcaaaaacttcttgagtaatatcccataaccacaggcaaccaaagcaaaaatggacaaatgggatcacatgaagttaaaaagcttctgcacagcaaaggaaacaataaagtgaagagacaacccacaggataggagaaaatatttgcaaactacccatctgacaaaggattaataaccggaatgtataaggaactcaactctataggaaaaaaaatctaataatccaatttaaaaaatgggcaaaagatttgaatagacattactccaaagaagacatgcaggctgggcacggtagctcaggcttgtaatcccagcactttgggagtccgaggcaggtggatcacctgaggtcgggagttcgagaccagcctgaccaacatagagaaaccccatctctactgaaaatgcaaaattagccgggcgtggtggtgcatgcctgtaatcccagctactcaggaggctgaggcaggagaatcacttgaacctgggaggcagagtttgcagtgagccgagattgtgccattgcactccagcctgggcaataagaatgaaactccatctcaaaaaaaaaaaaaaaaaaagacatgcaagtggaaaacaggcatatgaaaaggcgttcaacattattggtcatcagagaaatgcaagtcacaactacagtgaaatatctcaccccagttaaaatggcttatatccaaaaacacgtaataggaaatgctggcaaggatgtggggtaaagggaacccttgtacactgttggtgggaatgtaaactagtaccagcactatggagaacagtttggcgtttcctcaaaaaactaaaagtatgccgggcgcggtggcttatgccggtaatcccagcactttgggaggccgaggcggcggatcatgaggtcagattgagaccatcctggctaacacggtgaaaccccgtctctcctaaaaatgtaaaaaaattagccaggtgtggtggcgggcgcctgtatcccagctactcgggaggctgaggcaagagaatggtgtgaacccgggaggtggagcttgcagtgagctgagatggcaccactgcactcccgcctgggtgacagagcgagactccatcccaaaaaagaaaacaaaacaactaaaagtagagctatcgtatgatccagcagtcccactgctgggtatgtatccaaaagaaaggaaatcagtatattgaagagatatctgcactcccaggtttgttgtagcactatttacaatagccaagatatggaatcaatctgtgtccatcaacagatgaatggataaagaaaatatggtacttatacataatggagtactattcagccataaaaatgaatgagatcctgtcatttgtaacaacatgggtgaaactggaggtcattatgttaagtgaaataagccaggcacagaaagacaaacattgcatgttctcacttatttgtgggatctaaaaatcaaaacagttgagctaatggagatagtagaaggatggttactagaggttgggaagggtagtgggggatggtggggaggtggggatggttagtgggtaccaaaaaaaaaaatagaatcaataagacccagtatttgatagcacaataggatgacttatagtcaataataatgtaattgtacattttaaaatagtataattgtattgtttgtaacacaaggataaatgcttgaggggatggataccttattttgtatgatctgactattacatattgtgtacctgtaacaaagcatctcatgtatcccataaatatatgcacctatgtacccacaaaaattaaatttaataaaatgtataagacttatatgctaaaaactaaaatgtatgttagaaaacttaaaaatactgcaagatttttttgaggattattattattattttttctgagacaggatcttgctctgtcactcagtctggagtgactgcagccttgatctcacgggcacaagttatctcccacctcagtctcctgagtagctgggactacaggtatgcaacaccatgcctgactgatttttaatttttttttgtagggacggggtcttgctgtgttgcccaggctggtctcaaaccccctagctcaaacagtcctcctgccttggccacccagagtgctggaattacaggcgtgagacactgcacccagcctgagcattatttttaaattataaaatgagcgcagacttgtaggaattttgaataaaggagaaaaatacgtatacattcactacactaaattattccaaggtttgtataattttttgttttgttttgtttttgttttttttgagacggagttttgctcttattgcccaggccagagtgcaatggcatgatcttggctcaccgsaacctccaccgcccgggttcaagcgattctcctgcctcagcctcctgagtagctgggattacaggcatgcaccaccacgcctggctaattttgtatttttagtagagacagggtttctccatgtckgtcaggctggtctcgaactcctgaccttaggtgatccgcccgccttggcctcccaaagtggtaggattacaggcgtgagccactgtacccagactttttttttttttttttttgagacagagtcttgctctgtcgtccaggctggagtgcagtggtggcgcaatctcagcttagtgcaacctttgcctcctgggttcaagtgattcttgtgcctgagccactcgagtacctgagattacagacatgtgccaccatgcccagctaatttttgtatttttagtagagatggggtttcaccaygttggccagggtggtctcgaactcctgacctcagatgatctgccgaaagtgctgggattacaggggtgaaccactgcaaataagtatttattgatcccctatcatttgccacagcatttggtaggtgctgggactgtttcttccttgccttccttaaggctatagtccattgagaaagacagacatttctttctcgatgaaaaatcacgcaaatgagtgtgtaattaaaactgtgttaactgattttgacaggtgcatggtactttgaaaatgtatagtagaggtatttgaccaatctggggagccaagaaagatttctctgagaaagttattcttctgaaggatgagaaggaattaactaggtgaaggggaatgttggggaatcttccattcataagaagcaagtatagaggcctcatgacattaaaggagtatggctggggcttaagaactgtgagagagcttagaaagagcaatctggcaggagggcagataatacgggacatactttgtagactatgttaagagcaaaaatgtcctaactataaaaatagtgggaaaccattgaaatgggtttttttttttttttttttgagacagagtctcgctctgttgcccagactggagtgcagtggtgcaatctctgctcactgcaagctccgtctccygggttcacggcattctcctgcctcagcctcctcagtagctgggactacaggggcccgccaccacgcccggctaatttttttgtaattttagtagaaacggggtttcactgtgtgagccaggatggtctcgatctcctgaccttgtgatccgcctgcctcggcctcccagagtgcgggattacaggtgtgagccaccgtgcccggcctgaaatgttttaagtagtggagtactttaagatttgcagttgaaaagaaaacagctttggtgtgtagagattggaggggaacggtggtaaaagtaaggaacccagttatgagtctgttaaaattgtctacacgagagttgttggtagcttggatggtgatagtggtgaaaatgaaaagaaatggagagcttaaagagaggtataggaggtgaaatcagttgcacataaggatgaattggatatgaaaaatgagggaaaragttaaagataacatcttggttctgtacagggctggaaggtgtgtactagctttcaagtctgccccaactcttttctcagggctctcaaatttgtgtgtgtgtgtgtgygcgcacgcgtgcacatagatcccgctgagcagggttatgtaggaagcttgggcctattgtggtctctgctgtgcatttcaacagcctctgaccattctgggatattttgagagtttatgaatcctcctatggctgtcttatttcatggagcttcctgataaatctctgactcatcttctcatttgttgcttgtctcaggtaagacccaatggcaggcaattggccactaagattggagtaacgatactccacatctcatctgttcccttcagctgttgcagtgcagtggttggtactcatattctgtccttccctggttaaactactggactcatagttcaacctgtgatttgaactgaggagtagggtactgaataggggagttgatcctaggtgtgaatcacagagactcatggtattcttacccaaagttcagtcgttttcatgagtgaacatttcttagtttgttttatgcttttggtcagtttccaagtgctgaaatggttgtcttgactgttttgggttagctttatagttttcttgagaagagatttgtcaacctccttacatggtcatgatggtaaccacaagtccttttttagtttgtttattgacttaacaccactcagtgactattttgagttttcatcaaggtatataactgtgtaatcacctccacaatcaagatagagaacattacctcaaaagttaccctcctgccccttaccagtaatttctcttcctcttctgacctggctccaggcaaatgctggtctgttttcctttaactgttgattagtttttttctagtttcatacaggtagaatcatagtttgtagtcttttagacattgcttcttttgctcaccataatgtctttgagattcatctgtgtcgttggatgcatcagtagtttgttccgttttattgttgagcaatttttcattgtagagataggtctcaatttgtttattcacatgttgatggatatgtgggttatttccagtttttgtcccttatgactaaggctgctatgatgaacattcacgtctttatttctcttgagtaaatacctaggaatgaaatggctgggtaatgtagtagatacatgcttattttttaagaaactcccaaactgttttccaaagtggatgtaccactttatattccttttttttttttttttttttgagatggagtttcactcttgttgcccaggctggagtgcaatggcatgatctcggctcaccgcaacctctgcctcccaggttcaagcgattgtcctgcctcaacctcccaagtagctgggactacgggctcctgccaccatgcctggctaattttttgtgtttgtagtagagatggggtttcactgtgttagccaggatggtctcgatcttttcacctcgtgatccacccgccttggactcccaaagtgctaggattacaggtgtgagccaccgtgcctggccttttttttttttttttttttttttggagacagagtctttctctgtcacccagtctggagtgcagtggtatggtctcggctcctgagttcaagcaattcaattctcctaccccagcctcctgagtaactggaattacaggtgcatgtcaccacacccagctaatttttgcatttttagtaaagacggggtttcactgtgttggccaggctggtctcaaatccttgtcctcaagcaatctgcctatctcgacctcccaaagtgctgggattacaagtgtgagccaccatgcccagcccacaagttgtcatttcatctgttgatggaatctgggttgtctttggtgtttgacattatggaaagagctgctatgaacatacatatacaagtttttgggtggtaatgttttcatttctactgagtaattaatagtagtggaattgaagcaaagttaaaaagagaaaaacaagttttcctgtacttggctgactcactccaaggccagcaataggcagggccctggcagagccttgataacactatctgaaaagccagagcccaaaggaatgagctccagatactctcccagcacactgccccccacaccccgccccagagtgaggataagaaaagaaaacaaattcctttctcataactatttctacaaatacctgtgtttcacaagttttgtaagttcctgttttccctactgtgcagctgcatgatcacaagctatgcctgcgttgcgagacctgtcgcaatttaattaactgcctttgttctgcttctgtaagcctgcttgcctgccccatgagtttcgcactgtcacattcccaccgcaccattcaaactagccaactccctttcagaagtgtgtataaaagtcaagccctgtctttgttgagggctcagcctttggatgttaatctgctgggctggtggccacctaaagaaaatcctcctgttccacgcattggtctctccagtctccagattcctgcaacagaatgactggcttacatgacagttatacttttttttttttttttttaaagaaactgccagttttccaaagtggttatgccattttacattcccattagcagtatatgagaggttcattatattctgcattcctgcccacatttgtattgtcactattttcaattttagccattctaatggatatacagtgttaggccattgtaaatttaatttgtaatttcttgatgaataatgatattgaatatctgtttgtttttccttattggcctttagtatatctgcttttgtgaagtttgttaatatcgcttgcttcttttaaatattggtttgtctttttttattttttcttttgagatagggtctcagtgtgttgttcaggctggagtgtaatttttggaatccacctagagatgtaaagtgacatagccagcctcccagtgtttatgtgtttaataagcatgtttatgctgcattacccaagtgttttttactatttcatccttttcacactttgatttttgtatactttcttctttttttttttttttgagatagagtttcactcttgttacccaggctggactgcagtggtgtgatcttggctcactgcaacctctgcttcctgagtgcaagcagttctcctgcctcagcctcccaagtagctgggactacaagtgcctgccaccattcccagctaatttttgtatttttagtagagacggggtttcaccatgttgaccaggctggtctcaaactcctgacctcaggtgatcctcctgcctcagcctcccaatgtggtgggattacaggcgtgagccaccgcgcctggcagatttttgtatgttttccagtacacaaaatacatacattagtattcatatagttaaaaaagtaaatatacatatgttgtggttgtgccttacaaattatcagtagagatactttataattattagactttaagtctttaagttctggggtacatgtgcagaacgtacaggttttttatataggtatattcgtgccatgatgattagatatatttttaaaaggtaagaaaatatttgtgcctgggcatggaggctcacatctgtaatcccagcactttgggagacctgggtgggaggatcacttgagcccaggagttcgagaccagtctgggcaatgtagtgagaccttgtctctacaaaaaataaaaagtaaattagctgggtgtggtggcacatgcctgtggtcctagctacttgggaggttgagatggaagaattgcttgagtctaggaggttgagattgtggtgagccgtgttggcctcataaagtgctgggattacagcatgagccactgcacccggccaagaatttttttttttttttttgagatggagtcttgctctgttgcccaggctggagtgcagtggcacagtcttggctcaacccctgtctctggggttcaaatgattctcatgcctcagcctccccagtagctgggattataggtgcacaccaccatgcccagctgatttttgtatttttagtagagatggggtttcgccatgttggccatgctggtctccaactcctgatctcaggtgatccacctgcctcagcctcccaaagtgctgggattacaggcgtgagccaacatttctggcccaataattgtttgtatattctggatacaagtcttttgcaagataaatgtattgcacatattttcttccattctatggtggctttttgttttcttttttgatacggggtcttactctgttgcctaggctggagtgcagtagcatgaccacatctcattgcagctttgacctccctggttcaggtgattcttccacttcagccttctgagtagctggaactacaggtgtgtgccaccatacccagctaattaaaaaaaatttttttttttttatagagacaaggccttgctattttgcccagattgtcattctgtggcttcttaatggtctttttttaaagagcagaagttttaaatttcartaaagtcaaatttatcaatttaaaaaatttctttatgtcctaagaaagctttatttacttagtcacctttttttttttttaaactgagacagggtctcactatgttgctgaggctcgtcttgaacgcttgagttctagtgatccttctgccttggctccccaaagtgctgggattacaggcatgtgccactattcctggccaaatcttgatagttctacactcttttgggtctttcgctcctttgagaattcaataaaaaatataaaaatttttccaaggaagatacagaaaaaaccaattttacacacaattttagttaatcccctgaagccaatctatagattctttaagggcttttggattgacaggttaagaactcttggctggcagttctctaagtattaatctatctcttcttttgagatgaggtctcactctgttgcccaggctagagtgcagtggcgccatcatggctcaatgcagcctccacctccctaggctcaggtgatcatgccactttagcctctcaagtagctgggactataggtgtgcaccaccacacctggctaatttttaaaatttttttgtagaggtggggtctttctttttttgaaacrgagtctcgctctgtctcacaggctggagtgcagtgacacaatctcggctcactgcaagctctgcctcccaggttcacgccattctcctgcctcagcctcccgagtagatgggactacagttgcctgccaccacgcccggcgaattttttgtatttttagtagacttggggtttcaccgtgttagccaggatggtttcgatctcctgacctcgtgatctgcccgcctcggcctctcaaagtgctgagattacaggtgtgagccaccgcgcctggcctttttttttttttttttttgagacggagtttcactcttgttgcccaggcttgaatgcaatagtgccaccatgcctggctaattttgtatttttagtagagatgggatttctccatgttggtcaggctggtcttgagctcccgacctcaggtgatcgagaggcagtctttctgtgttgcccaggctggtcagatctgtcttctcaatttgccagatttcatattctttcccctcagttgtctttgctgtttctccccaaagagatttgctctttgggtagtcttcattatggtagtagcagacctgaatctaaaaaggtagagtaaggtgaattaaaactgaggccgggcttggtggctcatgtctgtaatcccagcactttgggaggctgaggcaggtggatcacgaggtcaggagatcgagaccatcttggctaacacgatgaaaccccatctctactaaaaatgcaaaaaaaattagccgggcgtggtggcgggcgcctgtaatcccagctactcaggaggctgaagcaggagaatggtgtgaacctgggaggcagagcttgcagtgagccgagatagtgccactgcagtctggcctgggcgaaagagcgagactctgtctcaaaaaaaataaaaataaaaataaaaaataaaataaaaaataaaactgaggacttgattagtcatgatggcttgtgcttctaatcctagcattttaggaggccaaggcaggaggatcgtttgaggccaggagttcaagaccagcctgggcaacacagcaagacccccatctctttaaaaaaaaaaattagctgagtgttgtggtgtactcttgtagtcctacctacctgggaagctggggcaggaggattctttgaacctaagagttacaggttgcagtgagctatgatcatacacattgcattcaagccaaggcaacagaacaagcccctatctcaagaaacaaaaacataaatataaaatctatttatattagaaatatggcaacatttgtacaaagttgcatgtgttttttccatttctgttacagtttggggtttagaaaattcacttcttgcgaattaatataaaattaatttattttaggaagtacaaatatgtcatcttatttgtgttttaatttgtgtaatggtaacttgataggtttttaaccttttcctgctgctataacagaatatcttagactgggtaatttataaacaatacaattttttttgttcacagttctgaagtctggtaaatstaagatcaaggtgcctgatgagggcttgcactgtgcttaaaagatgggaccttcttgctgtgtcttcacatggcagaagggtaaaaggggcaaacaggttctcttaggcctctcttataagggcactagtcccattcatgagtgctgtgtcttcatgacttccctaagtccccatttctttctttgtttttgttttttttttttgtaacagagtctcgctctgttgcccaggctggagtgcagtggctcgatctcggctcactgcaagctccacctcccgggttcacgccattctcctgcctcagcctcccgagtagctggggctacaggctcccgccaccacgcctggctaatttttttgtatttttagtagagacggggtttcaccatgttagccaggatggtctcgatctcctgacctcatgatctgcctgcctcggcctcccaaagtgctgggattacagacgtgagccactgcgcctggccccaggccccatttcttaccaacacattggggattagatgtcagcatatgaattttggagggacacaaacatttagaccatagtggataggtcatatctagttatctagtgagatgttactgctttagtatgaatttatgtatacttaaataataactagctacctctgcattgcatatgcaataaatattctgttaactgtatttaaatacagaagttaaaagtatatttctttttttttttgaggcagggtcttggtcggttgactaggctggagtgcagtggtgtgatcttggttcactgcaacctccatctcctgggttcaagcaatcctgccccagcctctccagtagctgggtctgcaggcatgtgccaccacacccagctaatttttgtatttttaatagagatggggtttcaccatgttgtccaggctggtctcaaactcttgtcctcagatgatcctctcaccttggtctcccaaagtgctgggattacagacttgagccactgcgcctggctaattttttcatctttgtaatttcttgttctttagtcattaaaaatatgcattaaatgcagaaaaggacgtttgtgtgtcgagttttatcatggggaatgattttgtaaattgtaagcatctgtgtgtgtatgttgttactatcccttaatttagaattttttaatcctttaagtgttttttttagaaaaactttaatgctagtattgtacagactacttctgataataagatgtaacaacccccttaggagtaattgaatggtttgagaagtttgttacaaagttaaggtggctttatttaaatctgtgattgagtcagtgattctctgctctggctgtaaaataaaatcatccggggctcccctttttaaaaaattgaggtaaaattcacctaacaggctgggcacggtggctcaccctgtaatcccagcactttgggaggccaaggtgggtggatcatgaggtcgagagatcgagaccatcttggccaacatggtgaaaccccatctctactaaaaatacaaaaattagcctggcgtggtggcacatgcctgtagccccagctgcttgggaggctgaggcaggagaattgcttgaacccgggaggtggaggctgcagtgagcagagatcgcaccactgcactccagcctggcaacagagtaagactctgtctccaaaaaaaaaaaaaaaaaaaaaattcacctaacaaaatctaccatttcagtcattttaagtgtacaatttggtggcttttaataaattcacagtgttgtgcaattaccactttctaattccagaacatttctatcatccccaaaataaaccttatatccattaagcagtcattgtacattttcccctatctcatcttctggtaatcactaatctgctttctgcctatggatttgcctattctggatgtttcttataaatagaatcatacaatatgtgccttttatgtctggcttctttcgcttggcatgttttcaaggttcatccatgttgtagcatgtattaatacttcattccttttgtttccccatagtggctacaccattttacatcctatcaataatacagtgtactagagttccagtttctccagcatccttaccaacactagttattttccattatttaaaaaatagccagccatcagagtgggtataaagtgatatttcattgtggttttgatttgcgtttccctcatgattaatgattwgagtttttttttttttttttttggacaggggcgtagtctgtcacccaggctggagtgctgtggcacggatattggttcactgcagccttgacctcctgggctcaattgatcctccatcctcccacttgagcctcccaactaactgggactacaagtgcgccaccacatctggctacatttcgtattttttgtatagggttttgccgtgtttcctgggctggtctcaaactcctgggcttaagtgatccaccagtcttggcctctcagagttttgggattacagcccactctgctgggctacttttacgttkgatgtcttttttttttgtgagacagggtcttgctctgttgcccaggctggagtgcagtggtgtgatcacagtttactgcagcctcaacctcctgggcttaggtgatccctcctccttagcctgccaagtagctgggactacaggcattagctgccatgcctggctaatgtttatttttattttatttttttgagacagggtcccactctgtcacccaggctggagggcagtggtgtggtcttggctcactgcaacctctgccctgggttcaagcagtccttttacctcagcctcctgagtagctgggactacctgtgtgcaccaccatgcctggctagtttttttatttttattttttggtagagatggggtttcaccatgttggccaggctggtctcaaactcctcacctcgagtgatacaccagcctcagcctcctaaagtgctgggattataaacatgagccactgtgcccagccagaaatataatttttaaaatttcagttttgattgtttatgtctagcatataggaatgcaattggtttttgtatgttgacttgtttcctgcattgatacaaggcaagataaccttgatgaactgttgattttgttgttgttttgagatggagtttcgctcttgtcgcccaggctggagtgccaatggcacgatcttgggtcactgcaacctctgcctcccgggttcaagtgattctcctgcctcagcctcccaagtagctgggattacaggcgcccgccaccacgcctggctaatttttgtatttttagtggagacagggtttcaccatattggccaggctagtctcaaactcctgacctcaagtaatctgcccgcctcagcctcctgaagtgctgggattacaagtgtgagtcactgtacctggcctataatagttttttaatgtgtttcttagtgtttttttttaaacacaggtcatgtcatctgcaaatcgtgatagttttacttctaagttgagtatcttttatttctctttgcttaattgttctgcctagaaccctaagtataatgttcaatgattaaagcagacattgttttttttgagatagaaccatgccctgttgcccaggctgcagtagctgggaccacaggcatgccaccatgctgagctaattttttaattttttgtagagacagggtcttgctatgttgatgaggctggtctcttaacttgtgggctcaagccatcctcctgctttggtctcccaaaatactgggattataggtgtgagccastgtgcccagcctttttttttttttttttttggagacagggtcttgctctgttgcccagttgcctaggctgaagttcatcggcatgatcatagctcatggcagtctcaaacacactcaagctatcctcctgcctcagcctcttgagtagctgggactgtaggtgctcaccagtgtgccttactttttttttttttttttttttttttttttttgagatgaagtcttactctggcacccaggccggagtgcagtggcacaatctcagctcactgcaatctccacctcctgagttcaagtgattctcctgcctcagcttctggattaggtgggattatagtcacacgccaccacgcccagctaatttttgtgtttttagtggagatggggttttaccatgttggccaggctggtctcgaactcctgacctcaggtgatcagcccacgacggccttctatcctgtagacacaggatgccatgtcttgtctctacaaaaaaaaaaatacgttgcataggatggtctcaaattcctgacctcaagtgatcctcctgccttggcctcccaaartgttgggattacaggggtgagccactgcgcccagctgaaaggaaacattcttgtcttgctccttgtcgaaaggagaaagcattcagtcttgtacctttaaacatgatgttagcttattagttatgggatttttgtagaagtcctttatcaggttgaggcatttggtatttaaaaaatcttaacctagttaacatagtgagatcctatcttataaggaataaaaagtaaattaaattagccaggtgtgctggcacacccctgtggtcccagctgcacaggaagctgaggtgggagggttgtttgagccaaggaggatgaggctgtggtgagctacgatcatgccactgcaccctagcctgggtgacagagcgagaccttgtctcaaaaaagaaaaaaaacttgtaggtaaattataatatgtagtcaagaaaagcaattatctaaattgrtgtttaaagaactaggatacatgactatattattgatactgaaatttcaccatggagaatgagatttgtatatttatatagttgttttttttttttttttgagacagaattcccctcttgttgcccaggctggaatgcagtggtgcgatctcagctcactgcaacctccgcctcccgggttcaagtgattgtcctgcctcagtctcctgagtagcagggattacaggcatgcgctaccacgcccggctaatgtttgtatttttagtagagacagggtttcaccatgttggccaggatagtctccaactcctcacgtcaaatgatccacctgcctcagcttcccaaagtgctgggattacaggcatgagccactgtgcccagtctatgtttctctctatagaaaaaaaaaccattttttccctatatttttctaaaaaaaattcctctatatttttattttttgtatttattgatcattcttgggtgtttcttggagagggggatgtggcagggtcataggataatagtggagagaaggtcagcagataaacacrtgaacaaaggtctctggttttcctaggcagaggtccctgtggccttccgcagtgtttgtgtccctgggtacttgagattagggagtggtgatgactcttaacaagcatgctgccttcaagcatctttttaacaaagcacatcttgcactgcccttaatccatttaaccctgagttgacacagcacatgtttcagagagcacggggttgggggtaaggttatagattaacagcatcccaaggcagaagaatttttcttagtacagaacaaaatggagtctcctatgtctacttctttctacacaggcacagtaacaacctgatctctctcttttccccacatttcccccttttctttttgacaaaaccgccatcgtcatcatggcctgttctcgttggtcgctgtctcttcggagctgttgggtacacctcccagatggggcggccgggcagaggcactcctcactcctagatggggcggccaggcagaggcactcctcactcctagatggggcggccaggcagaggcgctcctcacatcccagacgataggcagccgggcagaggcgctccccacttcccagacggggtggcggccgggcagaggcactcctcacttcccagacggggaggccgggcagaggcactcctcacttcccagacgggrcggccgggcagaggcactccccatttcccagacggggtggcggccggcagaggcgctcctcacatcccagatgggccggccgggcagaggcactcctcactttccagatggggcggccgggcagaggcgctcctcacttcccattcggggcggccgggcagaggcgctcctcacttcccagacagggcggccgggcagaggcactcctcactttccagacagggcggccgggcagaggcactcctcacttcccagacggggcggccgggcagaggcrctcctcacttcccagacggggcggccgggcagaggcgctcctcacttcccagacggggcggccgggcagaggcgctcctcacttcctcccagacggggcggctgggcagaggcactcctcacttcccagatggggtggccgggcagaggtgctcctcacatcccagatggggtggcggccgggcagaggcactcctcacttcctcccagacggggcagccgggcagaggcgctcctcacatccaagacgatgggcggccaggcaggggctcctcacttcctagacggggtggcggccgggtagaggygctcctgacttcccagacggggtggccgggcagaggggctcctcacatcctagacratgggcagccaggcagagacactgctcacttcttagatggggtggcgggcgggcagaggctgtaatcttagcactttgggaggccaaggcaggcggctgggaggtggaggttgtagcgagccgagatcatgccactgcactccagcctgggcaacattgagcattgagtgagcgagactccgtctgcaatcccagcacctcgggaggccgaggcgggcagatcacccgaggccaggagctggagaccagcccggtcaacatggcgaaaccyggtctccaccaaaaatacaaaaaccagtcaggagtggcggtgcgtgcctggaatcccaggcacttggcaggccgaggcaggagaatcacgggagcctgaggcagggaggttgcagcgagccaagatcrtggcagtatcagcaacagagggagactgaagaaaggagggagaggaggagggggagggggagagggagagggctatatttttaatgagtagtagacaagttaagaaatgcagttttgcttctgttagatagggttatctttttcttttacaagattaaattgaggctgggcatggtggctcactcctgtaaccccaacactttgggaggccaaggcgggcagatgacctgaggtcaggagttcaataccagcctggccaacatggtgaaacccagtctctacaaaaatacaaaaattaggctggatgtggtggctcatgtctgtaatctcagcactatgggaggctgacacgggtggatcacctgaagtgaggagtttgagaccagcctggccaacatggtgaaactctgtctgtactaaaaatgcaaaaattagccagtgtggtggcgtgtgcctgtggtcccagctactcgggaggctgaggcaggaggattgcttgaacctgggaggcagcggttgcagtgagccaagatcgtgccattgcactccagcctgggcaacaaagcgagaccatctcaaaaaaagactaagttgaatagcttctagaaaacttatactttaagtaaattatgatctttttattctagacaaaattattgtccttttattctagacaaaaggatgccacggagaaagaaaaaagttaaagaagtctccgaatctyggaacctggagaagaaggatgtggaaactaccagttctgtcagtgtgaagaggaagcgtagacttgaggatgcattcattgtgatatccgatagtgatggagaggttagtgaagtagagctgaaaagtagagctgtagctctcaaactatgcttctttacccatggggagtttgtttcgtgactgacttcaccttaatgccagctcaccaaaaccatgaaatttttactcagctttgttttaatttgtaaatggaatgaagaattacttaaggtagtaatcctgttgcttggttgaggatggatcatagttcttcagttttataatatagtaatccaaagtggcattttggaactatttgaatcatctaaatcaattgtaaatcttagttttcatgtgtctagaaagtgagaggaaaaacacgtgaatgttcttaagtctcttgatatgttctacatataatagcacctagccatctgtagctgtttaaaaataactaaaattaaaaatcagcttctctgttgcactagtcacatttcaagtgattaaagacacataaggctagtgtcagttgtattagacagcagagctatacaacatttttatcattttagaaagctttattctccggaataaagattgtaacctttttcctttatcctgtatttctatttgtttattggagttttctgcctgcctgcaggtctcatctcaaaggcagtgaattaagtcattgttttttccttcagattttcttctctttctcctatatattttttttttctagagccagggtctccctctgtcacctaggctggagtgcagtggtgttagctcagctcactccaccttccttctcctggtcccacctcagcctcccatgtagttgggactacaggctcaagccattatgcctggctaatttttgtatttttttttgtagagatggggtttcgccatgttgcccaggatggtatcaaactcccatcctcaagcaatcctgcctaggcctcctgaggtgctggggttacagatgtgaaccactgcatctggccaaaaaatgacatatttttggttagcaagattgagcatttctttacatctttattgatttttcagaaacgtttcttggccgggcacggcagctcacacctgtaatcctagcactttgggaggccgaggcgagtggatcacaaggtcaggagatcgagaccatcctggttaccacagtgaaatcccatctctactaaaaatacaaaaaattagccaggtgtggtggcacgtgcctgtagtcccagctactttggaggctgagtcaggagaattacttgaaccctggaggcgaagcttgcagtgagccgagattgcgccactgcagtctagcctgggtgacagagggagactccgtctcaaaaaaaaaaaaaaaaaaccaacaaaacaaaaagttccttatagttcagtttttaattaggacttttatctacatagttcattttaaaggcataagcgtatagagaagaaaacaaggggtaggtacatccctggtgactcatccctataatcccagtgcttcgggaagcttagacaggaggattgcttgaggccaggcgtttgagaccagcctgaccaacatagtaagaccctgtctctacaaaaaatacaaaacttagctgggcatggtggcgtgtgcctgtagtcccagatacttgggaagctgaggcaggtgggagaattgcttgagcctaggagttcaaggagtttgaggctgcagtgagctatgattgtaccactgcactccatctaaaacagaaagaaaacaaaacaattgtattacttggatatcatcttaatattaacaaaaataaaaatattaaatacacagatacagatatgttaaaaaaaattgtatacatatatgtttaaaaaaaaatccaagccataacataacagtttagaaagatatgaaatgaaaatgtacactacagacatttaaccataagcaataatttctttttcatttttaaaataatttcttgatgtcatctgtgtgatctgaaggcagtaatttcttctgtgtcctcggaaaaaaaattttgtgcatacattatcagtagagatttttacaggaaaagaaccatgctgtggaaactgttttgctttttttcacttaatgtctgtgttaggtcctccagagacatggaaccaataggataggcggatggatggatggatggatggayggatggacggatggacggatggacggacagaaggacggacagaagggtggatggatggaaggacagatggacagacggatggaatttattaggggaattggctcattcaattatggaggttgaaaagtccccacaatagtctatttgcaagctggataccctgggatgccagtagtatggctcagtggaagtctgaaggcctgaggacaaggggtaaggggtgctgagtgttaaggcctgaaatccaaggcttggagagcctggaattctgatgtccaagggtagaagaagaatgtgtcccagctccaggagagagacaaatttgcctttcctatgtttttattctatttagccccccagccagttggatggtgttcacccacattgagtgcaaatcttccccacttagtcactcagactgacactctaatctcctctgcaaacacccggacagacacaccagaaaataatactttactagttctctgggtatttcttactccagtcaaactgatactaaaattaaccattatagtatttccgggagacctttctatagcagcacatatgtcatacgtcatatatgttatgcatacaggaatgtgcataaaatataaatgcatggttttaaaaattaatgtgaacacttgcagttaccacctgagaatccctcttctcttagtgtgtcccttcccaattgcattcttttccacctttctttttttttttttgagatgaagtctcgctttgttgcctaggctggagtgtartggtgcaatctcggctcactgcgacgtccgcctcccaggttcaagcgattctcctgcctcagcctcttgagtagctgggattacaggcgccaccacgcctggctaatttttgtatttttagtagagatgaggtttcaccatgttggccaggctggtctcaaactcctgacctcaggtgatacaccccaaagtgttgggattacaggcgtgagccaccgcacccagctcttttccacctttctaaaggtaacgactatgtattctatcttcccatgtttctccttacagttttaccacatttacatgtatccctgaacagcatacgtatattttgaaaaactaagtattggtgattagacatatctaccaacactttccaataatctctccattccccaggtatttgaaattttacctttatcataaactaaaatcttgtttataaatgggtgtgtctctgtttttcttccgttaatctgtcacatatttttataattgttcagttgattgtcttgggtattttaggtaggcatttatctctgctaataactatcattttttctcttactctctagcacttacacctttttttgcttgttttcattgcgttggctgtagcttccagaataatgttgattgatactagcaatagagcacatcttttacttctgatgttttgctatttgtttcatatttccgtttttatgttaaggaactatcctttaattgcttatttactagtagtggttttaggaattatgtttaatcagatgtcctttatttagcaagatgatggagtagtttttctcctttaatcaactaatattatatatgggattagtattttctaatgttggaacatctttgcatttctgaaataaatcatacttggtcatgatgtgttatgttaatataatattgatttttttctcaatatattatttaggagttttgcatctgtactcctagtgccattggctttataaagttttttttggggggcgctatggccttcatcagatgttagtattagggttatgatataaaagagaaggaaagcttattatttttttctatgtcctaccacaatttaaatagtataggaattatttgttttatagggtttcctaaaaatctcccataaaaccgggctaccaaatgatttttattttattttattttattttttttgagacagagtctcgctctgtcgcccaggctggagtgcggtggcgccatctctgctcactgcaagctccgcctcctgggtttacaccattctyctgcctcagcctcscgagtagctgggactacaggcgcctgccaccacgcctggctagttttttttgtatttttagtagagacggggtttcactgtggtagccaggatggtctcgatctcctgacctcgtgatccgtccgcctcggcctcccaaagtgctgggattacaggcgtgagtcaccgcacccggcctaccaactgagttttaatatgtatttcatattcttatagtgtcttggtatttttgtatatgaaaaaaagtctttttttctgctttagaatagaaaaaagcagctggaataatcttaggaagacgtttgytttttgtttttgttttgttattatttttatttttttatatgtatttttttgagatggagtctcgctctgttgcccaagctggagtgcaatggcatgatatcagctcactgcaacctctgcttcccaggttcaggtgattctgcctgcctcagcctgcggagtagctgggattacaggtgcctgccaccacacctgcgcaatttttgtatttttagtagagagggggttttaccatgttggccaggctggtctcaaactcctgacctcaggtgatccacccagcttggcctcctaaagtgctggaattacaggtgtgagccactgcgcctggccttttttgtttctgtttttttttttcttttctttttttttttttttgagatggagtcttgctctgtcatccaggttggagtgcagtggcacagtgacgtgatctcggcttactgcaatctccattaatagtatgtactttatatgatttgaatcatttttaaacttagtgagacttgttttatggcccagaatattctgtgtgtacttgagaagaacgcacgttttggatagtgatttctgtaaatgtcaatctgatgaagtttgatgatagtgttgttcaaatctactttatatttattggttttctgtctattctacaaatattttgaggaggctgttgaagtctttgaccatagttgtggatttgtcttatttctctctctctcttttttttttttttttttgagacagaatcttactctcttgccccaggctgtagagcagtggcgcgatcttggctcactgcaacctctgcctcccgggttcaagtgattctcatgcctcagtctcctgagtagctgggattacaggcatatgccaccacgcctggcaaatttttgtatttttagtagagattgggtttcactatgttggccaggctggtctcgacctcctgacctcaggtgatccgcctgcttgggcctcccaaagtgctgggattacaggcgtgagccactgcgcctggcccacagttaattttagaacatttttaccctccatggccactgccctcgtcagcctcaccccacactatactgtgccagtctccacggcccagtagcaggggcctagaacattttcattactcccagaaaaaacccattttcattagcagttactctccattttcccccaaacccctagcccttgacaaccactgatctactttctatatggatttgcccattctgggcatgtcttataaatggaattatacaatatatgtggccttttgtctgacttctttcaattatatattttcaaggtacattcatttcgtagtgtgtatcagtacctcatttcttttttttccacagtgggggcactgttttatattcccaccaacagtgtactagggttccggtttttgtaatccttgccaatgcttattttcttatttgaaacaaaaattattttaattatcctagtgggtgtgaagtgataccttattgtggttttgacttgtatttccctgatgactaatgatactgggcatcttttcatgtacttcttggacatttctatatcttcatcttcagagaaattcttttcaaaccctttgcccagttttatttttatttatttatttttagagatgaggatgttgctttgtctcccaggctggaatatcgtggtgcgatcttagcttgctgcagcctggaagtcttgggttcaagcgatccatctgctccagcctcctgagtagctaggaccatgcctggctaatttaaaaaaaatkctttttaattaaaaaataaataaatttttttgggggttaaggacaggatctctctacattgcccaggctggttttgaactggcctcaagcgattctcccacttcagcctcccaaagtgctgggattacaggcatgagccactgtgcytggccttttatttctttctctattttattttttgttttcttgattattttgtttgcgtttcttattaaattttagggtggggtgtagggttggtgtatttggttctcttttgcttctataggatttttcatttaccctctttttcctttcctttactatccattgtccaaaagagtgatttaaaataaatgaatacacgctgagtttaaacattattattgttttttcatatcttcaatcaagctactctgatctttggtgatgcttactggtattttagagatagactagtttttgtctgactgtttatatgacagataataatgccaatatatcacatttttgttcttacagtttttattggttctagatcttatgttttcccttttgtactgaaaaggatcttctaatgttttatgtgcatatttataacaatcaccaattcctcagaggcctctcttagccataggggaggtagaagagagagaaatcactacttttagtggcagccacactgatgatatttcttgttttgcaacaggaaccaaaggaggaaaatgggttgcagaaaacgaagacaaaacagtcgaatagagcaaagtgtttggccaaaagaaaaatygcacgtatgttttcattttgttgataatggtttgggaattgtaatagtcatagaactgatacattttggactagttgattatgttgcattcttaggtctctgatagattcaagaaaagttgtgaatttatcagtttttgttgctattgttgtaaggattggaacaataacttttttcagtttcctgtatcttcagtggaagccagaagtggtcattctgaatctttaaaaaaatttttttaaatttattttttttttagagacaggatctcactctgtcacccaggcttaagtgtagggrtatggtatgatcatagctaactgcagccttgaactcattggctcaagtgattctcctgcctcagcttcccaactatgccccacgacgcctggctaattttaattttttttttaacacagggtcctgctgtgctgtccaggctcatctcaaactcctggcctcaagcaatcctccagcttgggcctcccagtgttgggattacaggtgacagccaccagttagcccccattctgaacttacagagcagcaaaatctgtttttatgattcctttttatttttttttttgagacggagcatcgtgctctgtcacccgggctgagtgtgctggcgtgatcttggctcactgcaacctctgcctcccgggttcataacgattctcccacctcagcctcctgagtatatgggcctacaggcacatgccactacactctgctaatgtttgccaggctagtctccagctcctgacctcaagcgatccacccgcctcagccttccaaagtgctgggattataggcatgagccaccatgcctggctagaacagaagttttaaactttgatgtggtccatttttttctcttttatggttttttttctttctrtgtcctaagaaatctttgactacgctaaggttatgaagatttccacctattttcttctggaaattttatagttttagctttagcatttagatttctgatctattttgagtttttgtatatggtgcaaggtaagaattaaggttcatttttttcccatatggatatccaatcattcttgtaccatttgctggaaagactgtcctttccttgtgttgaaaatcaatgcatgggtctatttctgaattttctgttcttttccatttatttatgtttgtcattatgccataccacactgtcttgattaatgtagctttataatgtcttaaaatcaggtagtataattcttccaactttattttaaaaattgttttgattaatttgggtcctttgcattcctatataaatttaattttattatttgtttattactactgttttttgaggcagggtcctactctgtcgcccaggctggaatatagtggtgtgactgcagcactgtagcctcaacctcctaggctcaagtgatcctccagctttagcctcctgaatagctgggactaacaggcatgcatcaccatacccagctaatttttttttctttctttttgagacagggtctccctctgttgtccaggttggaatgcagtggctcactacaacctctgcctcctgggctcaagtgatcctctcatctcagcctcccaagtagctaggaccacaggtgtataccaccacatccagctagttttttattatttgtagagacaagatctcactatgttgcctaggctggtctcgaactgctgggcttaagtgatcttcccacctctgcctcctgagtagctgagactgtaggtgtgcatcactacacccagctattttttaaaatttatttttttcttttcttttttttttttttgagacagggtctcactttgtcacctatgctggaatgcattggtgtgatcttggctcactgcagcttcgaccacctggacttgagcaattataggcatgagccactgtacctggccctgtttttcattgttactctcctgaggtgcctttttagactatttttccctctaaccactgccatccccatgatatttttaataccacagataagctttgtattccgttttatgtactgattgtatgtctgtatcttatatataaaaagatttttattttattttatttttgcctccaagaaccaatttttgtccacttggggatggtatcactcttgttgagaatgcatgatagaagttgccagacttggccatgcccagtggctcatgcctgtgatcccagcactttgggaggccgaggcgggtggatcacctgaggtcaggagtttgagaccagcctggccaacatggtgaaacctcgtctctactaaaaatacaaaaattagccgggcctggtggcaggcacctataatcccaactacttcggaggctgagggaggagtatcgcttgaacctgggaggcagaggttgcagtgagctgagatcacgccactgcactccagcctgggcaacagagagagacgccatttcaaaaaaaaaaaaaaagaagttgccagacttactggtataaaatcattcatagtattcccttatttattcttttagtgactgtagaatttataatcttgtttcctcttttattgtcggtattgttaattgttgttgtgtttttgttcttgagcagttaagaggtttatgcattttaattttttaattttttaattttttgagatggagtcttgttctgtcgcccaggttagagcgcagttgcgtgatcttggctcgctgcaacctccgcctcccgggtttaagcgattctcctacctcagcctcccgagtagctgggattacaggcgcctgccaccacgcccagctaatttttgtatttttagtagagatgaggtttcaccatgtaggccaggctggtctcaaactcctgacctcaggtgatctgcctggcttggcctcccaaagtgctgggattacaggcatgagtcaccgctcctggccgaggtttatgcattttattgacctttttgtagaattgatttttttttttttttgagacggagtctcactctgttgcctaggctggagtgcagtggcgcatctctgctcactgcaagctctgccttcagggttcacgccattctcctgcctcagcctcgtgagtagctgggactataggcgctcaccaccatgcctggctgattttttgtatttttttagtagagacggggtttcaccgtgttagccaggatggtctcgatctcctgatctcatgatccgcctaccttggcctcccaaagtgctgggattacaggcgtgagccaccgcgcctggcctgtaataattctataaagaggagcttttaatttgcttggttacccagtagtatagcttgtgtagaaaaagtaggataaaagcaattctattattttatcagttttcaaatagtggattcactgacattcttcaacagtgactggttagtctatgtatttttaaaaaatattagtatgaacttacagttgtttttgtttttggtttttttgagatggagtcttgcttttgtcacctagggtggagtgcaatggcatggtttcagctcattgcaacctccgcctcccgggttcaagtgattctcctccctcagcttcccaagtagctgggattacaggcacccaccaccatgcctggctaatttttgtgtttttagtagagacagggtttcaccatgttgtccgtgatggtctcgaattcctgacctcacatgatcctcccaccttggcctcccacagtggtgggattacaggcgtgagccaccacgcctggccttaacttacagatttaaatatatttgatgtgatttaaagcattgcattcattatctttattgatgcttcggttccatttttggccagtgaggactttatttaattggctcctaagttctttcgatatgactctagtagtgtctaatagagtctttgcttaatagtgtctagtagtgtctaatacagtgacaaatattctagctcatcttgttcatttcatgctttggacttgggacccagccatttcttcagtgtaccccggttccttttaaatgaaaaatggtgtctggagaccacattcttgtcactagggatgttcttttctactgggtaaatcagaggattctgaagagtaaaattgttctggctaaatgttgagcataaagcgttgcggtatttagcaaaaagctctagagtgggcattaattcctctgtttattcatttagcagatatttattacgtaccatgtgccctgcacttttttatgtgctggaggtataacagtgaacagtgtaggtaaaaactctgccttcatgggagcttacagcctagttaacccaagattcttgttgtaactgctgctaattatcttggccaacacctttccttctggggttttcctcatttacaagattataaaattgtactaagtggtctggtagtgtcttcagttgaaaagtttaataattctctttcttgcctccatgattattcagtgtttgtggtgttcctccttctcttttccctatcctcttacagagatgacagaagaagaacagtttgctctggctctcaaaatgagtgagcaggaagctagggaggtgaacagccaggaggaggaagaagaggagctcttgaggaaagccattgctgaaagcctgaatgtaaatatgccatgttgcaaaagtttgtggagattgatcagctatatttttgacttctgtggtgttgtagttgcattaggaactagctgtagtcatttatagggttttcacctaacaaaaattcccatagtaattttttaaagtctgtgttgaattgttggttaacccaatttaaagtattttgttaattctatatgaaagagttttcttccaccccatggattttttagttcatggttgaaagaattatcataagttgacagcttctgaaaagacttactgaataccaagaaccagaaggcagcaagataagatgctaacttctctagtattgtgggagagcaaagggaatgagaactagaggtggattatgggaagaaagaatgggcagttttaaaaaaataatgaaataaagttaaattgtcatttgaatatgcacaactgaattttttttttttttttttttttttgagatggagtctcactccattgcccaggctggagtgcagtggcacaatcttggctcactgcaaactccgcctcctgggttcaagcaattctcctgccttagcctcccaagtagctgggattataagcccccaccaccacacccagctaattttttgtattttcagtagagactgggtttcaccatgttggccaggctggtctggaactcctgacctcaggtgatctgcctgcctcakcctcccaaagtgctgggattacaagcattagccacctcgcccagcctgaaatgattttaaatgtgaaggatacttgccagtggcaggtcctgaaccatctttttatgccatttgcctccctgttttaaaaaagggtttagtatagtgrtctagtacaacactttgcacatagacattcagcatatgctgtgaaattaaattgagccatttacattttagaaagagaaagtcttatgaacggtggcctcccattttgtccttcctgtgacccttcatatatagttattttaataataaacctggtctggtatgggatcacttgtttcagagttgccggccttctgatgcttccgctaccagatctcgacctctggccactggaccgtcttcccagtcccatcaagagaaaaccacagactctgggctcactgaaggcatgtctccctgttctgactccttccattcatcaagtataactgtaccacagggatctcatgctgagagtagatacacggaaataccccagatccttttggtgataataaagaagttaaatcaggaagtagttgagatcataagaatatccggcatacttttatctccaaggaaaaaccaacatttggttaaacccaaagaagagcctttcttacccatattatgtaattcttggtaagtgataacttaccaagccctcttaataawaaagtttgtccttagccctactttttctcaaatacctacaggcatatggcagctggtacctccatcactgtttaaaggctcacatatcagtcagggaaacgaggctgaggaaagagaggagccttgggaccacactgaaaaaactgaagaggagccggtctctggcagctcaggaagctgggaccagtcaagccagccagtgtttgagaatgtgaacgttaaatcttttgacagatgtactggccactcggctgagcacacacagtgtgggaagccacaggaaagtactgggaggggttctgcttttctcaaagctgtccagggtagcggggacacatctaggcactgtctacctaccctagcagatgccaaaggtctccaggacactgggggcactgtgaactatttctggggtattccattctgccctgatggagtagaccctaaccagtataccaaggtcattctctgccagttggaggtttatcaaaagagcctgaaaatggctcagaggcagctccttaataaaaaaggttttggggaaccagtgttacctagacctccttctctgatccagaatgaatgtggccaaggagagcaggctagtgagaaaaatgaatgcatctcagaagatatgggagatgaagacaaagaggagaggcaggartctagggcatctgactggcactcaaaaaccaaggatttccaggaaagctcaattaaaagcttgaaagagaaacttttgttggaggaagaaccaacaaccagtcatggtcaggtaagggtcagtgatgctgtaattaaggatgatttattcacagattaaaacaaggattattttagctgttatttttgtggtcttcccctccttgattattaaagtaatacatgttcactatagaaaattaggaaagtacaggagagtataaagaagaaaaaaactaccatttttttttttttgagttggagtctcgctctgtctcccaggctggagtgcaatggcgcaatcttcggctcactgcaatctccacctcccgggttcaagcagttctcctgcctcagccttccaagtagctgggattacaggtgcttgccactatgccctgctaatttttgtacttttagtagagacggggttttaccmtgttggctaggctggtcttgaactcctgaccttgtgatctgcatgccttggcctcccaaagtgttgggattacaggcgtgagccaccacacctggccagtcatcatttctatgcatacaaaaatacatgaaaaaattttttgaacaaaatgaagactcttctgtgttaagttttgttcctctccctactttatagtttatcttagatcatttcttaatagatgacttattctaccatagataaaccataatttattttttgtataaattttttttttttttttttaaagacaaggtctcgctctgtcacccaggctagagtgcaccgatgccatcttgggtccctgcagcctccacctctgggatcaagcgatcccccaacctcagcccgtcgcaatagctgggaccataggtgcacgctactacgctgagctaatttttatattttttgtagagattgagtttcactttgttgcccaggctggtctcgaactcctgtactcaagccatccacctaccttgttctcctgaagtgttggcagtgtaggcatgagccaacacgcctggtctaaaaattattattatttctgaaaggttaaatttttgaataggtaacaatattcacatggctcgaaattcaaaaatatataagtaaaaagtcttaacttttctccctatcacctagccagccagttcccctctctggactcaaatttgtgttactagttctagtgtatccttccaagatactttatctggtacaagcagaatacattttcttttccctgccttcttttacacaaatgatttacacattattttctacttttttcatttaatatcctaatgagatcattacataacagtatataaagaatttcttcatctttttttttttttggatgtgaaaaataccatgtgtggattagtcagagtttactgttacagatagtaaaatgtccagaagacatttcatccacatggaagatatttgtattatatgataattttctgtagctgtaattggtggaccaaaaaatgtatttataatttcattagctgttgccaaattgccctccatagagatcatatacatttacattcccactggcagtgtatgaatactagtttctccatacctacagtaatgcagtattgtcagacttcttgatctttgccagtctgagagatgaaaaatggcgtctcagtgtagtcttaatttgcgtatctcttactatttgtgaggctgaacttttttctcacatgtctaagacccatttgtatttccttttctgtctgttagatcttatgatcattttttcttttgataatctattggtttgtggatacactttatatagtagagaaagtagtcctttgtgatatgaagtatggatagtttccgagttattttttcccattacataatggtgtatatttattattttgcttgtagtggttttgaataatttattgaaaccaatcttcatcttggtacatttagtttgctttttctgaagtagctagattatattgtgtatgaaagcttatatcttatttttccctttgaatattataaagcaataatataaactctttatatataaattgtaattttaaagagtattctgttttatgactatactgttttttcttgctatttctgttaccagactttgacttttggttttgttttactattatgttattctgtctttcttgtgttatgataaaggttcaagaaatggtaactttgaggagcttcatagaatagagaacatggatttggagttgagttctgatttttgtgtttagtaatttgtgtgtttttgagcaagtcacttaacctctttgaatcccagtttcacgtctatacagtgggaataacaattcctatctttcgacagttattttaatgattaaagtgaatttgtgtaaaatgtctactgcaatgcatagcataggcactgaacaactggtaattctctctaagggatcaaaggtcattcactggggagatgcctctaggaatcattatttcctagtaaccatcttcattcacattctggaaagattgttgtctaggaagagaaggcatttttatttaaagaaattttttttctgaaggtatatcagcaaagaaggcatttttaagaaatagttattttagtgactggtttcttttccaaaggaaagttacatgatgcttatgataaatgtttagtttgttctttccaattcggagatgctgcttcttaaaataatacattaactccaaagagtgacacttaatgatttattgtaattcaagttgttagcttgcaagatcccaggggccagagctctacatcatagacttgtgtcaagttctgtgttgtgtcaagtttgaaagtactgcctttgcagtagcctggaagaagtcaaaatctagtggatggtcttaattagattgaagttctttgactcttaacttcatgaccagaccaccaaatactacaggtagtattatcagttaatactatttgctgcagtaaactgaattaagctagcttaattaaaaagaggacttggctaggcacaatggctaatgcctaatctcagcattttgggaagctgaagcaggagaattcatttgagcctgggagtttgagaccaacccaggcaacttagtgagaccttgtctctactaaaataaataaataaaaataaaaaaattaaaagaggactttataaggaagcgaggtatctcagaagttttttttttttttgagatggagtctctctgtgttgcgcaggctggagtgcagtggcatagtcttggctcactgyaagctccacctcccgggttcacgcattctcctgcctcagcctcctgagtagctgggactacaggtgcccgccaccacacccgcctaattttttatgtatttttaatagagaagggttttcaccgtgttagccaggatggtctcgatctcctgacctcgtgatccacccaccttggcctccgaaagtgctgggattacaggcgtgagccaccgcgcctggcttcagaagttttaaaatagaactataaccaggcccaaagaaggtactgggcatctgatttttctgtatctcatggttatattgtgtctgcttcatttttctccctgcagacttggcactcttttgcttttgtttttcaggtgtaggttgaagacactgattctatagctctcaaacttattatgggttacaggagacttaatctctcccaattcaaattttaaattttcaggaaaggatttatggcccatttggtgtcagtagcccagtcagctgtggcttgatggaggttacttgtcaaattggctgtaagcccactgctaatgggaatgggaggggtgagggacagtcctcagtgaaagcagacaaggcagacaacctagtaagcatatagacattaactttaataaaaaaatcacttggagatgttaaaaaatgctgaaaagtttaaagaatattacctattttttgtatggttcagatcatattatttttgtatctttaatatcatgtagacattttctcatgttaaattatatatttcacttttaatggctatattatattccagtttatgaatttaccataatattttaaacatttttctattgctggatatttcagttgtgatatctttctatatgaaacttttctttattcctcatcagtgtacttagtcatgagccataaaaatgatgggttaaagagttatgaacataaagacttgatatttattgccaaattgcttgtcagaaaggctgttacaatttgtattctctccatttggcaatgtatgagaatatctagttcactgaagccttgccaacaaataattgtacctttaaaaaacaaacttcaactaattttataggcaaataatgtaggtcctgtgattgtagttttacctctcaatcttttgctttcaggaaatgtgggtagaaagaattcgtttgttaaacattttctattgaacacagctttggtggagctgcctgtatttgagacttcttggttgatagagatagcaagagagtctcaaaaatagggactcagagaaacattcactttggggcacataacttagtctatattaaggttattaaagctttagaatcagatgataactggtttttggcatcactgagacaagataaagttgctaatgaaggcctgtagatcaccttgagagcattatgacaaggagttggaaggggtagtatgttaatgtggttactacttttcagaatctgatacttaatttttcagtccggatattggaatttttttttttttatcagaaatgaccagattgtgtggggttgtgagaactgactttgatttgccaaacttcacgctgatgtatgtatacaaaatgacagtttatttatttattatggaatagagacattttcagtgaccagaatactcagacctgtatctactgtcttctagaatgacagtatctggagggttgaaataatcagaaaatggaatttttaagggatggttcaactagtctgtggaaaaacctaataaactaccagtgtcacacaatagaggacatttctgtgatgaccagatgatttatctattcattttcacttttttttttttttttttaaagatggagtttcactctgtcacccaggctggagtgcagtgacacgatctcagctcactgcaacctccacctcccgggttcaagtgattctcctgcttcagcctcctgagtagctggggtcacaggcatgcaccaccatgcctggctaatttttgtattttttgtagagatggggtttcacgatgttggccagtctggtcttgaactgctggcctcaaggcatccgccccccttggcctcccaaagttctggggttacagatgtgagccactctgcccagccccattttcacttttaagtattaaaaataccctttgataataattctttgaattttttttaagattcaatgcaaaccatcccttccttattaacatattatttctccaggaagaagatgtcttgattaggccatagcttccttaaatttttatttctgccatgctttcatgttcaccttgattacatttgggtagtctaaattttatttgcttattttgctatcctgtgttcatattctggaagaacctcactttatgttcagattactgccattgaggtataaatttctaaattaaaataatgtattgaaatgaagacgttcttgggattctacattgaaatgattaggaagaggatcatctgagtaagcaatataatagtttttagcgtgtggattttagagtcaggcaagtctcagcgctacgattttgaccaactatatgatttagggcaaattatttaacctctcgaagtttcacttatttttaaaataatttaatggtttttgcttcttaagttgcttgtgagaattaaaggagataaggaatgtaaagtgattagcacaggcctggcactgaatagaagcacaataattttgtttgtttgagacagagttttnnnnnnnnnnnnnnnnnnnnttaagggatggttcaactagtctgtggaaaaacctaataaactaccagtgtcacacaatagaggacatttctgtgatgaccagatgatttatctattcattttcacttttttttttttttttttaaagatggagtttcactctgtcacccaggctggagtgcagtgacacgatctcagctcactgcaacctccacctcccgggttcaagtgattctcctgcttcagcctcctgagtagctggggtcacaggcatgcaccaccatgcctggctaatttttgtattttttgtagagatggggtttcacgatgttggccagtctggtcttgaactgctggcctcaaggcatccgccccccttggcctcccaaagttctggggttacagatgtgagccactctgcccagccccattttcacttttaagtattaaaaataccctttgataataattctttgaatttttttttttttttttttttttttttttttaatttatttttttattgataattcttgggtgtttctcacagagggggatttggcagggtcatgggacaatagtggagggaaggtcagcagataaacaagtgaacaaaggtctctggttttcctaggcagaggaccctgcggccttccgcagtgtttgtgtccctgattacttgagattagggattggtgatgactcttaacgagcatgctgccttcaagcatctgtttaacaaagcacatcttgcaccgcccttaatccatttaaccctgagtggacacagcacatgtttcagagagcacagggttgggggtaaggtcacagatcaacaggatcccaaggcagaggaatttttcttagtgcagaacaaaatgaaaagtctcccatgtctacttctttctacacagacacggcaaccatccgatttctcaatcttttccccacctttcccgcctttctattccacaaagccgccattgtcatcctggcccgttctcaatgagctgttgggcacacctcccagacggggtggtggccgggcagaggggctcctcacttcccagtaggggcggccgggcagaggcgcccctcacctcctgggcggggcggctggccgggcggggggctgacccccccacctccctcccggacggggcggctggccggtcggggggctgaccccccacctccctcccggacggggcggctggccaggcagaggggctcctcacttcccagtaggggcggccgggcagaggcgcccctcacctcccggacggggcggctggccgggcagcggggctgaccccccccacctccctcccggacggggcggctggccgggcggggggctgacccccccacctccctcgcggacggggcggctggccgggcagaggggctcctcacttcccagtaggggcggccgggcagaaggcgcccctcacctcccggacggggcggctggccgggcaggggggctgaccccccccacctccctcccggacggggcggctggccgggcgggggggctgaccccccccacctccctcgcggacggggcagctggccgggcggggggccgatccccccacctccctcccagtaggggcggctggccgggcagaggggctcctcacttcccagtaggggcggccgggcagaggcgcccctcacctcccagacggggcggctggccgggcggagggctgacccccccacctccctcccggacggggcggctggccgggcagaggggctcctcacttcccagtaggggcggccgggcagaggcgcccctcacctcccggaccgggcggctggccgggcggggggctgacccccccacctccctcccggatggcacggctggccgggcggggggctgaccccccacctccctcccggatggggcggctggccgggcggggggctgaccccccctcacctccctcccggacggggtggctgccgggcggagatgctcctcacttcccagatggggtggctgctgggcggagaggctcctcacttctcagacggggcagctgccgggcggaggggctcctcacttctcagacggggtggttgccaggcagagggtctcctcacttctcagacggggcggccgggcagagacgctcctcacctcccagacggggtctcggccgggcagaggcgctcctcacatcccagatggggcggtggggcagaggcgctccccacatctcagacgatgggcggccgggcagagacgctcctcacttcctagatgtgatggcggctgggaagaggcgctcctcacttcctagatgggatggcggccgggcggagacgctcctcacttcccagactgggcagccgagcagaggggctcctcacatcccagacgatgggcggccaggcagagacactcctcacttcccagacggggtggcggccgggcagaggctgcaatctcggcactttgggaggccaaggcaggcggctgggaggtggaggttgtagtgagccgagatcacgccactgcactccagcctgggcaccattgagcactgagtgaacgagactccgtctgcaatcccggcacctcgggaggccgaggttggcggatcactcgcggttaggggctggagaccggcccggccaacacagcgaaaccccgtctccaccaaaaccagtcaggcgtggcggcgcgtgcctgcaatcgcaggcactcggcaggctgaggcaggagaatcaggcagggaggttgcagtgagccgagatggcagcagtacagtccagcttcggctccgcatgagagggagaccgtggggagacggagacggagacggagacggagacggagacggagggggagggggagggggagagggagagagggctgaatttttttttttttttaagattcaatgcaaaccatcccttccttattaacatattatttctccaggaagaagatgtcttgattaggccatagcttccttaaatttttatttctgccatgctttcatgttcaccttgattacatttgggtagtctaaattttatttgcttattttgctatcctgtgttcatattctggaagaacctcactttatgttcagattactgccattgaggtataaatttctaaattaaaataatgtattgaaatgaagacgttcttgggattctacattgaaatgattaggaagaggatcatctgagtaagcaatataatagtttttagcgtgtggattttagagtcaggcaagtctcagcgctacgattttgaccaactatatgatttagggcaaattatttaacctctcgaagtttcacttatttttaaaataatttaatggtttttgcttcttaagttgcttgtgagaattaaaggagataaggaatgtaaagtgattagcacaggcctggcactgaatagaagcacaataattttgtttgtttgagacagagttttcactcttgtcatccaggctggagtgcaatagcacgatcttggctcactgcaacctctaccttttgggttcaagcgattctcctgtctcagcctcccgagtagctggcattagaggcgtgagccaccatgcccggctaattttgtatttttagtagagacgggatttctccatgttggtcaggctggtcttgaactcccgacctcaggtgatccgcccaccttggcctcccaaagtgctgggattacaggcgtgagccaccgcgcctggccaaagcacaataattttttttttttttttttttttgagacggagtctcgctctgtcgcccaggctggagtgcagtggcgggatctcggctcactgcaagctccgcctcccgggttcacgccattctcctgcctcagcctcccaagtagctgggactacaggcgcctgccactacgcccggctaattttttgtatttttagtagagacggggtttcaccgttttagctgggatggtctcgatctcctgacctcgtgatctgcctgcctcggcctcccaaagtgctgggattacaggcgtgagccaccgcgcccggccaataatttttttaaacaattacactgagaaggtttgagatatgctttagcytaaggcagagatggaggtgccttataactaacttactagtgctttgattgcatctaaagaccaaggctagtcattataaaattctgttaaatggacactaggtgtcagcattctctttctctttctttctctttctgagagttcaataaaaaccttgtcacccctgagttcaaaggaagagacaggttaagtatttattgctgttgtattttagtcctttggtagtttggttaagtcttgtttttcataatgactatattccctattattgtacaactttccttttgactgaaaactcaactattcctgatttttaaatgtatttcatcatttacctgaatggtagcgagattcataaagagatgcctaacttgtttaggttattcatatcttattaggaaaccttgaaaacttcagctggtagctttatgtctagtggaagaagcctcacagcccaggcacttcctcagaagtctgcctaaggcagcagtagctgctttttctgtgatcttctgtgcatgtatgtttaatgagttggtatttgcgtcaactctaccattaatcaatgaaaataatttttgaatcaatgaaaataatctttccttatgtagtccctattcattacatttctgaaaagataatcctgtagccagatataaaaaccatagtggcagatttgtagcaaaaagaatctttgtaaccttccctttagatgtcctgtgttatggcttggtttttctcaaagatcatagattgcagtgtttatctcaactcagtatttcctttgaaaattgaacttttctctatattttcctttcccccatgcaaactttttgattgtttttctgaaatcataattcatttgacttaccagttaatattgatacaggtcttgcatgttatgaagtgcattgtgtacattatcttgtttaattttcacaacactctgtgaggcaattgttaatacccattttaagatgaggaaagagattcagatgtcatttacccaatcacaaatttagtaagtgatttagttctgatttaaataccagtcttctgactttacaggatgtgcttgttttattgacacttactggcttatggaaaatattttcttcttattgttaattgttgagggagaacattgaacaattaaatttttttaaaaaaggaagagaagccagttcacctgtgcctgtatatttaagatactacgtatttctttgcagtcttcccaagggattgttgaagaaacttctgaagagggaaactctgtacctgcttcacaaaggtgagagattatatgttgctatgcattctcctctgatggttgccagcataagggagatgaaccacatgagtgagactgtacgtggacagcttgccagagaacttttagctcttttataagtgaagactaggagaaattttattagtatctctaagttctcagatgtgcatctcatagaagcccagaatattaagagctggaagagatcctagaggtcatcttgtccaggccagctatcttggcataaatctcatttacattatttctgaaaagcggtcacatcctgcaattctcttaactaattacactagttttctatgccaatttgaaggctctagactgatttctttatagtccttctattcttagcccctttctctcttttccccaactctgcttatgcttattttatctgtatatctaaaccttatacatcttttaaatttactcttgagacttaacatcctcttcaaagtcttcatattattcaggccacacaggacctgtgtcactctcactgtctgtcctgtgccacttttaatccgtttgtgcctcctatctcctgtaaaggatggtatttgcattacctcctccattgttcttgctgattgattgatgggcttaccttctaagtcttcttactttaataatagatagcagttgattaattataaactgcactattaactggatcatgcttccagttactttccacttgccctttttatctagtagttgagttttgagactttctcaagagcttagttttgaactgcatgactgttctcccatatgagagttgaagcccacttgccatttgctgtagtcaaggtggtggtctttcttaggcttctggttgatagtacttggtattccttcctgggctaaagaatatggctttggtttgattttcctgctgttaagacagttttggaagtggttttaacagagtatgcctttactccctataggcctctctgctttattgtggtgagccttgtgcagagcagatgtaggttttaataaatgattatacactttgtcaccaggagagagttggaatcgcaggcaatgtggtttgacttcaaattgattagcccattttataaatgtcagaaaattgttttgtgatggaccctttgaatagagcactaatgttacatgcagagtaaactgtctggctggggtttataacaaatgctatgagatgttttatttagagataaatcacttgtggttttctatcaggatttagttatttatcatgagttcagttgtagctattctgtcttctctgtggttcttggttgatgtgaggatttttgttttcaagcatcctcttgcatacttgatcaaactaatcgtaaagccctgtgaagcatgagggggctagctcagatgctcagatcagccatgtattcctatgtcaggaagagattgcactccatgagcagtcagggaaaaccagaaggttggatgaaggaagccattcrtaattaagtttttgttagaaaagagattcaatttatgtgggcagatttttgctgtagggcagtttggaattgttttttatttttgttgcatggaaagcaacatcttgagataaagaggagatttaactgcaaaaggaggagaaagtgtgttgtcagaagaatctctgtgtcttctcttgtcagtttacaaatctctagccttcagaaggctgagatggaggctataaaacacctttgacatccttatattggagtggagtttttgccttctctgatattcacagacagttctcacccttcaaccttcctttgtgaaaactccaaaagggaatttgttttcattcagtgatttcactggaactgaagttgtaagcatatttattttccatatttctggtctggagttttcagtactgattccttgctttcctattgtgcttttgtggtattaggcagcaagtatctgtgattacctgtggctttgtgagtgactcaccattgcttttggctctatgttctgatttattttactgggaattcatttgggatttggttctctttcagtgttgctgctttgaccagtaagagaagcttagtccttatgcyagagagttctgcagaagaaatcactgtttgtcctggtaagtaccccactgtgattttactgaatttctgatacctatttaccttttcatgcctattaattttcctctgactcttcaaacctactctctggaggtttgtatgtaattgatacgtgtatgtacatgtctcaacactcgtatgcgtatacacatayaggtgtttttaatggccattggcttttattctcaatcttttctctccttaggggtaatttagttttgaaattaacatgactttttttgtcttcttgattgtttacaggcctcatcagagatggcagcaaagcatcaggaatagcatttgcttaactgtacattcagagccttttgttatttaatttgtttaaattattttaaattaaattgttttaaattattttgtcagccagcctggagtgcggtggtgcaatcatagctcactgcagccttgaacttcggggcttaagttctccctccttggcctcccaaagtgctaggattacagatgtgagccactgtgcctggacttcacagccttttagtagttagtttttatattgccatttgttggggtcttactgcataggaggttcagaaattgagttttgtgcatgttctgtcattatttttaatcttagacctaagatgcttaacctcgttaagtgctttagtttgctttttgttaattgtaaaaattaaaagataggtactttgttttaggtagaagagatgctcattcaaagttgcacatggatagatttagatatacaaaataatgtaaaatgaactaagatacttamcatctaagaaactcctgaatcattgtataatatgaagcattattttgtgatatgaaccactactttctaaggaatttgttttagactatattttcctttctggcttttctgaaaagatcattagcctcattcctgtgagattgagggacttcctactgatgtttaactttgaacagcaagtatacagatgttgccctaagtcacatctggttttccctcaggtctcgtatagcctataaggattagagataatcatagttttcttattttggtttccttcaatgtttttccacagagactcaaacttagtttgcatgtaatctaggaaagacctataaatatttttaaacatctggcagtctatcataaaggtctttatttattttaaaaatcggactatgttggcttttttcttttttttttttttttgagacagagttttgcccaggctggagtgcagtggcgcagtcatggctcgctgactgtaaccttgaactccttggctcaaatgatcctcactcctcagcctcccgagtagctaggactacaggcatgtgccaccacacctaactaattttaaaaattattattattatttttttttagtagagacgaggtcttggtgtgtttcccaggctgaccttaaactcctgagctcaagtaatcctcccgctttggcttcctaaagtgctggggattaggcatgaaccatcgtgctcagcctatgttggtttttattgaaagtggctccttaattcatttgaaatgtgtttggattactgcctaacaatacccactaagagactacactaccgagtgctcagattttggcaggagcactcaagaatactgtgctacctttgtgaaaagaaagctttccccctctgtctgggactactgacttcctagaaggaaatcactcagtctgtttaggatgatggcgtgtgacatcaccatgggatcttgcaggaggaacctgcaaatatattgatcttgaaaggcctagttaatgagagggaaaagcaggcccttcatactgaggttagatagcttttatgatcatgacttgctgtcattagcctgctaattaagtccaactgtttgctgacataaaccacttctaaatgagattgcaaaaggtattcattacattaatgttccttttgctaagaaagtataactgcttcaccatgaagccaaactcctgggtttctttttaaatatataatttagaagttatatatataaattatctgaaaaaatttgttccaaatgggtgaaacacatatttagtgtagtagactgttacctgtttacttttgtttcatatttctgacagttcaggagtctaatatttaagattacaatatctttttagtgttacttagttgaagaagcaggattatagccttatgcctacattttgcatgcttctagcattgcttttttctgagaagctaatgccctcttagttggacatttcagccattcacagaaagcataattgaagactttttattattgcagtaatctaagcagtgaatggttcttacttttaaatatgctgaatatctttttgaaaatacctttagggaaagttgacaggattttgaagtttatgtcctgtaagcctttttccaataaggtgtgtgtgtgtgtgtgtgtgtgtgtgtgtgtgtgtgtgtgtgtatgtgtccagttttcaaaaaaatttgtgatgtattaaaatataattaattctagaaatgtatttaatcctttcttaatgattcagaagatacattagaaacttgcagatgccctatttgcctgacattggccatttattgttttgtgaagcaaagtgctaattagaggtacagcaggtatagtgtcagataacagagaacttactggatttgcattctgaaataaatgtctggttttagtttgggttcctgtaacaaaatgctctagactgagtgggttataagcaacataaatttatttctcacagttttgggggctggagagtccaagatcaaggagttggcagattcagtgtctggtgagagccagacaacttcccgctgtgtcctcacatggtggaaagagggtgagagagctctctggggtcccttataaaagggcactaatcccattcttttgagggaaggccctatgctcatgacctaattaccttccaaaggtcacatttcctaatattatcacattaggggttgggatttcaacatacgaagttcggggggtacacaaacattcagtctgtaatgtttcttttccagatacattggtggttttgaaagataattactattttttttattgttgttatattaagtgatatgtgtctacagcagaagttggcaaacttttttktgtgtgtgtgagacagtgtctcactctgtaactcaggctggagtgcagtggtgtgatcatagctcattacaaccttgaactcctgacctcaagtgatcctcccgcctcgtcttcccaaagcattgggattgcaggcatgagtgactgtgcccagccaaactttttaaaaataaaagactagataggaaatattttaggccctgtgggccgtatagtctgttgagactatttggttcggccattttagtgcaaaaacagccatagacagtacatagatgaatgagcatggctgtgttccaataaaaccttacttagaaaaataggcagctgacaggatttggcccatgagctgtatctagttttctggsccctgaactagactacaagggaccccatcttagattttcatattactgatagcgagtataatgcctgggacttgatgttcaattatttgttgaattaatagatgctgcttaaagaatatattaaagaaaggcatatctttgtctagaatgtatattctatttctggtcccaatttctgtttttgctaatcatctctttaacctcagcactaacattggcaggttcttgttttctgtcaaatcagtatactttaaaactagaattacagtggaaataagccagttgatcagttggtcaatgaataaacaaattgtgatatatctatacaatggaatgctactcagcagcaaaaagtatgaactattgatattatgtgacgacatgggtccatctcagacacattatactaagtaaaagaagctggacacaaaagacatgtgattctatttatatgagagacaaaattataggaacataaagtaaactggtcattataaagagttcattgcagtgaccaaagaggtaggagattgactgcagaggggtacagagaactttttggggtgttggaaatgttttatatcttgattatcgtagaggttacatggtataaatggtagtatataaatggtatacatttgtcaaaacacattaaactgtatactgaaaatttatgaattctgttatttgtaaattatgcctcagtaaagctttaagaagaaacaaactagatctattaatatattgccaccacagtattgtcatatcctaaactttaggtgaaaataggcatgtttgtttttttaattatgaaaacacaaaatgaaaattaatgggattttaacttttttaaattacagagacmcagctaagttcctctgaaacttttgaccttgaaagagaagtctctccaggtagcagagatatcttggatggagtcagaataataatggcagataaggaggtgaatattttcctctatattttttctcagtggtttctttcygttggcagtcctctctctgatgcaacgttgacattggctgaaaagatttaggtggcagggggttttagttttgggggcccttatgttagggagagatttttatagttaagattagttcagcattgtttctaaaaataacagtagttaccatttcttgagtacttttgtatgcattattatttctattagagatggggaaacagaggcttaggatgtttaatttgctctaaatcatactactaataatggtagaaatataatttgaacacgggtttgaatccaaagttacagggcattttttattatgtaccaataagtaacagagacaaacagtcttggaaaaaattactatatttatattatgatgtatacataacttccagccctaatttgatcagaaatgcaaagtcaagatagctgtctgataaaataaatctatttgcatcattacctttcctcactttacatatctggcagtaaccataaagctgattgatacaggttcatacttctgattaagattctcggtgtgtatatttttccttttcttttcttttttttgggatggagtttcactctgttgcccaggctgcagtggcagtggcacgatctcggctcactgcaacctctgccttcctggtccaagtgtttctcctgcctcagccacccgagtagctgggattacaggtgcacgacaccatgctcagctaatttttatatttttagtagagacggggtttcaccacgttggccaggctggtattgaactcctgacctcaagtgatctgcccaccttagcctcccaaagtgctgggattacaggcgtgagccaccgcgcccggtcctcagtatgtatttttaatgttgagtctaacaaaacagtttacctggaattcctttaaaaatttttaaatcttaaaaatctgttgctgtcacaagcaacctgagagccaaattcctcagtagaaataaagattttggttacattggtgtatactttcttatcctgcgcactgtaagaaaggttcctttttggccgggcgcagtggctcatgcctgtaatccgagcactttgggagggtgaggcaggtggatcacgaggtcaagagattgagaccatcctggccaacatggtgaaaccatgtctctactaaaaatacaaaaattagctgggcgtggtggtgcgcatctgtagtctcagctatttgggaggctgaggcaggagaatggcttgaacctgggagtcggaggttgcagtgagctgagatcgcgccactgcactccagcctggcaacagagcaagactccgtctcaaaaaaaaaaaaaaaaaagaaaggttcctttttatattctggaattttgtattttttctcctcgagacaaagtcttgctcttgtctgccaggctggagtgcagtggtgcgatctcggctcactgcaatctccacctcccggagttttagtgattctcatgcctcagcctcccaagtaactaggattacaggtgcccgccaccatgcccagctaatttttgtattttagtagagatgggattttaccctgatggccaggctggtctcaaactcctgacctcaggtgatccactaggcctcccaaagtgctgggattacaggcgtgagccactgtgcccggcctgggatttttaaaaaagtttttacaatagaagttagatcctctccctggtctctgcgctgcaggtaactgggtaaatattctgccttcatgaatcatgcacactgcctggttctctggaacctgatctgtcacaattgaccaagattccctaatgccagtggtggtaggaaagatgatgacactccctgctgcagagtgactgacgacagatcctgctccataatgtcaaaatggcctctggattgttttctcaggaagaaacagaatcttctaaatgggaatgarggaatagaatattattaccatagtcatcctaacatacagaagaagcccttagttaaggctgatttcatacccatccatgactgcagacgagactgttctttgggtcaaagagcatgaaccctgtttagaatttatggtgtacacgtctgtgctactatatatcaaatagatggaatcataatagcctttctcacattgaatgtcctctttttggtgttgctgtttgctgatatctgtggatgtctctaaacagtcttagaagtttgcattaaaagggtgcagcacaccaacatggcacatgtatacatatgtaacaaacctgcacattgtgcacatgtaccctaaaacttaaagtataataataataaaatttaaaaaaataaataaataaatttttttaaaaaggggaaaactggagttttaactactagaccaagattacacattaaaagaatgactacataaataaatatagtaggaaaatattttaaaaaaaagtttccattaaaagaagttagatatactgtagattttaaatcatgtactagttacaagtcacttattagacagaatggaacattttatgtgcacaaagatagtataaagggtgtggactcttgccattgggatctgtgtaggtcatttgtcctaaaatttcttgtttactggaaggtgatatggtgtagtacaaggagctcgagcattgcaattagaagacatggctttaaatcccagctccaccatgttttgaatgttgtgcaaattaatcactttactcattcactaggcagctatttatagtttgtatactttgtgccagtcattgttttagactcttgggatacaaagataaataagaaaaacagtccctgcactcagagggttctggtaagggaggagacagacatataaacagataattataatgtggtctgacaaaggtaatgatggattcctagggcattaaggaagcacagaagagaaatgcttttctgaatttcagtttttcatatgtaaaatggaggcagaaatacctrttttactctgttggtttgcaggtgaaattagataaagaatataaaacgtggtagagatttgtcacaagtagaagtatcatgtggaaagtcatattattttactgctttgtaatatattactgtttattagtttactaatgacagagaattgctcaatagtatttgaggtatttggaagtacccatggcataactgtatgtagtccctcttgatttctgacaatagtcaactttctttggaaatagtgtttctgaatatcttgcctgagagtttcccttagttggagtcttagataaatatcctattctcagaggagctaatagaagttattcagagtcctccagagctagtttagtcagttaagtttttcagtaaactatgttaagagtcgtgtggtgagaaggggaagatccagaacaaagaggtttctaagctacacataattgggtgggggagggatggagagtttgatttgcaggacatgcttttgttttcactgggttcatttctcttgaagtgaggtgtatttttttttttttgaagtctgaagttaaggaccaacaacctttaagatgtcgagattcagtatctaagtacctcttttgaaaaatagttgtataatttttttttttttcttttgagatggagtctcaccctgttgcctaggctggagtgcagtggcgcaatctcggctctgcaagctccacctcccgggttcacatcattctcctgcctcagcctcccgagtagctgggattacaggcgcccaccaccacgcctggctaattttttgtgtttttagtagagatggggtttcaccgtgttagccaggatggtctccatctcctgacctcatgatccacccgccttggcctcccaaagtgctgggattacaggcgtgagccaccgtgcctggccgaaaaatagttgtataatattttaaaagaagtagaaggcgagcggggagggatagcattaggagatacacctaatgtaaatgatgagttaatgggtgcagcacaccaacatggcacatgtatacatatgtaacaaaccagcacattgtgcacatgtaccctagaacttaaaaaatatatatatataaaagaagtagaagcaactctgcaaagaaatccctgactgcatggtcctaataaaagctgctttgcttgcctttttcccccttgaggttcttccctagtagttaatacttaaatagactttttaaatgatgctgggaaaaaataccttattttaacataaaaatgttcagaaaccttcagggttgcctatgaacagtggttggaagtgggcttatattcataataagacaagtgactactccctcttgaatacattaatagttaaaggtacattctctgcattgtatagagctgtggtgaatacaaaggagtatagtgctcaatgtgggcaccagtgacacatttgcgtcatgtaacatttctgtgcttagtgaactttagaaggccaagtaactgcccattcaccaccaactttaagtaattaaagactacttgcaaattttagggtatattgatcccctttacccccctgccatccttctgctcaaatggctttgctatttgtcttttcttttttgaggccgggtctccctctgttgcctaggctggagtgcagtggtaggatctcggctcactggaacctccacctcttgggttcaagcgattatcctgcctcaaccacctaagtagctgggactacagacatgcgccaccacccctggctaatttttgtattttcagtagagacagggttttgccacattagccaggctggtctcaaactcttgacctcaagtgatccattcggcttggcctcccaaagtgctgggattataagcgtgagccatcgcacctggtgatttttcttttgttttcttttctttctttcctttttttttggaggcagagttttgctctgtcacccaggctggagtgcagtggcgggatctcggctcactgcagcctccgcctcccaggtttaagtgattctcctgcctcagcctcctgaatagctgggattataggtgcgtgccaccacgcccagctaatttttgtattttcagtagagatggggtttcgctatgttggtcagggtggttttgaactcctggcctcctgtgatctgcctgcctttattgtgggatctggccagcagcccgcaatgcatcggggctctctctttgttcctaggcagatcggcaggttgagaaataatagacacacacaagatagtgaaagctgggtccggggcgggtcactgccttctggtcctggggtgccaacaatgcactgaatataccagcatttattattaagtttagtgagggcaggggtaggttagtgagggatttagggccatttgattatgaggtgagatggtcacatggggatgaagtaattctttaacataacatttgtatgtagaagtacagtacatttctatgtagaagtatagtatacagagataagaatttacaatatagtatgttcctcagtaatttctaacagagccttaaaacagaaacacaatctttccataacctatgattagcaagatattaatcagcagtaacaattgcaacaaaagctggttacaaacaatccatggaaacaggacgtgaagctagacaactggttagaccagaaattctcagaagggagtatggcttaaccctaaagaggcctagcggagctgtggcaagatgagggcgtttatagccctatcttatccatatggacaggcgcccacccatgcgtctgtttataggctccccacaagggtcgcattccattcccagagctatgaacatctttttctrggataggaatcttggtgatgtgaaacctccctgactgcacgtccattcataggctctctacagggggaagcacatcacgcgctgttgactcgttctagcagtccaacctggcattgtctttacacgatcctgcgtgcaattttgtatttacaataatcaggagcatttcatctttaattccatagcaatagtttcagggagtctccctacatgccttggcctccaaagtgctgggattacagatgtgagccactgtgcctggccagctttgcaatttttaagctttacaacttttcgttttaagatttatgaacagaggaacctggatttgtgaggagcttagtgattaaatttggaaaacatagcacctagaacttccagacccacttgactttccccaccttgtagagaagaagaataaatagaacctgatagtttcttaattccttgcaggatccgcttccagaaacaaggtggaatgggaagaggctttttatttctgccacaacatgatagaatggaattactgaaggttttgatgccaagtgggcctgggtttgttcacttagtaactttgtgaccagcaagttactttgcttttccaagcctcagtttccccttctgtaatagcagaactagtgatacttctgtccagcggcttgttgggagggatggatatggaaaatgactggtggagcctgcatagtgtaagaactcaaccactgttagttcctttctcatcttttaggttttacgcctttagagtatgtcttttaataaaaggcaggtgatgttgaaaacaggacattttctggcagtttgacttggtatttagatggcctgttttcatctctgctggatcacacttataagcattaggttttagagatagccccaacctcttaccccaaaagacccagttgactcagaagtcacattttctatgcattgaagttttggtcgtgttttgttcttgtatcagaagatattttatttgttttcctcatgtagtaaggtgtaatgacagcccgggtgtcccttgctttaaatgtaagcagtagctatgcaggatgttttcacattgattggataggacatgctgtcctttgaagcaagtgttaggcagtagtgctgcagtgctcacacacactgttgaattaatcactgcagagttcttggctctgatcaacctgtgtaggtaaaataaaactgcctttaagagataccagcaactgtaggagaaatgatgactacaaaacagaggaataagagataggtttaagagtggctttggcagaattgattattttaactaatgaattatttggtgcttcttaagtatgtagatcttagtttcctctttcaatccagaaagtcacaaataaaacacaggtcttaggtcttatgggtctaagtacagacttatgttcttaacttaaatcctagttgtgctgtttttggcttagagctcttttgttttctaactccttatgtcttaaagtcacttacagtaataacagtccttttgtgaaattgaaaatgtgtccttaaggtgctgttgatatgcaaaatgtgaaacccagcaggcacagcacactgatgcartgaggattgtgccttacaatgtggtagagatcagtgccctcaagtttttgaggcagattctagtccttcatttgaatctcaacactcccacttacttgttctgtgactttgcaaattgctttactgttttacacaagtacttttctcacgtgtacaaaaggagtgtgctaataactttgtaagattaaatgagtaatacatatagagtgtttaatacatagttgtcagtataaatatacttacatataaatgagtaatatataaacttactgataaacgagtaatacatgtagagtgtttaatacatagttggcagtataaggcactgaataagtattgactctatcagtagtatctctcaatctttactcctgaatttgataagctgttgttgtctctttgaaagtaagtgaaatatggggtggagtctcttgcagttcgttgtagggaatgatatgaactaaagctgttatgattgctgtttgtcatgttcttcaggttggtaacaaggaagatgctgagaaggaagtagctatttctaccttctcatccagtaaccaggtatcctgcccgctatgtgaccaaygctttccacccacaaagattgaacgacatgccatgtactgcaatggtctgatggaggaagatacaggtaaagacccagcaggacagccaaactcttacttttttgtgtggtggttttataatcctatacattacaatgcagggaaaaaacatagctgttcttcaaagttaaagttgttgttggtcttgggttttttctatctagttatttttctagtacttttatgttcatcattacttttagcaggtattttgtcctgttacacatgcctcaggagaaggggaagggaaaagtctttcattttttaatgtttttgtttgtttgtttgttctgtttgttttttgagccagagtctctgtcacccatgctggattgcagtggcgcgatcttggctttctgcaacctccgcctcccaggttcaaacgattctcacgccttagcctcccaagtagctgggactacaggcttgcgccaccatgcctggctaattttttttgtactttttttcagtagagacagggtttcgccatgttggccaggctgctctcgaactcatgacctcaagtgattcttctgccttggcctcccaaagtgctgagattacaggtgtgacccactgcacctggcccaaccttttttttttttttttttttttaagacggagtctcgctctgtcgcccaggctggagtgcagtggtgcgatcttggctcactgaaagctccgcctcctgggttcacaccattctcctgcctcagcctcccgagtagctgggactacaggtgcctgccaccatgcccagctaatttttgtattttttttttagtagagatggggtttcaccatattagccatgatggtctccatctcctgacctcgtgatccacctgcctcggcctcccaaagtgttgggattacaggtgtaagccaccacgcccagcctgcacctggcccatcttttaacgtattaacttattcttttacataggtaggctagaaatcagtgcagtgcagtggaccttgcatttcaacttatgtattcaaatattgagattcctgtggaacttgaactaagttccacgtttttcattcagaataaaccccttgtaggttttttccctctttttgtagtttgttttaatagaaattttacctagagacagcagctgaaaaatatcactaatttacattcatgtcctacatatcatatctctgctgagttaccgaggagctgttggtttatctctttaagagtgtaccagaggctgggcgcggtggttcatgcctgtaatccctttgggaggctgaggcgggtgggtcacctgaggtcaggagttcgagaccagcctggtcaacgtggtgaaaccctgtctctactaaaaatacaaaaaattaaccaggcgtggtgccgggctcctgtaatcccagctactcaggaggctgagtcaggagaattgcttgaacccgggaggcagaggttgtaatgagccgagatcgtgccattgcactccagcctgggcaacaagagtgaaacttcatctcaaaaaaaaaaaagtctgtaccaaaatccctacttttcagacagcataagacattgatcaagaaaatcttgttaatcacagcccttgaaataccacctctgatttggcctgtttatgattttaaactctaaatatagtcatgtcagcacagctctctgtggtctaacatgctgaatgtaaacctaggtaattggaagtgttgcagtgttcttctcagtgctacttgattcctgtaacttaggtgtatttaaatgtgacattgtataattatgaagtgttttttaaattaagattgccagagaggcaagcacatgttatttacttttcttgaagtaatatactttttagttattaaataaggaagtacataaacacttaatttaataaatttgttgatttttctgattataaagtagtacatgttcattgtaataataatggcttacatttattgaatacttaaaattaggcactatttacataaacgggaccatgctatatatagctctctctatatattattctgcaacttgtcttttttatttagcagtaaatttagctctttcaatgtgcagataaatttttgacgtagttgaggtctgactgtaaaattttatattctgctttttctgtttatagtgtaaatatttcatcatgtcacaaagttatttataaaaatatttctaatgcctacataatatttggtaacctggattgctgtcatttacttaattattacatatttgaaatgcttcaagttactgcgttataatcacacagtactgagcctcttagcctaaaattgtcgctgtattttgggattatttcccaaggatatgttcccatatagggtgacagtaaggtaggctctggagggccagtcagtttgagcttgagtcccacctctgttactgacttactagtgtgtgaccctgtgctaatttccaagcttccctttatgcatctgtgaaataataataattaccttgttcagtttttgtgaggttaaatgaggtgttttaaggaaagtacttaacacggtacctagcacatagtaaatacataagaactattagctgttgttaccattcccagtagtgaaattactatgtcagagatttttttttaagggtctctatgcatagcattgtagtccctaaagacaatgaaagttgaggacctaaatctggctatcaaccacttttagtggcagagcactgaaggactgcaatctagatgcagttttaatttgacaaagctctttagtctgattgttttttttttagctgagtgttccagtgactaaaagaattctggggctgagcatttcaaaggaaagagactatcttgtctgtcttactaagcacttacacagctggtattgggtatctgagtcaatgacttattcaatacaacatcaaggtccagaaataaatgagtttgagaaactgaatgccccattgagctctaggaatatatgacctccttcaggtcagaatgatcaggtaaggagtagtataggatagcttctactgacatctcccttactgaattccactagttggtgctaaaataggaagctttggcatttataactgtcagatatcgtttaattacaagataattgctgttaagccggtcttccttactggagtgtggtgagagaactcaaactcacatccccaaatccttgtggttgaaattgattcaggcttgttcctgaattttctcaaaccaattttcagacttatgccactagaaccaggccatttaggtgggcaaaatagactgagtcttatcatcatcatcatccattcagggaggacatttcacgttctccttgttctgctgtgtccaggatcagtgaccccgtctaatgctgttcagttggatttacactctggatatcgcagactttcagacatgatagatgtaaatgtgctttttgatataatagaaagtccctgtattctcggcatcatatgtctttatagctttgatgcgaataccccagacctccatgtgaagatgtctgctatatcctgaatgacagtcacactttctttttcatagggaaatttgttataaaaactagtttagaagacaaatttagaatatagtcacgtgttgctcagtgatggggatgtgttctgagaaatgtgtcattaagtgattttgttgtgcaaacatcatagagtgagtatacttacacaaaccttgatggtgtagtctactacacacctaggctataaggtatagcctattgatcttgggctacaaacctgtacagtgtgttactgtaccgaacactgtagtcacttgtaacacaatggtatttgtgtatctaaacacatagaaacacagaaaaggtatagtaaaaatatggtattataattttatggcacccccatcatatagatggtccgttgttggctgaaatgtctttttgtggcacatgactgtactacatccttcttttcaatgccaatgtgtctacctagagccagaagtttgcttcttttctatcacctattacttcatatttacctttaattcatccagatattttggagcttttctttttttttcttttttttttttttttgagacaggatctcactctgtcacccaggctggattacagtgatacaattacggctcattgcaacctctgcctcctgggctccagtgattctccaacctcagcctcatgagtagctgggactatgggcacacaccaccccgcctggctagttttttatattttcttttgtagagaaagggtctcaccatgttgcccaggctggtcttgaactcctgggcccaagcaggcatcccgccttggcctcctaaagtgttgggattacaggtgtgagccaccttgcctggcattgcactttttttttttttaaatggtgctaggccttatgaagcttactaaagaagttttaagatttctctcttcaaggagcttgcattatcaatggtgaaataagcatttccccaagaaattaattaaaagatgacacaagtgaataattgtgtacccaagtaaatgtycctgacaatgggagaaaggagagctgcagtgaataaggatgagatcccagaaagagtgggcttagccttggctttgcaggctggttaggtctggataaacccatagcaaggtagagggccctttcccctcctatgggtttagataagataagaagcaagggaaatggccactaaacaatagcttcgtcttaatcttcctaagagagctctctgttgatttttcaggccctatgagagggagcagggtgccctcactggaaccattctactctctgcatgttcctctactttcctgggaacagagcttgggggtataggtgggttggggaagtagaggaattatgcagagcacctgctagtgtacttggtgtacaataggtactcagtacgtttgatctctttacttggtttccccaccagcttgcctgccccatcttccttgccagagacagaagttagtgattgtgctggttcctcttagctttatatgactggagacagaggccaggctcccaacctagttttaaaatcttttgtaaaaggaagcctttttttttttttactgtggaaggaaagaagtaattttccctttttttttttttttttttttttgagacagggtcttactctgtagcccaggctggagggcagtggtggaatcatggctcactgcagcctcaacctcccaggctcaagtgatccttctgcctcagcctcccgagtagctgggaccacaggtgcatgccatcacscctggctaattttttattttttgtagagatggagtctttttatgctgcttaggctggtcttgaactcctgggctcaagtgattctcctgcgttggcctcccaaagtgctgggattataggcctaggccaccatgcctggcaagttacttttcttgaagacacataagccaagctgggagaccattagcccaatgcttaaggggtggaataagagaggacgtaacctcccagtattaagtatctagcttttcactccttcctgtcttcccctgaagcggatcctagacgtgcttggtttggctgtgtaaaagaaatagcaattagaatcatttacataaagtgtctactatttatgcctacttaccgtgcagcacaataacaattatgcatatcattaaatatatgtctgactaactttgctgtaagttttgattataatactacgcactggttaagttggctcagtctactcagttttttgctcaatgacgttgtctattcagaactatgaaaaattagagggaatgcttttgtttctttttttatttttattttttgagacagagtcttgctctgtcgcccaggctggagtgcagtggcacgatctcggctcctgcaagctttgcctccaggttcatgccattctcctgtctcagtctcccgagtagctgggactacaggcgcctgctaccacgctcggctaattttttgtatttttagcagagatggggtttcaccatgttagccaggatggtctcgatctcctgactcatgatctgcccacctcggcctccctaagtgctgagattacaggcgtgagccaccgcacctggccgagggaatgctctttaaaggtaatgtttgaggggagaagattgactacgttgatctagactagaacaaatgcacgttgcctttgcatttactttctggaaaatgtatctaaggccaattgtgttagacacctagggagaataaaagcccccatttactcattcaatacgtatttatygtatacctactatataacagatacagtgagcagaatatacaattaacagaatataagtccctgttctcatggagcttattttctagtagtgggaggcagacaagaaaacagtaaatatacaatatttcaagtggtgataagtactttagagaaaaaagtaaagcagagggagaggggaatagggaataccgaggtctcaggaggtagcaatataaaataggtgatcagggaaggtctccttgagaagatgacatttgaacaggggcctagagtaagtgagggaataaactaagaagattgtgaggtggggagagtgctacaggtagaaggaacaataaatgcaaaaaccctgaggtgtgaacaggttgaatgtggctggattagagtaagtaagggagagataaacagtgaaaccagagaggtaacggggaggagtgcagatggacagagcacagggttcttaggccataataaggactttggcttttccttgagcaagggaggaaccactggagggacttgagcaaagaataatatttaagcaaaggatcactccactctggttgctactatgtggacagtagattactgggttgtgggacaagggtgraagctgggaaaatagagtcaatattttgtttttggcactatgataaagtagaagaaatgtcagttttagaactaggcagctcagctgtaatatttcctaactggctaatatttgacaagttatctctttcaggatcaggttcctcatttgtaaaattagtatgaggattgccatgagaatcacagacactttgtaaagtaccaggcattgtgactagcatgtaataggtatgcaataaatggtggctgctattattattgactgtgctttcctatctgtgtagtctttctgaggtctgtgtttctgtgtgatggtgagacataaaagataagccactagttgggtagaactaaggaaaagaagaaaggcaaagcataagagtcaaaggggtaagaataagttagggagaaatagattataggagagttagggaagctgaaggcattaactgtatacactttgagtctagatagagggtgtggcttagagtcaggatactgctaggagtggactttctcttcggggatatctcctggaaaaataatggtggatgggtgggtaggtaggaggaggtaggaattcttattatagatatgcctgagagttaacagagaaggaccaaggcctaaaataggcttgacttgtgactaagcaaaaatgtgtaagacctcagtatctctaagtaaaacttatttcttaaattagacaaagttgggacttgttctgttctatatatgcctacctaaatgtaatttgtaccctgtccagtcttctcacttatattaatgtggcctttgtggtacccaggataattaagtatattgctgcattgctactggtacgtagctactgagatattgacaattgtgaaatagcctaggtttcatagaagtaataaggattttggggacagactgacctgtggggatatatacaaatcaaatatgggccctgatctcactgacatttcagttcaattaggtagataagacatgaacatgcataactgtaatgcaaggtcagaactactaagggacatacaaataaaaatactgtagtgtttcagaggaaatacaattagagattgagaggggagggtattaatgtaagagaacggtaggctaaaatcacataaatagaaaaatgtgaagagtgtgtaggaaagaacaagcaattcagtgtagttatagtgtgggcattatgaaaggaaatggtgggcagttggagaatgacaaatgtaacttgaatcatgtgggttaacatttgtatgaattatgtgggtctacattatrgaacagcatttttttcaactcaaataattattggtgagtgttactaaaataattatttgtgtgtttaccccccttgtggtatataggactcttggatgcaggtgttggaaatatgatttcagtaaccttaagcaaaaaaaccaagttaatgtgtgtaataattggcaagtctggttagggcttaggctgagctggatctgggagctcagataatgtctctccatctttgaatccagtggtctctgttcaacagatggcctcttcttaagggacaagcaaaatggctgccagcagccatagcttttaatggaaagaaagaatttttttttccctcagaccataggttagtctagaggaagactctgataggcctttcttgattgaagtgtccacttacggtgtagtcactgtaaccaagtagatgggtacaagtcagaacaagtaaaggaaaacccttttactaactatgagaaattctgttagtatctgtcagaaaattctgtaagtcacaataacagaaaacatcattaacagtgggtttaacacgtgggatttctttctcctcacgtcacaagtccagagtgaggcagttggctcattgacataattgaggatcaggcttttgcctttggtgctacagtcataaacttgtggcttgattcacggtttcaagatacccgttgcatctctaggcttctcatgtatgtttgaggcaggaagacggagaaaacgtaaagggacatgactgcttactctgactcctttgatctaatactcattcctgcattctcatggaatttgagcttattctaaattatggttgaattaaggcagttctaaatttagtgtttgttcatacctctaaagtgtttatatgtctttttctatataaaattattttatctctaaagtcattgattaattgctttttatagtggttcaccttaagattttttcatatcctgctgttagtgaaatattgtgctggatgctgagggtagggaggaggggcctaaaagacccaaaagatggtaagggatataatacagatctgaataggatctcaaatttatactcagagagtttacagtccagcaagggaaacagacttgggtatgactatgtatagtacaactcagtcgaaatgctaagatgtaagcactaaccacccacaaaggaaggtattaaatctgattggtgattggtggagtaagggagggcttcttgcttaattgttcccctaatattgggcatgactttttttaacctatttttttttctattaaagataaacatctagggtcagtcatggtagttcacacctgtaatccaagcacattgggacgctgaggtgggaggatcagttaaagccaggagttcaagaccagcctgagcaacataggaagacactatctctgcaaaaaataaaaaattagctttgtgtggtggtacatgcctgtagtcccagttacttcggaggctgaggtgggaagatcacttgagcccaggagttggaggctacagtgagctgtgattgtgattgcaccactccactccagcctgagtgactgagcaagaccctgtctcaaaaaaagaaaaaaaaaaaaatctaaactagcaatgagccttgtaatgtagttctttaatatggattactaaaagtgtaattactagattatatgtataaagttaccagtagcttatgagagcattccttttgcctccaaatactgagggatattcttttaaaaaatatatggcatagtaatagatagtaaccaatggcatttcattgtacttcatgtttctttgattagtagtgaagttgacattttttgttttttaaaaagtcaatttatatttcttcttcgaagaagaattctctgaagtttgcctcagtgtctgttgggatctcagtattgttcttatagtttatacaagttctttataagtgatttactttttgcctcgaaggtgctttccagggtttgtttcactcacccgtcagttctcacaaaatttccagatttatgcagcctgggccagcagcccccttcttgtgtgaacactgccaaagcttttatttcttgaagtagaagcagtgctgatcctgcagaaaggtctaatcggtgtgaacagaagtggcactgatgtggggaaaagagtattcaaatccatgtggaattgasagggtgggtgggcagcaagtagaaaggataaagaagtcattgcctccatgctgttccattcctgtaaaaaaaaaaaaaaaaaaaaaaagcattgctattgctgactggatgaagaagctagagatagaatgaagaggaggtgcggcctggtcaccgggggtcagcaggggctggatgcccaaagtattaggtttaaaggaactgggatgtatctccagagcaactgggaatttaaaaaggtaccttcttccactgaatagaaaagtaatagaaatgaaaccaacgagtgaaatacatgtattttgctatatttattctttctggtaggttgcaagagcaagcactttccctcccagtattaggattcggctgatacatatctgggattctgctgatgtttbtctgtctgtctgtctgtctgtctatctgtctatctatctatatctgtctcctgtttttatatttgccgcccccccgtattacatcataaacgtcatctaacatgccgtttgaaattatttatattcatgacattgcttatagtttttaactttcacaaataatacaaaatgtacttaattctttttccttgctgtgggaatattttttgacrgaggaaaccaaagtgacaggagcagcttataaaacaaaatgcaaagacatttaaggaaggatgttttggaacagattctgggcactaggtcttatcagctataaagtagattcttctttagtcggcttcaccctagaactgttcagtgttttctggagaggacattatcttatttgaatgcccacagtactgacgtacatactcttagctactgaatgaacttgtagaccagtgtttccaccccagacttacgttacactgcatgcattttactcctctgggattaataatgtaggagctcctctctgcaacccctgtggtctcagttgtcttctttttttgtttgtttgtttgttttttagagatggattctcgctctgtcgcccaggctggagtgcattggtgcgatctcggctcactgcaacctctgcctcctcggtttaagcagttctctccctcagcctcccaagtagctgggattacaggcaggtgccaccacgcctgtatttttagtagaggcggggtttcactatcttggccaggctggtcttgaactcctgacttcgtgatccatctgccttggcctcctgaagtgctgggattacaggcatgagccaccgcacccggccttcagttgtcttctaacaacttttgttcaacttttctgtggaacatttcctcatgtcagctccactaggttgcattgataaagttgctgtatgatgtrgcatatgaaatggcagcctgactgcagtgtacgtctgcatgaattctcagtgcttttacacttcccatcttgttcctctcttaatattgactttgccttcacttcagttatccctattcattgtaccttcatgctaaggagccccccacctcaggatttctcttagcagttttcttctgccagatgtgcttattccttccttgaaaaataaaatagctctttttaacacctgagttaatacccaaagcattatgtgttaaaggaatattaacagcaaaaaccattttagagaagttcttcacttcatgatctagtcacacttttaaattcaggcatctagagcatttcgagaaagataaaagttcaagaaattaatactagatcagtgatctccattggaactatcttagagccacaatcaagactataattatctattaatataaggataagtttttgttatctccattttactgatgatgaaattaatattagagaactttagcacttgcattgtcaggcagtaagcagcagagccaaggyccagagctagcattcattactgtgttctttctgccttccatgtgtagagctgggacacacaggggaatgtttgagaagaccgtggaagcctcagtcggtttcaggaaagcagaatgctatagtcttttacctctgagtgcaaacatgaattctcatctcatcagaattgaccttgtcagattttcaattacctagaataaatggtttgatggattagactctttgctggtgaacagcgtccatgtgacatagtygcctctgtaaacctgtgagtgcaaagtcaaaaaaagatcagatgaacattacttctttctggtgatagctgtggagattgaccatgcatagactgatctctaaggagttttctaacggccgtatataaaggaaatgcttgataacaagataatattttctgttaagtaaaaggatttaatttgccgcatctttataagccatgcttaacattaagcaacattagctaccatttatgagcacctgctatataccagtaacagtgctttttgtatattgttctaatcctcataacagtcttttgaaacaggtgttatttcacttataaaagaggaagctgaacttgatggggaaataatttccccaagatcacgtacctagaaagtgacaagagctagggtacaccaagtttaactcaaaagctagtaatctgtgctctatagaatcttccatgaatgttcagatttttttgaaaaagtatgtttcaggatactaaatccaatatggtggtcaatatattttttaataatttgtggtaaaactgtgtgtttgtataaaaagaagataaaggtaatataattttgagaataaaggccacctctggggtgggggatggggtggaggcagagagatggaatccagaagaagcatatagttggctaatcagttttggcaatattctagttcctaagttgggtaatgggttcacatatatattcttttgtacatattacattataaaaccttttaaagaattgtatgtttctgttatgcaccactgtcatccattacgttttcagaagaaccttggtaaacatttactagtgaagttcagacaaattcagtcttttctccatatgaaacttacttactattatctttatttaggttctgatgacaatatccagtgtgatttgactgccattgatgattctttagaaggagggctcttgtggttttttcctagatccttatctttgtcacctgattttcataccactttcttcaaaagacagtggctagtttatctttggtatttgtcttgcaaaaggactttgtgtgtgtgtgttttacttttaattaccaaaaatttcaaacttaaaaattgagaggatagtagtactctgaacccccatattctacctagtcattcatcaactcgtggccactgttgtttcatatgtattctatccataactcccatcctggattatttcagattatatctcagataactttttttttttgagacggagtcactctctcacccaggctggagtgcagtggcacgatttcggctcactgcaacctctgcctcccgagttcacgccatactcctgcctcagcctcccaagtagctgggactacaggcacccgccaccacgcctggctaatttttttgtattttttttagtagagacggggtttcaccgtgttagccaggatggtctcgatctcctgacctcatgatcctcccacctcagcctcccaaagtgctgggattacaggcatgagccaccgcacccagccaattaatgataaattttttttctttctgagatggagtcttgctctgtcacccaggctggaatgcagtggcatgatcttggctcactgcaacctctgcctcccgggttcaagtgattctcctgcctcagcctcccgagtagctgggactacaagtgcgcgccaccacccctggctaattttttttctattattagtagagacagggtttcactatattggccaggctggtctcaaactcctgacctcgtaatctacccgccttggcctccgaaagtgctgggattacaggtgtaagccaccacgcccggccaattaataattttttttttaaaagacgtagtttcactctgttgcccaggttggagtgcagtggcgcgatctcctctcactgcaagctctgcctcctgggttcacgccattctcctgcctcagcctcccaagtagctgggactacaggtgccccccaccatgcccagctaattttttgtatttttagtagagacggggtttcaccatgttagccaggatggtcttgatctcctgacctcgtgatccgcccacctcagcctcccaaagtgctgggattacaggcgtgggccactgcgctcagccgataatttttaataccaccaaatatctggtttgttcaactctcgttgagtccaataattgtttttttgtttatagttggtttgttgaaaacaggatccaaacaagttttacacattgcaaaaagcttttgttgctaatgtctcgggctcttttaatttacagaagagtcaaaccccaagaagttctttttaaagattgaatcattcttgaattacacataagcttaatattgttaacagttattgtgtcatagtcctttttattccctccatagtatctaatatagtattgtgcaggtaggccctcagaaaatgtactcttaaaagcaaagtctagcaaactttttctgaaaggaacaratagtaaatattttaggctttgcaggccgtttggtctctgtcgcaactactcaagtctttgccactgctactcaactctgctgttaaagcactaaagcagccatagacaatttataaatgaatcaggcggctgtgttgcagtaaaagtttatttataaaaaaagctaggctgagcgtggtacctcaagcctataatcctagcacttttggaggccgaggtggacagatcactttgaggtcaagagttcgagaccagcctggccaacatggtgaaaccctatctctactaaaaatcagccaggcatggtggcgcctgcctgtaatcccagctactcgggaggctgaggcaggagaatcacgtgaacccaggagtcagaggttgcagtgagctgagattgcaccatttcactccagcctgggcaacaagagtgaaactctgtctcaaaaaaaaaaaaaaaaagctggctggccatcccatggtttgccaatccctgttctagagaactggtttttttgttttttgttttgttttgttttgtttttttttgaaacaggccacacccggctgagaactggtttttcaaaatgtcctctgtagttaactagggttctgtaaaggtgtgggaagggcagaatgaatactggtaacactccaacttgaccacccacctcatccatacatttatgtattttacatattgcgtttcatgtgaaattttattnnnnnnnnnnnnnnnnnnnnattgcgtttcatgtgaaattttatttgaaaatagaattctctctttttttaattgaaatttggctgggtgtggtggctcatgcctgtaatcccagcactttgggaggtcgaggtgggtgaatcacttgcggtcaggagttcaaggccagcctggccaatgtggtgaaacaccatctctactaaaaatacaaaaaatagccaggtgtggtgctgcacacctgtaatctcagctactcgggaggctgaggcaggagaatcgcttgaacccaggaggtggaggttgcagtgagctaagattgcctcattgcactccagcctgggcaacagagtgagactccatctccaaaaaaaataaagaaattcatgggtctgtgacacactactggtgctttttttttttttttttttcttttttaaagaaatggtgtcttattatgttgcccaggctgttcttgaactcctgggctcaagtgattttcctgctttggcctcccaaagtgttgggattataagcatgagccaaccatacctgaccactactggtctttataataacagtgactgctattactactattttctgcaagtcagtatgcgcttatgcagtaactcttattttacctgatctttgcaggaaccttacaagttaggctttgtcatccttagggagaagtaacttgctcaaaatcattaagctagtaattggtagtgtgggaactgagaacttagacctgtttgtttcagggcctatttttttcctctctattttgaaaatttcaaatttcagaagtatgagatacaaaaatagtgtacttcctttatccctcctatttctcttctttttctttctcatatgtatattttttacatatatggacctttccctggccatttgagagttagttgcataaatcatgacactttacctctaaatactttaattagtatgcatctcttgttgttgttgttgttgttgtttgagacagggtcttgctttgtcacccaggctgaagtgcactggcatgatcatagcttagtgtaaccttgaactcctgggctccagcagtcctcccacctcagcctccctagtagctaggactgcaagcactcaccaccacacccagctaattttaattttaattttgtagtgatgggggtcttgctatgttgcccaagctggtctcaaactcttgacctcaagagatccttctctcttggcctccccaagtgctggaattgagccactgagcttgatcagtgtgtatctcttaagaacaagatcattctcctacaaaattgtaacaccattattatactcaagaaatttaacattaatgccaatactattatctagtatacaatccacattcacatttcctcagttgttccagtagtatcctttgtatctcttttttggcgtaaaggatccaattaagcatcatacgttgcatctagtcatatctctttattcatctttaatttagagggtttccccagtctttttccctccgttattttattatgaaaattttgaatacacaacaaagttagaagaatcttattacttagattccattaatatcttactatgttttattacaaatctatgtatctctctagccatcctttaatccatgttatgtttttgatgctttgcaaagtaagttgcgaatattggttcattttccctgaaatacttaagcatgcaaatcatgaaccaagttccaatatttgtgtgaaatgcacaaataagtgtaaatttgcagagtttgggcatatgcgtatacctatcaagacacggagcattaatatcaccctggaagattccctcatatctcttcttcacccctccccctaaaggcaaccactgttttatttctrtaaaattctgcttatatgatattctgcagtttgatattagtagaatcataccagtatacttttatgtaatctttcactcagcataatgtttttgagattgatccgtgttatattcctttttattactgagtagtgttctagcatatgaatataccagtttctttatacagttcttctcggtgtatttttcactaagaatgctgctgtgaacattcttgtacaggttgtatagtgagcataagatttcacatcttttgaataaatagctaggaatggaattgctaggttataaagaaactgccaaacctttttccaaagtagttataccattttaattcccactagcggtttatgagcattctagttattttacttgttttacatctttgctaccatttgatactgttttatccccttaattttagccattctggtagtcatgtaatgattctaattgcattccctgatggctaatgatgttgagcactttttttcacatgattgttgtctaattttgtatcttctgtaaagtgttcaaatgttttgtccattttaaaattggattatgtggctttttattattgagataggagttctttgtatgtcctgaataccagttgtttgtcaaatgtgtgttctacaaatattttctagcgtgtacttgcctattcattttcttttgctttctttttttttttttttttgaggcagagtcttgctctgtcgcccaggctggagtgcagtggcacgatctcagctcattgcagcctctgcctctcaggttcaagcgattctcctgcctcagcctcctgagtagctgagactacagatgtgtgcccggctaattttcgtatttttagtagagtcagggtttcaccatgttggccaggatggtcttgatctcctgaccttgtgatccacccgcctcagcctcccaaagtgctgggattacagatatgagccaccgcgcccggctgcctattcattttcttaatggtatcttgctgtgaagaagatttaagatggtctaattttcaattttttcctttatggttattattttctatttaggtatatggtacatcttgaattgatttttgtgtatggtgtgagttaggggatgaggtttatttcttctatatagatatctagttattctaactcagttcattaaagacttctttttctcagtgggttgctttggtgcctttgaaaatcaacttactgtataagtgagagtttatgtctggcttctcttttttatttaattgatctgtttgtctttatgccagtacaagtgtcttgattatagtagcttcatagcgagtcttaaagtcaggtagcaggtagcataatttctcatttgttctttttcaagattgtggtagatattatttttattattwttttttttttgagacgaattctcactcttgtcccccaggctggagtgcagtggtacgatctcggctcactgcaacctccgcctcccaggttcaagcgattctcctgcctcagcttcctgagtagctgggattacaggcacctgccaccatgcctggctaatttttgtagttttagtagagatggggtttcgccatgttggccaggctggtcttgacttcctgacctcaggtgatccacctgcctcrgccccccaaagtgctgggattacacgcgtgagccaccgtgcccggccagattgtggtagatattctagtctttcacggtttcatataaattattgagccaacatgtaaatatacgatgtaatttccagttttatccctgataatgtgtgtgtgtckgtgtgtgtgtgtgtgtgtgtgtgtctgtgtgtgtgtrtatatatatatatwttttttttttgagacagagtcttgctctgttgcccaggctggagtgcagtggcacaatctcggctcactgcaacctctgtctcctgggttcaagcgattctcttgcctcagcctcctgagtagctgggattataggcacccgccaccatggccggctaattttcatatttttagtagagacagagttttaccaagttggccaggctggtctcaaactgctgacctcaagtgatctgtccgcctcagcctcccaaagtgcagggattacaggtgtgagccaccgtgcccgaccttattttctttctttcttttttttttttgcttttgatacagtctcactgtgttgcccaggctggagtgcagtggcactgtctcagctcactgcagcctgtgcctcccaggttcaagggattcttgtacctcagccttccaagtagctgggattacaagcatgtgccacgacacccagctaattatttcttgaagtgtattttatctggtagaactactggatatggttctagtcatttcagtcttattcctactgtttgcctgatacatctttttccattcttttaactgatctgtgtttttatttttaaaatgtgtctcctgtagacagcataccattgggtcatgcttttatccattctgacaatctcttgttctctcaggtactaggcttgataatcttattctaatagacatagcttctaactcaaacatcttacgtgattatgttggtagttcctaaatagaaatctttacaaccctaaaaagataagcattgctgggtccatttacagatgagcaaacaaaggcttaggggcttgaagcctataaatacctgctctggcataggattcaaaggcagttagactccaaagacagtactgcaatgccagactgccttctttgctgcaaaaaagccacagaggccccctgcctactcaaaatgtagcgattttctttcaagcttagagataagcctgttctcttaagaggtgcacttttactgatctacttccttactagtacttgtctataatatttatagcttaatctttaacagctgaaatttttgtttaagcaatttgataatatatacgtagaacttaaaagtaattcatatcttctgacccatgaattaaagtttgaaaatctactctaaaaacgtcatcagaatttagatgaaattgtatagacaaagatggtttatcaaagcattatttataacaatgaacaacttaacccaatgttcaaaaacaagacgaagtattatataaggattcaaaataaagactgaaagaaaatacagtattctgaaatattaaccataatttggaggagactaaaagcagagagacagatgataaagcagtgttagtagaagtggacggacttgagaatcttttggtgagagaagcaaaccttgtgactggtcaagatgagagaaggcaatcttaactcaggtttctggctaagccarttgtagggtactcaacttagaaagcccctctgagtaattcagaagatcactgtgktgtttaactattgcttgtacttccttactgacaacccagttggtatttatttagcagcaactataacgcagatactgttctgcaagctgagggtacagtactaaacacaagtcagtgttcttataaagcttacctttttgtgagggaaacagataataaatacaatttaagaaaaacaaggcaagaagaggggatggagagtgactagaacagaggaaaaagggggctcgattaaagagaaagatcaagggagacttcttgaggtgatatttgaatagagtcattctaggtcagggaataaatacaaaggccctaaagcaagagtgtgtttggcatgtttcttagagctgcaggaaagacacaatgactgaattagattgagcgacagggggaaaggagagaagaaataaacagtggtcagatcatgtgaggtgaggtttttgtacttcattccaaatatgatgaaaagccataggggggttgagaacgagggaatgatgtaatctaactctggctacaatgtggaaaataatctatagagggatggggcaaaaatggaattgaggagactaagcaggggtggaggggagtggctgttgcattattccagggaagatctgatgtttgctttgaccatagaggtagctgtgaggtaaagaagttgtcagatttgggaatgttttgaaggttgaacctacaggatttattggagtgtgagagaacaagaaagactaaggtgaaatcaaggttttgccccaagcaactgggttaatgatgacttcgttgtttgagagcgggaacactggggcaggaacaggtttggaggaagaaattaagaatttggttttgtacataattttaagatgcccagtgaataaccaaatgaagatgttgagcagacagcaggatatacaagtctagaaataaccttatgggaaatattactgcatatttgtatgctgatggaatgatctaaaaaaagagggaaaaattgatgtttcaggagagatgatggcaggaggggaatccttaaytaagcaagaagcgttcagattcaggatcaaatggaaaagtgagccttagatagccgtgtgggcaattcattctgtgcaataggagggaaggcagaggatatgggtacagatgcagatagactaatacttttggtggtggaagagtgtagaagttctctcaagtactacttttttctcatcaaaaaagtctgaaaggttggtttaacattagaaaatcagttaatatactgtatcatagaacaaaggacaaaaaccacacgatatctaaatggacacagaaaaagcatttgagagaattcaatactccttcatgacaataaaatactcagcaaactaggaatagacaggaacttcctcagcctgatagagggcgtctatgaaaaactcacagctaatatcatacttaatggtgaaagactgaaagctttccccaaaatcagaaacaagacaaggatgttcattcttgccacttccattcaacgtggtaaaggaggttctagccaggacagttaggaaagagatgaaataaaagccattcaggttggaaacgaagaagtaaactactctatcagatgacatcttttatatagaaaatcctagagaatccactgaaataaaacaagcctttagaactaataaacgagtttagcaagtttgcaggatacaaggtcaatatagaaaatgaactgtatttttgtacactagcagtgaacaatctgaaagtggatttaagaaaacagttacatttaatatactatcaaaaataataaaatacttaggaatatgtttgacaaaagaaataaaaaacttctctgagaattataaaayattgttgaaagaaattaaataagacctaaataaatggaatggtatttcctgttcatggtttagaatacttaatgttgtgaagatggcagtattcaccaagttgatctacagatttcaaatccttttcaaaatcccagctaggctgggcatggtggctcacgcctgtaatcccagcactttgggaggctgaggtgggcggatcacctgaggtcaggagttcgagactagccttaccaatgtggagaaacyccgtctctactaaaaatacaaaaaaaaaaattagccaggcatggtggtgcatgcctgtaatcccagctactcaggaggctgaggcaggagaatcacttgaacccaggaggcggaggttgtggtgtgccaagatcgcaccattgcactccagcctgggcaacaagagcgaaactccttctcaaaaaaacaaacaagaaaaccccacaaaaatcccagctaacttttttttgtaaattgacaagttggtcccaaaattcataccaaaatacaaggggcacagaatagaacagtcttgaaaaagaacgaagttaagagttcatactttccaattttacaacttactaattaagacatagaggtaggcattacagttcagtggaatagaattgagggtccagaagtaaaaccatacatttgtgggcaattgatttttgagaagaatgtcaagacaattcagtgggggaaaacaaggcagtcttctcaatatgtagtgctgggacaactgaatatccacttgcaaaaccatgaagttggaccacttgtttatactacgtatgaaaatagatcaaagacytaaatgtaagtcataaagcttttataggcagctacagtggtacacactggtaagtcccatctacttgggaggctgaggcaggaggatccttagagtcccacctgggcaacacagttgacaccttgtctcagcgagtcaggggaactatcttagggataaaacttcacaaccttagatttggcagtggattcctagatataataccacaagcacaaacaacaaaagaaaaagataaattggactttatcaaaatttaaaacttctgtgcatcaaaggacactatcaagaaagtgaaaagacaacctacagaataggagaaaatatttgcaaatcatatgtatgttaagggtttagtatccagaatatataaagaactctctttctgttgcccaggctggagtgcagtagtggaaccttggctcgctgcagcctctgcctctccacctcaagcaatcctcccacctcagcctcccaggtacttgccattgaatcatagactttaaatgggtggattatatggtacatgaatatatctcagtgaagttatatttaaataaaaaagaatagtgatacaggaatcggaatggatattagagttttgagaatagcagagaagatgtgaaatagtacctgggaggatggaagaatgaaccgactaggaaaatatgtcaagattgctagcagtagtgagggaccacttaagattttgatcttaaataaaaagtgaggccagtcagcacgttgtatgtgtttttgttcctgtcacattcagcagatagggacacctaataagtaggagggctgtatttaaccaaagtcggattgcgcaagtaagtacagtagaaagaagttgagggaatattcaaggggagtgttaatatgataactatgtaaactaaggcaagaaggaatgcgaagatatgacagggtaatcgtgaaaagatgatagtataggattagatgtcctagtggggctgaagggtgattggtgtaagaacattagagagggtgagttgggaaagataggtgatggtgaacagagaatggacacctgaaattgagctcatcattaatgataggctcagctagagttcttcattagaaccatggaagtcagaaaatgaattcattgtttgcttacttctcccagttatgatacatagctggtaccactttagatgcaggggacagaaattgacttayaacatttggtgggtgccttagggcattaggcttactcctctcttggaaccccactggagaaaggctgagatggtaggagccataggaattaataaacaagaggtcagggaactgagaggctggagtactggatggatcatatcttgggttgaagttacaaaaactgcaacttcatatggttcagtctaatatgtagatattgaaatcaccaagaatggtggcaaatggggatgagaatccagttgaagaggtatgccagaggaggcttggatttcttttggtgctcaaggtagacagaattgaggcataataggattggtcctggttaatctcatgaaagaacagcactatccaatgggaacttgtgcaatgatagaagtgctctatagctgtgctgtcaaatatggtagccacatatggctattgagcatttgaaatgtggctcatgggactgaggaattcaattttttttattattttttgagacagagttttgctgttgttgcccagactggagtgcaatgacatgatctcggcttactactgcctctgccttccaggttcaagcaattctcctgcctcagcctccgaagtagctgaggttataggcatgcgccaccatacccagctaattttgtatttttactagagatggggtttcaccatattggtcaggctggtcacgaactcctgacctcaggtgatccacccacctcggcctcccgaagcgctgggattataggcgtgagccaccgctccttgcccaattttaaattatatttaattctaattaagatttaaatttaagtagccacatgtctcagaaactgatagataatttgtttttttgtttttgtttttgttttgtttgagacagagtctcattctgtcgcccaggctggagtgcagtggtgtaatcttggctcactgcaacctccgtctcccgggttcaagcagttctcctgccttaacctcccgagaagctggggttacaggcactcaccaccaagcccggctaaattgtctattttcagtagagacagcattttgtcgtgttggccaggctggtctggaactcctgaccccaagtgatcygcctgccttggcctcccaaagtgctgggattacaggcgtgggccaccttacctagccaatagtttgttctaataatagcctttaattgagactggtctctgaggtcgttggttgtagggaggcagtgagcatggctgcctcactctgtgcaggtggagctcgtcttcccttcttttccttatatcccactgaagaagtgctaggctgaaagaggggtgatcttagcaggaaaagacacaactctgtggcttcccattattttctactgaggtggttttgaggttgagggagacaaactgagaagactttaaccacttgtcattctgtaaaaactcccttctttgtatatataatttctggtctcctcaaggaatcattgtctttacaatttatagtactaggccatatgttttttattgttgattgttcctcctctttgaattttggaaacaaatatgttgatgtttatatagtattgataattgttctataatgcctaggctatttatttgtccattttgtttgtaaaatttagtatggaaaccacttaagactaagatctaacccaaattgtaggctagctagtggtcactggttccatggatgggtttaagtctttggataaggctaagaaataaatctggaagaagaataatgaaaattatataaacaaatagtgaataaaactaatgtttactgagtgctttctgtgggctggatactcttacagtatctgatatgattgttagcaaaactcattaaggttaaatgcagttatctcattcaacaggttaggaaattgttactcaggttacagaacttgcctaaggccacacagctagtagaggcccaacctggacacctrttgtccaactctaaagccagtgagtgcccttcaccacaaggcaatactgattatttgtatcttaacagtgccaagccacagttctaagtacaactccttaaagcatttcccatgcagtggaatataagcagctgaggtaatggtcatatgtttagtgttgtctctctcagctttcagtgatacctgttctcttctacctttccctgatagttgtactcagaccccattgttcctttttgaaatctgtggctgctgtcatcagcagtttggtttttggatatatgtttcataatgaattctctgcctgcagctagtttaaatagctatctcaaccctcataaaccacaagtactccttcagagcaacctacatacacttctctgctcttttgtaggggcagtaggtttcaaaggaaaaacagyggcaagccccagtccagtccattgtgatcataacatttaatagaattaccgtatagtcctaaccatctatcaatatcaagtctctcccttcaaattttcttctacctgcccacttatttaccacttaccactttttctcttcccattctttagcttcttattttccaggagaggcagcctgctcttgtagaagaacatatgcttctgtaaagtcagatttgtattgcattccttgtgctttttgctttttttttttttttttttttgctttgtgaccttgatcaggttacttaatacttcatttacagtcaggcgcagtggctcacgcctgtaatcccagcactttgggaggctgcggtgggtggatcacaaggtcaggagttcaagaccagcctgcccaagatggtgaaaccccatctctactaaaaatacaaaaattagccaggtgtggtggcaggcgcctgtaatcccagctactcagggggctgaggcaggagaattgcttgaacctgggaggcagaggttgctgtgagccgataccacaccactgcactccagcctgggtgataagagtgagactgtgtctcaaaaaaaaaaaaaattatttactgtaaaatagaaataatgatatattctttgtagggttgttgtaaagataaagatgtttataaagtctctggcacaaaataggtcctcataaaacaagagctcttttttcccctggaatctattgatacagtttaattcagcaagtatttattagcatttaatctgtcctagactctgctgaggatgctgaagagaaaaaaaaaaaaaagaaacaaaataaaacccagagtctctgaattcagaaagttgcatggtgtagaaggaagactgacatataagtgaataggaacagaaatgtggtaaatgcagtagtggtatatggacagtactagaatcaattaattctttttccatccctatctgtggagtggtttccaagtatttcttttggaaaaatacgtgatagtcaagatgggggacaagtagagaaagaaaaataaaaaatagaactcctaaaggattctgtaatctttgaggtgccagccttttaagaatggattttagcaaggcacttgataaaatctctcatgaagtcctcgtacataagatagagaagtatgggctggttgatagaataggaggtggatttgaggctggttctgtcctggatgtttttctcctgcagtactttaattttacttataaaatctctgcattggaaggaaccttagatcatttaatctgtgcctgactatataatctgattccccgcttctagtttttaatttgatttacagaaaagtataccatgaaaagtatgcctccttcctcttccagtcttcaagtattcctgtcatcctccgcagaggcaaacactattactagttgcttgtgtgtgatcttgttttattacgcatatctctttacaccttgggttgtagttatttgagtgtgtatgctgtctccattagtaaactgcactctccttaagagcaaggacagtgcctcataatttcctatatctccccaaattacttgcacattgaagattgtcaataagtgtttgcttaattatttaaaggaaagttggaccagagagaagacaggcttctctggtaacatgtcacagttttgtccttggccatatcctttacaaccatttttccctagtgacttggataaagatgtagaaagtatggttgtcatatatgcagaggacacatagctgagaaggagagctaataacatcagatgacagttaagactgcagatgatctcaacaaataggagtgttcagctgaaaagaacaggaacaaatacaaaatcctgcatttaaggggagaaaaaaaaaatacccagcaacttagttaccaaagtacagaattaagagacttgtcttggtaacattgtatggtatggtatggtgtggtgtggtgtggtatggtatggtatggtatggtatggtatggtatggtgtatggtatggtatggtgtatggtatggtatgctatggtatggtatgstatggtattaattttttgagacgatctagctctgtcacctaggctagagtgcagtggtgctatctcagctcactgcagcctcaaccctcctggctcaggcgatcctcccacctcagcttcctgagtagctgggactacaggcaagcaccaccatgctggctaacttttatattttttgtagagacgggggtttcaccctgttgcccaggctgttctcgaactcctggtctcaagtgatctgcccgcctcagcctcctaaagtgttgggattacaggcgtgagccgctgcacccagtgataacattttatttgaagataatttgggagggtaggggatggatcttaatttcctttaagttcagtttgagccagtagtataccaggattgtcaataaagcaaacacagccttgactgaatcagtagagtatgagtccacatggggtagcccatggttcttctgttctttttactagttggattgtttgttgaatattggattctgtttggggtgctacacatattaaggaaaactgacaaattggattgtatatctaaaagaggttaattaggaaggtaaaacataagtataggaatcagatctagattctatcctgggttttactatttagtagttttgatagcatggtgaagtcaattcctcttagtttatttccataccattaaaactggggaaaagtaataataccaatctggagggtcatcataaggattagagctaacctaggcactcgaagatttgtcaatccaaatcttaatagaatagccatagtaactaggtatagttcttcctttgatgatggttgcattttagtggggcagaaaactgagtaaatccaagatgttgtaatgcagcttgttaagtgttcaaagaggtgacttgtggaaaggtgggtaaatgtattcatatagtccccagtaaatgcagattgaggcagattgcaattagaatggatttccctagggggaagtgaatttccctcagtgaaaagatacagccaagttggccgggcgcagtggctcacgcctgtaatcccagcactttgggaggctaaggcacgtggatcacctgaggtcaggagtttgagaccagcctggctaacattgtgaaaccccgtctctaataaaaatacaaaaaattagctgggcgtcgtggcgggcgcctgtaaatcccagctactcaggaggctgaggcagaagaatcacttgaactcgggaggcggaggttgcagtgagccgagattgtgccattgcattccagcctgcgtgacagagcgagactccatctcaaaaaaaaaaataaataaaaatttaaaaatacaaatataaaaaattagccaggcatggtgggacatacctgtagtcctaactactcgggaggctgaggcaggagaatcacttgaactcgggaggcagaggttgcagtgagctgagattgctccattgcactccagcctgagcaagaagagtgagaytatgtctcaaaaaaaaaaaaaacaaaaaacagtcaagactgtatcattacttgtcagggatgtttatagaaggcattttcatatgagtaggaggttgatctagaaggttaggcaaacggtggccagccatgggtcaaatctaaccagatacctgttattgtagataaagttttattggaacatactcatttgtttatgtatagcctgtgactgctttcctgctaacagtgcagagttgagtagttgtgacagagaccatatgtcctaccaagactaaaatatttactckctgtctccacagataaagtttgctgacccctggactagataaatgcttcacaacctaagttactcgtaaccctgctaaattatctgttgtggggatttcaggtgttaggaggaaagaaggcagagtttgaagtgaaattgttgtagtttttcttgttatgcaaggaatgagctggaaaacacttgattaaataacctccaagatcctttaagagactattttataaacagatgtcttttggtgtgagagacaaygtatttgtgtatcatttgggctaaagccatttatacccactagaattgggaggtggtattagtgtagtgaggaaagactggttgtattaactgttctgagccacagttttctcactgcagaacttttcagagttttgtaaagattggagctcatgtaggcactcggatggctatcattactatatttcatagaggacctcacttgagtgtgtgtcataccagatagaattttgcttgggaaagtgtaaatccctcccttgagtgctgcaagctgggatagtacacaaaaaccttttcttggtgtggagtagatctttagatctcatggcttagcatacagcggaatatcttgtggcggacagaatattgtcaaaacatttgttttggtgcaaatgttacaatcgctattctcaattctagaaagattgagacttcccaaacaatgcacttcttccagtgggataaggttttaaactttgcttcttcctgtgcattttgtcttttatattcagagtctactggcagctaactatgtgtatatatatatattttttatattaaaagtattgactcggagacaaaaagaggccaagaccaagagtgacagtgggacagctgcccagacttctctagacattgacaagtaagtaggtatgctgcattcacrgagctcttgtataacataccatcgtttggactgaataaaaagaccaattcctrtcttaccctgtatttctttggcctgccaattgcttcattgcttggatgcctgaattttcttttcttttcttttcttttcttttcttttcttctcttctctttctyttttttttttgagatgaagtttcactcttcttgcccaggctggagtgcaatggcgtaatctcagctcaccataacctccgcctcctgggttcaagcgattctcctgtctcagcctcccaagtagctgggattacaggcatgcgccaccacgcccggctaattttgtatttttagtagaggcggggtttctccatgttggtcaggctgtctcgaactcctgacctcaggtgattggcctgcctcggcctcccaaagtgctgggattacaggcgtgagccactgtgcccagccctgaatttctttttcttattcctagtctctgtcagtgtaggtggcctctgtatccctttttaatacactaaaagcaatcctgccacccactccacttctgcattgctcttaggtttctgttttctttaatttgcttattggtatttggtgctctttgggaagcattgagcattttgtataatagtacagaagttgaattgcaaaaggttgggcaatatagaagactttttggttgtgtgttgcagcttgactgagaaagctcattctgaggaaggggtcagaatcacaattctcaattaattattcagccccattaggaaggaactagtctaactatggtcttataggtaataattgtcagaaactagatttgcctgactcataagatccccttggttttaagaagctaaaaaaaattttccaaagcatgctatctkggacatcaaagatagcacaaaggtgcttcctcctgaaagtaatgtcattaccaacagtagattagagcagttactaagcagaaacttttatctttgaaacacagatcttagaccctgagtttcagggctgtcttccctaatttagttgagcagagctgatccctttggaatcttactgtaatgtagacattcgtctaggaattcctcacattgtattgcagtaatttggttttaaaaaagaatatttctgtattcctggttagtctgagttttttgagagagatacttgccttagttcatgtttatatccccagcttctaataaaatgtatctgagacagcaataatagctgtttgtttagtgcctaatattatgtgccartcattgtgctaggtgccttgtttgtaagtctcactgtagttgatttaaggtagttattctttcgttttttaagtaaggaaactaaagagaaattttatgtaactggttaagatcactgcagctagaagtgataaagtctgtccaactctgaaactcctgcctcttatgcagtacttctgtctctcatgtagtagggaattaatgttttttgcattaattgataaaccttgaaaggtrtactagtctagcttttctcttaaggcagcattttgcttgcattcttctggataattaagtatttgagagacttatttctgctattttaaacatcttcagaaaaagtcttccttatagctaatccaagtctcccttgctgtagttactgaataataatggccagaaagagatgtccaagatagcatgctttggaaaatttttttagcttcttaaaaccaaggtgatcttatgagtcaggcaaatctagtttctgacaattattacctataagaccatagttagactagttccttcctaatggagctgaataattaattgagaattgtgattaaagggccttgcagaggttctcaccacagagaaaatacttaataaatactcatttttttcttttacccccagtgattccatttttactgatgcccaatacactttacctcaaggacctacttttcctctctttacccaaactctgctcttttaaaaaaggtaaagatagctatgcatataaaattacgcaaaagcctctggcagaaccacatggcttttagtaacttcttagttgwtgttgcagattgtagaattaaggaagtcagcatatagacagacttgatttgctaatcagacaagttcatccaccctggtaaaaatgtcaacttaatttaatgctcttggtgctcccttttctgttgaaattttaacttctctttgaaaaaaactattacacttaattttggaagagttcgacagaatattttatgtctgaagagcaatcagcattgtttgagatagtttgaagagctgatttcattaccatcccactgctgcaacagcagggtacagagaaacagccagggaaaactgctaatcactcagtccttttgattggcgttggattagttttattggtgatcctgctgagtgaatctgcattggttgatatgtctcctccatagaataactttgcgacgtaaaaacacaatttgagacatatccargggcccagaggcaaaagcacatcttaaaactgtgttttcttccttttttcttatyggataggaatgagaagtgttacctctgtaaatccctggtcccatttagagaktatcagtgtcatgtggactcctgtctccagcttgcaaaggctgaccaaggagatggacctgaagrgagtggaagagcatgttcaactgtggaggggaagtggcagcagaggctgaagaacccaaaggtatgtgtagagtgttttgggaaaggccacctaaccctcctggttgtcagttgtaagaggccacagttctgttctggcttttccctcttctccctcccctcttccctctatttatcttgaaacaagatttgtgctttttaaaattatttttccttttaatttaaaaagtaatacatgttcattgtagagaatatggaaagttcaaaaaaatataaataatcaggggaaatcatcacctataatttagctactcaaagatgataacctttaatgtattggcctattttcttccggtctttttttctatgcattgttaatgtaattaacactattctccctctccccccttctctctctcaatatatatgcaataagcacacacacaacatactatatatctagtactatgtgtatactatattctgtgtagtactcgatatgtagttttctcacttgcatttatgaaaacttaagatgtagtgtaaacatcattttgggttttatttttaaaaattactattaatgtttatatcacacagatggtcatttaaccatacacctattattggacattttggttcttttgtgttacaagattgtatttaaaacattaatcagtctttgtaccactgattatttccttagaatacattttctgatacggaactattaggtcagtggatgtacaaattttaaagtgtctcgaaacctgccaaattgctttccggaaaggatatccaatttataatcccactgccaagaatatatgtgagatcaactctgtcgaactccttaggaagctgccaggtctgggccctggtcactgggaaggatggatgtacttttggggccttgtaattagagatcaggaagagcaagtcttggcttagagatgaaagataaagcagcagctccatattctmgggttaccgacaaaggagtcactgtacacactaaaatggggaagccattgtctgtcatgccagaagaaagagacccctctctgtgaatggggtgattttgaggcggagatttggagttatggtttataggtaagcacttacttatacagccagtttattctgggatcactgcctgtagacactaccttaaaatttattttctattttaaatccatgatactctgggcatagcgatgtattctcttcattatagtttgctttttcacttgtgaaaccctcgtttattagaaagcaaaagacttccctagagctgtggcccccacaccttttctcttctatgaacacgtgtgatctgggctgtggaagttgtattttagactctgacatgaagtaaccttttcatctrtttttctctgttacaggaaaaaggccacagtgaaggccgactccttagtttcttggaacagtctgagcacaagacttcaggtgaggaccccaggaccagttttctgggcttctgcctaaggcctttcagtgaagatagccattgccagccccctgactatttgctgtggttatctgggtacacacgtgatccagtcagccagcctttgagactcaatctaggtcatctctccttaaggaagttggggcaatatgctgtctttttcatcctgtgtttcatttcaggctttataaatccttggatcaggacagcctgttgaactcagaaaaaacactatcaaaacacaggggaatacgacaagccccaagtataccttctaaaggaacaggcacagtaaactagatgtgcagacattattgcttcctyctattgttttgtgcatcattmatatgttacctttatcttagtgtcgcaacctgtgatcctgagcgtttgtgcgtagtatttagggagcagtagagtggattggttaagaccattgcagggagttagtaatgccaaacctcatagattgcaagaattgtatctggtaaagctccaaacatattccctggcataagtaggctcttgataaatgttagctgctattattactgttgttattagtcgctattgttaaaattcaccagatgtggatggaagaggagcttttgcttaagcctggtgagatgtgcttaccatctagttctaatagttcattcccaccaagcaaatctgttgtgccttctgatgactataaaaaggcagcctctcccagcctcatatcctgctgtctctagatcaccagtttgtgaatctctgcaggtggcagatttcccttggcaacttccttgttcctcaagtccagaattgaagtagatttattcagaggttgttcattcaaaagtgttcatctgagtgcccctgcagctgagtctgttggacactaatgctcaccgtctgtgggtttaggggattggggatctgtgctacctggataggcctgatgagaagcagtgcctagagcacrgaagcaaaagatcagtgagaagtgctatgattaccaacactactaccaacattattattttttcttttatatcacagatgcagacatcaagtcttcagaaacaggagccttcaggtgaattggattgtgcactgaattgtggctgtcagcatttctgaaaagtgcaggccttgtcctgtgttctgtgtgtagtgtgatactcagactgttgcagtagaaatcactgtggaactattatgacctctctctsagtatgactctgtgctccccatttagctaaagattggataactcaattcattcattgtgttaaaacaaacagagtgaaagttatgtcttattcttctgtacctctctatccccatccaaccctggttttctgacctggattctcaagcagcttgggaatttggatctcagttctcattctctcaatggccagctttaagtagtatatgatttacccagtgacctcatctgtgaaaacagagtgatgatatgtggtgggattattacaaagattatttgtactaataatcccctgatatgtaaaatcccctgatacagtgcatagcatgtccttgatgcttagtaggtgtatattgaatctgaatttttttccttctctctagggtgccttcaccagggatggaagaggcaggctgcagcagagagatgcagagttctttcacacgtcgtgacttaaatgaatctcccgtcaagtcttttgtttccatttcagaagccacagattgcttagtggactttaaaaagcaagttacygtccagccaggtagtcggacacggaccaaagctggcagaggaagaaggagaaaattctgaatttctagggtccaaaagttgacaaamccattagtaggaggggtgggccatgttcattaagccatagtggtccctagttcattgttgagcaagttttagccctgcagttttcaccaccagcacctacccagcattctggtttttatgttttttatgatctatgcagacaactgtgtattctgttttataacagtttgtttgaatttacttacagttaaaaaatttaaatatatttatgtttgtacgaaatcttatttcaatagatggaaattttaatttttttttccttcatgttgcagggtttggggtggggatactttcattgtagaggtagtttattagactcataaatcacatgctgaatgaatgccattactgatccttgacataccatgtatatattcacttaatgtgtactgcacaattccgaacattggttactcccttgactgtttctgacataattctgggaggtgccaggggcattgactcccactacctattctgctatccctaccattcagtgacctgtcccttcatcttgtactcacacagtggaattctcagcctgagcatagaacatttgaaggatgtgtcctgccattcttcccaggaatgtgcaagtgaacactctgttattagatgcctatgcaattattttttctaaatagattaaccagtggggatgccaggcatattcatctgttcaaatcaagattgggtctcttgatgccaaaggttagcagcaacaggacatggcttctgttttggtaacattactaacatagcgcacattcctcaccgtgttgcctaggagcttccagtgcagaacagagatgtggtctgttctcggtgcatgccatgtgcagactctgaagatgagaggatgtcaattggcagaaggagctacctgaaggagatgaccaaacaaggatgtgaagaatgctagttttggccaaaactgatttgaagttgtaatgaaaaactgggggaggtggctgttgaccaggaaaggatcttgggacaggataaacaggcacactcaagactctcctaacttctgattttgtccaaagttatcttttcttttaacatgaaaacgaggtatgtgttagactggggagttagcagatagctgggatggaagacagcacaaacattaaggccttgttcctgcctaggtccctttgcacacaaccttttgagttagaagaaggcaagatggcagtctcactgtcttttccttccatagataatgtcttgctgttggatggcactgacctagtggctagcagcacataagaaatagctgttattttttgagcaactactacggtccaggcaatgtatgtggccttcatttaatcctcatagcaaccctatggggtataggtattatcatctcaatttccagatgaggaagcaaaggcttagagtaacaaataagccactttttgtccatggcagtggaaccacagtgcccctactcttcattcctgaagaaaatgctatattttgactccagtattgattattttcctgtttttcttctagtgaaaagtagtttatcagttatgtcccataagcttaactctcgcttgttttctctttcattaaatggcaatttattggaggtagcgctgtataaacaggggacagtgtgtgtatctgtttgcctgaagataagaaaagggaaagggtacttctggaaagtgaattatttagcttaaaattgagcagtttccctaaaacatgagtcagcagcaggagggtatggatcagccagaccaggaaccacaggcttaattattagctaatggggagtcaagggaagaacagctacccacttcccccatcgcctcctcacaaccgtcttgtttgcccacagtcttattctccccatgctgtgatcctgtgagaggagcattagtgaaagagtgaagagacaaagtataaaatgtgtgagatcagcctacatctgcaccctgcttctgataaaagttaacctctctgagacctggctttcttgtccataaaatgggaaaaaatcatactaacagggttctaaggattaccataatgtggataaagctttgatccagcacaatgtcatcacatagaagaatgagttagtggcagcagttattaatgtgatgctagtctatgtgtcacaaatgatgttgcactgaggggtggagggatgggggacgggtgcagatgcaagaggagatagttttcagaggaatgtgtactcaggagggactactcgggctccatcaaccatcaggcttccacaggaaacttgggtcccaggcatctagagttctcctagggcccctggatttcttttacttctgaaagatgagaaatagctgttctgctgatgctgccaactcacggagagctgggaagctccataaacttcacaagctattgccgtaaattggaagagatagagggggacttctctttgttaggcgctgtagttgtgctttttcatttagtccttacagcagccccagcagaggttgtgcctcgcccatttcccccaggcattcgccattctgctgtatacccacagagtcctgttgcaagtacctgagactctgcctgaggacttctcttggtttgtgttggcacaagctgagagtaccagggagttagtgcccctgggacagctctcagccagtggaagtgggaggatagataccccagcttcctcactcagtgagggacaactctaaggcacattctacctatttctcagggttccctgtgggagtgaacctctctaagctcccagtaacaattaacgtacacttccttggcttctttctcttcctacctggcttccagctcctcttctgtattttcctgatcaggactgggactagggtgatgagcctttattcttgggttcatctaagtgcaaggttggcacccgtatgaacctgagagggtctctttacattctgtaccctaggcatatcatttgcattgccctgattctggccctgtcctggatcacttcccaaataaagttatttgcattcaaattaggtctgcctctgggtttacctaacctaaagcaaatcctatgaagacatcagtctccaagttttatacaaggaaaaccgaggctcagaggaataagaaatttgtctaaggtctttcagttggtaatgagatgggattttgaaaccaggtctgcctgaccccagagctgaagctttctgtactatagcacactacttcctacttctcatttcagtcacaaaactaatgactcaagggaaatttcaggtttggatgagctcatttttgcctgtgaatcagggtagctttggccttaggttgttagcagatgggaatttggggaggggaaggcaggtagtaagtggatgagagggttgtagttgtcagtggaaagatggactagtggaaagactgctgaaaccatatgcaccaggaagacagtaagagcttgcttgcttcctctcagtttcaaaagccctggactttttttttttttttttttttttttgagacagtcttgctctgtcacccaggctggagtacagtggcgtgatctcggctcactgcaacttaccctgcctcccaggttcgagcaattctcttgcctcagcctcccgagtagctgggattacaggtgcacaccaccacgcccggctaatttttttaatttttagtagagacggggtttcactgtattggccaggctgatcatgaattcctgacctcaagtgatccgtccacctcggcttcccaaagtgttgggattacaggcgtgagccatcatgcttggccagccgtggactattgagattgtgggagggctcttcaatttaacaaaaattaattgatacttgttccttgccagataaagaactgaggtctgaggctgcacgggtgaataagaaacattctctgggagcccatagtacaatggggaagaagaacacataaacagatgcctttaataaacagatataaatgcagtgatacaagaacatgcatcataatacggaaccaataagcagaccacactcagctggggtcggccaggaggagcttttcagagaagggctcctcattgtcgttgatgattataatttaagggatgaggaaaaatgaggtgaaaaggtgggagaggccaaagggagggtcattccagacaagtcagtgcaaacaaagacacaacagaagtagctcgatgtgtgtaggagagctgcaaggcacattcacggtataaagggtgtggaacaaattgggggagcttattgaggatctctgtgcctggcatgggcactgtgagtggtgagaagcctgtgagcaagcgcagagggaaggcctgacctcccagcccatcggcagtgctctggttgtgcccacctctcccccagcaaactgcctttcctcattccttagctccatctctacagttggagattggcactaaggggctatgagggaacctcgtgaggacttgtccttccctttgttggtcagtggccatctggtgtctgaagagaaccgctggcagctgcagtgcctctgctacagccaggctgtcccagctgctcacagacctcaagctcagccatccttctccctccactggccttgacccagactttccctggcattctgactagggaaccaggacccctgctcctggggtctggacacagaccttccagaaacgcagatgaagagccctggccatgcttgtcaggggcatatcctcaccctggctcaagaaatggcaggctatctgcatgaatcacagctgggcctttcatagtcagttccacattctcctctcccaactgaacaaagttgaaagggactgggatcccaggctaggcaggatgctgtgttgtttgtgacagccactctaccctctgccaccccatcccccacttccctgcctttcacagcctatatgcctggttggtacccagtaaacttcacagcaggactgatgtttggcatgtttcctggcctcttcatgccactactgatagaggagccactatctctggtctccatcctgatgtcatgtggaggcctactatctgtggatagagttactgctgacaaggcagcctgaagctttaaagtgtatccatgccttcaacaaagattgttgcaggctgtctagtattctacattggtgccccaaggttctgtgcctttgaggagaaattcccacagaaaaacagcttgttcgccaatagctccacagcagcctaacactccccttcttccagtagagaagacctaagatgtgaacctactctccctgcgcagcctacagactaaaggctagactccgcagtctgcctgtcacctcctctcccactatatattcctaccttggtgtaccctcttcaggcgcctggagctgcacctcattgctgtgtgtgtgtgatttgtggttgtgcacatgctctccactttgtcaaggaccacttttgtcagcatactgctgttctttcttcaagactcagcttcttcagctagccctgcccactctctgcagagtcagtcccttccgcttgtgctcccacattgcctcttgctcaaaagtacttaccataacctttccaggctaggcgcctccagctccttctaggggcgagccaccacctcagaactcactatatttgcaaaataaacagccctcagcattgtagagggaatggcccaaaatcttagacccagttcaacgctccacttcgcggtaatcatcttgctcaagttttcaccacagccttgcctagcctgggctactcttagggcaggcttggaaggaagtgcagcttcctgaattagctgatgtttggtaagtggtggtggaggaaaagggtggggcttgaggatattataactcgggtcacccctgagtgttgcttttggtcattggggtgcctcatattgccagacaagagctcagacctgaggagagtgactagcttctctgtgtcccaggtaagcacttcggtctaattactgcctgctccttccgcagctgtcttgtcctcatccctcctgtttggctcacaccaggggaagtggacactggaaagattaagccagctggttctctttctttgtttttgagatggggtctctctctctatcacccagactggagtacagtggcacagtcagggctcactccagccttgacctcctgggttcaagtgatcctcccacctcagcc

SEQ ID NO: 98223 - DNA, 80650 bp, Homo sapiens
  misc_feature (1)...(80650): n = A,T,C or G
caggtgagtgttggggtttgtgtgcagaggggacaggtccagatgttgccaggggtcctttgaaggggcttatttttagttctatctcctgtcttatccctcacaaagtaatcatttcttttatgatctggctctcattccaccccagcttacaactgggaggacatttgtatcttccccaacatgctgcaggttcccccggtgggtatcattgagccttacaaatagtagtcagtcataaatgctcaccctgtagattcttaataaaggataattctatattatttttcttttttctttcccttttttagagatagcatcttgttctgtcacccaggatagtgtgcagtggccttatcatatctcattgcagcctcaaactcctaggcttgaccagtcctccccactcagacttccaagtagctagaaaacaggcatatgccaccatgcctagatcatttagaaaaatgttttaatacacagggtctctctatgttgcccaagctggccttgaactcagggcctccagcaatcctcccccttcagcctcccaaaatgttgtgattacagatgtgagctacagcacccagccctgtattttgttttcaaatataaatgacaaaaaccgcaaatgggcttaaacagctcaaaagggaatgcgttggctgatctaactgaagaattcaggggtttcagcagcctcagaagcagctgaatctgagggcttgaacaatgaactaggattctgcaaccctctcttctccaggctctgctcctctccaccccagcttcaatctcaggcatgcccttttattgtggcagtgctgtcaagatcaggtcatttctttccagcttcaagtacagcaagaaaagaaattctttctctccttagttccaacaaaagtcccagaaatgagcctcaatggcctggcttgggtcatatgcccatctctgaaccaatcattgtgtttcagggaatagtggatgctgattggccgggcctgggcatttgttgtcttttggaattggagggggatagtccgacctgaatcttgtgtgctgatggtggggaggggtgatccttccaaggaaagacagaagctggatgctgagcagtgggcagatgtgaacacttggaccatagcacggaccataaagagccaatgtcttggccaggtgtggtggctcacgcctgtgatcccaacactttgggaggccgaggcaggcagatgacttgagcttaggagtttaagaccagcctgggcaacatggtgaaaccccttctctaccaaaaaaaaaaaaaaatgctgggcatggtgacaagggcctgtagttccagctacttgggagactgaggtgggatcacttgagcctgggaggcagaggttgcagtaagccaagacagtgccactgcactccagcctgggtgacagagccagacccaatctcaaaaagaaagaaagaaagaaagaaagaaagaaagaaagaaagaaagaaagaaagaaagaaagaaagaaggaaggaaggaaggaaggaaggaaggaaggaaggaaggaagaaggaaggaaggaaggaaggaaggaaggaaggaaggaaggaaggaaggaaggaaagaaggaaagaaagaaagaaagagagagagagaaaatccaatgtcttgcttaagggtctccaagagcatgtcctgcttgctgaactaatttcctgatcaattgggttatttgtctggtagattggagcaaacctggaagctcatgattctagggctctgctaagtctttccatttatttttgtgggtgcagcagtgagatgtgagctgaatgatggtgtggtcagaggcttcctgagtggacaaaggagcagctggtttattgccctagtgcaatatgcaagttgatctcgagttgggagcctctggaccctgtccttggtcctgcctgcagcaacctgtttagttaggacttggttgaaagtatatgtgacttcctaatgtcatctgggaatgacagaagcagaagaaaatagcaaataccctccctgacagcacccacatcctgagagggctccatatgggaaagagggattagatgtaatacgatggaaaataattgggatgaatttaagtgtctgcatttaattgcagaaaaccagcgacctaaagggtaggtgaggaacacccagttgttgatagtacctaggcaaagacctaggacaatgtccatcaaagtgtgatccgtcttcagaccactggcagcagcagaaacatcttgtaggttttacagggcacagtaaaagcagattcctagacccctccccagacatcctggatcaaaactaggataggcaggacatggaaatttatactccaagcaactcataggaacttcggtgcatgtccaagtcagtgatggcctcagcacagggtctgagctccccaggtccaggggatattagcagtgcgatatcactgaccaacagctgattaggactcctcttgtgtatcaggccatgatggcagaacacctgccaaccccttcaggagatgccttcaggaagcagcctcaccacggaacacctacagggtgtctgggtggcgagacaggggcccagagccctgctgccatgccagcatctgaagcagaactgtttgccctgaaaattcatgatagaccaagacttcatcttctgaagaaaaatttgcctgagtaacagaagcaaaggaggctggagctctcaggagtcctcttcccatctggccatcctaccttagggtctgagacaaaccctttcctggcagcccttcaccctggattcttaagaagagttccagtgagacacctactccccctctctacaagggcacccctcctccttctcctgacatgactctgagcatcacttggaagggaacagttcagctgaggcccgggtgactaaaaggaaccagccacgtgaagatctggggacagagtattctaggaagaaaggcaaatgggaaggcctggaggtgggatgagcttggatgctggagaaacaaagtgaggggttgaggggccttatggctagggcctaggcagagttgaagaggaaggcaggggccagattctgctgggaccacaggctgtgcaggcactcatgctactctccacatatttcagctctgccttccaggcacgaggtgggattatacttcctggccctcttgggtgggactgtggggccagttctggccaatggattgtgaccagacatgatccattgtgtctgggctgagcgattgatggctggtgggtgcacctctggaatggctgctgtcaggctgggtcctcaagtgagggtgacctcgagtcatagacccatgatggacaaatgagaaacaaacctttgttgatttaagtcactgagatttggggactatttgttacgacatcccctaatctatcctgactcttacatagaccattccattctggctgaagagagaggggcaagaagagaagtgaacaaagcagccaactgagcagaaaagacccttcctttcctgtatctcaaacctcatttcccaaattcaaatcccagagtagaaactgtagcaggagaaaagatgaggacacggacgttgaaaccaaacctcccaaggatgcatcttagctaaccctgcagtctattggataaggttggccctgagcaatcaggcacttcctctccctacgcctcagctactgcatctgcataatgggaataataatgtttctttaacaggactgcatgtgaggatcaagccaaattataaatgtatgcaaggacatagtggtgtccagcatacttttttttttttttttttgagacggagtcttgctttgtcgcccaggctggagtgcagtggcatgatcttggctcactgcaacgtccgcctcccaggttaaagcaattctccctggctcagcctcctgagtatctgggattacaggtgcccaccaccacatctggctgtgtgtgtgtgtgtgtgtgtgtgtgtatttttagtagagatggtgtttcgccatgttggccaggctggtctcaaacccctgacctcaagcgatccacccacctcagcctcccaaagtgctgggattacggtgtgacccaccacacccggccatccctttagacagagcatacactattataatgtcatcttataccccagccctcaatcctcttccttcatcctcagccaccagcctccagtgcccaatccccagtgggccccaagggcagatcctgccactgactcacctctcccacccacctctttcctgcagaggctgaagaggggtgttatggtgccaacaggagcagcctgggcacacactgctcctacacacacacacacacacacacacacacacacacacgagacatgtgagttgatcaggccctgacaccgtgtacattcaaactgccccgaaagcaaagttcccaaaccagaaggtggtgaacactttcccctgggctcacatgaagtctaaaaaattattttttactagttaaaaattttaaatcagaatatttcacatacgacggcttctgttgaaaatttggaagatgcggctatactgtgccccggtcccctcccccgacaaccagcacctggagcagaaaaggcagctgccccttgagatgggatccttgtgcctgtccccagcactgccctttgcctccctggcgatggagcccagcgtctgtatggttgcctctggagctttagctggtgttttttatagtagacttaagaggaaagcaaaacatttttcataacccttctctatcaaaagtgggaaacaaaagacagaccgagagagggcctcgtgtctcaagaaatataggagagctcatatctctttgtggaagcaagaccatcccttacatcgcctagcctgcagcgccaatttatattatcgaccggccccgtaggcgtttgagtttgcgaccctgccctcaccctgctcattcccctcccgacccagactaggaccctctctttttccgatcactccccccaggcacaccgcacgcggctgtcatttcctttctccttcaaggcagccctctgtttattttaacccgattagggaatgggggtggggcacaggagactccagcagcggtcactgctggaggctccaggagacgacgtgacttgaccaaggtcacagagctggaaggtgaagtcgcctggaccctacccccggtctccctagctgccaaagcccagctcgttcctttacacccacgtcgcgggcgccgtgcgctctcggggctcaaacaccgcgcgcccagtcgggtgcgctgcgcctgaaggttgttttccttcggcgaacggcgccgaggggttagggaaaccttgggtcatggtgtgaggcgcgcccctggaatccaccagcctgcgaggctgggactgcgggtgtccccgagtctggcctgccagctctggtggccagggcacctctgcgcgcgggccagggccccggggctctcccgcagtcccctaaccaagccgcgggctggcagcgtaccgcggcgcccggacgaccccggagcgcggccgcgaggaaagggcgggggagaggactgcagcggaacctgcccggggcacccctgccctgggcggctctccgcaggctggcgccgcgccggggtcgccgcagccccgggcccctcccgggccacctgtgcgcagactggcgggcccgcgagagcccggatccggagcaccgatccactccgggtttcagactcctgcccctgtccctggagaccccgcggggcggtgggaggcctccacgcccaccaccccaagcccctccctgggggagcctcaggcatcgcccagagggattcccggtgctgggggtggcccgcgcgcgctgcgcggggcggcccggcccctccttccttcccccgcccctcccagccgccgccccgctccgtcgctccagtccgggttttgcggcgcccaccggcccgctctccggctgcgggctccgcggcgcggctggctcggtgcgcggcgcggctggcgctgcgctccgccccggctgcattgctgcgctcccgtgcccaagggagccacgcgccgcgtgcgcccggcagccggccgcccggaggcagcgcagtccgctggcatgggccccgggggcgccccgagctggggctccgggctgaggcgctaaagccgccctcccgcccgcggggccccgcgcccggcccgcccgcctgcccgcccgcggccatggccgtccggcccggcctgtggccagcgctcctgggcatagtcctcgccgcttggctccgcggctcgggtgagtcacgccgcgcgcgctctggggaggcttgcgggggaccgtgcgcgcgaacgctcgctgctctgggggtccctgaccagcgctgccagacccggctgggagccccccgaggccaaactttgcgaggcgggacgcggggggctcttcttgctgctgcgcagcttccccgcgcgctctcccggaagcctgggttctgccaagtccagragcagctgtsagcccgcggggctggcgagtgtagacaccccacgcctccgggtgggggaagtttgctggttgcctgggcccggagcagggctgggggtttggatcaaccccagggagcctgactttgaggattcgaagattagagggttttgagcctatcccagtgcccaggaaatggggggtgcggggaacgtttaagatacctcttcccggtagcatctgccctaaacagccactcacaatctcccagcttggcacctggcctctgcccacgtccagaacacagtgtcctcctctgtccccgccacacacgctctcacacgcacacactcaggcgtggaggcgcatacaccagcccccagtccttgcagccagcacagtcaaagcgccgcggtcccggtggccggggctgtggctcctggcctccctggtgcggggggccagagttgtgtgtggttggtccgccagtttccccttcttccttaaactccatagcctttcttggcccctgcatgcyccattggtcaccctaacccactgctaactcagccctcagcccacctcattcccttgggagggggcttggggggaggaagttcccctgcatcctttgtctgctgtccctgagccttcacctaggctgagctgtgggggcctcctgatctctgccccccatgcacttagctgagttgagcgtatgtgtctgtggtggtggggggtgggtgccatttgtgtggtcaagggggcttgaggcttaccctggcaattctcgattcttgctgcccctagaacctgggcggttactccccagcctggccaggccgctgcttataacaggggtgttggaagggagcactggggtttctgagctgccaaaccagattgatcagagatcaatgagtgggagctcaggagccagcctgatgattgaggccgatggctgtttccttaaagggtgtctctgcgcagcgcatcctgcacccaccactgcctgaccgcccgccccatcctgcctcctcagtacccctctctactccatcccaccccttctatctcccttctccatcagcacccctcttcttccccagggcctctccttctaatcctgaccaagctgagaggctgaactgctgttgggtgtgtgtccgtgtccgccacatgtgtgtgttaggggcgtgtgtgcagctccgcagatgagcacccgggtgcaggttgcactgttgtccatgatgaggtggggatattagtgccccacacacaggtggggtgttgcctgacacccagtaggtaccctggaaatgttttctgagttgatgcttttgagggctgtgtggtcatagctgcatgtcgcccacgtgagcacgtgtgaaggctgtgggttgacatgtgtgcccgggtaaccaggggggttggcatggtgtgtgcagcattggcatgtstgtgccctgatgaacgtgtgtgatgaccagcatgccgcacgtgtgtgacggctgtgtgcagttgcacaggtgagcgtgtacagataagggggcacaggtaccggtgaagcagggtgctgcggcctggagcggggggttgccacagggactcctcaggaggctgtgggggtggggaaactgcatccctggttggcagggcatctgttgaggcctggcccaaggttgcccagggagtcggcaggtgggcacaggtgctgcaggggctgacgcagagcctgccccaaggcatcaactctrcccctgggcctgcgggaggagctgctgaaggccatggggtggggaggggctggccctacttctttgggactcccttccccctgtgccccacaggcactgggcacatgtggacgcccaggcaggctggccctgccgtgacccgggctcctcccgcgctgccttttgcctccgttgcaacagcctccggtgaaaaatgtgtctgtgagccgctgagggagggatggccagcgggcagcagggggcgccgggggccagcgcgactgactgcagccgcttgctccccaggccacgcgcccaccctctgttgctggacatcacacaaaagcctgtcccttcagcatgctcgcacctgcaggccctctctgtgcccgcgcacgcaagcacccatctgtctcacaggattttccctctcaaaccccgtcacgcagctggcatgcaaacccccaccctgcccctgtggtctccctgtcacccagacctctgcagtcttgagcaggagggacttgggagctggctcccttgaagatggggctgaggggtgccatgctctggcattgctgcattgcccaacctgaccccaaccatctagcctggctcctccttctcagaccccatccccatacttagggctaacctaggactcgtctgtccaccccgacacttgggagaatgcagctggctgagggggtcttaatcctccagggctaggagataccctgttcctgctcgccctgccttgcaggtggggtggcctgggctttggggcccctaggtcctcccaggggagagctggtcctcttgctgcctgcctgctccccacttgcctgtgttgggagggggggcttctctcaggaaccagggataggcattgatccaggtaccaagcccacaccagaagtcacggccctcgttcccaggagcagccaactttggcctcagccaagggccagagagcccctgtcctcacgacccttcttcctgcctagtgctgctctgggcccagacccgcaggctggagctccgaggcttcacaaggcaggagcctgccctgagcttggggtggggctcccctgctctagtgctgggcctagctgccacttgggaatctgtgtgtccacgcatatgcatgcggggcctcctgttctaggccacccctctcccaatgccccctcctcccaagggccctgccgtcccctcctcctattctcccagcctggggctggaagccttagcgtctcccttgcttctcccttctctctcacgcttcacatctaatatgtcaccaagtcctccagctcgggcctacttgtggcattgctcatgtctctcgacttctttgtcttcctccactcctttctccctcacctgcagcagccaccaccacccatccccctcgggcctcctccactcagactaaggcatcccctggcatccaggctggaaatctgctagaaagctttcggtgactcccagtgcctgcaggtcaacccaaaccttgagcccccttgggcccttaggaaaataccttcctccctcgtcatcgccccacatcagctctgggctggtctatctggaggtcgggtgccctccctggctctgactgctggtggggtgggcacccccaggcaagctccggcttccagactgtagctcctttgccttgcaaagcgtggtgccactgaccccgccagcatgctccccacccaacaccccaacgttggctctgtccagacctgggacacacccctttgctgctgccaatccctgcactgtgaaacccgcagcttcagtccagcccctcccaaaggcctcccacctcctcccctgcaaaggggtcctggcatactgatgtgctttgggtgggctaaagaaagactgaggtattgagtcctcagccctggggctgccagaagcctctgacctgagcctcctccttctcctccagtgcctccctcaggtattgccattgtttatggcgcggtgaccctgttctctggcccaacttgctctgagtcactgccagccaggtgctgtttttcttcatttctccattttgagtttgggctctctttgcaggcagggagggctgctattgctggggwcagggagagatgtttgctctgcccctctcagcaaccatcccatccctgtccytgaacacggactgccatgctccagggaagctggaaacggcctcctgtccagggtggggaccaggaaaactaggccccatcctggggtggaggatgctgtgccccagccacgtgtatggacagcaaaccagctcacattggtgcatgcttgtgggccactcacgcaagttgtatgcccatgtctgttgagtaggaacccccatccccaccctggcatggattttcccagagtgaatgttttcttgagcaaatggtgtcattcacagagtcacgtcaagacgtgggctgctctgcacagctcctacgtggggtgggactcctggttcctgaggctgagccccagggcccaaccacgctcagacaggagctcagcttcctgcaatcagttccaccagcccaccccttygttccttgtctgctcctgtgggagtggcattgaagggtcctcctgccttctggggagtctcaccccgtattcttgccaggtgaagcagaaaggacaggmtaagctttggaggcagtcagggtcaacttccaacccaagcctcgtgtccttggacaagcaacttgcagtccccagcctgtttccacattgatagaatgggtcatgcttgctttctggggttatagtaacagattgatgggcaatgtggagagggcactcagggtgaaccccgacacytagtaggtgccatagcttgtctgtctccttcctctgtgttccttcgcatttgtggggggatggcatgagttaggacagaggtggggacttaagccgcatcagggcccgagcccagacacaggagaaaaatgcatctcagtgtgagctgcttcatttcccactgacccaggcccaggcaggggccccttctggttggaagaagcatcccccctcccccgccattgacacatacaccacccactgcagggacttgggcctgattcagactcattgcttccaatgcacaaggggcarttgtttggaggttctgaagatgaagatttgggctcagcttttcatgcaactgtgtgttgatgatcatctctgactctcaggacatggcacagagtggggcaggagccctgagcagaacgaaattctagtcctctctctgctatttgattgctgtgtgatcttttagacaaatcatttaacctctctgggctgtttgcctctctgtatactaaagggtgtagtatacccaatgatgcctatattggagcctggggtggactctgcactcagcagcaggctcccccaggaactgctcacacctgcccagcacctgccacagacatcagctgccctggcaggggctgcctgcatcgctggagagccaggtggctgctggggcagagccaaaagtggttgggaggcagaactggggactgagtcccaacccctaggccaggaattgagggcccacttctgctggcaaataactcctatgtcagaaacaggccttctcagggcgtccagaaggtcagggtcccagtgcccaaggcccacccccttcctgggcactgatgtcagktgcgacaggcagcttcagaccccaggggcccagaaccccaggcacatggaggaggtagtgaaatgggtgagttggcaagctctgtggctgggtttggaccagtactagggtgaggccaggcaggtgcctaggcacaaaggtagggccagcccccaagagtgcacgcctcctggccctgcatccagctcctccctgcatggcttcagtttccttgtctgtacaactgactcaaaaagaacccacctcctaggattttgtgcagattagacgggctgaagtgtgtcagtgctggcacatagtgggcactcaatacacgttagcaatgatgatgccatggcagagggcactgttcagtcctctccttcgggaagtgggggagtccttggctgtctttgtggaagacggagcgactggggagccaggagggagggaaaaggcctgaggtgagcttcccattctgggctggggacaggcctggcttcctttctgtttcttgtcatgcaagggcaggtggtccttgactggccctcccagccctgtttgaagtgggagagggggagccacacagagctctgggaagtctgagtggcagctgctcagccccagagtaactggggaaggggaagttttaggtagcattttgatgggggaggggccatgaggcccctgcttctgtgctgtggtgggagcgccaagggccagccgtcaccctgactggtggggcccccagagccgggcctctcccacactgggatatcagagctgtgtccgtctggaaggctcagggtcaccttgagctccaggcaaatatgtagctgagatggggagggggtggggggaaggccgggggaatctgtctagattgacagcacctgaagcgccttggggagggaggtccggaccctgcatcccacctcggccctaggtgtccccagccagggcggcaggtggaactcccgcgccccaggccagcaggtccactggagaggctgtgggggtctacgggagtactccctgaattagactctacccctcctaatcggggcagggacccagtggagccgaggggccagtggtttttcccagctctgcatctttccagcaccgccccccaccccgcccctccccacccccgcccaaacaaatgtgcccgtcactggcgggtagcagcccctcctcagcgcgtgtctctggcttcgccagtccccgccccgctgtctaggtagcttggtacgcgagggcccttaggccggcggatctgcggggcacgtgagctgccgtggagcgcgggtgcccgagcccacggcagccggggcagaggggcttcgccattcgccgcggcgcccgtcgggcggggctgcgggaggctcgcgcccggggacgtccaggccgggggtgggtgccgcggggcagccgggcgcggggtaattaacgcgctgcaaactccggckgccaagccgggaaggggcgggatgcctccgcccgccagcccgcccgcggccgcccgccggattagcggctctttgttcggggcctgttaacaagttcctggctgagcgctcggctgccgccccgggagcgggcgtccagcctccgggcaccgccgcgcggccgcctccgccccgcctccgtgctgtagcccagctgcagcccctgcccctgcccgcccttcccgggccccctgagaagtgggtgggcgcagggcttctcaggcgatcttgtgcctggggcttccgaagaccccgggctgatctcgctgcgaaagggaggggaacgtccccataacccgagcacctcctgcaggccggggcttccgatgcacccgtgtcgccattcccgttttacagatgaggccgagcaccgacttgccccaggtcccggctgtcctctgcaggctggggctccactccagcccctgacacccaaattcattctccttctgctaagaggagagaccgtgtggcgggaagaggaggagcccctgggggctatagactgttacgttttttattctttattaacttggtgatggtagtaatctgggctccgcctacatcatctgatcaaaacctcaggacaacctacaggtgggtgaggttagccccatgcgtcagatgaggacacatatcaggggaggtcacaccgcaggaagtggcagagctgggaccttattgggcagctactactctgcccgatctcccccaccacacaccacacccaccttgtgggctctcctatgtggctatttactgccagggcctctctggtatcctatggacttgatgggagaatgtccagagaccctgattctctgtgtggcctcaagtgaactccctcacagcctgaagcccattccccatccccatgctgcctcctgaccccacctagtgtgcttccagcctgagaatggctgtccaggccaccagacgttgattattaacttcctcttgtggtgttggctttcctcacccgtagccctgagctttaagccaaagggacttgcccgggccacacttcttcaggcgactgggactgttcaaaaccactttcttataatgaaggggactctttcccagtaagctccccaaatggttctgggcccttccttctggggccgcacaggttgggggagcccctttcagttggttaagacagggctcccacctggccacacctgcccctttcctggccagccctccccagccctctcagctgctcctcatgagcattgccccaagcctgaatcccaaccccccacatctttgttacctgtctgtgggtggtggcccaattgtcacagcctcctcagccctgggagctcaccacactgtgccacaatgccccagcttgaagtgacatgggacactaagtgtatctgttgcaaatattagaacccaactcacactggcttaaggaaaaaaaaggaaaacgaagaagaaggagaccataatggcacatggaactgaactcaggggtggctgtggcttcaggcatggttgtatccagggagaacagtatggccaagatccttccctcatctctgctcttggggattcggcaccactctccaacagcctcttccctctatcccaaggtggctgccaggagcttccgggactacatccttacaggtccaggcccaggctccgcacgggataggggagaagagcacatctctgccctccaccacccaacaaatgtccaagtcttccatcattggtccacctccagtgccctgcccagttgtgtgagccaatcaccatagacaagggtaggattatgcagattaggttgggccggagccaccaaggccattgtcctgttgttacccaggctatttgctactcctctcagcttcttgtccaccaagaagggtgggcacaatcatcctcagatgtcatcagcacattttgccaggtattaaataagcatgctgaatagcaccaggcacagcctgtggctcagaagtaaagcgggatctggatcaacactattttattggcagcattagaaaacacagctggccaggccgggcgcggtggctcacgcctataatcccagcactttgggaggccgaggcgggcggatcacgaggtcaggagatcgagaccatcctggctaacacggtgaaacctcgtctctactaaaaatacaaaatgttgggccgggcacggtggctcatgcctgtaatcccagcattttgggaggccgaggcgggtggatcacgaggtcaggaaatcgagaccatcctggctaacatggtgaaaccacgtctctactaaaaatacaaaaaattagccaggcgtggtggcgggcacctgtagtcccagctacttgggaggctgaggcaggagaatggcatgaacctgggaggtggagcttgcagtgagccaagattgcaccactgtactccagcctgggtgagagagtgagactccgtctcaaaaaaaaaagaaaagaaagaaagaaaaaaatagaaaacaaggctggccattcagcaggttttgcctgcccttcattgtgctgtcatctgctcatatatctgcatttggccatctaagatatgttatccggtgcctggctggaatccagacacgccatgtttctagtccatccttaatctaccgtgggacagtaaccccataataagggaagctggtctggcgtgactggtccatggggatcccagcaggcctctcacggtccctccttcctttggtcatctgcagctgattgagaagctcttctagaaccgtgcctggagtttgcataaggctcattgggctgtggcacctccagtggatgtttgttaggttttgtatctggtccagctttcatcccagtcttagtggggtattttggggggcccttcatcccagcagcagggcccaggtgagctaggtaagtatttctcttgacctggttcttttcyagctgcagagcctgctctttaagcttctgttccttctctcaacaacccagtcttccgccagtgcttcttctttcctaaatttgtgagaattgtttttttcttgyttgccttcaaagaaccctaagtgatacattcaccaaaccaaacttkcttccttatgatgactagactacagctcctgccccacagccaccrgcatgccactttctcagatgtcagcagcagggctcagctcttctgggctccttcctccaagccccgcccctgccctgtgtttctctggcattgcccacaagcctcacgccgctgcacctgtgctctgcttccgagcgtggttcctccatccatgcctctcacctgtggcttgtccttggtttcgggccatctttctatgttgggcatgtctggtcagagtctgagcctgcctacctggatatcttgtagttgccctggcacttttctagggaccttccttctccagttcctttaggatcacacaaccagaggtccatttttgagacccacttggtctcaagacctctttcctttcagacccctggctccactggaggcccgtctttggtgtgaattcctgaagtccaccacccaaatgccaggacgccttgagagtggtcagcattctgcctcctcccacaacagtgtggtgtcctgtcgaatggttaacagttggctcttcaggcaggctggggaactaatttgccaatttccatggtgtaaatactcccaccacagcctatatcaagctaccaatgtgatgtcaactggcttaaaaattctagaaattgtagtgattggctgtcctgagccaggacgagctggcygcatacaccactgctcctgaccaaggtcactcccagccccctctgaagtgaccgcaggcagggagtggacaaaggcatctcaggccttcccctgcaggacytattgacttcccaggctgagaggggcagcttacctcctggacaccagactctggttaggccttcccctgcaggactaattgacttcccaggctggaagggacagcttccctcctggactttagactctggtaggtcgaaaggtagagagtcagctaggacctgggaggactgtgcttaagagccagggctctgatgtggattagaatcctgaactgggtgaacttgggcaggttatttaagctctctgtgcctcagtttgctcacctggaaaatgcagacaatgaaaggttcctacctcatagggctgcaaggattaaacgagtcattctgtgtggtgcatgcagcctgatgccggctcacagtaaatgctctgcaggtgcgagctgtgtggcccgcggggcgggggatgctcacttttggcccccctctgtgacacgccctggaagtatttgtgtggaggggtgtgcggagcaggatctgcggttgataaaactggcagcagcaggtatcaagggcagggcctgcaggcctggaatctgagcaggatcttcgattgatgaaactagcagcagtgggcgtcaagggcagggcctgcaggcctggaatcttgggaaggtgttcattcttggataatgagcattcatgagggggcctgagaaggaaggttggcgtggtgaagggtgagtcaccagagtgacttggctgagtaggactcctgacacctgagagcccgggtgtgtctccaggacatgcagagcagagaggtggcagaggccacagccacatttgagagcccagacaggcccaacaaggacagcccacctgctggcctcaggccaacctgtgacttcagagctggtccctgggcaccccctgcctctgccccagagttctgggaaccctgaggccagaacaggagagggactcaggctgggaccttggcatgtggtgggatttggccagacaatgaggggaggagaaggagtggacaggcaatcccagtggcagcctgtgtacagggcagccgggaggcgtgcagccccgctggagcagacggtgcctgtggggtgccagcaagcgacagggctgtgaccacatctctgagctggggagtgacaggcagtgagcagtgtttaaggaagattaatctggcagcccatggaggatggatrggagcagggagaggctggaggcaaggagaccagccgggaggctgccgtggtcatccaggcaagaaatgacgaggcgtccctccctgatggcgggcagacagcagggatggagtaagagagatggatgtgggagaygctgcaaagggggagatgttgcatctggatgctgcatgtgggggggcgagggagggggaggaggcaaacatgattcagagctctggagcctggggaagtgatgtcagaaacagaaaatagatggggagctgggttgggggagaagctgaaagagcaagaggctccgcccagggagctccaccctgccaggctatgtgcagagtgtggacagggcgcctgggtcacaagcaacagaaactggctctggtcacgtgaagccaagggagcggaacagcgtttccgggtcaggcaggcactgggggcgaagggcagacttaaagccagccgtggcccaggagagacgtccaacaggtcctggtggtgctggggccatccggtttcctttagggcactgaaagccgtccgggaaaggtggatttacttggttctgtgaagccctacggggtaggtcggtatcagcagggagagacacagggaggctgagggagaccctcccagcaagcagaggctcggaggtctgggcacgatgagagcctccacaggggggctctatgggacagtcagggagaccctggacaggggcaggtggcctcggtgagtctcggtgggaaaagggaaaggacggctggatactgacttggactcctctcagctccaccctatttggtcttgagaagtttcttaccctttgagaactgrgctttctggacggatggctccatctcgagggggttggtagtttctctgccgcccattgttttaactgctgaaatactttctcagggcacagcacctccaccctcctttggcgacctcccgccatggggccctggtgggactgtcagttaygagaacccagcctctccctggagaaagcacctgtcccagctggcgaatggtcccggagatcctgggcacatgattgggccaggctggccacatggcctgggttgagccagtcaggatccttgccagggcttctcccgcctggaggcggaggtgcggccccgatgcctcccgggttggaggcagcaatgatgcaggttccgacactggcccaggactatttcccccatgtgtggaaagcggccgtggggctgaggcgggtgaggccagcgcacagggagatcagggacaagcggagggaggaggctgtcccagtggccccgaggccctgaggctctggtccctgcagcttttctcagtcmtgtgagctgctgttaacagccttcctggccctagatccacaaacttcccgctttaacgcccgtgtgagttgggtttctgtgtcctgcacctgaaaggggcctgaccgaggatcttaggagaaagatgatgatgtgagcaaagcgcccacccagaggtagcaaggtggcagcaggcagggcatttagcccccacgcggcagatagaacattctaaaaaaaaaagagagaaagagagagaattcacataaaaatccaaatgtcaggcttctcttgaaaaagcaaaagatctgggctgggcccagcaagcccattttcctgggtggctggggctggaacctggatgccactttggcagatgaacaccccctactgctaggtgcctccatgcccatgcacccccagtgcctgtgcactccctgccctgtgcacccccaccacctgtgtgccccctgctctgtgtaccccctaccttgtgtactctctgtcccaggcactctcaccactccgtatcccccaccccatgcacccccagtgcctgcgcactgccctctctttgccactcacccccgctcccgtgcacaccaaggctgcgtctccccaccctgtgcacagtgcttggtgggtgtcaggtactgaggccatgggcagggccatccctctccttccctccctcccagctcttggagtctgcatttggggccttagatttcgcctgttcagtttgaagtggtggaggatagtcaggtggaaacatctaaaagrtaattggaaactgggagtggcactttcagatgcaataagggtgggaagtggagttgagagaccctttcataaggagctgatcaccgacatgcatgagctcgaatcccattcaaagaggatgattagggaatggccatggctggggtggaaaggaggattcaggggacaattttgaggaagccaaaagggggcccgggagagagcagtaggggcccaggagtgtgtgtaaggttttgagcaggaggggaggcagccttgaggaaggctttggcgaaggacccgccgatgaggcctggaggacacgctgggaggaggcagggagagcggccggaggacgctgtgctcagaagcagcaggagtgaactgggacagtgtgaacagtgtagacagacaggacacagaggccatttggaatctgcaaagcatggaaggataccaggtagaaaaggcacaggatgcagtgaaggtttcagggagaaacttgggaaaggggggcgagggcaggacaagcatacttgctgagcactggcgatgtacttgcacgaaagctctcgatgggtagctcagaggtgagtgacgtgcccacatcccacagctaccatggcagagctaggtgccagccccagctccatggcagcaaaatgggcagaaggtccagagcctcataaagcttttaagagaagcagaggggatgggctgagggacaaagctaggtgacaatggcacctgagccattaaataaacatttattgagcacctgctggcgccaggcccggcgtcaggtgccacagatgagcatgagggccgtgtgaccatgagggagctggaagcaggggcatgctgggtagccagtgagacaggacagtcctggaagaggtgacacttgaactgagacctgaatgacagaaggagcaggctgcgggtgcagcaaagggcctactctggtctggtcacagggaatgtggagctgggtgaggagaggtgtgatgacttgtgtctgtgttcatttatacatgcatagaagccacctctgcttccagagacgcacagcaggaggggctgagggcacatttgctagggttagctggtcggagggggcctggctcccagacctgctctgctgctacagcacaagcccaggccagatacactcttctgccccatctatgaaatgggawgaatgactgggcctgggctatcatggagcggatcctgaggcctgggacaggggcaagggtagaagccatgggagggcgcagggagcaggccaggcaggctacttccacccttcgcaggcctcagcaaccccaggatcaaacagtaactgrtaaaatgagcttagtccaaccgatgaagttggactttgatgcatatatattttttctttccatttttttaattcttctttgccattttttaatcaaggtgaaattcacgtaacataaaattaaccgttttaagtgcacaattcattggcattgagtacattcacaatgttatgcgaccatcacttctatctagtttccaaactttttttttttttttttttttttgagacagtcttgctctgttgcccaggctggagtgcagtggcacgatctcggctctctgcaagctccatctcccgggttcacgccattctcctgcctcagcctcccgagtagctgggactacaggcgcccgccaccatgcccagctattttttgtatttttggtagagacgggatttcactgtgtttgccaggatggtctctatctcctgacctcgtgatctgcccgtctcggcctcccaaagtgctgggaatacaggcgtgagccaccgcgcccggcccaaacattttcatcagaacaaaggagaccccattaagcagtcactccccattctccccttgccccagcccctggcaaacagcaacttgctttctgtctctacggacttgtctattatgatatttcatgtaaatggaatcatgtaatttgtggtcctctgtgcctggcctctttcgcttagcataatgtgctccaggttcatccgtgttgtagcatgaaagcatgcatcactgcttcattcctttttttttttttttttttttgagacagagccttactctgtcgcccaggctggagtgcagtggcacaatattggctcactgcaacctccgcctcccaggttcaagcgattctcctgcctcagcctcccgagtagctgggattacaggcatgcaccaccacgcccagccaatttttgtatttttagtagggacggggtttcaccatgttggccaggctgatctcaaactcttgacctcaaataatccacccacctcggcctcccaaagtgctgggattacaggtgtgagccaccatgcccagccttcattcctttttgtggttaaataatatttcattgtatggatggaccacatttggtttatccattcacccattggtagacatttgggtcgtttctaccttttggcgactgaataagctgttttgaacatttgggtacaagtatctgtttaaagacctgttttcagttctgttgggcatacacctaggagtggaattgctgggtcatacggtaactatgttgaacttcctgaggaactgccaaactattttccttaacaactgcaccattttacattctcactagcaataacgagggttccagyttctccatgtcctgattcttatatttgaagtgttaaattcttgcaaacatttttctcatgtcttggtgctcctgctttgctggtgcctgaatctgtgcgtggccaccaggttagcctggtgtaggtctcgtggttcaagattggcaacagaggaccggagaggagaccaagcagctgggagcccccagaggtgcagctagctgtagggtcagagcgrgtctgggcctctctcagccctctcggaccctgtggaccctgtttccctctgcaagcccccttttgtcctccttccccctcctccacacccacccccagccaggagctgccctctctgcccctctgtgctgccgttttgtgtgtgtgtctygtcaccaggataaatgcggctacaaacaatgcggcaggctgggtgctaatttgtcagacgcagtgcgcggctgtgattccgaatacattaacattttcacatgaaatcatttcaatttttagtgattaagaggtatttgttttaaagcatcagggtgatttgctgcagacctggggggcagtgggggtgagggagccccgagtgtgatgtcactcatggcatcagtgtggggagtcaccactccacacccacctgtgcccaccctgcgcttcctgggcatggggctggaggtggcaggaccagggagtaggaatcaggggacccaagagtcccttgagggcacggaggcccagaagcctcagcccccccatcttcccctggcttccctgggttgtttggcctcactcaaatatcgcctcctcagcgaggttccccctgggcctccaacctcaagtagcagcctgtcactctctgctttagcttcttcatggcrtttatccacaytggagatgactttcttgacttacttacttgtttatgttctgtaccacccccagttaaaacacacgcttcttgagggcagggactatggcctgctcatgctcactgctcgttcatggatggatggatgggtgattggatggctgggtggatgggtggatgggtggatgggtggaggtatgaaagatggatgggggctgggcgcggtggctcatgcctgtaattccagcactttgggaggccgaggtgggcggaccacaaggtcaagagttcgagaccagcctgaccaacatggtaaaaccccatctctactaaaaatacaaaaattagacaggtgtggtggtgcgcctgtaattccagccactcaggaggctgaggcaggagaatcaattgaactgaacctgggaggctgacattgcagtgagcagagatcgcgctgctgcactccagcctgggcaacagagcgagactccatctcaaaaaaaaaaaaaaaagaaagaaagatggatggatggatggatggatggatggatgggtggatgtatgaaagatggatggatggatggatgggtggatggatgggtggctggatggatggatggatggataaagtgggtggatgggtggatggtgatggatgtatgaaatatggatggatggatggatggatggatggatggatggatggataaagtgggtggatgggtggatggatgggtggatgtatgaaagatgaatggatggatggatggatggatggatggataaagtgggtggatggttgggtgggtgggtggatggttgggtgggtggatggatggataaagtgggtggatgggtggatggatgggtggttggatggatgggtggacgtatgaaagatggatggatggatggatggataaagtaggtggatggatgggtgggtggatgggtgggaggtggatggatgggtagatagacaagtagatatatggatggatggatcaatgggagggaaggtggatgattgttcacggggcacagaagactcccttgccatattgggcatcctatcatccctgaatcagtccctcaagtccccaggcaggccaccttgggtgtgccaggcttctctacacctgggaagtacaagttcattaccacggggctggttcattaccacaggcctccaaccctctcacttccacatcactgctccttttttttttttttttttttttttttgagatggaatcttgttctgtctcccacactggagtacagtggcgtgatctcggctcactgcaacctccacctctctggttcaagcaattctcccaccttggcctcccgagtagctgggattaaaggggtgtgccaccatgcccagctaatttttgtatttttaatagagatggggttttgccatgttggacaggctagtcacaaaacttttactctttaaagcctgtccctgtcaccttcctctctgggtgccatgagaaccgctctaaggggctccctaggccttcagacagaccacctccgccaggtctcagctgttgccagtcgtcttggctggggaccctctactcccttcccaggagctcccaagcagggtggccctctccagagcagctcacagtgcgctaaagcctgggctggaggatgtgcctccatggggcatgggtgcggtgtgcgcctgcttgtatgctggcatgtgtgtgtgtgttgtgcgtgtgtgtgctggtgtgtgtgtgccagtgcgtgtgtgtgctgctgtgtgctggcatgtgtgtgtgtgttgtgcgtgtgtgtgtgctggtgtgtgtgtgccggcgtatgtgtgtgctgctgtgtgctggcatgtgtgtgtgtgggtgttggtgtgtgtgcatgtgcatgtgtcctggtgtgtgtgtgtgtgcgygcgtgctggtgtgtgcatgctggtgtgtgtgtgcgctggcgtgtgtgtgtgtgtgctggcgtgtgcattcgtgtgtgtgtgctggtgtgtgtgggagtgtgtgctggcatgtgtgtgcactggcgcgtgtgtgtgctggcatgtrtgtgtgggtgtgggtgtgctggtgtgtgtgcgctggcgtgtgtgtaggtgtgtgtgtactggcgtgtgtgtgctggcatgtgtgtgtgcgtgtgtgtgcgctggcatgtatgtgctggcatgtgtgtgtgctggcgtgtgtgtgtgcrctggtgtgtgtgtgggtgtatgtgctggcgtgtatgtgccggcgtgtgtgtgggtgtgtgtgtgctggcctgtgtgtatgtgccggcgtgtgtgtgtgctggtgtgtgtgtgtgtgagatgggaggtgatcaggcctttgcccagttcctgcagcctcgctctgtggtggccacacagaagcccgttcctcatccttctgttgccccaccccccacctccgtgcctcgggtcaaacccctccctcacctaccccagtgaaaggaaaataactagaagcttttatcgttctgcagaagcaacatcagaaaacaattattgttttaattacctgctgtcgccatacaagacagggaggttgtaaagtgtgataaaatctttcatgttaatggactgccagcccgggccagggctcgatttatggggctgcagctggtaactccaggcagctgtatggaacccccagggcccctctccctgtccctggggccagggctccaatgccagggacctggcaccccttttgttcrtcacattttacccaacacagcggggatactggccttctctgcgcaggaatgctcaaggccagcacgcatccaggtgtgacctgggggctccattccttaggaaggcaagccttgggctggcccctctttctgccccatggaaggggcctagccgtgggctgggctggttttccctgacaggccctctcgccaccactcggctctgctgtgcaccaccttggaccctcctgcagtgcccagagcggggcttccccataagcacagtgacctcacacctgtctcctcgtctcctgcccacctccacctcccagagctgacccctggccrctgcttcctgactgaagtcctcatctgtctgctctcaacccacccatccccactgctgtacccaccatcttcccaaagcccactcaagctggtccctcctcaggtaccaaccttattttctcctaagcactttcactttcacacactttctctctcttttttttttttttttttttgagacagagtctcactctgttgcccaggctggagtgctgtggtgcaatctcggctctctgcaacctccacctacctggctcaagtgattctcatgcctcatcctcccgagtagctgggactacaggtgcctgcaaccacgcctggctaatttttgtatttttattagagacggggtttcaccatgtcggccaggctggtctcgaactcctgacttcaggtgatccacccggctcagcctcccaaagtgctgggattgcaggcgtgcgccaccatgcctggcctcacactttctcactgaagcctcaatgcagagtttggaggaggtgccgttattatgctcccgttttagagatgcagtaaatgagctgtggagaagtcaggtgtttggctggcagtctgatttcacagggctggagtgaggacttaatggggtgacagttgtgaaatgcttaggacaatggcaggagcaaagtccacgcctgatccaagctagctctcgtagtaattctttttgcttctattgctgttcaccctggagcaagtcacttatctgcttgaatcatgcctcactttccacatctgaaggatggggacagcagtcacctagcctctaggatgagaggatcagagaaggccctgtgtggtgtgtggtgagaacacaggacccctcagctgccgctgctgctatgaccatgtaatggtggaggaagctcaggttgggaagctaagttgggtccaccttatacaaggcccttcatggcacaccaaggggtgttgagccattctagggatggtagggagctgctgaagattttcaatcaggaaagcagtggactcagatctgagttttagaaggatggcagtggcaagctgaagctggttgggcaagagggagccgttggtactcgagtgatctccaaatgaggactccagatgatctccagatgagtcctccaaatgaggactgacgaggccatgacaggcagaggtggaggcagggacagaactggatggccagggcttggtcagcccttgggcagaggaggaacgaaaggaggctcatgccttcttaaatcctccattccctccccagtgccacacacaggactggcacgtgtggtagccactctcaaacccaggatgcaggtagctggccaaggtcaggaaacagcaagaccctctcaggccgaggccaagttggagttgagaggaacccaactcagaatctttttttccttccaacttttactttaggttcaaggtggtgcgtgtgcaggattgttacatgggtgcattgtgtgtgctggggtttggcatacaagtgatttagtcgcctaggtagtgaggacagtgcctgatgggtagtttttccgtcctcaccctcctcccaccctccaccctcaagtaagycctgtgtctgttgtttccctctgtgtgtccatgtgtactcaatatttagctcccacttaagtgagaacatggttttctcttccggcattaattcacttaggataatggcctccggctgcatccatgtggagcaaaggacatgatttcattcttttttatggctgtgtagtattccatggtatatatgtaccacatgttctttatccagtccacgccagcccacaatctttaggccatggcctgggactcaggtggggcctccctaggcacctgcaggaccccagcttcctctccctgacaggttcaagcatagcccatgagtctctgccctttgtggctgcactcattagctcagtcacacagcctctttttttatcttttttctttcttttttttttttttgagacggagtcttgctctgtcgccaggctggagtgcagtggtgcggtctccgctcactgcaagctccacctcctgggttcgcgccattttcctgcctcagcctcccgagtagctgggactacaggcgcccgccactacgcccagctcatttttgtattagtagagacggggtttcaccatgttagccagsatgatctcaaactcctgacttcatgatctgcccgcctcggcctcccaaagtgctgggattacaggtgtgagccaccgcacccggcccagtcacacagcctcttattctctcattcatcaacttaggtcttcagtaaatgtttgtggagtgccgcatctgtgctgggctctaagctggcactggggaggtggagcaccgcggagctgtgtgtgtgacctccaggagctgatactccagtggaggggatgcagtgcaccagtgaaccaatgaagaaattaaataattacacactgccgggagtatggaagagaacaaaggagctgagacagggccccctgcccgtccctgtcctgtctgcacaggagaagtggctcccagttccccagccctaccgagatgcatggttggcattagccgcccagctggaccgatctgtctccctgtcttcccgggattacttcccccattttggccatcacttctgaactctaatttattccccagggcccaggaggggccattcatttaaagagttttctatggagcattctcctgtgaggaccctaaggggaagaaaaatgccaggaaaggacgaaaaagagaataagagggatctggtttcagaactcccaggcagcaggacagatgtggaaggagcagggctctgtttgccgagagacatatttacctagtggcacaagtgccctcctacctccctctactctctgcaggttcccacgtcccgtcttctctctctctctctctctctctctctctctctctctctctctctctctctgtctctctgtctctctctccctcctctccctctccctctccctctctctctccctttccctgggtcgctgcaggagtctgagcctgccccacctcccagggagaagctgtctcctggtgctaggagatggtgtccctgattacaactcaatctgccactgtccctctcccttccctcccagttcttagaggagcaacgtgtgcactgtcggctcctgcagggaccagcctcactcttcttatccccatagctgggccagaggagctggcaggctgggcccatcctgtgccaggtggctgtgggagacacatgcctgagtgcagccacaagctccatgaaagcattcagaaactcctggcactgtgggcaacccctgcactctgcaggcagcgaggccagggagagaggtggcctcagggtggcttcttaaagtgccatgtgttctcacatcccatcagcctgggaatggggcctccggccaggggctggcttgtacacctggaggtgaacattggcactggtgtgactgaggagatatatgcccatgggtgaaggtgaccttcctgcaggctcggaaagcaggccctgggggctcagggccacctgccaggcctgcctctgtctaagtctgaacagaggccgcttgcccagtccagtgtgtgtgtctcccaggaaggttcccagagggggcctgcctgtggctgggagaaatccccatcccrgattctgtaaccatcctgtccaaatttcaggaaattccctgattccttcccaacagttccagatgctccagagcctccgactcatcgctccctgtgctggcattttcctgcctggctccggccccttcccgcctgtcaaacacatgaaaccaatgggcccttcaaagggtagctccaaatccctccccagcgtgcaggtgtgccagtgaggaagaagtgtgggcgtgggtgtgaactcttgtgcacctgagcatgagtgtagaggtaccagcatctgtgcaaatggatgcctttgataaaggatgtgtgtgtgtgtgtgtgtgtrtgtgtgtgtgtgtgtcctgaaatgatgtgcacatcctaagtattctggggtgtaggtctcctgtctaagtgtcttaacagattcatctggaatttgaagcaactgttttctcattgataaggagctgacaaagaaatgaaacaaaaggcctggatgaataaacagtcttctggatagagaagtggaagatgtgagctcaggcaagaattggagctaatcttttttaacatttaaataaaagatctggaagaggatgtgtatagtgaaatcaccaagtttgcagttaaatcgaaactctcctgggtggtagtaaaatgccagactggtgagggatgagctttaggaagatcttatctagaaaggcagtgagctggacagagaatggccagcaggctttagtytggggagaatgatatggacgaagtctgggggaaggcagctttcctaaggcagggcccaggagggcaacagcaggctggacatgatgcgaaggggagattgcagcaagccatagatgttcttctcccaacaggtgagtgagggatgccagtacccaaccatccagcatgcttgtggtcacgcctcctcaggggagcccagcccgagatggggcagaactggattgtattacagacttatatgatctgcataattcatttccctcaatttgcacatctgtgaaatggaagtagcgatccctgggggcctgctccacaggggagcgacagcagctgagatctcacagagacgacagtgtgtaggcacctgtaaagttcagtgccaccgtgagtggttatggaargagttgcgatgagaagggagctgccatagaaaatcagactggcccacctgggacagcctcaatcagagagaggccaagagggagtgtggcagagatctaggaaatcagaaagggctcggagaagggagcttgggctccttcactatgccccagcctgacagagcgaaccgctcccccagcccccagcaaagctcaggagaggtatgtttaaaaccaatcacaggaaatcctgctgcactcagcagggaataaactttgaaaatcatttcccctagaggtgatacaggctggaaatataaattgcttccagaaaggtttagataagttcatggatggcagagccaaactagttcttgggcaaaattagaacgttaggaggcatcttcctctctgatgtcagaggaagtccctgccagagccagcgcacaggccagacggaacaacctgataccccgtctctgtgtatgtgtgagtctgcatttaggaacaacttgtccctgtctgacgagggtgccttccctctcaccagactcactgtgccgtgaaattgcctttcctccctccccagtccctcacccccattgctgctcccatagcccctttaaactccatgctgtggagttccccagccccactcccatacctcactctcacagtgccaacttctgtctccagcttgcccctgccatctcatctgccatcacagagcagccacccctccctctgtgtactgtcttctagcacaggcaccttgcctggcagtgcccatgagccggtgaggacaggagcctcttgccaggccctccagtgaatgctgttggcttgcagcctctctctccggctgacttcccagagccctactctgcctggctgcttctcccagggtccctagcagaggccggctgaataggagctgacgtatgagcccttcagggacccacaccctggagaacttgggtacccgaggccagatggatatccacaccagggacagggtcaccatcaggaaataggcacgcttgggtgtgtgccaggttatctgatgcgtgcagaaggtcttcagggaatgggattagcaagggaggcaaggttatggagtatgctttcccgccgctgttcctaagatgccttgggccctttccaagctgccatggatgggctgtgtagctagctgggaactctgttttagcaccacagatagcggtcctggacatggcacactttcagcaccgtggacagccccaggcgctccacagatagcggtcctggacgtggcacgctttcagcaccgtggacagccccaggcgctccacagaggctgtccctctgcggactcggcttcctaacctccggactctgcttcctaaccccaccaccacctctagagacctctagagaattcatttatccatccgcagaaattaattgagcacatatacatccagtcactgttgtgcaagagtacactactgaacggaatagtcaaaaacttgccctttggagcctccattctttgtggtggggactcccaccccataggcttccgttgaaattcccggaactcgttccaggcaaagtggccctgcaggtcatgaagtgtgaacaatttattatttcttgcaaacctgattctactgcttaactctggggggaaggagctggagaggtgggaagtagggattggtgaggcctaattcagatggtattttaggattttaggaagccactcccctgctaaaaagcctgtgatggttccccaatgcctatagaaataaatagtagttccccaacctgtcattcaagtcccatggtaaaatgttcctgatctgtcttcccagtcttgtcttcttacctctcctcatgtttccttcactccagccaaactggattctcagttaacaatcttttggttgcagtatgaaagaaaactcgactcacacagacttaaacacatttactaagtggatgttattgacttgcaactgaaaatcccaaaggtacagctgacttcaggcaaagcctgatgcgctggctcagacaacagcactctggagctaccctgctcgctgttctgctctgtcttccctggtgttggccatatcctcggcttccccagggcatcccctaacatctctacactctccctgtcttggtactgggatgactgcagcagcacagccctcacatcctcaccccacaccttccaggggaaagatgcctcctctcttgaaaagccctggggaatgtctcctgggacctcagtggctggcccacatgcccatctcaaaccaatcaccagagccagggcaggagatagcattggtttaagccaatcagggtccatccctgaagctggtaggggtcatttccactcaaaccacatagcttactatggaacaagagtggatctccaaagaaaatggggctgttaytttgggaaaagaggagctggagctgggaaagcagtcagcaggtgtccagtcatggagtgtgttctcctgcctctgtgcgtttgcacctgcaggtctctgcctgacctgccctctcctatcatcccagctactgatgccctgtgccaccttccaggcccctctcaaaggcgactgcctcccttaccccactcctgtcacttccatcatgtccaccttctctgacccctcacagcacctagcacatgctctttgtcctgaggggatactgaaggggataagtggattagctgggagcaggtaggggggccaaggccactcagccatgagcacatcggaagaagatgaactgaaagccaggaaacctagagctctgtggcagcaaggtccctgatccgcaggcagtgaggagagtggacatgcctcccagggcccatgtgcaggagcctggtgatggatggctgctgtcacgttggcttcgtggggtgggatawcagcatcgttgagcccaggcaggccaggagggccgctgtctggacagtctcaggctgtccctggtgcccaggtcacatggcctaggctgtctcctgccctcactcctagtaaagggttggacttccctggtttgtgggtaagatccttgcccctgaaactgccctggcagggcccgtggcaggaaggctgaggatgtgcagggagtgggtgatctggcctgagtggaggcgctctggggagggcctgggggtcctgggacagcagataccgcaagcgaagacagaagcaagcagcacctggactcctttcccactgtggcttcacggccacttccttttttttttttttttttttttttttcttgacagagtctcactctgtcgcccaggctggaatgcagtggtaagatctcagctcactgcagcctccacctcctgggttcaggcaattctgctgcctcagccttgcttgtggtccaggcttgtggtctactgcctcagcctcctgagtagctgggactacaggtgcgcacgccaccacgccctgctaatttttgtatttttagtagagatggaatttcaccatgttggccaggctagtcttgaactcctgacctcaagcagtcagcgcacctcggcctcccaaagtgctgggattacaggcgtgagccaccgcgcctggcctcttcattaaagtgtgaaccttcttcacgccttgctggcgttggcccaggttgtggggactaggacgtggttggggagagcaggggcttgtaaggaacccgctgggcctgagggagaggagactggagcagagtgtcagagagaggagggaaggaactccgaggcatgggggcccgctgtgagggtgcagggacaggctgggctgtgagtcgggggaggggctgggcggcagagccattattcattcccaccagcccgcagcttcctaaatgagataacactcacatcagcacttttctcttttgtgctcctgttttaataacacgttgggctctgcaagggggtgaccacatctctatctcttcatctctttctgcctttgagagaaccctcaccctgtctaggatccattggtccggagcagagctcagagtggcagagggctcatgtgagggccggggaccctccctctgcagatgcacttcccagagggagcaagtgggcaggacaaaagggggcctctccccccctggcccaggcgtccctggtgcccatcttctaactccacaaccaagaggacttacaaagtccaggccagcttcagagaaatctcattctgcagtgggacaaacgggaccagacgacagggagacctgcccccatgagcccacgctgacagccctggaaagggcttctgtgccaccctgccccgcctttgttatgggtccccccacaacgcttgagcagcacagagagctgctggcagtggggtggcctgratggagcttccatttgatccccaaactctgggtgtctgggcaaaggtttccccactggaaaaccatccacctccttcaccggagaagggggatgaaccactccgcgctgaatggaggcagcgtgacttggtcatgcattgaaagctgtggcaggcaacgggagtgtcagaaactgttctcatctcttcagctaaacttgtaaggtcagggggtcaggaccacatggtaatgatcacgagctaaagttgcagggggcaccagatgtctgttctaatttatttcctttgagccacagagctgctcagtgacacaggtgattgtgggtgccgtttgcagacagagctgtgccagagtgagccagccagaggtgaagcggggactcagactcagctcccagcttccagatcagagctgtgcccaccaccccagagctgcacccagggctgagcctagaagagctgtgagatgcagcatagcaggggacttggggcacagactgtggaaccrggctgcctggctgtcccatgtgcagcagtgtggctgtggacatgttattgattgaatgtctctgagcctcagtttgtcacctgtaaaatgagaatcttggtagcacctaattcgtaacgttgctgtgaggatgaaatgagaagttctckacaaatgtacatagcacaaaccacaaagataaaagttcctatcaaattaaacatgtgcttaccatatgccccagcaatccctctctctagagaagtcccactcccaagagaagtaaagatatatgtccaccaaagacctgtctgtgaaagctcttagcagatttactgaaaatcatcaaaatctcacttctgaaaagaaggtatacaaatggccaacaatcatgaaaaaakgctcgacatcactaatgatcagggaaatgcaagtcaaaaccacaatgcgataccaccttactcctgcaagaatggccataatcaaaaaatcaaggccgggtgcggtggctcacgcckgtaatcccagcactttgggaggccgaggtgggcggatcacgaggtcaggagatcgagaccatcctggctaacatggtgaaaccccgtttctactaaaaatacaaaaaattagccgggcgcggtggcgggtgcctgtagtcccagctactcgggaggctgaggcaggagaatggcgtgaacccgggaggcggagtttgcagtgagccgagatcgcaccactgcactccagcctggatgatagagcgagactccgtctcaaaacaaaacaaaatcaaaaaacagtagatgttggcatggatgtggtgatcagggaacacttctacactgctggtgggaatgtaaactagtacagccactatggaagacagtgtggagattccttaaagagctaccctttaatccaggaatgccactactgggattcttccagaggaaaagaagttattatacagaaaagatgcttgcacacacatgtttatagcagcacaattcacaattgcacartcgtggaaccaactcaaatgcccgtcaatcaacaaatggagaaactgtgatatatatatatatatatgatggaatactactcagccataaaaaggaatgaattaacagcatttgcagtgacctggatgagactggagactataagtgaaggaactcaggaatggaaaaccaaacattgtatgtccccactgacatgtgggagctaagctatgaggacgcaaaggcaaaagaatgatacaatggactttggggacttgtgtggaagagtgggaaggggtgagggataaaagactacaaatagggtatagtgtatactgctcgggtgatgggtgcaccaaaatctcacagatcacctctaaagaacttacgtaaccgaataccacctgttccycaatcacttatggaaaaataatttttattttttttttacaaaaagggctaggcactgtggctcacacctgtaatcccaacactttgggaggccgaggtgggtggatcacctggggtcaggagtttgagacaagcctggccaacatggcaaaccctgtctctactaaaaatacaaaaattagccaggtgtggtgatgggtgcctgtaatcccagctactcaggaggctgaggcaggagaatcacttgaacccaggaggcagtggttgcagtgagccgagatcgcgtcattgcactccagcctgggcggtaagagtgaaactctgtctcaaaaaaaaaaaaaagaaagaaagaaagaaagaaaaaaagaaaagaaaatcatcaaaatgtggaaacagcccaggtgaggggacagatgctgtggtgcgtccacacggtggggcactgcccagcaggggaaggaygctgccgtgggttcaggccactcagagggactctaaagtactgtgtaccgctaaagaagycagacacgaaggactccattctgcatgatcccattgcggtgacattctagaaatggcaaaacgccagtgacagaaagcagaagggggttgggaggggggattggtgcaaaggggctggcgggaactttagggggtgaagctattctgtgtcttgatgctggtggtggatacatttgtccaaattcatcaggctgtagatttaatggggataaacattattttatgctttaagaaaaacccagatttttgaaaagcagagccggggtgtagtaagtatggaagtgctcgctgctcttattattattagtgtgaccattattattatccacggaagattctctggacgggtggcttgtttgcatccctgacccaccgggctgygccctggagcccccctgctcaggctggccaaggagggcgcctctcctcccactcggcggctgggcccggccgtggtgtgtgatgggccgtcttgcccagccctggcccctggcccctggcccctggcgttctgacagacgtgcggcgcgtggggagggctctcagctgctccctggagtctgctttcctcccgctgatcgtgtgaggcgctcagcgacacgttagcaagaaagatgccacaagaaataaagtttgttatgaattattctacttggggctaattataggcacagaggagaggattatttacagagacaggaggcaggggacggggaggasgaggaggaggggccctgagacatggaaacgagtggagggctggagagagttcagcaaacggggctttttgaataaaagctgtgactaaactcaggtccatgctgattgtagcgtctcaggggacagatcagaggccccaggccttgcctgatcctcaggacagagctggagagaacacttggtcctggtatcccgtgggccaccggggttctcttggtgggtgtggcacagctgaggaagccccaccgctggagtcccagggtggaggtgggcccagatctgtgcagggcccagcctcactctgttctcctgggccttccctgtgccagggaaggagaggccaggggaagtttatgtccacccacggtgtcccagctgagcgagaagggacacgggatgatatgagctggccgtgggcgcccactgcatacagcaggttggtgagggaaggtcygatggggacttagccgcactgtgccacaccgaaattcacagcccaccgtggctcggaggagcatgggctggtgtgaccctggcttccaattcttcaacaggaggtgggaaaccattgtttctgtgcaacttcctagtctttaaatgctgccttaaacctcctacatcacacccaggggtctgtggaccacagttcacagcctcctattgttccagttggaacagaggactcagcagggctatggcccaatcactcaccccragacccctctccaccctccagcactgyttgcagtggatcgtggaagtcggtcctcggtgccagccacagactccctgcccagtgctcatgacagacagcagcagttccacacttgggtctgcagcagggtgggttggtggctcgcagcttgccggaaaagccccaccttatcagagggcggtggtcttgccctcccctgagagtgagcagtaggccaaggtttctccagttatttctgcctggctgcaccgccatctactcacgcaaccaggcaggaaatgacagaggcatcttctgctcccgccctgcctccctccccgccaggagagtcaccctccatgccctgccccggggatgtttttcatagccgttccccctctccagcagcctgttccaggtcaggcagctccctgtcctcctgtgacgatagcctccaccagccccacgacagagccctcgctccagagctctctgaccccctcgtccctgctcaagtcttctgccgcccctgcttccccacgctcagtgtcctggcacggatccaaagcctgtctaatccagcccgtgctgccaccagataggtcctgcctcatatgctttgcttatgctgttcatcggcctggaatgaccttccctacccacctcctcttggcccctgcccgttccccgaggccctgaggcagggcgttatgcactgcacctgtgcttgctggcttcccctgctggacgatgagtgccccacagaccctctgcagcccagggcttggggcctggcacagagcaagccttccagaaatgtctgcattcccccattctgaaatctgtactgcggtgagccaggccctggtccaggtggatgaaacagacagcccctctgctcctggagcttcccctctagttccaggcagatggacaacaaagagacaagtccagaagggcacccaccagggtcactaggcactacagtgcaacagggcactatttagatggggagacagagagggcctcctcagggaggtgccatgagctgagattcaggcgatgaggagtgtgctatggcatcagagggaacagcattctgggcagagggaacagtagatgcaaagcccctgaagcaggactgagcagagcaccgggagagccaacaaagggckgggtgctgcatggtgagtgaaagggacagtggcctgtggcatctgaagtgacaggagaaaaggaggtggaaggcccacattcagcaggtttctggccaggttggtggccatgctgtttgcacagggagctggtcatctggggtagccacataggatggctgaggcgaaatgttctgcagtggcgagcctggaggtcctgatgaggatgggggcactttctgccctgaggtcctcactggagcctggcactctccaggagagatgggagagcagaacagagcacagaggagggaggagccctggaggctgagccaaaaggagcattggaaccagagacagaggggtcttttggcaaatggctaggcggaggtggaagccaggttgtaggaggtggagccaggaatgggattaaggtgggtgggggragctgagtagggagggggaaagagaaaagggacccagaccagcagggacaagacagcaaagagtttaatgaatggttttcttgtccatgaygggggacaggtgagcatccttggagacccctgggctattgaggcatcttatacagcttggtgacatctcctccaggaagccctcctggatgccccagatcgggccccccagttatgtgctcatgccaccagcccttgtctgactgaactctgactttgggcggtaaccttggacttaccacttggatgatctcaccagtatctgcctcccacaagtgggcgggctctagagaggggccaggcctggtttcgacctgcttggtgaatctaagctgctgcccaggacctggtccacagccggtggtgggagaggctgaggacagcagggagagcagccacagtcctggcgccgaggcccggagggagctggggctgctgggtggtgaattggcccagaaggaggtcatgccgaccttgaagccagtcggcctgtgggctgctctgagaggctggagcgcatctcagcaggggcggacgtgcttgggagcaggrtggacgcagagccgcgcacatgctctgccctcccagagcttccacagggagcgcccccgtcaagcctaggagagagcagcacagccccttgccgccctcccatccccctctcattccatttgtgccactccgatgggtgccccgctcccgcctgggagcagatgaaggtctgcctcacccccgttcgttgaagtcgggcgccggctgattctccatgcccgacggctggagccaggccctggtggtcttcgctgatgaaaggatgcttggatgaaaatgccccgttcccatccagcgcgtgactctgggatgggcatttgggagagagacagggctggcctctgggactgatgggagagccgggcttggcgttgtgcacacgcatgtggtccggctggctgaccccgccctccctccagggcctcccttctatggggacgcctcctgggaacaggctgccgaggcgggggggccctcagcatcctctggctttcctcaattcattaagacctgtaaattttctcattaatatacttaaagttcgttttaaggggaacaagcgcagagataattgataataaaccctcagttaatgcccttggtttgctgtatataatttatatccactggtagcctctctcactcccaattacccgtttagctgcagcgataacagcagttcaatcagaccgatcccaacttttacatattccagcccgatagccataaatacccacacagagagactcgggggggcccacagtatatttttattaagatttaaatattcatgcaattattagtgatttattaagagccaatgaccccttcaagagcccctaaatcttcacccaaagaggcccctggccctcccctccccccgtgtcccccttcctctttaccctcccccgccaaaaccagagaaatgggcctgcccttccacagcccagatgacatggaagcagcgcctgcgtttccatggtaacagcaggcaggtgaggcggaggcccaggatggaggtcaggcccagggaagggctgggcttcttgagggcggaggctcctgctgccttcccacaccagacctgggggggcaagaggaagaggaggcatccagcagcccctccaggcccctactgaccagctgaccagcagcccccacgctgcggcctcctccaggctggtttcstagagcacccctccccgcctcatttccacgttagcaccaccgccccccgcacccagatccctccgcccctcagcctggtgtgacatcctttagggacccttggggagggggtaccccagcttctctctcccctgctaccccaaagcacaagagggtgtgcagggatctgaggccctgggactcagggcccagacagggcagcggctcatctgaggctgcatagtgacactgaggccacccctctctttcctccatgttcctccaagaccctagagcccattaaaggggcaggaaagataatgaacaaatgaggaaaacatgaaatcaataccaggagaaaaaagtatggctgtcattaagtgaagtaaacaagctggtaattatttggacagtgggtaattaaaacggggtgagggctcattcctgtctcatcaggggtgtgatgggagcggccagacaccctattcccagatggaaggtggcagcagggcccaggctccttcccgcccaaatttggaataggaaggctggtgtctcaggggtcccctctctggagtcccccacctggactcgcctgtgccgctggttgcaggaggcttcagctgcctcacccaggggcaggagctgaggctcagaccacgggcacacaagatgggcagccgcggcctgggccctgcgcrtctcgggattgcagcttctcccctctcggcctctggaagggacagtgccctcaggcctcagctgagaggacacctggtgctgacaggtacatcctgctacccgcccaggtacctggggcaatggacagccgacctctccgcctctgtccaggcccaggggccttcttttgggggctctgatgaggagggttcccaggaatgagggggtgctggcaagggcaggaagagcggggcagagactgggagggcacagcagggacagggctggagtgtggcggcagcgggggttcccttgccttgctgtgaccctgactggtaaagtcggaagaggccttggacactgcccagtctggctttgccctgccgacttgtttggcccacggagtgtttaaagtgtttaaattagttgtcaatatttttaaatgggaggtttcacataaaaatagatttccagcttcccttggggaaaaaaaaatcagtgcaggctgggcgcagtggctcacgcctgtaatcccagcactttgggaggccaaggcaggtggatcacctgaggtcaggagttcaagaccagcctggccaacatggtgaaaccccgtctctactaaaaatacaaaaattacctgggtgttgtggcatgcacccataatcccagctacttgggaggctgaggcaggaaaatcccttcaaccagggaagtggaggttgcagtgagccaagatcacgccattgctctccagcctgggcaactgcgtctcaaaaaattaaaaaaatggtgcacctctcatctggcctgcccccttggatggacactgtcactgtccacttttcccagccccacccagcccctgaaggcactgaacttgccacctctcactcagtcctacatctcctgaggtccagagagggaagtggcttgcccaaggccacgtggccaggtggaggcagagtgggggctggggactcaacctcctgatgcccaactgagggctgtgccccagcccccagcaagtacataccctgggccagttgccagcagggacagagatgacaccctactgcccactcttggagcttgtggcaagttgaggagacatttcaactctgccaccatcactggcccccgacttgccagcccctgagctggacactgctgagaagagttggctcccacctgctgtgtgcactggagggtgcacaggctgacagcggaggcaggtgcctgcacagccagccctgcgtcagcaggatcatgggaggccgaggagcaagccatgcagccccacgtcccccagtccctgccacaccagcccagaggaggcaacatctttaattttgaatgaacagggctgagtgcattggtagtaggtggggtgccctgcaggtttaggaggaagtcggggtgtgagccctaactttaatacatgcacctggctgagctgactgcagggtatgggttggtgaccagggatgggactgctgtgttagttgtatgggaaccattgcaggggtttgaagtgtgagatcggattctctttctagaaatagcgaggttgaggacggcactgagctaggaggtagccaagggaaggcacactttgggtggtggggccgggggtggaggctggatgagttaggtggccacgagggaggaaaggagggaggcttcctgggaggtgggggccctgctgactgcaagaggcagaaggagagtcgggatggcgcaggcagcgagggtgggcggggagcctggctagggaccccggggcaggagctgatgggggccacagaagcggggcctcaggagagccgagcccgggaagccgtttgcagcttcaaggagtggctgcatgtgctggcctctgctgtcgccctgggctggtgggacccatgagtgggagctgggtttgtccctaggttactgggttttcctgtgggccattgtatgaggaggggtccaagcgggctcatctgctgagaatgggaatcaaagattggctggtggcctgtggcctcagtcaccatcctagtgtgggcagtggtgtatgtgcccacaaatgctaatggaccgggctgcagcaggcatgattctggaggctgtgctcccaggacttcccagtgctcccaggactttccagtgctcccaggacttcccagtgctcccaggacttcccagtggggctggggtccctgggccaccccatgggggcatggacgtgggtccctcttgggctgtgttggccggtgcctagcacggtgccaggacatgttgccagatgcatgctcctggttgagagcccggggcactgtagccagcctgcctgggcaggaacccatcgctctcgacttactgtgcctctccatgcctcagtttcttcattggtaattcaaattagttccttgcctcttagaattgttgtgagggttaaataacatcctgtcaagttcaccatggctgtcgttgctgtgactgtgtgggtgccgtgacggctgtggttgtgggcagtgtctcccaccagccaagggcaggcgactgtgtaacctcccaagtgcctctgggctctggtccccaccttgcacaacctgagctgctgccactcctggaccaccccggccccagctctggcggggcacacattaaaccagtgagatatgaaatgccgccatatgtgggacagggtctttaattaaattaattgccagcaacattgtaaaaatgctgacggggccataaatggtgtaggccacgctgttcatcatccccgcgccggggccacacctgggctgggggcggggctggccatggcgggctgcagcctctgagggagctctgtgcacccccctcgggtggcccccggagaggggaggggagcatgggggcaggaggcaggggaagaatgtactgtcaggaggggctgcagagtggcactcctagttggggcagctcctgactttccagctggcctgtcttgaggggcaactgtggaacaggtgcactgtccttactcggccttatggtgcgtgtgcctggggaagracccggatggaaatggggagggtgcccccagagctactctaagtagagttacctccatccgtgggcagtcgggtgatctgccccggctctgccatggtcgctgtgtgtccttgagctagtcatcccgtctctgaactcatttcctcattaggaagacagaaggaccctacccacctgcctgcctctgtcgtgttcccagcgccctgccggctaccctctcttggcctctcgccttttggggagctgtgccaggaattctttatgtctctctcagccggggctgccacaggccttgccagggctcagagcctgcctaccgcccctactgcttgtgaggcagctgggccggccacctgcctctgccaggtgagaggtgagggaggctcacacacactcacacacaccacacacacagaaacacacatacaccacacagaaacactacatacaccacacagaaacacacacatatcacacacagaaacacacacagaaacacatacacaccccacacacagaagcacacacacacacacactacagctaccaaagcacaggcgccggccaaggatcccaaggcaggaaagcgccttccttccccagttttccctgggccgtgtgaccacataattaccctggattccattctatttaattgcagcttattaagttctaaccagccaattatcagccacaattacagcttaattcagggacacaatagctattttatcatttgttaatcaaatgcttatttagacctcagctttattaactatttctctggcctgaggcgaggcccctcagcaggaaggggcccttggttggggccataggagcccgtccccccatcacagcactccccccgggagtttctgagttccctttgcggtgggttcaggtacttagcgatggcaacagtgtcacactaagtgtgggaaggcccaagccagttcactctgcgtttgcgacatcttggctcagctcctgcccagtgctaggccctgtgcctggtgctgggaccggtggcaagacagatgtggtcctgctgttgtgacatgttttacggaagagtaaccaagtacacaaacaagatgacctcaggtggtggcaggcgtgaggaggaaaacagactgggaaaggggagggagaggaagagctccttcacacaggccaggtcctcggtgacagtgactccgcgggagcagagatgggacgggttagagcaggcagctgtgggaagatcggaggcagcgtgtgcgggcacgacaagtgcaaaggccctgcagtggggtgagtgcagagcatttgagaacagatacaggagccctgccccactcctggccccggccatttggctaaagtccttggtgggttgtaccaccttaggaaaggcctgagcctcacgttccttgtctgtacaaccagaggcaggaagaaggagcctgtgagcagtggccggggcggaggacaggcctggtctgcaggagctggcgggcaagggaccagcggtgcccctgcccagagtagtcatcctctgagatgggagcggtgccgcccccgccctgcccctttgttctttgtggttcagcctgtctgcatgtcctcctcgtgactcctgtgtccgtccttgtgaccaggcccctggagcccactggggaagagggtgactttcctccgatctcggggaggtggctgctgcttcagtgacaccttcatgcacacgttactatggaaaccagagtgccgtgcttgcctgtatgtgagcgtaggtcgggggagcagccctcccttccaaggagcactgagagggactgtcacccccatccagtcacctccacatccggcacgctcctagacaggagacactgccctctccccaccttcgtgcattcaccacacactgggcatgggccctgggactctgggctcagacctgtccctgccstccagggagtcctgtgctattgggggtgactgctagggcgacagaggatggacagagggatggaccaaggggacgggaaggggaagaagagaagcaagtcctggggtggactgcactcccgaaaaacctcatccgctatttgcccgtttcacaaatgagaacaatgaggctctagaaataggcggttcgcacaaggggctgcagtggggtcaaataaggccagggaagcagctggcaggctgtacagaggttttttatgttttggctttgaaagaattcagaggcgtgcaccccagcttgctgctggctgcatggcaccccgttgttacctccaggcaggttcatacctgagttgccacctggactstcatggctcttactgtgccacccagatctgtagtctccggtagagattgaaacccaggtcatggaacctgccactccccaccttgccctcctcaccacaggtgctgtctctgtccctgtctctgtctctctctgtctctctaacagcaagtgcggaacgtgtccctgcttatcagagccccctagtgaagctccctcttcacagaactgtgtatgtttaaaaagtaataactcatgccgccatctcaggccgcagggatgcaggtggcagggagtgctcagccccactcccctgcgtgtctgcaagcccggctgagccacactgggctcctgctccccctgccccctgccgctgtgccccctggctccctgacccctctgcttccccagggtccagcactggcatttgaagaacctggttcccttcccattgaactgaggggttcattggttgattggaaggtaagcagagctggctcccagccagatttgagtttccctcctccacttctagcccttcgttcctgggctcttgtcccattgctgggaatgatgttccacattcattccacaaaaactctctggctgtatgtcaggtcctgaccaggctgtggggatgggtggtccctgccctcaaggccctgacaatttatatgggaagacacatgcataaatggtgacaatatgatattcaaggcactggggtgacttcggtaagggactgtgggagctcagactggggtcagggcaggcttcctggaggagggggtgtttgagcagaccttgaagaatgagtagtggtcacccaggcagacagcagatgggcaggtggaccaatgagatggaaagatcctgactccaactagcttcagccaaaaaaaggaatgtactggctcatgctctgggaatccagagctagctgtgcctccaggtccatgggaccccaggcctctgatgctggcaggaggagctggcctctcccttgcactggttgtctccactcttcaagctcttgcttcagacctgtgaatagcctgcctttaccctcagccttacgaaggcctacaatgcctgcaggactggcccttccctgtgagggcccccggcaactccagggctccatgcccacggctccaagctcagcacagggagagggtctcccttcccaaaaacccgaccaagatgctggaatcccgtctattggacggggcggcctgcaagtccttctgggaaccattggtggggatgggagagggggagcgtgcccacctctgggtccacagatagggtcagcccctggaccacgtggcctgcatggtgggaggagttgaggggaaggcattctttaaagaaaatcaggcactgtcagccagaaagtgagagggaggcagaaactgggacagaacacgcagaacccctgagaattgcacgtggcgaagacgccgccggtgtggagggatccctagaggcgaggccagcagggcctcaaatgccagccagaggcacaagtggcacgtcatcctgtggcactccccatgcccggacatccgagcacctgtagagyggggaacccaggccctggyggacctactgggggcaaacctccatggggaggctgcccaggggctccccaaggcctgctgggcaccagcatccagggctcaggggtgcaatgctggctgctgtgccccagcctyctcctccaccccatttcacatccagaacagctctcagggaagcagaggaaggggctgccaccctggcccctcgctgtgttcctcaaccgcgccgtgtggtctgcagggcggacggcgcccgccaccaggcckctgggaggatggaaggaatggcggcagccgccctggggaagcagcacccacctctcccagctgagtgaggccgagtgacgccctgtccctacccctcccctgcccmcagggacggaggccttgctcagtatatatgggttcattaatagcttgattaatcacacctcatattttctggtgcttttaaaaataaaacatttgaaagcactttcacacccaccttgggcctcagagttccgggcgagtcttatctcccagactgcaggtgaggaaaggggctgagcctacaagagcagcatgtgccagcgggtggctgggggcagcctggagccaggggcttctcctgcccgccactcygcctgkgggctgctctgccctctctmtgggtctctccacagaccaggagtgaaggggccaccctaggcagatctgaaattctagagggaaaaagcggtggtcattcagtcacgcaacaaacactccatcagcatcctggtgagacctgggctcctgcccccagggagtttatggtctaacaagggaagtggcgtacaaactcaccctggtcctgaagtggcattaacccagatggaggctcaggggatggagcaggtgctttgagtgacaaaaagtgtggatccagaaaggcctccaggaggaggcgacaactttgctgacatttccctggtggaccaggtggagcaggtccaccacagtccacaccactggatgcccacagcagcctccccacctcccctctgcccagtgccacccctcccctcccactcctcacgcagggagagcacaccacacccctgcacatgacccccaaggcttcctgtggccctggcaatgaaatcccaactcctgactcgactgtaaaggcccctggggtccagcccctgcttcctgtctgaccaaacacgtctcgccctcactcactctgcccaggccacactggcctccctgctgtcctcaaacaagcccagctgcctcctgccttagggcctcccctgttcccttttccaagcacactctgyagcctggccttggcattcagggcgctgctcagatggcacctgcctgagccccgctccctcgagagccctctcacccgcccctttctgaaagtctgccccttctaccttctctgctgcacttagtccgccccttctaccttctctgctgcacttgggttttgttttgctttgtttccccaacttgaaagcaagcttcagagacggggactgtgttgtcttgcttgcgctggatcccggtgcccggaacagttcctggcacacagcaggcactcaataaktatttgttgaatggatacgtttcatgtcttggaagaaggtggcatccgtcccaggctcagttcagtccaaggctccttgcccaggggtctcttgcctcccattgccaccggccccggggactcatctgcttcccctcctttctgtagctgccacccccgttggcccccagcctccctacacacacgcacacacacacacatgcatgccacacacacatgcgcacacacacacacgccttgcccctcctccttgctattcctgagaagatgtgtggtttgggggttgcccagtttgctgctcccacccttgccgagcaggggcaccagctccagctgacgtgggcagccagttctctcctgagagaggcagggccagccagtgggctctggggctcacygcaaatggggttcccacttcagggcttgagtcatccacccagccctgtctgaccaagtcctgtagttcctggtgaccaagcgcccgtcaggaatctgctagtcagtgaatgaggtcttctaacttaattccaagcgggcagccaggccaggtcacgtcccttgccagtgggaaagctgtgacatggcrgaaggagcctctgggaaactagggatgagtggggtttgggaagtggcagggcccatgaagctggtgggcccatacctgcctgctgtcctgcaggcccacgagccactgcaaccaaggtgtgtccgccctggcagtgttctcacacgcccgtccgtcagtggccccagaggcagcagcggtaggcaccccaccccgaggccccagttgctaatgcccgcattaagcagccttgtgctgcacggcatggaccgaggatgcacagtctgggggtggggacaaagcctcctgcctgcttctcctgtgacaacagctccagcaccagcgaggacaggccctagatgcagagagggtgagatggcatgtgtggtttcccaggagagttgaggtaggggaaccctctttccagaggaggtgacattggagctgagccctggagagaaggtaggaaagcactggacaaagaggaaggaagggagtttcaggcagagacctggaggtgggaagctcctgcctcggagggatccatgggtgtctcttcagaaaagggctggagcactgactggggccagaacgtgaggctcagtgatgtcagtcaaaggcacttggccctattctgaaacacccatgggagccagatgaacaatggaaatgggagaaacagacccagggtgaggcaacagggagtggtggggactatggcaaactagccagctctcaggccctgttgaaaggatcctaggtcctttggactgagcaggcactacctggcgttgtctttgatggacaagtacatggaaagcgaaagaaagagagagagagaaggaaggaaggaaggaaggaaggaaggaaggaaggaaggaaggaaggaaggaaggaaagcaagcaggcaggcagggagggagggagggaaggaaagaaagaaaggaaggaagctcacgctagtagcctgggctgtgcagtgggggaggcgagaggctcggctgtgccttcattcaggtgagagccctgaccgggacaccgagggggggacagacagatctcaggtactgatggcaaggatagaagtcacacagtgagctcgggggccagaggcagagaaagccagccctgactgcccaggaagattcctgtagccccgagaggacgtccagtagcaccttaatttaccccacccatgcccttgctagagggcatagctgctagaatgtccttgctagagggcatagctgctacaatgtccttgctagagggcatggctgctasaatgtccttgctagagggcatrgctgctagaatgyccttgctagagggcatrgctgctasaatgyccttgctagagggcatrgctgctasaatgtccttgctagagggcatrgctgctagaatgcccttgctagagggcatagctgctagaatgtccttgctagagggcatagctgctagaatgatgtccttgctagagggcatagctgctagaatgtccttgctagagggcatagctgctagaatgyccttgctagagggcatrgctgctagaatgtccttgctagagggcatagctgctagaatgtccttgctagagggcatagctgctagaatgatgtccttgctagaggkcatagctgctagaatgtccttgctagagggcatagctgcagcctggagggtgccccctgggtccaccggataaatgccccccggggccactgtggcgtgacagaggccctggagaagtgagctatgccccttattggtcacagtacatttatttttcattagcagttaaatgcagacatgagggattgtgctgggttcaccaggcggctgacgcgagcagtgcttggcgtgctgatcgatagggaggctggagggccgcacaccccctccctgcccccacacgcccagccagggacccctgcccacccagctcccccgccaagaggcaggcacaggccagcgcattgtctacctgttaagggatgtggcacaggtgggcccggaacctgccactgggggggcttggtgacacctgcctgctccccaacacctgcagggcttgctctggcatccatcttggcctgtcctctgcacggcctagggtcctcccaaatgctgcagcttgcctgggtgcatgtctagagcggccctcgggccagcagcacccatcccacacccccactccagggttcacactccccagcctcccaagaccacctccttccattcattctccagaccgtgggaggaccatgtgggagcccaactcagcactgctctccctgagcccacccctgggtcccacgtctgggtcagggctggccggtggctgccaagtgaccatggcgagcacacaggtgactgtacacttgatgagcccagtgtctcagctggaggctctggggtaagggaccccctcgggcctcaggttccccgtcaataaggtgtcttggtcccaccccccagcgtcgcctgcattccgccacttcctgagcctacgacagaccccagcagaggtggttcagggtggggtgggtctgggtctgatgaccttcattttcacgacatgtgaactgcaagtgtgaccccgcttatgaatgcgggcttggtgtccataacagagctgcggaacatgcggggggcagttgccagtgggagggcacacaagggaaaaagccaagctggggagaggccggagtctggcaggtgggcaggaggcaggcagggaggccagagagtgagaggaggggcaggcgcccagggagggccggcgacccagcagcggacaaactgtccggctatgtcccaaatgccctccacacccatctgcccctgagctcacaaagacacagctgttgcacccctcagctcagccagcctccctctgccatccctaaggcacctgccagctctgtgcctcagtttccttgttggctctcaccccctatgagattgctgtgaggatgaccaagctgagggggtgcagccctttgctgtggaacacgcagaaccgtgggggtaccaacagcagcctacgctccctgagcactgtgctgagtgcctcacgcctgtttcatttcatcctcacaacagccttaagaactgggcaccacgccccattttgcaggtgaggaaacaggttcaggatggggtggatggacctgcctgaagttgcagaggcccctgaaccctcggtccgagcctgccctccagggcgcctgcaggagctggtgcacacacctcctgccgtgaaaccggggtcctggtgaagggcggactcccaccctggggagagggtccctgcgcaagcaggagcgaaaggggcagtgggccaggcgtatgtgcccctcggtgggtagggtgggcccaggcctcccagtctgaagccctgggtgggttttggatcacccgtggggagggtggaggagcccagaggccatccatgtgaggggcctgtggacatccccacaggcagctgtcatctccatctcacagatagcaagccactcgctccccaaggtcaccactaagatgagcagaatagatggtctggaaacccagggtttccctctatgcccaggggctgcaattgtgaatgcgcattggtggggggatcactgcagccccaggggaggccaggctggctgaggacctgttcaaagggcrgctgsgggttgtgggagctgagggtgacccccaccccatcctctcaggggacctgctggttgggcagggatcagactactctgggggttttacctctgccagtgcctccaagccaattacctgtgtaattagcaacaaatgacttgtgggatggttgtggttttcagttaaaattagaaggaaacccacatattcaggtctccttgaaggaggtggcccaggtatctcagattcccagacagactcccggctctcgccttgcccgtgcccaccccgcatgttatttctgagcacctactatgtgcagggccagggatggggccaaccaggaagcagggccccagaggcggccactggccagggctgctccctccctcgccccaggcagctcacctgcctggccagggaccttctcaccttggccagccttgccctggacctcccgggcaggggcctgcctggccagatccctggacttctaggaaggcagtcgccaggccacctcggtgctgggactccgcccaggtctcatttcacctcaccacggtcttcaggatggcatgggctgctccttccctgcttgtacagaggaggacatggaggcccgggtgggggatggtcattggcctgagattgcccagctgggacatggcagagcctggactcactctcctcccatctgccccaacccacggtggaatcgtttgctgagccgctgcctctaccctgcccagtctggcccctggctcaccttccccctctgccctgccgcaggtgcccagcagagtgccaccgtggccaacccagtgcctggtgccaacccggacctgcttccccacttcctggtggagcccgaggatgtgtacatcgtcaagaacaagccagtgctgcttgtgtgcaaggccgtgcccgccacgcagatcttcttcaagtgcaayggggagtgggtgcgccaggtggaccacgtratcgagcgcagcacagacgggagcagtggtgagccgcatggggcgccaggcagggccaatccgggggaggcgagtttcggcccccccagaggagcctgcagctgcccccaggattccccacctgggaccccggaggccttccccagaggccacaaccctcagcagtttggggagaaggagggggagagagggggtccctgatgaccaaggagctcccagacctcacattcagtgattgttttctttgtgcgtcggttcattcgatcagtcaggcattcactcacacctgtgagcacccactcccgtgctggggacagcccgccaccctcggagcccaagttcccacagagaggcagacagcggggtgacctctcagcagggagagaggcccctcaggggaggtgatgtgttaactgagagaggcataagaaccggttagggagtgcagaagggggaagtgcatcccaggcaggggacacagcccaggaaagcctggaggcagacgccggcatgccggtggtggggtcagcagtgagggtgagggtgtgcaggggaccaaactgatgccactgtcttaggggatctcaagctgcagagcgacatggccagagctatatgtgattcaggggccagagttggggctgatggaagcagcaggtctggagacactgagcagagggggccagccagactcagctgggggcacagagagagaggttctaggggcagcgagcagacccaggaagcacctcttccatgagacaccacattccccacccccagccctggccttaagtggcactggggacgtgggcagacagcccttgtctgggttccgcaactcccccagaaaggactggcagagagagaggcaggagcaaacaacagcttctcctcctcnnnnnnnnnnnnnnnnnnnnggtcctccgtcccctcctccccgtcccctcctccttctttacccccttcttccgtcctccccctcctcgtcctccccctcctcctcctccccctcctcctccctcccccactcctctcctacctttcctcctcctcctcactcattagagcctgtttcagtttcctctcccttggtgctttgtggagcaccccacgcataatgacacctcaggggtagtcctgagccccctcccaccaaggcctcagccatcctgagacacagcacacataccctgtcgaggcacagcccgtgcgggacacacaggccattgccgtgaggctcaagccacagtgcagctgggacaagcaggtgtcacccaggactcccactgatgccaagggcaggccggggaccttgggcctagagaggtggcccaggaaggattcccagcggaggaggaacatccaagctcaggtctcaaaaccacctggaaagggcatctcccaggcctgtagaatggaaggtgcagaggcgcagaacagccttgggtggctcgggtatggagcgagagcgaaccccggggcaggcagcagtggccaggagactgcgctaaggggcccctggaggctgagacaccagagcgggctgcggtcgcacttgcactgtaggaagaccgtgctgggcacagggagactggaggagggcaaggcccctgccagggagaacggtttggaagctctggcagtgatctgaggtgagctgaagagccctggatttaggcagtgccatttagccccagaaccagcttgtcattttacggttgagactgaggccttggctcttactcatccagagccctgccggggctccaaccagcccttctcgtctgcagcagtcacacaccacccctccgtgagggtcagcagggactgcctccctcccccaagtgtcgtctcagtgccttggcctgactgcagcttctcacctgcggtcttcaggtgttcgctgagcacctgctctgtgccatgccttgggttaggtactaggagttatgctctcagggcagtgatccagctctacctcctaccctcagagggagatagagagggttggcggccaatgtagcccaacagaaccctgggcaccaacacctcccaggaccagagcctctcccggccccagcggaggtgccagaggcctccctgcccagcagcagggcccaccttgtcttgctgggagggtctgcaggagaaccgcaggcaagtccctcccctccctgggctcagtttcttcatctgtaaaatgggggtgaggagacctcccctccatcctgccccttgcagattggtcgggggaagccatgaaatctcacgtgcccagtcaggacccagcacggggcctttcctttctccccaccccacacccggggcccagcgtcccttcagcataagttctcccactgctgtggcaggtcccccagggaaagcacagccagagagctgctctcctgcagcctggaagctccagtccagccccctgctgctcccagcacccccttccgggctcccccgcacacccctctgtctgaaacacccctgccattatgagggctcagatccatggactggcaggaacccagacccttgcctgaatgagcagtcgcaggcccgggccggcacacacaccgggagcccctggcccacactccccagccggctcctgtggccctgttctcttcctgccgggcagagaagcagagcttgggacacgtcccacccgtaaccgccagggtcctcttctgccccgagcatccgactccagcctcccatggccggaacatctgaacgttcattgatctcatcgatttctcaacccaaagccatcgagtgctttgaggtgaagaaaaaggctttccttacccacggcagataccacggcagtggcgccacgccgccaaagaccaaagaccccaaaccagaaacgttctgtggtcagacaggtatggcagggctcggaggcccacccagctctgcagcccactcattcatgtgtggggctggaggtggccggatggacacccaggagagcacctacttccctctcgtttgccctcattcctcacccagaaggccagggggcagggaccaaggcctgaagtgctggaacccaaacctgctaacactaaaaaaaagcctgaaatttgcaaaaccaagcactggagtccggtctgggagtataacttattttgtgttaaacaaactgattggttattagattgtttagaagcagattgctgagaaggtgagaaccgaagtgccagcttggcctcagagccccagctagaaaccctgggcagcccaggttcacacacacaccmgcccaggcccactggcccggggtccctccccagggctggcacctgctcacacttatgggcaggtacagacatagctgtacccagacactgctcccaggaaccaggctgcctgatgatccacaagaggagagcgcacagcccctcacatcaaagatggggtagggccgggtctgcagcccccgcctcaggcactgccctccaggagcttgtggggctgaagggcacccctcaccaaggcaytgcgtggagctggcacattgaggacacacttggccctcactcatgcaagtgagagggaggagaggaggtggcaggacagaaggggagggaaggcaaagggagaagaaaagggagcgcttaaaggtagtgctgttctcccaagctgagccgcctgggccatgggtgaggctcctgaaggagggccgggctccccacagcaccacgggggatggaggaaccattaacagacttgtccacccaagggagaaaaagtacccagttcagaatgttctggaggtctcccacccctaacccccaaggcagagaggatgaagggagtggagggcccctccccagatctccttatcagatgccctaagtcatattgaaagatagctggtgcccaaggcccctctcctatacaaggaccctgtgagccaccccctcgttctcagcctgcccaccccaccccctgagagtgtccacactgggtgtcttagagaacggggcaggtggtgcccagaacggagggaagcggcccagctaccatgatctcaccagaggtgacagctctgccatctcctatgatagctggccggcgacagggacaaagtgatagaaaaatctggacacccagtgtgagagcccagaggcttgtgaggaggggtctgggaagcagtcggagaaagtcatgttagagaaattaagagggaaacagcctcccagcctgccggctcagctgggcggccgctcttcccgcaatgcagccctaattgaatttcgctgttaacaatggaaacacattggctgccggcctctctctccctttctgataagccaatgacccgagggaaattggggtcaggaggaggagaaattggaagcaaacagtcttttctcactgctggggatgctggttttggctacagacggggcaggaggagggttgctgcccccgctcctgagttgtcagagggtcctcagcctgcctcaggccagatatggcagaaggtggggggctgagtccagcctggagcggagtccccccagctcaccctagttaggcagagcgggtcctagacccccagctccccctctgctggctgctctctcaccctcttccaaagtttctccctagtgcataggcgccccagctcacccttcggatgcagacagtcccgggtccccatggcaagtcacttccctctgcatttctgtccaagggagtggattaagacgacatccccatcccggcacgtgggaaaccctaagtcccagggcgctagcatcatactacataatcactgcaattatattgttaatgactgttattatattatcacgtcaggatctatctgctagcccccgagggagggggccagatccttcctcacctcttttacccacagaggtgcagagctcagcctgtctgccccaccccttctgcctggagtctttggaggtcagaccctctggcccaaagctctacggcagcccctttatggacatttctgtaagtgactccggggagtcaggcctcaggtaacaaagtrtaatgaatggaaggtctaccctgcctgcccggggccttcaggagatagaaatcaagcggcccttgggccccctggagtttcctccaggctggaggttgccttaaaacttaaaatataataataataaaatttaaaaaaaaaaaaacaaagtccactcccttgccagtcagcgagagtggctgagggtggcgcaggaacccacacacagaagctcagggtggccctggggctctgactacctgcccctcccgcccccagggctgcccaccatggaggtccgcattaatgtctcaaggcagcaggtcgagaaggtgttcgggctggaggaatactggtgccagtgcgtggcatggagctcctcgggcaccaccaagagtcagaaggcctacatccgcatagcctgtgagtctagggctgggccctgggggagggcrcacggygggagggtgtcaccaggagaggggacagtaggcttcctggaagaggcggtccggtcagaaaacctcacagccctgcctggatgagtggataaagtgcctgtggacacggcccagccaccccatggccccctggccacctggcacttcctctgccatgtgccacggcccctgcaggacaagggacacagccagccaggctgagcctgtgcgaggccctcagacaggaggacactctcattcctcttctagatttgcgcaagaacttcgagcaggagccgctggccaaggaggtgtccctggagcagggcatcgtgctgccctgccgtccaccggagggcatccctccagccgaggtgagggctcctctagtgcccacgtctggacctgggctcctgcctggtcaccctggcaggggccactctgggcagggccagcatgggctggcagtacatggcagggctccctcccctaggtggagtggctccggaacgaggacctggtggacccgtccctggaccccaatgtatacatcacgcgggagcacagcctggtggtgcgacaggcccgccttgctgacacggccaamtacacctgcgtggccaagaacatcgtggcacgtcgccgcagcgcctccgctgctgtcatcgtctacggtgggccccgggrctccctggtcacagggagaggcactgcggtgcccctgggcagtgacatgtggctggtggggtgaagagaggccatgaggccaaagccaggtggaccagatcgtgcctgactaggcaggataagcaaagggctctctgtgactgctgggggcccaggggcatgtctgggcaaaggagtgggacagattggaggtcctttgtgggcagcgggcattgtgcagaaggagatgagggacaggatgggaatctaggaaaggtgacaggctgtccccactcctgagtctccaaggggggaatcagaagccacacagtccaggcacccccaggagccagcagagggagggtgcgggagtcaccccaggagaggctggggtctgggctgcaggagtgtgtgagccgcggttcagcctggctaccccgagtgccccctgggagaagggaagactgtggcgtgcrtgctgcagggcccgggggccagcaggcacgagcatggcctcccccaggccttctctcccagctcagccacagcccacccgtgtccagctcacagcccctctgccctcacgccccgtcccctgggccagtgtatctgaggacgcccccgctccctgaccccagtccttctctgtccggccagtgaacggtgggtggtcgacgtggaccgagtggtccgtctgcagcgccagctgtgggcgcggctggcagaaacggagccggagctgcaccaacccggcgcctctcaacgggggcgctttctgtgaggggcagaatgtccagaaaacagcctgcgccaccctgtgcccaggtaccagcggccaccgcctcccgcatcgttcctcaccacgccatctccgtgccctggctccatcgcgcccaccagcctgcccccccatggctccatcccacccacccgccacgcagggccaggctcagtctgaggcggggatcggggtgcggtgtatggttggagtcagggctcgatctgtgtccaatgtcagggctcaacatagggtgtaagtcacagggtgtgaggtacagtttgacagggtctagggctcagcccagggctgcagagtccacttgtccctgggttcagaagggtcaacgtgtgacgagagagccctcgctgccccagggccaggacagcctccctggtgtggagagagccaagcagcccctggcgtcatccgcgcctccctgtcattagcatgcgtcatcaaggccagctggacactagagggcgtgcatcgtgggcctggccctggctttgcacccaaatccaggctgccttgcactgcctggtctggttgcccagaggggccacactggcagactgccggggtgggctcccaggctgaccgcaccgtctcctctctgcttgtctctcatctagtggacggcagctggagcccgtggagcaagtggtcggcctgtgggctggactgcacccactggcggagccgtgagtgctctgacccagcaccccgcaacggaggggaggagtgccagggcactgacctggacacccgcaactgtaccagtgacctctgtgtacacagtgagtcctctctgccctgaggtcctcttctgtttgcctggattggccttgcccagccctggggaggtsggggctgagggagctattctcctgmcaaaggctgtagcctctccaggctcaggacccactgagatccccctcatccttagcatacctgcacatgggcccaggcgcgccccaccacctcccatgcctcctgagacgggcacagatttgaaccttgattcatgcacacccattgcccacacttacccaacaccacagcttcacatctgcccacactcaccaacaccacagcttcacatctgcccacgctcaccccacaccacagcttcccatctgcccacgctcaccccacaccacagcttcccatctgcccacgctcaccccacaccacagcttcccatctgcccacactcgcccaacaccacagcttcccatctgcccacgctcgccccacaccacagcttcccatctgcccacactcgccccacaccacagcttcccatctgcccacactcgccccacaccacagcttcccatctgcccacactcgccccacaccacagcttcccatctgcccacgctcaccaacaccacagcttcccatctgcccacactcgccccaacaccacagcttcccatctgcccacrctcaccaacaccacagcttcacatctgcccacactcaccaacaccacagcttcccatctgcccacacctgccccaacaccacagcytcccatctgcccacactcgccccacaccacagcttcmcatctgcccacactcgccccacaccacagcttcccatckgcccacactcaccaacaccacagcttcacatctgcccacacctgccccaacaccacagcttcccatctgcccacactcrcccaacaccacagcttcmcatctgcccacactcaccaacaccacagcttcccatctgcccacactcgccccaacaccacagcttcmcatctgcccacactcgccccaacaccacagcttcccatctgcccacactcgccccaacaccacagcttcccatctgcccacactcgccccaacaccacagcttcccatctgcccacrctcaccaacaccagagcttcccatctgcccacactcgccccaacaccacagcttcccatctgcccacactcaccaacaccagcagcttcccatctgcccacactcaccccaacaccacagcttcccatctgcccacactcaccccacaccacagcttcccatctgcccacactcaccaacaccacagcttcccatctgcccacacctccccaacaccacagcttcccatctgcccacactcgccccaacaccacagcttcccatctgcccacactcaccaacaccacagcttcccatctgcccacacctgccccaacaccacagcttcccatctgcccacactcaccccacaccacagcttcccatctgcccacactcacccaacaccacagcttcmcatctgcccacactcacccaacaccacagcttcmcatctgyccacactcacccaacaccacagcttcccatctgcccacactcaccaacaccacagcttcacatctgcccacactcaccccacaccacagcttcccatctgcccacactcacccaacaccacagcttcccatctgcccacactcaccaacaccacagcttcccatctgcccacactcgcccaacaccacagcttcccatctgcctggtcccccaagtgcacatacaggtcctgtgggaatgccgggcttgtgagggctgttaattacaaggccataactaacaattaaagatctctgttggatttttttttttcctctagaacataccctcccccattctttcaattaaaaacctaattatctgtgtcaattcctttctgatggacatttcttccatttatgcaaaacccttctaaaatcaatatagcttcctccaagcagtcaatcaccccctccccagacctgccccaggccttggggaggcagacagagagaagggcccccaaacccctgctcctggtctaggcactgacctggaaccacacaggaggcagaccctgtgctctggggatcccaggagttcacccccagcccaagctgcccttgtcccagaagagcaggcagcaggttcaacctagcagccaggcaccaggttatccgctctggggaagtagctcttcccctcctgcatcctccaggcagcagactcagctgggatctcaagcccacgaggaatgtgatttgctcagagtcacacagcacagtaatggcaaatacagggctgggatgcacacgcacggactccatgctccctgccacaagcgtctgctccctagctagtgcagatgccccggggtgcagacctcatcctcctggggtgcagaccactgacctctccttcccagactcctacacccctgcccccaccaaggccatgctgtctcccgcagctgcttctggccctgaggacgtggccctctatgtgggcctcatcgccgtggccgtctgcctggtcctgctgctgcttgtcctcatcctcgtttattgccggaagaaggaggggctggactcagatgtggctgactcgtccattctcacctcaggcttccagcccgtcagcatcaagcccagcaaagcaggtgaggggccccgtgcccccagcactcctgccccagctcccacgccaagggctgctggggcagggatgccctaggtgccattgcctgagtctgtctttatcctgcagacaacccccatctgctcaccatccagccggacctcagcaccaccaccaccacctaccagggcagtctctgtccccggcaggatgggcccagccccaagttccagctcaccaatgggcacctgctcagccccctgggtggcggccgccacacactgcaccacagctctcccacctctgaggccgaggagttcgtctcccgcctctccacccagaactacttccgctccctgccccgaggcaccagcaacatgacctatgggaccttcaacttcctcgggggccggctgatgatccctaatacaggtaggaaggaccccagggggytctgagagctccacttccctcctggaggaggacgggacagccggacgttcctctcgtgcccctcggtgtcccgtgacagatcagcaaggaaagggggtggagttttggggagaacccagtcttggctggcaccgaggccgtggccagagctgtcttcctcttgttgcctgtgggcacaaggtaattgtccattcatttacacagccaagcagcctacttgttccagtctccatgtggggccctgggcccagaggtagggcaagccccggccccaaggagcttgcaactgagcagggagacaaccaagggcaaacagatgagcacgggcctgggcagaggccatcctggagtccccactgcatcctggcttccacccaccccagcaccgaaaccctctgaagaactctttccatggctgccttgcaagaagtggctgcagcctctggcatggctggccactcccacccgaaattcccaagtccctcagcttagatgaccccatgcgctcctggtttgcttgcccctctccagctgcctgttccataaatgtaggtgtgcctccgagctccctcccagtgcccttctccccgagcggcctcgcccactccatggctttaatcgccgtgtctgtgcagataactcccactcccccatccttagcctgcagttctcccgggcgacagaactgtacacccagctgcctcctggccagctccatctggatgtctcacatcacctcagactcctggtgcctaaaacagaaccgtctcccaccctcccccagagcctccccattcctggcttcccccagttcacggatcgtctagttgctcaagccggaaacttggggtcaccttgacctgctgctcgtcctctcttgccccccgccagcttcagtcccacgccagtccctcctcaatagctcctgccacctcctgctcttgtcctcccttgctgcctctcctgacacgggccaccaaaccccttacctggttccttgctgtaaaacttcaccaaatgaagccagagttgatcatgaccctctcgtgctcgaatcccttctgggctcccctctgccccctgcaaagcccacatgataccacagagaagacctgtcccctgcaggccagctgcttcagcctcttccctcacacacatcgtcccgcacacggcagccaccatggactcaacatccccgacacacggtgctgccctctgcatgcaccgaccccctgcccctcccaccagctcagctgggacttctcttttgggtccccgcctgacagctcttgccgtctgtgcctcacgtccacacggatgataacgaacccctcatggggctgttgggatgacgaggtgagacggcatctgtcagctcttacagagacgcaggcgaacagtggggcccggcagcccttgctcttcgctccccaggccggggggtggctgccacttcccccgcatcctgtgctgtggttgacttgtccttctcccctgctgggctaagaacttcatgagagtggggtctgtggttttccttcgccgtcctgagtacccagcattaggagttgatgaatgaggatgtaagtgcgtgtaccttccccatggagagccttcctgcgaggatgtctggcattgtcaccaacactacagctgggaccgcggggcagtgcaggccagtgaagggagcagtggctgtgactctgccctctccggtgaaacggtgataccagcccagccctgctctgcgctgcccacgagggagtgtgcatttgcttttggacttggtggggtaaagtcatggaattcctctccctccccatgtcctgagctgggagcccctcctcatgtaagggctccctgtctgggggagtccctgctcaccacctctagagggactccctggcccccgtctttgccggatcctgtcccaccatctccctgttgaaccactcccctctccactcacacgctgatcctgctcctccaagacgttggagcagaggcaagccagccgacgggagggcatccagcccaggagataggttattcaagacccaccccacctgcagggaccatggcrtggcagagagtagaaggagcaagggagaggggagctggagcaggacgggagggcagtgggggctcaggcagtggttccagaaccaccaactttgtagcactggctgggctagagaggcagtgggggccagaggcaaaggcccttcaatgccaggccagggagctggacttcatccgggggcagggaaggttttaagcaagggataccctggtcccctccagtgcctttcaggggacaagggaggtcggtaccgcataccttctgtccccaagttttctgtgcctgagctagccaggcatgctttccccacctgggttccctcagttgctcatggggtgcccctgactcagcttcatgcctgtgggggtggttggtcagcacggcagtctttgaggcccctctgtccccaggccgggctggcaccagtcagtcctcacaggaaggctcctggaggggctgtgtggtggggtgttgggtgctttggcagtgggtaagccctggccctcttcctgccgttccaggaatcagcctcctcatccccccagatgccataccccgagggaagatctatgagatctacctcacgctgcacaagccggaagacgtgaggtgtggccgcgggccctgttgccgggggtgggagggacctgcctgctgccttcggtccccaggaagccccctgcccacccactgttgtgcctggcccgaggcggcgggggaaagagctrtgcctaagccccacgtggtcctgcagcccaagcccctggcccctgggatgctgctgccctgcccttggcctagccctcaggacccaggatgggccactgacacctttccctccccacccatatttccccacttgaggttgcccctagctggctgtcagaccctgctgagtcccatcgttagctgtggaccccctggcgtcctgctcacccggccagtcatcctggctatggaccactgtggggagcccagccctgacagctggagcctgcgcctcaaaaagcagtcgtgcgagggcagctgggaggtgagcagggaactgacccgggctccagaagggaacgtgggctaactgcacrctccacccggccttccaccgctgggtggtcctgagccgcacccccacccctccccagtctccggccacttcttgaagccacagctggccctagggctctgaggctgggccgaattgacccactgacccctgcccacaggatgtgctgcacctgggcgaggaggcgccctcccacctctactactgccagctggaggccagtgcctgctacrtcttcaccgagcagctgggccgctttgccctggtgggagaggccctcagcgtgrctgccgccaagcgcctcaagctgcttctgtttgcgccggtggcctgcacctccctcgagtacaacatccgggtctactgcctgcatgacacccacgatgcactcaaggtatctcccgcccctcaccccccgccgctgggaggccgagctatgcctggccctgtggactgcctgccttgggcgcagtggggaggggcctgggctgaccacctggggcactgcaggaggtggtgcagctggagaagcagctggggggacagctgatccaggagccacgggtcctgcacttcaaggacagttaccacaacctgcgcctatccatccacgatgtgcccagctccctgtggaagagtaagctccttgtcagctaccaggtgagggccagggccgtggccagcgcacaagaggcctggagcttgggctcacctgacacctcctctctgcawccccatcaggagatccccttttatcacatctggaatggcacrcagcggtacttgcactgcaccttcaccctggagcgtgtcagccccagcactagtgacctggcctgcaagctgtgggtgtggcaggtggagggcgacgggcagagcttcagcatcaacttcaacatcaccaaggtggacgggaggggctgccgcaccgccgtgacgtgctyccactaccaactccccaccagcccccaaaacgctcctgccctgcctgccctgccacccactctccctcccgcctgtccccaggcccacctcctcctagaaaccccttggcagcttcctcccagactcagagacagggaggcacaggtgcaaatgggacttggggaggggagtgcaggggacatgrgagcagcaggaggggagaccctggagggcttccctgaggaggggctttgtactgggccccaaagaatgagccagtttggctgcggcattraggggaagagcatttctggcrgtgagagctkggcaggggggactcaggccgtgaagagagctgtgtgtgttgagtgtcagcagaggctgggcagagtgacttggaggggagaagggcggagagggagggaggccacagagggctcctctgctctctggctatgtggctttgggcaggtcgctgcacctccgagccccagtaagaagggccttggcacatgggaggtgcccaggaagtaccagtgctcatgccgcccccatgctctgggggagtctgggagctcccccagcaggaggtggcggtggacccgggcctggggaaagttctaacaggcacctctttccctcccacctccaggacacaaggtttgctgagctgctggctctggagagtgaagcgggggtcccagccctggtgggccccagtgccttcaagatccccttcctcattcggcagaagataatttccagcctggacccaccctgtaggcggggtgccgactggcggactctggcccagaaactccacctggacaggtgggcgggagaggggcagagagggcctgcgcaggccaccgacagtcctgcccggcggcggggtgggtgaggtggacaggaggccctgtggggcctgtgccgcatctactagtggccggggcagtcattgtgtttggcttcggggaggccctgccctggggtgggccagggggggcaggaggtgtcrgctggggccaggccaggctgctgacggcccccctcccctccacagccatctcagcttctttgcctccaagcccagccccacagccatgatyctcaacctgtgggaggcgcggcacttccccaacggcaacctcagccagctggctgcagcagtggctggactgggccagccagacgctggcctcttcacagtgtcggaggctgagtgctgaggccggccaggcccgacacctacactctcaccagctttggcacccaccaaggacaggcagaagccggacaggggcccttccccacaccggggagagctgctcggacaggccccctcccggccgaagctgtcccttaatgctggtccttcagaccctgcccgaactcccacctctccatggcctgcctagccaggctggcactgccactcacactcggccccagggcccaggagggacagtgcctggagcctgggccaggcccagcccatctgtgtgtgtgtatgtgcgtgtgatgctacctctcctcccgtccctctccaggggccccgcatacacacggccatgcacgcacacactgggcctgggccagggccccagagctcctgcctgagctggaccttatgcaaacatttctgtgcctgctgggtaggggcacgtctgaggggccctgctccaagcctgcaggaccgagggccacagccggacagggggtagcccctggattcaggcacacgaccaccacacgagcacgtgccacgcatgcctcgtgtgctcatctcacacacacccccctcccgggtcacgcagacaccccccaaccacacacatctcatgccgtacacctgaggctgctcacgtctcacgcccagtgttggtgcacatttgcctctcacatgctgccctctccacccacccagggacaccccacggctcctccctgcccctgcccctcccccagccttgaggtgccctgcccggcggggcctgtgaatatgcaatgggagtcccaggctgtacagtggtgagtgtgtgtgtggcgtggcgtgcccgtccccagggctggctggtgccccacgcggggcctgtcatgtgaagctcgtgtcctgactttgtcttaagtgcattcacgcacttactcttggccttatgtacacagccttgcccggccgccggggcacataggggttttatcgggcgtgaatgtaaataaattatatatatatattgctaacctgagtgctacttctctcagggaaagccagggagcaaggccaaatggccgcagaggggtcacacatgggatgtcccaggagtcctgggtggctgggcctggctgggaaacaggcagaccccgacccggctccagcaaggctgcggcggagacctcctcagcctggaggtttcctcagacacgagtcaactgcgcaaggcggcaggcaacagcggtgaccagggccgcacctttgccggacccatcctctgactgcaggaacgtgaccacacagcgaggggccagctcccgcactgtggccgccaccaggctggagaagctgtgagaggagggctgaggtgagcccaggccaccagccccacctggccacacctccctccccagcccgcacacccagactcaccgcgggtgcagcttgtagagcgttccatccacccccacagacactgccagctcttccaggccccggttctcccggatcttctccaccacggcagctacacccgccccacagagctgggcagccctctgggacacagcctggcacacctctagcaccatcagggcgtcatctgaggtcaggggtagccccagatcctctaggatggctcggacctgccgcagggccaggctgtcactgggggccaggaaggaagagagcacagggaggtgggtcgtgacttctcccacttcatcctccagagcagacctcgtcaccacccatggccagcaatcccccacagtggacagaaagaccccctgaagtgggggaggcaatgtaggcctcaggcacctttcgatctcagagaggaacttggtcttgaagatgtccctggtctgaaggcgctggatctgctggccccggaagagaacgccaaggctggttaaatgtaaaaggatgtggcggacgatctcccccaggtacatgccgctgatcatcttttcaaacctgcatgaacatgtgtgcactcggcagaaggccccaccagccaccatccccagcaccggtcacagccagccaccactgcctgggcccagcccacacctctgcttgccggggttgatggacgcctggtccacacttgcatcaaagcgggtgctgagcatggccagagagccatcgtccccaaaggcgccccactccatgttgatgcacatgcggcctgagtccccaggcacgcccgccacattccggagctcctccatgtagcaggcattggtgccggttcctgcagagaggccagacaacgtggaagctacttactgatgtagacaaggaccctctgagcacttcccataccgagatggcaacgattcgggctcactctctctacctctcatgctcacagcctgtccctggtcctggtccttcttccttcccgacatccctcgtgcagaccctgccagctccaagccctggggaccttcactgcctttcccaccaacatcaccatcagtgcatccaccatgccacccccaagtgctcctacaatgcccagctgtcctgtcattcccctgggagacatgtgacatcccccgccctcgcccctagctctctgcggttgagaggccgaagctccctggaccggcctgccaggcccttaatccaactaagaggtgctgggccaagagcaggggacacagagaaatcagagacgaggagccccacagtctggccagaggtcaggcaatgaatagccagctctgacagagcctctgtgcccccgtggaagcaccaaggagagcatcgtgggagcccagaccacggggcgagtctctgccaacaggatcaggaaagcaacagagaggaagtgactgaatccaagaagcacagaaagaaaaaggcattccaggcagaggacgcaccctggatgagggcgtctccttcctttctctgacacagcttcagctccaggaaggtgggctccttgctggccccacctggagctcctctgtccagctgtttatgcacacagcaacctgggcatgcctctcccaagtgcctaaccgtgccaggtgctgggttcaaaaacctccccctcaagagaggctgccacatgcctcgtgttgagagaccaatgccccaggagctgtgggatccctcctccccaacagagccaaatcctttctttcagggctttcaagttccactcatcctgggacccactccttcctgatcttggcctcgctgctgcccacgtgtagaatcaagtcactctctgaccgctacgtgttgttctgggcttaacccttgctgagtggtcggttctgagaaggcagaaattgcctcttgttttatgtgtcttcctattcctctgtccagtcccctgtggacacagggtaggtgcttaataaggatggaatcttggactgtctgaaggaccctcattgctcattggtcccctgcccccgcccagctccaaacaccaggtgtgtaccatgagccagggaccatgctgtattttgtcccctcccatttcatcctcatgatgccttgagacaggcattgttactcttatctccatcttagagatgaggaaactgaggctctggtgacttgcccaaggtcatacaggtggaaacacaaagctagtatttccacccaaatctgtacaactccaaagctcagattcatttatcagatgggcaaagtgaagttcagagagcttaaatgaccatgagtcagtcactgagctggactatacacccaagctccaaactgccagcccaagagattgttccagagccctactgggtcagaccagagcaatcccacatccccaccgccaaggaaacatccaaccagaggaatcaacagaaggcagcaaattgccaagcagtaggggcatgaaagggcagggccctcctcaccgacaatgaggcctatctcgcaacgggggtcctcatagccacaggacatcatggtccccaccgtgtcattgacaatggcaaccacattcagctccactgcctgcacacaaaaggatgctgctagttgctgggcaacgcggtcgtcacagcaaccagcactggacccagaggtctctaccgcagagggctcccccctcagaaagtaggagactctttgctcccctcaaggcctgccacagccccaaagcacccctagaacaggctcctacctgtctgcgagtgatggcttcccgcaacagactcacgacatcttggccctcgcagtctgatgccttgaaacccttggtccagttcaggaggatgccctggggtgagaccgagaggaagtggcaggaagctggaggccccttcaggctcactctgcctctgcaaaacctgcatccatcacaagcctaggctttccaccctccccaagcacaattccttgcctactttgctgtatggttgaaggccttgccctctgcccgctccctactccccaggaggctttcggtgtgcaaaaacctattaataaccatctaacctacattttccattattagttccagacagtcagagggtctggccattttaagacgtgtgcccggaaggaatggccctttgtaattgggttaggaattaacagagctggtaaagtgagtgctgtgtgtgagacaggggaggacagagaaggctcagaggcccagatgacagcagatcccaccctttcagaaagaactccaagttactctagaggaaggaattctcagcttcagggatagagccgtgtcaatgggcgagtcactcatgtgttccaaatgcaggggcaggaggaatggaaaagccagaacccaggcccctgggcaggatgaaggctgagtgcccagattgtgagaaaagggacttaaacttagtgacacggggctcaactttacctggaaaggaatgctgttttcttagtgtgcgtcctctgagggagggggcagggggagcaggaattagtctacagctgttgggagaaaattactgctttgctcagaggaggagcatggagggtaggtcaggaaatctttggggcagaagattttagaaatagtaagcaacgttttcctccaataatatgtccttttatcccgttttttattgtcctaggctcattgtctcaaaaacagaaagcagagaatgtgatagagtgagagaaagaacccgtttgagagagaccagatgatgagtaagagccctgtgtgggctgctctccctagagtggggaaggggaggcaaagggggaagtcagacccaggttgctgatgacttcctgagacaggtgtcctatgccctccccactgggctgaacccctgttcagaagggatctgagaaatctgagaacagaggaggcctctgccctccttccccagataatgcacaggaaggtgtcgagactcaagagaggaagtggcagaggcaagtgcccaaagagcagggcccggggcacctccctgagttcccacatccctgcaaattctgcacagcaaaggctgctgcagagccaaaggggctcctggggaaggcaatccccacactggttaagttttcacccctgaaaataatgtgggcccaacattttttttttaagatggagtcttgctctgttgcccaggctggagtgcaatggcacaatctcagctcactgcaacctctgcctcccgggttcaagtgattctcctgcctcagcctcccgagtagctggaattacaggcacacactgccacgcccggctaatttttgtatttttagtagagatggggtttcagcatcttggccaggctggtcttgaaatcctgatctcatgattcacccgtctcagactctcaaagtgctgggattacaagcgtgagccaccgcgcccagccttcagcacagaaattaagttcagttacagaaaattaataagactatatttcttgcccccaccccgccccccgatttgcacatggagtctcacctgcttctcacatcttacaaggaataatcaaaaggactgagcaggcttagcctggagcagagcagccaagcagcaagactggcccactgcaccatccaaaggaccaccgtgtaaaagaaagcagagtacagagttgcatatcaggtggagtgcggtggctcacgcctgtaatcccagaactttgagaggctgaggtgagcggatcacctgagatcaggatttctagatcagcctggccaacatggtgaaaccccatctctactaaaaatgagctgggcgtgttggcatgtgcctgtagtcccagctacttgggaggctgaggcaggaggattgcttgaacacaggaggtggaggctgcagtgagtgagccaagatcatgccattgcactccaacctgggcgacagagtgagacttcatctcaaaaaaaaaaatgagttgcatatcagagagaggtcagagcaggagcagggggtgaaaatcacatggaggctggttggagtaggtgagatgaagcttttcattgatcacaggtgtctaagaatgcaactgttgccttm

SEQ ID NO: 98224 - DNA, 28156 bp, Homo sapiens
tgcagccggtttcgccctcggtcctggcaactgtcgcgtaaccacccatgaaagcgtccatgcctcgccgtgcgatagtatctccggaacaaatttgtccctctgcgcgatccggaactccgaggtcgttcctacgcgccgtcgttcgcctcttcacatcggattgggtctcacgcaaggatgaggcggggtttcgccgtggcgcgcatgcgtgcagcaaagaatggaggagtcggaacccgaacggaaggtaggagagaggcgagaccccgcgcgtgtgggagcgggcgtgaagaggggagcaggccgtgcctgactggcgtgtgcttgcagcgggctcgcaccgacgaggtgcctgccggaggaagccgctccgaggcggaagatgaggacgacgaggactacgtgccctatgtgccgttacggcagcgccggcagctactggtgaggggcacgcgtccggggagggatggggccgtgaccgcggggtcgcagggggcgggcgtggcctcggcctccgtggggaggagggcagtctgaggagtgagcttcagtacaccagggcgcggcccccagacaaacgagggaccgacggcttgatctgaggggtagggcagctttgcgcctcgggcacaggatcctcgccccaaagccaggatcctgacgctgaccttgtggactccatgcccatcctatctgtggatcccgggtggaacctcagctccagaagctgctgcagcgaagacgcaagggagctgcggaggaagagcagcaggacagcggtagtgaaccccggggagatgaggacgacatcccgctaggccctcagtccaacgtcagcctcctggatcagcaccagcaccttaaagagaaggctgaaggtgggctgggcagcactgcctgggcgagaaagaagaagctgagcctggtacaccgttttggtatctgtctgacatcttccacttcttttctcagcgcgcaaagagtctgccaaggagaagcagctgaaggaagaagagaagatcctggagagtgttgccgagggccgaggtatggttgtagccaggatagtgagaaggtggactgagtcttctcctcccagccccaggcatgttatatctcaagggatctggcttctcagaagcaggagccagccctgagccatgtctctctcttcagcattgatgtcagtgaaggagatggctaagggcattacgtatgatgaccccatcaaaaccaggtatgtctgtacagtctgcagttgcccttgcttaggatggtacatgcagggatgctcccaggccagctattcccagggctctcttgatccctgttacccatccacagctggactccaccccgttatgttctgagcatgtctgaagagcgacatgagcgcgtgcggaagaaataccacatcctggtggagggagacggtatcccaccacccatcaagagcttcaaggaaatgaagtttcctgcaggtagtcaggggctggagagagataccacacttttataatcaaatgcctgtgaggttatgtcctggctcccactgagctcagccacatctgcattggatccagtcactggggctggagggatttgaggaggagtttctttaggttccttgttgcctcagctgtacgtgttcattgttctctgctgttacaaagcttcaggaggaaagtgccattgggcatagacactgggtacaaatcctggctgcacctagcctgtgggccttggacaagtctctttttttctttttttttttccactctctctctctctctctgagcctcagtttcatcatctgcaacttgtaggggtagtgccagttttacaggctttggggctctgagaaagtacctgtgagtcatgaagacgatgtcggttggttttcatagccatcctgagaggcctgaagaagaaaggcattcaccacccaacacccattcagatccagggcatccccaccatgtgagtgtggactgtggacctggggtccttgaggagggctggaacagggaggagcaatggctaggtgtccttcatcttctgttgaaattggccctcgggtcatcctctcccaacagtctatctggccgtgacatgataggcatcgctttcacgggttcaggcaagacactggtgttcacgttgcccgtcatcatgttctgcctggaacaagagaagaggttacccttctcaaagcgcgaggggccctatggactcatcatctgcccctcggtaagataggctggcctggagggcaggccagagattggggctgccatctggtgccagcctttgtccctctgcctgcagcgggagctggcccggcagacccatggcatcctggagtactactgccgcctgctgcaggaggacagctcaccactcctgcgctgcgccctctgcattgggggcatgtccgtgaaagagcagatggagaccatccgacagtgagtgctggcgctccctgccccccacctctgccacctgcgagtctgtggaaaagctaaaggaccctttaccttagccactccacagatcttcacagagggctgctgtgagtgcgaccctcaaggagctcccagtctaatggggaggttagttgggggaggacagagggatgtggccaggtactgtgggagcacggcagatggaatggcccaccttgctggggacatctgggaggtgggagctcagagaaggcttttccgggaaggtgacatttgaattgggaagaggggcagtccaggctgaaagcacagaggcggacggcccaggaaggtcagggtcattcagtggtcagtcaaggaggttgaggcactggggtagggctggatcccagcggcacctgtgtcctttcagtgctgtgcagtcctctgcagaccaccagaggccctggaccaggccctctgttcacagatgggccagaccccatcccggaggccttcctccacggacttctgagtattagggagatggtgagcacagaaaaggtgaagccagtgggccaggaaagcgagcccagagtaaagcctctggagcttgatgacagcgcttctgggtgagaggctgacccaggagaagggggaaggcgcgccaggccgagcggtggtgaagatggctgcagtgccttgggaaagagctgtgtgctatacatagggcaggtggtgggaatgatgagaaggggacagacaaagaaataggaaggaggacagagagcagagcagatgcagggtgcctgcttgcctctagataggtgataggccagtggccccaacctgagggtctctccttggtccccagcggtgtacacatgatggtggccaccccggggcgcctcatggatttgctgcagaagaagatggtcagcctagacatctgtcgctacctggccctggacgaggctgaccgcatgatcgacatgggcttcgagggtgacatccgtaccatcttctcctacttcaaggtgccgcccccgcccggccagggcaccctgcaccgccccccactgcacgccacatcagactgcagggaccccatgcccctggccaccccaacccactgctcatactttgtgggctgtgtctcagttgctcagcttccccagaccccatgcccctcagcccagccctgtgtgcccttggtcgcagcccccctcttcctcagggccagcgacagaccctgctcttcagtgccaccatgccgaagaagattcagaactttgctaagagtgcccttgtaaagcctgtgaccatcaatgtggggcgcgctggggctgccagcctggatgtcatccaggtgggcaggtgctcctgatgggcggtctctcacctgtgggggctggatctgacaagtctccctgaagctgattggagccgggggtccaccttgtgggaaccgggggtttcattcaaagcccctgacgcttaaccagggccatttttagggcaccagcccttggcggccagaggcttctggtcacctcctggtccagatgacgggccatggcagggctgtggcgggtaagcctaatctcaagatcacctgacctgatctttgtggtggcaggaggtagaatatgtgaaggaggaggccaagatggtgtacctgctcgagtgcctgcagaagacacccccgcctgtgagtgcagccaggccaggccggggccagagtccccaggaccagggagggctttggaggggacagagtgccaggggaggtgcggtgggtgcccaggcagttagcccctgactggagttggtctttccggacaggtactcatctttgcagagaagaaggcagacgtggacgccatccacgagtacctgctgctcaagggggttgaggccgtagccatccatgggggcaaaggtcagggtggtgcaagcactggcttggaccctgctgcagtagcagcgctttacctaatgccttcccctgcctggttggcctgccactcccctatcccatggtggctctgacagtgtctgcctgaccctccccagaccaggaggaacggactaaggccatcgaggcattccgggagggcaagaaggatgtcctagtagccacagacgttgcctccaagggcctggacttccctgccatccagcacgtcatcaattatgacatgccagaggagattgagaactatggtaagagcctggggcccaagggcatgggttaggccggaaaagggccaagccaggcccctagtgtccagcgatgggccagagactctgtccttctctctgcagtacaccggattggccgcaccgggcgctcgggaaacacaggcatcgccactaccttcatcaacaaagcgtgtggtgagtctgttaccagcgccaccttagctgttccctgggtcccctgcctgtggccacccaggttctggccacagagcccaggatgggccctgatgcttccccactcctcccccagatgagtcagtgctgatggacctcaaagcgctgctgctagaagccaagcagaaggtgccgcccgtgctgcaggtgctgcattgcggggatgagtccatgctggacattggaggtgactgcagagcgggatccccgagtccccagccggcaggtggcagggaggggtgctggaagtcagaaacgtgaaaccggtggaccgagggtgcctaacggggggcccgaagtccagggcatggatcctggtccttgacttggctgacccctgtccccattcccccaggagagcgcggctgtgccttctgcgggggcctgggtcatcggatcactgactgccccaaactcgaggctatgcagaccaagcaggtcagcaacatcggtcgcaaggactacctggcccacagctccatggacttctgagccgacagtcttcccttctctccaagaggcctcagtccccaagactgccaccagtctacacatacagcagccccctggacagaatcagcatttcagctcagctggcctggaatgggccaggctggtcctggctgcctgttccctgtgctcttcagaattactgtttttgtttccttttaccccagctgccattaaagcccaaacctctagcccagccctggccctgcctctgtgtttcacctcatccgccccctggttcctggacagacgtcacctctgacctctggagcccctctgaggcaaggccccagcatctcccactagcactgccaacacctggcctgctggtacttggctgtggaaggagccaccgagctggtgcccgcctctggggactctgggtctctccactgggttgtctgaatttatgactcaaggagggaccacattggcgggccaaggagaagtgcttggattctctggtctccctggccagctgtcatagctctcaggcccactcttcctgtcagggctgtgatgtttcagggacttctcctgaagccccttgggaggctgcttcttgcctcaggacccccacccactgcctgcctgtgccagccacctggagggagccctccattccgttgactgaggaggcagcagatgtcatagaactgccatttaggccacaagctctccctaagcctgctctgtgcccagctctgctgagctgtgaggacctagatgggccagggagatggctgcctgggaagccgtcaggcgaggggagagaaagacgcacaygcagaaacgtggacggcagtcacaagaccgctagcagatgaggcaggatctcagcatctggtgagaggtaggcagggaacggcacaggcggccacacttcctctgagccaggcactttgcatgtatggccacatgctcattccagtgagacagcggttgctcaagccatatttgtcacttgatatgtggcattgggcaagttacttaatttttctgagcaccgatttcctcactgttgaaatggcgatgagaacgcaaaggatgtggcgtctgaggtggayggagcttagggctgcttgggccacagtgggcacagagctgggtgccaggaggccttcaggacatatttcctggccaagtgcattcccaaatggcattccttatcctcttccatgttctctcccagaggtggtgctgaatgacctgaggctgttccagaataaaggtatacacacagccccgctattggcatcttgctaggcaagccaacaaaaggcgcccccagcaggaagcaaagctttaaatgaacatgtgacctctccggggccccctgggacctgccacccacactcacrtggttggggccattcagggctgtgggtcccatgtggactggatgcccagcgtgagtgtataccgtgagggccttwgagctctcggacagcgtggagtggtcaaggaaggcctccaggaggaagaggtggccaaccgccccaggcagcacagtggtgagggggccctggaggggctggcctgggggagatgcaggccagaacacacaggtccctgagtgttgggctgaggagcctggkctgcaccccaggaaggggagagacaggttggtcttgggttgtggagagtgctgcatggagscccagtggggcagtggcccctggggggatgccaaaggctggtgatgttcagtggctcgtgaggtggagaggagcaggtgaacacgagagagatttcagggagaaagaaaagcagcaagatggggtgaggcgctcaaaccaggacgccgagtgggaaagccaggagttggctagagaagggtcctgggtggaggcagggccagggagtgtcaggcccagggtgcgcagctgcccggggcgggacgggggaggggcgggaactcatgactcggggagccagactgcgatcagacgcgcstgcccagctgaaccaggtgcgtgagaaggctgccttcaggtggccgggggctccctccaggtaggtgtgggcaccttgggcagccagaaccccagggaggaaatacatgctgcccccagcccctgagctgaagacaggctcccctccccccggcctgcagctgtctctrgacggagggacgggaagtggccagaaggggaagtgtgaggagttcccgtccagcctgtcrtcagtctccccaggtcttgaagcggcggccctgctcctggccgtgaccatggaccctckggagacccctatcaaggatggcatcctctaccagcagcatgtcaagtttggcaaggtggggacccctggctgccaggcagctgccaaggaccaacagtgggtggagaatgcagcctctgcccctgcctcggacagcccaggcagacctgggagacttgggaagggagtcagggtggaggatcccacccaggtatggggagtggaatggagtgcgggtgtcagcctgagackgcaggggctgagcaggctctgccagacmctgcctccgggagagatgggaaatacaggagtgggagagggtcgaaggctcaaacctcccagcagggaagagcttcacagcctctgacccatgaaatagtgccaccgagggccctaaatagggtgaggggctgagctggaggaggcctcaagggtggagcccctccctgcagcggcactgtcctgggagcaaggaggcagggggtcacctctcctcggcagcagccccacacccccgcagctcagctgcagctgctgcccaggcagataaaccgtcagtttcctttgctcgaagctatttgcatgtttccttccttaacagcttgaggcagaggcctccctcccaccccagctcttggcctgtggcccaagtgcccctttttgggggtgagagggaaccaatataatggcagtgtctggtggtctgcccggccactggatgctttacaaacatgacccagtagcagtcccagctcgagttctcatggccttttgagagacgacattgatgcttgtggaggtcacagttaggaaagagcgggctgggatttgaacccagggctgaccaatcccaagcatagccaaggcctccttacctggctccctgagaaactggggagcagaggcccgctcctggctgggagcgtttgccgagcagcttgtgctgagccaagtggcacggacaatctgccacccaagggtcttcaccctcccgctcccctcccgcagaagtgctggcggaaggtgtgggctctgctgtatgcaggaggcccatcaggcgtggcacggctggagagctgggaggtccgggatggtggcctgggagcagcgggtgacaggtcggcagggcctggccggcgaggggagcgacgggtcatccgcctggctgactgtgtgtccgtgctgccggctgacggcgagagctgcccccgggacaccggtgccttcctgctcaccaccaccgagcgaagccatctactggctgctcagcaccgccaggcctggatgggccccatctgccagctggccttcccggtgagtgcggcgagcagggggcgattgggctggggcacctgcccccgacttgtccacctccacgctcacatcccatcacccagcaagctccaccgagcacctacaagcctgggaaaagtaaatctataatgactctcagagggccgtgcgtgccatggagaaaatggaccgccaggggagcaggaggaagtgagggagcgacgggcagggtggccagggaaggcctctcagaggagggccctgaatgacaggaacccactgggcaaaggtctgaggacaggggcagcctggggagttgtgaacagagggagtcccgtgggcagaggccccgaggccggacagtgtggggtgtttaagggcagaaagaaggcgacgtggctggaaggaaaggagtgcaggaggaagccaactcacagagcttaggagagcggctgaaatgccctaggccatgtgtgtggttttgttctgagtgagaggcgaaggctttggagggtttaagccggacatgtttgtaaagccccaaaaggtctgtgatgggtcaaaaggaagtgagcctgggggttcttcaaagaggtaaacagagttaccatgtggcccacaggtccactcctaggtgtgtgcccaagagaacttgaacaggtgttcaaacaaaacatgtacatgtgaggcaggaggatcgcatgagccccagaggtcgaggctgcagtgagctgtaatcgtgccacttcactccagcccgggagacagagcaagaccctatcttaaaaaaaaacccacatggacatgaacgtccatagcagcactactcacagccaccagaaggtggaaacagcctacatggccatcagctgacaaatggataagcaaaacgtggtccgtccgcaagatggaatactactcagccataaaaacaaacaaacgcctggcacagtagctcttgcctgtaatcttagcactttgggaggctgaggtaggaggawtgcttgagcctaggaattcaagatcagcctgggcaacatagtgagaccctgtctcaaaaaaaaaaaagaaaagaagaaagaaagaaatgtacagacaaggtaactccattgggatagaaatcagatgagtgttggcaggagctggaggaagggagaagtggggagtggctgctcatgggtacagggcttccatgtgggatgatggaaaagttctggaactagacagtggcaacagtgcacagccttgtgagtatactaaaaagcactggtggccgggtgcggtggctcaggcctataatcccagcactttgggaggccgaggcgggcggatcacctgaggtcagaagttcgagaccagcctcaacatggagaaaccccgtctctactaaaaatacagaagtagctgggcatggtggtgcatgcctgtaatgccagctactcgggaggctgaggcaggcagaattgcttgaacctgggaggcagaggttgcggtgagccgagatcatgccattgcactccagcctgggcaacgagagcaaaactccgtctcaaaaaaaaaaaaaaaaaagaaaagaaaaaaaagagcactgatgatacactttaagatgtaaaatgggccgggcgtagtggttcacacctgtaatcccagcactttgggaggccgaggcaggcggattacctgaggtcaggagttcgagaccagcctggccaacatggtgaaaccctatctctactaaaaaaaaattacaaaaattagctgggtgtggtggcacacgcctgtaatcccagctactacttgagaggctgaggcagcagaattgcttgagtctgggaggcagaggttgcagtgagcttagatcgcaccactgcattccagcctggccgacagagcaagactttgtctcaaaaaaaaaaaaaaaaagtaagatggttaaaacagtaaattttatgttctctgtattttatcatattttaaaaatcaaaaaacaaaaggcagttgaggttaggcatggaggttcgtgcctgtaatcccagcactttgggaagccgaagcacgtggatcacctgaggtcaggagttcgagaccagcctgcccaatatggtaaaaccctgtctctactaaaaatacaaaaaattagccaggcatggtggtgggcacctgtaatcccagctacttgggagactgaggcaggagaatcacttaaacccgggaggcgggctgggcgcggtggctcatgcctgtaatcccagcactttgggaggccgagacaggcggatcatgaggtcaggagatcgagatcatcctggctaacatggtgaaaccccatctctactaaaaatacaaaaaaaattagccaggcctggtggcgggcacctgtagtcccagctacttgggaggctgaggcaggagaatggcgtgaacctgggaggcggagcttgcagtgagccaagatcgcgccactgcactccagcctgggcgacaagagtgagactccatcttaaagaaaaaaaacaaacccgggaggcggaaattgcagtcagccgagatctcgccattgcactcaagtatgggtgacagagcaagactccatgtcaaaaaaaaaggcagttgacaggagcaaggagcctggtgaggaagctgtggcatttgacccggctgtgttgctatgggccagggtggtgctagtagaggagctgagtgggaaagagcacaggggacatgctgaaggcctgggtgtggggatgaggcagagattgggggcaccttgcagggtcatagcaggtggctgtggtgagatggaggaagacacctggggtactgctctaggctgtcagacatacagaagctggcccagccaagcccaggggctgcaagggacatccttttgtgtccccagtgatctgcagctctcagacaccctcaagcacagtgcctcttgcccagcccagcactctcagtggggagccaggtgggagaacaggctcggaaggggacctaggcttatgcagcgagccgggcaaagctggaactggagcccaggcccctggatgccccctggcttgtggagttctgggatactgaggggaggggacagggcatgggagtgcggtgctctcacctttgacttgaactcattccccaggggacaggggaggcctcctcaggatccacagatgcccagtctcccaagaggggcctggtccccatggaggaaaactccatctactcctcctggcaggaaggtaagttggaggacgtgcaagggcagcctcagccccccacacccagggctgggtctttttgggactgacggagctgtcctggccacctgccacagtgggcgagtttcccgtggtggtgcagaggactgaggccgccacccgctgccagctgaaggggccggccctgctggtgctgggcccagacgccatccagctgagggaggccaagggcacccaggccctctacagctggccctaccacttcctgcgcaagttcggctccgacaaggtgaggtgcaggggtgggaaagggtgaggggctgacascctggaccctcctgctaatccccacccgtgtgccctgtgcccagggcgtgttctcctttgaggccggccgtcgctgccactcgggtgagggcctctttgccttcagcaccccctgtgcccctgacctgtgcagggctgtggccggggccatcgcccgccagcgggagcggctgccagagctgaccaggccccarccctgccccctgccacgggccacctctctgccctccctggacacccccggagagcttcgggagatgccaccaggacctgagccacccacgtccaggaaaatgcacctggccgagcccggaccccagagcctgccgctactgctaggcccggagcccaacgatctggcgtccgggctctacgcttcagtgtgcaagcgtgccagtgggcccccaggcartgagcacctctatgagaacctgtgtgtgctggaggccagccccacgctgcacggtggggaacctgagccgcacgagggccccggcagccgcagccccacaaccagtcccatctaccacaacggccaggacttgagctggcccggcccggccaacgacagtaccctggaggcccagtaccggcggctgctggagctggatcaggtggagggcacaggccgccctgaccctcaggcaggtttcaaggccaagctggtgaccctgctgagtcgtgagcggaggaagggcccagccccttgtgaccggccctgaacgcccagcagagtggtggccagaggggagaggtgctccccctgggacaggagggtgggctggtgggcaaacattgggcccatgcagacacacgcctgtgtccaccctggcctgcaggaacaaggcaggccgcctgtggaggacctcagccctgccctgccctcctcatgaatagtgtgcagactcacagataataaagctcagagcagctcccrgcaggggcactcacggcacacgcccctgcccacgttcattgcggccaacacaagcaccctgtgccggttccaggggcacaggtgacctgggccttacctgccacccgtgggctcaaayccactgcagcagacagacgggatggaaatcattaggactccatgttgctctgcacggccgagtgacacgaagaggcaggcggagrgagctgtgaggcttacttgtcagactcaggaaggagcaacatgagggcccaactggagacccggaggcccgagctgggaggaggcagtgggggcggggtgcaggtggaagggatttcagagacaccctcgtccaaaacacttgttccctgctgaaactccaacaatttgcagatacttctgggaaccccaggcgtcagtctcctcatctgtaaaggagagagaaccgatgacgtatcaggcataatccttgatgagagtttgctgcgtgcctactcagtgccaggcgctgggggacacagccgtgttcaggacagccttggtcctgttctccgggagccgacattccagggggagagaagtttcctgaagacttccatgctgcgttccctctgctcctgctcctggcgccatcctaggagccagccatgcacgcaagcgtcatgcctccagggctctgactgcccagcccctcaccgcaactccacctcagctgcacacacccttggcacatcctgaacctcattttcatgacggacacacaatttttgctctctcctgtccaagcctcatcctctggccgccacctcyttccagctcacttcctttagtgcggccagtaccgcccctgcctaggcatgtcgacctgcagggacccttttctggctcttcgaggcctctgcccaccatcccctctttgttctccatagtcccttccccctgttctctctcgtttcatcttactggtctggcaaagtccccggccttgggcgagcccagacctcctcagtgcctgcacacagctgcccacagccagagaaatccatttaagcagactgcctgcatccttcttaacagtgcaaggcaggcactccctgccacaagagaccctgttccctagtagggcagcttttctcctccccagaacctcctgtctatccccacccaatgtctcctcacaggcatattggggaaacaggtcaggctctcccaccgtatctgcaagtgtactggcatccatctgtcttcttcctacccctacagtrgaaacagtgtctgtccccagctgtgctctgatcccggctcctttcacctcagagcttggaaaattgagctgtccccactctctcctgcgcccattcatcctaccagcagcttttccagccacacgcaaacatgctctgtaatttcacattttaaaccttcccttgacctcacattcctcttcggccacctctgtttctctgttcctcttcacagcaaaaactgttcaaaagagttgttgattactttcatttccactttctcacccccattctcycctcaattaactctccttcatccccatgatgccattatgtggcttttattagagtcacsaaccttattctccaaaacaaaagcaacaaggactttgacttctcagcagcactcrgctctggttcttgaaacacccccgttacttgctattcctcctacctcataacaatctccttcccagcctctactgctgccttctctgagttcttcccagggtcctaggctcagatgtagtgtagctcaaccctgctacacaaagaatctcctgaaagcctgtaaaaatgtccatgcatgttctgtgagtgatctaccaagaaaataaaaaattttaaaaatcaaatgcccatgcctgggcccacacgcaggggctctgatttcatcagtctggtaggtgggttctgggcatccacgctcactggatttccggatgattgtagtatgcagcctaggctgggaaccactggcctcagcaagccagtcattctccaggtgtcacagaccctctaggtgctaatgaccccgaaggtctgtcttcagtgcacacctccccctgagctccagatttaggaatcccactgcacacgagacatctggatgtggaaaagacatctccagatcccatgggtgaaagggggttgggggaatggagactctggtgttcttccaggatgtgtgtggacacagaatgcaaagcctggagggatgctagagccatagggaggaagatttcrgctcacttattcatgcaagcacttcctgatgggtaaggtcttagagcaagctgaggccaagaggcgggcagtcgaggtgctgctgcaggcacccccactccctacagtggcaagcccaagcccagcccttggcagctcaaatcccaggacacgctgaaggtcacccagagagtcaggggcatggctagaaccagaacccaggactctggggacccagcatggcatcctttccttcattacaaatctgagctgctttgtttcctagggatttctgtgatattccaaggggactgtgggaaagaaagtccttggaaaccaccaggacgctagaggcctggcctggagcctcaggagtctcggccaccagagggcgctgggtccttgtccaggtccagttgctacgcaggggctgcctgtgctgggaggctccccaggggacacagaccagagccttgcaccagcccaaggaatgggagcctggggtcctctctgctggaggactgccaggacccccaggctgccgcctcttcctttgctcatttgctgtttcactttgtcaatccttcctttcttcgtgtgttcattcacatccactgtgtgctggccctggggaaatgttagataagacacattagctgtgtgtcttcattgtcctaacaaagaacacaccctggaaagagcaccgcagagagtccccattcccccatctccctccacacatggaatctggagatgccttttccacatccagatgtctctggtgctgtgggattcttaaataaacaaacatttcatacagaatgtgagatgatggagatgctatggggaaaartaaagcagagggagggcctagtgtgtgatgcgggtgaggcatccagggattgctgtttcagctgtgatcaggaaaggccctgggaggaggccacatctgagcagagacctaaataaagttggaaacctgttgctgagatatctggagaagtgtttcaagggccgggcaccgggcatggtggctcacgcctgtaatcccagcactttgggaggccaaggcaggtggatcgctggaggtcaggagtttgagagcagcctgaccaacatggagaaaccccatctctactaaacatataaaaattatccgggcatggtggttcatgcctgtagtcccagctactcgggaggttgaggcaggagaatcacttgaacgtgggaggcagaggttgcagcaagccgagatcacaccactgcactccagcctggatgacagagcgagactccgtctcaaaaaaaaaaaagaaaagaaaaaagaaaaaaaaagaaaagtgtttcaagcwggggaactggcaagtggagaggccctgaggcagaaatatgcttggcctgctggaggaaatgtgagtgaggaggtcagggtggctggagtggagggagcragtggtaggagtcagacccagtttattcatattctgtaggtcttaaggacttcagttttgagtgcaatatgagcccactggaatgctaaaagctgagagtgacatggtgctgtgattctggctttaaaaatatcactttggctgcttcgtgaagactctggaaggggcaagggtgaaagcagggatgcccgttaggagaccgttacaggggcgcaggcacaaaatggcagtggctgggacaatggtggcagcagcggttagatgtgaacatgttgaaggtggaatttgcagaatctgggggaggacagaagagaaaggataacttcatcgtttctgctgaaccagttggataaatgttggtggcacttcttgaagtgaggaaggagttaggaaggtgggaaaggyacaagtttgaattgggccatgatggtctgagatacctagtacagtggttccccaacctttttggcagaagggaccgctttcatggaagacaatttttccacagactgggggtggggtggggatggtttcagggtggttcgagtgcagtacatttatcattagactctttttttttttttttttttgagatagagtctcgctctgtcacccacactggagtgcagtggagccatcttggctcactacaacctctgctgcccaggttcaagtcattctcctgcctcagcctctcaagtagctgggattataggcatatgcgccaccacgcccagctaatttttgtatttttagtagagacggggtttcaccatattggccaggatggtctcgaactcctgacctcaagtgatcctcccccgcctcaacctcccaaagtgctggggttacaggcgtgaaccactgcacccggcccatttatcattagattctcataaggaatgagcaacctagatccctcgcatgcacagttcacaatagggttcacgctcctatgggagtctaatgctgccgctgcactcagcttctctggcttgccgctgctcaccttctgctgtgcagcccagttcctaacaggccacaaacggggagttggggacccctgatctagtaaacatctaggcagggttttggataatggagttagagttcctggggagaggtcaggctggccatgaaacatgggatgcctttgcatataggtggtgttgaaagccacaggacagtacggggtctcagggggtgagcataaagagaggcgacatcagatggccaaggccagaggcagaggaggatgggaaggaggggccagtggggcagggggaagctgtgaagccagggaaaaagggtgtttcgcggaaaaggatcaacctggaccagtgctgcccctaggcagggcaggatgaaacttaaccaccacggattccatggccccatggcctccaggccacaggggaccttgagaagagagatctcaggggacgggtgcggacaagagcccgcctggcatggcttcaagagataactgaaggaaagcaagtggagacgcgataaacagacaactccctggaggaattttactctcgagaggagaattaaagggtagtagctggagagggatgtggggtcaagagaaggtctttaacgacgagaactctcacggcggtttgtgcagaacagggtgggtgtgatgactgtggatggagaggggagaactgcagcgactctgtcctaggaggaggtgatgggccgggaccaccaagcgagtggagggtggacgccccttccctcaccccgacacccgcatgtgctcagtgtccgtgccgccggccctagtgcctgggctgaacgcggggccgggactctgaggacgcctcccaggcggcgcagtccgctctggccaaggtggagcgggacgcggcgcttccgacggtgcgcgggtcggctcggggttgcagggacatccggcgtccgctcctgccctgttttcctgccttcggcagagcgttgcgcaactctagctttaaacgcccctgtccccctcaacttgtctcccccagcccctctgatttacagattctgcagtccccgagggttgcgcctacgataccgacactcgcggcagccctgcgaggcgagtatgatcgtcccatttttcggagtagcaaactaaggttcagagactactatgtcccaggtcggtctggtttgaaggtccgctttcctctccctccgccagcgggcggtgcgagggactgggcgaggcagcgcttccctaaggaggcgacccgcagccccggccccctcccgactccgccccgttgcagggcccgggtcggcgaggcctctcagctctaagcccgacgggacttggtgattgggcaggacggaagagctgggtggggctttccaccagcggagaaagtctagtgggcgtggtcgcgacgagggcgtggcctggtgccccgcccccgtccgcgcgctcaaagtggagggtggctgtgggggcggggtcagaacactggcggccgatcccaacgaggctccctggagcccgacgcagagcagcgccctggccgggccaagcaggtatcgacgaccgcgcggggcgtcttgggctgsaccaggcgggcgcccggggcctgctgaggaccacaaagggcactgggggtcgtggtccaggctgtgcttcctcccgctggccctggcccctgcctccgcccccgcccccgccttcctgccgctaagccggctgcggcggggccgattggcgcctgcgccgcttcctgcggccggggccagtctaatgcatggggcccgggcgggggactaaggggaaactgagtcacgtcggtgtgggagcagttctgtgtgggaggcaccaccccccactgggctcggggaaggatccccctccaagctatgcttgagggtcccagcccccatctgtctccacaggggccgcaccccactcccgccttccccttcttcagcacccaggggtcccgccctggctcccagcagcctcgactggtcccggaatggctaggaggatccgctgcagccgcctccctcccctcccctcccctcccctccccctcgcgtcccaagcccccgtgtgctccctccgctggctctccgcacagtgtcagcttacacgccttatatagtccgagcaggctccagccgcggcctgcctgccgggacctgggggcgggggagaggagagccggcccctgactcacccggccgcccgaggctccaggctggcttggggggaggccgcgccagtttagtccctcggcccacccctggttgcaaagaacctcaagcctggattcaggcacccctcaccgttccagtcccaaggggaggggggctgctcctgtctttccaaagtgaggtccgccagccagcagcccaggccagcctgacaaaatacctgcctcctatggcttgggcgtgctcaggggctgcccgtgcctgcctggcccctgtccaaggctggtatcctgagctggcccggcctgcctgcctgcccgcccaccatgctggccactcaccttctcttctctcctctcaggagccggcatcatggattccttcaaagtagtgctggaggggccagcaccttggggcttccggctgcaagggggcaaggacttcaatgtrcccctctccatttcccgggtgagcctaggtttggggagggggctcccccagcggtctttcggtgcttaggtctccagagggtgatggggggagtcctaacaggagctggtcaggggccagcaggccaggagatgtctaggtccggagatgtagtggtacctgcctgccacaaggactcccaatgaggtggatactgggagggagcacccaggcttctccagccctgcactgtacccgatgctgttctcccaagctcctgtggccacctctgagggctggagggaggctcattgtgcaggatgggagcctaacatttcaggaggtatctaaacttgaggtggcaatgcttggagccaggccccaggcaggacactgtgactataggatttcacttcagcctcactgccgcccagggaatagcaatcctcatcccgtttttccagatgagagaagaactcatggagaggtggcggggctcgctcatcgagtccatggtgaagcagggattggaattgaggcacagcatggcgtacattttttgtgggtagaaggggtctctccccagcctatgtaaggacccacatccactgttcccattcaggatgtggtggcctttgaccccaagcagaagtgtaggacagggctccattctaggggcttaacttcagcttccaagagcctgccctggtgtgggtggagctggaggctggctcctccctgtagcagggggattgccttataagcccaagaatgcagccccacgctgggatggccaacagtggctgcggtctgyagagctgaaaagggctggcctaggcctggccccctgaaccccactggtgggcctctcagctggtcaccaggctgcagctccagctgtatggtccagttgtgagacacaacaaattgcctgcccagagtgggtgaggccagcctgtcggctggcatctctgactggcctgggggtcaggagggggtggggacttcctgcccctatatccgcctgccccragagacccacccaggcgccgggtgggcaggcagctgttgtcaggaagcccaaggcaagcccagcctggaggggcccagagggtcgtggcctgaggaggggctcaagctggagtctgtctgtaggagctgggcgtgggggttagggtgggcaggccagcagtgctcttctcaggggtcctttgatggcattctcctggaacctgccccgccagcagggtagtgaggcagtggttgccctatgacacacgtcccactacatagccctcacacagccctgaaacctacctgacgtcctgctccctgggaaagtgctggcccagtgtgtctggggagcctgaacctcagtttcttccctgatggagatgactttcagatatggcctgttgggggcactccgggctccagctccctggtcagcatccctggcatgtgggcggggccactagctgatcccagccctggagttggacctgggcccacatgggtgggtgaggtgggcttttctgagttaggccagccccctccccctcccctgaccccagaatggagggaggtgggaggggcaagggctggctgtgggcccaggcctgggagatgaggtaacgtctgggactggggggctgggctgctcaggctgactcacccccacctcatgcagggtccagccccctggctttttccctccttggttcctctggccttaccctgcccctggcttgagcccctccctgcctctctccagccacccgcccagcgctgtcttctgctctcctgctgccctccccacgctctgaacacccctcatcctctgtgcttcctgccctcctcactctgggaagggaagccgtccccgccccccaccccctctccaggagccagctagctgcaccccaagacccccacctcgggctcagcccacagctcccaggagccagccctgtgggcagggagtggctgggccaggtttcccttctactgactcaccatgaccttgagtaagtcacttcccctctggggtgtcacttccccatacacagtataaggggttgatttagttggattgaactaaaggtgagggagtggctcagggtgtctccaggtgggctgacccctcagttgggcccccatgctcagcagaggtggcccacagtggtggagccttagggtcagagacacttcctggctctgcctcttactagctgggtgacttgaggcaagttgtttaacctctctgtgtacatttgcaagtgcaaaatgggtaaaatcccagattactccacaaggttgttggaagattcagtgtcaatatgtagcatagttggtgctcaataaactgaagcaagtcttcttatctagcgagtgaggaaggggccgccgagctctcttagccttctgacctcctacgcaagcaagaggtcatgttgagcccagctcgcctttcttttcccagtgctgtcaagctctgtgcctggctgccctgccctctgacatctctctgaaacctcttgcctcccctctccctgcctcagctcagtctgtgcactgacccacctgaggagcctcctggggccactggcagcctggacccccccagatcccccccacccagtgaaattgtcttccagcactgcctcacaaaagcctacttgatgcagtgccaggcctcttgccagatggctgggtggtcccttaggcttggacccagtcaagctgccctgcctgtgttgctggggctgggctagaggcctggaaggggtttatcagggtcaccctctcagggcctgggagatacccaatcccagacattaaaactgccagtagcccctctaccttcaaagccaagtcctggtcccttcccctggcattcaaagccatcgtaagtgaactctcacccgctaggcagcacacgccattctcctttaccgaggcccaccgcttcctcaaagtcattcctgatggtctcagctcatgctggtggcagccatttctcccagcctactgtctctactcattgccacaggaaccagggactcccagctcaagagcctgaaggattggggtcaggggaaattggcagtcgagggcttgggagtgacagccatgtatggcctacgaagtcccagctgtcaacttaggtcccattcaggcagtgttcacagggaaccgggagataacagggcctgttcctggctctcaaagggtcccagcagacccctatagatggcccccgacagggtgctggggggtgagaggtccataagagcccccggtggtttcggggaggaagctgccccctgcatgggccagagggcatatctggtaggtggagtggcctgggcaggaggccagcaggagcctcaaaaggcaatggtcctcctgaaacacttgggctttagcctgagcgtggctgtttgtggacatcatagcaatttctggactgtgggggagggtggtggcggtgaatagataagcatcgtgactggggaagctcaggtgagcaccacctgagggagagggtctggcagtgaataaataagcagtgtgactgggaaattgtgaagctcaggtgagcgccaccacctcctgggttgctttagtgtccagcagctgcctagaactatgttgaatgaagagctctctgggttctggaagtgggacagctttgggtggggcagtgttaccaccgtcagcctggcttgggtctgcagggtccagggcctcggtcactttgcttctctctccacagctcactcctgggggcaaagcggcgcaggccggagtggccgtgggtgactgggtgctgagcatcgatggcgagaatgcgggtagcctcacacacatcgaagctcagaacaagatccgggcctgcggggagcgcctcagcctgggcctcagcaggtatgcgggtggacatggatgggtgcgcccgcgctggcagtggggatccctgcgggcccggcccgctgtcacgctttccttctcctccagggcccagccggttcagagcaaaccgcagaaggtacgaggctggccgggacatccgggcggtgggcggtgtgggcttggacggccaggcctgctcgccctcctggcacattctcggtaccccaatccctggccgggagtggagggcagaaaccggagctaaggcgggtctagggccctggagttgagccaggggctgctgcacggtcctggcaccacgcatgtccgcctgtctgtccgcctgtctgtccgcctgctgcctcccgccgccggcgctgcgtgctcgcccgcactcggtcagccctcggtcctgcgtggactgagatcgccactcccaaatgggccccttgaaacctgagtcgtcctctccccgtagcctccaaatagatgtagggggtggggtgggggtggggggctggagctgccgctgtcctctgctgcaggcgccccacttccacccaggcccccaccttaccctgcccgcccgccctgcccggctgtgtctctgcccaggcctccgcccccgccgcggaccctccgcggtacacctttgcacccagcgtctccctcaacaagacggcccggccctttggggcgcccccgcccgctgacagcgccccgcagcagaatgggtacgtcggcccctgcccgcccgcgcccacgccatcaggcccactgtggccccacgcccgctgcccgctgctgctcagtctgtgctgcgccccagcccggcggaaccgtgcggcagcgccccctggcggccggggtggggctgcaggcacagggcccctcccgaggctgtggcgccttgcagggcaccgccctggggaggggtctctgaatgacgccgcgccccctgctggcggctgggggttgggttgtggtgtcgggccagctgagccccagacactcagtgccgccttgtccccggctgttctgacccctccccgtctttcttcctctcctgtgtctgtccctttgtccctttatctgtctgtctgtcttatttccttcacaggtgcagacccctgacaagtcagtgagcccccctctgcctgtgcctttcttcttccttttggcactctgggtggcggcccctccccaccctggctgccctcctctccacttcgccctcctgtcctctcacctacccgcccagcagggctcctggcctcacccttacccactccctcccatcactgtaacccaaacccacatgcaccaaatcctgggaggggctgcccccaccgcccacccccagtgtggggttctgagccacaccctccccacagacagccgctccgaccgctggtcccagatgccagcaagcagcggctgatggagaacacagaggactggcggccgcggccggggacaggccagtcgcgttccttccgcatccttgcccacctcacaggcaccgagttcagtaagtgccagcccagggcagggggtactttcctcgcccccagcccaggcgtgatccctgaccctgtgtcttttttggtcaatgcctgcctctgccctctcagtgcaagacccggatgaggagcacctgaagaaatcaaggtacagggacgggcaccagcccctctcccacctcctgcctcttccattccagctactgccctgtgtctactcctgaggctcccagctggggctctcaattctcccttccttccttccttccttccttccttccttccttccttccttcccttcctccttccttccttctttcatttcttccctccctccttccttccctcctccctccctgcctcccttccatctctccttccttccacttcttcctccctctctctctgcccctcagggaaaagtatgtcctggagctgcagagcccacgctacacccgcctccgggactggcaccaccagcgctctgcccacgtgctcaacgtgcagtcgtagcccggccctctccagccggctgccctctctgcctccctctttctgttcctcctgcccagggcacccccttagtgcctccagcttctgcctacctcaccccccctttcgtgcccctggcctgagcctcctgctggcctggccctggccgcccacctgggttcatctgacactgccttccctctttgccctgtggtactgctgtctgccaggtctgtgctgccttgggcatggaataaacattctcagccctgcttgctctgcctgtcttctatctttgtggacctggtttgcatttggggtgtgggggtgtttcgtggttcggactgtttgggccctgccgtcctcgttttcagtgggagggggtacctggcaaaggggccctgccctgccatcacagatggcttcctggcatgaggggagccccaggagctgcctcagaagcgggagccctgcctcgtctcccagctagagaccgcacaccagctaactggacattgctaggagaagctgcccttcccatccctaccccagtgggacctggaatccaactcggcagtttccacgcccccagtcatctcccgtggggccagcaggacccaggttggggggtggggccatgtcaggaagctcagccatgcagggccttgaatggcagatcttgcagccaggtgcccaggacagaagccccagccccagcctcatctacaccccaggagccctggcctggtgagagggagtgggctcgggcctgggcaagggtgggcagcctccaggggcatgggggtggtgggcttctctcagctgcctggggctccacccccgtcctttggggtccctgggcacccctttagagtcactttccccggcaggccctaccgcccccagccctaccagccgcccgccctgggctgtggaccctgcgtttgccgagcgctatgccccggacaaaacgagcacagtgctgacccggcacagccagccagccacgcccacgccgctgcagagccgcacctccattgtgcaggcagctgccggaggggtgccaggagggggcagcaacaacggcaagactcccgtgtgtcaccagtgccacaaggtcatccggtgggtggcctgttcctgtccgaccctggctttcccatcctgcagcccagccccacctgtctgcccacctgtcttgcctcagctgcgactggggggaataaggattcagttctcagctggagtaggagtagggacctgggctgggtcctcccattcttaatcccacgctacctaccccagcccacccacaacaactgctagcagcatctgccgtggcgaaatagccgaagggccaaccataggctgaagctgcacccctacctttgctgctctctgggcaaagaggggcctgccccctcccagcgcgtctgcccctccctcctgctctctgtctccctctgctctcagagcatacaggcctggagccactccctctgtgcactgccccgtggggccaagcagcatca

SEQ ID NO: 98225 - DNA, 16225 bp, Homo sapiens
gcacaggccagacagcagagagcttgccaagtgagttacagaaaggggtaaggcagtcagggcatgccttaagtcacatgctaaagccagaccaactcctccctttttctagagagaccgccaacctggaagccagtagccttgcagccaggcccaggttccacacgcagctgagaggtggcctggtaggaaaccccccagggcttctgacttaccccccattatcctgtggtggtggattcagctggggaggagcacagcccagtcctgagagtggtctgggaaggctggaacctctacagattctcccttgccctctgggctttttctggggacagggtagagactggagagatggatatggggtgatatcccaccttcatgaaaagaagcagtgactattatccaggggaacggcgtggactgggtactccgagcacgtccacacgctaattccctcggccctgctcccctctcctatgaggaccacatccccatgggcatcatcctgtgctctaagagcacaaaccgcagagcaactggattgaacccagagtcccaattcctcaggacagtggacaccgagaacaattgttcctggtgccaccaggtggcaaaccagatttgcagtcccagtggctcccaggcccaggccaccctggctctgaggggcagtccagaagaggctttgtctccctcatcaatcactgcccaagactagtaaaaggcggattcaaacccaggcaggctggctccagagcctacactagatagctacactagcctgcatcagttgcgtggatctttgcaccaaccctgtgtcaaaagcacagaattgacatcagtaaatttctctggaaacagctatggaaaaggatcaggaaatagaaatgctcctctgttacctttcctttcttgtctcatacagaccttcgtactacgaggtttgaatcctcagctgctctggttacaggacctcaaaactgcaaaggtaacgggaagacaactggcacctcctgttgtgctaggcagtgccatgctctttacatgtgtgcggtcctttaatcctcacacagccctgcagagccaatactgtcataactggctcagtgacggaaaggctgcggtcggacagatgcaggggtctctgctcacataattacggaggactcctgcccaggtcgaacgctagtccacgctttctattatattcctgttttcccctttcaacaccaagtctgaaaaatccccaaaagtacaagttgtggccactaaattccagaatcttatggcacctgacggacttaagaaacatgaaggaaatgaggtgtcattcacgaggaggagatccagtcatgtgttctgtgagaagacttacagggacacatctcaagtgccccacgaatggaggcagtcaaatcgctttccccattctgctttagtgagaaacaaaattagctaaggtgtgggccaagctcgcatctttcacgtagggccaatacagctgcacaggaaatggactaatgcgtgtataaggagtgtctagtacgtgccaggcagtgaccagccaggcagagcacggagcttctgtctggtgggttctgctggtggcctgcgaaggatggggggaagtgttaaggaggaagggtagggtctgaggctatatggatgtgatgaggaaggcagagaccagagaaacggaatacacgtcctcagggatcagagacaaattgagaaacacaaatccatggtgagaggtcagcggagtcagagacccgcatgcagatagagggaggctggtggagaaacacagacacaacgaaacacataacgagagagactagcaaagaggggatcagaaactcacaaagggaagtcaatggagaaatacggacccacgggccggggggaaggtgctgggggaaggacgagtgccgcggaaagggagagggggcgggggaggcagagacccacagggacagacagaaaccggaacagagcgccagggacccacagggagaaccacacgccctcacagaaacccgcagacatggagacgtgatggcctcgggttcccagattccgccggcggccgagaagggagcggcgcccgggaggacggggcccgggcccaccgccgccgctcacctgccgtcctcccagggcagctgcgccgctttcctccgcgaggggaacatcgtgcggagaggcggcggcgcatggggcaggcgctcgcagcccggccggcccggcctcccgggcctacgcggcgcctccgcctcccgctccgcccaggcctatccgccccgccccccggtccgccgggtccgccgggtccgccgctccgccgcgcgcgccagctcccggagccgccgcctccaaggttctgcttgcgagcagcgcgggcgcgcctccctctctgggcggctccttcctagccgccccgggacccgcctggaagcccgagaaactgaagcccagaggcccagggcctcccaacaaatcactgggctgggactggacctaagagtccagactcccaaaccaacgctcggggagaatctgcatctccgtcctctttccgaggggaggcgggagcgtcccggggtccccgtctcggcccaggcggcgcgttctccgcgcaagcttggaggggcaaagccaagctcacggctcggcgctgagttcagctgacagcccgcgcaggcgttaggagccgagccctgaagacaagttgactgaatttgaaacccgactctgcttgccgggcgcggtggctcacgcctgtaatcccagcactttgggaggccgaggcgggcggatcacgaggtcaggagagcgagaccatcctggctaacacggtgaaaccccgtctctactaaaaatacaaaaaattagccgggcgtggtggcgggcgcctgttagtcccagctactcgggaggctgaggcaggagcatggtgtgaacccaggaggcggagcttgcagtgagtcgagatcgcaccactgcactccagcctgggtgacagggcgagactccgtcaaaaaaaaaagaaaagaaaaagaaaaagaaactagactctgccaattcagctgtgttttgaccaagccacatctctgcatctgtttcctcacctgggtatatcaatggctcctattctatatggtagctgtggggattcaaggagaaagtgcaaacacttgtgcagcgctaggcacacagttcaacgccatataaatgacagctgtcatccaggaaaagggtactttggtggagctgagaactgaagaagggaataggagactgagttcccatatctgccccgtcaccgtgggaacttaaccatccccctcacccccagcccccccacccctcctactagcctcctacctggggaaagaaagcggcaattgttagacttgacctcctctgctcttccaggcaaactttaagtttcctaatagatagcaaacatctattaagttcttattatgtgccagtcattgttaatagttcttactacatgagggttatctcacgtagtccttatcggtaggtgcttatccccaagttaaaattgagagaactgaggcacagagaggcaaatcaggtagtttggttgcaaatctatgggtttggggtttttgttttgtttttccccacaatctatgatcttaatcactctgctccagagagaacttcaccgtgggtgggaaatgaatcattcccagtaacccctttaccccgtaaacctggaagtatataatccacccattccccttcctgttgactcccccagggcactgcatcctaccccagaaccgtggtcaatgcacagcccatctaaaggggaccactccatccggttagctgttactatatcaggatgaagctctacttcagattgtcagattcacactctcaagaaatcagatctcaaatgaaaacccaaattatctaatttttaaatgtgatatccagctaagagccatgttgataatgacacttcaactctgatctcttttctacttttttattttattttattttatttatttatttattttttgagacagagtctcactctgtcagtcaggctggagtgcagtggcacgatctcggctcactgcaacctctgcctcccggggtcaagcaattctcctgtctcagccttccgagtagctgggattacaggcgcctgccaccacgcctggctaatttttgtatttttagtagagacggggttttaccatgttggcggctggtctcgaactcctgacctcaggtgatccgcctgcctctgcctcccaaagtgctgcgattacaggcgtgagccaccatgcccagcctgtggtctcttttcaaaaacccacaactctagtctaatcatgagaaaaacatcagacaaatcctagctgagaaatcgtacaaaatacctgacctgtactcctcaaaacagtcaaggaatcatcaaaaacaaggaaggtctaagaaactgtcacagccaaaaggagcctaaggagacacagtgactaaatgtgatgtggaatcctggaacagaaaaaggacagtaggtaaaaactaaggaagtctggataaagtaatgcatgatgttactaatagggaaaatgtcttcacaatttttctgcacttttaaagctgttctttaaaaatacttttttttttttttttgacatggagacttgctccgttgctcaggctggagtgcagtgaagtgatctcggctcactgcaagctccgcctcctgggttcacgccattctcctgcctcagcctcccaaggagctgggactacaggcgcccaccaccacgcctggctaattttttgtatttttttttttttttttttttgtagagatggggtttcatcatgttagccaggttggtctcgatctcctgacctcgtgatctgctcgccttggcctcccaaagtgttggggttacaggtgtgagccaccgctcccggccttttttttttttttttttttgagacagagtctcactgtagcccaggttggagtgtagtggtgtgatcttggctcactgcaacctctgtctcccgggttcaagcaattctgccgcctcagcctcccaagtagctgggatttcaggcatgcgccaccacacctggctcattttttgtatttttagtagagatgaggtttcaccatgttggccaggctggtctcaaactcctggcctcaggccatccacctacctcagcctcccaaagtgctgggattacaggtgtgaaccaccgtgcccgccaaaaaactttttttttttcatgtggaagaattagttggcagcatgagcccagattgcatcatcccattaggggaagcagcccccaaacttgtctccttcttcctggtctttctcacacactgctgtaacctccctcacatttcttattagaaggttcttctcaaaactgcctgcccatttgcctcccccaacccccaacagcagcctcacatccctgatcaataacactgtgattctgaggtgccagtagggctctcagtggctttaccagaccctgggtgattactgcaaagggcccagaggccagagggaggggggcaggcatttaccccaccacctgctcagtattaagccagccaagctgctgccttcagcttgtgcctgtgggtgcctgcagcccctcttgaaaggtgggcatgtccaaatcgcttacctggagctcgaggcttctctaatccaaccttcctttccagcttcctcacaacaccctctgcagctgaaattaaacacccacccacctccattccagctgtttgcctccacttctccaaccacccctgtcctgccatctccttccagcagaatccttcctctccttcatggtcctggttgaaatcacttgctgttggtttagcccatcaacatccttgtccctgccagcccagggtggctgtcctgtagcactcccctgctcaatgcacctccttaccaggcacttcctggcagcatccatgacaatcctgcttactgactctagaaagagggaacttcaccagggagctggcacagaggaaagggtgtaaatttgagccccagcccaatttacttgttgtataatcttggacaaacccactattccctgccacaggaaggcctggagaagaaggaaagaatgaagctgactggtgggaattcactttggaatgtgaagtgctttgctctttggaagaactggcattccctgaggcaccctgcagtgtgtgcccactgatgactgagtcacttgcactggacaagaagtcattttttttttwattgggaaactcatgtaacaaacctacatttattgaaaatgaaatcagtaactaaractctgcaggccccaccccaaccagcaccaaggcctctacttggtctggtcccagttctttaagccccagaatggacaaccatgtgaagcagctcaggtcaactgcagggccacattcccacactgcaaacccctccacccaccytcaactcacacacaccctggatcagcaggtctaggctgaaagagagaacagtgaggttcccagggtggcaggtgggtatgacaggcaccataccccaacctgctcaaaaccctaagttagcaaaggaagacagaagactggcttgcctgcccattcccctcccccyacccccaasagcagcctcacatccctgatcagtaacactgtgattctgaggtgccaagaggaggggctttaccagcccytgggtgattactaccaaacggcccagaggccagagagagagggcaggaatttgccccactacctgctcagtattagccaagctgctgccttcagcttgtgcctgtgggtgcctccagcccctctcccttccagaacaggtatggctggaaaccagtcctcctgacagaagaagtcagttccaggaggtcctttctcccccagcctgggaggatgggttgtgacgcctgggacagctacacaagcttcttggcttcaaagaagctcttgaggtgccgcatctgccagacaccgatggccacgaggatgagggtctgcagaatggaccaccacagcacccgctggttggtgctctcactggtctgccggaagcgctcctctcgccactgcaggggaatataaggtgagcctgagttggctggggctgctagaactgctgattcccagaccaagaggatgcccaaggtcagccagctttgcccaggttccagccaagtgcctgcaaagtgtcactctacctggggactatctttaccctcaggcaacctactcattctcccaagtctgtttcttcatctgtcaggcatagccctcacctagtcctgccctggtgcctgggagagaggtaaggtagttgtggtatcaccccacgaggcagagctgtcctggagcacacaggagtggacttgctctaagccctctgcctaggtctcccacactgctccttgaagatggtgggcacaggctgtaaactggcaggctgggggctggatctggcctttaggtatgttttgttggcctcacacagtgcacagtcttttgtcaacatttaaaacacaggtaatttgtgcagcagcaatagaaaaaaataaaaaataaattaaaatgttcgcataaaaatcctatttcctcttgaaaaaatggaacatctgtaaagccagggctggtatttctgcaaggaagcccccaggtgacactgaacagtggctgtgcttgtttagatgggtcactgccctactagtccttaaggtcacagattcacttatggtaatctctggttcctggtcaccggtaagtttgagaccctggtcctgggagcatgtggacccactgaaacagcacccaaggtgttggtatcaaatgctactgtgccattctgtgtgtaactgtgatttagggcaatgacagcctcttacgagtctgtatcctcaattacaaggtcgagttagtaatacccgccccacgacctacaatgcagtgcaggtaagtcccttgggggtctcagaatgaatttaatgtgaaattcctggctgagccagtgggcagcttctagggagaagcccactgctcccggcccagtcactcacccgctggtagttctgctctttctggatctgctccacttgttccaccagctgtcgcactcgtagctgcaactcactcaacttgtctttagcagcaatttctgcatagtcattggcatgttcacctacctggatgtccaggtgaactctctgaggacagacaaaggagataagggaaatctggtagccctgctccatcttcctgccagagactgacagctcatccccgactttccttcatctgttcatttagccaacagactgggccctcttcagtgtcttagccccatgaggctctgggcacacaagcaagtattaagcctrggctggtgctctgagtgaggcatgtacaaagagctcastcactgtgtcctggacatccagtggaaacccagtgttcttaggagacacaaaatctgacataatcctctcacacccacagcaccaccagtcccccagtcctcaccaaaggatgaaggctgaaacctgcaagtctcacatgggcccacttaccagcatgcctccagcaaagagggagaacttggtggaattggagtgaagacagatctggtgctcaccaggggtatgggaagtgaaagtgaacctgccctcggagccatactgccgggccaggatgacctggaggaaggtaacaagcttcagtcagtattatggtagggatgggaatggaggaaaacagtgcttaaggctctaagtactgcaaaagttgacaggcacagcctttcgcacctcacaacactgaaagattcaaagctgctcagcagctgttgccatatgcttgtgtgagaactctctggggcaggtgtttagactctgagagtctgacattagggtggcaagtgactgactgctcttgggaagggctttcctttatagcttatgccctttcaacttttttggtgtgagttgttttttggggggttcttttttgtttttgtttttgagacagagtctcactctgtcgtcctggctggagtgcagtgatgctatctcagctcactgcagcctcagcttcccaggttcaagcaattatcgtgccttagcctcccaagtatctggtattagaggtgtgcgccaccacacccggctcattttttttttttttttttttgtatttttactagagacggggtttgccagacggaggttgcccaggccggtcctgaactcccggcctcaagtgatccacccgcctcggcatcccaaagtgctgggattacaggcaagagccaccayaccccgccatgagttttttaacgaaaagtgacagaaggtgagagctgaagggttttgccgttcgttttaatatccttacttgggaagattaaaagctgctcattttgtggggaaagtatcatgttctgtgaaatcttaaagtctagatgactttaagagttgacaaaactctttgatttttatcaccacaattaatccgcccatttcacagaccgggcggggtctgcaagtcagcaggatattcccacaacatcaactgtctctcccactttagcagatgcaggaactagaagaggaagtaccggagcccgcctagctgagaggctggcggagaggagggggggggttggctcaccttgtcctctgggtccttcacctccacaaacatgccaagccccggggtggccggctggtactcctcccgctgcttgtcatacagctgcgtccggtagtttccttgagggaagcagggcgagcccaggtcagaggagcgcgaggtggcatgggttccgcgaccgcctgggcacggcgaggccgtctcctcccggctctagagagctgactgtctcgcatcccccgccccaagaccacggtcacgttccaaactcgccccttcctccccgcccccgcacctatgaccatggtctcgtccgggatctcctcaataaagcacttcttctccgtctctccgatgtgaaagtagagcgcgcttccgcgcgtcgccagccacagcaccagcaggagggtccgcatcactctacccagcccgsttccgggccggggccggacgagcagcacgcccagctccacagccatcttgctccacctgcctgcgcagccgcagccggccgcgccacgtcgccctgccgccgccgcggtgcctgccgggaccgcgagttccgccgggtggaccacaaatcccgagatgtcccgcggccctggcgcggcagtacctgattggggcgcggcttttacctgagagagagcgggtgccctagaataaaaacttatttccgttgactctcttcatggcctggcaactgacgatggttaccagcttttcatagatgaaactgaggtcgtttgtttgaggttgcggagcgaattgcgaacagagacaggattcgaacctaggatccctgactttccttggcacagcatctaccagtcttgatttgcttctacctttaaaaatgaatttaaagagaacgaccaaataatgcacaaatgtattatcaaaaaagattaaaagaaataaaaggcaaggtctcccattaccacttctttgtcctcataccctgtccactcctaaatcgggtgttaccctctcaagcatttctccgatcacacacacacacaaacacacacacagcctctgctgccagatcccgactgcaatggctcgttactagcaattctacagaaatagaaaggatcataagagagtactatgagcaaatataagccaacaaattggataacgtagatgaaatggacaaattcatagaaatgcaaaactgactcagaatagataatataatctgaataaacctataactagtgaggagattgaatcagtaatttaaaaaaaatcatccttacttaatatagttaagatgtcaatactatccaaagcaatctacagatttaatgcaattcctgtcaaaatcccaatgacattttttgtagaaacagagaaactcattctacaattcatatactctcaagggatttcgattagccaaaacaatcctgaaaaataagaataaagctgaagaactcacacttcctgatttcaaaacttacttccaagcttcagtcatcaagacagtgtggtactggcatatagacagacatatagaccaatggaatacaatagagagccccaagatatgccctcccatatatggtcaaataatttttaacaaggagaccaagcccattcaatgcggggaggagggacagtctttctaacaaatggtgctgggaaaactggatatccacatgcaaaaaagtgaaggtggttccttctctaacaccatagataaaaattcacccaaaaagacccacaacttttaaaatcccaaagcataaaactcatagaaaacatatggcaaagggtttaccacatcggatttggcaacagacttcctggatatgacactaaaggcacaggcaacaaaagaaaaaatagacaaattggactttatgaaaattaaaacattttgtgcatcaaaagactctgtagcagagtaaagaggcaacccacagaatggaagaaaatatttgcaaatcatatatctgacaaaggattaatatccagaatatgcagagactcctaaaactcagcaacaaaataagaacaatctcattcaaaaaccacaacaaagggcttgaatagacatttctccagtgatcaacaagtggccagtgagcacatgaaaagatactcaacatcactaatcattagagaaacacaaatcacaatgagataaagaacaatgagatactacgtcatatacccattaagatggccactagaaaaaaaaaaaggaaaagaaagaaactacaagcattggcaaggatgtggggaaattgaacccttgtgcactgttggtgggaatgtaaaatggtacagacactgtggaaaaccgtataatgattcctcaaaaaagtgaaaataggctgggcatggtggcttacgcctataattccagcgctttgggaggcagaagcaggaggattgcttgagcccaggagttcgagaccagtcggggcaacatgacgaaaccccatctctacaaaaaatacaaaaattaactggatctggtggcatgcgcctgtagtcccagctactcaggaggctgaggcaagaggattgcttgagcctgggaggtcaaggctacagtgagctgtgatcatgccactgcactccagcctgggtgacaaagcaagacactgtctcaaaataaataaataaaaatagaattaccatatgattcagcaagtccatatctagagatatcctcaaaataattaaaagtagggtctcaaagagatatttgtacacatatgttcacagcagcattattcacaagcaaaaaaaaaaatggaagcaacccagttcttcatcagtagatgaatagataagcaaaatatggtacatccacacaatggaaatcctttcagccttagaaaggatgggaattctgacacatgctacaacatagatgaatcttgaagaaacattacgctaagtggactaagccagacataaaatgataaatactgggtaattccatgtatatgaggtactagagtcgtcaaaatcacagagacagaaagcagaatggtggttgccagggactggaggacagggagagtgaagttattgtttaataggtatagagtttcagttttccaagataaaaagagttctgtagatggatggtggtgagagttctatggcaatataatgtacttaatcccactgaagtgtacagttaaaaacagtcaactttggccgggcacggtggctcacgcttgtaatcccagcactttgggagaccgaggcgggaggatcacaaggtcaggagatcgagacctgcctcaccaacatggagaaaccctgtttctactaaaaatacaaaattagcctgtgtggtggcacatgcctgtaatcccagctcctcgggaggctgaggcaggagaattacttgaacctgggaagcagaggtttggtgagctgagaaggcacctttgcattctagcctgggcaacaagagtgaaactccatctcaaaaaaaaaaacaaaagtgtggtagaatgctccagtgtaatcatctgggccttgaaatttccttttggggagtgttttaattatgaattaaatttccttaatagctatagggctattcaaagtatctatttcatactagtaagttgtgatagtgtgtgctttttgagtaattgatctattttgcctaaattgttacatttatgtatgtagaggttcagtcaggatggtggggaaaattatacaataaaacacaaaacttggaaggccaaaaggtttttgcttagcttcagatagtttggctgaaagcggcctaatcctctttgagccatagcaagggtaagtaacataggaatgtagaggagtctatctaaatagcttgtttactcatgtggttctaaaagtaacctttaatcattcgcgggcaggatggcgctctgggggaggcaggggaaggcgaccaggttgattaccctctaatggtgtttacttgagacttttgctgtgtttaatgtgtgctaagtaaatgacgagaaggccagcgagtaggaggcggggagtcggggccacgttgcaaatgtacagcactctcctgggagtctgtagggggcctggacaatccgcctgactgacaagcagaatatctgtgtcagtgtacattattcatctgtcgttgagttgaggtctgcagcacacacccccacatatgtatgtaaagttgtccgtggaattattctcttatgatccttctgatgtgggcagggtctgtactgatgtcacccgtttcattactgatactggtgatttatgtcttcttttttctgtatcagtcttgtaagaggtttgtcaattttatcagtcttttcaaagaatcagctttttgtgtcattgattttctctgttgcttttctgtttttaatttcattggtttctgcttgttattttttcctcttctgcttgctttggatttagtttgttcttcttattctagtgacttgaagtagaagtttgtggggtttttttgttgttttgttttgttttgatttttgagacaaggtctcactctgtcacccaggatggagtacagtagcaacatctcggctcatcgcagcctccacctcccaggttcaagcgattctcctgcctcaccctcccaagtagctgggattacaggcatgtgtcaccatgctctgctaatttttgtatttttagtagagatggggtttcaccatgttgcccaggctggtctcgaacccctgacctcaggtgatctgccctcttcagcctcccaaagtgctgagattataggcatgagccactgcacccggccagaagtagtttagattattgatttgagactcctcttttagttaggattttggttgtacctagccagaggaatggagaaaagtatgtctatatcatcttctcagaagcagaagtcctaaactatcaggtatgttttaaagaacaaaattattacaaataaaattaaatccttattccctccatccctttccagatgcagctactttaataactttgatttatatctattccactaataagatattttaaaaataggccgggtgtggtggctcacacctgtaatcccagcactttggaaggctgaagcaggagagctgcttgagctcaggagttcacgaccagactgggcaacatggtgaaaccctgtctctacaaaaaaatacaaaaattagccgggtgttgtggctcgcacctgtagtcccaactacttagccaggcgtggtggcacattcctgtagtcccagctacttaggaggctgaagtgggaggattgcttgagcccaggaggtcaaggctgcagtgagctgtgattgtgccactgtactctagcctgggtgacagtgagacctgtctcaataaataaataaataaaaattaaaagaaagaaattatggaccaggtgcagtggctcacgcctgtaatccccacactttcggaggccaaggtagatggatcacctgaagtcaggagttcgagaccagcctggccaacatggtaaagccccgtttctactaaaaatacaaaaattagccaggcatgatagcacacacctgtaatcccagctactcgggagcctgaggcaggagaatcacttgaacccgggaggcggaggttgcagtgagctgagatcatgccactgcactccagccttggcgacagagtgacactctgtctcaaaaaaataaaataaattatggcacacttctataattaaatattatatcgccatgaaaaaagaatggccatctggttatcagtaagaaattggtaactatgcctgcttatataaaagaggaacaggggtttggggagctattgtgggagaggaagctgctttgtaaatgttttactgaagcataaaaaaaagacagaaaagtgcataagctaaatgtttacctctcagtgaattttcataaattgaacacaatttgtgaaaataccaacaccagatgccataaatgtgtatagttgctgtctctgcatctatttttgggtctggcataagttgtctgaagcccagccataccctttcacctttggcctagttaaaacttcccgtccccatgtagttgcctctgatataattcactcattcctcatcccactaattcaaaacccaacacaccccatagctgctgaccacgataaaacctaatggtcatcactagggtcatgtaaatgtttcccctttcatgcatgctttctttaaaatgctcaacatcactaatgatcagggaaatgcaaatcaaaaccacaatgcaataccaccttactcctgcaaggatggccaccatcaaaaaatcaaaaaataataggtgttggtgtggatggagtgaacagggaacatttctacactgctggtggggatgtaaactagtacagccagtatggaagacagtgtggagattccttaaagaactaaaagtagaactaccatttgatccagaaatcccactactgggtatctacctagaggaaaagaggtcattctac

SEQ ID NO: 98226 - DNA, 21508 bp, Homo sapiens
  misc_feature (1)...(21508): n = A,T,C or G
acgccgtctctactaaaaatacaaaattagccgggcgtgatggcacatgcctttaatcccagctactcaggagactgaggcaggagaatcgcttgaacctgaaaggcagaggttgcagtgagctgagatagcaccattgcactccagcctaggcaacaagaatgaaactccatctcaaaaaaaaaaaaaaaaaaaaattagctacatgtggtggtgcacacctgtagtcccagcttctcaagaggctgaggtggatggcttgagcctgggaggcagaggttgcagtgagctgtaattgtgccactgcactccagcctgggtgagagcaagatcctgtcccaaaattagccaggcatggtggtgtgctcctgtaggcccagctactcaagaggctgaggtgggagatcactggagccccgggaggtggaggctgcagtgaactgtaatcacaccactgcactcgaggctggctgacagaatgagaccctgtctcaaaaaaaaaaacaaaaaaaaaatggccgggtgcggtggctcatgcctgtaatcctggcactttgggagaccaaggcgggtggatcacctgaggtcaggagttcgagactagcctggctaacatggtgaaaccccacttctactaaaaatacaaaaaattagccaggtgtggtgcgggcctgtaatcccagctatttgggaggctgaggcaggagaatcgcttgaaactgggaggtggaggttgcagtgagccgagatcacgccattacactccagcttgggcaacaagagtgaaactccaaaaaaaaaaagttgtatgaggccgggcatggtagctcacgcctgtaatcccagcactttgggaggccgagctaggtgggtcacgaggtcaggagatcgagaccatcctggctaacatggtgaaaccctgtctctactaaaaatacaaaaaaaattagccaggtgtggtgacgggctcctgtagtcccagctactcaggaggctgaggcaggagaatcgcttgaacccaggaggcagaggttgcagtgagctgagattgcgccactgcactccagcctgggtgacctagagtgagactcaatctaaaaaaaataaacagttgtatgaatgtgatctctttcttaaaatatcttattgtactatactcacccttcttgtgatgatgtgagatgcttaaatgcccatgtgatgagatgtggtgaatgacataggccttgtaatgcagccttaggctcctactgaccttgaacacaagcccactgcagtactgccacagtcactctgataaccaagacagctactaagtgactaatgggcagacagtgtgtgcagcatggatatgctggacaaagggatgactcctatccagcgagacagagcagggtgactcaagatttcgtcacaacattcagaagggcttacaatttaaaacttatgaattgtttatttctggaattttccatttaatattttcaggccacagttgaccatgggtaactgaaacctcagaaagtgaaaccatggatggggtcaactaatgtcctttggtatggtgggagtgtcgagtatgaaatgggaggacagatgaggctacagataagcttagactttatcctcaaggcagtgggcagccactgaaggcttttaaacagagctgagaagtcgctgttagattttctggcaggaggtcaccagtaaccttgaacagagcagtttctgggaggtaggagcagatgcagaattccaagagaactgtgtttttcttgtcagaccggggctccccagggaatgctatgttgctcccatcagactggtgtacatcaagggtgttgtgatacttccatcaaattggtggtttcccaggacattgtgtgtttccccagagggctatgtgacccttccccaggtactttctcaaagggtcttgagtctctcccatcagactgaggaatcctcaaagctaagaaaccattttaggctgggcgcggtggctcatgcctgtaatcccagcactttgggaggccgaggtgggcggatcacaaggtcaggagtccgagaccattctggccaacatggtgaaacctaacaatgcaaaaactagctgggtgtggtggcggtcgcctgtagtcccagctactctggaggctgaggcagaagaatcacttaaacccgggaggcggaggttgcagtgagctgagatcgcaccactgcactccagcctggagacagagcaagattccgtctcaaaaaaaaaaaaaaaccatttcatggacagaacgagacgctgtctcaaagattaggaactcctctgtgggtcgtgtgtgccgtgagactggactccctaaagggctctgtgtcccttttatcagatgggctctttacaggattctgtgtctccctcattggtcttgagcacttgctccctggctgtacttggcaagggcttgagctggaaaagatgaccagactcccaccgcccagagggcgtcccctgcaggagagcttcatgcgcctggtggaggcctgtggggactcggagcaaagcatggacaactggctgagtcggctggacggctgccgctgactgtaacatgtaaagcaggcactgagcaccacctgcctggcagtccagggcatggagaggtaaggccccattgacatagagaatagggtgagatgggcagggctctcaacccctggatgcaaaactgtgattcagtaagcaaatatagcctagaactgggtccattctattcctggcctggtacatggggctgaaggcacagacagcaccctgcttgtgacttcactggcccaactcatcctggaccccttgagcaagaccatggctggattccaggaactggtggagtggaagtggatccaggaaagtaagtgaccacccaaccccagccttaccctccatccagaaacttgcttcctcgtgcccattgctctgccccctccccaggccagccaccccttccagctgcgctgtgcccattcagccttctcccatgcccaccccaagcatgaggcacccacctttctcctcttcctggactgcgtgtggcagctgggctgccggttcccactgtcattggagtttggggaagggctactgttggcgctgtttgggcacgcctatgcctcctcttttggcaccttcctctgcaacagcgaaaaggagaggtgagctgagggggtgttgaggtagcttaggggcaggcacaggaaagggttggatacctgtgccatcagtgccttacttccttttttttttttttttttgagatgaagtctcgctctgtcacctgtcgcctggtctggagcgcagtggcacgatctgggctcactgcaacctttgcctccctggttcaagctattctccagcctcagcctcccgagtagctgggattacaggaatgtgccaccacgtccggctaatttttatacttttagtatagatggagtttcaccatattggccagtctgatctcaaactcctgacctcaggtgatctgcccacctcggcctcctaaagtgctgggattacaagcgtgagtcactccgcccagccagcaccttacttccttaggagccatctttcccgaattcaagtgggtttgtcttttaggaaaactgagtgttctccttgccccacctccaaatctcatacttcctcctaacttctgcaaacccagagataaataggtccaaggccaatcctttagacagacctactctgtccatagccaattgcaagtgaacccctaccttgaaaacaaggattaaaggggaaatttgctgcaaaaataatttataaggctctctaccactttgcaaggtcgattgtttcaaagcaatagaacagaggttgaaagcagagtggaatcatttgggctcaaattccagtttcaccactcacctgctgggtgttcatagcaaacccgtctgagtctcaatctcgtcggtagcatgaaggggataagagcagccataatctggccgggcgcggtggctcacgcctgtaatcccagcactttgggagctgaggcaggcaggtcacctgagatcaggagtttgagaccagcctggccaacatggtaaaaccccatctctactaaaaatacaaaaaattaggcctggcacggtggctcacacctgtaatcccagcactttgggaggctgaggtgggcagatcacaaggtcaggagatcgagaccaccctggctaacatggtgaaaccccctgcctactaaaaatacaaaaaattagccgggcatgttggcacccgcctgtagtcccagctactcaggtggctgaggcaggagaatcacttgaacctgggagtcagaggttgcagtaagccaagatcccaccactgcactccagcctaggtgtcagagcaagactccatctcaaaaaaatataattagccgggcgtgttggcacatgcctgtaatcccagccacttgggaagctaaggcatgagaattgcttgcacctgggaagcagaggttgcagtgagccgagatcatgccattgcattccagcctaggcaacagggtgggactccattaaataaataaataaataaataagtaaataaaagaagtggtatttttattatttggttggcttgttgcatatgctgcctatcagtcccagatgccagctgtcttatgagattgagagatgcggggagggagggttcacctttccagggtgaagatcagatttagttatcttctgttgctcagtcttcctctataccccatcctgcttcactaaccccactagtcctggatcatctctatttacctccctctcccccatccttcatctttagtctttctcctaaaattgtctgagtttggtcctcccttgccagaaggccctccccccgtcttcatccacactggtctcttccatctggactctccggcagccgcctcactgttctctgcatcttcattgttatcaattttctttcaaaagctcctgggtccagacctatcaatattcacagtgggccctttcccgccttctttctttggctcatgccgttctccccatgttggctgttgctttgcacagtgggtatgctaggtctgttgagactcagctcaaacatcacattcttaattagccttctctgacattgaggcaaaactaaattggtttctccctttaaatagaactccttaagaagtaggactttgtcttgttccccttttattctagtgcctagtacaagatctgactagcaataatgtttgcaagaaaaaggagaaaagtaaaggttatcactgctccaaagtggctgtcaccctactaaccagggctgcccacccagactcccagagggcatacctggggctggaaactcactccctgcctttctgcagatgccgtgtgaagggaggactcagatgcactccctgtggtctgggctcaaccagccaaaagagcaacaaagactccagaacccactctacctcctcaatcccttggccatctgtggagccccagagcctgcggctgtggcaaggtgagctccacaccttctcccctgggtattacccctctgctcagcgtcctgacctgtcttcctcctcctcaggcctgtttctgcgctggacctgctcacctgagcctgcagaagctgcatgggggaagagtgtggcaaatagtgacaggaagggagaagacagaagcctctcagccaactgcttcagccgagcccctattctaagcactggctccttggatagcagctgagatgttcctgaaacctctgcaggccccttaggacctttacaccttggatgagggtgcctgcaacccaggttagccaaaagtactgagggtcttaagtttgaagtgtccaaagtatagggaggtctcaataataaaagtctccatgatcagcatcagcttgctggggtgtcagtgaaaaggaaaaatgatgaaacagacaccacaaaatatctgaccagaagccatttattaccaaaccaatttatttcttagagttcaaaaccttctgtgagaatcttctctggcctggttggagatccaccttcttcttttttttttttgagacggagttttgctcttgtkgctcaggrtggagtgcaatgaygtgatctcagctcactgcaacctctgcctcctgggttcaagtgattctcctgcctcagcctcctgagtagctgggactataggcgtgtgccaccatgcctggctaatttttgtatttttagtagagacgaggtttctccatgttggtcaggctggtcttaaactcctgacctcrggtgatccgcctgccttaaaaaaaaagtggtgggattacaggcatgagccaccacgcccggcaggagatccagcttcttaagcctcaaactcaaattcgaagtactgtgggtcgaagtaatggatacggacgtaaccatcttcgccgccgctgctgtagctggaaaaagatarccaggcaccagtcaggtgcttactctgggaaaggcagagacccaacccaggcttaggtcagctgcttcactggkaccctacctcttgccatcaggatggaaggcaacactgttgataggtccaaagtgacccttgactcttccaaactcttcttcaaaggccaaatggaagaacctggaggaaaagggacacaattaattcactttctatcttcttccaaaacactttggaggtggcactccccaaatgcaaattgttattattatttatttattttgagatggagtcttactctgtcacccagggtggagtacagtggcgcaatctcggttcactggaacctccccctcctgggttcaagcaattctcctgcctcagcctcctgagtggttgggattacagatgcctggctaatttttgtatttttagtagagatggggtttcaccatgttggccaggctggttacgaactcctggcctcaagccgccttccttagcctcccaatgtgctgggattacaggcatgagccaccatgcccagcctatcatgtgtatcgactttgattggtagttgcttgtagtgctggagaaggattctgaggttcattggaagtgagtgccaggaatgattagtacatctgccatggatacaatggaagaatggcagtatatctatgtctatgtatttgctgtgtgtaggtgaggtcttggtctttggtaactagttcagcactcaaagtggggacactcaggttgctgtcatccttttacagggttttaatctcttgggaagggccattggtcactcactgcatcctagcaactcccatccatgtccagnnnnnnnnnnnnnnnnnnnntggctcacgcctgtaatcccaacactttgggaggccgaggcgggtggatcacttgaggccaggagtttgagaccagcctggccaacatctcttctaaaaatacaaaaagcagccagggacggtggccatgtacctgtaatcccagctactcagaagctgaggtagaaggatcgcttgagcccaggaggttgcggtgagcagagatggtgccactgcactccagcctgggcaacagagtgagaccctgtctcaaaaaataataataataaagcagaaaaattgagataagaagtgaatgtgaacaaaataagatggaaattggtggctgcgtgccatggttcacgcctgtaatcccagcactttgggaggctgaggacagaggattgcttgagcccaggagttcgaggccagcctgggcaacatagtgagaccctgtctcttacttttttaacttttttattatatggggaagactggacccagatgtctgcctgaatacataactaatacttatagagtgcctactatgtgctgggcagtgcttaaagagcttaataaatattaactgaataatttaatctgcataattttatgttaagtatattgtcattgtctcattatacagtagaggaaatttagacatagagaaatataatgaaggctgggcacagtggctcatgcctgtaatcccagcactctggaaggccaaggtgggcggattacttaaggccaggagttcaagaccagcctggcaaacatggtgaaatcctgtctctactaaaaatacaaaaattagccaggcgtggtcatgggtgcctgtaatcccagccacccaggaggcagaggcaggataattgcttgaacccgggaagcagaggttgcagtgagcagagatcgcgccattgcactccagcctgggtgacagagcaagactccgtgtcaaaaaaaaaaaaaaaaaaaaaggctgggcacggtggctcatgcctgtaatcccagcactttgggaggctgaggcgggcgtatcacgaggtcaggagatcgagaccatccttgctaacacggtgaaaccccgtctctactaaaaatacaaaaagaaaattagccaggcatggtggtgggcgcctgggccgctgaggcaggagaatggcgtcaacccgggaggcagagcttgcagtgagcagagatcacgccactgcgctccagcctaggcgacagagcgagactccatctcaaaaacaaaaacaaacaaaaaaggtacaccacatgagattttaatttggaagagctctcttcttctttacctggcctcaaacttgccaatcctggtggaggttgtggttacatccatggcttcctgaccaccgcccaggaccacctgaatggaagaagaaactctagatgggaccaatggacaccaagtccattttgtgtttttctgctgccatatacatttttaacatctcacacggctcaatgggaggataccaaaggtaggggatgatcagacacttctgccacctcctgctggctgccctggggctattcaatccttccagctttgtcactcctctgggcatctcctctctgcctgacatcatttcccccacaatgttgtagcccaacttctggacaagcatctagaacttggaagcttcctgaggcttcagcaggaaggcaggtggggttctcttacatggtcatagttgggggagagggcagctgagttgacaggacgttctgtccggaaagtcttctgatgttcaagagttgtggagtcaaaaagctggagagagaaggcaggggggaaatctgtaaagagctttcctgggggaagtcgggcagggtgagctgtgcagccggagggagggagcagccctgccagaccgctgcccaggctcaccttggctgtgttgtccttggacgcggtcacaaacatggtcatgtccctggataactggatgtcgttgatctgccgggagtgctccttaacattcaccaacacctctccagactagggaaggaagaagagtgacactgaatgggcccaatccctactaatctcagctccccagaaacccaagcacccaaatgaaagctgagacagcatggactttgtgttttcctcaccccctctatcctatcagtcacccctaaatatcccttgactctgtccagtaatgtacatcctatgcctattggctagttcaggttcactctccaaacataaactgcaaaagctgttggaaggaaaatctggccattgataaccctttaaagattccctactgcctggaggaaagtcaaaactctttacctcctcacactgaaggacgtttaaaatctattccccgtcctctgtccccaagaccacaccccaagggtttctgaagactccatactttcttaactctgtgcctttgcctttgctgttccttttgcctgtgggatgttctttccttcctgcttgaagctccatttattctccagggtttaatgtacacgccacctccctgggagagtgcaccttccacacttggctgagacctctatggtggcacaattcacaatctgactcaggtgctagctgtttgcaagtctgtctccccatgggggaagggactgcatctgatttacttctttgttctaggagttcagcattatactcagcattatacagggcattatactcagtggtggcaaggaaatgctcatttgtgatccttaattatttttttgagacagggtcttgttctatcacccaggctggagtacagtggcacaatcatggctcactgcagcctcaatctcccagactcaagcaatctttcagcctcaacatcctgagtacctgggaccaaaggcacactccaccacacccagctaatttttaatttttttttgtagagacagggtcttcctatattgcccaggctgatctcaatctccgggtctcaagcaatcctgccacagcctcccaaagtgttgggattacaagtgtgagtcaccacacccggcctgtgatccttattaacatgtcctgagtactttgtgacaagtttttcaaacatgtgatatcatttgatccttgaaacattttacagataaacagggtcagagaagtcatgtaaattgcccaagatcacacagctagaaagtggtgaaatctacatttgaatctcacctctgctctttttaaaattttttattaacttttttttttttttttttttttttagagacagggtctcactgtcacccaggctggagtgcagtggtgcaatcatagctcactgcagccccaacccctgggctcaagagatcctcctgccttggcccccaaaggcactgggattacagatgtgagccacagcatacagccctgcccttgttctgaactagtgtgctatcaccaggacccgaggcaggtggatcatctgaggtcaggaggtcaggattcaagaccagcctggccaacatggagaaaccccatctctactaaaaatacaaaaattacccaggcatggtggcaggtgcctatagtcccagctactcaagaggctgaggcaggagaatggcttgaacccaggaggtggaggttgcagtgagccgagatcgtaccactgcactccagcctgggtgacagggtgatactctgtctcaaaaaaaaaaaaaaaaaaaaaaaaaggccacgagcggtggactgcctgaggtcaggagttcgtgaccagactgaccaacatggtgaaaccctgtctctactaaaaatacaaaaaaaattagccaggtgcggtggcatgcacctgtaatcccagctactcgggaggctaaggcaggggaattgcttgaaccagggaggtggaggtcgcagtgagccgagatggcgccactgcactccagcctgggcaacagagagagactctatcttaaaaaaaaaaaaaaaaattattctggtaggctcaggccccatgtggcctcttaccttggcactatactggttgagctctccactctcatggccagcgatgatgcactcccccaggggtccccaaacagcactggtgattttagagtcattgcaagggatcttcatgtagggctcattgttgtctgtgtggggcagtagatgttaggccctgggctcyagaactgtaccctttacctcaaccccagccctattcccagccctcaccaatctggctcggatcccgcaggtcaaaaaagctcacaaagcactggtagcccatctgcttgtccgtggagaacatgatgatgttgcccccaaagtcaaaaccgcaggtccggacagccgaattggtcttgagaagggccagctgctttcctggagtcaggcaaagtctgggctacaccatccattgcaattgcagggaggacattctagagaatgctaccatcacatctcactgtttgtcttgctccagtgacccaaacttaaaaagtattttaacttttctttttttttttcttttttgagacagtttcactctgttgcccaggctggagtgcagtggtgcaatctcggctctcactgcaagctccgcctcccgggttcacgccattctcctgcctcagcctcccaagtagctgggactacaggcgcctgccaccatgccccgctaattttttgtatttttagtagagacgggatttcaccgtgttagccaggatggtcttgatctcctgacccgtgatccgcccgcctcagcctcccaaagtgctgggattacaggtgtgagccaccgcgcccggcctttttttttttgagatggagtttcgctcttgtcctgcaggctgctgtgcgatggtgtgatctcggctcactgcaacctttcaagcgattcttctgcctcagcctcctgagtcgatgggattacaggtgcccaccaccatgcctggctcatttttgtatttttaatagacggggtttcaccatgttggccaggctggtcttgcactcctgacctcaggtgatccacctgcctcaacctcccaaagtgctgggattacaggcgtgagccaccacacctggccaagtattttaacttcttacctagactctttcctcagacatcctgctaatgtggcactactcatacgtagactgcaatatatctgtctctccctcagactgtgcttctccacagcaaagacctgatctgatttccctccatgtccccagtacccagcatagacctggcactaaacagaacagcttaggctgggcacagtggcttgtgcctgtaatctcagcactttgggaggccaaggcgggtggatcacttgagctgaggagttcgagaccagcctggccaacatggtgaaaccctgtctctactaaaaatacaaaaattagctggtggccaggtgcagtggctcatgcctgtaatcccagcactttggaaggccgaggtgggtggattacctgaggtctggagtttgagaccagtctggccaacatggtgaaaccctgtctctactaaaaatacaaaaattagccaggtgtgatggcgcatgtctgtaatcccagctatttgggaggctgaggcaggagaatcacttgaacctgggaggcggaggttgcagtaagccaagattgtgccactgcactccagcctgggtgacacagcgagagaatctgtctcaaaaaaaaaaatcagccaagcatggtggcgtgcgcctataatcccagctactggggctggctgagrcaggagaatcccttgaacccgggagacagaggttgcagtgagccgagatagtgccattgctctccagcctgggtgacagtgagactctgtctcmaaaataagaaaaagaaaaaaaaaaaaaaaaagaaaacttaatctatgcttcctctaccatggcgtgtattttctcatctatctttcttgtctcttattccctagactggaaactatctatggatttcatctctattttcctaggacctgtttactcaaacaggtacactgtaggtcctcaatatttgctaaaaaggtgaatgaacccagcttacctgtttcacagtcccagagacgacagctgttgtcagctgagccagtgaggacatgcttggtgtcccctgaagagttgttaagaaatatgacgaagttcacccgagcccttgtcctcttgggatgccaagtgaatcatctccctgttcagccccaaagagcctttctacccctcttacctccttatccagaactggaatttgtcctgaatgtttcctcagycagtgaagagaccagggagtaggaggtatcgttctctaggccctcaacagcacccccaactcccaactcccaactcagcctctccatcgctgacagaccctagcaacacggactcagacccaaaataaggatacagtcagcgtccacacaccacacagctccggtatggcccatgtaggtgcccagcctctcaccattcacagagtrccatacattgacgatctggaaaagtcaaaccacaggatagtacacatcccagtaagagcaatggcttcctattttgccccaggaaccctcagcagcctgtagcaaggctgattctgccctcttctgttyatttcttgggaaacagcagggagctggtaaaaagaccaactcctggattctcctcccttcctgaagggaagcaacagaggagtcaggcggcttgtaaaggcatcctcatttgttagctccagctctcctgggactcccaacggctccaaagaataaaaggccaagttgagctccagtccagaaaaacagtatctctgatgtcttatccaagtgggagcagctggtagtaaggaagtctgggttctggtgcctgctctgccactgtctcactatatgatctcaaatacagtgcttctctcctctgaacttcagttttctcatcttgaaaatggccaggccgggtgtggtgactcatgcctgtaatcctagcactttgggaggccgaggcaggcggatcacctgaggtcaggagttcaagacaagcctgtccaacatggtgaaaccccatctctactaaagatacaaaaaattagctgggcatggtggcacgagcctgtagtcccagctactagggaggttgaggcaggagaatcgcttgaacctgggaggcagaggttgcagtgagtcgagatcgcgccactgcactccagcctaggcgacagagcgagactccgtctcaagaaaaaataaaataaaatggccaggtgcctcaaaaggcagtatcatgagggattgtttggcattgagtagcaggatgggattgacttaaaatgagactagagacaccctcattaagttccctgtgtctgaataacacagcctgcacctatcctggtagaaagattagattatccctaaaggtcgcatcccgttctctgggcaagctgaccctcatctttatcccctttccacagtggtctcttgcttttcttggagtgcagtggcacgatctcagctcaccgcgctcaagcgatcctctcgtttcagactccgaagtagctgagaccacaggcgcgaggccaccatgtcaggctaatttttttgtgtgtagagatgggtcttactacgttgctcaggctggtctccaactcctgggctcaagcgaccctcccacctcggcctctcaaagtgctgggattacaggcgtgagccaccgcactcggccaatagagttcttccccacctttcccggtagaatactttcgccaacctacccccggcatggcctctccctacttctcacaatgggctgctctttggttccccgctaacggcaaaactggcgtgtccacccatcgtcctggcagaaggatcccgcccctcccggaccccctccagccaacactcacagggtccttggccacagtaaagaggaggtctccttcgcggttatacttaatctgcgtaatggaccgctcatggccctgcagtaggatcggcttctgtggggacaagacagtaacgtcagtgctcggaattgggccccagcctcagcccaggacccccactgcaatacccctaactctgaaactcaccatcccggctgtgacgcgaggaaggccgcaacgtgagtaagaccggaaaaggtttcgaggtcacttccggattatgggtctccgccccttcgttcccggaagtagaagacagcggcgttgccatggcggcgtctctgggtaggtagccggccccgcccttccatggatttcccgaccctcgcctcgaattcatttcctgctccacatccaccctctaaccccgacccctgctacaaccccagaggccggactcctggattcatctccctagcttccctgggcctgccttagccgccagtcgcagccgaggcgaagagagcgaaggagggaagtgggggcggctagctggggctagaaggccaggagagggcggggtgggcggccgtttggggtgggggtcagggtgactcactcgtctgcattcagggcaggtgttggctctggtgctggtggccgctctgtggggtggcacgcagccgctgctgaagcgggcctccgccggcctgcagcgggttcatgagccgacctgggcccagcagttgctacaggagatgaagaccctcttcttgaatactgaggtgcgtctctgtgaaaggcccctctctcggtggagttgccgccaagaatttggtctttggagtcaaacaggtctgggtcagccccaccacttactcactagaaattctcggaaaagtcagttgtccttgagcctcagtttcatcatctgtaaatggcgattataataataaccatctgataggtcagttgcaggaattaggtgagatacgtagagcacttagcattaggcctagaacatagtaagtgctcaatctatggctgccattattcacattttattgtgattccttcagttacataaggcaacatttgtgagcctttccagagggagggcttggggctcaaattggccctgcaggggaggagttcagaggaggaaggctggagctggaggacttggggaaggcttcctggaggggctgacattggcttcaaggccttgcaggatgggaactagcagaggtgagggagagggtagtttgagcaaaggcacagacttcagtctgtttccctctttgccctggaaggatcctccttagagggattagtgttctctgggtccttataaccctgcctccctccaaggaaagacattcgctaggagctcaaagaaggcagtgctgctcagtcaggccatcacactgactgcaggtttctcctctttccagtacctgatgccctttctcctcaaccagtgtggatcccttctctattacctcaccttggcatcgacaggtgggtcctggcttggaactgttctgcttagtgtttgaggccacctggaagagtgattggggggggcggggtggagcttgaaacacctcattcccatcagtgagagagggctgactagctctagttccctcttactatcctcttctctgaacaagaggggcacagtgtgctggttatgagtatgttgctaggcactggagttggtttgaagcctggcagtcatgtgtgaccagcggaggaagaaggaaggttcattttgctgtgccaagtgctggctttcacattcttgcttccactgtgtgctacctacctgaccatgagcaagtcacccatttgagccttggttttatatagttggcttcatagcattgtgaggattaaatttaatgaatgggaaacatctaggagagtgcctggcacacagtcagagctccatatacataaatttcctttctcttgacatttgtgactgccctctactacgtcagatactgcactagtcttacacattatttaattccaatcatgactctgtaaagcagatatgattatcttagaaaatgaagttgcaaaactttgtgcaatttcacctctcaagtcccacaggatgtcagtgcagaaggatttgaagccatatattaaaagtttatgctcgactgggcatggtgactcacgcctgtaatcccagcactttgggaggccaaggagggcagatcatttgaggtcaggagttcgagaccagtctggccaacatgctgaaaccccgtctctactaaaaataacaaaattagttgggtgtggtggtgtgtgcctgtagtcccagctacttgggaggctgaggcgcgagaatggcttgaacctgggaggcggaggttgcagtgagctgagatcatgccactgcactccagtccctgggcaacagagcgagactctgtctcaaaaacagaaagaaagaaataatatgcacttatttaaagagtttgaaaacctctggcctcatgcattcactgctgtggaagaatgctgaacccttgaccagctgactacaggtagccattcaccaagttttaatcaaattgcagttttaggttctttttatctcattaccctttctgcctgtatcctttaatatccatcctttctaataaccagaacagtaataactatttatgaagcatccacttcagccagggactatccatgcattatcacagttcatcttacgacaacccaacaaaagaaatggtatactgtgacccctattttacatgcggggaaacaggttgagtgtttgaatatcctaaccaagattgcaagggaaactcagatctgcctcactccaatgccctcactttccactgcaccgtgctgcatccttcttccatctactgttgcaaaccagaccttagcagccatgacactccttgtaaggtatgtaaacttaagaaggcagctctgggcagggcacagtggctcaggcctataattccagcacttttggaggctgaggtgggcagataacctgagcctagagatcaccctaggcaacaacaacaacaaaaatacgaaaattaactgggcttggtggtgtgtgcctgtagtcctagctgctcaggaggctgaggtgggaggatcgcttgagctcaggaggttgaggctgcagtgagccttgacctcaccactgcactccagcctgagcaacagagagagaccctgtctcaaaacaacaacaacaaaaacgaaaaacaaccaaaaaagaaagcagctctttgtaagtggggttgtatcaatttcttagatgggtaatgcctccatgctggggcctcccaggggatgaggagcaggacagtttgctcctttgcctcacacaggcgagccctgggagtgctgggaaagaatttgctgaggagccagtgtgaacatctggtctgcagttgagtcttgttaccatggataactcagctgattcgtccattggtcttttttatgtgtatgtggtgctttttttttttttttttgagacggcatttcgctcttgttgcccaagctggagtgcaatggtgcgatcttggctcactgcaacctccgcctcccaggttcaagtgactctccttccttagcctccccactagctgggattatgggcatgtgccaccacgcctggctaattttgttcttttgtttttgttttttgagatggagccttgctgtgtcacccaggctggagtgcagtggtgcaatctctggtcactgcaacctctgcctaccaggttcaagcaattctcctgcctcggcctcccaagtagctgggactacaggcatgcaccaccatgcctggctaatttttgtatttttagtagagacggggtttcacaatgttggccaggctggtcttgaactcctgacctcaaatgatccacccgcctcggcctcccaaagtgctgggattacaggcgtgagccaccacacccagcctaattttgtattttcagtagagacggggtttctccatgttggtcacgctggtctctaactcccaacctcaggtgatccgcccgtctcagccttccaaaatgttgggattacaggcatgagccactgcgcctggctgtggctctttttttgatgtgataagaacacttaacaggagatctaccctcaacaaattttaagttaactccattagtctttttcttttttttttgagacagagtttcactcttgtttctcaggctggagtacagtggtgtgatcttggctcagtgcaacctctgcctcctgggttcaagcgattctcctgtctcagcctcctgagtagctgggattacaggcgtccgccactatgcctggctaatttttggtatttttagtagagacggggtttcaccatgttggccaagctggtcttgaactcctgacctcaggtgatccgcccgcctcagcctcccaaagtgctgggattacaggcgtgagccaccctgcacccagccaactccattactctttttcaagtttgcttattggcagtcagccccttggaacttcaaaattaaggaacagatcctgggctatgatgccctctacccacaccacaggtccagcccaatgtcctgaacaggtcctgctccttccttctgacactttttatttttaactccataaggcctgagcttgggctgaaacagaaacaaaatgtgcttcatctgatgttctgctctgtctatatccacagtttaataacggcgcaggctttggagtcaggcaagccttggtttaaatcctcaacttgccttagtttatgtgacttctttgagcctttgtttcttttacgcaaaatggtgataatccccttcttgcagtgttgtgaaaactgagatatgtacacaaagcacctaggccatggtatgtgcttaataaatggtggctgtgcttggtgttacctgactctctactcatcctttgggatttgggtgcctgcctgtccgtccagatgtccttgagatctcacgagttctctttgagtgcaaagacctcattctcattatcaaaccaggctggtcccagacctcagagttcaggtcttcatgctggaatcctgggaagcactgaacgtggagtcaggagatgtgggtttgagtcctgagatttgctgtgacttcatctggaagatggggttttgataccttttttaaaggtatgaaatgatgatgatggaagtgttttgtgcctagaaaggcatttgttgcatctcaggcattcttttcattctgaccacccagatctgaccctggctgtgcccatctgtaactctctggctatcatcttcacactgattgttgggaaggcccttggagaagatattggtggaaaacgtaagttagactactgcgagtgcgggacgcagctctgtggatctcgacatacctgtgttagttccttcccagaacccatctccccagagtgggtgaggacacggccttttcccatcctgccctttcctctgcagctgttttgcttccttgtggccatcagagttcccttcccctggacagtctggagaaagacagaggctggggtttgggattgaagaccagaccccatctgagcccttcctccagccctgtaccagctcctactggcatggctgagctcagaccctcctgatttctgcctattatcccaggagcagttgctggcatggtgctcaccgtgataggaatttcactctgcatcacaagctcagtgagtaagacccaggggcaacagtctaccctttgagtgggccgaacccacttccagctctgctgcctccaggaagcccctgggccatgaagtgctggcagtgagcggatggacctagcacttcccctctctggccttagcttcctcctctcttatggggataacagctacctcatggatcacaataagagaacaagagtgaaagagttttgtaaccttcaagtgctgttcagctgcggggatttagcacaggagactctacgctcaccctcagcaacctttctgccccagcagctctcttcctgctaacatctcaggctcccagcccagccaccattactgtggcctgatctggactatcatggtggcaggttccatggactgcagaactccagctgcatggaaagggccagctgcagactttgagccagaaatgcaaacgggaggcctctgggactcagtcagagcgctttggctgaatgaggggtggaaccgagggaagaaggtgcgtcggagtggc

SEQ ID NO: 98227 - DNA, 47201 bp, Homo sapiens
  misc_feature (1)...(47201): n = A,T,C or G
cgcctcccgtccctaccgtcagtcggtccgtccgccctcccgcccgcggctccgctcagcgtccgacccaggggggagggggcgggcctccggcccgccccgcccgtcccctcctgggctcacctatagccgcgcagcccgggcaccgctccagccaatcagcttgcgcagacacgggcccggaactcggcagggggcaagggcagcccggagaggccgccgagggccccctgggcctgtaccaaggtctgcgacagatgggtggggagccgcccggggaccgtaccatcagtcccgggggaggaaagcagctctgtaaacttaacagtcccacttcgtcgtgaaaagcgtgcttggagatcggaggccaactttctgattttacggagaataaaccgaggcctacaggggaaaagtgacttgcacaaggtcactcagccaataaaagggctgaacctgggttagaaagcgagtttgtggccgcaaaggagggctacagaaaaataattaaaaagaaaagcaacacgcgggtttggagaggaagaaaccgacaagaaagggaaagaaagctaatgtttgtcgaggggctgctgtgtgccaagtactgtgcgacactttaccaatgttatttcagtttttcctcaaaacagctctcggccaagggctttttacctccattttacaggacaggataaagaagttcagacttctgtgaattattcaaagttacacaaagtaattaaattcaattttttaattgtacagggtttttaaaatgctttctttgcaccagaggcactgtaacaaagtgacagaacccagcctttcagactccaaaatctacctccctgatgcagtcacccaggatgactaagtaggcgtctctttagacaggaggaaatgggattatcctatgataggagggcaggtttcctttcttttctttccctgtttttttttttttttttttttttgagacaagagtttcgctctagttgcccaggctggagtgcaatggtgtgatctcggctcaccacaatctctgcctctgtgttcaagcggttctcctgcctcagcctcccgagtagctgggattacaagcatgtgccaccatgcccggctaattttgtatttttggtagagactgggtttctccgtgttggtccaggtggtctcgaactcctgacctcaggatccgcccacctcggcctcccaatatgctgagattacgggcgtgagccacagcgcccggcctaggagggcaggtttctcagcctggtagctaatgacattttgggccaggtaatgcttttttgtaggaagctattctgtgcattaacagcttctgtgaagctgttctgtgcctgggcaactagagtgaaactcttgtctcaaaaaaaaaaaaaattaagcagcatccttagcctctacccactagatgccagtagcaccttccccccaggctgtgacaaccaaaattgtctctagacattgccaagtactgtgcaatagctttaccattgggttggggggaagattagtggggtgtaagggagtgtaaaattgcccccaactctaccattaagaaccactccaccagatcatcaattatcaactgatcatcactgaaagctgaaagacctaaaagtgcaatgctgggctattaaaataactacaataatgtcaatatttaatgagtgcttcctgtgtgccaaacattgctctaagttagccgccaacttgtggtcctacagtcaacaagaggctgggcacagtggctcacgcctgtaatcccagcactttgggaggccaagatgggtggatcacttgagctcaggagttcgagaccagcctgggcaacatggcaaaaccccatctctacaaaaaatagaaaaattacccaggtgtgggggcgcgctcctgtagttccagctactcaggaggctgaggtgggatgatggcttgagcccaggagacagatgttgcagtgagccaagatcatgtcaccacactccagcctgggcaatagagccaggccttgtctcaaacaaaagaaaacaacaagatacatctttatgcctctttaaagagtgtttgggacttgtgtttctcactcagaaactgcatttgagtcattaattataaggtaacagaaaatctaagactgggtggcttataatagaaacagcaaagggccagggaacaaattctactcccagttctctgttgctaattctcagctagccctgggtgggtttacttaaccattctgggcctccatttcccttgttataaaatggggaggaggccgggcacagtgactcatgcctgtaatcctaacaatttggaaggctgaggtgggcaaatcacctgaggtcaggagttcgagaccagcctgcccagcacggtgaaaccccgtctctattaaaaatgcaaaaattagctgggcgtggtggtgtgtgcctgtaggtcccagctacttaggaggctgaggcaggagattcgcttgaaaccgggaggtggaggttgcagtgagccgagatcaggccactgcattacagtctggatgacagagtgagactctgtctcaaataaataagaaataaaataaaataacaaaaatggggaggataggaatacaaagttcacccacgctatggctgtacacagtatcccaaagagaaggagtgtggggatcagatgagatcatgaggtgtggcagcaggtcagtcaggtgatagatttacattattatgactcagatgctctttgtttgcatatatatatgtatatatatatatataattttttttttttttgagatgaagtctcactctgtcgcccaggctggagtgtagtggtgcgatcttggctcactgcaagctccacctctcgagttcacgccattctcctgtctcagcctcccgagtagctgggactacaggcacctgccaccaggcccggctaatttttttatatttttagtagagacagggtttcaccatgttagccaggatggtctcgatctcctgacctcgtgatccacccacctcagcctcccaaaaagtgctgggattacaggcgtgagccaccacacccggccctttttttgtatattttaaaaattacaaaaaataaataaaataaaaattaaaaaaataaaaattaaaaaaattaaaaataaaaattagaggccgggcactgtggctcactcctgtaatcccagcagtttgggagaccgaggcgggcagatcacccaaggtcaggagtttgagaccagcctggccaacatggcgaaaccccacgtctactaaaaatataaaaattagctaggcatggtggcaggcgcctgtaatcccagctactagggaggctaaggcagaagaatggcttgaacctgggaggcagaggttgcaatgagctgagatcgcgccattcagccttccgagtagctgggattgtaggcacctgccaccactcccggctaattttttgtatttttagtagagacggggtttcactatgttggccaggctgatcttgaactcctgaccttgtgatccgcctgccccggcctcctaaactgctgggattacaggtgtgagccacggtgcctggccaacatttccctatctttcatcaaacactctgccatcctcaggtatctttaattttctcactttttaatggaaatgtgggtgcaaaaaaccattttctttattataccatttattaaatggtataataccataatataattttctttatcataccatttattaaaccatttatctttattataagaacaacaagcatgagcttggtggtaaatagctactaacactcagtttcattgtctaagaccaacagggagtggaggggactctggcaaaggtagagttcaggccctacctggaggggtggccattattcagctccatgaggacaggtaagtccaacatagctaaatcttcccttttttttgagatggggtttcgctctcttttttgctctggctggagtgcaatggcaggatcatgctcactgcagccttgacttcctgggctcaaactatcctcctaagtagctaggaatacaagcttgcctcctgagtagctgggactgcaggtgtgcaccaccacaccctgctaatttttttttttttttggtagagacagggttttgccatgttgtccagtctggtcttaaactcctgggctcaagcaatctgcccaccttggccttccaaaatgctgggattataggagtgagccaacgcacctagcccctatttttcaagagaaggcagaaatctggagttttatgcaaaatctccccagttttataaactgactaactcagtctattttcaagacagcagcaagagccatccttttaaaatgtaagtcagggctggacgctatggctcacgcctataatcccagcactttgggaggctgaggaacatggatcacttgagcttaggagtttgagatcagcctgggcaacatggtgaaaccccgtctccaccgaaaatacaaaaaattagccgggagtgttggtgtatgcctgtggtcccagctactgaggaggctgaggtgggaggattgtttgagcccaggaggcagaggctgcagggagccgagatttcacctttgttctccagcctgggtgacagagtgagaccccatctcaattaaaaataaaaaaaagaggccgggtgtggtggctcacacctgtaatcccagcactttgggaggccgaggcaggcggatcacaaggtcaggagatccagaccatcctggctaacacggtgaaaccccatctctactaaaaatacaaaaaaattacccaggcttggtggtggacgcctgtagtcccagctactcgggagactgaggcaggagaatggcatgaacccgggaggcagagcttgcagtgagccgagatcgcgccactgcactccagcctgggcgacagagcaagaaaaaataaataaataatttcattatttatttcaaaaataaataaataaaataaaatgtaattcagatcatatcagctttgcagagattcctgcaaagtttcctcaaaatggcttctgcagaggccacaaggccccaggcctgtaggatctatccccctctctcagagcatgcccggtaaacgcctgcctcaccctgttccctctggctgactgctcctcccctcctccatacaaggctcactccttcaccttggaatctttgctcaaaagccacctaccttctcaatgaagccttccctttttttttttttttttttttgagacaggatctcccttcgtcgcctactctggagtgccacagtggcacaatcatatctcaagcaatcctcatgcctcagcctcctgatctgctgggactacaagcatgagctactatgctcggctaagtgtgtttgatttttttaaaactttttttggagaccaggatcttactctgttcttgaattcctggcctcaagaaagtagtcccaggtactcgggaggctgagacaggaggagcatttgagctggagaggttgaggctacagtgagccgtgatcatgcgactgcactccagcctggatgaaaaagtgagacccagtctcaaaaaaaaaaaaaaatctgaggatagttacagatttatttgttcctcctccattcccgccgcttcatttgactagccttaaaaaaacaaaatctgaggtcaaatatagcccttgaatcagtaaaaaatgctgttgcccttttataatggggaggaaggtcctttgacgcacccattccctaagggattccaggtaggagtcaccctgaatcctttggggaggggtgaggagcactgtcccatttgaaggggtctgcagagcctccagacatccactcatcccatctttcaccccaactcagggtgacctaattaccattttcttaacccccactgcccacccacaaagagtggacagcaaagagatgtacaacagtcatcaacagacatttattgarctcctgatgtgtgccaggccaggcaccaaggaggagcacacagaggtattagataaagtcctggcccttgaggaacttctggatgatctgaggaaagaaaagtaggtgggcagaagcttctgtcaatcccaggcttctcccctctctctgtggtctcaggaaatgggagagccagaaaggggtaccttgtacagtgtccaagacatacatgcacaggctacacatgyacaagacatgtgcagagtccacgcaactacaggacacgtgtacagacacaaggtgcatatgtgtcacatgtgggtgggattcatgtgcagagtccatatgtgcataggccatgtgactatggcacaagaactccatctccccaagtcaggctggagagaaagggggagaaccccagggcctctcaaggcctctcaaggctgaggctggtactggccctctgtggccgtgaagaagtcctccagcacactgcgcaggtagtcaaaggtgggccggtcctctgggcgctccttccagcacagcctcatgagttggtacagctcctctggacagttgtcagggcgcaccatgcggtagcctcgctccaggttctgaatcacctccgggttggtcatccctacgggttgatgggtgaaaggacatcaaggtcaggcactggaagcccacaggcaagggtaatgttcggaatatttaactggcacagtgtgagcaccaatccaaaagaatcttggtcttcatcaatggtaaggtcacactagaggtacttgttgaatatcagtcacaccacttggagtgcctggtatagattatttccttttctttttttttgagatgcaatttcactcttgttgcccaggctggagtgcaatggtgcgatctcggctcaccgcaacctccacctcccaggttcaaacaattctcctgcctcagcttctcgagtagctgggattacaggcatgcaccaccacgccaagctaattttgtatttttagtagagacgggtttctccatgttggtcaggctggtcttgaactcctgacctcaggtgatccgcccgcctcagcctcccaaagtgctggattacaggcgtgagccaccgtgcccacctgattatttacttaaaaaaaatgttttagataagggatctcactatgttgcccaggctggagtgcagcagctgttcacaggcacaatcatagcacattgcaaatttgaactcctccgttcaagtgatcctttcacctcagcctcctaaatagctggacaacaggtgcacaccaccacaacctgcttccctggtgtaaattaaatgctcaataatacacacatgttagttgtggaaccttgggcgagcccagtttccttatttggaaaatagagtaaataactgttcctacctcatagaattgttatgaggattaaatgagattgtgcacagaaagcatcaaatatagtgcacaggccaggcatggtggctcatgcctgtaatcccagcatggtgggaggccaaagcaggcagatcacttgaggccaggagttcaagaccagcctgaccaacatggcaaaaccccatctttactaaaaatacaaaaattagccaggcttggtggtatgcgcctgtagtcccagctatttgggaggctgagtcacagtaattgcttgaacctgggaggtggaggtgcagaggttgtagtgagctgagactgtgccactgcactccagcctgagcaactcaagccagactcttgtctcaaaaaaattaaaaataaaaataatatatatattattatatatatatctcacatatatatatctctcacagatatatatatatctcacagatatatatatctcacagatatatatatatatatatatcacagaaagcatcaaatctatccaggcacagaaagtctggatcggagatgcttcataaagggcacctgaggccatctgcggtggctcacgcctgtaatcccaacactttgggaggccaagccgggtggatcacctggggtcaggagtttgaaaccagcctggtcaacatagtaaaaacctgtctgtactaaaaaaatacaaaaattagctgggcgtggtggcacacacctgtaattccagctacccgagagactgaggcaggagaatcgcttaaacccaggaggtagaggttgcagtgagctgagatcatgccactgcactccagcctgggtgacagagactctgtctgaaataaatacataaataaataaataataaagggcacctgggattattattatttggtaggaatgatgagatggtcagggcccagggcaggatgggcacccacaaccaagacagtggtgaggtctctccagttttaagaccaggcacatgacatcctgcatcacgaagccaaatggaccctgggcctagcaaagcagaccttgcttggacttgagaaggttccccaggcccctccatgacccagatgaaatagtctttgggctggttccctccctttatgctggtcctggcccctctggcaggcttttggcatgtagaccccaagaagagctgctctggagaactacatgatcacagcagtaacatagctccctccttccctatttctaaattgctcatgtagtgtctggtttctccttcagtcttctgaacaaagattgtgacaagcagttcccaaagaccaaaaccttatagggtatttacaaaatcaaagttttgctcctggaaagcttgggactaaagcctggtcaacagagaccctttttccccaggacttgtacaagggagcctctgcctatgggactctcacaattttttttttttttttttttttttgagacagagtctcgctctgttgcccaggctggagtgcaatggtacagtctcggctcactgcaacctccgcctcccaggttcaaatgattcccctgtctcagcttcccgagtagctgggactacaggtgcatgccaccacacccggttaatttttgtatttttagtagagatggggtttcactatgttggtcaggctggtctccacctcctgaccacgtgatccgctcatctcagcctcccaaagtgctgggttgcaggcgtgacccaccacgcctggctgggactctcacattttaaaactggggcataggaggacataggccacggaactaaacacccatggccagagttaagggtgcaagcccacaggctaaatccagcctgagtatagcccacagatccactttggattggccctagagtggttttatttatttattcatttaattaatttatttatttaatttatttatatttatttttgagatggactctcactctgtcacccaggctggagtgcaacagcgtgatcatggctcactgcaacttccgcctccagggttcaagtgattctcttgccccagcctcttgagtggctgggactaccagtgcccaacaccacgcctggctaatatttttgtatttttagtagaggcagggtttcaccatgttggccaggctggtctcaaactcctcaccttgtgatccacccacctcagcttcccaaagtgctgggattacaggtgtgagtcaccgtgcccagcccctagagtgcttttaaacaatttgaatcaatcgccaataaatggaaatgaacagattttcctaaaactccaagtttgggcttctcttaaaaaaacaaaagatctgtttttttgggtcccccacgccttaattgcagccatctgctggagcagctgcaagtttaccaaggtccccatttctccccattgtctccctgaccctaatgctatatgtcagttgccatttatcatcatgctttcactgcctattttcttctaatagatacattccctatgggtttgcctctgtgggaaccgggaaggagcagtgaggacccctggcaggataactggagaatatttctgtatttccagctccagcactacccctggacgctggtttggggcaagcccagggcagggaagcccctcagcttttcacctgtttccaaggtggttgtttttgtttttgttttgaaacagagtctcactttgtcacccaggctggagtgcggtggcatgatctcagctcactgcaacctctgcctcctgggttcaagcaattctcctgcctcagcctcctgagtatctagggttacaggcgcgtgccaccatgcccagataatttttatatatattttttttagtagagacggggtttcaccatgttggtcaggctggtctcgaacacctgaccttgtgatccacccgcctcggcctcccaaagtgctggtattacaggtgtgagccactgcatccggccttccaaggtgtctttaccttccttggagcaaaggtctgttcaccttgctctggggatatgggaagcttctacaaatctagccactgtgccgcatgacccccctactcctgtctttatgctccatttcctttccccagagtttcttagcaagttcctttcaaaaattccatccctgtcttggctgaattcaggggtaaagggctttgtccaggagatggtgggaggagtcagtgtatactgacaacctactrtgagtcaggctctttcacaaatggtctctcattttttcttttttctttttctttttctttttttttttttttgagacaaattctctctctgttgctcaggctggagtgcaatagaacaatcatggctcactgcaccctcaacctcctgggctcaaatgatcctcccacctcagcctcccaaatagctgaaactacgggtgtgtgccaccatgcccagctaatttttaaatgttttttttgtttgtttgtttttttttttttgtagagatggagtctctctttttcttgttttgagacagggtcttggtctattgccctaggctggagtgttatggcatggtcttggctcactgcaacctctgcctccctggctcaggtgatcctcccacctcagccttctgagtagctgggactagaggcacatgccaccaaacctggctaacttttgtttttgtagagatggggtttcgaccagtttcccaggctggtctcgaactcctgggctcaagcagtcctcccaccttggtctcccaaagttctgagattataggcataagccactgtacctggcctagtctcttatttttagtatcaggaaactgaggcttagagaagtgaagtgactagcttcactagttacagtaatgatctgaacaaagccaaacagaaagttagcaacagtggcagatctgctgataaaaggtaggcctcttgttcctgagctagatcttcttctaccataccaggctgcctgggccagaactaaagaaaagagctggggccgggtgtggtggctcacgcctgtaatcccaacactgggaggccgaggcaggccaatcacgaggtcaggagattgaggccatcctggctaacatggtgaaaccctgtctctactaaaaatacaaaaaattagctgcgcatggtggcacgtacctgtaatcctagctatttgggaggctgaggcaggagaatcacttgaacccaggaggcagaggttgcagtgatccaagatggcgccactgcaccccagcctgggagacagagcaagactccgtctcaaaaaaaaaaaaaaaaaaaaaaaaaaaaaagaaaaagaaaaaaagagaaaaagaaaagagctggggttattaaagagagatacggagatggaagccagccctgggagatgtggcatctgcctggggacgttggactcatacccctgagargatagaggagatgcagctacaaagtttcagattctgagactggaaagaattgaatgrgaagacatggacttgcccttcccatcaccctttcagttcctgcccttggctctaacctgggtaagggatgcggccgtgggtgacaatttccrtcagcaggatcccaaaagaccacacatctgacttgatggtgaatgtcccgtagttaatggcttctggcgctgtccacttaatgggaaacttggcccctaaggaggaggcagagtgaggtcacctgggtctgcttggccagaccctgcagggcccagaccacccttaaatctcacacrtaccctccctggctgtgtactcgttgtcctcaatgaggcgtgctaggccaaagtctgcaatcttgcagctcagggtgtcagacaccagaatgttggcagcccgaaggtcacgatgaatataattccgctcttcaatgaatgccatgccttctgcaatctgcaggccaaacacagatcagcggtcctgagccagatgtcttcacgtcactggtctgttcccttgcccagcccccctccccagtctccttacttgggctgccatgtccaggagtttgttgatggtcaacttgatgcctgaaggggtcttgagaaaatccactagactccctgtgggcagaagcaagagttgctggcccaagttgccccagggggaggcccccagacctttctcctccaactgggagtctagaagtgtgtctgacatgtgaaaargaagattgaagagtgagaatggaggagtgtgtgttcagggtaaggatgcccaggatatgtaaaggtttttttgcagaggggctagggtagagcatgctgggagggatctgtaggtttttcatcaccaataaggtagaacctagaatcctcaactagtatcctaagcttggcatggtccacactggtagcttcttctctttcccccactctgcctttgacttcaaacagtttagcaattttgagatcctgcactcagaccactaggctctcaccccaaagcctctttgtttcatctctgcctgctaaaaaaaattctacttttctttcgtggccctgctagactgccccactaggaagcctctctagatcctaccaggcataataaactggatcatcatctacactcccatgggcatgctggaactttcccatggcacaaactctggtttccccagtagctgtaactaaaatcaggtttccctgacaacaggaaccttgtttcatccatccatgttcctggtgcccagccgagagtaagaaacaataactatgtgctgaatatattggatggaataagaaagagggggtctgggggtctgagggaccacctctctaatagtggagggcagctggacatggatgggagttgctaggatgcagtgagtgaccaatggcccttcccaagagattaaaaccctgtaaaaggatgacagcaacctgagtgtccccactttgagtgctgaactagttaccaaagacaaagacctcacctacacacagcaaatacatagacatagatatactgccattcttccattgtatccatggcagatgttactaatcattcctggcactcacttccaatgaacctcagaatccttctccagcactacaagcaactaccaatcaaagtcgatacacatgataggctgggcatggtggctcacatctgtaatcccagcactttgggaggccaaggcgggaggatcacctgaggacaggagatcgagaccagcctagccaacaaggcgaaaacctgtctctactaaaaatacaaaaattagccaggcatggtggcacatgcttgtagtcccagctacttgggagactgaggcatgagaatcatttgaacccaggagggggaggctgaagtgagccgagatcatgccactgcactccagcctggaggacagagtgagactcaaaaaaaaaaaagatacacatgacataatctatttgccatttcccattagccaatgaacagcttgtttctcttcctgaaaaaaggatagatcttacaytcccaaagaatcagagccagataacagcaacaaacttattgatcagttactatatggtagccatagttttgtgggttttttgttttgagacaaggtctcgctctgttacccaggttggagtgcagtggtgcaatcacagctcagtgcagcctcaacctcctgggctcaagtgatcctcccacctcagcctcccaagtagctgggactacaggcatacaccactatgcccagctaatttttaaacatttttttgtaggaatgaagtctcgctatgttgcacagactggtcttgaacttctgggctcaagtgatccacccaccttggcctcccaaagtgctggagttataggcttgagccacagcacctggaagtaggcatagttctaactgctctgtatgcattaattatttcatcctcacaagaccctgtgaggaagttactaacgcgttattatagtaggaaaccatggcagaaagaggtgatataattatcacaaagccataaaatcatgaagccaggcttctgacccaggcagtcagactctagaggccttgatgaatactctgtattatttctggtgagcccatttagatttctgctgttatacttggggaaactgagcaccagagacagtgcaggcacttggcctgtcacacggcaaatcggtgtgaacaaagctgaagctagaaactcatattcctcttcctggggctctcactctgtccagtaacagaccaagaggggtgcaggggtgggggtctcactcagaactgaaaaagagggctttgggggcagatctgccctcctagggctcaggggcagaagggagagaaacagggctagggacccacttgctttctgagatcaagcatcctgagatcaaggtagggctttgaagaaggcaaacagaatggcaggtcagggaaggttggggtgaatgctcttccagaacattcttgccaccttaggcttgcccccagacaggatcagatcagaggatacacctttttctcatgcctggaggtgagtctttttttttttttttttttttttgatagagtcttgctctgtcacccaggctggagttcagtggcatgatctcagctcactgcaactgtagcctccacctcccggattaaagggattctcctgcctcagtcttctgagtagctgggattacaggcatgtgccaccacacctggctactttttgtatttttagtagagacagagtttcaccatattggtcaggctggtctcgaactcctgacctcgtgatctgcccgcctcggctcccaaagtgctgggattacaggcctgagccaccgcgcccggctggaggtgagtctccagggggcaggaaagctcaagaaaccctccttgcttgagctttgggccagaagaaaaggtgtatttccaccctctggcagggacagcagggagagcagtatcccctggtagccgactcgggtagcacccaccattctccatgtattcagtgatgatgtagatgggctcctgggtgaccacagcgtagagccgaaccagccgctggtgytgcagctgcttcatgaggttggcctcggccaggaaggcgtccggggacatgctgccctgcttcaggctcttcaccgccaccttcgtgtgcccgttgtagtaccctgggtcggggaagggaaggagtgggaaagtcgccaggcagctgtcctgggactctcatcacctcagcggcccctcccgttcccctcttcccaggcagtcctggaggccacactcacccatccacacctccccgaactgtccagcccccagccgctccaccagcttcagcgtctccctgggaacctcccactcgtcctcccaccacggcttctggggcttctgggtctggcaggggcggctcaaccgtgtgcacagcccatctgaagcatctscgaggacgagggaggggtgaaggctgtcaatagggcaggcctcgtattgacaccacctcccccacttctccaagcccccatctaggtgaagtggactagcaagggggtgtggggctgtcacccaaacacttggggccgtagggtcaggttccacacctcacccactgcggggaatggagtagggmattgaaagatggatgggggacacctgagggggactgaggggagataggctgatagggcacgggggaggggtcccgtcgggctcactggtgtaatggcggaccagttcatgcaggccgggaaaagtgattcgaggggagatgtagaagccaccgttgtccagattacggatcttgtaatgtttcaccacctctccctggttytggtcgaagtcccggaccgacagtgaaaacgatcctgaatgaatgaatggatggacaaagcgacgaaagaacgcagtgagtctggcccgccaccgcscccccaccttgggctcacccagsacccccaactccgggtcatcccgcgcccccacctcgggctcatcccgcgtccccctccgactcaccccgtgtctccacctcgggctcaccctgcgccccmcctcgggcacaccccggggcacccccgcgcccggtcgagaccgccgcccgctcacccgcggtgctctcgctctcccggatgaggaaggagccgtgagtgttcccgggcgccaggagctgccgctccgcgtccttgcggctcaggttcttgaagaaccagctgtgcagggcggaagcgaacgaaggccgtcggctgtcgtcggatcttcctccgtggccctcaagccttcaccgccaccccaggcctactccctgctccaggatccctagatctgctcctacccacccccacgacgggtccccacttacggttcgggctccaggctgttcgctttggccacaaaattgaaggggatgaagccttcctggcccgtggtcagggactgcgccttccaccactcgccgctcctgcgccacggaggtgggtcagtgtggctcgctcagccgtcgacctgagaccctccctcaaagacccctccaccccttaagccagcctcccccaaccctggctcagcaatactgagcctcgaattttgtcccaagggcggccaccccgagctggtcaagggccgcaggagggctgcgggtcgcggagatcgccgctccctcacggactccgccagagcaaggtggagagggactcactgctccaggatgcggagctgttcccccttctcaaagcccagatctccgtcgtgagagggctcatagctgtgcagagcgataaccaggttgtctgtaaagacaaggggcatcagggagaaccgagctgggatcggcaggaagcctggagttacagggtgggggacaaggaaggcaagaccggggagaaagtaggtgggggagaggtggaagccaacagccagggatccgcaggccttgtctttcaggccctgctgcctggggtcaccttgcagtggggaagccggcggattggagccttcgtaggtaaccagtgggtcccgcacctcagagccatttcggatgagcagctgtggagtgggggatgagggtggggtcagaaagcagaagattgggtcagaccctggcccccttcccccctgctctgctctcagcctctccagcctggttagatgttatccctgagtttaccractactttctgtgtgatcttaggagattcccttcccctctctgggcctcttttcctttctgtatttcaggggagagggccactctattctttcaagggcctgtagtgctggtcatttctttctcctgggttgcattctctacccaactccctcaccaaggcccctgtctcgcctcttaccgtgcccttgccatccagtgggactatgggataatggcagttctcacacacatcgatgttttccatccagtcatcttccgggtgtgagctgcagccacagcccatggtccctgagggaatggaagagggggctgaaggggctcccccaagatctgctcccccaacatcagatataatggggccttgccctggaaagttccaaaagtacctgagattgtgagatcctgggatccccattcaccagccacagaaaagctaaaatagggggtcccagctccaaaccggtgctccctctgagccctcaggctacaagtaaattcacacacggcccctgagccctagccccaccctcccacctgggatgggcaaaccgccacaggcacctttgttagtctagttacccacttcctgcctctgccccctccctctccctctgccagtaccctgtgttgggaggaccacctcctagagatgacacacactttcccaagcctgggagagacctgacttatcagaccctcccctactggagaggtgtgcacgccacacctcctattataattcccctgtctagctgaggaggctgagaaagaggcttctgctcccgaagtccaccatcaagcccccgctgttcccctcacacagcccacagtcatctcacagggttccttcaaacacgggcttgcttctccccagcagaaaaccctccagtgactctgttggccataactttttttttgtttatttgcctgttttagcagtggaaattttttgtctgatgaaatcaagcagaactccatagataaagtgataaatgtgtgcctgttttgcctgaagcagagtggggccctcactttgaagcccccggagtccctgcagctcctccttctctagggctgctcctcagagtgcttggaaagcgctgtcctcaaagtttaatgtaccatgcattccagacctttcatatcaagatgaaatccacctccgcagtctattctgccacacacacactctctcacacacacacactcacacacaccctatacatatacacaccctacacacacacactctcacacacacacacagaggcaccccctatcccacctccacagaggcatccacacacacacactttcacataaacacacacactcacccctcacaggtactcccccacacactcacacacagactcaccctcccacacacaggcacccacactcacactcagtaaacacatacactcaccctccacaagtgcccccccacacacacactcaccccccacacacaggcacccactctcacacacgtacccacacacacattcatgcacacaccctatacatactccccctacacacacaggctcccacacccaggaacacacacactcgtccacacacccacacagtcacacccacatacacacacacacgcattcacccccacacacacgcactcaccccacacacacacattctcccctccccaacacacattcatacacacacacaggcacctccacacactcacccacacccatgcacacatccacacactcaccttacacacacacacaggcatcccctccatagatacccccacacacccacactcacacacacacaaacacccacacacaggcacccccacacacccccacacacacagcctgtgttctgaactattcttgcctttcccaaacaccccatgctattttcttacttaatgcctttgtacttgtggttctccctgctttgaaatgcgtgcgctctctcgctctctctctctctctctctctctctttctctctctctctctctttctctctctctctctctttctctctctctctctctttctctctctctcttgagacagggtctcccttcctctcccaggctgaagtgcagtggcgcaatccccttagacctcctgggctcaagcaatcttcccacctcaacctccccagtagctgagactaaaggtgcacaccatcatgcccagctgattatttttttgtagagatgaggtctcactatgttgcccagtctgatctcgaactcctgggctcaagcaatcctcctgccttggcctccccaaatgctaggattataggcatgcaccaccgaacccagtcggcatgctctcttttgtccaactgctgaattctaactcaaccttcaaggctcagctgaaatattacctttttttttttcctgcaacctctacctcccaggttcaagcaattctcctgcctcggcctcctgagtagttgggattacaggcatgcaccatcacgcttggctaacttttgtatttttagtagagacagggtttcaccatgttggccaggctggtctcgaactcctggcctcaagcaattctcctgcctcagcctcccaaagtgctcggattacaggcacctggcctaaatatcacctagtctgaagacttcccaatgctctttgcttccctctcaccccagtctcctgcaacattctattcagacctcaataatcaacttagacacagagttccatgattactgatttacatgtcagccccagggtcccactgcctctcccatacctttgatgagagtgggggttcatcaagagcagaagctgtagtttatttgtctgaaagccaccagcacccaaaattagttaataaatgtcaactggaacatgcagtgttaatgcatagagtctcccatctgcaaaggtcttagaaaccagcaagcctaatctccaattttattatttgttgatttatttttgagataaagtgtcactctcttgcccagactgcagtgcaatgacccaatcctaactcactggaacctcaaactcctgggctcaagtgatcctctaacttcagcctcctgggtagctggcaccactgagcccaggtgattttttatttgttctagagatgggggtattgctatgttgcccggactggtctcaaattcttggcttcaagtgatccttccttcttggcctcccaaagtgctgggattacaggcatgagctgccatacctggctaaacctctgattttagatgagcaaactgaggcccacagaggtatgcttaaagtcacacaacctatttggagtagagcaaagctggagttgctggccgggcgtggtggctcacatctgtaatcgcggcactttgggagactgaggcagtaagaccattcaaactcagaagttccagactagcctgggcaacatagtgagacctcatctctagaaaaaaaatcaaaaaattagccaggtgtgatggggcatgcctgtagttccagctacttgggaggctgaggcaaaaagatcacttgagcccaggagctcaaggctgcaatgagctacgattgtgccactgcactccagcctggataacagagcgagagcctgtctcaaaaaaaaaaaaaaaaaggccaggcgcggtggctcacacctgtaatcccagcactttgggaggccaaggcgggtgggtcacaagattaagggatcgagaccatcctggccaacatggtgcaaccctgcctctactaaaaatccaaaaattaatcgggcttggtggcaggtgcctgtaatctcagctactcaggaggctgaggcaggagaatcgcttaaacccaggaggtagaggttgcagtgagccggaattgcgccattgcactccagcctggcaacagagtgagattccgtccgtctcaaaaaaaaaaaaaaaaaaaaaaaaaagtccgggcacgatggctcattcctgtaatcccagcactttgggaggctgaggcgggtggatcacgaggtcaggtgttcaagaccagcctgaccaacatggtgaaaccccgtgtctactaaaaatacaaaaattagccaggcatggtggcacacgcctgtaatcccagctactcaggaggctgaggcaggagaatcacttgaacccgggaggcagaggttgcagtgagccgagatcaagccactgcactccagcctggatgacagagcgagactccatctcaaaagagcaggctgggcacggtggctcatgcttgtaatcccagcactttgggaggccaaggtgggtggatcacctggggtcagaagttcaagacaaccagcctggccaacaatggtgaaaccctgtctctactaaaaatmcaaaaaaaaaaaaaaaaaaaaagttagctgggcatggtggctggagaattgcttgaactcaagaggtggaggttgcagtgagcctagatcctgccactgccaccgcactgttcactccaacttgggtgacagagactctgtctaaaaagaaaaaacaaaagagagacagagagagagaattcatgctgggtctaagtggaagcagggagcagtggaagtttctcattagcaaaactcagaagactgtccccatagttagagacctaagttcaaatagcaattttgacacttactgtgtgactttgctgaaatcattcctcctaagcctcacttttcctcttctgtcaaatggggctcttcatccatttctcataagctcacatgaatgttagcttagtttagtgcttagaaacactttcaccagtgcacaattctgtcctaccaactcctgctttggaaggtggaagaatgggactgggtaattaatctcctttgctttagactcctgtttctttcttttttctttttttaatagagtctcggctgggcgcggtggctcatgcctgtaatcccagcactttgggaggctgaggagggcaaatcacatggtcaggagttcgagacaagcctggccaacatggtgaaaccctgtctctactaaaaatacaaaaattagctgggcgtggtggtgcgcgcctgtaatcccagcttcttgggaggctgaggcaggagaattgcttgaaccatggaggtggaggttgcagtgagctgagaccacgccattgcactctagcctaggtgacagagcaagataccatctcaaaagaaaaaaaaacagacagaatctcactctgtcacctaggctggagttcagtggtgtgaacttggctcactggaacctccacctcccaggttcaagtgattctcctgcctcagccccctgactagctaggactacaggcatgtgtcaccacgcccagctaatttttgtaattttagtagagatgggggtttcaccatgttggccagggtggtcttgaactcctgacctcaagtgatccacccacctcagcctcccaaagtgctgggattacaggcgtgaaccaccatgcccagcctagactcctgtttcttttctctctttccttttttttttttttttagacttgctctgttgcccaggctggagtgcagtggtgtgatctgggctcactgcaagctctgtctctcctccctcagcctccctaagcaggtgggactacaggcgtgcaccaccacgcctggctaatttttgtattttgtgttttgtatttttagtagagacagagttttgccacgttggccaggctggtctcgaactcctgacctcagcctcccaaagtgctgggattacaggcaatgagccactgtgcccagccctagactcctgtttcttttcttttcttttttttttttttttgagacggagttttgctcttgttgcccaagctggagtgcaatggcacgatctcggcccaccgcaacctctgcctcccaggttcaagcgattctcctacctcagtctcccaagtagctgggattacaggcatgtgccaccacgcccggctaattttgkatatttatttatttacttatttatttatttacttttatgggtatctggtaagtatatatgtttatggggtacatgatatattttgatagaggcatacaatgtgtaataatcacaaaagggataaatgagctatccatcacctcaagcaagcctcttattattattattattataaaaactagctgggcatggtggtgcatgcctataatcccaggtgcttgggaggctgaggcaggaggatcacttgagcccaggagttcaaggccacagtgagctacgattgcaccactgcactccagcctgggtgacagaacaagaccccttgtctaaagtaaataaataaatgaataataataataaatttttttaagttttgaaaagaagcccaacatactgccaggcatttgcatttctctttctgcatttgcatttctctcattacttttttcttttttattttttttgagacagagtctcactctgtctcccaggctggagtgcagtggcgcgatctcagctcactgcaacctccgcctcctgggttcaagcgattctcctgcctcagcctccctagtagctgggactacaggcgcgtgccgccacacctggctgattttttatatttttagtagagatggggtttcatcgtgtttgccaggatggtctcaatctcctcaccttgtgatcctcctgcctcggcctcccaaagtgctgggattacaggcgtgagccactgtgcccggccttattattattattttttgagacagagtttcgctcttgttgcccaggctggagtgcaatggtgtgatctcggctcactgcaatatccacctcccaggttcaagtgattctcctgcctcagcctcccaagtaactgggattacaggcgtgtgccaccacacccggctaattctgtattttttaagagactggatttctccatgttggtcaggctggtctcaatctctcgacctcaggtgatctgcccgcctcggcctctcaaagtgctgggattacaggcatgagccaccatgcccggcctaattttgtatttttagtagagacagggtttcaccatgttggtctggctggtcttgaactcctgacttcaggtgatctgccctcctcgacctcccaaagtgctgggactacagacgtgagccaccgygcccagctcgactcctgtttcttaaactgagatactcagcctcccatgggtaccggaagtcatgtcatggtgtgcatttttccagagcatgagtgtttcctgaccttattcatgtaagttaaacaaacatgacctattatggaggaaaatgcaaaatgtgcatggaattttaaatcaaatcaagaaactttccaggaaaagggtacgtattcactctttcccctactgttaggagtcctggggggaggtggacatttgggaaatcctgctagaccagagtgcacccatctgtgactgcaaatgactttttgactattatagcctgagagtaattagcaacaagagcccccagtaaaggactaacagcaacctggaactggtctcagataagctgagctgttttgtgaggtagtgagcatcctgttgtttgtgatagtcgtatgagccttaggaaaccacaagttggttgtgttgtaaagagaataccaacatcagatggaatgtggacttagaccagtaaggtccctgccaggcttgacattcttggagcctttagaaaaaggcaagagaaagnnnnnnnnnnnnnnnnnnnnnnnnnnnnnnnnnnnnnnnnnnnnnnnnnnnnnnnnnnnnnnnnnnnnnnnnnnnnnnnnnnnnnnnnnnnnnnnnnnnnnnnnnnnnnnnnnnnnnnnnnnnnnnnnnnnnnnnnnnnnnnnnnnnnnnnnnnnnnnnnnnnnnnnnnnnnnnnnnnnnnnnnnnnnnnnnnnnnnnnnnnnnnnnnnnnnnnnnnnnnnnnnnnnnnnnnnnnnnnnnnnnnnnnnnnnnnnnnnnnnnnnnnnnnnnnnnnnnnnnnnnnnnnnnnnnnnnnnnnnnnnnnnnnnnnnnnnnnnnnnnnnnnnnnnnnnnnnnnnnnnnnnnnnnnggggaggaggaagaggaggaggaggtgaaggaggagaggaggtggtggtggcggaggaggaggaggaggaagaaagggcgtagtagctcaggcctataatctcagcccttttggaggctgaggcaggaggatctctcttttttttttttttttttgagacagagtctcgctctgttgcccaggctggagtgcagtggcgtgatcacgactcattcactgcaagctctgcctcctgggttcacgcccttctcctgcctcagcctcccgagtagctggaactaccggcgcccgccactgtgcccggctatttttttttttttgtatttttagtagagacggggtttcaccatgttagccaggatggtcttgatctcctgaccttgtgatttgcccgcctcagcctcccaaagttctgggatcacaggcgtgagccaccgtgcccggccaggaggatctcttgagcccaggaattagagaccagtgcctgggtaacacagtgagaccttatctctacaaaaaaaatctgaaaattagcagggcatggtggtgcgcccctgtagtcctagctactcaggaggctgagtggggaggatcacttgagcctgggaggttgaggcggcagtgagccgtgaacacgccactgcactccagcctggataacagagcaagagagcaacaccctgtctcaaaacaaggccgggtgctgtagctcatgtctgtaatccctttgggaaaccaaggcaggagaattgccaagagtttcagaccagcctgggcaacgtagcaagactcagtctctatataaaggaaaaaaagaagaggaagaagaaggaggaggagaaggagaagagataaactatggtgcaacagtgagaaaaggccagtagaagaagcagaaggaatctaggttggagatcatggggctggaagctggtacctggtccaggctggggtcaggtggggagggaaaaggaatcacaaggccttgggctaggatccaggaaagcatgcaaggcaggtcctagattctggactgaatctgggccagaaaatccccgacttaagactgggcaaaaagtgagaaaaagtcagcctatgttaaattaagatcagaggaactctagctttgcagggtatctggcctctactgtttcctctatggccccccagctacaggtggcagwtcctgccctctataagcatgtgagctttggaggatagggcctggcagcaatcgtaagtccataggatctggcaatgccagaaatgtttgtagtcagaggctcccagcctgaagtttacatgctcccaggaagtcccaggctagtgccggggaggcctttaggttattttaatatttcaaaaatctgaaaggaaattccactatactttgtttcttgttttgacaaattgtattatttatttcttcattgcatacttaattaaatcgctgattacatttttttttttttttgagacaaagtctcactctgtcacccaggctggagtgcagtggcgcaatcttggctcactgcaacctccgtgcctcagcctcccgagcagctgggattacaggcacgtgccgccacgcccagctaatctctctatttttagtagagatgaggtttcaccatgttgcccaagctggtcttgaactcctgacctcaggtgatccacctgcctcggcctcccaaagtgctgagattacaagcgagagccactgtgcccagccaaatctttgattaaaatgtaaacttgaggccaggtgcagtgactcacacctgtaatnnnnnnnnnnnnnnnnnnnntttcttttattatttatattcgagtgaaccaactcgttaggtggaggcatagttagcgtcttgttttggtgacatcaaaccacatcatgcgtcccctatggaaggaagcgcatatatcagactgctcagtcgctctgtcttagcccagcaggcagtctgctcaagatgactgagataggctgcacatgtagtctagatctgcatgcagaggtgtagcaagctccagctgagtacatgctccagaagtccaggctagtgcgggaggccttagggtatttaatattcaaaaatctgaaaggaatttccactatactctgtttctgttgtgacaaatggtattattattttcttcatggcatacttaattaaatcgctgattacattttttttttttttgagacaaagtctcactctgtcacccaggctggagtgcagtggcgcaatcttggctcactgcaacctccgtgcctcagcctcccgagcagctgggattacaggcacgtgccgccacgcccagctaatctctctatttttagtagagatgaggtttcaccatgttgcccaagctggtcttgaactcctgacctcaggtgatccacctgcctcggcctcccaaagtgctgagattacaagcgagagccactgtgcccagccaaatctttgattaaaatgtaaacttgaggccaggtgcagtgactcacacctgtaatcccagcactttgggaggctgaggagagaggatcgattgagccccggagtttgagaccagcctgggcaacgtggtgagaccctttctctattaaaagaaaaatttttttaacttgaaaataagaaaatttgcatctaaatgaggtagcttagtaggtaaaaactttaaaatcatgagatccatgtggggaagagggagtgtagaacagggaatggtaaaagacactttgtcttcacaagagtttaggaaacacaaatacagttcatcagcctcattttaaaactggggaaaaggagaggttcagtgattgtcccaataatacactgagggttcctggcagatgcaaaactcatatcaaaaccttacatccttttttttttagacgaggtctcactacgttgcccaggctggtctctaactcctgggctcaagcgcttctcccacctcagcctcccaaatagctgggattgctggcatatgcctggcttggctcctacatcctttatcaagatcctctcctctacttttcactccctggaaagtctaagggtggagggggagggctgagaggtctaggagaatgtgaggcaggaaggcaggtctgacagggtagggtccatttcccatcaaaaatttgaccactgtgctgttaacaaaggcttttctcttcaagacaatcccccctctacctggaatgcacgtttctgggtatatatttacctgcctgttgaatgcaagtctgtgcatatgaaaacatatgcagtgagcmctgtgcttatgggtgcatatctgtgggtttgcaggagtctgtgtgtgcagagggatatataacagaatgagactatgaatagcagcgaccgtccctatgtaattgtgaagtcatataggcatacatctgtttatacaaaatgtgggtataccccatccttccggtcttcttctttttttttttttaaacagggtcttgctctgtcgcacaggctggagtgcagtgcagtggcactgtctcagctcactgcaaactcctgcctcctgtgctcaagggatcctcttacctcagcctcctgagtagtggggactgcaggcccatgccaccaagcctgactaatttttgtgttttttgtaatgatggggtttcaccatgttggccagtctggtcttgaactcctgggctcaagtaacctgccaccttggcctcccaaagtgctgggattactaacctgccaccttggcctcccaaagtgctgggattacaggcataagccaccatgcccagccttttatttttacttttttgcagtgacaaggtttcaccatgttgcccaggctggtctcaaactcatgggctcaagcagtcctcccacctcagactccgaaagtgttgggatggcaggcatgggccaccatgcccagtctaatttttatttatttatttatttatttatttatttatttatttatttattttatttattttgagacggagtcttcctctgtcccccaggctggagtgcagtggcacaatcgcagctgactgcaacctccacatcctgggttcaagcaatttctcctgtttgagcctcccaagtagctgagattacaggcatgcaccaccatgcccgctaatttttattatttttagtagagacagggtttcaccatgttggccaggttggtctcgaactcccaacctcaagtggcctgcccacctccgcttcccaaagtgctgggatgacaggcatgagtcaccagacctggcctgtggcctttttataatcatcacaaaatgttctgtggaccacgggcagccttaagtttgactgagaacattacatgccctagtcagaggcagcctcgaatctatgaaattcttactcgtgaccttggattcctaaattgggagaaaagaatgtcctgtttcattcaccccagaatctgccctcattgctggttctgggagccctggggattcctttcatctgtttttttttttttttttttctcccttcctccacttctttctttcagacaatgagaaatttatattaagctttaattttgattttctttttactgacctcatttattaacctggttagatcatgttggctactcagcaatctttatcaaactaagaccagaaggagtctgggcatggtgactcacgcctgtaatcccagcactttgggaggctgaggcagtaggactccttgagcccaggagttcgagagcagcctgaccaacatggtgaaaccccatctctactaaaaatacaaagattatctgggtgtggtggcacgtgactgtagtcccagctacttgagctacttgggaggctgaggcaggagaatctctttttttttttttttttttttttctgacagagtctagttctgttgcccaggctggagtgcaatggtgtgatctcggttcactgcaacctctgcctcccaggttcaagcgattctcctgcctcagcctccggagtagctgggattggaggcatgcgcctagtatgcccggctaatttttgtatttttagtagagacggggtttcaccatgttggtcaggctggtcttaaactcctgacctcatgatctgcccacctcggcctccaaagtgctgagattacaggtgtaagccaccacacctggccctttttttttttttttttttgagacagaggacagagtctcactgtgtcgcccaggctagggagcagtggcacgatctcggctcactgcaacctccaactcccaggttcaagtgattatcctgcctcagcctcccaagtagctgggattacagtcacgttccaccaggcccagctaatttttgtatttttagtagagacggggtttcactatgttggctaggctggtcttgaactcctgacttcgtgatccgcccacctcggcctcccaaagtgctgggattacaggcttgagccaccaccatgcccggccagcaggagaatctcttgaactggggaagcggaggttgcagtgagtggacatcacgccactgcactccagcctggtccatggagtgagactctgtctcaaaaaaaaaaaaaaaaaattagccaagcatgatggcgtgatggcatttgcctgtagtcctagctacccaggaggctgaagtgggaggatcactgagcccaggaagtcaaggctgcagtgagccgtgattataccactgcacaccagtctgggcgacaggggaccctgtctcaaaaaaagaaaaaattaattaaattaaattaaaaaaaatttttaagttaacattttttctcctccaactatagacctattgatttattgaacattttgtccaaaatgtgtgccagcttcgtggctgagtttcttgggccaatgctttacatcaagaacaggcaggtggtcggatgcaatggctcacgccagtaatctcaacattttggaaggccaaagtggaaggatcactcgaggccaggagttcaagaccaacctgggcaacatggtgagaactcatctctacaaaaaatacaaaaattaaccaggtgtggtggtgcacgcctgtagtcctagctactcaggaggttaaggtaggaggatcgctgagcccaggaggttgaggttgcagtgagccaatatcataccactgtactctagcctgggggaaagagcaagaacctctctcaaacaaaacaaaacaaacaaagcaacacaaaaaacagcagacaagactatacttcctttagggatcatttctttagttcagtttctctgaacatgtagagcacaaaaagtaaaaaagaaaaaagaacaagcagactattctactgcagaccattgttgtactctggaccacctcatggcaaaatctgtcagaaatcatttagaatagccagggctggaggctcacgcctgtaatcctagggccgagatgggaaaatcacttgagctcagaagttcaagaccagcctgggcaacatagtgagactttgtctctgtaaaaataaaaataaaaggccaggcgcagtggttcacacctgtaaccccaacactttgggaggctgaggtgggtggatcatgaggtcaagagatcgagaccattctggccaacatggcgaaacctcatctctactaaaaatacaaaaaattagctgaacgtggtggtgcacacctgtagtcccagctactcggaaggctgaggcaggagaattgcttaaacccgggactgcactccagcgtggcgacagagcaagactctgtctcaaaaataaaataaaataaaataaaaataaaaataaaattaaaaaaaaatgaatcatttaaaacattttcttcgcctttgccccgacccagacttgattaatgacaaagctgcccatgttcaataaagagccttagctattcatgcccacatagaaccctcatgacaatatcaagcaatatcaagaatcagggctagcaggcatggcaaataatttctttctttattttattttattttgagacagggtcttgccctcttgctctcttgctctcttgtgccactggagtgcagtggcaaaatcacagctcactgaagcctcgacctcccgggctcaagcaatcctcccacctcagcctcctgagtaactgggacaacaggcatgtgccaccacgcctggctattattattatcattattattattattattatttttatttttttagatgaagtctcactctatcgcccaggctggagtgcagtggtgcaatctcggctcactgcaacctctgcctcccaggttcaagcaattatcctacctcagcctcccgaggagctgggactacaggcgtgtgccaccacacctggctaatgtttgtatttttagtagagatggggtttcaccatgttggccagggtagtctagaactcttggcctcaagtgatctgcctgcattggcctcccaaagtgtgggattacaggtgtggcatgagccaccgcacccagcctccagctattttttttttctttttctttttctttttttttttttttttacctgagaagctgtgaatgagagggcccgggtaatttttgtatttttttaatttttgtagagacagggttttgccatgttgctcaggctagtctcaaactcctgagcttaagcaatccactgcctcagccccttaaagtgctgggattacaggcatgggctaccgtgccccgtcagtaattaatttctagtgggtaaatcagggatgtgtcctgggctacctcctttttcatatttgtttaaatacataatactttttttttttttgagatggtatctcactctgtggcccagactggagtgcagtgacacaatcatggctcactgcagcctcgacctcccatagctcaggtgatcctcctacctcagcctcctgagtagctggcactatgggtgggcaacaccacgcctggataatttttgtatttttagtagggacagggtctcaccacgtcacacaggctgggttttttttttttttttttttgagacggagtctcgcactgttgcccaggctggagtgcagtgacgtgatctcagctcactgcaacctccacctcccaggttcaagcgattctcctgcctcagcctcccgagtagctgggattacaggcacccgccaccatgcctagctaattttttgtatttttagtagagacgtgttttttagtagaaactaattttagtttcactatgttggtcaggctggtctcgaacttctgatgttgtgatccacctgcctccgcctcccaaagtgctgggattacaggtgtgagccactgcgcccagcctggtttttttttttttttttaaagagatggagtctcacatctcactctgtcacccaggctggagtagtacagcacatgattgtagctcactgcaacctgaaacttctggcctcaagtaatcctcccacctcagcctcccgaatagctgggattacaggcaggagccactgcacctggctttaattccgctctctctcttttttttttttttcctttagagatgggatctcactctgttgcccaggctggagtgcggtggcatgatcatggctcactgcagcctcaaccacctgggctcaagtgatcctcccacctcagcctcctgagtagctgggaccacaggtacacaccaccaagcccagttaatttttttattttttgtagagacggggtctgcctatgttccccaggctggtcttgagctcctgggctcaagcagtccccttgctttggcctcccaaaatgctgtgattataggtgcaagccaccacacctggcttaataccttttttgaatgaactctgtagcctctcgacacagagagaacaaaaaaaaaagcattattttggatgcaaacaaaatggatttattttcacaaattgggagtgtcttgaacatagaactgattctgctagtcaagtatcgctataaataagggatatagagcaattattctaattggtattttagtagaagtcccccaaccagtaacgtgaatatacctgataatcccttttactgagtcygctcccttgggtactttggtgtgctttttgtatcatggacagttttattaggatggagccttacttacagcttggcaatccacactgctttataaacgtttctgggagtctggcagctctggaagctcagttcaccatgtccatgccatggcaacccaaattcaatccaggttctcccaatcacttgctggcagaagggcaccaggcgtggtggttcacacctataatcccagcactttgggaggctaaggtgggcagacagatacgtgagcccaggagtttgagaccagcctgggcaacatggcaaaaccccgtcggtacaaaaaaaatacaaaaattagccggactttgtgtcccatgcttgtggtcccagctacttgggaggctgaggtgagaggatcacctgagattggggaggtcaaggctacagttagccaagattgggccactacgctccagcctaggcgacagagcaagaccttgtctcaaaaaaacaaaaaaaacaaaaaaaaaaaaaacaagacttactggcagaaggttgttgggcagcttactaaacctctgcacttccctcagttccttcatcagcaaaatgatgacaaaaataagacttgcatctaaggctggctgtggtgagcattatacgtgatatatagatgatctcatataataaaatgcttaacatagtgcttgctacatagacactggccttaaacatctttcaggctaaaatgattgatcattttcattttccttcatgatttttggcacttccacgggctaccttttcacgtttgatatatgtacctaaaatggaaactttactaccataaatggaaaaccagaatcatgagacataaatagaagtgaaacaacagcgcacactaaaataaacacataaattaacattcgtaaatggtcatccattatcccctaaaatcacttacacacctgagtggtgtacaggtcatattttaggaaatgccacactgcaagagagaactttgggcttaggctgctgcttgtggattaaaggagctggcctattgacaaaaatgtaatgggtgaggtaggacgattgcttgagaccatacatagtgtgagtgcagcttgggcaaaatagtgagatcttatctccacacactttttttttttaagacagagttttgctcttgttgcccaggctggagtgcaatggcacgatctcggttcactgcaacctccacttcccgagttcaagcaattctcctgtctcagcctcccaagtaactgggattacaggcgcctgccaccacgcctggctaatttgttgtatttttagtagagacagggtttcaccatgttggccaggctggtttcaaactcctgacctcagatgatgcacccacctcaccctcccaaagtgttgggagtttagtagaaaccccatttctactaaaaatacaaaagttagccgggcttggtggcatgtgcctatagtcccagctacttgggaagctgaggcaggagaattgcttgaacccggagacagaggttgcagtgagctgagatagtgccactgcactccagcctgggtgacagagcaagactccatctataaataactaaataaataaataaataaattgtattgttattattatgttttaatagagacggggtgttgctatgttgcccaggctagtcttgaatgcctagtctcaagagatcttcctgcctcagcctcccaaagtattgggattataggcatgagccactgtgcctggccaagaatttttttataattagctgggcatggtggtacacatctgtagtcctaggctactcaggaagctgaggtgggagaaccactcaagcccaggtgtgtgaagttacagtgagctatgatcacaccatgtgccccagccggggcaacagactgagacactgtctcaaaaaaaaaaaaaaaaaaaataaatttaatgggtacctcctatgtgccagattctgacctagagctgaggatgcagaagtaagcagacagagagcgtcccatgcatttggccctgccctctgtgacagaggtgggtgcccctctggtgggtcacttcattttcacaggaggctataaggcttgtagttagctcactgatcaataatatctgtgactgccgacaacatggccgcacatgacagcaacacttgccaggaagtaacatttcaaaatcaccaccgttaaccatttaccaagctaacgtttagtgaaacagttaaaaggatgaggtattttgtattgacatgtattgacacggaaagacatcccgcatacaccatggcaagcaagttgcagaacagaatgcagagtatatgcctatttgcattgacatatgtatacaggggattcttttaaataagctctgtgctaagcctttatttgcattatttcatgtaattctcataataatcctatgaagtgctattattatccccattttacagatgcaaagactgaggcccaaaccaggtaaaatgatttgtctgaggcctcataacaaacaaatgagcagtggagttgtgaagtgagtcccggtctgccagcctgcagagactagacttaacctccatgtttttcagcagccatacatgggaaaatctggaaggacacacaccaaatttttcacgatgggcatatcccagaagtgggattggaggaggctgcatttcttgtatttctttatatgcctcttactgtttgagttttaaattttattttttttttaaataattaaatagagatggggtctgcctatgttgcccaggcaggtctcaaactcctgggcccatgtgatcctcccatcacggccccccaaagtgctaggattacaggtgcgagccactgtgcctggcctgtttgagtgtttttaaaacagcaatgtgctaattttgtaattagaaacaaaaacagccgggcgaggtggctcatgcctgtaatcccagcactttgggaggctgaggcaggcggatcacctgagatcgggagttcaagatcagcctgaccaacatggagaaaccccatctctactaaaaacacaaaattagccgggcgtggtggtccatgcctgtaatcccagctactcgggaggctgaggcagcagaatcacttgaaccagggagacggaggttgcagtgagccaagctcgcaccactgcactccatcctgggcaacaagagtaaaactctgtctcaaaaaaacaaaaaacaaacaaaccaaaaaaaccccacaaaacttagccagacatggtggcacacgcctgtaatcccagttactggggaggctaaggcaggagaatcactggaacctgggaggtggaggtttacagacatgcaccaccatgcctggctaattttttgtatttttagtggagatggggattcaccatgatggccaggctggtttcgaactcctgacctcaggtgatccacctgctttggcctcccaaagtgctgggattacaggcgtgagccactgcactctgccgtgtttattttttagagacagaatctagctgtgtcacccaggccagagtgcagtggagcgatcacagctcactgcagcctcaaacccctagctccagatactttaaaatcaacactgaggttgattgtgagaggccccattactggatggtaccttggtcccacctgctcctcaccacctaccccaccccaccccactgagaattactttcactgaattgagcttggccttgaagccatcagctcgtgggtgtgtgcatggagttataggatgtagtctgtgttttatgtgtagcccctgccctgcctctgaacacatctgtacacgtagattttcccatgatatgtatggtgttttggcttgtgtgtgtgtgtgtgtgtgtgtgtctgtgtgtggctgcgtgagagaccctcttctaaagtagatcccatggccccgctcagagtccagcctgcctgagttctcacactcctcacactgtatacaggaaacaggctgatttgcaaagccacaccacaagtgtgagggaatgggtggttcactggcccaccaaggtgctgagtgggcataatttgggtgtggacagccctccctttggtgcatcatttgcagggggagggagtgccccacctcccttaaacacctactatgtgctggccaggtgcggtggctcatgcctgtaatcccagcactttggggggccgaggtgggcggatcacgaggtcaggagatcgaaaccatcctggccaatatagtgaaactccatctctactaaaaatgcaaaaattagctgggcatggtggcgcgcctgttaatcctagcacttgggaggctgaggcaggagaatcacttgaacccgggaggcatttttgtttgagatggggtttcgctctgttgcctaggctggagtgcaatgactcgatctctgctcattacaacctgtgcatcccgggttcaagcaattctgcctcagccccctgagtagctaggattacaggcacctgccaccacgctcggctaattttgcatttttaacgaagacagggtttcaccatgttggccagcctggtctcaagctcctggcctcaaatgatctgcccgcctcagcctcccaaagtgctgggattacaggtgtgagccaccgtgcccagcttgattattgcctctttacagataagtaaactgaagctcagagagagagatgaagccacttgctcaaggaaatggtccagcggaattgtgactgggtcggcctgtctctgaaatgcacattctctgctccacaccacacctgtgggctctctggcctttggtcttgctctgaggtctctgccctcgtggtacccaaggaacagaatccagggatagtgaccttggcttcatgtcctacgcactcttgaaaatgggtctttctccttctcagaactgtcttgactcttgcaggaagctttccagatcttaagagacaccttctcccctcctctgaaccaatgctcagcctgttcttggcccttgtccacttggcccttctctctttgagaagagcctctgttcctggggcccaagagcaagggaccctgtctgattcgtctgtcagcatagggctgggtggaaggaactgctcatgcctgtccagggtgaatgaccctccctgaagtgcgaggagagccaccatgttccctagcccccacaagaggctacaggacttggagctgtagacaggagaaaggctgggaccagctgactaggcggaaagtgtgtgtcaagaaaaactccaacgaagcaggggaaacctggaaatctggctgagtgaggacttcccaaaaaaattaaggctcagagttaaaaagtgaggaggtgagcaggtagcaactatgcctccccagtctctctccacctccctggggtttgaagcaggaatcagcaaaaccaactggccctacacaggcagggctgaagcgggagggagccaggggcgaggggaggacatcctgctgtgacgcttggcaggggcaggaatggtgactttccagatggaagttcagcgcttcctcacccaggaccaactgcacccctgtctgggataaaaatagtacttcctcttcctttctcccatcattctctttcacttccaacttcccatactcagatcagatatgtccatccaccctggagctccatcccagatgatggacacccccacacatatcagttcacgcccatcaggagattcttccctcgatcgctgaggctaaaatcactcctcgcatgtccatctggatgccttgggtgatctctgkctctctctctctctctctctctctctctctctctctctctttctcaggagattcttgtcactggggtctgccccagaaaccagaaggattcctgggtcctctgagtccagcctgtccatcaccctgctccaggcggggtggccacagcctcagccatcactctcagccctgccactgccttgctgagaaaccgtgggcagtgagtgccttgttctctctgggcctcaggagcctcatcctcatggcctgagggactgggcttggtggtttctggaagcctttttaacacctgactgtccatgtgcctggtgtccaggaaacacgctcccagtcaggtggggccactggtggacagcacgacagaggcaagcgacaccagcttcgcaggaaagaggcgacccagctacactgcctgcctcccacctgaccttgagcgaggatcttctctccccagccacaaagggctgctgcatccctagggagcctgggcccgcacagctgcagccgtctgctatcaggcctctcaccccggcgcctgcgcccccaataccagcgctccttacctgcccagcccgggagccctctggccccattcacatggtcctcctggcctaacctggctgcctggacagtctcagctcccttcgccgtcgtagccaccacctgtctccccgcgcccacgtcccaccctgacttcctgcctcctccggagggctccgcagccaaccgggccccagcagcccaaccacaaccctctagcacgccaagcttcctgccaccatagacccctgcctctcagcccctgggggtcccctacatctccagaccaggtccatcttcccctactgtcccagggtgacactgggaggtttaaagttgaggggaggatgtctgatagaccctcccttctgccctccagggtgcatctgggcaagagattcaagggcagcctttgggcccagtgagcagggggcaagcggacacacactcagcttatggtgagaggcaaacagcacctcagcaccaccgttgcagctgagagacccttttgtttctgtctggcagcaaaggtagcatcgttcagagtcagaggagaggacaatatccctgttaaatagctggtgagcagaccatgcatgttacagtcaggtcaggccgagagaacaattcccatgtcatctcagggcatggaacagtagctttattatagtcaagggtaggtgaatggcaggctaccatccctcttacagacagaatgctggaaaacagcctgtttcaggaggcagacaggacaacctcatgtcttcaagagggcatagtaacggcccctgctgtagtcagaggccaggacaacacccattaatcatggttggagagtagggcaacagttcgaattcaggtagaggcaaggccacagcccctggcagaggtggagggcttggcactatctcctgcaacaggtggaagacagagcaaacagggccgctcaggcccccaggtgcaggccacagactgtcaggactttctgttataagcaggaggcaagaagattgtcacgagcagcaggcaggcaaagaatttccatttcccctggggccaggctgagggggcacccatcattagctgagggccaggtcaccagtgatatgaggaactccaggtggcctcatcaggtccaagaactcggccttgaccccaccaggaggaaagtgcacatgcgtcactgcctgagtgagctggtagggggaggggaacccacagagcattgttggggcttgtgaggtggaagcgatgctgtgtgcacctcagctgcagagagaagtgggggcaggaaataggtggggggaagaggaagcctgagttggaaagtcagacaaagagggtaacacagaaacaaaggctgagagagacaaagtgaaaaaccttcacagtgacacagagcctagagttggagctccaagcctggtgcagggcccagactcccttgcaatgtaagcctgaacacttcacggtccatctccctgtctcagcacagagtagaaagactgccgcgctgggagtgagtaatagttcatattcactgagcgctcactgtgcactatctcccgtaaggcacatctgctgcctgtggagtgagaatcagcatctccattgtggaggtgaggaaacagactcaggggttaagggagctcctcagggtcgaatagaaataaacggtggctcaggcctgtaatcctagcactttggaaaccccaggcaggtggatcacttgaggtcaggagtttgagaccagcctggccaacatgctgaaaccctgtctctattaaaaatacaaaaattagccgggcatggtggcgggtgcctataatcccagctactcgggaggctgaggcaggagaatcgcttgaaatcggaaggtggaggttgcagtgagccaagatcgcgccactactccagcctgggcgaaagagtgaaattccatctcaaaaaaaagaaaaaaaaaagaaaagaaaagaaaggaaattagctaggcgaggtggtggccacctgtaatcccagctacttgggaggctgaggcaggagaatcgcttgaaatcagaaggtggaggttgcagtgagccaagatcgcgccactactccagcctgggcgaaagagtgaaattccatctcaaaaaaaagaaaaaaaaagaaaagaaaagaaaggaaattagccaggcgaggtggtggccgcctgtaatcccagctacttgggaggctgaggcaggagaatcgcttgatccccggaggcggaggttgcagtgagctgagattgtgctactgcattccagcctgggtgacagagtgagactctgcctcaaaaaaaaaaaaaaaaaaagaagcagaagaaataacaacaacaaaaagaaataaacggggtagctggctttgaacccatgtctctcagattctgcattcttcaggagcccaatttacctaagtcacctcccatgggcctgcagtgaactagggtggtcccagtgacaggcgacattcagatagcggccttgggcctgaataaacgactgcaagagaccttgatgggaaccagagaaagcgtttattgaggagtttgagggtgtgagctcctcctcctccccctcccagctgggtcagcagaggaaacaggatgctggggttttgcactcttggaattcagctctcagaaacctgaatgttcctcctcccccgccaggagctggtgcctctggggcacccctccctttcctcttcccaggcaggcaggggaagcggcattgggagagggggcggggagtcggggggcacaggtgttcctcagcagagggtgaagcgccgggcgctgatgttcatgcgcgtgaggcccaggtgccgcagcagcggggccagggctaggccggccccgggctccagctccagctccagctcggcctcatccagcagctcctggtgcaggtgacaggcttggtccatcttcagtcggtgcagctgggcccgcagccgcagcagctgccctgccagctgcctgtcctgcgcctgcatctcccgctgcggccgagagggggcgtgagcctactggacaggccctcggccgcgcgccgtttctcccttcctggcaacgctgggcctttgcactgactgtgtcctccccagccccctctcacctcagcttgatctctccctatctcccaatctggcttcacctggtggttctcaaacccagctaaggagtcattattaagcaaatccaactgcctgggccccatcccaaatcaactaagcagaatctctgtgttggagcctgggtatctttatatttgcacatgttgagttgggagccacctactgaaacttcacctcttcagaatctgcctgcagcatggccagtgcctccttttgcacttcgctgtatctttaggccatagaaagtcccagagtaggggaggctgtgtatttccctatttataatggtgccccacaccccccaacaccagtgctctgtcccctaagcaacaggagcacaaggtcagtagattggatggaatccttcttcagcaagcctccctgaatacaacactggacaagtccattcccggctcctcagcccaggacaccggagcgggcggttgctggaggcagggtccattctcatcccttccccatgcctgtggtcttggaccctaaggaggaccagcctgaaggccctgggcaaagctgcccaccccaccagactcaccagctcccgtcggagccactcaagggcggagtccattgagtcgaaaccacagatgtccccaggtccccctggtccaggtttggcttgggccctgcgccaggcctggctctggacctgggctgtccactccagatatgagggccgccgagtctgcagctgcagcttggctgtcagtgccttcacagagtccaggctctccccctcctcatcctcctcgtcctcttcacccactgcctggaatttcagtagccccagggacatggcaggtttgaggtgagtgacagggcagggctgcagctctgagattagggaaaggctggcagtattgcccagggagaggtggcagaagttgagggtgagaagagcgtgccagggagtgtgtggtggtcaatgttcaaggtgggttaggggggctgaatgtgccagggtgagtgagcagatgggtgtgtgaggccaagtatgcaagggctggaattttcctggactgctaacttgggagccacgtgatgcccatctgggtgggggccggaggaaccctgctcctctggccctttggatgaattttattgtctttgcccagaaggagacacccaattcccagaaaggaagttgctccaggatgagaaaagcatcattcataccagagtcttggccctcctcccaagactcatgttaagggagctgagatcaggaaggaggctgcctagccaccccttgtccttactcgtgacaccagcccttcaggaaaggactagcctccagggccctggcctgggagtcaggagacctgagttctagtgctggctctgcagaaccttgggcaagtcactgaccttctcagagctctgttgggacagatgaaggatttcaagctaatactctaaggagccctcaagggctgcctgcaggagaaggacagagctgtggatgggctccttgccttccatctccctgcccctcccagggcttcaaccagagcagttcccttttttaaactttgttttcaaacataacatacacacagaaggacaggtgcagtggctcacgcctgtaatccctgcactttgggaagccgaggtgggcggatcacgaagtcaggagtttaagaccatcctggctaacacggtgaaaccccgtctctactaaaaatacaaaaaattagccgagtgtggtagcatgcatctgtagtcccagctacttgggaggctgaggcaagagaatcgcttgaacccgggaggcagaggttgcagtgagccgagatcgagccattgcattccagcctgggtgacaaagcaagactctgtcaaaagaaagaaagaaggaaagagagagagagagagagagaagggagggagggaggaaggaaggaaggaaggaaggaaggggaaagaagtgtaacatacacacagaaaaactgtacatatcataaatgcatggagacacggtggctcacgcctgtaatcccaacattttgggaggctgaggcgggcagatcacctgaggtcaggagtttaagaccagcctggccaacatggtgaaaccctatctctactaaaaatacaaaatgagctgggcgtggtggtgcatgcctgtaatcccagctacccaggaggatgaggcaggagaatcactggagcctggaggcggaggttgcagtgagccaagatcacaccactgcactctagcctgggcaaaaagagcgaaactccatctcaaaaaataagtaaataagtaaataaatgaatgtatggctcgatgaattctcccaaactgaacacatccatgtaaccagcacccagatcaagcaacagagtattaccagcacccaggaaccgctgttagcctcccatgtgctcctggcctgtcactaatctaagggtaacaccaccctcattctaacagcatagttttctctgtttatatgccttctagtggttcacaaactttagcatgcatcagaatcacctagaaagcttgctaagatggctaggccccaccacccagagtttcagattcagtatgtatggggtggggcctggtaatctgcatttctaccaaattcccatcccagctgctgctgctggtctggaattttacaatttatgctttttttttttttcgagacagggtcttgctttgttgccaggctggagtgcagtggtgggattacagctcactgcaaccttgaactcttggactcaggtgattctcttgcttgacctcctcagtagctgggacttacagggccaagaccccacacccagctaattttttttttttttaagtttttgatagagatgaggtcttcctctgttgctcataatggttttgaactcagccaggcgcggtggttcacgcctgtaatcccagcactttgggaggccaaggtgggtggatcacgaggtcaggagatcgagaccatc

SEQ ID NO: 98228 - DNA, 14495 bp, Homo sapiens
gtttttaaaacagcaatgtgctaattttgtaattagaaacaaaaacagccgggcgaggtggctcatgcctgtaatcccagcactttgggaggctgaggcaggcggatcacctgagatcgggagttcaagatcagcctgaccaacatggagaaaccccatctctactaaaaacacaaaattagccgggcgtggtggtccatgcctgtaatcccagctactcgggaggctgaggcagcagaatcacttgaaccagggagacggaggttgcagtgagccaagctcgcaccactgcactccatcctgggcaacaagagtaaaactctgtctcaaaaaaacaaaaaacaaacaaaccaaaaaaaccccacaaaacttagccagacatggtggcacacgcctgtaatcccagttactggggaggctaaggcaggagaatcactggaacctgggaggtggaggtttacagacatgcaccaccatgcctggctaattttttgtatttttagtggagatggggattcaccatgatggccaggctggtttcgaactcctgacctcaggtgatccacctgctttggcctcccaaagtgctgggattacaggcgtgagccactgcactctgccgtgtttattttttagagacagaatctagctgtgtcacccaggccagagtgcagtggagcgatcacagctcactgcagcctcaaacccctagctccagatactttaaaatcaacactgaggttgattgtgagaggccccattactggatggtaccttggtcccacctgctcctcaccacctaccccaccccaccccactgagaattactttcactgaattgagcttggccttgaagccatcagctcgtgggtgtgtgcatggagttataggatgtagtctgtgttttatgtgtagcccctgccctgcctctgaacacatctgtacacgtagattttcccatgatatgtatggtgttttggcttgtgtgtgtgtgtgtgtgtgtgtgtctgtgtgtggctgcgtgagagaccctcttctaaagtagatcccatggccccgctcagagtccagcctgcctgagttctcacactcctcacactgtatacaggaaacaggctgatttgcaaagccacaccacaagtgtgagggaatgggtggttcactggcccaccaaggtgctgagtgggcataatttgggtgtggacagccctccctttggtgcatcatttgcagggggagggagtgccccacctcccttaaacacctactatgtgctggccaggtgcggtggctcatgcctgtaatcccagcactttggggggccgaggtgggcggatcacgaggtcaggagatcgaaaccatcctggccaatatagtgaaactccatctctactaaaaatgcaaaaattagctgggcatggtggcgcgcctgttaatcctagcacttgggaggctgaggcaggagaatcacttgaacccgggaggcatttttgtttgagatggggtttcgctctgttgcctaggctggagtgcaatgactcgatctctgctcattacaacctgtgcatcccgggttcaagcaattctgcctcagccccctgagtagctaggattacaggcacctgccaccacgctcggctaattttgcatttttaacgaagacagggtttcaccatgttggccagcctggtctcaagctcctggcctcaaatgatctgcccgcctcagcctcccaaagtgctgggattacaggtgtgagccaccgtgcccagcttgattattgcctctttacagataagtaaactgaagctcagagagagagatgaagccacttgctcaaggaaatggtccagcggaattgtgactgggtcggcctgtctctgaaatgcacattctctgctccacaccacacctgtgggctctctggcctttggtcttgctctgaggtctctgccctcgtggtacccaaggaacagaatccagggatagtgaccttggcttcatgtcctacgcactcttgaaaatgggtctttctccttctcagaactgtcttgactcttgcaggaagctttccagatcttaagagacaccttctcccctcctctgaaccaatgctcagcctgttcttggcccttgtccacttggcccttctctctttgagaagagcctctgttcctggggcccaagagcaagggaccctgtctgattcgtctgtcagcatagggctgggtggaaggaactgctcatgcctgtccagggtgaatgaccctccctgaagtgcgaggagagccaccatgttccctagcccccacaagaggctacaggacttggagctgtagacaggagaaaggctgggaccagctgactaggcggaaagtgtgtgtcaagaaaaactccaacgaagcaggggaaacctggaaatctggctgagtgaggacttcccaaaaaaattaaggctcagagttaaaaagtgaggaggtgagcaggtagcaactatgcctccccagtctctctccacctccctggggtttgaagcaggaatcagcaaaaccaactggccctacacaggcagggctgaagcgggagggagccaggggcgaggggaggacatcctgctgtgacgcttggcaggggcaggaatggtgactttccagatggaagttcagcgcttcctcacccaggaccaactgcacccctgtctgggataaaaatagtacttcctcttcctttctcccatcattctctttcacttccaacttcccatactcagatcagatatgtccatccaccctggagctccatcccagatgatggacacccccacacatatcagttcacgcccatcaggagattcttccctcgatcgctgaggctaaaatcactcctcgcatgtccatctggatgccttgggtgatctctgtctctctctctctctctctctctctctctctctctctctctttctcaggagattcttgtcactggggtctgccccagaaaccagaaggattcctgggtcctctgagtccagcctgtccatcaccctgctccaggcggggtggccacagcctcagccatcactctcagccctgccactgccttgctgagaaaccgtgggcagtgagtgccttgttctctctgggcctcaggagcctcatcctcatggcctgagggactgggcttggtggtttctggaagcctttttaacacctgactgtccatgtgcctggtgtccaggaaacacgctcccagtcaggtggggccactggtggacagcacgacagaggcaagcgacaccagcttcgcaggaaagaggcgacccagctacactgcctgcctcccacctgaccttgagcgaggatcttctctccccagccacaaagggctgctgcatccctagggagcctgggcccgcacagctgcagccgtctgctatcaggcctctcaccccggcgcctgcgcccccaataccagcgctccttacctgcccagcccgggagccctctggccccattcacatggtcctcctggcctaacctggctgcctggacagtctcagctcccttcgccgtcgtagccaccacctgtctccccgcgcccacgtcccaccctgacttcctgcctcctccggagggctccgcagccaaccgggccccagcagcccaaccacaaccctctagcacgccaagcttcctgccaccatagacccctgcctctcagcccctgggggtcccctacatctccagaccaggtccatcttcccctactgtcccagggtgacactgggaggtttaaagttgaggggaggatgtctgatagaccctcccttctgccctccagggtgcatctgggcaagagattcaagggcagcctttgggcccagtgagcagggggcaagcggacacacactcagcttatggtgagaggcaaacagcacctcagcaccaccgttgcagctgagagacccttttgtttctgtctggcagcaaaggtagcatcgttcagagtcagaggagaggacaatatccctgttaaatagctggtgagcagaccatgcatgttacagtcaggtcaggccgagagaacaattcccatgtcatctcagggcatggaacagtagctttattatagtcaagggtaggtgaatggcaggctaccatccctcttacagacagaatgctggaaaacagcctgtttcaggaggcagacaggacaacctcatgtcttcaagagggcatagtaacggcccctgctgtagtcagaggccaggacaacacccattaatcatggttggagagtagggcaacagttcgaattcaggtagaggcaaggccacagcccctggcagaggtggagggcttggcactatctcctgcaacaggtggaagacagagcaaacagggccgctcaggcccccaggtgcaggccacagactgtcaggactttctgttataagcaggaggcaagaagattgtcacgagcagcaggcaggcaaagaatttccatttcccctggggccaggctgagggggcacccatcattagctgagggccaggtcaccagtgatatgaggaactccaggtggcctcatcaggtccaagaactcggccttgaccccaccaggaggaaagtgcacatgcgtcactgcctgagtgagctggtagggggaggggaacccacagagcattgttggggcttgtgaggtggaagcgatgctgtgtgcacctcagctgcagagagaagtgggggcaggaaataggtggggggaagaggaagcctgagttggaaagtcagacaaagagggtaacacagaaacaaaggctgagagagacaaagtgaaaaaccttcacagtgacacagagcctagagttggagctccaagcctggtgcagggcccagactcccttgcaatgtaagcctgaacacttcacggtccatctccctgtctcagcacagagtagaaagactgccgcgctgggagtgagtaatagttcatattcactgagcgctcactgtgcactatctcccgtaaggcacatctgctgcctgtggagtgagaatcagcatctccattgtggaggtgaggaaacagactcaggggttaagggagctcctcagggtcgaatagaaataaacggtggctcaggcctgtaatcctagcactttggaaaccccaggcaggtggatcacttgaggtcaggagtttgagaccagcctggccaacatgctgaaaccctgtctctattaaaaatacaaaaattagccgggcatggtggcgggtgcctataatcccagctactcgggaggctgaggcaggagaatcgcttgaaatcggaaggtggaggttgcagtgagccaagatcgcgccactactccagcctgggcgaaagagtgaaattccatctcaaaaaaaagaaaaaaaaaagaaaagaaaagaaaggaaattagctaggcgaggtggtggccacctgtaatcccagctacttgggaggctgaggcaggagaatcgcttgaaatcagaaggtggaggttgcagtgagccaagatcgcgccactactccagcctgggcgaaagagtgaaattccatctcaaaaaaaagaaaaaaaaagaaaagaaaagaaaggaaattagccaggcgaggtggtggccgcctgtaatcccagctacttgggaggctgaggcaggagaatcgcttgatccccggaggcggaggttgcagtgagctgagattgtgctactgcattccagcctgggtgacagagtgagactctgcctcaaaaaaaaaaaaaaaaaaagaagcagaagaaataacaacaacaaaaagaaataaacggggtagctggctttgaacccatgtctctcagattctgcattcttcaggagcccaatttacctaagtcacctcccatgggcctgcagtgaactagggtggtcccagtgacaggcgacattcagatagcggccttgggcctgaataaacgactgcaagagaccttgatgggaaccagagaaagcgtttattgaggagtttgagggtgtgagctcctcctcctccccctcccagctgggtcagcagaggaaacaggatgctggggttttgcactcttggaattcagctctcagaaacctgaatgttcctcctcccccgccaggagctggtgcctctggggcacccctccctttcctcttcccaggcaggcaggggaagcggcattgggagagggggcggggagtcggggggcacaggtgttcctcagcagagrgtgaagcgccgggcgctgatgttcatgcgcgtgaggcccaggtgccgcagcagcggggccagggctaggccggccccgggctccagctccagctccagctcggcctcatccagcagctcctggtgcaggtgacaggcttggtccatcttcagtcggtgcagctgggcccgcagccgcagcagctgccctgccagctgcctgtcctgcgcctgcatctcccgctgcggccgagagggggcgtgagcctactggacaggccctcggccgcgcgccgtttctcccttcctggcaacgctgggcctttgcactgactgtgtcctccccagccccctctcacctcagcttgatctctccctatctcccaatctggcttcacctggtggttctcaaacccagctaaggagtcattattaagcaaatccaactgcctgggccccatcccaaatcaactaagcagaatctctgtgttggagcctgggtatctttatatttgcacatgttgagttgggagccacctactgaaacttcacctcttcagaatctgcctgcagcatggccagtgcctccttttgcacttcgctgtatctttaggccatagaaagtcccagagtaggggaggctgtgtatttccctatttataatggtgccccacaccccccaacaccagtgctctgtcccctaagcaacaggagcacaaggtcagtagattggatggaatccttcttcagcaagcctccctgaatacaacactggacaagtccattcccggctcctcagcccaggacaccggagcgggcggttgctggaggcagggtccattctcatcccttccccatgcctgtggtcttggaccctaaggaggaccagcctgaaggccctgggcaaagctgcccaccccaccagactcaccagctcccgtcggagccactcaagggcggagtccattgagtcgaaaccacagatgtccccaggtccccctggtccaggtttggcytgggccctgcgccaggcctggctctggacctgggctgtccactccagatatgagggccgccgagtctgcagctgcagcttggctgtcagtgccttcacagagtccaggctctccccctcctcatcctcctcgtcctcttcacccactgcctggaatttcagtagccccagggacatggcaggtttgaggtgagtgacagggcagggctgcagctctgagattagggaaaggctggcagtattgcccagggagaggtggcagaagttgagggtgagaagagcgtgccagggagtgtgtggtggtcaatgttcaaggtgggttaggggggctgaatgtgccagggtgagtgagcagatgggtgtgtgaggccaagtatgcaagggctgkaattttcctggactgctaacttgggagccacgtgatgcccatctgggtgggggccggaggaaccctgctcctctggccctttggatgaattttattgtctttgcccagaaggagacacccaattcccagaaaggaagttgctccaggatgagaaaagcatcattcataccagagtcttggccctcctcccaagactcatgttaagggagctgagatcaggaaggaggctgcctagccaccccttgtccttactcgtgacaccagcccttcaggaaaggactagcctccagggccctggcctgggagtcaggagacctgagttctagtgctggctctgcagaaccttgggcaagtcactgaccttctcagagctctgttgggacagatgaaggatttcaagctaatactctaaggagccctcaagggctgcctgcaggagaaggacagagctgtggatgggctccttgccttccatctccctgcccctcccagggcttcaaccagagcagttcccttttttaaactttgttttcaaacataacatacacacagaaggacaggtgcagtggctcacgcctgtaatccctgcactttgggaagccgaggtgggcggatcacgaagtcaggagtttaagaccatcctggctaacacggtgaaaccccgtctctactaaaaatacaaaaaattagccgagtgtggtagcatgcatctgtagtcccagctacttgggaggctgaggcaagagaatcgcttgaacccgggaggcagaggttgcagtgagccgagatcgagccattgcattccagcctgggtgacaaagcaagactctgtcaaaagaaagaaagaaggaaagagagagagagagagagagaagggagggagggaggaaggaaggaaggaaggaaggaaggggaaagaagtgtaacatacacacagaaaaactgtacatatcataaatgcatggagacacggtggctcacgcctgtaatcccaacattttgggaggctgaggcgggcagatcacctgaggtcaggagtttaagaccagcctggccaacatggtgaaaccctatctctactaaaaatacaaaatgagctgggcgtggtggtgcatgcctgtaatcccagctacccaggaggatgaggcaggagaatcactggagcctggaggcggaggttgcagtgagccaagatcacaccactgcactctagcctgggcaaaaagagcgaaactccatctcaaaaaataagtaaataagtaaataaatgaatgtatggctcgatgaattctcccaaactgaacacatccatgtaaccagcacccagatcaagcaacagagtattaccagcacccaggaaccgctgttagcctcccatgtgctcctggcctgtcactaatctaagggtaacaccaccctcattctaacagcatagttttctctgtttatatgccttctagtggttcacaaactttagcatgcatcagaatcacctagaaagcttgctaagatggctaggccccaccacccagagtttcagattcagtatgtatggggtggggcctggtaatctgcatttctaccaaattcccatcccagctgctgctgctggtctggaattttacaatttatgctttttttttttttcgagacagggtcttgctttgttgccaggctggagtgcagtggtgggattacagctcactgcaaccttgaactcttggactcaggtgattctcttgcttgacctcctcagtagctgggacttacagggccaagaccccacacccagctaattttttttttttttaagtttttgatagagatgaggtcttcctctgttgctcataatggttttgaactcagccaggcgcggtggttcacgcctgtaatcccagcactttgggaggccaaggtgggtggatcacgaggtcaggagatcgagaccatcctggctaacatggtgaaaccccatctctactaaaaaaatacaaaaaaattagctgggcatggtggcaggcacctgtagtcccagctacttgggaggctgaggcaggagaatggcgtgaacccgggaggcggagcttgcagtgagccgagattgcgccactgcactccagcctgggcaacagagtgagactccgtctcgccgggcgcggtggctcacgcctgtaatcccagcactttgggaggccgaggcgggcggatcacgaggtcaggagatcgagactccgtctcaaaaaaataaataaataaataacaggattgaaagaggatgagaaagaaaaaaaaattagggcatggtggcacatgcctgtgcccaactacctgggagactgagatggaaggattgcttgagcccagaagggcaaagctgctgcagtgagccctgatcacatcactacactccaggcctgggtgacagaggccgacctgtctcaaaataaaaaattaaaaaaaggcttctgtatctatgaagtaccattgttttattcctttattctttttttcttttcttctcttttttttttttttttttttttgagagaagtctcactcatcccccaggtttgagtgcaatggctcaatctcggctcattgcaacctccgcctcccgggttcaaaagattctcctgcctctgcctcccaagtagctgggattaagttgcctgccaccactaatttttgtatattttagtagagacggggtttcgccatgttggccaggctggtttcgaactcctgacctcaagtgatccacccacctcagcctcccaaagtgctgggattacaggcgtgagccactgcgcccagcctattcttttcttttttatttttttgagacggagtctcactttgtcgcccaggctggagtgcagtggtgcaatctaggcttactgcaagctccacctcctgggttcatgccattctcctgcctcagcctcccaagtagctgggactacaggtgcctgccaccatgccccgctaatttttttgtatttttagtagagacagggtttcaccgtgtcagccaggatggtcttgatctcttgacctcgtgatccgctcttcttggcctcccaaagtgctgggattacaggtgtgagccaccgtgcccggcctctttttttttttttttttttttaatgagacggggtctcactctgtcacccaagctggagtgcagtggtgcaatctcagctcactgcaacccccacctcccaggctcaagtgatcctcccacctcagcctcccaagtagctgggaccacaggcccatgccacacctggctaattttttgtgtttttggtagagttggggtttcaccatgttgcccaggctggtctcaaactcctgggctcaagtgatcctcctgcctcggtctcccaaagtgctaggattatggccatgagccaccactcctctccctattcctctattctttttctttcttttttcttttctttttttttttttttttgatacaagtctcactctattgcccaagctagagtgcagtggcgtgatctcagctcactgcaacatccacctcctgggttcaagcaattctcctgcctcagcctcccaagtagctaggactacaggtgcgagccaccatgcctgacaaatttttctatttttagtagagacagggtttcaccatattggccacgctggtcttgaactcctgacctcaagtgatccgcctgccttggactcccaaagtgctgggattacaggagtgagccaactcgcttggcttttttttttttttttttttttgaggcagagtcttgctctgttgcccaggctagagtgcagtggtgcgatctcagctcactgcagcctccgtttctcgggttcaagggactctcctgcctcagcttcccgagtagctgggactacaagcacataccaccatgcctggctaatttttgtatttttagtagagaccagatttagccatgttggccaggctgttcttgaacttctggcctcaaggtatccacccacctcagcctcccaaagggttgggattacaggggtaagccaccgcacccagccctattcctttattctcaattaaaaagaaagaaagaaaataaataaataaataaataaataaaataagctgggcatggtggctcatgcctgtaatcccagcactttgggaggccatgcagcaggagcattgcttgaggcttggagttgaagaccagcctgggcaaaacagggagacccccatctccacaaaaatatttacaaaagaaaaagaagacggatggatgaatagatgggtcctgtggtaaatcagctcagctctcgtcctgcaattttaccagcttaattgtgtctcttgccagactgaaaaccctgtgaacagaatcttccccagtcatccctgggccccagcaccaaacacagggcccagctaactcactgtacaggtaatacacacttgctgaaacgatggtggatagctgatggggttcttgaggtctggactcagccagaagtgggctgcacagagggcgccctcaggcagggacttccagctgcgaggtcgaggagggacgccagctacacagctgcagcatttaaggtggaccaaaggatttccccaacccaagtttcttatgtatgggaggaagtaggcagttcccagtttcacacccactttccagcccttccaccagggtatggtggaagagatagttatctttcttcctttccttccttccttccttccttctttctttccttccttccttccttccctccctccctccttccttcctttcttctttcttttctcttttttgacggagtttgctcttgttgcccaggctggagtgcaatggcgctatctcatctcactgcaaccttggtctcctgggttcaagcgattctcctgcctcagcctcccgagtagctgggattacaggcgcacgccaccatgcctagttagttttgtatttttagtggagacggggtttcattatgttggccacgatggtctcgatctcctgacctcgtgatcggcccgcctcggcctcccaaagtgctgggattacaggtgtgagccaccacgcctggccaattttttgtatttttagtagaaacagggtttcaccatgttagccagggtggtctcgaactcctgacctcaggtgatccgccccgcctcggtctcccaaagtgttgggattacaggcctgagccactgcgcccagtctttctttctttttaaagttagcagtagtgctagcacctcagggcttgaaaaaacaaaaatacaaaaatattgagtgtctcctgcaacccaggcacagggttaaggactttaggcaagattattctccccatttcacagacgatgacatggagatttgcttataacagtctctggccagggacctcgctaagaaatattggcaatatgaggggaaattcctgtgaaactgtgatcctttcctctgaggggcctccttaacagctgtccagacggcgtcgccagctgcccaggcagttcctatccctttcggagctccagcctgcccctcctgacgctctcagagtctggccttctgctgggccccgggtctctcactggcagaatggagttctcggagctgatccatacgggctgagcccaagcagagtttctacggggcccggaggcgcccccgcttcgcggcacggtgtgagtcaccgtccaccacctgctcctgtcgccagggcccgcgtcctctccggacctgtggctgctgctgttgcgtagcgtcgactccttcgagaagcagtgagacgtggcggggtgggggagggtccccggggttggggagcgcgcggcttggcggagtagggggcacggccagcgcagtcagagctggcgccctcctgcgtaagcccaatccgggaaactcgttgcccctctcctgggaaaggaacgtccctccccagggttgcgagtgactcgggcaccatcaccctgtgctgtaaagacctgcgagtgctgcagctggaaatagagggcgcggaagcgacgctgggcatcgcccgctccatcgaggtgtgccgagggagctcccgagccctttaagctctccctgtctcgcgtagaggggaataaaaaggtgcttctgttcaaagaggctccgcagccgcagctaaatggcagggggatgcagggtggtccggggtacttggagaggccgaagctgaagctacaggactgaggggctggaaagggcgcgggcgagacaattccgaccctccccagagcccctgacttccttctccggacgctgtcctccctggaatcagtcatcacctccttccctttattctaccgtcccaagggcctgagattgggcgactcctggcacttcctcccgcccgaactctactgcaagagagtagctcgcgaagtgggcgcggtcgtaggggcccgggaaggtggaagcgccgggcctggaagaggcgcggggacagggcactccctgggtgccctagacctggcctctctcctccctgcgctgcagaccaacgcgtggcggctgagcgaggtgaacgaggacttcagcttgtgccccagatacccccgtgcggtgatcgtgccatacttggtggacgatgatgccctggcgcgcagcgcccgcttccgtcagggaggtcgcttcccggtgctcagctaccacccggctcccagcggcagagggagcgcgccctccccacgctccgcccctgggtggctgcgtcctttctgggccttttctttttggcccggtcaattcgcggcgtagccgctgccccaactcctgccccattctggtcccgcccctctccc

SEQ ID NO: 98229 - DNA, 40684 bp, Homo sapiens
taatattaggaggggggctttgggaggtgattaggtcatgagaccaaaggcctcaggagtgggatcagagcccttattaaagagacttcagagagatccctcaccctttctgccacgtaagtttatagtaagactacagccaggccgggcgcagtggctcatgcctgtaatgccagcactttgggaggccaaggcgggcggatcacctgaggtcaggagttcgagaccagcctgaccaacatggagaaaccccatctctactaaaaatacaaaaaattagccgggcgtggtggcacatgcctgtaatcccagctactcgggagactgaggcaggagaatcgcttgaacctgggaggcagaggttgtggtgagccgagatcatgccattgcactctagcctgggcaacaagagtgaaactccatctcaaaaagaaaacaaaacaaaacaaaacaaaacaaactacagccatctgtgagggagtaggcccctcgccagacatggaatctgcaggcatcttgatctcagacttcctagcctccagaattgtaagacataaattcttgttgtttataagccacccggtctatagtgttttgttacagcagcccaaatggactaagacagcaaagatcactgatttaacctggaattacaagccaggatagaggtcaggttctagtagggtggtccccagctaggggacctgaacctagaccctgcctaatgacaggaatgtgggcctgcttttcccacttttttgcttagactacaaaacccctccctttaggacatgtccttctctgttcatttcattgattaattgattgattgattgagacagggtctggctttgttgcccaggctggagtgcactcgtgcaatttcggctcactgcaacctccaccttccaggctcaagccatcctcccacctcagtttccagagtagctgggactacaggtgctcaccaccgcgcacagctaatttttgtattttttgcagaaatggggttttgccatgttgcccaggctgctccaaactcctgagctcaagtgaatcgcccgcctcggcctcccaaagtgctgggattacaggtgtgagccactgcacccggccctccgttcattttagaatcccattctcttcatttggtttggactgtctccttgtcttaatgatacactgttacccaggcgtattaaagaggaatctttttttttttaagaggaatcttttttgttgaatgtgaaacattcacttgagctagcttaaaaaaaaggcagtaggatattctcatttataagtggagttaaagccgggcgcagtggttcacgcctgtaatcccagcactttgagaggccaaggtgggtggatcacaaggtcaggagttcaagacaagcctggtcaacatgaggaaaccccgtctctactaaaaatacaaaaattagctgggcgtggtggcaggtgcctgtaatcctagctactcgggaggctgaggcaggagaatcgcttgaacctaggaggtggaggttgcagtgagccaagattgtgccactgcactccagcctgggtgacagagcaagactccgtctttaaaaaaaaaatgtggagttaaagaatgtgtataatgtgcacacagggacatagaatgtgaactgatggacattggagactttggagcggcgaggggtaggggggcggtcggggcatggggcgaggggagggatgagaaattacttaatgggtacaatgtacattatttgggtgatgttacactagaagcccagacttcacactaagcaatatatccatgtatcaaaactgcacttgcaccctctaaatttataccaaaaaaaaaaaagacaggagggattgatcttaagtctggaggggtatgccttggaagccacaggcaggcgtgcacttgggcctaggtgtgctagaaccagggactcaaagcaccttcaggagcctccatctctccccgctgctgccctctgcataactgcctcctttctgtgagctccctgcagcctagccctgtctggtttcccttcccaggccaagaggtagagcagccacccgctgccactcctgtcaaggaccagctgcttttggggcagggtgggtggttctaaagatgacaggtactgccggttctgattgtggcagagggaatgttgggttgcagggaaggggagaggggaacagcctggagatccaggcagtggtccccacggaggtgtggacacagagctgcaggggaaggcctctctcaccagaaccccttagtctccaagataatcagaggaagcaaactaattgttttggatcacctattagatgccaggcaccatgctaatcatctttcttgtgatttccttccattttcacacattaaaaaaaaaaaaagacgagaaaacaggcccaaaagagctacattacttgcccaaggttgcagagctagaagtagagaggctggaattcagcccatggatcattccactctaccacactgtccctggaacctgggtcagagccacagtcagtatcagtatcactgaaagtgcctgttatgacctggccagcccagtatcatcacaggtgactgtggaaatgtccctggttccagaaaaacaggattttcaaacatggctcattgtatccgctcacttggattcagctcagcccaagataaatatggccagtattggtggctgatgagcagagccccttgacggcagaggcaggaccaggtgaagagccaggcaacctggtctcctgagataggtcagcaggtggtgagtcagggggctataaacagcctgtggccccagccagcactgcccagatactcagctgatgaaaccccttgtaaccccctgtgtgcccctgcctggcttggggaggagcatgtcagcgctcctcggggagggggccctacttggcaggccgggcccagcattgtgcacggtctgttccagcctggctggccaggcccagggcctgggctcatgggctatattgagggctgagtcaccagcccgcgcctgggtcaggctgagtgtcactggctgctggggcctgagtcaggccccgatttatcctggagagcaacaggctcaggtttctgaggacggttgcggggggtgacgggaatcatcctttggcactctgtaccctcctctcctctgccaaccattcacttgatcccctgggacccgcacactgacctcccctggagcgagctcttgagtcagagggaaagcaagggaagctacgctgggagttccttctcccctccctggcttcctccggcctctccacctgaacagaggcgctcagctggctgggggacctcagataatgcctgcaaaacaggactgtggaccattagggtctgtaaaggggctgtcagctccgagctacctcaccttaaccctttctcctccccagcagctcaaagaggaatgcatcctttctcagatctgtgtctcagtttactcaccagggattcagaggcagcactgctgaaccctgagcccttggcacatcaggttggctgtcagaagtcggcctttgtacatacacagttcccttgtgaggcccagctgcgtgtcctaggagcggggcctctctccacagcagagctcagcctctcaagtgtatggacagcacgggtgcctgatgggtggatttagccatgagttgaaggtggcttggggagaatgagagttctagagatagggagaaggggttgccaataggagagtggaattcctgagcacctcgtcacaggcagccgacagaacatgagccgcagggcccaggctatttatacctcgcctgtcactatcagggtccccacagctccccccacctccagccacacacagcaggtccttttgctctttctggtcccttctctactcctccccctccctacctaaggaccaggcaatttcattcatagacccctgtcatcataagcattgcccccacagaaccctgacactttttcctcagctccgtaacagggggtgccctcattggcccttgggggaaagagcccccaaagatgctcactatcccttcttttacaccaggtctaggggtagaagaggaattagatataatgattcatctaaaagggcccagaaccttccctggcttaaagaaacttctcaggctcagatatggcctcctagccagctcagctagacttactaggtctagaaggatgggaaagctgaagacacatggcttgaaaaagggggaactgggagatatggctgcacgtatgttacaaagttgcagaatggatcctctccttatagaaatacattctctaggcccagcacggtggctcacgcctgtaatcccagcactttgggaggctgaggcgtgcagatcacctgaggtcgggagttcgagaccagcctgaccaacatggagaaaccccgtttctactaaaaatacaaaattagctgggcgtggtggtgcatgcctgtaatcccagctatttgggaggctaaggcaggagaattgcttgaacctgggagacagaggttgcggtgagcagagatcatgccattgcactccagcctgggtaacaagagcaaaactccatctcaaaaaaaaaaaaaaaaaaaaagaaaaaagaaaaagaaatacgttctctagctctttctcctcaccccaggccagagtctgtttgggtgcctcggtttccctgctgttctattccccaggcctgcagcctttggcttgccctgagtgcagctttgcctgggcatcccagctggctcccttaggctctccctgaccactctgcccctggtcctgcctacccacctggtcacatttccccctggctgctctggctggggctctccctgtttctgcctggctgacccaccctttccctggcaggatctgccctgtggcccaaatgggcatgttgcccagggggctccctggcactatgggggaagagtctctccttcccctcttatcatctcagttgagtcagacttgggggagggggatacacagtgtgagtcactgggtacccttttcctgagctcagcttcataccgaggcgatgaggccaaacgggctggtgacagggacactgagtcaggggcaggggccccggtcttactcctgggcctctggatttgggccctacatgaggcttttctatctgtaaagtcaagcaatggctgggaggcacacacaaccccccgcccccccgcaggcttctccttcattggcccgggcaaggtccctgcttcctctcaggccgtctctgcacaagcacacacacttcccttccctgtccacaggtggacaatgccctgggctaggagccagccctcgcaggccctgtcaacagcctgccaccaactagtctagaaaattctgtgaacaccagatcagtgggttttgccctaatcactggcctcagtttccccatttacctcttcagcccgtgcggggtgtggagggagcatatttcattcctgacagtttggtgtgttgggtgtggatggagaactgtcggccctccccgccaccttccagcgcggcggcaccgggggcccagggggtgggcgccctcaaccccgtcccgccgcccgggcggcgcgggggaggggcggcgggggcggggcgtcctgtgcggcgcggcccccacccgcgggccgggcggcattcctgggaggccggcgctctgacgtggacccgggggccgcgggcgcggcgggggggcggcggtccgggggcttcttaaaccccccgccccggcccagcccgcacttcccgagcaccgctccgaccctggagggagagagagccagagagcggccgagcgcctaggaggcccgccgagcctcgccgagccccgccagccccggcgcgagagaagttggagaggagagcagcgcagcgcagcgagtcccgtggtcgcgccccaacagcgcccgacagcccccgatagcccaaaccgcggccctagccccggccgcacccccakcccgcgccagcatgatgaacaacagcggctactcagacgccggcctcggcctgggcgatgagacagacgagatgccgtccacggagaaggacctggcggaggacgcgccgtggaagaagatccagcagaacacattcacgcgctggtgcaatgagcayctcaagtgcgtgggcaagcgcctgaccgacctgcagcgcgacctcagcgacgggctccggctcatcgcgctgctcgaggtgctcagccagaagcgcatgtaccgcaagttccatccgcgccccaacttccgccaaatgaagctggagaacgtgtccgtggccctcgagttcctcgagcgcgagcacatcaagctcgtgtccataggtcagtgccgggggcgagggcacgggcgctgcggggatagggtcgtcccatggggcaggggcacaggtgcggggtgggcgcgcggggagctgagagacagggcggagggcaccccccggtatagagagaagaccctggccccggccctcccacccatcgacaagggccatgggcactgcctgcacacccctctggggacagcgagcactccctgggtgccccggggagtccaggccttasggtttgcgagccctccagctgccgcctccccatgcacattcccacctcccgcctcggctcaccgttccctttccttccatcgggcaaccctagcccacactcgggaggacagaaccagtgcctgtcactgattcctgggggcatctccccgcccccaacaaaacaagtggcttcccagcttcacagcccctccgcgggctgggagagggytgaagacaggtccccaaccactgcccgcgtctgcgggctctggggccgaggggagctggcgcgggaggccctcttcgtgcatgtgctcagcagctgggttcaggcccgggggccaggacaggcagggcccagcctcagaaacctaaaaaggcactgagcgagcgcggggagacttaacccctgtctgtcctcctcctgcttcagcctgcggtggagggggcttccgcaagtccaggccytgccccagcccaccccctaccgcgggattggctgcagctaacggtctgggctgcggggagggagggaaaggcctgtggaagggaggaagtctttgagtgtaaccagatttggaaggtgtgtagtgcagggtgggggcggggaggcactctagtcttgggagcagagacgccaagggtgggcttggagtggcaggaggctgtcctgccctcagagtcctgcagtcatccctgaggctgggggcctggggaagatccccccgcccacccctgtggagagctcttaagaaccctgctgggatttgcaggacgaggtccttggacggtgcaccccacggccccaggaggggagtttcatgtggggccaggtgggccccacacaggatgttccctgagatttctccagatracttgatgtctgtcagccccactctcccttggggccatctctaggcctcctgatatagcagctgaggtcagcccagggccctttgccccgtccagtcccctccctagcccttaccccctcctgccccaatactgcccccccaccccacccgcctgccctgtcctggaaatagccctgcctccgtgacacagcagatgtctctgagctttccagaaggacaaggctgagggcagggggtgggggagggagcctggagtgtgtagtgagactgagggctacgtgatggaggctgaggggtcagagaggagtcagtcctgggccggcatcctcagcaggctgggttttgaaaggcaggactgactgtaccaggtggggtctgggggaagagccggaggcttcggcaagacatataggaaaccgctcagccttcccctcccctccagtctgcgggggctctcggcccctctccaggcctcgtccttcctgagcacacctctcccctcccccgtggcggtgcctggctccagcccccttggctcagcagaggaggggctggctcagagcagaggggaagaagcaaaagctggtttgagggtgggagggaagctccctggttcccgctgggaggaaggggaggcagtccccatttgggccaagtggctcactggcgctgatgagataagctgtcagcaattcagctgccggccccaggctgaggctggaggggaggggacaccggcagcgaccagctggggcgccccaccatgaggaggttcaaaggggctgcccacgaggcaggggcatcctgcttctgctagctcccctactccatttagtggtggraaggggctatccatggggccaccttctgagtattgtctcagcaccgaaatcgagcatctgggcacctcagggggtgtcagaaagactccccacttctctttccaggagggaagtcagggtctggagtagcagctgggatccaagcccacctgaagaaggggcactgagcccaggttaaaggagctgtgcccttcatatcctcaccaccttgtcctggcccyccgttgcccctcgttccctccgaacaaagaggcctatgaggcagctctgtctcgcagctgttccccagttgctattccttctcctggagccaacaaccaagggaggggcgggagggggcagcagctgtcccagcacctccctaggcccagccctctcctccccctccatttgaggcctggggtggcctcgggaactagctgtctggctcctcccactcctttgggggtatccctaggcagatggagaagtggcttggtgagccctggtggcgctgagctcctctcctctgcctggcctccgagagggaggagggagagggaggtcattgcttccagagtgggacttggggccccactgcccttctcctgccccaagcctggaccacttgctgtctggcccagggccagttgctggggagaaacttccctctccagcaaatatgaatgaccaccctccccatatacacaccgccccccccaacccctgcagcctcaaggcttcctgcccaggggtctggctccagtttgcaagaagtacttctgggcgtgtgagctttggaggctgtcggggttgtgagaggctgggggcactggggcatccagactgtgtgaaagtgttggagcctgtgtgtttgagagaaagcaccgggaggcagggagtgagtgtgtcatggaatctgaaagctgccaaaccattgtgctgcagtggagccaggggaagggggtgggctggggagctgctggggaaggaaggatgaatcagtgacagggtgggggagcccaggcggccagagccccagccagagggacagggagactgaggcacccctcccggggcaggtgggagtggggcaggggatgccctggatttcccaggctctcggtctcctaacactttccccaagacctggggaagggtggaggggagaagatgtgtaaggggaaggctccactccaccctctcccatctctcgggcaacatcagtaaacaagactgtcttccacccccttccagcctcctgaaagcagtgctttgggaagctgatagatttcagaacttcattgccctttacaagtaagctgaattccaaagatctatctacatgctaggccaccccaggcttctggatatttctttctgattgttaagggggatctaggcgccccccccccccaaatcttgaggaaccagttctggctcaaaggattcctcaaaggaggtgatgggtggagtgtgtcagctcctgaggctggagtccctctggcccccagcctttgacaacatgactttcaagacttaactgagaatgtactggaccccacccacccacccctgccccactatcagaaccccttggtttctaaagccctttctggcattcggggtagagtgtgagtggaaacttgtcctaccccactccaatttcagttcttaaaatattcattcaaccaatatttattgagaccttactatgtttaagaccttcattgtagaaagataaaacctagtgtctagagtgaaaaaaaccagaccaaaaaaaaagagagtatatactgtgtgattccatttatataacactctaggaaatacaaagtaatctatcgtgacagagagcagatcagttgttgcttgggatggagggacaaggacggcaggagggagggctcacaaaggggtgtgtgcaaggaaactttggggagtgatggatggtaccttcgttattctccatctgtggtgacggcttcgtgatatatccatagtgtcaaagcttctcaaacttcattctctagcatgtgcagtttgctgtatgtcaatcatagctcagtagaactgttaacaaaacaaaaaggctctgccctgggagccttacaatcccacaaggccagaaagaaaccaggtaattacatagacrggaggcagactcacttgctgtagctgaggtgagggtaccttccagaaccacaggaacacagagaagcagccttctgaccggaagggccccataaagaacttggcatctgagtggggcctcgcaggagggagagggtcaggtaggcagagactagaggcctgaccccagagctctggcccgaggagctgcgcaggtgagggagggtgctctggggcagtggagggtggggcgcccctgagcccgtctgtgccctcccctctgcagacagcaaggccatcgtggatgggaacctgaagctgatcctgggcctgatctggacgctgatcctgcactactccatctccatgcccatgtgggaggatgaagatgatgaggatgcccgcaaacagacgcccaagcagcggctgcttggctggatccagaacaaggtgccccagctgcccatcaccaacttcaaccgtgactggcaggacggcaaagctctgggcgccctggtggacaactgcgcccccggtgagtgggccagtgagcacagcatggagcccttagctcccaaagacagaggggacaagctggggctgccaaggcgtgtggttgtcagaatgcacaccctggggcctgggggccaggatcccctgcagggtttgtcctcctccagctgtggctctccgctggctggtggcaggccctacctgatgagtgtgccagattccgcrgaggcaggaagaggtttaaaacccctcattttacagacaaggacactatggcccagagagggctggtgacttatccaagatcacacagcttatctgtggcagaaccacctagagcccagggcctggactccctgccccatgaattttttactgtgccacgaggcactattcctgccgagctgagagagaggcagtgtggtgaccaggacttgtagcaagaccaggagttagatccagagaaggctcttctctgggagaccctgggatgactttgagaaggggttgaggctcaggatgatgtgggatgaggccagtggggcactgcctggtggcaggtgagccagccttgccccttctccgtgtaggtcctggcctggtcaagtggggacagctcaggggccatgaaaaaagctgaggcatcactggctagagcgtaccccatggacagctccctttctgcccctcatctcctgaaaagataggttttctccaggagtcacagcccctcgggagaatcctcctccaccctggggtcagccggggagcagagggtgggaggcgggggcacagcctcctgggaagcattcccagctgctgagccatggcccataactggtgtggctgccagcagtgagctcagctgttccagccagtcatggattccagccttgagccggccccctccccgaaacggtgtgccgtccccctcctccagctctggcctaaaccaagcgccccttcacctgcaccgttcataggagtgatctggggctgcctcagcgtccttcctgttaggaaggcagggctcctgagggctgcagaggagaagtcattctctcctcacaggccctttaatgcctcagtttccccaagtgagcagttagaaggaataggsagtctcataccctaagactggtgtggaaagcgtttggagttctagagcttcggggcagctgtgaggaggccttctaggggggatgggtcaggggcatatgtgggacaggcactctgacctcctctgcccacccctgagaaagctgaatgaggcaagagatagcgagagggggtaccctcccagggtttggggttcaaggtctgagctggggcctgggcaggcaggaggccggccagcagggctggtgccaggctgcgtcagccagggcagaaaggcttcattgttggtggtggagagggctgtcctgctcctacgtggtgaggggcctcgaagctgatggggtcagcaggaacctggctggtcaaggcctagagctggtgggaaggggtgtaaagccacagcctctgagggtgttgggtgaacaaatgccctgcatcctggccggctggctgcccctcaccatcgtctccctccatcacctctccaggtctctgccccgactgggaggcctgggaccccaaccagccygtggagaacgcccgggaggccatgcagcaggccgacgactggcttggggtgccccaggtacatgcgcagatggggcaggggggaaaggggrcaggggcagaggttgggtctgtaagtttacctggccagggtgcagggggagactggggctgctgggaaaagagggcgccatgtgacatcactcctttccatcgcaggtcattgcccctgaggagatygtggaccccaacgtggatgagcattctgttatgacctacctgtcccagttccccaaggccaagctcaaacctggygcccctgttcgatccaagcagctgaaccccaagaaagccatcgcctatgggcctggtatgtgtgagcccctgrcggccctcctgggcagctgggcacatgtaggctctccctgagtaacctgggctctgctcctgccccgtaggcatcgagccacagggcaacaccgtgctgcagcctgcccacttcaccgtgcagacggtggacgcgggcgtgggcgaggtgctggtctacatcgaggaccctgaaggccacaccgaggaggtatgcagaggccgctggggacagagggattcacttgggattggaaccagagagcrtggggccaacaacaggaatggcccggaggtgactgccagagccacacactgtgctgtgcagtctggggaaggtgtcaccatgggggctgagtggggctggggtgcataaggcactgtggggtcaggaggggctatggtcattggagaggcttccaatctttttccttcctaataggctaaggtggttcccaacaatgacaaggatcgcacctatgctgtctcctatgtgcccaaggtygctgggttacacaaggtatctccctctaggcccccctgcctgcgctgctcttcacatccttggttccggctgcatggacccctctctcagcctgtacctcgcgcctgcccagagccccagctgcccgcctctcaccctccttggcctggctgtgcccctctgccccctctcaggactgctctcccctagaagctaacctttgacctctgacccctaggtgaccgtgctctttgctggccagaacattgaacgcagtccctttgaggtgaacgtgggcatggccctgggagatgccaacaaggtgtcagcccgtggccctggcctggaacctgtgggcaatgtggccaacaaacccacctactttgacatctacactgcgggtaggacgggccccagggggtgcaggtggaaagcccctgaccatgtggggctgtgtgggggtggggggaggctgggacagggatgccagccagagggtgggcagcctcagggtgagggcaccggggcagctgtgtgtgtccagagtggtgctgacagcctctgttttcggcaggggccggcactggcgatgttgctgtggtgatcgtggacccacagggccggcgggacacagtggaggtggccctggaggacaagggtgacagcacgttccgctgcacatacagacctgccatggaggggccacataccgtgcatgtggcctttgcgggtgcccccatcacccgcagtcccttccctgtccatgtgtcggaaggtaagggcccttcactgctccccacggtagcccttaccaaagccagaggcttgcaaggggcaggaggaagagctggggcgggggtctgcagagaccccctccctgagtcctccatcccacccccaaggtggctggagttcctaagagcacagctgggaggccacagtgaagggtcccagaacatgtgccaccctgggagggctgagcggaagtgacggggctgtatgggtgggggcatatctagggagtactgcctgcatgccaagccctcaggtggtgactgccccacttgttctctccctgcactcagtgcccatcgtccaccaggccgagagtgatgccacattaatgctctccagtggaggcggggccaggcatggccgcagctgactggcctcacctgtgctgtgtggcatggcccgggccgtgtggaatcgcccccccttccttggcattctgtggcaggccccaggttccatgccgttgtctgtgttctgtggcaggtctagygtctttgccacttgcctggtgatttctatgatgaaatctgggctctgagccattgcctgtgttccgtggtaccccttgggcagtgccatcgcctatggtcatggtagtcctggaatatgtgtcgtgtcctgtttcgtagcacctgtgggtcccatgccatttttctggattctgtggcaggctgagattcccattcctttgcctgtgttccatagcaaggcctgggctcattgccactggccacggtctgtggtaggctgatgtccacacgttgcctgtgttgtatggcaggcttcgagttctatgaagtagcccttgttctgtggcattgctggatgttttgtggcatgacttagatcctaaggttgctttggtgccctgagaggcccagagggctctagatggatggccttgggctgggtaaaggggccttccctgtctctctgagcccactctcagcccaggctctgccatgcatttccccagtggcactggctcggaaactttcttgtaacctgcctgatctggggcctgtagccagctccagcccggcagccccggttgtgctggggacacaaagggctccagagcagggccgtgggccactgcctgtgcctgggaggggttagaaggactgtgcacagggaggtgggggctagtggtccaaggcccctcagcacccccaacctcctttctcttcctcccctagcctgtaaccccaacgcctgccgcgcctctgggcgaggcctgcagccmaagggtgttcgcgtgaaagaggtggctgacttcaaggtgtttaccaagggtgccggcagcggggagctcaaggtcacggtcaaggggccaagtgagtgccagagcccagggtcgtgagggtggggctgggggatcataagggaagtatggccagtggttctgactcccagagggcagtgacagccagcaccacagctccacagtgaccagaggcaccccagaatctcaggctcattgtctcctctctgcctcagtttcttggtctacaagccaggaatgattctctccaccctaagtgctatacggggtgttatgcacagggatgacaagtgttccctgccctgagttgcagcactgctcactacagcactgccctcgggctgggtcggggtcccaatggctccttgaggggattgaggagctgggacttcaaggatattgatctgccttcttccccaccctgcccccatctcctcagagggcacagaggagccagtgaaggtgcrggaggctggggatggtgtgttcgagtgcgagtactacccggtggtgcctgggaagtatgtggtgaccatcacgtggggcggctacgccatccctcgcaggtgagtaccttgcgccccccatgctgtcctgtctaggccatcacagggagggacgaggggcastgggctgcgagggagtttgaggggagatggagtttgggctgcgagggactttggggggcacttcctggcatggacaccagctccctctctgcccagcccctttgaggtacaggtgagcccagaggcaggagtgcaaaaggtccgggcctggggtcctggtttggagactggccaggtgggcaagtcagccgattttgtggtggaagccattggcaccgaggtggggacactgggtaagtggctggggggcaggaggagggagtgctgcgggggagggcagyaggggacactgtgggtaatgggtgcagtgcgcatgctggggagcgctggggtgagcagggagataggacatgagggcagctagaggggagctgggggacggaagggtcttgcctgatgctggayccccgaccctcccccaccttgccccaggcttctccatcgaggggccctcacaagccaagatcgaatgtgacgayaagggggatggctcctgcgatgtgcggtactggcccacggarcctggggagtacgctgtgcacgtcatctgtgacgatgaggacatccgagactcacccttcattgcccacatcctgcccgccccacctgactgcttcccagataaggtgtggtcccagctcacacacacctgccccgggggtggggcaagctggttctcctcccctccccaactcagccttcttccctccgcacaggtgaaggcctttgggcctggcctggagcctaccggctgcatcgtggacaagcccgctgagttcaccattgmtgctcgtgcagctggcaagggagacctgaagctctatgcccaggtaggtcattgtccagtctctgctgcccttactacccatggcagggaccctggaaggcagggccaggccagaggcagaggcctcccagcaggaaatgacagcatcacagaagatcaggcaggactgatactcatgggcccatcagtaccatggaaaattttaaattttgtgttttcttaacgatgataacctaaaaacgtattttaccaaagagtcatttttgtgctaatttgtaattgaaagattgtttcattgaataagacactggtttcccaagtcagtttctcagactggtgtccattgacccctagaggttaatgaacatattcttgaggatctaagagggtgattcttctttgaaaggctcatgattcagttttaggaacataaatttagcccacactcttcctgtccaacacatttcagagttgaggaaacctaggctgggagagcaagccatacagatggccttgagtcaggctcccagggtgggctctggccgccagagcacgtggccctgggctctggtggcctcagtggctggtgtgggggcgggagtgccagtgttgggggtgggaaaggaggcgctgggttcacctgcggccagcagagggcgctctgcagaggccacagctatgaactttgcttgggtgatgcccacaggacgccgacggctgtcccatcgacatcaaggtgatccccaacggcgacggcaccttccgctgctcctacgtgcccaccaagcccattaagcacaccatcatcatctcctggggaggcgtaaacgtgcccaagagccccttccgggtgcgtcctccsggcctgccccgtgcccaccaccaggggtccctgagggagggcggaaccctcgctggagtccctgttgtccctgggctcaggctgggactgaggcttgggctggtgccactgaggctgggccgggtgcgctgggcaggaggatgagccttgagggagggcaccacgctgagctgcgacccctcccgcaggtgaacgtgggcgagggcagccaccccgagcgggtaaaggtgtacggccccggagtggagaagacaggcctcaaggccaatgagcccacctacttcacggtggactgcagcgaggcggggcaaggtgcgcccagccggaaggggtgggtctgggagggggcgggggtgagtcgagtcgggggctgagcccaactcacagcagtgcycgcttctctgcaggcgacgtgagcatcggcatcaagtgcgccccaggcgtggtgggccctgcagaggctgacattgacttcgacatcatcaagaatgacaacgacaccttcaccgtcaagtacacgccaccaggggcgggccgctacaccatcatggtgctgtttgccaaccaggtacctaagctcctgggtactcacagcgacatgcacctgccagctccagaaggcagctggagatgctgtcactgggaacagggagggatgattccgcagacatggtggagccctacctgtgtgaggcagggtgcctcagaggaagcaaagggggcccttttrgaggctgcccctgtccatgctgggtcccctgggtgtgtcctgagccagcatctagcygagagcaggggtgtgttcccctcgagagccctgactgagcctcctccacatccaggagatccccgccagccccttccacatcaaggtggacccatcccacgatgccagcaaagtcaaggccgagggccctgggctgaatcgcacaggtgagtgtctgggcaggggctgggactggctcgaggttggggttaggtggctgccaggccctcaccacatctctgggtgggtcctcaggtgtggaagtcgggaagcccacccacttcacggtgctgaccaagggagccggcaaggccaagctggatgtgcagtttgcagggacagccaagggcgaggttgtgcgggactttgagatcatagacaaccatgactactcctacactgtcaagtacaccgctgtccagcaggtgcgctctgcccctcccatgctaccgcccggccggcccgccagagccctgggtctccctcctccagtcccatgggaccagttctggatcctccacgcctttcctgcctcctgccctcactctcatggtggatctgagcttcagagcccatattcaccaccaggatgttgtaggaccttgccttatatccagttctgacctaccattgtacccaacagggcaacatggcagtgacagtgacttatggcggggaccctgtccccaagagcccctttgtggtgaatgtggcacccccgctggacctcagcaaaatcaaagttcagggccttaatagcagtaagtggggcaagagccaccctgggagtgaggggtattcgggtagggtggaccggagtctcctcatggtgtcacttgccctccacgcagaggtggctgtgggacaggaacaagcattctctgtgaacacacgaggggctggcggtcagggccaactggatgtgcgratgacttcgccctctcgccggcccatcccctgcaagctggagccaggcggtggagcggaagcccaggctgtgcgctacatgcccccggaggaggggccctacaaggtggatatcacctacgatggtcacccggtgcctggcagcccgtttgctgtggagggtgtcctgccccctgatccctccaaggtgaggagataggagctggttggggctgggagttggggacttgttgggaagatagatgagtcatagggggcagaggccagagggacttatgtgcctggagtgggcacagccaagggtgtggggctgaggccagccccacccmaccacctgccttggagacaacttagctattaagagcctggccttggagtcacacctgggcttgaatcccaggtccactaactggggcaaattgcttcatctcgctgcctcaatgtcatcacctgggattgttataagcactcagtccacagtagcagccacagttggaggtgatgagttgggtgggggccatgaaggctgggatgaggaggccaggtgcagggaacccacaacctgcctcttcccctaggtctgtgcttatggcccgggtctcaagggtggactggtaggcacccccgcgccattctccatcgacaccaagggggctggcacaggtggcctggggctgaccgtrgagggcccctgcgaggccaagatcgagtgccaggacaatggtgatggctcatgtgctgtcagctacctgcccacggagcctggcgagtacaccatcaacatcctgtttgctgaggcccacatccctggctcgcccttcaaagccaccattcggcctgtgtttgacccgagcaaggtgcgggccagtggaccgggcctggagcgcggcaaggtcggtgaggcagccaccttcactgtggactgctcagaggcaggcgaggcggagctgaccattgagatcctgtcggatgccggggtcaaggccgaggtgctgatccacaacaacgcrgatggcacctaccacatcacctacagccctgccttccctggcacctacaccattaccatcaagtatggcgggcatcccgtgcccaaattccccacccgtgtccatgtgcagcctgcggtcgataccagtggcgtcaaggtctcagggcctggtgttgagccacacggtgagtggacaggaggagccaagaaaggtcaagtggcaggtgcaggagctgggtagtccgtgggagggagggaagaagagctgagagctggaagagcaacctggggtgaagggagggctctcggagcagccccagagtccttactggcccagaaaccccagagaaggagtggaggggaagaccgggggtggagattggcctctgctcttgtggcaaaactgcacctgcctctgggcgtttttctggagagatctcttctttcatgtgcttaaggggtaccctgatccaaaaagctaaaactctgctctggacgggggcacggggaaagctttggggtagaggatgacaagagtcagaagacagtaagtgggaatgggccatctgccaggggccagaccctggctaggcatgggccacggcagagggatgcaagacccaggcccacagcctggtgggtgactcaagtgaacagagaatgtcactacatggagaagggagtgaaggcagaggctggagctcacagaggtgcaggggagggtggggggcccaggctccgattagaggagcagcctgggagttggggagtgggagaggagggggagaggagggtgagaggaggggaagaggaggggaagaggagagggagaggagagggaaaggagggggagaggagagggagcatctgtgtgaaggctgcccccacccctgctgaacacgccacccctgggctccaggtgtcctgcgggaggtgaccactgagttcactgtggatgcaagatccytaacagccacaggcggcaaccacgtgacggctcgtgtgctcaacccctcgggggccaagacagacacctatgtgacagacaatggggacggcacctaccgagtgcagtacaccgcctacgaggagggtgagggccggtgggccaggctagtgggcagggctgggcaagtgggcagggccgggatctgatgatattgccctcggggcaggaggggtggtgggggcgcacactccctgattgatgcccctgtggctggcttccaggcgtgcatytggtggaggtcctgtatgatgaggtcgctgtgcccaagagccccttccgagtgggcgtgaccgagggctgtgatcccacccgcgtccgagccttcgggccaggcctggagggtggcttggtcaacaaggccaaccgattcactgtggagaccaggtatcctccccctttgctagcctaaatctgtgaccaccctttcccagcccctggccctcctcgctcatccctctgcctgggcctcagccccaccccatcctctctcaggggtgaggcaggagcagaccccctccaggaccccagattggcccctgtagctcgtttctcctcagctgggtccccagcggcctgccctctttcctccctgtccccccattcagctactccctcatcctcactcactggtcttatgaagctgatggggggatgttatctctcaggggagcgggcaccgggggccttggcctagccatcgagggtccctcggaagccaagatgtcctgcaaggacaacaaggatggtagctgcaccgtggagtacatccccttcactcctggagactatgacgtcaacatcaccttcggggggcggcccatcccaggtgtgcagagagagtggtcggggtctcagggaagacaagggagggtgcaggatgctcgccccacaagggggaaactggaaggaagttgggtaagaatgttcatagagaggacagcctagagtgggttggggccggagcccggccagagggaggacgtggaggaggcaggcaatgagggttgatgtgacagcccccctagtcaatcacaggaacacactctggcctcctagccccttgtctggagctcaagaccttggctttgcaggtccaccactcactgtgtgtccagaaactcagacacagyccactcctcttggcggctcaggccagccttgggccttcttgcacgcatcgtctgcagaactcccctgccctctgcagacccagctgcccgggcaggtcatgtcttcaaatattgtatgacttgggactgctgaaattggaaattttttcccttatctaatttcccatctttttattatttcagccacagtgtcagaaatacatttcatttttgaaaacattttattttcacattttattaatttaggaaggccttctcttccaggcctgggacccacatgagtgaggtttgcccagcctcagtctgcagtcaagttcatttattcttgtgtgtgttttcttagcaagttcctagccattttcccatgttggtctggcttccctgtgggcatttcaaaggcagggaaggcctcctcctccraggctcctcagcatcagggggacccatcagggctggtgggcagggtctaatgtccttctcctcacagggagcccgttccgcgtgccagtgaaggatgtggtggaccctgggaaggtgaagtgctcagggccagggctgggggctggtgtcagggcccgggttcctcagaccttcacagtggaytgcagtcaagctggccgggcgcccctrcaggtggctgtgctgggccccacaggtatagaatggccggggcagggaggagggaggtggggcgggacgcccggaggctctgctgaccctgtgccccttgcccaggtgtggccgagcctgtggaggtgcgggacaatggagatggcacccacactgtccactacaccccagccactgacgggccctacacggtagccgtcaagtatgctgaccaggaggtgccacgcaggtgaggaccagccctgggctcctgtgctgcggctgagctctggggtgctcctgctggggtggcactcaggatcactgctggagtcccctgggagagcctctcccagctctcagcctcgtccagtctcgccaccccatcccgctcttccccggggctctctgctgtgaggctttcctgccccaggagcttttacggcaaacctagcgccttaggaagagtgcaggaggcctgggccagggcctcctcctggaccctcccacagcaccttcctggggaatggagacgtaccctggctctgtcgagggagtcccagagtgcccccacccccagacayggaatgtcatcggcttctgggaactggtccctcctccctgccccacagtcctccctcctgcccatgtctatggggaggactctggctcaagatgagatcaccccccaccgccccgtccatgccacccagccaactgtttatcccttctgctcctcaagccccttcaagatcaaggtcctcccagctcatgatgccagcaaggtgcgggccagcggsccaggcctcaacgcctctggcatccctgccagcctgcctgtggagttcaccatcgacgcacrggacgcgggcgaggggttgctcactgtccagatcttggtgagtctctgtgcatcccaccccgcagrtcatgctccaggcacaggcgggccttgacctctgcttctccctcaggrccccgagggtaagcccaagaaggccaacatccgggacaatggggatggcacgtacrctgtgtcctacctgccggacatgagtggccggtacaccatcaccatcaagtatggcggtgatgagatcccctactcgcccttccgcatccatgctctgcccactggggatgccagcaagtgcctcgtcacaggtgggtgcccacccgctgcccgtgccctgctcaccacccagcccctcaaagcccctccagaaccctggcctggtccccaggggtctgctggtcggagagcacacatgccctagccctggcccctccctccctcacccccgcccaatgccccagcccacgttgagcaccgcctggcctcacactcttctctctttccagtgtccattggaggccatggcctgggtgagtgccctttctctcctcttcttggwgtgggccagggtggttggcggtagggggcgggcagcgggaacagagagggctggctccagcccaccagctccctgagcaggatctcccgcatggcaggtgcctgcctgggccctcgaatccagattgggcaggagacggtgatcacggtggatgccaaggcagccggtgaggggaaggtgacatgcacggtgtccacgccggatggggcagagctcgatgtggatgtggttgagaaccatgacggtacctttgacatctactacacagcgcccgagccgggcaagtacgtcatcaccatccgcttcgggggtgagcacatccccaacagccccttccacgtgctggtaagttctgtagccacagcaagactagatggctggggaggggggcctggcccttttagcagcagcagggatcccagataactgtccccaaggaatcccacttctctgagggctcctggggccagagtgctccaggatggagccttaactttccccacagcacccccgaagtgggaggagagcatggccctgccccctgcccagtgctgtcagctgtctctggaggaacccgctgtgctctccaccatccccagctccatctccccagaggctgccctgcaggaggatgaacacccaaattatcacccagcatttcaggttcctgggccattctctgagtcagcccctaggcctgtgaggctgccacaccctgtgcccccgtgccttgcctccccaggcgtgtgaccccctgccgcacgaggaggagccctctgaagtgccacagctgcgccagccctacgctcctccccggcccggcgcccgccccacacactgggtactgcgcctcccaccaggcgatgtcctcctcctcctccccttccttcatttcttctctctactcctctgcagccagggcggggacatggtctgggggcctcttggggagcaggcaagagttaggctgggcagatggaaccccacttgggcacagcactccttctcttgcagctgacgcacctctcctgccacgctggtttcatgattaactaccttgttctttcctcactctccagcttcagtcatagcatgggtcaaactcctgggccttccccagtcactgactgttccctctcacctgctgcaggccacagaggagccagtggtgcctgtggagccaatggagtccatgctgaggcccttcaacctggtcatccccttcgcggtgcagaaaggggagctcacaggtactgccctgtggcycccaggcatgagggctgaggggagaaaccctcttccaggcccagtcctgtgtcttaatgatgaaaacaaaggcccagagagaggaagtgagctctacccagggtcacacagcaagttgggcagagccagaactcaggtgcaagccatctgtccccagttcagggctcaggccactgccacaggctgtctcttgatgcctggcttctcgggtgrcagcagaagcactcaggaccaggcctgggacagcagggaggttgcagtgggggaaaccagggtctccacgtaactgtgtctgccctgcaggagaggtgcggatgccctcggggaagacggcacggcccaacatcaccgacaacaaggacggcaccatcacggtgaggtatgcacccactgagaaaggcctgcaccagatggggatcaagtatgacggcaaccacatccctggtgagttaggggctgggctgggctggggcttgggtgagaggagcaggccgtagcttcagtcctgccttccctctttcaacaaatatttattgagcacycgctgtgtgcagacaccaggcgaggccccagggaggcttataccctggtgggaagcagacctccaccagcygggtccctacggcacagacggagggggttggcagggaggctgctggaaggtgctggggccaaggtgggctcagataatccctgatgctgacccagccccctttttctctgtatccccagggagccccttacagttctatgtggatgccatcaacagccgccatgtcagtgcctatgggccaggcctgagccatggcatggtcaacaagccagccaccttcactattgtcaccaaagatgctggagaaggtgagggagctgcaggtcgcaggctggggtggagactcaccaggggcaggggtgagggcaggacctctgatcttggccacacytccacctacagggggtctgtcactggccgtggagggcccatccaaggcagagatcacctgtaaggacaacaaggatggcacctgcaccgtgtcctatctgccgacygcgcctggagactacagcatcatcgtgcgcttcgatgacaagcacatcccggggagccccttcacagccaagatcacaggtgaggcgggtgtatgggcatgtacagcccatgaggcacacacaccgcatacagtgcactcatgtgcaagcccagcccgttcaagtcactygtgacattagggcagaggcccttcaaggtgtgaggggtcatattttgataaatgtaaaaacactctgttctccacggcagctaagaagcagtcagccactccttgtgcctgaaaacacattgcctcatttagtctttgaagtcatttgttttgtttttgtttttgagagggagtcttgctctgtcacccaggctggagtacagtggcacgatctcggctcactgcaacctccgcctcccgggttcatgccattcttctgcctcagcctcccaagtagctgggactccaggcgcccgccaccatgcctggctattttttgtatttttagtagagacagggtttcaccgtgttagccaggatggtctcgatctcctgaccttgtgatccacctgcctcggcctcccaaagtgctgggattacaggtgtgagccaccacgcccagcatgaagtcactcttaagaagttagggcacggataatccttttgatagataaggaacccctgtcccagagaggccaagcaacatgattacagccacacagcgaggaaggggtctgggcggtccagtctagtgttttgttatcacaacatcatgtgactcagggttaaaatgcaggaggtttyctttagggatttagcccacaaggactgaggcagccacagtggaattggggtacaggcccctcttagtctctggcagctcacatgtgagtgcagactgcactttccaggccttgggcctccgtgcacctgggagtggccccccgtgtctgttgagtccagggggggctgctcaggagggttcctgagccctgtgagggcagggcctgcctggagtcatagcagcctgatgccccaactcccccaccaggtgatgactccatgaggacctcacagctgaatgtgggcacctccacggacgtgtcactgaagatcaccgagagtgatctgagccagctgaccgccagcatccgtgccccctcgggcaacgaggagccctgcctgctgaagcgcctgcccaaccggcacattggtgagcgtggggcctcacrgggacctcaggggtgggggcccacaggatgctctgcctaacacccactttccacagggatctccttcacccccaaggaggtcggggagcacgtggtgagcgtgcgcaagagtggcaagcatgtcaccaacagccccttcaagatcctggtggggccatctgagatcggggacgccagcaaggtgcgggtctggggcaaggggctttccgagggacacacattccaggtggcagagttcatcgtggacactcgcaatgcaggtacctcctgccccagagagcccccattccagcgggtgcctcccacaggcacttgtcctcgtcctgcccagcacccccttggcygcactctctcctccctgaaacttcctgaccagtctgcgtcaggattcgcattctggggccccttgcgggaaagtgaatggccccgcatcagttctctcccttttaagagaaagctcagctgtcctgagtttctgtccctcccttgctcactggaatccaagaggcttaccttagggaattttccagaccgcctgtcccgtggtgcccccgctcctcccactgagccatttttgttagtggtcactacacacatcggtgcccattctgggtggagcctgcagtctgrggagaggaaagcattgtggcttggccagcctaggactgagggagatgtgttccttgctttcccccaggttatgggggcttggggctgagtattgaaggcccaagcaaggtggacatcaactgtgaggacatggaggacgggacatgcaaagtcacctactgccccaccgagcccggcacctacatcatcaacatcaagtttgctgacaagcacgtgcctggtaaggctctgggcagaggtcggtggcgagagacagggaggccaggaggctggggctctgaggttcctracccaccctttgtccccacttcaggaagccccttcactgtgaaggtgaccggcgagggccgcatgarggagagcatcacccggcggagacaggcaccttccatcgccaccatcggcagcacctgtgacctcaacctcaagatcccaggtagaagcctggaggaccctgggtggggcgggtggtgggagagggctggcccggsccagagcccacctgtcgggcctccaccctgcttcctcacccctcgcttccctccctcaccctggctcccttgaccacacaggaaactggttccagatggtgtctgcccaggagcgcctgacacgcaccttcacacgcagcagccacacctacacccgcacggagcgcacggagatcagcaagacgcggggcggggagacaaagcscgaggtgcgggtggaggagtccacccaggtcggcggggaccccttccctgctgtgtttggggacttcctgggccgggagcgcctgggatccttcggcagcatcacccggcagcaggagggtgagcaccgcacactgggccggccgggtcctcayggcgggatgggagggtgctgcggaccaggcttgatgctggcagactggccccgaaggccagggcaggtctgagcagaggaggaggtttaactgatgggggagggaagggccagggctaggaggaatcccagtgttgccctgacatcccccaaaccctgcaggtgaggccagctctcaggacatgactgcacaggtgaccagcccrtcgggcaaggtggaagccgcagagatcgtcgagggcgaggacagcgcctacagcgtscgctttgtgccccaggaaatggggccccatacggtcgctgtcaagtaccgtggccagcacgtgcccggcagcccctttcagttcactgtggggccgctgggtgaaggtggtgcccacaaggtgcgggccggaggcacagggctggagcgaggtgtggccggcgtgccaggtaaggggcaggtggccaggagtggggatgaagtcagggcagccagtgtgaggggcgatgatgctgaagtccactaccttgcctgtccccagccgagttcagcatctggacccgggaggctggcgctgggggcctgtccattgctgtggagggtcctagcaaagcggagattgcatttgaggatcgcaaagatggctcctgcggcgtctcctatgtcgtccaggaaccaggtgggcgtccacactggcagtggrgctgggcctgcctgaccttccagactgggtttctgcccactggccaggcaggagatgcttggggccacagaactcccctccccggagccccctgctcttcctctgccccgtctccctctaccccacaccctcagaaacatgtgtctgcctccagatctgagcgctgaccacagagcctttcctgggataaggccagggtggggaggctcccgccctgccaacctccatsccggaacctgtgctgactggtctctctccccaggtgactatgaggtctccatcaagttcaatgatgagcacatcccagacagcccctttgtggtgcctgtggcctccctctcggatgaygctcgccgtctcactgtcaccagcctccaggtttgtgcccagggtgggggtggagggtttctgctatctgagagatgggcaggagttgaggacagcaggtccatggggccagggatttagcagtgaccttggaagggccagttaggagtcccttctcataaggcacgaggcagggcccttggggacggtgggctcccaccctgggggcttgcccgtgcactcakgcatgccacgcctcgttctgcctttctcagggtgtgtctgcctgtcctactgccacctgccatttcttgttacagtttgttccaccttctgttgtaagaatgctagatgacaacatttataagaatgagagcataaaatctatacaaactaagagtaaaccagtttgcacagagggtgtgagaggctcctctaaagggaatgcctatgggctgcagagcctgggctgcatcctcttcaggccgctgggggcctggcttgctttctcttgctgctgacttctagagatgtggtgtgttcctttcattctgtcacagcggacatgtgcaaggaaggctttcagcaagtcacactgaaacatgcaaaccagggggccaggtgtccaggggacacattgtaaaggagcttctgcataaggcgcacagaatgggcttcaccccacctccttctcccacgcgcctcctggctgcccctcagggtggtcacattggcccatccagagtccttgtgcatctcctcctcccactcctgaactgggctccccgatgcaggctccaatccctcccccagagcccttctgtgcttcttctggtcctccctgttggtccaccttctccaggaagctctcccaggccaggccagtgaaactcagcttcctacctcagagctctctggcacccccagcccacacagcccatcaggcacttgccctccgccctcagcctgcttcacacagagtggggcccttccttcctcagccaggacagggcacatcgtctgtcatctcccacacaccaagcacagctaggatagcaggtgcacacatagggttgcataccggaccctggctcctcctgctcccaggctgggctggcaggcaggggccaggctgggcatggggtggcagcagcctttgggctgggcttacagtgagcaccgtgtggggcttcagagaagactgctccagccccggcctcccaggagtctgagcatcctccgtggcctttgcaggagacggggctcaaggtgaaccagccagcgtcctttgccgtgcagctgaacggtgcccggggcgtgattgatgcccgggtgcacacaccctcgggggctgtggaggagtgctacgtctctgagctggacagtggtgagctggccctgcccctgccaactcccttccgggctggggccttctggggaggggaaggatggaggctaagccaccaaccctttatccacagacaagcacaccatccgcttcatcccccacgagaatggcgtccactccatcgatgtcaagttcaacggtgcccacatccctggaagtcccttcaagatccgcgttggggagcagagccaggctggggacccaggcttggtgtcagcctacggtcctgggctcgagggaggcactaccggtgagtgcctggagctggggaacagggtgacttctgggggtgcttggccactagtctggtgctgytttgctccagaggtaggggccctgcttcctaagccaggagtccccacagaggctgtccagggagctggggcccagtccctcttgggccacaagcccttcctgccctcagccttgctacctctggcccccaggtgtgtcatcagagttcatcgtgaacaccctgaatgccggctcgggggccttgtctgtcaccattgatggcccctccaaggtgcagctggactgtcgggagtgtcctgagggccatgtggtcacttatactcccatggcccctggcaactacctcattgccatcaagtacggtggcccccagcacatcgtgggcagccccttcaaggccaaggtcactggtgagtgccagtttgggggaggtccacccagcctgcagcccagcccagcctggagggctccggtggccacgcacatctaggccatagtctgcccccagacatcatggtcagtttaccagggctagaggtgggcctggctctacacagtacacgttctgtggagtcgggcatgatcacgtaaaaatgccattcttcctctccatcgtggcccctcactccttcagctctggcctgcgctggctcctcaggctctagcaccactttcttccctcctggcttcccatattcctccgctccaagaagacacagtcggtattgagcaagcttcccctcttgaggctgtctgtaggatgagttgggtgggtgttcctttgtaaagtggctcttaccctgtgagttagcctgagttcccagacaaagcctgcaaggatgagggacgcagcatctgaggccccagccctagggtggagcaccagttggagctggcagctcagggccctggctgggaatgaggctgtgctcctagagtggcccttggaggaatttgagggggagcctcaaatgcaggcagtgagtcccacagggtggcagtgctggccgagggtcccctgcctggggaagaacaggaagcccttctgactaggtttgtgccccctccacccacccctcaggtccgaggctgtccggaggccacagccttcacgaaacatccacggttctggtggagactgtgaccaagtcctcctcaagccggggctccagctacagctccatccccaagttctcctcagatgccagcaaggtggtgactcggggccctgggctgtcccaggccttcgtgggccagaagaactccttcaccgtggactgcagcaaagcaggcaggtggcggggggagggcgtctcccggggtgtgagcaagaagccgtcagggagcagggtgtgggtcacagtaggggactccctggtgtgagcctgtccctctgcctccctctccaggcaccaacatgatgatggtgggcgtgcacggccccaagaccccctgtgaggaggtgtacgtgaagcacatggggaaccgggtgtacaatgtcacctacactgtcaaggagaaaggggactacatcctcattgtcaagtggggtgacgaaagtgtccctggaagccccttcaaagtcaaggtcccttgartcccaaaagtgcctccccagcctcagcccccacctccagccacacacacattacacacacacacacacacacacaaatgtgccacacccagacacgcacagaatcagacactacaaacacctgccttgggggtgaagtgaaggcccagcctccccaccccaccgcgccccaggggttggaggaccttgtctgtgtcaggacagtgtccctccytgggaatgtgacatgagggccgactggggccaggctcaggggcagaggctgggacacaaggggctggcgagggctgcgaggccagggaagccctgagtttctggcggggctgagcagtgggggagcattgtgttgtgggtgtctgtgtgtgaggtcaccctcaaactgcaccgccggccagataccctcctgaccccgaggacttggtctggtctctctggtggctacaaccccagagttttaaggacttggaaaggaaagcmcaatcagagaagaaaacagcccccraaccagcaggagyggcctggcacatggaccggcctgagcgatgtgcactccacccaagccaggctcccagggggcctgatttctctctcactgtctctttttttaaaatggttgcacggctctgccccatggggggccttttttacmcactgcgaggcccagctttytaggggacttttgcacatgtcatgcagctcagctgggagctgcttaggtggaaaactccaaataaagtgcggctgtcgcagagggttggctgttccttgggggtgtgctctgtgtggctggctgccctctggcctgccacacgaaaaaccgggccctggggaggcagaggcggcctggctgttccctggaagattgacccagtcgagggaaaggtcctggggcagaagtgaggtctgggatgttggcagagtgcttgaaagaaccgggggtgggggctcggggatgtgggaaggggtcccagcgggagggttcgtggacagtacagggtgtggatactgtgttctacagtactgtcccaggacccctgggaggccagtttcagttcagcttgacctcaaggatgtttttcaaattaagactttaaaacagtgagcactgactcaaacaggaatattcctcaaccagcaggcaggcagaaccacctgcagactcagcaccttccccctagtcagttcctgaatcaacttggcctgtttcatgcccctttccagcactaagcttgcacagggcctccctcctgaactcctgcaacagccctgccctggccagctccctccaacctcccctccatgctgcagcttggcgggggggtcactttaaagatagtatatgcccctctctggtttagggccatctgtgactccctcctgctccagagtaaagtctcctcttcctgacaaggtctccagggccacccaggttcagacagcagcctccccagccatatgagttgggcagcaggcccactctccattgtgccctccacctccaaccccccttcattacctctgggcacccatgctgtaatttgggcccttgcccggaaacacctttgcctccccaccctcttcatcttcctggccaacaggaagttttcctggacccctccctacccctcctggatcagtgcccccagctcccaaactgccctgggacacatctctagttgcagttacgaccctgagctgtggccatgtatccacggctccccaccagatggagctccctggccctgggtgtgaatgagtgagtgaatgggtatgaatgaataaatgagcagctgagtagctgcagcagggaaaagaagtctttcattcaactgatcccacaatctagacccacctgggcatttcagcacatggtggtgggcttggcagaaaaacccacgagtccccaactcctaatccctgacctccccacctctctcaccaggctctgtgcttcctccctcttccctcacaccctcccacacacccatcctcactctctgcccccctcaccctcaccctcacccctagatgtgctaatttccccctcagcttcggctgcctccacctgtgtgtggctgataagctcacagacctccagcctgcctgcttccagccagccacagtgtggccctgggtgctgagccttacaggcccttcctcattaatcctcataacagccctatgaggtggggctactaccatctgaagaaaccaaggccctgggaatttcagtgatgagtctgaaaccgtacctttaagtagtggggcacagattgaaacccaggtgtgcccgaatcccaagcttatcacacatacaatcgctagaccagaccacgggcacgtctcaagcactccaaactcacaaaccccatgccagacaccgggagtgctgatttgttaaaagggaggaggaaagagtggctccttccccttcagcctgctcatcttacagaggtcactttcttggcaatgttactcccatccatgtgctgcacaggccagaaacctggaaatcacccaggtctctctctctacctcactccccaaacacatccactctgaaaccagttttgtcctaaatatctaaatatctctcggctctacctacttctctgcgtttcccattatcaccacctgagtcctggccaccattatctctcacagtggcctcccaatttggtttctcctccctcagtttcgcctctgcacacagcacagtcaacagtgagtgacagctctaaaacgtaagtttggcgatagcactctcttacttgaaatccctcagcagcttcaggataactgtcctcaggataacttccagatctttttttttttttttttttttttttagacagagtctcactctgtcacctaggctggagtgcagtggcgccatctcagctcactgcaacctcccttgcccgggttcaagcaattgtcctgcctcagcctcccgagtagctgggactacaggcacacaccacctcactgggctaattttttttgtatttttagtggagatgggatttcaccatgttggccagactggtctcaaactcctgacttcaggtgatctacccgcctcagcctcccaaagtgctgggattacaggcgtgagccaccgcgcccagcctgcagatcctttttttttttttttagacagggtctcgctctgctgctcaggtttaagtgcagtgccgtgatcatagctcactgtaaccttgaactcctgagtaagccctgctgcctcagcttctcgagtacctggaactataagtgtgcaccaccacgcctggctaattttttttttttttttttttttttttttttgagacagagtctcgctctgtcacccaggctggagtgcaatggcacaatctcggctcactgcaacctccgcttcccgggttgaagcaattctcctgcctcagcctctcgagtagctgggactacaggcgcccacaaccacgcccggctaattttttgtgtttttagtagagacgggttttcgccatgttggccaggctggtctcaaactcctgacctcaggtgatccacctgcctcagcctcccaaagtgctgggattacaggtgtggcgtgagccaccatgcctggccttaccaattatttaactttccttgaaggccctacgctctctagtcagtacgcctttgcacatgctgttcctctgcctagaacaccgtcttgtcctcacttctatccccttcatcctgcaggtccttcaggtctcagcttagatctgaagcaagcttcttggggaagggttctttggacgccccctctctccatgggttagttaccatggatgtgtgcttccatatacttttcacattctaaccattaacacacagctttgtagtcgcctgttcccttgactttccacctcactaggcagtatcatcattaacttttgcattcctttaactgaacaaacgtgtgttacttgttaactatgtgtcatagttacacacatacatacacgataaagacccagaccctgcccttgagatgagtaactgcgtctcttctctggggtctcggcgtctaacagcgtcaggtccaaagcgcttgttgaacgaatgaaccaaggaacgagtgaatgaacgaatgaatgcccgcgaaggacgtggtgccgcgcggtcttctgggaatcgtagtcccctggttcgggcctgtctttacggcgcaggcgtattcacatggaggccgtgttgctgttaatgcgcatgtcccggaatgcggctgggaggactgcgcatgctcgaagggtgggggttgaggccgacggggcgccgtacggcggaggcggggtttcagtggcttctggtgctctagggtgagctctgcccggctgcagggatggcggggaggggtaagctcatcgcagtgatcggagacgaggacacggtgactggtttcctgctgggcggcataggggagcttaacaagaaccgccatcccaatttcctggtggtggagaaggatacaaccatcaatgagatcgaagacactttccggtacggtaccgcgcgaggcctgaacgggcccttctgctgctcggtggagtgcggggcgaggctggaggctgcccggacgggggtgaggggacgatcctgaaagtccttccgcccttccggagcggaggcctccgcgccccaagtccccgtttggggctcggtgggacagaagctgtatcaggtccacgagcccccccacctcacatgatcgtgtgtcatgaaagaaggggaacagagctcgtgacagcctagacagtgggcttggactttgttctgctttctcctcctttagaggctcaccatcgtcccgtaaggcagggatgatttttgtcctactcacaggtgagaaaactaaagctcggagagggtaaggcacacactaaagttacgagtcggcagaggcagagctagaatttgaacccaatctcaaccctttctgcctccggtaagccaggtacacactcttggcaggtctcctcaggcggcctcggaatttccttgtagtcttgagcacagtaggcagaaatgtcgggactgtgagagccttctgctaagaccttgcactcaagccctcactgcctgccttaggtcagagtgtgggtgcaggcatgcttttaatccaccaggggtcctggtgactggaattaaggataccagcctcctattttattcctcaccccttctccagggcccctgtaccaagtctcaggaataaaccactcacctgtttcccccaaacagtccagcccagggctgctggctgagactggttcctgctgcctggtgtattaggtagtccctgacctgggaggctgttatctgccattctctaagctgtctggtaaagtgacccaagttatcatgggagaaggacaaattttacttcaagaattttttatgtttccaaccaaaagggacctcagagatcaaatctaacccagtgactggcagggggtgggtgctcagtaagtaatttttaatcagtaaataaacgaatgagtctgggtgcagtggctcacgcctgtaatcccaacagttttggaggccgaggcgggtggatcacctgagctcgggagtttgagactagcctgaccaatatggtgaaaccccatttctactaaaaatacaaaaattagccaggcgtggtggcgggtgcctgtaatcccaagaaatcaggaggctgaggaaggagaattgtttgaacctgggaggtggagactgcagtgagccgagatccaccactgcactccagcctgggtgacagagggagaccctgtctcaaaaaaataaaaataaaataaacaaatgaatgggtgggtgaccacaggagagaaggagcacaaggccaggttctttttgtgcagaaagtgtgattccttcatcaaggtgtcctcttcctagcttgtgatcttagttcatgccaaactttccctctgacccctccaccaccctcatcaggatagaccttgaggccttcagtggtctcatcagccctatttttaaataatttgttttctttttaaaagttaatgtgtctttttttttttttttttctgagacagggtctcactcctgtcacccaggctggattgcagtggcgtgatcgcagctcactgcggcctcgacttcccaggctcaagtgattctcccacctcagcttcctaaatagctaggactacagcttcccaagtagctggcacatgccgccacatccagccattttttttttgtgtgtatatatatagatagatagatagatccgccacatccagccatttttttgtgtgtgtatatatagatagagagagagagagagagagagggagatgggggtctcactatgtggcccattctggtctcaaactcctgggttcaagcaatccacctgcctcggcctcccaaagtgctgggattacaggcgtgagccatcacagctggccttcagtatctgcacataaaaagggatctgcatacatataatcttatccttcccctttctgacacatcactgcatattgaatacaccagtgtgcaccctaatcaatcttcattaccagttcacttggaagccttccgggcagtgttgtagaagccaaccctaatcagcgtgaccctccgctttgggatgaaattgattctaggtagggttgacagagggttgagcgtggcagcctttccccttgtcctctgtgccctctgggtcatgctcat

SEQ ID NO: 98230 - DNA, 63479 bp, Homo sapiens
gactgatctgttggtctcaggcatttcattaggaccagattggttctaagagttagtctggactggccctaggaaacttgaattaaataagcctcttccccttaccgatcctttttaacactctcaggtttgtttgtttcccacttttttcctatgctggtctgcctcaaagtctcaagaccaaggtgactcaagataacaccagaccacgcatgatcaccaaaaccttcccatcctgattctcttcttctacctctaccctctccaacttctcctggtcttcacatatactctcaaagctagtctgaaagtgaccttactttcggaagtagggaagtggaactttggtaaatgactgtttgcctcatttaatagtatacaggctcagcccatagactacagttcttcagaggccatatgtctcagcaagtactggttatattctttttttgtaaggaagatcataaatgctaaaaattccactaagccattcagttcttccttttgcctacctagtcctgatttttgtattaattggttccctttagcaagggattcagatctttgtaccttatcttatatccagagcagattccatttggcagatagatggtctctagcctattgtattcttagaccaaaaatcataacctgctgtttctcagcaaagccttgctctctggagcttactatgtgctggtacttaaagagtacattctgccttgctgtagtgaagagacccactccaaataaaaaaggggccacacggggcttctaagttaggttgccagtgttgctgcccatgatgagttatttgcctctgagtttcagatgacctctctgtagggacactgtgttatcaaccattaagaagaaagaaccacaagcctcccaagtatttgggttctatcttagggttgaaatctggtcattattccctctacccttggaatcagagcaatgtgtcttctttcctccaacctcttaccttagatgcatcctggttatctggaagcatgggaaagaaggctacttatctctttgtatgtggctccagtctgtgaggatacataacattttctctacaatgaatctgtgctaatattttgccttctttctttcttttcttttcacccttagagacagggtttcactatgttgcccaggctggtctcaaactcctgggctcaagcaatcctcctgcctcagcttcctgagtagctggaaccacaggtgtgtgctaccgtgcctggcacttttttgccttcttaatggagatattcagttttctttttttcatttaaacaaagaaaaaaaatgtatctactctaccttccctctgctctcctccctccctatcctacttgcccatatgagcacggctccccatggccacatactcctgcaaagcttttatgctgcttcgcttttctctaaacagatctgatattgctgctcctgtggttttctcaaaattaactttgccgtggtttttaaaaaggaatcaaaatgcattgttgcattaagctttttcaataaaggaaaattacggaaggaaaataggcaacaccagcaaattatatgtggacaggttctaaactctatatatacatatatatatatatatctatatatctatatacgtaatcatctagttctgtcatcttactgaaaggaataacacttctaaagatcaccatttctgagaagttcttggaaatctttatgtctaagtgattgtattagatcagcaataatgactatgtaatctcaaaaaacaaataaaatattcttaacatggactcttaagggtatttcttgtttctgtgaactagaaattcagagatgagagagatctctgggcaacaaactagagatcctgctgtagggcaaggatgtgaaaatgttaccaatgggcatgtttgaccttaggatgtgaaaatgttaccaataggcatgtttgaccttagttaataaatatcatgttcccctcctaccagccagcatacacgcgcatcctggctgtgtgtgtaaagaacctgtcttctcagaaccaccaccctggggagtcgaggactgtaggcttaactcagagaaactaaaccatagttctaggtccctgactcccttttagttgaaaaatgcaggaaatcagcatcccccagtttgggaccaaaggaccttgataactaggacctgattatatccagccaaagggaagaaagaagtgcatcaggcagagatttgtctctaaatcaagttgcctgatttaaccaaaggataatccaattgcctattctttctcaactgccagtagggtaaccatctttgggtagctttctgatagccaccttctttagttgactacctaaactagttctgcatcctgtatgcaagatgttttcttttcatagcagaatcttctgccactttggcttctgattatttagattaagggacacagggctagaatcgtctgggcagtcagtaatcctcaaaattagtgccattccagttaagaggaggagaatgcagcagctagcaatgaagccggtcagctcaaaggatttgctcccctgcagtagggcttgactcctcatttgtgaaggatggaaccttgggtgcctgggtctttatttcagaatcatagggtaagcccaagctatccactgctgcacaagtttctccacctcacaatattgtgcaaaaaaacttgaactttaaagcaggctagcttgggtttgaatcccagctctgccatttacaagttatgtaacttagtcaaattacataaccactcacagcctcaattttcttgcctgtgaaatggatactgcttatctcctaggataaggatttaatgaagcgatatataaaaagtgctgcttatttacagagcctggcacgcactgctgactgcatacacatcattccttgtctcaatctagagccctacaacctctgttgcatcattacacccacacctgccctttatggagagaggagggtgttctatcctttttttactaaattatcctaactgcctgatagcctcaaaaagcaggtactttaaaacttactgcgtcttattaagctttctcagtgccaggtgctatccatttagtcaagtatctgacctctgtggattaaagtggagtgcttatatggggaaaagggtatatgtgattcttgtaactacacctatttatacctccaaccctctgctggcagcctgagttttgggacaagggaaattggtaatgtaggttttttaataacgtcaaatataacagcattggagccatctctgcaagatggagagacttgaccagccttgactagctcccaggtatgggtgcctctgtggtgaatggtattgatgactatgatgcctttgttgacaaataagctaaaataaattgaatgtgtgccaattccatggcctgtagtttcaaagttttcagttactctgtggtttcttgttacatcttccagttgtttccagatatcttcctccttattagaaattttgaacgtctgggcctatagtgagcacataggtgtctgatcttagtaaaggtattctatttcgctgagatgtggaaaagatcatggattgaggtctctcctcgtgttgactctatgcaatcttcatagcaccagttttacacattccttctctgaaattaaagccagatggagcctctaggcttagcaagtggctttagatagccaccagaggggacttgcaagctgtcctctatcctactcccaagatcagtctgccctttcccctaggaataggcaggaaaagaataaagcatcaaaactggccactcctgtctgctaccactgttgggatcctgccgattgattaggctcacaaaagaatatgaagttctgggcctgttaaccttagggctctgactacttaggaggagaagtactgggaagaagagagatagaataatgaattctttctattaagaaatcccaatgggctgtgctgtggcaggtttaccacactgaagcagtgatgagcaaggcgtgggttgtgaactttaaagcagggtgtaaatttttaagagtttaacaaattataccctgaaaaaaatccaaagtcaagtagttcaggccttgagccagggactttcttggaaattcatatcaattcagttctgtaaacgccacactccccaccccccacacccagccccccgccccgagacatttttggttgtcgcactagcgggaggatactactggcatctagtgaagagaggccaggtattctgctaagcatcctacgatgcacaggacagccccctacaataaatattcagccccaattgtcaatagtacagagactgtgaaacgctgcgttaaacgtacataaattaggggcatacaaaaatgagctaaatttggtcttactcgctaggagcctatatgtgggtggggagaggagtgggactggaagaggaaaaggaagatgtgaaggtacagtaaggagatattggaccagggtgagaaaacccaaaaagctccaaagagtgctctcaaacttgccttgttctgtcgcctatgaactggcaaagggaaaagtgagagagagagagagatgttaagaaagggacagggttgtccctaaggtatgggaaggtggagtaattcctctaggccctttgctttgggtatatcgtggaaaatgttaggattttggatctaggcagaactggtttgacaccaacacaacctgaatgagttgagggctaaaaggaaagctttgtggaggaggaggaggtgacaactaactagaatctttatgagagaaaaggaatcaaccaggagaacagaagacagtctcctccagagaacagcataggcaagaccctgagacaagatagaatatgataccttggaaaccgcagggaggaatctgcaagtgccggtttcttcatcagtaacattggattcgtaaaaacaccctgtcggggagaggtatgatgtgatatttggaaagcgcttactgcagtgcctggcaccaagctcagttcaacaatcccccagacccttcctaaagcaaccaggctggggacagcgatttggtcccacctgttcccctgagcctacgtctttggggcttctattaccaagccagactgtctaaatatttactacaagctactttttaaattcaggagagggcagatcaaacagcctcttttgcccccagtaacaatgagcccttaggaagcatctaagagagaggaaggaaagaaaggactggcgagcaggtgagggtgggggcttgctctaccctcaacatttacacaccatgaggaagaggccccctacagcagagaagggcagatgacaggagcagccctcgagggcaccaccaatttcagtgatggaaaaactcccccatcccacccttagacctccagtctcccagccaagccctagctccgggcgagatgcgttctcttcagaaaaacgctgagaattctcagcttccagagacagcgagtccctcgtttcgggcgatgtccctggccacctggcggtgccatccctcccctgagactaagcgggatatgggacgtgtgcaggagccgggatatggggggccgggtcggtggtaacagggaaacggagactgctgtggagcagtaggcggagactagagctccggaaaaggtcgctacagggacgggggtgagagctgagagacaccgagtgaggagcacagagataacccgcctgatctcaaggcccagctttcgcgaggtgtggagcctgtagctaacctaggagtctccgtccgccagcaatgccgcaggactaaaaagatcccctcaaaaatctcttcattgagcccccacctcctcgagtcccgctccggccggtcgagcagccaatcgcctcgcggggcggggttgcggcgagctgccgtaaccaatagaggtggagggggcggggcctggctcccggcgcgcggcggtagggtcgcctccggcaaagcgagctgaaccctgaggggagccgctgaccagcagcatggaggaccccgccgcgcctgggaccgggggcccgcccgcaaatggcaatggcaacggcggcggcaaagggaagcaggcggcgcccaagggccgcgaagcgttccgaagccagcggcgggagtcagaggtgaggagcccggaaagcttcggctggggcccggagacgcccgccggcgggaagcggcggctgaggtgattcggcctcggccccggagccctcggcgcgctcgatcagccccgcgcagtgggcgcctgcggggtcctagcggctgaactctgggctctttggcccggaccagtgtccgcccgtctcctgccgcgggttgggggctttctagccctctggctttcccccgctgcgcgaagatgagcgcggtattgagcggaccagatactttccaaatatttatctcacttaatcgctgcagccccctgaagcagaaattccgatcccagtttatagacgggggaacaggagcggagaggttaagtgactggcttgaggggtgggaggctggagctcagccgcaggaaagcaggattggcgagtggggcaaccgcagtccccctcccaggctgcctgcggcgggcccctgggccagccgagggacttctgcccgttccctgcccgtccccttccccccgtaagtcttaggccgtttcgggagcgccttccgcggacatcaggcccctgcctgtgagggctgagcgagacgggattcaggcaggggcagtcctggagtggctatctggagggagcagtcgcaggatacagataggagtgtgaatatttcgatctcttcctcctctcctgaaaaaagaaaccctatctatgaagatgaaagcgttgaattattatcacttccctatcccctcattgaggcagttcccatcagttggatctgagcggggatcagaatagacgacaaaatatcagatgtggcagggtctgcagatatcatctggtataaccctttcattttacagacctaaaaaaaagaggagtgacttgcccaagatcagacatctggcatagttggtggtcaagaacaccagactttggagtagtcagaccaggttttgactcctagccctatcatttactacctgtgtgattttcggcacattacggaacctctctgagctccagtttcttcatctgtaagatgagattaacactgcctacctcagaaggttgtgataaagtcaaaatgagataattgactataaaatgtttggcacagtgcaggcacaatgcatgtaattagtcagtacatagtaactcttagtatattgctatcatcatcatcatcatcatcatcaagtggcagagctggtactagaaaccaggtytttggcatcccagaccttgccttaccatttgaatagcatttcagtttccaaagtgatttcatgtatgctttacattttgatgtaggtagagtaggaggaatccattcattttttttcaaggtagaaatggagatgaaaagactggcccaaagtcaccaccttgcagaggcagagagctcagccctcctgtcttgctagatgatacccgccacatcatctccctccctacttcaagatgagtctggtcttttagggcaccctgtacctccttcccccacagagacattgttctcgttcaaatgtttttttggggagatgagccattcattaattcaacaattatttatcgaggactttctgccagccactgttttaggtgccagggatatatcagtgaacaagatagggtcttcgcccatggggagacaaattgtgagtaaataaataaaataatttcagaatgatatgttctatggggggaataaaagtctctgcctgggtctcccttctaaagttgcaatctgttccccacctstcaagtcttcttcaggcaaaggctctgagagtacagtcctttgcttttgccagtactttgcagtgtccagagactcgaaagctttccacctgcaccgcggtttacctgctgattgtctgcagctgcactcttcatgcctggaaatgaacaactgctgcgatcatctctatctgggctcattgcctgccaaaagcctggctggaaagattagctttcctctaccttctgctgcagcaggactccttttacctgccagtacatcccctattaccacagtacccaggtgccagatctgcttttcttctctccctctttttgctttcctgtggaaggcagtccktagaggagatgggatttttttcctctctagggcttttagaaaatcactagaagagaattactgtggcacaagtcaagagagcctcatcgtgtatcactgtttatggaagcactgttgacctaccttctcccactggcttagtgtgtgaacatcccaacctaaaaaggaagctaaagaataattgtttgcttaataagaagagtcttaacctaataaaaggattcacctcagacctcttttagccagatctggtttattgatctcaaactccttgacaaagttttaactggtctgtggtaaaatgaggaaaattcaggtcatcraagtgagtttttctaaaaatttagttcaatatattaaatttaagaatgtatacaatttaaaacagtgtttttcaaactgctatagggggcaacctgttaattgaggctaaaatttttattttaagaaataaagccagcatgatggctcatgcctattatcccagcactttgggagactgaggcaggtgggtagcttcagctcaggaattcgagacaagcctgggaaatgtaggcagaccccatctctacaaataaataaaaaataaaaaagatttagccaggcatgatggtgcgcgcctgttgtcccagctgctcaggaggctgaatcacttaagtctaggaggttgaggccgcagtgagctgtgatcatgccactgcactccagcctgggtgagaggaagaccctgtcttaaaaaaaaaaagaaaagaaagagaataatagaaaatatcactgcatcacatgcagtaaaggtaaatattttgttaaacttttgttccagtttktgtgtgtgtgtgtgtgtgctgggacgtaatgtaaaaggtatcatttttccaaaaagtttgaaaaacaatttttaatggctgttctttattctgagattctgtctttcattttttgaattttttaaagtttttaaagtccttacctatcagaataaaacagcmacaaccctatgtcatttgccactctccacctttttctttttccctactgttccttttaatccaaaagtttggaaatctttgctatagtggattaaaacatgattcgccttktttttttttkttttttttttttttgacagagtctcactctgtcacccaggctggagtgcagtggcgcaaactcggctcactgcaagctctgcctcccgggttcacgccattctcctgcctcagcctcccgagtagctgggactacaggcgtccgccaccatgctcggctaattttttgtatttttagtggagacggggtttcaccgtgttagccaggatggtctcgatctcctgacctcgtaatccgcccacctcggcctcccaaagtgttgggattacaggcgtgagccactgcgcccggccaatttgctttgttgacagtataaattggcataatgttttgggggagcaacttatatacaaagagactttaaaatgttcataagatttgattcattaattttctttataaaaatctatgcttaggaaatatcctaaatatagaaaaaagtgtaagtctattacagtttgttgcatataataaaggaaaattaaaaaccatttaaatattcaataaggaactagttaagtaaacaaataaatgtacatccatttatacaaccatttaaactaatagtcataataatgtgagaagaatgcctttatagtataatattaaaatcatagagtgaccactcacatagtgctacgaagtgctaggccgtgtgcctttcctatattaactcatttagtccttaaaataaccctatgaagtaagtcctgttattatcctcattttacagatgggaaaactgagcaggtcattttccaacaattcgctgacaccaactggatgtcctacagttcaattcgattctgacactaactacctagaattagcacagacccccaagttaagggctcagtcctacaaggccctacgttagacaccagccataggtgggatccccaagctatctacacttcagcctggccaactacaaattaagcggttatcatgatcttcctttcaggttccataatttgctagaataactcacaggattcaggaaagcatgtacttagaattataattttattataaaggatatgactcagaaacagctaaatggaagagatgcgaaggacgaagtatgggtttggggtgatgcagagtttccttatcttccctgggcagcactctcctagcacatctgtttgttccccaacccaaaagctgcctgaacctagttgtttctgggttttcctatggtgtttcattacctagacataattaaactattggccacatgactgaacttaatctgtagtacccctcccctccctggatgtgggggtggtgctgaaagttaaaccctctaatcatgtgctccgtctttcctaacataagtcacctcatgagcataaattctggtaaagctgacagtgactcattatgaataactgacactcctatcactcaggaacttctaagagtttcaggagctctgtaccaggaaccaggggcaaagaacagtatattttttatgtcacgctgaggcacagagaggttaacttgtccaagatcaaatagtatgtgacagagctgagattgaaaattttaaaaattcatatgtatkaacatatacaggaaggaaatatcccaaaatgtttaagttagaagatgggattatattaaaacatatttamtaggattataaatttatacatacaacgtcatgggaaatgtaatctttactacaacttggagtggagatgttgcatcatttgacaatcctaaagttgcagaatattagagctaaagaacctctttaaaaataaggaactatgatccacagcatgagacttgatctatatcatacagtgggttgatgacagaactgaagctagaatccagttctctttgtttctgtctgtctcaattttatataaatcagctagatgctcctctggtctgtgttcatgtagattagatatggacacagaccatagctttcatatatgtttgagatcctggccctttattcagactttccgattttgtataggaatcctcagcccctccccacactgagactcaagttttggcttggcgtagggtacctctgagatgaaagacccaaataggactctcctaactgtctccctgatctaaccttggcctccatgaggggaagaagataaataagggtacagtcttcccttggcaacccctttttccaagttatcccagttaccaacaaaatttctctgttacagggctctgtggactgtcccrctctggagtttgagtatggagatgcagatgggcatgcagccgagttgtcaggtatgaggtagatgggtcagtagctagtggaagaatggccaggaggagagggaaggggcctgtgatctccctggaagcttgtctgttctcaccaagtggctgttgaacaaaggctgttctccacattccttttcctctccatccaagtggtaaatatctctttgtttgtcttcacatttccttctgtgattctccttggctatggtattcttcattctgtcattctatcactctttcctgctcactcttctttattctctttgaaaataactgatttggtgcactctcaaatcagttttctctccatcttctccatattccttctctttttctcttcctgtcacccatatctttgcctgcctacttctttctgctgccctctttctatcccatgccatctctttttcctttgtctcctctacctccatcttttccttcttcctctcgcaactgccccttattaaaatctcagcaaagtccgaggaaaaactatagtcaactggccagctgagcaaggctggacatgtcacctgcatccatcatagtagagttctgcttggatgtttatgagctggggttaagtaattccattcttctttcagtgctggcctgcttgtctctgtctggatttttagcttagggtaaatgtgatctcctcacattaagggcctccatgttacatgtgctatgaatgccagttattaataaacaagctttgggtggagatgtgtgaaatttaaatattctgtcacatggaagtgatactttgaggcatgctttttcagagaaaagagacaaacaattttaaagacgttcttgtgcatgagcacagagaataaattttgtgatgagtgacagagaaatagagagctaagtttaataaccaacaaaggattagaattcataataggaatatgatataaatatatatatattttaaagagaggagagagatgagcaacccaacaaagaaatgggcaaagaatataaatgggaatttatagaagaaaaagccaaatggtcaataaatatatgagaagatattgaactttattagtatatggggaaaagcaaattaaaataataaaatattatttcacaatcatcagagtgcaaaacttaaaagcctggggttggtgagggtgcagagaaattagtacttttatgcactgctagacatggggggagcagagtataaaattgaaaagcattttgcttatatcttgcaaagttgaagatgtgcacatattgtgacccaacaagtctactcctagatatccactctaaagaaaattacacttgggcacaagaaaatgtacaaagatgtttattgcagccttgtttatcagtgtaaaaagttggaaacaacctacaatgctcatcagtagggaaatggataaactatagcatattagtgcagtaggctattgaatagccattaaaataataattgatctaaatcaatatatttattttttatttttttatttttgagacagagtctggctctgttgcttacgcttgagtggcacamtctcagctcactacagccttgagctcctgggctcaagtgatcctcccaccccagcctctcaagtagctatgcctatggtcataggcatgccctaccatgcccagctaattttgtgccaccatgtccagctaattttgtgccaccatgtccagctaattttgtttatcttttgtagaaacaragtctcaccatgttgccmaggctggtcctgaactcctgggctcaagtgatcctcctgccttggccctccaaagtgctgggactacaggtgtgagccaccacacctggcctcaacatgtttcagtatcaataaatgcttggccrggtacggtagctcacatcttgtaatcccagcactttgggaggccgaagtgggtagatcacctgtcaggagttcgagaccagcctgaccaatatggtgaaaccttgtctctagtaaaaatacaaaaattagctgggcatcgtggcatgcacctgtagtcccagctactggggaggctgagacaggagaattgcctgaacctgggaggcagaggttgcagtgagccaagatcacgccactgcactccagcctgggtgacaaagtgagactccatctcaaataataataataataataaatgctaaagataaaattgggacaaaggatcagtaacaaaggaatttatacaataggatactgcttggataaaaaagtttttaaacagagcaatatcatatgtttacaggcatatgtgcatatagcaaaagtagaaaaataggcttgtgaaggatacacaccaatttcattatagcagttgcctctggagaagggaataagatagactggggagcagtctgaagcaaatataacaaatgctaacatttgtttgacctgggtagaagataatacacaggtgtcttaaatgtactattctgttcttacctgtatataaaaattcataatctaaaatttaaaaataaaaagaccaagactaaagttcagtacctaagagccttgcccacttttctgatttggtttttggtgctttaatcttaaaaatatatatattcacctctccactaatgactgaagaatttaagattcagtgatgggatttgcttctggtcactcctagattctggaacttaagactcaaaagccctgactcccagacaaggtgtttctcaaccattagacagctggctggaacataagtgaatttctcttgctttgtgaattacctgtgacctggttaaatttccaggaagggtctcaggtagggagcagagatttaaaggaaatctgttctatcatctgttgacttctgtatttcagttcttcatcttctgtaagatgagggtacatatacaatgttctggagagagatagagagagtaggaaagggcatttttatttcttttcttctttctttcttttttttttttttaagagacagagtcttattctgttaccccaggctggagtgcagtgacatgatcatagctcactaaagcctcaaactcctaagctcaaacgatcctccacctcagcctcctaagtagctaggactacagtcatgtgccactacacctggctaatgtttaaattttttgtagagatagggtcatgctatgttgcccaggctagactcaaactcctggcctcaagcaattctcctgcctcagcctctcaaagtgctgggattacaatcctataggtctgagccatcacacgtggctggcatttttatttctcataagctttttgcattttgtattgagaggctgctgttagcaaagttagattttcctgggcacagcagccctttgacaaccatagctgttctctagagttttttttgcagcctctgcttwgtggctgtgggcaggaatctaaacttctataccctttgaggaaacttagcagggagagaatgaactggttccaaccctgaagaaccatctagcacttacttttcagcccttgccatggtttcctgatccagcacaaggatctttcctctaagtttcaggagttgtgttgccctcctcttctcttagagatgggatagttcctggttgggttgacaaagcaggagttgcagccctgagaaacaggagtgatgagattaagctctctgtgctgcagtcctcctcttggccctcaccaaatgttgaaggctgccttctctgctgcagcagccagctggcaggaagaggacaggtttgatggtttaatctcccagggacacaagtggctatttttaacgttgctctgaaaaggaggaagctagctttggattcattggacacaggaatgtgttggaagcttcagctctttcatgccaccctctctactttgggcctcttctttaaggatctcccgaatgtgactgttctgtctttcctgccacagaattgtatagttacactgagaacctggaattcaccaataacaggaggtgctttgaagaagatttcaagactcaaggtaattccagatctttactcatagagacctgctttttccttttatgatataccagcctgatctagtaaaagactaaaacaaagtgcgatccttcatcccctctgtattagttagggttctcttagagggatagaactaatrtgataaatagatagatatatataaaggggagtttattaagtattaacttacacaatcacaaggtcccataataggctgtctgcaagctgaggagcaaggagagccagtctgagtcccaaaactgaagaacttggagtccgatattcgagggcaggaactatccagcacaggagaaagatgtaggctgaaaggctaggcccatctctccttttcatgtttttctgcctgttttatatttgctggcagctaattagattgtgcccaccagattaagggtggatctgccttccccagccggctgactcaaatgttaatctcttctggcaacatcctcacagatatacccaggatcaatactttgtatccttcaatccaatcaagttgactcacagtattaaccatcgcaagtccaccccttgtcagctcgaactcatacacatctcctgagatcatacataatcttcaattaaagacaataataagggcatagttatgcctaacataattgtacaaaggataacataaatatcctttgtacaactggaaactcaccaatccccaacccaaatactattatataaagttaacaatacttaaatgctgatatgaagtcaataaatcttatgtcacatgataaaggagaaagaaaataaaatgaagatattaatacaagtgtatacacgcacaaacatgtttttaacaaaagaagaaggaaatactcatgaccagctggtcacgtggtcgtagctggtattgatgactaccttcttctactacccattctgtattccctttgcattcagcaagcagcttggcaggtcgtggtttttttcctggtggagtaatccaaaccttcattcctgaggggtctgggtcatttgtagtcctgcctggattggggtgttgtagtttcccatcgaccttaatcacagggcatagtaatactaagagacgccctaatggatctcctgtattccatgcatactcttccttacctccgttgtggagtagtagactgatttcatcttgatagtctgggtcagtcaccccagccaacactgtaactcccttcttagcctgttgacttaaaggtaggaggaccccaaagtgtccaggtggcaatcttaacttccagtttaatggaatcattgttgtgtctcctggtggcagtttcctccctctggagctaaaacctctaggccagcagaacgtaatgtcacgggaacaggaagcaaaaattttgctactagatcactaggggtgatggtgagtggtgccacttccaccccttgattcctggaccggtgaatcctgactatgggaaaaacagtaccatatgttggatgctgattcagagcatacacggccttctggagaactttgccccagccctgcaaagtattgtcacctagttggcattgtaattgtgacttcaaaaggccatttcaccgttctatcaatccagctgcttcaggatgatggggaacatggtaagaccatgagcatgagcccactgccacacttctttagccatgaaatgagtgccttggtcagaggcaatgctttgtggaataccatgacggtggatgaggcattccatgagtccatggatggtagtcttggcagaagcattgcttgcaggataggcaaacccttatctggagtaagtgtctattctagtgaggacaaacctctgccctttccatgacagaagaggtccaatacaatcaacctgccaccaggtagctggctgatcaccctgaggaatggtgccttatccagggctcagtgttggtctctgctgctagcaaattgggcactcagcagtggccgtagccaggtcaaccttggtgagtggaagtccatgttactgagcccatgcgtaacttccgtccctgccacagtggccactttgctcatgggcccattggacaatgacagaggtgctggggaaagaggctgattggtgtccacagaacgggtcatcctatccacttgattattaaactccttctctgctttggtcacccactggtgaacactcacayggagtacaaatatcttcatagtttttgaccactcagagaggtccatccacatacttctttccccaatttttttgtcaccaattttccaatcatgcttcttccaagtccctgaccatccagccaaatcattggctatagcccatgaatcagtatttaatcrcacatcttaccatttatccttccatgcaaagtacacagccaggtgcactgctcaaagttctgcccactgggaagatttcccttcactgctgtccttcagggatgtcctagaaaggggctgtagtgctgcagccatccactttcaggtggtgcctgcatatcgtgcagaaccatctgtaaaccaggccctggtcttctcttcctctgtcaacttatagggagctccccatgaggccatcagtgcaggctgggggaaagaagccagggtggcaggactggagaccatgggcatttgagccacttcctcatgtaacttacttgtgccttcaggacctgcttgagcccgatcacgtatataccacttccatttgatgatggaatgctgctgtgcacgacccactttatggcttgatgggtcagaaagcactcagttcatgataggcagttgaggtcgcatggtgacttgatgacccatagtcaaacgttcagtttccaccaaagaccagtaacaggccaagagctgtctctcaaaagtaaagtagttatctgcagaagatggcagggccttgctccaaaatcctaaaggcctccmctgtgattcatctctgggagcctgccaaaggcaccaaacagcatccccatctgccrctgacacctcaagcaccattggatctgctgggtcatatggcccaagtggcagagcagcttgcacaacagcctgggcctgttgcagagccttctcttgttctggaccccactaaaaactgggtggggtccagataaatgggcaggaataacacacccaaatgaggaatgtgttgcctccaaaatccaaatagacccactaggcattgtgcttcttggttgtaggaggggccaaatgaagcaacttatccttcacctaagaaggaatatctcaacaggtcccacagcactggatccttggaattttactgaggtagaagttccctgaattttaatcagatttatttcccgtcctctggcacacaaatgtctcaccaataagtccactgcatttgctacttcttgctcactggatccaatcagcataatgtcatcaatgtaatggaccaatgtgatatcttgtggaagcaaaaagcgatcaaggtctctccgaataagattatgactcaaagccagagaatagatatacctctggggtaggacagtaaaggtatattgctgtcccagccagctgcaggcaaattgcttctggcgggccttatggacaggaatggagaaaaaggcacttgccaagtcaatgaccacgtaccaggtaccagaagatgtgttaatttgctcgagcaatgaaaccacatctagtacagcagctgcaattggagtcaccacttggttaagcttacgataatccrctracattctccaagattcatctgtcttctgcacaggtcaaatgcgagagttgaacagggwtgtggtgggaatcaccactcctttgtctttcaagtccttgatgatggcactgatctccacaatccctccagggatgtgatattgtttttgacttactatttttctaggtagaggcagctctaatggcttccatttgtcctttcccaccatagtaacgctcaccctaccagtcagggagccactgtgggggttctgccagctactaagtatgtctatgccaattatgcattctggcactggggaagtgaccacaggatgagtctgggggcccactgtaagtcaggcctgagctaaaacttcattagttacctgacctccataagcccctactttaactggaggaccacaatgacattttgggtgccctggaatcaatatcagctcagagccagtgtccagtagtccccgaaatgtctgatcatttccctttccccagtgcacagttaccctagtaaaaggccagaggtcttcttggggaaggatgggagaaaaattcactgcataaattgttggtaatgtagtggggtccttcctcaagggaacccggcctccccttcattcagggggttccaggtctattaactggctcaagtctggaaattgagaggccatgattctctgtttttataattcaaattagtctttcgtccattcgacctacaagttttctgcttgtataaagtaggaatatagtaggcttcctatcagtttcacttctagaaacactgtgattaattagccaatgccacagctctacatgagtcagactattctgattgctcctttgcctctgccatccattatggtagctatgctcaccttgcctttgatggtcgagtgcttccacttggcccctgccacctcgggatccaattattcccattgtatttaaattttgtagttgagtgactgtggttcccaccattagctctggcataaggagaaaagcaattacaggactcttcaaagatgcagttgctgccttcataaatctattttataatgcattggtcaagggtgtatctgctggaccctcccagctgggatgagtagatctaaagtgactaatccactccaccatcccaatctccctaagcctttggatcccttcctctacattaaaccaagggagagcaggcatttccagctcactcagagtgggccatcttttaatccataattcagctgaccaaataaactattagaaccttttttaactccccaagctgcaacattgaacgcagagcccctacttagtgggcctaaatcaataaattgagcctgatccaactctgtgttccttcctccatcatcccatacccttaatatccattcccatgcctgttctccagattgctgtttatataaattagaggactcaaatagttctttttgagtgtagcacacctcctcatgggtcacactctcaacctcacctctaggggcctgccaggactttcgtctagttataggtctagaaccaaacaaaggtgttgagggtagcttctgaggagaagcaatattatcttgcctggcaactgtttcagggcaactgccatcactgttgcttcaggcagtgcagggtttatctcctcagacaaaggtggaaaggctgatggcagcatgggtcagggaggagatattgccactactggggatggggaaactgttcctcctggcaaaaaaggttcatcagagtttayaaactcagtgtgcccagcttcaccagggtcctcccacatgtccccattccaagtttcagggtcccattcttttccaataaatgccctcactttaacagtagacacctgacaaggctgtaaatgcatctttcattgcagttcagccattcacatgacaaaagcttgtgtctgtttttccacaatttcagctctttctctgcaggagataagactctcactcagggcaatcttagcagatttgaggctcagtatctgcttctgaagctgggagacagaatccctgagttcatcattttctttcatcactttgtccactgaacttcggagcaaccaaccagcttccttatgttccttggttctccacatatggtcaaaggtattatgtatagtcactaaactccttgcctctcatgagtggtgaatcaggaatgtcaaatgcatttattttgcataactctctaaacagtttccaccaaggactatcagtgttctctatactattagaagtagatttcttagcatttttggatctaatcatattaagcagccaactccagaaatctcaaaaccactgaaagaactccatccttaatattctgttcctctagaaccactcctggtacccaaatctgtattagtcagggttctcttagagggatagaactaataggaaatatatatatattaaccttcacaccctccataaccatgtagcctttccttcttgcttaggggatacagggttctctgtatctcaagtggagagcaatggagtagaagcatgagaagctggtgctgtgctgcctgatagaacccttgaccttaatgtttcatcccatcttcaactttgccctactctcaatagtaatttcatgtgcccacactgtgacattctcagacattctcatccatttccttacttggtcagtggcaattcaattttcagttcaacaaatgtgtggtgagtatctattctgtgtcagatactggaggcaggagtgagaagcagcttttacaaagaagttagagtttgagagcaggggaatcatgtgcacatcacaaaactagctgaggctcaaacartcctcctgccccagcctcccaagtagctaggattacaggcatgtgccactatgcccagcttctgcccaagggccttctctgcagcctatacagggcagccaggaattgtagggaatcagtgtgttcctctagtttagcacccctcatccaagagaaaaatgctgtgtcagaaaagttttaaaagtgttatggaagcagagtatttggccacagcattagtgagaaaggtcctttttttttttttttttttttttttttttgagacggagtctcgctctgtcgcccaggctggagtgcagtggcgggatctcggctcactgcaagctccgcctcccgggttcacgccattctcctgcctcagcctcccaagtagctgggactacaggcgcccgccactacgcccggctaattttttgtatttttagtagagacggggtttcaccgtttttttagccgggatggtctcaatctcctgacctcgtgatccgcccgcctcggcctcccaaagtgctgggattacaggcgtgagccaccgcacccggccgagaaaggtccttttatattgggcatgtaagactgggaaagaggtcattttgtattgtgcctgtaaggatgactaggaattgaatatgtagggagacagagggaactccttgaggaaaggcagaaagacaggacagtatgggctgtgtgtggaggacagaggggatgttgaaggtgaggctatagactgggttcaggccagaacattttgggtccttttcccrtaccttattctttctcagtgaaataaggaaagcttttggagaaaataattttggcaggggagctgagatcagaggtggatatgctatgaggagcctttccaggaagggtggcaatagctgacactggatgtatatggccttttattcccagtgcagggcaaggaatggctggagttggaagaagatgcccaaaaggcctatataatgggactcttggaccggctagaggtggtcagtagggaacggcggctgaaggtggcccgggctgttctctacctggcccaaggtgagtgaccacccttgctagctttagaggggtggaggcttgagagggaagtgggcattatcaggactgagatgacgcaggctgtgctgggaaagcaaggtttcttgcctctcaaggacagatcttgtcatgtgctaggagtaacctgtgcttatgaggaagatgagatagtgttgagtgctgttctagatccctcgggatctgcctttatcttaccaggtatgtcagaattttttatagggttcttcttttccctaccctgtactataatcatatgtgaatactagcaagaggtgtggccagagctgatatgtaccaccagctgatcatggagacaagacatcaactgtggcctggccccaaaactgaggagaaataggagagtgtcacagatacacatggaccccttgcattgtttctcattggcattttgaaagttcaagccaacataactgcgggagtggatgctgtgagtaatttggagatgatcagaactaaatagagtaattggggaaagctgctcagaagaaacctgttagccaggtgttggaaagggaaatgagatagcctagctggagtgaaaataagcctacgatcataaatataaggcgtgttaacagaamcaaccagttgggagctaaaaaaaaaattgtaaaataaaaaaataataaatgaagaggggaaagggtggacattaggtgaagagaagactagcaaataggactgtgccctcctgtatctcttgggtctggtgctctggccaacttccaactgccagtaccttcatatgtttgcccaaggactttatttatctaagttttttaaaagaaagtctcactrtgtttccctggctggtcttgaactcataggctcgagctatcctcctgctccagcctcctaagtagctaggattataggcatgtgccaccatgctcagcttctgctcaagggccttctctgcagcccatacagggcatccaggaagtgtagggaatcagtgtgctcctttagtttagcaccctcatccaatgactaacaggagttagtggatggatagcctgactgtctcacccctcttggatagaataactgtgagttgtgtgtttyatactgtttccaaattatcccctgagtgaactctttgggcttccttttcttccctatctctactgatgattcctgggaatgattcccaaataagctacttgcactggaatccttacttacctcaggatctgcttctgggagaactcacccttaagacgataggccattgatgagcacattggacctaaccctggagactacctctcctctcccctgactcattccaggaagttcttggggcccctgtcatacctatgtcrgcctaattattaggcagagtattataggaaaatcttaagatcatggggcagggtggaaagaactgggatactgccacccctcaacccctgtaacaactgtctggtcctttaggtacttttggggaatgtgattcagaggtcgatgtgctacactggtccaggtacaactgcttcctgctgtatcagatggggaccttctccaccttcctggagctactccacatggaaattgagtgagaagccttaggggaagggctggcctacataacccccattccttaaaggggcctcatgttctatgctgcttccctcactatagagaccccctgtgaggaactgggtctactcacacctcagcccaaagctcattgacagttcccctccatccagccatgttctctgatattctgttctccctccctgaggttggatacatctgcagcttctgcctcacttacagctttaatcctgggcttcaggggcctatcctgagtgggttctctttttattcaaggactttcttagctcagcctaactctggaattcaagagggaaactattttgartgcatgacccaagaaagacaggaaatcaattcctgtcattgtgcccaattctttccctcatgggctatagttctagaggtggccttatttgctgctaccactacagtgaccccttgttttgtctcatgcccatcacccaggagtttgagatagggtgcaatctgcttattattcatcaggtgtttcttagcatctgttttatgtccagcacagttctaagcatagtggggaatgcaagaggagtggataccacagatcctgcccttgccttgtcttcaccatagatgagagtttgctgaggtggcaggggaattctgtcagctcctttactctagaccagtttcattagtggctgcctagccagggaatggcaagcactcatatttgtgtgagtgataagtaagagcacagagagaaaagaagtcttatgcattcctgttctttttctcctcccctggcagcaacagccaggcctgtagcagtgcccttcggaaaccagctgtctccatagctgatagcacagagctcaggtgagtggggctaactatgggcttggaacagggcagatgattagcacctgggttaccttttccccaaatcccagatgactcagaccattaggaagttgccctgtagctaatctcactgggttgggcttcccacagagaccatcyctgaggtctgtgactatgggctgggaattgccttgggaacctcttgtgactcttctgtaaccccagggtgctgctgagtgttatgtacctaatggtggaaaatattcgcctggagcgagagacagacccctgtgggtggagaacagcccgggagaccttccgcactgaattaagyaagaaatggcacttgaggaaggtgtggatggggtgctaatgggagaggggaagcagagcatctgcctaggagaggcagacagtcgttttttcttttgttttcttttttaaaattaatgtcctttcttttaggacacagatactgcatggcaggcacaagggctgggcttgattgccgccctgtatctatgagctaagaccagccatgtaacttctctatgccttggtttccttggttataagtggggatagccattcctctcccactctatcacgagtcccacatgaaaaaatgagttgaatcaccttgaaaactgagttctgttcaaatgtaagttggtgttgtcatctgacagggataggatatgaaggactatgggattttaaaaatatatttattgatgtggaaaagtgaatgacattgagtcctttagccagaaagcaatgtcttcattattgttacttctagtttggcatccaaccccaaagcgtcaccctaagctctggggcctatgccattttaattccatggcgtcccttcctgcccttgaggggcttccttctgggggctaagcctccttctcaggaccaagtactctggtattcttcaggggaggtgagtgccttcctgtgtgtgtccagaatcagggttacatgaaaaaggttttagctgcctcatcctcactttctcactcccctctctcctcacccctaggcttctccatgcataatgaggagccttttgcccttttactcttctccatggttaccaagttctgcagtggcctggctcctcacttccccataaagaaggtcctgctcctgctctggaaggtggtcatggtgagtaattctccccactcccacattatcagatcagcaatgccctatgccacctcagtttcttctagtctcattccaggaggctggatccagggagcagaacaggcagcccttagccaactgctaatatggaggggcaacaaggctgtcctagagacatcagatgttctatgttagaatgggtttcatgtttctattggatggatgggagatgccactccataaattggggatgtcagtggtaccttctcttattaaagccaatgtttgatggagagaacactggttgaaagttggtagatctgggctttgctgatactgagaaactttgggcaactctctgtgcctcaatttctctagctgtaaaaggttggggtgagtgcctgccctccctccagataaacagaggttttgtattttttttttaataaaaataattttttcttacagacaggcctccctgtgttgcctgggctggtcttgaactcmtggtctcaagcaatcctttcaccttggcttcccaaaatgttgggattacaggcatgagccattgtgcctggccaggatttgctttttaaaaaataatgaagttcttataaatatgtggttacatttctgttactagttattcaacctgatccttcatttttggctcccatctcacaaggcaggcctaatagggggaactgcctcttgactgcagaggaaattgagtgactctgggggtttatagcacctggatggtgttccttaaaaaagtcgatagtttctttttttyyttttttttttttttgaggaggcccgcaggaattcctttcctaaattctgtgatatttcccatactggggcagtaaataatgccttatcctgacccctgagctcctcagttgccgtggggatggtaatcatatttgcctctttatgttttactacctccttattaaggaaaaggtctgaagggactggaggttgtggccctttcttttcatccatgtttccctgaccttggctctctcttacttcccttccttcctctctctctgcccctttcctgtttcttccttagtttaccctcggtggatttgagcatctgcagactctcaaagtacagaagcgggcagaattgggcctgcctccactggctgaagacagtatccaggtggtgaagagcatgcgtgctgcctccccgccctcttacactcttgacctgggagagtctcagctggcacccccaccctccaagctgcgaggccgccgtggctctcgaagggtatggactgaagcagacaatggtattgggacaccgactggccaaaaatcragattctaagttactctgggtgtggtaggaaaaagcagtaaatgacccggctcatcctgcccaggttggccctatgaccaacctgaaatcttagggtctctagtttggcctctgtcccycagccctgacagccccctgcgctgttgtgatgtgacactgtgatatcatgtcatatatagccatgtcttgctacagaatcattggcctggacctcagtgcctggagttccttacattctgaayaacaattaagggtataatcctggggatagggacccaggataccggaacaggtctccaagcaaatccrtttttctggggtaaggcattttactattttgaagcaccaggaagttttactgtcagccagccacactcttaactggccctggaaccaaaggcttacatttaagagatgactgggtaggggtctatgtatataaccatgtgacactwaacgacagggatacaatctgaaaaatgtgtcattatgcaattttgtcactgagcaaacatcatagagtgtacttacacaaacccagatggtatagcctactgcacacctaggcatatagcctattgttcctagactacaaacctgtacagcaggttactataccgaacaccatatgcaattgtaacccaatggtgtttgtgtatctcaacctagaaaaggccaataaaaatacagtattataatcttatgggtccacaattacatatgcagtccattgttgactgaagcatcgttgtgcagcacatgactatagtctgctgtcctgaaaaggtcagaatgaaaagttatactgagatctgacyatgttcttacaaactcccctgcctgacccacttcagtttatcaacagggctagatagtagtgctcagtaatccagtctccattatctgcaataaaattttttaactttatttttgttttataaagtaatgcttactcattgtagaaaatttggaacaaatataaaaatgtgatgaagggagaaaagaaaaatcacccacaatcttaacaaccagagacagtcactgttaactttttggcctatttctgtccaatctttttttctttgtcacaagatttaaaattccaaacttgcttccctctgcctagcagcaagcttctgtcctcctcttcctcagtcagccagctggtgtatgctcacagaaggcaaactaattgaatgttcacctaagcagagcataattaggaargaaagtgctggcaaaaaaaggcatcactgctttctgaaagctaagtaattgtgactttgggattatctatgctatgttccctggctaatggcagggttacctgagaacttcttgtcctgttattgggccgggtggggacagtaggttaaggtggggaattggatgttttcgcaagggctgtgttcagattccatgttccctgaaatgtggaggcctgtggatatggggtggcctcagacaaggatgcccagagtgagatctctgcatgcctaccctcccttctttcccctccagcaactcctcactaagcaggacagcctggacatctacaatgaaagggatctcttcaagactgaggagcccgccacagaggaggaagaggagtctgctggtgatggagaacraaccttgkatggagagctagacctgctagagcaggaccctctggtgccacctccaccctcacaggcacccctctctgctgagcgggtggcttttcccaagggcctgccctgggccccaaaggtcaggtaggtttgatagcatcagggacccctatgcttcggggtttcagtctccaaaggcccaagatggggtagtcyatgtattcaaggctcgttaagttggtctggcagtcagaactcctgggtttgaaattccttctgttgattgctgccyttttccactgctccagtcctctgattggagggataggagcccggaaagtttttctctctcaaagtttgcttttcttcccttctctgggattggtctttccaccatcctctcagacagaaggacattgagcacttcttggagatgagcaggaacaagttcatcggattcaccctggggcagtaagtgactgaatggctggaactggctacagagtggttcctagggkgccagaggagcaggtagcttggaatgagggatggtgcctggtggtcataatgtaacctagagcccctaggccatggacaactcccagtgactactttgggttctttctatggatttcttttttccttgagtttcttccacttttcctcaaagaacttttgtgtttttagccaactgtaggactttgagcaacaagtcatttctctttcgggcttaattttttcctgaggttgttgggttagatggtttctgtgggcccttcctgctctaatgggctaaaattctgtgaacaagagacatggtcagaacggatccagtcttcccccattccccagcctcatgaatccttcccactggcctcttgaaaattgagtccttattagtggagtttcatagtcaaggtgtcattgggctatatacccttttaagtaggaacctaccactcctacaccaagtgagtacccaaaagactataaaaatctcctgatttccagaaacatttctgtgtaccattattatttttgtgtcctgaagcactgatgtgggacctacgagcttgcagaggaaggtctagggtactgggggtagatgttgttgaaagtagcatggtctgttgactctaggggggtattggggtatcagtagttctcgtactttggaagcttdtgatctggtatgtctggccttttacagggacacagatacattggttggattacccaggcccatccatgagagtgtgaagaccctaaagcaggtgactggggtgggctctcagtcttcagggatagggagccatcaaagcaggtcagattaccaggctcctggatactgggtggggcttttataccagactctttctggaccttctgcattcctcctgcagtcctttggccaaataggaaaaattaggtctctctttacttactcagtttcctatattcaggtagattttaaaattctcctttcttcctctcatttctttttcctcttcccattcttctctctctcttcccattccttgcttctttttctttcacttctctctgtccataagtctactaacttccaaaggcccaggattgagtaggagcctgctctatatccattgtatgcatggagtcatcactccatgcatacgtgcacacgcatcaaaattctcagggcagtggtccaggggcaggggcctgtttctgacttccccttgcactttatwtgaagataaatgcttaggtatttgctgctcttcagcaaatgtagaaacagaattttaaaaaaacactgtgcacaaagcactttgactggtgctgatgatgcagaggtgattaagactccttccttgaaagagttcatgtctatgtggggtaacaaacccataagcagaacatttccttgcttttggggaatttaagtaagagactggtacacatgtgaatgaggccctcagcccttgttgatgtcttcttatctttgtcagcacaagtatatctccatcgcagatgtgcagatcaagaatgaagaggagctggagaagtgccctatgtctttggtgagccaaggaagccctacacaggaggagagtagaagaaaacctgtcttcagtgttgtcacagagcatgtgtgcatgcattcattcagcatattaggctgtaactgtgttccaggcaagacaaggtccctactttcatgatatattgaagttggggaagaaagataaaaaataaaaagttaagtaaaccaaactatcagagaatggtaaatacaatgaagaaaatttaaacaggatgacatgaaagaagcatcagtagactacttaagattgggcagttggagtaggtagacctctgagaaggtgacatttaagccaagatctgagggacagggatccagccataggagcatcagaggaaagagcattccaaacagagagaacagccttagcaaggggaaagcaggcttaagagtgtcagaggtagtgaaggaaggctgttgtggctagagcacagggccgagggctgggatcctagagatggagtcagagaggtggcctgaggccactttgccgaggacctgtaagcaaaggtagagagcttgaagttgactcgcagtcaaagggaaggcagcctttggagatttgaagcagkggagtgatatgatctgatttatgtttctaaaaacattagcttctgtgtaaagattggaccagaaaagcatagacgcactctacggagattagttagaaaacccttgaaatagtcaaggtgagagatgatgccgacctggatttggagatgtagctgacaagacttgcagtgcatttggatgtggatagagaggcaaagaaaggaatcaagaataagtaccatttgccaggatgtggggggaatatcaagagttctgttttggtcatactaagttttagatgcccattagatacccatgtggagctgcaggcaattggaaataaagtctagaattctacagagagggctgactttgagaaataaattcgggagttgtttgtaacacttataggcagtgttaaaggccgtagaactggctgagataacccagggagggagtagagacaaagaagagaatggaaggcaggacaaagccctggggcacaccagtatgttgagggggggatgtgtcaggaaaggagccagaagaatatgaaagacagtgaagtggctggaaatccaggagattatgatatcatcataaaagctaagaaagtctttcaagaaaaaaggagtgatctgctgggtaaaatgctactaataagtggcattatggtaagaaccaaggtgcccattggatttggcaacatgaagatagtgaccttgataagaacaactctaagtgaagtagtgggactgaaagcctaattggagtgtattgaagggaatgtcaaaaaaggaggtagatgatataaaagttttgtgaagaggagagaaagtggatggtagctgaaggaaaatgtgaggtcaaggggaggatgttttatagctgagagatactagagcattttttgtttcctaaaataagtgatccaagagaggggataattgcaggactgaggcattcaacaaagcaaatgggtgtgggatcctgagcacaagtaggagactggcctttgttagaagcacaggcggttcatccttcatgtcaagaaggaaggaagaagactcttggtagatttggtgttgagaagatgagtgtgtgcctgtctgattgcttctgttttctccatgaagcgtgaggcagggtcagcaactgtttagggatggtgggcaaaggagttggtttgaggagagagaagatggtatgaaatcagccttttggagagcaggaaggcaaacatgccaggattgccaggctctgttgaatgtccattkaggacttacrtccatttaagcagcagattagttgtgtgggacagagggaggcgggttattcttccctgcctcagggtctcatggcagtggccccttgccctgtaatagagggaccttgtaggaggaagggaactgcattggtcaaagatgacagtggcctgagcagcttattgggtccctgagaccccagcctccccactctgataaaaggcttagttaatgtcatcaacaggacagagatagttgtatatgagggagctggtcagaaaggagaaagtgatgtaggggctaatggagaggggaagaaaatcatttccatccacttaaaagcttctttgctaatattccttcctgtttctccagtccataggttacccaacttccttttaaacccacactattgagccacctacctctccttccaggcttacagaacgttctagagttttcagcctcagatccacaccataggaagtgcttctgtagcatctgttccagtatcccaggtactgaaaggtcatccaggccaacctgatggtcctattaaagagaaaactaggactcagaaaaggaatgtgacttaaccaaggtcacacagtgagtcattaacacagctagggtagaaacctagatctgactcccagcttagtgctcttttcaggtcacccctcacaaccragaaaaaaaagcctttggtcacctggaaagtggcattgccaaaccatgtatttcttgccatagggggaagaggtggtaccagagacgccatgtgaaatcctctaccagggaatgctgtacagccttccgcagtatatggtaaggagatggctaggccagagctgcccttctctgctgcaaggaacagacagctaaaaaccatttcaagtggacctgtccaacacttgagcttgtttcctgagcctttgcccctttggcaaggcattctctgacacatgcaaattctgagctttcctcagtgctcctctgatggtgctgttctccctagtccttctttgggaagggtggggaataagttggggtctctacaggatacactggggaccctcctccgagataagtastgtagtccctctgagatctgctgtggtctgtcatgtcctagatagcctcaggctgggagtggggaagatgccaatggttcrggttagaggaaagaaaagagtgggagaagttgggtttatgccgcccaccttatttctacacactgtccctcccactctgttccttccatcttcccctttgaaaagaacagtcttttttttttttttgaagtggagtctcactctgtcgcccaggctggagtgcagtggcacgatcttggcccactgcaacctccacctcccaggttcaagtgattctcctgcctcagcctcccgaatagctgggattacaggcacatgccaccacgccagctagtttttgtatttttagtagagatggagttttaccatgttggccaggctgatcttgaacttccaacctcaagtgatctgcctgtctcggcctccaaaagtgctgggattacagacatcagccaccatgccaggccctggaaagaacagtcttgaagcataacagccaatgcactccctctggctttctccctagcctcacaggcaggcctgtcaggactgggcacctgtttgcttttctggatgctggggagatatggtcattgagggaagaacttacagaatggctttaaaacactttttatagggcggttagggtgtggaagaatcacttccttgctgagtgggtttgacagtggtaaatttctttattttctacttctcagatcgctctgcttaagattctgctggctgcagctcccacctctaaggctaagacagactctatcaatatcctggcagatgtcctacctgaggagatgccgtgagtgcttcaacgggggcagctgctggatactagctgtcttatctgcaggctctctctagtccccactcaccttgttaacacttacagagattgtctccaaagagatctccccgtctctgcccaccagtaccccctttcccgtacagggctttctgcttggctctttttagctcagaactctggatctggagggtgacaccagtgccagcgactggctgcccaggtatttgggtgaacattgccaagggatgagcttgccaaaagagagacggaaacaaagagawcagtggagcatttcttcagataggctcataagtgggaactctggaggtttccctggcacagaagttcaagtttcccaagttctggctctcttgtgtatattgtatcagacccaaatacctggatccctacagggctccctttaaggccactctctgcactaataccttctctccccattgtagcatcactgttctccagagcatgaagctgggcatcgatgtgaacaggcacaaggagattattgtaaagagtatctctaccctgcttctgctactcctcaaacacttcaaactcaaccatatctaccaggtgagcagctaggagcacttctccacaggtcttgggtgtttgccaggccctatctctcaaaggaaggatgcaaagtcccttttaatcctgatgagcatctttcagccttttctttgtcctctctcagggaatccagccacccattgcatgagcttgaggtagggttatggagtgggaactgtcctagaaaggtgcagatgtctgtgtcccttgtaagttatcccagagttgtgggtaggaatctctagcttctcaggaatatgcccagccagtttttaaacaatgcaagagagaatgtaagcatttcacaaaaatgggggggtggggggagtatgttgaccgtagttttctatatgtgaagcacttttccaacatttgagatataattctgagaatagggcacagttctggctcttcagggccttgaaaccttataaaggatacagatatataagtagccaattatagagagataagtgcactgatactgataagcactggttgctatggaaacayctaatccagcttgaggtggagaagaaatgactcctaacctgagtcctaaaaaaacagatgttagccaggatatgggaattgttagggaaggaggacaggaggcatttcaagcagaaaagctaatatgcaaaagtccagagggggaagagagagagcaaagtacctttaaaaaccgtaattaaatgttgctggagttctgcctggggcggggaaagatgggcatggtctggtgacacaggaagctggaggaatcggcaaggagcraatcataatctatatgctaacacacaattactgggcacctatcctgtgcccagcaccctgttaagtttgtctaggccctcatttaattatctccaccctatgaagtagtcttatttaatacctcttttatacatgatgaaatcgaagctaagaaaaattaagaagctgctttcccrtaaaacattgtttgccatgctaaggagttyggacttggtttcatgggcattgccaagatatagggacaagatggggacagcaaatggatgctcctgtctgtgaggagaccacagggaaaaaaggaatgcttctcatttttgcccagaggctctaccccattttcctcctaagaagtcagaatcaagcttgctggtagaagagcaggtcctcagagtacagagaggcttctgtagggtctatgtccatggccctatcaaccagggtatttttccactttcatacattcgaagacatctttgggtatgtttcattgccctgagtgctcccacttttgccagtgtttgctgagcagcagcagggctgggaggagtagtggtaggtaggagatagtgtttctagtggaaagagaacagagaactgtagatgtgtgtttacttctgcttttcttggtgggaagtatgtggattcacagccagacaggtggatggcttgatgggccatgccagtgtgtcagtgaatcctgaagggccacaggcacatctcaaactgaaaaaagttttccatcagatgatactggatatgtgttggctcttttgtctggggctttggaaaataccctggattttacaaataaaataaataaccttccagggagaaaattttgaacagaagagagaagtagtcttggcataaactgactccactgctctaactacatacccagggccattaggcagcttagcttgctgcttggctacttgttggtgatcagagagctgaggatttaaaacaccatagttctctgctttttcaaccccatttctatactagaatactaggttctggatctggagataaactgtgtttgacactccttagtgtatcatgggtaacataacccccatgacactgctcttatggccacctgtcccactgggttgtcctatatacagaccacatctggatttgggagagcagaatggagtctccacattctggtattaagcctatcaaagacaccttagacttctcartgcagtatctgttggctgaagggctcttgttcattcatttattaaaacatttactaatattctttycccctttcccccatactccaagcggccagtatacttactgatattctaaatactaaggataatatggtacaccagacatactggagctggagcccagtggtccatttggttattatgtgctgtcaccatcctgactgagtgatgccagcagttgccaagagtaagctgcagctgtccctgctatatcaatcacagttgaaacattatgagccagaggtttggcatggaaaacgactccctcggggagccttcctttcctgttgggcttaggaacaaatctcacagcaattctttctatgtattggagtgggattttattttctggcttctttgttttgtgcttgtgacatatactgcagattatccccctccatgtaggatgggctggctgaagatgattcttcccatttcccagacaggaagactgataacacaagtggatagtagatattctcaggaatggatattagatttgtatttcctctctttttttcaaacatactttccattctcctccaaataagcagccctttctgctttgatttttaattcagtttgaatatgtatcgcaacatttggtatttgccaactgcatccccttgatcctgaagttcttcaatcaaaatatcttgtcatacatcactgccaaaaacaggtatgaactctggacaggtttatttcaaggggctattttggggtggttgagaaaattacatcatctcggagcctttcagttttcctggtgtccctagtccctcctgtcttagagctgtcactgttaaatttaatttccttgaagtgttagctgatggagtgtatagttttacttctttagggaagtatttatattttaatagttttaaacactgaaaaatgtcaygacttaaagaaatgaagtggcaatgatgaatttttagctctgtgtcaggtggatccaggggttgttttttgtgaaacaacctgcttgtctggccaggcgttattttagtataaatcataagttggagcaattggaacagttatactgtttcataaactgtaatgtattatacaaaatttgtaactgaagttacataatcgaatttactgaggtacatcaatttgtagtttaaaaaaataaggtatttcacattcattatttaatctcctcagcaatgctaagagttgttataagttttattctcatttttccaattaggaaacaaattcagagatattaacaaaattaacatgctggtgagaccycttaagtaagcatcagaggcaggatcagaacacaggcttccctgtgaatacaaattgctttccattcctccagccaagcagggacttggggattacagagtagatccttgttccttaatattctactttcacaagaactggaaatatgttaatcagtagagtttaccagaggcaaaattcctaaagtagaagtaagagggctaatctcatacttggggtgactagagatattgccacactagtttgtcagtactgcctgaaattccaccatggagaaggagcctacttatatgtagcttaaaacacacacacaccctatggagcctgaagtcatgagacctggattcgtgacctggatctgccacttactagttatgtaatctcaagcaagaaactgtttctctgaaccacagtattttcatctttaaaataaggatagcttttctgactatatcatagaacttttataagcattagttaatattggtatatgtaagattgctttaaacactttcccttgggggtaagcattggaggatgggtttttcctaacaatacggagacctgtgcactggcccctttaaaactggcacttcagatgtgctacttgagttaccagggaaaatgaaagtacargtcaggctgtgtcagggccacaactgcatgcaggcacctctgtgtatcagtcaacactcttggttaaaagtaaccaaaactagctggactacactcatgcagaatagcgactttgtcagaatgaaatgacgtgtcatcctgaggaacctaggacagcartgcagctctggacctcagggttggcctgtagtgtggggagcccagaaagcctttcacgtctatctgtaagacaccaggcctctgtatttccactccagtttcctctctcactgacaaatttatcagtctgcattgtttgcttctcaggccgcatagtgaaatacgtctatatgagctaaacatgccccacctcagagactgaattgactcttcaatccctattccagattccctgggttagaggttcactcctagatcaactgtggctaggggagtggtatacagaaattgaatgttccttctgcacccatggacctagaatgggaggtacagacaattcaatagatgtccatttggttcagtttggagttggaagagtggtagcaacagactacaccttttgctaaggttggcctgaacaagatgatcctcttatgcaccatctgtaagttttacttttgaatgatctctgagaacttggagatcacagctcattattgcagaattttctcatggctcttaacaatctagatgttctagatacttgtaaattaattttatgcccccttaggctagatttcarttcactaagagaatggaacaaatctatctttgatttcccacccccatttcctggtcgccggcaactactttgccatagggctttgtcagtgggaggtgggtggataggtggatgagccagccaagaatgttcatcctaatggagcagtacagaactggcaaccctgggaaaatccaatagagtgaatcaagatgatgaacaacattacaggtagtttgacactgccctctcccaagctgacccttctcctctcctaccctggtcccccaggttatcttggacaaaggtaaacatttctggccaaataaattgttgccttttacttgtatagaagttttgacttttaaaatgtagagacaggttcattatagcagtgtgaacttgtcgtcgtcaaagccactgctttgccaacatcctttatccatttccagctgcactagttcagataggttggtgttcaaaacctcatggaacatcagaaccagaaggggcattagagattagctagtccagattctgtattgtgtcagtgaagaagggagaagaggaaagagacagctgtcatttattttgtaactatgtccttgtcataatgcaatgccttatttcccctcctaactcatgcctgcttccctgggctcactacagagctgtagcttgcagtcccccactgtcagctattaccattcttgagttactagattagcctttctataggaaactgcccctgtctcaagcttcctttaggagtggcttctgtaatcattccccagagctcccagctttcagaaagatctggtgagagacacaggaggatcatttcatcctcccatcctcagattgttatccagtgggatgggtttgggcagtgtctgtgggagcagttatattcacacatacagttaaatgcagaaacacaaatgcactcaagtttacatgttcctttaaagaagcaaggagtgctaagaaaagaggctctctttctgctttcttttgcatctaccagatgggtgccagcctcaaagaactcattggttcctctcatgacaggaaaggagactggagctagagttgcctggcaccagagccctcatttcagctgaggtcactaagcaatttgggaaatggataggggctgctggagagaaataactcctgccctttccagatacagccaattcctgctgttgccrtttacctaaagcctgtccttatctctgcatcttacagcatctcagwcctggattatccttgctgtaccatccaggatttgccggagcttactactgaaagtctggtaagcagatggggatttggtagcctttgaaattgctaggtagcacaggttggcatttgctctttcatttcttctccaaccccttaatgccctggtttgagagtctcagatcaatgaaggtatattggcaagagcagagatgcagcaggggtttagagttgctgacccagttgagaaagatttggaaaagtttagcgtagcatttttcagagaagaggaaacagccagtgaaaaacactaaggaggaaaaggaatttagaaacataatgggaccgaaattgagcgtgaatatctatgctaaatgcaggacaatctcttctggtctagcacaaataattatctgtcttctttctgctgtgctacagggagttcacttcttattttcatataggtaataaaacctagcaagcaatgtgtacttgagaaaatactttgtctaagtctctcggaggcaaaagtctatatagccacaaaaggatagcccagaaagtttctcatcttgaaaacagctctaggcaaatcagaaaagtcactcacggttattcttaattccatgaaactgactgaacaacagccatactgaagatgaggtatctacctcatcatgtattgccatagctccttagataagccacaatccatacctccagcctgttgcattgtaattatgcatttgtgtctgtttcttaatttgactgtagaatycttgaatgaagaggtagtataatcatttttatatccttagagtmtagcactttgtctggtacattgaagagctcaataaatgtcaaatgattgaatcatggcatgcaccaatggttactacaaccctttgtcctccaattgtaattcctgcaaaatgttgagtcagaaaagtatattatgcaaaaatagaatgacaatctctgtggtacaggttttatagaaccatgggattcttggctggaggggacttaagagccatttgatccaacccccttatttcaaagatgagaaacctgaaggcccagtgaatgaagtgacttgtcatggtttactcctcataggtgacagagcctgaatcagacatgagtcaaaagacccatgtcctgagacaccaacctagcacccttttttaccactgggatagagagattccctggtcttatttagatgtggcctcagcagccaaagaagttggaagctttttattcctacagagaagtaataaattgtctaaccctctctatgttatttatgatgctattcagtcttttttcaagttttttattaaaaaaaattttttttacccacactacagagatgtagctattaaatcgttaaaacaactctatgaggttagtattactattttatagatggagaagttaaatagctaccagttgaaagtggaagtcagggtagagagacatgtatcccctgccattcagagttggaatgaagaatacattttccacagaaacagtggtacacagtagcattaaaattctgctattagtagggcatttcagaagataaagtcaacttttatggcctgaatttatttcttcctataatgtgttttttattttcagttccaaccccattggttcatatataggaattgataggaaccacactttcacatctctcccaattgacctttgggatatgtgcataaaattactgaaatgaagtgaacataataatttattatgttttctaagaagattttaatattattcagagtgaaagcatgtatttattcttcctgaaaaatagtcatgctaagtattttactactttgtgtgaagcaatagtggcacctggtggtttcatttagtaaccacagactttttgttttgcttgaattttgaatgagcccagtcatgggctgcaataactagtgagtctattccacataggtcctcagtatggtttatctaaactggtgacttctrtgctcagaaaaacactaatgttcatatgagtaagatatatctgtttttttcaggcttaacaaattgcaagcacagaaaaygtactggctatttgaatatatagaattttcttttcttttccttttttttttttttttttttttttttttgagacagagtcttgtgctgtcacccaggctggaatgcagtggtgtgatctcagctcactgmarcctctgcctcgtgagtccaagtgattttcctgcctcagccttctgagtagcggggactacaggcacgtgccaccatgcccagctaatttttgtatttttagtagagacaggctttcatcatgttggccaggctggtctcgaactcctggtctcagatgatccacctgcctcagcctcccaaagtgctgggattataggcrtgagccacaacgaatggctataggattttctttaagtaacttttgaagtttttttcctgatattaaaataaatatacgtattgcagaaaactggagaaacagaaaagtatgaggaagaaaaatactcttatgccacctacatatagccactgttaatattttgctgcaattatatatatattcactcatatataaacacattaacaaaactaagactttatacatagatatttcatttgacagcaaaatttaaatgttcacaatatcattttattaaacattctagaggacaatttttttctttcttttttgaagacagggtcttgctttgtcacccaggctggagtgcagtgcactcggcctgaagcacggcccatcrcagcctcaagctcctgggctgaagtgatcctcccaccttcccaagtagctgggtgtaggtgggaccacagacatgctaccatgccaggctaatttttgtattttttgtagagacggggtctttgtgttgcccaagctgatcttgaactcctgggctcaagcaatctgccctccttggcctcccaaattgctgggattacaggtgtcagccaccatgcccagctgaggacataattttaatttctttaaattttttatttattttttatttttatttatttattttttttgagatggagtctcgctctgtcggccaggctggagtgcagtggcgccatcttggctcactgcaacctctgcctcccgggttcaagcgattcttctgcctcagccttccgagtagctgggattacaggcacatgccaccacgcctggctaattttttgtatttttagtagagacagtgttgtactgtgttagccaggatggtctcaatttcctgacctggtgatccgcccacctcagcctcccaaagtgttgggattacaggcgtgagccactgcacgcagcccaggacataatttttaatagttacacataatattccactatttagtttcaaaaaggattctgtgctgttgacatttatttatgttttccttgtgtaactccaaaacaaacatccttgcatgcaaatcttttattttttttttttgagacagggtctcgaagttgctcaggcttgagtgcagtggtgtgatcacagctcactgcagtcttgacctcccagggtcaaatgatccttccacctcagccacccaagtagctaggactacaggcacatgccactatgcttggctaatttttaaattaaaaaaaaatttttttagagataaaatctccctagagacagaatctccctattttgtccagactggtctcaaattcttgggcttagtgatcctcctgccttggcctctcaaagtgctgggattacaggtgtgagccacaatgcccagctgcacatgaatctttgattatttcctttagattcctagaagtggaattattgggctgaagtagtctttttttttgagacagtcgcccagactggagtgcagtggcgcaatctctgctcactgcagcctccacctcccaggttcaagcgattctcctgcctcaacctcccaagtagctgggattacaggtgtgtgccattactgcccagctaatttttgtactttttagtggaagcagagtttcaccatgttggccaggctggtcttgaactcctgaccacaaatgatccacctgcctcagcctcccaaagtgctgggattataggcctgagccaccgctgggctgaggtagtcttgatttatattttttcagttttctgaatttgaactgaattcatttcaactttatatgaaactctaaacagcatgatgaacatgaaataaaggtgagctaatggcatattaatttctgaagtattcccattttgtcaaactaattagctcttagataggccatcttcaccaatatactaagtagtttcccctcccacctggtacaggaagtttaaaaatttgtgtatctccaaatgtcggtattcatattcaatccactaaactaggaaaaaattgaaataaaattccaaacttaaatgaaggatggtgaacgtatgattatgtggaagttaagtgtggtctttgaaaggaggttgctggagaaggcagtggatgtgggctcagtatgtattttgcaatgcttagcatctgaatggttgttgagagcagtggtatgaaatgtaggctgtgcaaggaaatgctttgggggatggaaaatattaaatattttatatgtattatattgatatctttttatttttttattttttatttattttttttattgatcattcttgggtgtttctcgcagaggggratttggcagggtcacaggacaacagtggagggaaggtcagcagacaaacaagtgaacaaaggtctctggttttctaggcagaggaccctggggccttccgcagtgtttgtatccctgggtacttgagattagggagtggtgatgactctttttttttcttttttytttttttmtttttatttttttttattgatcattcttgggtgtttctcgcatagggggatttggcagggtcataggacaatagtggagggaagttcagcagataaacaagtgaacaaaggtctctggttttcctaggcagaggaccctgcggcctaccgcagtgtttgtgtccctgggtacttgagattagggagtggtgatgactcttaacgagcatgctgccttcaagcatctgtttaacaaagcacatcttgcaccgcccttaatccatttaaccctgagtggacacagcacatgtttcagagagcaccgggttgggggcaaggtcatagatcaacagcatcccaaggcagaagaatttctcctagtacagaacgaaatggagtctcccatgcccgcctctttctacacagacacagcaacaatctgatttccccatcttttccccacatttcccccctctctattggacaaaaccgccatcgtcgtcatggcccgctcccaatgagctgttgggtacacctcccagagggggtggcggccgggcagaggggctccccacttcccagaaggggtggccaggcagaggtgcccccctcctcccggacggggcggctggccgggcgggggctgccccccacctccctcccggacggggcggctggccgggcgggggctgccccccacctccctcccgggcggggcggctgccgggcagagacgctcctcacttcccagatgcggcggctgccgggcggaggggctcctcacttctcagacggggcggctgccgggcggaggggctcctcacttctcagacggggcggctgccgggcggaggggctcctcacttctcagacggggcggctgccgggcggaggggctcctcacttctcagatggggcggctgccgggcggaggggctcctcacttctcagatggggcggccaggcagagacgctcctcagctcccagacagggtcgcggccgggcagaggcactcctcacatcccagacggggcggaggggcagaggtgctccccacatctcacgatgggcggccgggcagagacgctcctcacttcctagactggatggcggccgggaagaggcactcctcacttcccagactgggcagccgggcagaggggctccttgcatcccagacgatgggcagccgggcagagacgctcttcacttcccagacggggtggcggccgggcagaggctgcaatctcggcactttgggaggccaaggcaggcggctgggaggtggaggttgtagctagccgagatcacgccactgcactccagcctgggcaacattgagcactgagtgaacgagactccgtctgcaatcccggcacctcgggagaccgaggctggcagatcactcgcggttaggagctggagaccagcccggccaacacagcgaaaccccgtctccaccaaaaaaatacgaaaaccagtcaggcgtggcggcgcgcgcctgcaatcgcaggcactcggcaggctgaggcaggagaatcaggcagggaggttgcagtgagcggagatggcagcagtacagtccagcttccgctcggcatcagagggagaccgtggaaagagggagagggagaccgtggggagagggagggggagggggagggggagggagactgtggggagagggagagggctattgatatcttttttactttccgtacttatgagtacattcctacaatgttatttaaaactatgcatttatcagtaaacatacatgtatttcagagatatactgtaaacataccataaagtatatatccaytttccatgaggtatttatacaaaggaaggaccatggataaaatttttttagcattatatcaattttcctgttggtcactatttctataatgggttcttggggagattagaatctccaggatgatttttcaaactcacatacccaggtatgttagtgccccttactggggcacttgtagtttgttaaagtttcccaaacaatcttgaaatttttttttctccttcctccttatccacttatttcacttgagaaccattactctcttttaagctatccagatctatgtccttaatctrgcagtaatttatcaaaaacccatatgataagagaattattctataatggtgttggtaaagaaaatctaaaatagaaaaaacatgccaacaattgattggctaatgaggtgggtgatgccagatgcaagactgctgggcctaccacaggagcaagagagaagccatgcattccatctcaaggcatctgtgagcccatgtagacaccatgagcaaagctcaccctcctgagttgaaaaaatttatagacaagaagttatcattgaaattaaatggtggcagacatgtccaaggaatattgtggggatttgatcccttaatgaatcttgtkatagataagtgtgtggagatggcaaccagcgggcaacagaagaatattggaatggtggtgatacgaagaaatagtatcatcatgttagaaaccttggaacaagaataaataatggctgttcagcagagaaattccacgtcccctctccaaagagcctgttttactatgatgtaaaaattaggtcatgtacatttttatgttggactttttatattaaaaactttttgttaggccgggcacagtggctcacgcctataatcctagcactttgggaggccgaggcaggtggatcacctgaggtcaggagttcaagaccagcctggccaacatggtgaaaccccatctctactaaaaatacaaaaattagctgggtgtggtggcgggcacctgtaatcccagctacttgggaggctgaggcaggagaatcgcttgaacccgggaggcagaagttgctgtgagccgagatggcaccactgcactccagcctgggtgacagtgtcagactccatctcagaaaaagaaaaattgaaagattggcagtaacctaaatgaccactaatatagggccaactggttaaataaattatggtacatacttgcaatacaatattaggtaaccattattaaaaagaacgaggcagttcttttcaactggagaaagtccatgtaaatcacggaattatagaatgctcagacctgaagtgatcttaaagattagctagttcaaccttctacaggaaacaaggaaaatgatttacctaagatcatacagtcagggatgaggccataatccaagtattctggtatctattccaatgctgcttctacaaggggatgccttctctcccatattattctttgagatactgaggactgcaaggctttttatgcctctaccgtattgaaaatcaggatgaaggaagctcacagtagaaatacacttacttatcccatatgttttgtgtttcccttgcgtcttaaaaatttaaaagtctgttcgggcgcggtggctcatgcctataatcccagcactttgggaggctgagggaggtggatcacctgaggttgggagttcaagaccagcctgaccaacatggagaaaccccatctctaccaaaaatacaaaattagctaggcgtggcggtgcattcctataatcccagctactcaggagactgaggcaggagaattgcttgaacctgggaggcagaggttgcagtgagccaagatcaccccactgcactcaagtctgggcaacaaaagcaaaactctgtctcaaaaaaaaaaaaaaatgtaaaagtctccctgtctctattaaccacacaagatataacgtctgtagaacttggtctatttggggcaagccagactacctgatgcactacagtagaaagycccatagaagttttccttagaagcagacagatggttctcctgggacaatattgaacatttactgtatgatggagaatattatttataaataatgtttctttttttttttttgagatggagtttctctcttgttgcccaggctrgagttcaatggcgtggtcttggctcactgcaacctctgcctcctgggttcaagtgattctcctgcctcagcctcccaagtagctgggattacaggctcctgccaccatgcccagctaattttttaatttttttagtagaaatggagtttcaccatgttggccaagctggtctcgaactcctgaactcaggtcatctgcctgcctcggcctcccaaagtgctaggattaccagtgtgagctaccacaaccgacctataaataatatttctaaataagaaatttccctgaaactttttggctcttggtattaggtattaggaaagcctaataccctcaaaaactttggatgttcattccacattagatatatgcctgtcttgcttcaaattaatttgagggaggaggaggtaattttccattcaccagacagcagctcacttctacatgtcatctactcctacattctcctatcacattgtagatgtgaggaatttccaagatgttagtttggctgtcacgtgtgctcattgagttatatagcttctgacaccagtatgtatttgcaagccccaaattcacataaggactcacatttttatttctgaaaaatctttctatgagtagatacctgcttttaatctgacatccatctgttgtctctggttaggtgttcacaaactatcaagaaatatataagaaaaatatctgattagaagaaaccatctgccatttttccttccatgctgaagaattaagcatctaactgtaatatggtttgataaaggagggtgaaggttgataagataaaaaaaaattcaaccatagttgatatcagatccatccaacatagtttaaaatctaccagaattagacctaatcctaacaattacaaacatagtttatataagcgcaaagtacctgtatatgggggtaaaattctctcatctcttttctgatcctagagcaataagctacacaagaaaacttgcctgaatcaggttcctgtgctcatgtatcatctttctaaccaacacatgctgtaggtagagtcttccaggattggcagctgagggggtttttaaaccatgggctttggagacttcagtgtgttaagaaacaggaaggtgaggaggtattatttcatacaggaaggcctcacctaaactgaccaacattgacttccaggcttctgtgggaattaawgccttgtaggtattaagataatgatggatgttccctactataggaagctggagacaacagccagttctgctggaggaacctcttttcctgcatcaacctcctgaggctgctcaataaactgaccaaatggaaacattcccggaccatggtgagtgtggttttttacatcatggagttgtccatctgactgaatttttaaaagatcactagtaaatatttgtgtgctacctggtttgtgatctccgtatatagacactgaatgctacataagatttagcacctcataattctgggcacttattctatattagatgattacttatcagtccatttcttttcagggggctgaatctcaaaccctccctcagggcaactctagcagggaagctagcaatgttgtttggattacatacattcccaaatgatgcaagtgcaaggtttatcattgcaacattgtttataataatgaaagcttgkctgggctccgtagctcatgcctgtaatcccagcactttgggaagccgaggcgggcagmtaacaaggtcaggagttcgagaccagcctgaccaacatggtgaaactccatctctactaaaaatacaaaaattagctgggaaaggtggcaggcacctatagtcccagctactcgggaggctgaggcaggagaatcatttgaacctgggaggcagaggtttcagtgagccgagatcatgccactgcactccagcgtgggcaacggagtgagactccgtctcaaaataataataataataataataatgaaagcctggaaacaagctaaatgctcattaagcaggaccaactggttaaataaatgatggtatgtccttataatagaatattatgcaatcattaaaaagaatgagcagccgggctcagtggtgcatgcctgtaatcccagcactttgggaggctgaggcagaaggattgcctgagcccaggagtttgagaccagcctgggcaacatgataagaccccatctctattaaaaaaagtaaaagaatgaggcagttctgtactgatatggaatggttttcaagatatattcaataaaaaaaaccaggtatagaacagtgtggcaggatatgtagttggctaccatttgtgttaaaaaacaaaagtaggctgggtgtggtggcccacacctgtaattccagcacttcggaaggccaaggtgggaggatcacttgaggtcaggagtttgagaccagcctgaccaacatgatgaaaccccatctctactaaaaattagctgggtgtggtggcgggcrcctctactcaggggaggctgaggcaggagaatcacttgaacccaggaggttgaggttgcagtgaatcgagactgcaccactgcactccagcctgggcgacagagtaagactccatcttaaaaacaaaacaaaacaaaaaaataaaagtaatatatgcatacatagaattatctccagaaaataaacaaaaatactgtgacagtggaaatgatatgtgtggctgacaaaattttcttttcactttataccatatgctttgaatattgaaaactttgaacaataaaatatgaatggaatagttctctctctctctctctctctmtatatatatatatatatatatatttttttttttttttttgagacggagtcttgctctgtcactcaggctgtagtgcagtggcatgatctcagctcactgcaacctccgcctcctgggttcaagcaattcatgtgcctcagcctccttagtagctgggattacaggcccatgccaccacgcctggctaatttttgtatttttagtagagatggggtttcatcatgttggccagggtggtctcaaactcctgaccttacgtgatccactggcttcggcctcccaaagtgctgggattacagacatgagccaccttgcccagcccccctctatattcttgaagattaaatctaagtagagcctggaccatagattcctgaaagctccccaggaatttctgaggctagctaggtttggtttaatttgtctgtaaactggaaattccaagaaacgttagatctttaccccacccctctttcaatgaacagatgctggtagtgtttaaatcggcaccaatcttaaagcgggccctcaaggtcaaacaggccatgctgcaactttatgtcctaaagctactaaagttacagaccaagtacctggggcgccaatggaggaaaagcaacatgaaaaccatgtcagccatttaccagaaagtgcgtcaccgcatgaacgatgactgggcttacgggaatggtgagtcttcccaaagctcttgacttcctggagtttcctggggtttagacaaaactaaataaatatttatcactcctcttttggcatgaattgttacatattttagatgaaaaaatatgtgattataggtcaggcgctgatacaccaaactttaaggttatgcctcaaattctagtatgtacccttgtcctatgtaaactatgaaaatccgttttataaaacaagtaaattgagagataattaattgcctttccaaaacattcttttaaatgacagctttctccaaaagatttaaattaaaacaactttttattattacaaagcagttagaaaaaaagatagaaaatacaagtaaacaaacattttactatattatatttatgccatatttgtactatgcagaaattgccaccattaacatcttattgtatattcctccagatctttttctatgcatatacatgcatattttatcaaaatgaaagcaagttatgtatgctattttgtaattttctcttttaacattatctctaccttttcatgtcagtacattttcatttcatctaataaagttcatattcacaattttcgagttgtcccaaaatgttcttcatagctatttttccaagtcagaatccaatccaggaccacaggttgyatccagttgttatatatatgttaattatttttgttttctgttttttgtttgtttgtttttttgagagggtcgctctgtcacccaggctggaaagcagtgacatgataatggctcactgcagcctcgacttcctgggctcaagtgatcctcccagctgccaagtagctgggactacagatgcataccaccactacacccggctaatttttcaaatttttttgtagagatggagtctctccctgtgttgcccaggctggtcttgaactcctgggctcaagggatcctcctgccctggcctcccaaagtgctgggattacaggtgtaagccaccgtgcttggcctctaagcagtctccccacctccaccattaatgctaactaattgaagaactaggccagttgtcctgcaaaatactcacattctggatttgtctgttttcttctttgtggtgttatctactttattcgtctatctatggtattacctgtaaacttgaagttaaatctaaaggtttgatgaattcaatttaaacctttttggctgcagtatgtcctaggtaatcttgggaactgtacattgcctcacatcagaaggcaagatatttggttaaactaccagaacttgtaagattgatcagagtttggaaaaatttattttggagagcttttttattgttttgtatttgaccattatttccataattgtatttgagaatttttggtaatgacttgtctttgctgtgtttgtaacctgcttgaattttaaaggatgatgcagtaaagagttcagataactctacttacttacctggcagggaaaataccatgatcatgaagatggttttcccaggacaagtcttatccattttactccagatatgctgacccctgctattcccctaaatgtgggaaactcaactgcataatttgtggtgctgagggactgtcttttcactaaaaaagggtttagagaactaaaggaaacatatgataggcacataacaagcmaggatgcaacttctgctataagacataaagcacaattatctattaaattcttgtaaatttttaaaacacaaaaatgttttatcctgcaaatggcacatctgttgttgctgccattatgagcccaaactcacactacacttccttatgataaacccttgcatgtagaacatgagagatctgggagatttgtatcttcagccctgaaataagtgtctaagtgaatagaagcgaaacagattatctgttttctgtttttaccttcattgaagccgtcacctcatcatcttaaaataagctgacatatagatttatcatgtgctggaggagattccagggaatcaggaaaatcttcggtaattggtccattctgattctccatgttatacccctcttgccccttcctattccttgaaagctggctattccattcagatgggacactcatcccctaaggaaagctgcataaaaggaatttaattacccttttgggaaacataatacatataactagtaatacataaagctaataagaaagtgaaataataaaaaggaaatacaatagaagaagtccacctccctctgggccctcatttcctttctcataggtaaccactattaccagtttctagactacccttccaaagataatttctgcatatacragcttatgcatgtgggcatatgtgtattttttaaacctaagtgtcagcatgctgtatactaacttcatacattgctctttacaaaaaaaaaaaaaaaaaagaatttctgagcagttccatttttggaatcccatagaccatgctctgtgataagaggagcagtgtcttgcattgtatgtcttcttcttcctctctttccaacacagacatcgatgccagaccatgggacttccaagcagaagaatgtaccttgagggccaacattgaggcttttaacagccgtcgctatgacagaccccaggactctgagttttcacctgtggataactgcttgcagagcgtactggggcagaggttggatctgcctgaagatttccactattcatatgagctctggctcgagagagaggtgttttcacagcccatctgttgggaggagctgctccagaatcactgactaagttcttgtcaacaagcatcaatagatagaggtcagctccaataaactgtgctctgcctaccctgtccatacaggcgctgttaccagttcagggctcttctgggggctcttgggcctaaagatggtgcaagggtgggatcctgaatcacaacaaaatgatcaacttgccctggggtcagttgggtgcccagttggccttggaaatcttttggtggatcaattctagacaagctctttggtaggaccttttcctgctttagtcttggctacaaccaggctagactttgctggctctaaaagaggaaatttgttatggcatttgacccatggcattcatcacagatagtgggaggtacaagtcataaaatagggagaaagttttcttcttgctcacactggattcctaggacttatcagagatttggaaaaaccaactttgaaattaagtttgcattttaaatttcaaatttggaagcctctttctgaaatcattagctctaagattattttagagcacctgcaccttctttgtgaaggatgatgatttactattccctcaatactgcatgttatcgaaaagtgtgttgtgtaaagtgtttttttcctcattctgtaagagatctatattcaatgtgaaaattatttccttgtgtactctgtatagggcatggaatgctctgccatttttaaagagccacaaccaatatgaaataattaggtcctctctaaggatgtttcatgtttttcttaaatgactccagtcttcaaatggctgagcatactgcagaaaattatccttttcatctaattcattttttaaatgacaagttaactacaggaggctttatttattcagatggtatgtccacttgtggtcgtgatcaatatatttttctaattgaaaagtaaaagcatcacagcttaccatttttctttttctgcagtgttgattaatgatttttttcccgtttattgctagcagtttcaaagtgtcatgtggagatttagcaatactgtctctacttaaaagtattgcacatttcattgaaaatgtgagagttgatataccagcctctttatatttctcttttacagcagaatcacatacttctcaagataaacaaggtttttaaaaaagtttctgatttagttaggatcatatgctttttttttttttttttttttttttttttttttgagacagagtttcgctcttgttgcccaagctggagtgcaatggcacgatctcggctcactgcaacctccgcctcccgggttcaagcgattctcctgcctcagcctcccaaggagctgggattacaggcacgcaccaccatgcctggctaattttttgtatttttagtagaaacagggtttcaccatgttagccaggctgacctcaaactcctgacctcaggtgatccgcccgcctccacctcccagggtgctgggattacaggtgtgagccaccatgcccagcctcttcaagcttttttactatacatgttgcccctctcccccaacttaggcactactgaattttttatgatggcaccaggtcactttatgctgggtgatatagtcaaaatttgcttatttactctgcccctcgtcaaccacagtatcatttcaaggacatgaataaaatacttgacagtatccaaaggagctataccaaaatctaacaagtaaattttggattttgcctctttgtgctttaaagtaccaggatttctgtctctatggataggtcttggagaatgttaagtaatggatgaaactttttaaaataatttgtaaattttacctaagtaggacagtagtccttactgcaatcaaaataatttactgagcacaactcctgtaaattaatctacagtcaggctagtatgattttaatatgatttgagtaaaaagataattttcaaggaaagagtaatcatccatcaatttattataaagccagatagtattcaatttatgtcaagaacaaagaaattgcccttttaaaagcatgtacgtgaatgctttttgaggcacagaagtatgctaagctttaacattttgtatttatttacaacccttttctaagggaaggttacttctcagtgcagatggagaaactgaagcactaaggataaatgattagtttccaatcacatcatttttttccacagacttgctgggactagctttcaggtattgacagccagccccatatattaaggtaaccaggttgaatcttccaatttgagaacccatgtatgggttgcagtgagccgagatcatgccactgcactccatcctgggcaacaagaacgaaactccgtctcaaaaacaaagaaggatataataaagttaatatataaaccatgtatgtggttaggaataaattcaaattcaccagtctccaatggtgattacttttactacatagaaaaacattttagtgacttacagaggatttttatttgtgaatatttcagtaaagtttgtgttgattgttgataacactgttcatctactgaagcactttaataaaaataaaatgagctggaattagaaatttggtgtttaaattcttcaacacaagagaaactcaaagtcatatagaaaggaaggatataggccgggcgcagtggctcacacctgtaatcccagcactctgggaggccgaggcaggcagatcacctgatgtcaggagttcgagaccagcctgaccaacatggtgaaaaccccgtctctactaaaaatacaaaattagccgggtgtgatggtgcatgcctgttatcccagctactgggaggctgaggcaggagaatcgcttcaacccaggaggtggtggttgcagtgagccaagatcgcgccactgcactccagcctgggcaacaagaacgaaactccgtctcaaaaacaaagaaggatataataaagttaatatataaaatattattttacccccagagtgttccctgagaatagactaatacaagcaataaactccagatcttagtgacttttgacaaacgtttcttgttcatgggtctgggagttagccgcagctctgctcgactcaccttggcttgcttggcttggctctgctccacagtcttctttctctggcactagactgatggaatagttcctacttgggacatacactttttatagtgaagagcaggagcaagagacaaaccataccatgcaagcacattcagactcctgcttgaatatggtgtaaatcaaattgttcatataccattgaccaaagcaaatcacatggacaagcctaacatgagactggagaagcatactctacctacagagtggcaaacatggatggtataatactctcataagtagggaaagtgaattggtcatgaatatctgctcctatattacacacaacacacagcccctcctcaaggaagaccaaaaatcttatccagtcatgtgagacctaaattctaggatctcatctagatgaaggtgtagatgaagtgtttcttgatcctgtgacttgttaacttaaacaacaagatatatctacctaaaatgaacaacagagaccaactctccaaagcagagtttatttgggaatagcaggggattgcaatctgggatatgcatgctatggcagaccacaggctcatccaaaggagttgtggcaaaggggaagcttttaaaaacaaaaagaagtccacgtaaactgttttggaacaaagaccattggttacaggggcttgttgcagagttggcaatagctcatgggtggagacattcattgttagttgagtatccttgtgtaagtgacttatctggaatactgtggttttgaggaattttttgcatagttcccatcataggcatactcgaatgagggcccctcctccatggcctcagctccgttttgtttgttagatttgacattagtgactccattttgataattttacagttaatgcattgtggtggtcatttcacaatgtatacatatatcaaaacaagttgtattccttaattatataaaatttgtgtcactttgatacccaggctacatgaagtataaacctatgtgaagtataaaacttgccacactgggactctgggaacataggtgataagtatgtgtttagggtggtttgcaggggcaaagaaagtcttgacatgatttcagaaatcctaggcacaccaattaacatctgctttacctacaataataggtccaggtcagactttttgataatagtgtaagtgtgatagaatgttttctgtagtaaaagaatgttttacaaaatacagaatttgctaaaaacatttgtgaaacacccagtagattctttagcagctggtactattctgacttgtggttaatgctaacacacagttggccttccacgtccgtgggttccacaaccatggattcaaccatggtggatcaaaaatatttttaaaaattgcttgtgaggccaggcgtggtggctcatgcctgtaatcccaacactttgggaggccaagatgggcagatcaactgaggtcaggagttcaagaccagcctggccaatatggtgaaactctgtctctactaaaaatacaaaaattagccaggcctggtggctcatgcctgtaatcccagctactgtagagtctgaggcatgagaatcgcctggagacggaggttgcagtgagccaagatcataccactgcactccagcctgggcgacagagtgagactccgtctcaaaaaaaaaaaaaaaagaaaagttgcttgtgtactgaacatgtagtcttttttttcttgtcattattccctaaacaatacagtaaaacaactatttacatagcatttacctaatattaggtattataagtaatctagagattatttaaaatatacaggaagatgcacatagttatatgcaaatactaccccattttatatcaaggacttgagcatccaaggattttggtatccttaggaggtcctggaaccaatccctccagatactgagggacaactatattgtcttagtctgttttctgttataagactaccagaaattggataattttatataaacaatataaatgtatatggtttacagttctggaggttgagaagtccaagagcatggcgctggtatctggcgaaggcctttatgctgcatcatcccatggcagaaggcagaaaggcaagatagcacactagagagaactaggaaaagagggctaaactcatcctttttcaagaacccactcctgagataatcaacctattcccacaataactccatcaatcccttcatgattgcagagtcttcatgatctaatgacttcttaaaggtcccacttctcaacatgattgcattgggaattatgcttccaacacacaaactttgggagacacattcaaaccatagcactttttttttttttttttgagacagagtttcactgttgtcccctaggctggagtacaatggtgtgacctcggctcactgcaacctctgcctcccagattcaagcaattctcctgcctcagcctcccgagtagctgggattacaagcatgcaccacaacacccggccatagcacatattttatatgatgtttttcaacattagagacctcaaaaagacatttgagagtaaaaatggctacagtatgattttattatctatacattaaatataaactttatctgcctctgagtctcctcctttcccattttctctgaaccaaaaaaaaaaaaaacaaaaagaatgaagagaataatttacctcccttatctcaccactcaacacagattgtttatatggtggtggtttaacaatataaggaaatgtgtaatctataaaatagagtagaacaaagagatcaaagctctattgatattggtgaagcattgtaacaacatgcaaattatttctggaaatgttggtataggtaagtcccaataggtgatgtttggaaaacacatgagttacatctcaaaaaacaacagcaacaacaacaaaaaaacaaaacaatagaaacttattctctctctcttttttttttttgaga

SEQ ID NO: 98231 - DNA, 112955 bp, Homo sapiens
aggctggtaccctgatctcgaacttccagcgtccaaaactgtaagaaaataaatttcccttcttcaagctggtattttgttatggtaagtcgagctaagattttgatgaagttggacttcagaattcttggtggaagtgacagaaacttaatttgaattagcttgagaaaaaaagaatatttcttcaaagaactctaggaaagaaaacaatgggtattagagtaaaaccactggcctctgacacactgcctttgcaacttctccccaaagtgcagtggctcactttaccctgaggttggaggatgatgtggggtggggtgggtgtcaagaggctacaagagaattaaggaggcctctgtggggccacaacctacgcttattattgtaacctgaggttcaccacaaatcatgggtgccttctcatggcagatcaaagcttttttttggcggggggtcgggggtacagaatcttgctctgttgcccaggctggagctcagtggcacgatcttggctcactgcaacctccgcctcccgggttcaagtgactctcctgcctcagcctcctgagtagctgggattatgggcacatgccaccacgcctggctaatttttgcatttttagtagagacgggatttcgccatgttggccaggctggtctcaaactccggacctcaggtgatccactcacctcagcctcccaaagtgttgggattacaggtgtgagccacctcgcctggccagatcaaagcttttatggaaggcttcatggcattgcctgtagagaactggagtgcttgaggtacagccctcaatctttggataatctcaccccaagtcagtaaaagaaacactcattatctctttccttctttccttcagagaatccatatttagcttgcttgcagaaggaaggagtcagggctctttttgttgggggtgggtttggtctcatgaaactttgcattagagtccagttttcctagggttaccattgtgcctaatgacaaaagttatggggttttgatattttaaatattttatatatttctaatattttatttcaaatgtattttctaacaatattcgacatctctggtgcatttatttggtgcttaaagatgcgcgtctcaatcactcctttgtctttagccaccaactagaaactgacaactcgcaaatctggattttcaacccaccccctgggcttcagtcccacacatgctacagcctgctggtcttggctgtctgttaagtgcctcaatattcaacatggctaagattaaacttatcttcatcctcatatccctttctgtttccataaaagccatttcttcctttaggttccatatctcaaaagcctgggttttcttccctcttgtcacaccttgcagcttaagtaatcaccatatcaagattcttcctctgaagttcctaaatacctctctatctccatgcccaccgccaacactttactccaggctaccatcactcctcaccacgattattacaatcttttcttatttctgttctagccaccttccctgcccaagccatttcatgtcaaactagactttttttttttttaagactaaggaacaaagaaacatgtcacttaagacatttgctaagcacccactatgtatcaggtaatggcatgaggtcacaaagatgggttaaacactgtttagcttcatttcttactcctacccaatgtcaactctatccttcagctactttcagtcttcagaaggtaattttttcccttgcctccaggctttcatactgttgcctctgcctacaatactaaaccctttgcctaattgcttcctatttatctatcagtctggtctcagtttagacataatttctccagatggtgttaccaatctctctactctgggttaggtatcacctctatttttttttcttttttctccaactgttagctaaatatccatgtggtgttttaataattcctaaccatagaacttttaaaaataagttttattgaaatatagttcacattgccataaaactcatccttttaaaacatataaaaaacatatgccagtggtttttaatatattcatgaggtttttctgaacatcgtcaataattccagagcatttatttccatcaatacaaaaaaaaacaaaacccaaaacaaaaaaccaaccctggaaatgaccaatctactgtctatatttagaattttgcctactctgaacattttatgtaaatagaatcgcgtaattaatgtgccttttgtgtctggccactttcacttagcataatttttcaagtttatctatattgtagcatctatctgtacttcattccttttaagggtcaaataacctttcattgtatggatatagcacactttgtttatccatgcatcaaatgacggatattggggctgtttctgccgtctattatgaataatgctgctatgaatatgcacgtgcaagtgcttgtatgcacacacgttatcatttctcttgagtatatacctaagtgtagaactgctggttcatatgataattctatgtttaacatttttttgaagagctgccaaactttttcaacatggccgcaccatgatacaatcccatgaatagtgcatgagagttctgatttgtccacattctcaccagcatttatcattttttaaattttagtttttctagtgggtgtgaagttgtatctcattgcagttttgatttgtatttccctgagggctaatgatgagcatcttttcatgtgcatttgtatatcttcttggaagaaatgtctattcaaattcactgcccatttaaaaaactgaattatctgaggccagacatggtggcttacgcctgtaattccagcactttgaaaggctgaggcgggtggatcacttgaggtcaggagttcgagaccaacctggccaacgtggtgaagccctgtttctactaaaaatacaaaaatcagccaggcatggttgtgggcacctgtaatcccaactacgtgggaggatgaggcacaagaatcgcttgaacccaggaggtggaggtttcagtgagctgagattgtgccattgtactctagcctgggcaacagagcaagactccaactcaaaacaaaaaaacaaaacacacacacacacacacacacacacaaaacaaacccaaaaactgagttgtcttttcattgttgaattgtaagagttctttatatactctggatactaatcagttatcagatatgttatttgcacattcccttccatgttgtggactgttacttcactttcttgatagtgtcctttgatacacacaaaaaaatttgttttgagatatggtctcactgtttcccaggctggagtgcagtggcacaatctctgctcactgcaacccccacctcctgggctaaagcaatactcccacctcagcctcctgagtagctgggattagaagcacccaccaccatgccctgctaatttttttgcatttttttttgtagagatggagtctcatttcattacccaggatggtcttgaactcctggcctcaaaggtaatcctcttgcctcggcctcccaaaatgccgggattacacagttgtgagccaccaagcccagcactaaatttttttttaatgaatgaatggattaggtaaccaaaatatcaagtttcttttttctgtctaaaattgtatcaactctgtgcagtaacattgttttcatcatgttgttggcagttaaaaattccttgactaacaattcagaagcaaacgaatgcacaagatgatagggattgtgtgatttaacaggttttggagcaacactgatctggattcaaatcctaactttaagaactgtatccttgggcaaattacattactatttttctttctttaaaatgcgtttttttgtttgttttttaagtgccaggggtttatttccctcacatgtgggatggctcacatacacaacacacaaaggcgttggcaccgtgggagagggcagcacccctggcttctgcttggcctcacagtgtaagaagggagaggatgggttctctctcctcccctcactagggcctaggggacccaggagcaaattccatccctttcacctctcagccaaggagaagccacattggtgacatttagttccaacaattacagtaagtggagaagggattggtctggtcccgaccattacacggtgaaggtatacatagtaaaggaagatacagtttggatgaggccacaatagggtgcagatgacaccatcagaagcatgtgcaggggaggggcagtcactcagcttctgggctgcttagttcctgggttggcaggaagggtagggaagacggatggggctcattgtttggcattgatgatgtctacgaattcgggcttgagggaaacaccactcatgaggaaggcagccacgtcaggctggctggccagctccttgcaggttgccttggtcacagagcctccataaatgataccagtgctctgagccactgcatcagagatgttggacttaagccatcctcggagcttcttgtgtacctcctgggcctgttggggtgttgcagtcttgccagtaccagtggcccacacgggatcataggccaagatgaccttgctccagtccttcacattatctgcgatgacctttgtctgctcaaaaacaaccttctcagtgatgccagcttccctttcatctagcttctccccaatgcaggcgattactccgagtctctctgccagagcatgggccacttttctgcccaatcagctcatctgactccccaaagacacgccttctgagtgccccaggaccacaccacccacgtgactcctaagtctttgaccatgccagggctgatctccccagtaaaggccccattagtcactttgtagcagttctgcggagccacagcaatcttgggagctagcttctgccgggccaactcgttatacgcagtggcgagagcacaaatcaccttggtgtcggcaggcacagtggccgcgttctgagtgccgatgagctcccccagacatttcttccgcccgttcatcttccagttcctccccacgaagaacttcctggagggcgccatggcgctggagctgaggcgctgtaggtcagtgtcagcgcctaaaacgggttttattaatacttggcaaggttgttaggcggattaaatgagatcttgtaactacagtgttttacacattgtgatcatttatcaaatagcagttatttactagtgcaaaggactagcagcaatgttaatatcaatatactgttaccttttgtccctaatttctccatagtacagtttccaatatttctgttttcttttgtgaattgttagaccactggtattggattcggacagaaaggcattcacaaaaatacagttcaatgtgagaataaccctaaagatgtatgcaaaatgctctggagttagagcaccaggagctgtaagcagaatgaagacctcttttgggcttaagaactaagtaaaggggagctgaacaaagattctaggcattttggatttatctcaatgtggcacatatttcaggtttgtaaaatagttcagttgactacgtgtctgtctcctccactagagccagcgtaggtaccatgtcttaagtcatctttggatctccagtactgtggccactctagggagagttgaattgacgcgccttgatcaccagggcagaaaaggattctctggagagggatggggcagtcggaaggggtaggaaaaacctggatccgtttccaaggagctgaaggcagctcagatatggggcacatctcggcgctaatgtcccaagctgctagcgaggaacagagagaacaccggctcttcttcccggctcctggcccggcagggttacttccgggagggggcggggagacaagaggaggcgtgccgggaaggaggccgtttgtagtgtaccaggcggaagtgtgccaaaggtatcggtgctgtcgcttccggtccgggtaaacgaaccttaggtacactggtgtgtggcctcccaagataggcttctgagggcaagtcagcgactgaagacgggagcgccagaatctgtggactcaagagtctagaatcaagtggaaaaaccggaaaaaaggccaggaacctgaatacgacctaatagctgtttccgagggggcaacttccacggagavccttctgccctggtaacggccaaagaggaggagatggcgccagtcagggagcggccgtggcccagacagtgaggaagcgcgaaggcggagcaaccgaggaatcctccggagaagaatcagagccgtcgctaccgccactaccgccaccaccatggaaggagcaaagccgacattgcagctcgtgtaccaggcagtgcaggcgctttaccacgacccagatcccagcggaaaggagcgcgcctctttttggcttggggagctgcagcgttcggtgaggggcccagagaggcagttctgtgccgcacggccgggrcggggtggaacctaggctccgggggagaayctgagcccggcagttgacctcgtgaggtcctccttggggaggagctgctgtcgtggggtggggctgcgaagctacatctttgccgcttttgggaaactagtcgcacctgatcggtcgcgawctggccctttccccacccggcagaatctgatttgtaggtcttatactcttcgattgtggcatcaatctaatcttgtttaagttctccctttgccgttgcttcttgggccgtgcttttccgttttgtcttcctcccaccaaatccaaccccagtgtttctccaccttccgcttaagaaggctttattcgtctcccctccgtgtccaagacttgcatctggcattttgctcccagtcgtagccttatgcctcactctttttgcctattttcactccagtttgagtctgttcttctcgaaacttctcaggtttctagattcttactcatgcgagttttccccttgctttggagtggcaacataatatgaagaaaaaacagtaattctgctttcagaaaatctttggagttctcattttgtttcrtattaatcctctaaccttgttatttctctggcttttagatttttatttataagatgggtatcactgctgctttgattattccatataaaactgtatgtgcatccggtgagatatttaattgtagcttatatctgttgtatttctgcattctttgattcatgttttatgcttcctgccctaattttcacacctttgctgtgcttcatttctgtgtaaatgtgtattcttggttatctggctgacttaggttctaatgtaggatgtactttaaaaattaagtactttgaaaactaaagaggctttttttacaggctgacaaaatactcacctttacctttatttttgcattttatactcacaaccatattttttttggcccccttccctttattttaactcataactgatacttaaaggtgctctgccttattaaatcagctcctaggctgcaagtgcataatatttaaaaatttgcaactttgactttttaaaaatctggtcttggtatggagcaactttgccttttttttttttttttttttgagacagagtctcgctttgtcgcccaggctggagtgcagtggtcccatctcagctcactgcaacctcctcctcccgggttcaagagattctcctgcctcagcctcccgagtagctgggattacaggtgcctgccctgacacccgactaatttttttttttttttcttgagacagagtctggctctgttgcccaggctggaggagtgcagtggtgctatctcggcacactgcaacctcctcctcccaggttcaagtgattctcctgtctcagcctcctgagtagctgggattacaggcacacgccaccacacccagctaatttttgtattttttagtagaaacggggtttcgccatgttggccaggctggtctctaactccgacctcaggtgatccgcccrcctcggcctcccaaagtgctgggattatagatgtgagccatcgccccccgctgcaactttgactttgaatattaaacctaaaaaactggcacccaagtcctcttcagaaaataaaggaatacgactcactgtaggctacacaagaaaatcattcacatatggtctcatttagtgtttctgtgatctctggagagtcaacaattccctgatctttgtatagttttctaaagtgtaattaggagaagtgctacactatactaaaaaagtaatctctttctaattaaacctgcttgttgtgtgtattttaaatcaatatttgagtgcttaccatgtgccagcaactatgctgggtgtttggatttggaaatgaaccagacaaaaatctctgcttaccacagaaggtagttgtgattaaatgagttaatattctacgaagagsttagaaaagttcttggaacatagagattaaaatgttagcaattgttatttaartattagtcacttttctctccttactttccaatactctattacaaccttacatcatcttcaccatcacagttaatagtcagagtccagacaggaacagatggcacacttgacaggataatctgagtttattttataaagatactattataaagatttaggtatagtggtgtgacaagaaatagtttggtaacctatagctgaacggttaacatcccataaaagagggaatagttacttgaaaagtatggagttggctgccttgagaggaatggtgactttcagccgaagggacatagctagtttcaggtgaccttgagagaatgaagctggaggaatgaatatcctgaccctgttctcttaatttcttgctgggattccccattggccaaacccaaccggaagccaggggcacagtgacctgttggtaaagtctatacaggtcagcctattggagcagaaaacatgatagaggagggtggaaaagtggatctggaaaatatccagcagtaacacatcacgtttaggcaacttcagcatctggattgacagttcagctaacactttggccttctgattcctttacctcttcattctctttagccacctggtcacacaatcacaccctggatcttgtctttactaaaaagccaccacccaggctgggcgygcagtggctcacgcctgtaatcccaacactttgggaggctgaggcgggcggatcgcttgaggtcaggggtttgagaccagcctggccaacatggtgaaaacccgtttctactaaaaatacaaaaattagctgggcgtggtggtgcgcacctgtagtctctgctactcaggaggctgaggcaggagaatctcttgaacccaggaggtggaggttgcagtgagctgatattgtgtcactgcactccagcctgggcgacagagcgcgactccatttcaaaaaaaacaaaaaagttgccagccaggccaggcccattggctcttgcctgtaatcccagcactttgggagtccaaggtggaggatcccttgagcccaggagttcaagaccagcctgggcaacatagcgagacctcatttctacaaaaaaataggaaaattagttgggtgtggtgacatttgcctatagtcccagctactcaggaggatcccttgagcccaggagttcaagactgagtgagctatgatttcgctactgcactctagcctgggaaacagcaagattgtacaaaaaaaaaaaaaagtcaccacacctccaaatcactgattcagacattctgctgtgatcataacccactgttttccagtttgctggctcaaaaatatcaaataatgtcacctagttttttttgaaatctttatgtagttttactaatatttaagttttatttttaaaacaaaattttgtggaaccttttttttcctgttggtaatcaaatacctctttttttttttaacattttgttttctgggtatccacaataagtcaccctcaaatctcagtactgtaaatatcctcattgttcagactggtgatttgttttcttttttggctaaaggaaatatgtatcccaagagccctccatttccctgctccagtctggcctggttcgctaggtctgttggataattactgtcatgggattccataaacactgtcctagggaattccctttgcctctttgttgtgctggatccactgattcttggattccatgatgttttcttgggttactcttccatttaatggatcatcgagaagggaaccttcatcctttctctcattgcttttctgttggtctgtttttcttgggctgcttttaccttgagttctctagtcagcctgggggttataagctagactgccagtgttctaaagccagttcagggaatgaagccaggggatggatctcacaactaagtatgtaggttttaatttaatctcttgtttttcagcatgatactcctgtctttagctgagtctgttgtctaagagtccagagaccacctacttcaatctttccacagtaaaccttgagtcttctgttatggtgggagagtagtagcctggttgctcagagtcagagaggaaatttaggagtctactgcttcttacacagattttgacccttttatttatttaaacttttttctttttttgttttaaggctgcattactagccgattccccccccacccttttttttttttttttttttgagacagagtctcgctgtctcccaggctggagtgcagtggcgccatctcagctcactgcaagctccgcctcccgggttcacgccattctcctgcctcagcctccagagtagctgggactacaggtgcttgccaccatgcccagctaattttttgtattttttagtagagacaaggtttcaccatgttagccaggatggtctcggtctcctgaccttgtgatctgcccaccttggcctcccaaagtgctgggattacaggcatgagtgactgcgcccagcccaccccacctcaccctttttaaaaaaagaaaaaaaagaaaagaaaagttggggtctcgctatattgcccaggttggacccgaactcttggtctcaggcaatcctctctcctcagtctcctgagtagctgaaattacaggtgcacaccaccacatccagctccactcctttattttttgttccgcctgtgcatctgccttcagatgtacctgtgcttccaattccccagtcttcctgggttttgcaacatgaatagtttgtcccttgccttccctattctcgtctcatcctccctccccacccccaggcaaatatcagccttttcggatctgctaagacagttaacactgtcctttagctttccagtttccacagttctattgatatctgtcacctgtttccattttctttgtctttatgtgtttttgccttttttaaaaaagatctttactctgatttttattggatttttggaaggacctgaaagcagacagctgtgttcaatcagttagtttagtcattttaaacagaagtccctgcattagttcttgaattttatcaaaacctcagttcattgactgttccttacttcttctttattaggtcttcttgtttttacttctctccttaccaaatgtggattccaagatctatcattctagtcattttataaatacaccatcacctttcccctccaatttggtcagacttcagcatggttgtatgcagctgcttctcctcttrtcagatctaggtgctttgcatctctcaatcttctgaaatttctgggaccttgatcttttggtttatcctatgtcttgtctgcatctttagactcctttactgagtctttcccatcagcatccaaatagctgaaatatttctcatagtacacaaatattttggggtagagtggatgccgcctttgcccaactttactttcttctctgcttttaccctttcccaaccctttcttcaaatgcagaaactaactcatcttttgaaagcccaacctaaattctgctttctccttcaaggcttacctgcttctcttcagccaaaagtgatttcagcccccaatgaatgcctagagaactttacttcattgtgtttgcctttttataaacctttttgaaaataagtgttttgcctcccctactagactgggattcttgtcacatttgtttatgtagtccaatacccatagttgaagaaataaaccatggttattaagataaacaatcaagacacttcacacacaggttcttaaaaatgttgattgtcagaagtgcatacatgcagatactcagttggataactcacatttttctttatctgcgagttttatttatttttgctgtcacttttcaccatatacatggttaaaaataaacaatattcagcacctttaatgctcttcagtctttccagtctttttttttctttcttttttttttttaaatcctttatgagatgtatatgttgccctcatttcatacttgcaaatattcaggtacagaaagggagaggaactttttgactcaataaggctctctttgtttatttattttttgagacagagtctcactctgttgcccaggccggagtgcagtggcaccatcttggctcactgcaacctccgcctcctgggttcaagcaattctcttgcctcagcctcccaagtagctgggactacaggcrcatgccaccatgcccggctaatttttgtatttttagtagagattggggttttgccatgttggccaggtttgtctcaaactcctggccttaagtgatctggccgccttggcctcccaaagtgctgggattagaggtgtgagccactgcacctggtctatttatttagttttttgagacagggtctcactctgttacccaggctgtggagcgcagaggtgtgattactgctcactgcagccttgctcacctgagcctgggttcaggtgatcttcccacctcagcctcttggacagctgggactacaggcatgcaccaccatacctggctaatgttttgtattttttgtagagtcagggtcttgccatgttgcccaggctggtctcaagcccctgggctcaagcacttctctcacctcagactcccaaagtgctaggattacagacatgagtcactgtgcctggccaaggctctctttaagtggtcactaaatggcatttgtaaccaaaagtaatgtgygtggtggtttttttctttccggaagattttgtctactggaacaaaagcgtgttttaactgtagtaataactatagtgttttaacatccatttgaaattggtaaggcatagaatttgtgtggtttgctaaaaaactactttcaagaatatgtatttgtgaaactattatccttattcttctctaccaccccacctaactaatccgagagtaattgagtatagttcgaatgacctggtgacagtagacgtggtatagaggtataatttgaatatgctttagcctgtactgtgagttagcatcttttctctttctctaatatttgtataaaacagccattttctgaagaatctgtattcattgctctaaacttccaccaaaatttttggagatgtacagccatggttgttttatgtgatagatagatatcactgataacttcaaagtgttctgaaagagagtattttgaggcagatcttaaaggaatcttagtagcctgtcctgtatatttagtagtttcatttgtccacccctactaaccaaaattagtagaagttgtagagagctattgaaggaaagaccatctcttcatagggccaattacttaagcgactcagttataagtttttaatttaagttgtaagtaggagataacttttacagagacaatctttgggttagatattacctcaaaagttttatagttcagtatggaaactgaataggcatgcttcagcatgggtgtatgcagctttttgatggaaagcatcaaaagcacaaagcagatgaagtaaagtcatgctttgatagactaagttggcattgtcatgtttggtttatcacatgtccataggaattttcttcttagatatcatatcagaaaggtcttgggttgatatggtttggctatgtccccacccacatctcaccttgtaataataccccccgatttgtggcaaggtggggccaggtagaggtaattgaatcatgatggggggttccctcatactgttcttgtggtagtgaataagtctcacaagttctgatggttttataaatgtgagttcccctccacaagctctctcttgcctgccgccatgtaagacgtcgctttgctcttccttcgtcttccgccataattgtgaagcctccccagctatgtgaaactgagtcagttaaacccctttcctttataaattacccaggcttgggtatgtctttattagcagtgtgagaacacattaatacatgggtcatggaatatcagcttcaaacttctttgctagtacttttcctttttggaatttattgattctttagcctggttataaaacctagggtttttggcttttctctggtcattactgatttatcttgaaagtttaggcattttttgtgtgtgcttatgcttgcaccttccagtcaaaacatgcttttgaaaggaaagccttctagaaaatagaaaatattcctatacaacttcagtagatgagttcagtctaggaatactctgtgccttgcactgatagaaactgggagtatgtaaataatgaaaaccaaagatctttctcccagagagtgtaccaatgtagctgtgtcatccagtgtagtagccaccagtctagtgtgactatttaaacttaaaattaagtaaaagttaaaatcagtttcttttttttttttttttttttttgagacggagtctcactctgtcactcaggctggagtgcagtggtgcaatcttggctcactgcaacctccacctcccgggttcaagcaattctgcctcaggctcccgagtaactgggattacaggtgcatgccaccatgcctggctaattttttgtattgttagtggagatggggtttcactgtgttagccagaatggtctcaatctcctgatctcgtgatccacccacctcagcctcccagagtgctgggattacaggcatgagccactgcgcccggcctaaaatcagtttcttatttgcacttacccacattccaagtactgtacggtacaaatatagaacatttcatgtctttgaagtattggagtctatgtttgtgattttgtgacagtatttctgttgccatggtagtctgttatgtggtggcatttctccatattttgattagtttcttgtcttgccaggccttgggccaaagttgatagtttgatttaggatgtaaaattatcagggtactactatattttctaattacaatagtttttccaaagtttttcagatatttcttcagcattcttttacagtgattgattgcactgatgtttatggaggaaatggaaagtaggttttatagatttttttttttttgtggcaaaacattcaaaacataaatttagcattttaacgttttttttttttctgagacagggtcttgttctgttgcccaggttggagtgcagtggtgcgatcatagctcactgcagccttaaactcccaggctcaagctatcttgcctcctcagcctcccaagtagctgggattacaggcatgagctaccgtgcccagtcattttaaccatttttaagtgtgcagttcagtggtattacatacattgacattgttgtgcaaccatcaccatcatccatcttcaaaactttttcatcttgtaaaactaaatctatgcccactaaacaaaataggtgcccatttgctccccgccccaatccctggcaaccaccattctactttctgtctctatgaatgtgactattcttggtacctcatgtaagtggaatcatacagtatttagcctttttgtgatgggctattctcacttagcataatatcttcagggttcatccatgtgcgtagcattgtcagaaattccttcctttttaaggctgaataatatcccgttgtatgtatatataccacgtttggcttatccatttatccatcaatggacacttgcttgcacctttgtgaataatgctgctatgaacatgggtgtataaatacttgtgggagtacctgctttcaattctttagatatacagtatacctagaattagaattgctgtatcatatggtaattctatatttatttgtttacttatttgggggaactgccatactgtttcccagatttttaagctctgttaaacttaaaaacaaatttatttcttaggaagttgatattactcagactacctgtcctgtatttccctcacttgtaccatggtgctgaaatgttaccagagagtatttttacagctgtataggtgaagcctctaagataaaccttatttctctttactggaagttaacagtattgctacaagggatagttttgtagtgtttgttatgtacatactcttaaaagtactaatttaattttcttcttctggtagagtatccaaaatgaaattagaaaacaagtatttttccttttggtgggttttctgttaacagagtttgcataatggtttttacttatttttttctcaagcccacagcacaattcttttttctattttgtgttcattgcttcctagttgtattttctgtctcagtcatagtgtaatattttaacagttatcttcaaagcaagagaatatatttggaactagacatgaaaacatagatgttttgagcaaggctccatctcaaaaacaaaaaaactaaaaaaggccaggcgcagtggctcatgcctgtaatcccagcattttgggaggccaaggcaggcagatcacttgaggtcggggttcaagaaaatatacatgcttttatataaataagcattcagagatttaattaccactttaatgcgttattacaatactttaagttagacatattacatttatgtaagtttgaaaaatttgagtcttaagcactgttaacatatgctttgtatgtacaatagaattctcatctggtttatatgggttataaaactgagcaggtaggcagaaatagagaccagtgttgaaagaagataaattttctgtattttggctttcaggaagcctttgcatgggctaaccatttgtttcaaatgaaatggtttcaagcttggcattttctatttttaaagcaagactgcctagtataaataaggcccacagtgaaaagattatcgagtaatgcttgacttggtcattcccaactgaagttggctttatggatctaaatttatttgtctttttcagggccattcttgagattaataccaacattcataggtaattgaggattattattttggatagggattcttgtcatgaaaaaattggggcaagatatcttagtaccatcttatgtgtgaccaacaactatgtagttcagccaaaattcatttgtcagaggtcattatgatataggattatttaaaaatgcttgtctcagaacttctgggatttcraagaatcygggaagaccccactgtgcagtgctgtcattggccttattgattcctttcttttattttgattcaatttcagtttattttagagatagggtttcactctgtcacgcagtctggagtgcagtggcaggatcacagctcactgtaactagggcttcagtgatcttcccacctcagtcccctacccccaccccctgaagctgagaccaaaggtgcgcaccatcacatcctgctaatttttttttttttcctgtaaagactgggtcttgctatgttgcccaggttggtgtagaatttctggtctcaggtgatcctcccaccttggcctcccaaggtgctgagatgacaggtgtgtgtcattgcacctgacccttccttttaagtaattgtttttagctacgaatatctttcctcctaaggaaaatacttgttttccttttgattatatatttagctcttatggagatggctgtgaaaatgtaagttgactgaacttacctctataagggaacttttttgcttctagaaaatrtatttatgtatacccaagtgtattttgtgaatctgggagcttgctaggagatttatgattacttttcttttacaatttttttttttttttttggaggatgggagttgttttatcactgctttggtgaagatattagctaagtttgatttcatcttggtttctgtgtttcaggccatcttgcaaaagaagttatattgaaaaatatttttaggtagtgatggttatcttatgtgcccctcagtttatttttttcttaattagtatcctttcaaaccatttttcttcccaytgtccgagaaaattatcaagaagtaatttgttgtaacaaatctagcaatttatctcgttttgtaaaattctcataaaggattagataaaagaagttaaggtagttgatgacttaaaaaattactttttctgtttgaggtaaattagacttgttctttctttacccgtctcatgaaaatgattttttcttgatatgggaaattctgacttttctagctctataccacatggttgcagggcatatatctaaaatattgttttgtttgaccgatttgtagttttctttttaagagttctttttactctgtgttctgatgtagtcttccttcccagaactttccccaatatactataaatctttgaaaatcttcatttagtaaataatatcgttcactcatcgaaatgcttaaaaaatgcagcaacctgacacttatgttacttttcaagtgttattgaattatctgtatttccagaactttattttctatttgccagagctctttggtactcagtgaagtattttaggtaattctgcttaatttgaggagtttttgtgtaggattaactagcagctgtaatctgcttctaattcttggcagctaatgagtccttaggcgcctgtctgggtgtgtgcttgcattgttgagggcctgctcagtgattttggttgatttggcagttttagaaatgttagtatagaagtgagtcttggagcaacagtgcaccattaaacaaaaaagggagcaagtactttaggatctgctgtgaagtataatgaagggcttagagcatgttagtgaaaggattgctgggccatagcctgcctcatattcatcacatagtcatggaaatatcttttgaaaagactgatataaaggcctgttctgctactgctttgtgaaatggaagattggaattagatgcttaaatggaaaatgttctcttgttgcagcctctttgaaatgtgctgctagtgggagctgcagcttcctcctgctgactctgagccccaggcttcagttgagatggtcctttcagaaatgtggagcttagtccaagcctggatttcagtgggtagcacctggcatctgtggctagaaagtcctatgaagtgtaagtgctttattctctccttataaagaatcccttttccttccttgattctcttccttcccttccttttttctgctgtttagcagaggggaagaacaatgagcaatgtactgtagtttgtagggtatcaggatttggttgaattttctttatgactcagtagccaaaacaagatttcattttgttttcttttttgagacagcatctcactctgtcacccaggctggagggcagtggtgtgatcgtagctcgctgctgcctccagctactgggctcaaccaatcctcctgcctcagcctcctgagtagctaggactacaagtacaccatgcctggctgatttttaaattttttttagagacaggatcttgctatgttgtctccaggctggttttgaacacctggccttaagcaagcctcctgcctaggcctctgaaagctcggggattacaggtgtgagccaccatgcctggctggatgtcaacaattcttaaactctcctggaattcaaaataaagtgataattatgacccttaacatttagtatgggcaatgtcatcacgggtgatttttcgttgacgatgtacttagcagtagccttgatacccaagtttgccaaatgattctttaggggtcactctcatatttagttattattctgaaaaaactaatacagtatttgaaaggagaagtgcatttgaccagtgggtaagacagtatcaaagtaaataagggtgcttgaatttagaagatagtgccttccttttgcttctacttgatacatttgcacaagagtaagtcaatgatttttctaagactaatttcccatagcattgtcctgagaaattcatatagctgccatccatagtttaggttaaaaaaaaacccaaactagataataacataatgagcattaaaaggtgcaatttccaacttgcagaaaaataatttttttaacgagaggtaattttcttacataaagtgcaccatcttaagtgtgtaactcaatttttttcttatatgtatattttaagtaatcgcaaataacatcaaggcatagtacattctattactctagcagatacctgaatgcctcttcccagtaaatcattcccctcccataaccactattctgacttacatcaccacagatttgttttgcctgttttttaaaaaatagctttagtgaaatatagttcacacaactacatttcactcatttaaagtataccgtttaatggtttttaatatagagatttctttatccatcaagttttggacattttcttttttttttttttttgagatggcgtctcgccctgttgcccaggctagagtgcagtggcacgaccttggctcactgcaacatctgcctcctgggttcaagtgattctcctgcctcagcctcctgagtagctgggattacaagtgtgcaccaccacgcccggctaatttttgtatttttagtagagacggggtttcaccgtgttggccaggctggtcttgaactcctgacctcaagtgatccacctgcctcggtctcccaaagtgttgggattacaggcgtgagccaccatgcccagctggacattttcatcataccagaaagagacctgtaccccttggcctgccacctcccacctcattgctaggcagctactaatctactttctgtctstagagttttgcctattctggatatttcatataaatggaatcatatagttcatgatcctttgtgactgtcttctttcagttagtatgatgttttcaaggttcatccatgttatagtatatattattacttcactcctttttatggctgagcagtattccattcaacatatataccacatcttatccattcattggtcagtggacattgggactgtttccactttttggctatcgtttgtgaatagtgctataatgcattcatgtacaagtgctgttgaaatttttggattatatgataactcttatttatttatttttttttagacagaatcttcctctgtcacccaggatggagtgtgggggtgtgatttctgctcactgcaacctctgcctctccagctcaagcaatcctcccgccttggcctcctgagtagctgggactacaggtgcacactaccatgcccagctaatttgtattttttctagagatggggtttcactatgttgcccaggctggtttcaaactcttgggctcaagcgatcctcctgccttggcctcccaaagtgctgggattataggtgtgagccactgtgcctgggtgataacgctctatttttaacctttcaaggaatggcatcctgttttcaaaatggctgtaccattttacactcctaccagcagtgtataagggttcctgtttttctgcatattcactagtacttgttgttgtctgtctttttgattatagccatcctggtgggtatgaagtgatatctcattgtggttttgatttgcatttcctgatggctaatcatgttgagcatcttttcgtatgctttttgaccattcgtgtatctttggagaaatgtctattcaagttctttgtccatttttaaaaaaacttttaggttcagggatacacatgcaggtttgttgtataggtaaagctgtgtcataggggtttgttgtacagattattttgttacccaggtgttaagcccaggacccattaattattttttccgatcctctccctcctctcaacctcttacctccagttagtcccagtgtctgtcttctttgtgttcatgtgttctcatcatttaactcccacttataaataagarcatgtggtatttggttttctgatcctgtgttaatttgctaaggataatggcctccagcgccatccatgttcctgcagaggacatgatttcattctttttttatggctgcatagtattccatggtgcatatctaccacattttctttatccagtccactgttgttgggcatttaagttgattccatgtctttgctattgtgaatagtgctgcagtgaacatttgcatgcatgtgtctttatgatagaacaatttatattcctttgggtatacatccagtaatgggattgctgggtcgaatggtagttctgtttttagctcttcaaggaatcgccacattgctttccacaatggctgaactagtttacactcccaccaacagtgtgtaagcatttctttttctctgcaacctcaccagcatctgttattttttgctttgtccatttttaaattgggttcttggtgtcgaatgctttcattttagaaatatggtttcattggctttagaattctttcctttttttcttcccattttttagctctacctctccatgtcttctggcatcctcattsttgacaagaagtctgctctagctttttacttttgttcctctgtatttaatgtgtcctttttctctgcttcccttcagtatttctctttatctctggttttcaggagtttgagtatgatatatttagaatttgtttgcttatttgggggagtaacattctctgttgccctggtctaccctagtctttagcatttctgttgtctgccattctctctggtagggcggcctcagtgatcctagtttttcttgtgtcattcattctttgccttgcatctggcaggtattgtgcaaaatagtttttttttcccttctctcagtggtaggagacctctcatggtgttggtagtattattataggctcaagactgttttatgcctgtcccctaggggtagaggtttttcttttacgcttagtgcaactgcagtgagtcttaacctgtactttgagggtgacatgctttgctgccccctccccgtagcctaaggcttttgttcagggaagggttcagtcagagatttttgtgctttttcgcaacagaggctcttcccctcctccaggactgcaccaccaaaggaggtggtcttctgccctacccccagtctttctcttgagtatctggtctgcgaaggtgatctgctgggtgactgtgagttctgcttgtgtctgcgagtcccaggggttctatatgctcatcctagcccacatgcagcctttctcaatttgttagaagtgttagcagaatttttatgagctggttgccaggtgccctgaatttcttcctctgtcctgtcgtagatgagccagtgcttgccttcattttccttgttagaggtctgtccttagatttcagtcaacttggttgccctaagacctcaactttctgatgcatttaagcaaggttattttgtagtttatttgctttcgtgtattgttaacttacggaaagcagtattgtttctgtcattatatatcttaggtggatgtggaactcttctgaggcatttttattcttcatatattttaaataccacaagatattattgctttatataatcagtgttaattggatttacccatatacttcactgcttttccattgttcttcattcattcctgatttctgttttctcttttcctgctaggatttcaattatatgtgtcttagcctttttcactgtgtcccacatgtcacttgcattcttctcattgtttaccttctatcctttttttgactttgtgcttcagtctttttgttttttattgacctgttatcaagcatagcaatctataattcttcagttgtctgatttgctgtttggccttttctaatggttcttaatttcagttaccgtatttttttacttccagaatttccttttaattcttttttatatattccatttattaatggaaattctccagttttgtcttctaagtctttgcatatattaatcagctattcattttttccaactttatttcttttaaccttttagaaatacaccttataawgccctactccttaaacttttccacttgtatcttgtaagaacaaggacatttttctaaaataaactaaaatgttgtcactctcaagaaatttgacattgatatgatggtattatcagtctgtattcaaattttcctaattgctctagttatagatttcaagctttctaaaattttattttctctaatctaggatccttcaagggtaatgcttttcttttggttgttatgtctctagttacctgggtatttttttttcttttatgatgatgatattaaaaaacaaatccaagacaggtacggtggtgcacacctgtagccccagctacacaggaggctgaggtgggagggttgcttgagcccaggaggccagactgggcaaccatgtcaagaccctgtccctttaaaacatatacacacagctgggtgcggtggctaacgcctataatcccagcactttgggaggccgaggtgggcggatcatgaggtcaggagttcaagaccagcctggccaatatggtgaaacccccgtctctattaaaaatacaaaaattagccgggtgtggtggcaggcgcctggagtcccagctactcgggaggctgaggcaggagaatcacttgaatccgggaggcggtgattacagtgagctgagatcacaccactgcattcctgcctgggtgacagaaggagattccatctcaaaaaaaaaaaaaaaaaraaagaaaagaaaagaaaaaacacacataccccacacaaatccagggtgggccattttgtcttagtttttagtatgcctcactatttagatttatctggttcttttctcatgattgcattcaggtcaaacattttttggaagaatactgcatagacgataatttgtcatttttactcaatcacatcaggagtcacataaaatctattggtgatgttttattactttggttaagacatcagttattttagtctttgataattcattatctagataatggttactttgtattgtctgtttctttctagttgttgtcacttggttttgctttttttttccccccgacgtggtctygctctgtcatctaggctggagtgcaatggtgtgatcaaggctcactgcggccttgacttcctggctcaaataaatggacctcccaccacagcctccaaagtagctggyattacaagcatgtaccaccacatctggctaatttctttttttctttcttttttgtgtagagacgaggtctcactttgttgcccaggttggtcttgagctcctagcttcaagtgatcctcccacctcagcctcccaaagtgctaggattataggtgtgagccaatgttcctggcctggctttgcttttgtttgatagatgcttgatatgttgttgttgttttgagacggagtctcgctctttcgcccaggccggactgcagtggctctatctcggctcactgcaagctccacctcccgggttcacgccattctcctgcctcagcctcccgagtagctgggactacaggcacccgccaccgcgcccggctaattttttgtatttttagtagagacagggtttcaccatgttagccaggatggtctcgatcccctgacctcatgatccgcccacctctgcctcccaaagtgctgggattacaggcgtgagccaccgcgcccggccgatatgttgtttaagaaaagttgaagagataaatgatgtttccttcctgagatgattttcttttgcttctggcaggtcttttttttttttttttttttgagacagagtctcgctctgttgcccaggctggagtgcagtggcgcgatctctgctcactgcaagctctgcctcccgggttcacgccattctcctgcctcagcctcccgagtagctgggactacaggcgcccaccaccatgcccagctaattttttttttttgtatttttagtagagatggggtttcaccatgttagctaggatggtctcaatctcctgacctcgtgatccgcccgcctcagcctcccaaagtgctgggattacaggcgtgagccaccgcgccyggcctcgcaggtctttatgacagggacagatctctttgaaattcaaaaagtaattgagcagattctaagctgtgtttcaacctttttttgttttgttttgttttccaagacagggtcttgctctgtcttccaggctggaatgcagtggcgtgatcatggctcaccgcaacctctgcatcctgggctcaagcagtactcccacctcagtgttcctgcccacaccccccagtagctgggactacagacrtgccatcatgcccagctatttcaccttgttgcccagactggtcctgaactcctagggctcaagcagtcttcctgcctcagtctcccaaagtgttgggattacaggcgtgagcccctgtgcctggcctactttctgtttttatgagtcttgctactttaggtaccttatataagttagaatcattcagtatttatcttttagtgataagtgtattttcacttagtataatgtccttgaggttcatccatgttgtaatgtgtgtcagaatttccttccttttgaaggcttagtaacattccactgcatatatatacattttgtttatccatttatccatagatgggcatttaggttgcttctatctcttggttattgtgaataatgctgcagttggctgcagttgaacacgggtgtgcaaatatcttatctgtttgagatctttttttttttttttttttgagtttagctctgttgcccaggctggaatgcagtggcatgatcttggttcactgcaaccttggcctcccgagttcaagtgattctcatgcctcagcctcccaagtagctgggattacagtcatgcgccaccatgtccggctaatttttgtatttttagtagagatggggttttgccatgttggccaggctggtctcgaactcctggcctcaagtgatcacccgcctcctaaagtgctgggattacaggtgtgagccactgtgcccggccctgtttgagattttatattcagttcttttagatatatagccagaactgggatttttggaatatatggtagttctatttttaattttttgaggagcctccatccccttttccatagtagctacaccatttacattcccaccagtgatgcaaagggttctagtttctccacattcttgataacacatattattttctgaggtttttttgcttcgtttttttggatagtggtcattctattgggtgtgaggtaatattttgttgtggctttgatatgcctttccctatggttggtgatgttgagcatcttttcatatgcctgttaaccatttgtatatcttctttggataaatatttattccagaaatgtcatccaagaaatcactgtcaattgcaatgattatgaagcttttcccctaggctttcttctaagagttttatagtttcaggtcttacgtttaggtctttagtcctttttgagttaactttyatatgtgatataagggactaactttgttctttttcaggtgaatattcagttttcctagcaccattgtgtagtcttggcacccttgacaaagatcatttgaatcctttacaggagggtttctttctgggtctattccattatattggtctgtgtgtccatctttatgctagtacccatactgttttgattactatggctttgtaataagtgttgaaattagaagtatgagacctccaatattattcttttttaagattgttttggctatttggggtctcttgagattccacgtgaaggaaacaattccattttttgcagaaaacgtcattgagattttggtgaaggttacattgaatctgtagattatgttgggtagtactgaaatcttaacaatattaagtcttctagtctgtgaacatgagatgtctttcatttattggtgtcatctttaatttctttcagcaatgttttgtaattttcagtatacaagtcttttgtctccttggttaagcttattcctgagtattttattcgtttttattctattgtaaatggaattgtttcttttcagatttttcattgttagtatgtagaagcaactaattttaatctgttaattttgtgacctgcaactttgccaaattcatttattaagtcttaacagtcttcttatggaatcttttgggttttctacaagtaagatcatgttgaatgatcttacattatatgtgaccagagattattttacatcttcctttcaatttagatgtcctttgtttttcttgcctaattgctctggctagaacttcgaacactatgttgaatagaagtggcaacagtagatatcctagtcttgttcctgatcttacagttttgaaaagctttttgtcttcactgttgtgtgatgttagctgttggtttttgcatatatggcatttattactttgaagttgtttccttcctggtttgttgagtgtctttatcatgaaagggtgtcaaagtctgttagatgctttttttgcataaattgagatgaccatgtcttttccttcttcattctgttaatgtggattacatttattttcatatgttgagccacccttgtattccaggtataaatcccacttgatgatgatgtataatcccttcaatatgctgttgaaaagccaggcgtgatggctcatgcctgtaatctgacttatttgggaggctgaggcaggaggattgcttaaggccaggagctcgaaacccatctgggcaacatagcaacaccccatttctaaatttaaaattttgaaaataaaaatttaaaaattgagaaaaaatatgctattgaattccatttgttggtattttatcgagggtttttgcattactattcataagggatattattagtctgtaattttcttttcttgtttcttcatctagctttggtatcagaataatgcttgtctcatagaatgagtagaaagtgttctttcctcttcagtttttggaaagagtttgaaaaggattaatgttatttctttacatgttttgtagaattcaccagtaaagccatttggtcctgggcttttcttcattgggaagtttttcattactgatttaatctcttggcaagttataggtctgttcagattttctgtttcttcatgatttagtcttgttaggttatttttctaggaatttgtttatttcatgtaagttattcaatatgttcacttgcatttgttcataatactttttataaccctttttatttctgtaaaattggtagtaatatcctgacttttatttctgattagttatttaaatcctcttatttctttctttctttctttcttttttgacatagaacctcactctgtcaccgagactggagtgcttgtggcatgatctcggctcactgcaacctctgcctcccgggttcaagcaattctcatgcctcagcctcccaagtagctgggactacaggcagctgccatcaggcctggctagtttatttatttatttttttgtatttttagtagagacagggtttcaacgtgttggccaggctggtcttgaactcctgacttcaagtgatctgcccgccttggcgtcccaaagtgctggrattaacaggcatgagccactgcacccggctctctcttatttcttaatctagcttaagctttgtcaattttgttgttgttgttgttaattttgaaatactttacttttaaaataggtcacaacactaagcttttggcccattccgccattgtacaagctacagatgcttgcttagcagccaaggggcactcttgagtagcatatcagaaaagtgaataaaaatccatataaaacaaatatttaaatagtttccataggaacatatataatgtgtgacctatatcctagtcttccatattgccacatccgtatgaacccaactcttaagaaaagtgaataaaaatccatataaaacaaatatttaaatagtttccatagtaacacaaataatgtgtgacccatatcctagtcttccatattgccatgtccatgcgaacccaactcttacgaaatcccttaattcaagctggactcatggttaacaattacaagagtgatatctacatattaatactagcagaagcacaagttgctgattgatgtttcattctattttcccaagcagaagacacaggatgctaatgtcctgttcctctacttggggtgggagatcgtgcttctagatacactgcatgagtttcgatgctggtcctgacatcacatgtagattgttggcctctggaatccattaaaagtacaagtagcagcaacagtgtcagcgcccatgtttttaaagagcatccaattacctacatatattttgggcagatcacagtgctcaacaatctgatcaaggccatcacatgttcttcccatatactggatgaataatacttctcactgatctaggtctcttttgcagcaggggctttacatgtgcatgatcataaaggattgattaaatgatccatatacttcatcattcatgtaatacataaaggtctgttcgcttgactcatcttcctcttcagagcctgtctgttcttttttttctttctttctttttgagacagagtctcgctctgtcacccaggctggagtgcagtggtgtgatctgggctcactgcaagctccgcctctcgggttcacgccattctcctgcctcagcctcccgagtagctgggactacaggcgcccgctgccgtgcctggctaattttttgggttttttttttagtagagatggggtttcaccgtgttagccaggatggtcttgatctcctgacctcatgaactatctccctcagcctcccaaagtgctgggattacaggcatgagccaccgcgacggccctgtctgttcttttaatatgatttttttggcaatgaaagctgatgccacatgaaatatctgcctggctcagctgtgactctcactctagagtctggtggaaaatacttgtctgatgctgggttgattacactggtaatacttcagatttaagcctcacgtcctcagatccaggaaagcaactgccagtattaagcagttacattctgaaaccaaactcaactcccgtgtcaaagacacagtggacattggaggctgcctgcatgaaggtctcaggattggtacagctacttcctacatggaagctgacaccagtgacatcaatatttagttcttttgctcattccaaaagaagcctgctggctttgagcatggcaccagatttaacactgatgtgacgggctgctttgagtgtgttctggcaactgacatcaacttgacctcattaccgaaaatcatcatctggactccattattggcagtgtacttaatttgagacatttgtttacaagaatttgcatacataaacctctctgggggcatccccagaatctgcaccaattgtatttcagccttgctagcacagtcaaatcctgtcccgatggcagcaagagtcttcatgatggctctgctgtcattataattgactgcataaaagggggtgacatgaggaagagcttttaactatcttagatgtgtctttagaatgtctctaaggtccatgacatagaaggcatcctaatcatcatcagaagaaaattcattaattttttggtccagaatgtccttggcagtaaaaccttcatcaaggaagcaagtggcagtgaaactcttcattattaaactcttcatggtttcttgatgttcctctgaaacacaacaaaatggaaaactaagagatggaattgaaagaaatatttccagcttctcacaaagacagttctccaggaattccaaatcctgcctcttgtgccctcagagcagcagtggaaacattctcagagcacctgggtaccacagagagtgaagatgctgctgtctgagccagagctacaggacctctctgctgtgcctgtcagtgccttacttctgcccgccagagatgctggcccaaggtagtgctggagctgttggcagaggggcggccagtgactgtggctgccgggactgaccttgttgatctttttgtagcattcccttgattttcctatctattttgttaatctttgccctaaatctttattatttccttctttttgctagctttggatttagtttgttctttttatggctccttaaggcataaaattaggttgttgatttgagaccttttttcttttttaatgtaagcatatatacagttatacattttattcctcttagcacagtttttgctgcattctataagttttggtatgttgtgttcttatactagttcagtttagttcagttttatactagattttatactagttcagtttaatatgcaacattggggtttttgttctgttttattttctaaacataaacacagaaacacaatacaartgtataacttagtgaattactatatgtggatgtccttttagccaccacccaagtcaagaaacatcttcatttgtctgaagatgttttctgatttcccttccttgacccattggttttttgagtatgttgtttaatttccacatatttgggaaatttctagtttcccttttgctgttgactcctagttttatttaattgtgatcagaaaagatgttttatatgatttcagtctttgaaaatttattaagacttattttgtggcctaacgtatcagtctttttaaggagtggtatatttcttgtttccttcactgggtcccaactcaagagtttggagtatttaccagggcttctcttcgatatttctgaattccagtttttatttccccagtcttgagaggctgtccagagcccttcagcttcttagcctcttgtcttccactttcaaattggcaaatgccatgaggggaaaagtggagccaaagagtgaactgaactctctgctcttccattcccttctttctgggaactgtggcctcatattttagctttggtgtctttaaaaaggttytttgtagggagtatttagtgaattttttgtgttgtttttttttttttttttttttttttttttttttgagacagtcttgctctgttgcccaggctggagtgcagtagtgtgttcttggctcactacagcatccacctcccgggttcaagcgattctcctgcctcagcctcccaagtagctgagattacaggtgtgtgccaccatgcctggctaatttttgtatttttagtagatatggggtttcaccatattagtcaggttagtctcaaactcctgatctcaagtgatctgcccgcctcggcctcccaaagtgctgggattataggtgtgagccactgtgcctggtcttagtgaatcttttctggtagtttatgaattgatgtaataccagatggtctgttataaccaaagttgaaacacccgataaatgtcatgagagagatagctttattgtttagggagcatatggacatgaaactaactcctgtgtgttgttaaaaaagctttgctaccttttctaaacaaattttacagaaaaaaatcttacaggccaggtgtgattgttcgtgcctgtaatcctagcactttgggaggctgaggcaggcaagcccaggagtttgagaccaggagatagcaagacctgtctctacaaaaaataaaaaaaaattagctgggtgccgtgatgtatgcctgtagtcccagctatgcaggaggctgaggtaggcagatcacttgagcccaagaatttgaggccacagtgagctgtgatggtcccactgccctccagcctgagtgacagagagaggccctgtcaaaaaacattttgcaagatctgtatcacttttttaaaaaatygtatataaagtacaagttatttttaataaacaggtaattacaaaagacactttaaaaatattcaaacagccaggtgcagtggctcatgcctgtaatcccagcactttgggagaccaaggcgggcagatcacctgaagtcaggagttttgagaccagcctggccaacatggtgaaacgctgtctctactaaaaatacaaaaattagctgggtgtggtggcacatgcctgtaatcccagctacttaggaggctgaggcaggagaatctcttgaacctgggacgtggaggttgcagtgagccgagattgtgccattgtactccagcttggccaacaagagcaaaactccctctcaaaaaaaaaaaaaaaaaaaaaaaattcaaacgtcatcaaaggagcttgaaaaataaatctcctgtgcatccctaccctccaagttaaccagttttgcatctctacctctaagattactggtttgcctgggggcaagtaattgttttgtttttttgcttctgcccttcatttttgaggtctctacttttaaggagatagaaatgtttaaagtcagaagtacagataattgagaatgatatggttggtgttttctgtcatttagtttctgcacaattttttttttttttttttttgagacggagtctcactctgccgcccaggctggagtgcaatggcatgatctcggctcactgcaaccttcccctcccaggttcaagcaattctcctgcctcagcctcctgggtagctgggactacaggcacacaccaccaagcctagctaatttttgcatttttagcagagatggggttttaccatgttggccaggctggtctagaactcctgacctcaggtgacccaccagtcttggtctcccaaagtgctgggattataggtgtgagccactccgcccagcctacattgggatttttattgttgttctgttttattttctaaatgtaaacacagaaacacaatgcagatgtgtagcttagtgaattactatatgcagatggccttttaaccaccacccaagtcaagaaatagaactttgagcacagggctcacacctgtaatcctggcactttgggagacccaggcaagaggattgcttgaacccagaagtttgagaccagcctggataacatagtgagaccctgtcccatttttataaaaaaagaaaagaaatagaactttactggccattccgctccagaagcttttcttgtaccatttgacataaccgcttccctccctctaaaggtaaccactgtccttttatagtaatcctttgtgtttctttatggttttatacttagtggcttagtgggcaatctcacacttcatagttgagtccagctggttttttttttttttttttttttttttttttttttttttttttttttgtgacagagtttcactcttgttgcctaggctggagtgtggtggtacgatctcggctcactgcaacttctgcctcccgggttcaagcagttctcctgcctcagcctcctgagtagctgggattacaggcacccaccaccacgcccggctaattttttgtatttttagtagagatggggtttcatcatgttggccaggctggtctcgaatttctgacctcaggtgatccacccgccttggcctccgaaagtgcaggggttacaggtgtgagccactgcgcccggcctgtttttttatataatgtattttgagtgtcttaatctgcaggttctctctgttgttttattttatttttaagactgtctcactctgtagcccaggctggagtgcgtagtgtggtcatggctcactgcagccttaaactcctgggctcaagggatccttcccctcagcctcctgagtagctgggactaaggggcatgccaccacacgtggcagatttttcaaaaatttttcatagaggctggtctcaaactcctggcctcaagtgatcctcctgctttggcctcccagagtgctggggctacaggtgtgagccaccacacctggcctctgtaggttatttatctgttgaagtatcagggccatttgacctatagagtttcccacagtggattttgctgattttattgtcatgattcagttctactctcccttgtttttccggcaaattagctgctggatctagaggctcaatgaggcacagatttgattcccttgttattgtggtatctcctttcatcaagaggcatatagtgtttggttttctggtggttctaattgtttaccactgtgaagcagattaccccaaaacttaagtgatttgaaataaaaaccattttattgtatctcataactttgttgatcaggaatttgagcgggctcaaatcagcatccaggatgctgattgtgctccttcagttttcatccatttggtggttgggctggtctggaggttctaagatggcttcatttacgtgcctgacagtctggtgggaatgactggaagcctggattcagttcggcccctctagctttccatgtagtctcagggctcttccacattctctccagcagagtagttttaagttttcacaggcagtggctttcctcagagttaagtgttcaggataccaaggcagaagctccaaagattcctttgacttaaccttgaaagtcccagaatgtcacttcctgccatattctatcagttaagcaaggtatcaaggccggtgcagattcaaaggcatgtagattctacctttcagtgtaggattagcattatattcgcagctatcttcaatccacctcattcttttttgtgtgtgatgtaactagctgttattgttcagtgcttaatccattaattgtgggttgtgaagtgttaatattctaaatctgttatttctttacttacatgctgttaggttggtgccaaagtaattgtggttgttgccattagaatacttctataaagtgactcttctctgttaggttacttaggagtacagtttatataggaaaaccaagataaatacgtgatttttacccttgtaagataatgagtttatgtctgcttgtaattgttaccaaaaatggcctgtggtggccagtttgttttttccttgtatcccttgctgaatcctaaattgtcctgtctctggccagctggttgcctcctttgcctctcagtacttttgaaatgactctagtagtcttattgtcttctgtcctttctagtatgacaggatgtatcatgggcccatcttgtgtatttaatattggtatcttttagtgggaaattgaatttaaagactacaatgtaggcactagggatgcaagttgttactgagttggacagtatgtttagggctttcagtggatagagctagggaattgtatatttttatatatctatataatatatataaattatctacacgtgtatgtatacaagtgtagaaaagtatgtatataaatagtgggtataaatacttaaaggtaaaatacctcatgaatttatagagatattgccttttcaactacagcactataaagtttttaacttaagcctttttatgtctacacctcctttcttccatactgagaatccaggttgtgagggacacagaaggtgacagagtatcttataattactcagtagctctgtcycmcattaacctagtcagtagcctcagactaacaatactaacactactactatcagtatatacaccaaaaacaagcatagttttgcatgtgctctcccctttcttccacactgtatctgtacagagcttgtaatcattacataccacttctctttcgactttcatttattcttaattgttgtaataaactatgtttaatattcatccccagtccttatgttgatgccttgttctctctaatcagtttgattttttaaacagattgtttaggaagggcttataggaataatatctacatttttgcaagtaacagtttctggcctttataattgaaaatcggtttgacttgacataaaatctttgtcacattttctttcttagcacatctttaccctgttctttcttctttcatgaagtgttcaagtcacagtagatgataatctaattttttcctttataaatcagttgctctttttatatagatgtccaaattattttatctttttctttaagtatattaattttaccagattatgtctcagtattggttgttctgcgttggtatttttaggtatatgatatactctttcaatgtatagtttcatgtctttctcccctaccccccaacatttcagaaaccttttcttttttttttttaagaaacggggtcttgctctgtcacccaggctggagtgcagtgatgggattatattcatttatttactcttcctcttttgataactttgataccaaatttttttaattaaaaaaattagtggcaggatcatagtgcactataacctcaaaactcctgggctcaaatgatttttcctcctcagcctcctagtagctaggactacaggcacataccaccacacccagctaatttttaaattttttgtagagacagaatcttgctatgttgctcaggctggtcccaaactcctggcctcaagtaagcctcccacctccacctcctaaaatgctgggattacaggcgtaaactgccttgcccaaccaggaacattttcttgaattacagtttttgataattgttctgtttccttgttttgattttcttcttcagagatctctgttgtctatatgttagatatttgcctatgttcaatatttgtcatttcctcttaaatgttttaaaatttttttgtttaaaaaaaaacactccttttcatgtgtttctcttaagacattatctgatgtgtttagtcacatgtgaaattcctcctagtctttatctctgaagggatttttttaatttctgatttttttcctgagatttttacctaatttctgaaatgttccttctcaattctattcttccgtatcttgtatcattttcttaatgttgtttagctcattttgaagtaataggctaggtttttaaacctgtttttctggtcttctttcctcgtaaggtattactctgcttattttctctttcagccatatatgacatttgacctcagttgcttattttctgtgaaattagtttttctgaatttctagaaggaggtttgattaaggataatacttccaaccttttcttccttcatctctattatacttgttctatattattttgttttttttcatagcagtttttcctcaattggggtctcttcctgactgtttggtttcaaggttttataaaggctaaactgttggcatccccttcacacttatacttactggctattggattgggtcaaacctcctcctttttctttctcttttttttttttttttgagacggagtctcactcagccacccaggctggagtgcagtggtgcgatctcggctcactgcaaccaccgtctcccgggttcaagtgattctgccgtctcagcctcccgagtagctgggattacaggcacccgccaacatgcccagctaatttttgtattttagtagagacggggtttcaccatattggcccgactggtcttgaactcctgacttcaggtgatctgcctgccttagcctcccaaagtgctgggattacaggcgtgagccaccgcgcccggccaaacctcctccattttcaactgccatcctcagattggctccttgtactttccagtgaatctctgttggttcttggtgtttctctgttcttaggtccagtagacaccctgttgtttgcctctgcttccacatttactgagactaaaaccacacaggtcttacagatgtcactggtttgtctccttccacttatattttggggttcttgtagatacccttggagataactagacaacacctagttttgttgctatctaatgctctgttttttttgagggatttgtggagattgtataaagcttcatagaatctttttgctatttaaaaatatatcagctaggcatggtagctcacgcctggaatcccagcactttgggaggccaaggcaggaggatcacttgagtttaggagttcaagaccagcctgggcaacatggcgaaaccccatctctacaaaaaaatacaaaaattagccgggtgtggtagcagacacctgtagttccaactactagggggctgaggcaggaggatctcttgagctcaggaggttgaggctgcaatgagctgagatcgtgccattgcactccagcctgggtgacagagcgagaccctgtctcaaaaaataaaataaaaagatattaacatgagcaaagtaaagatattctgatggtctattaaatcataggtgtgcttgggttactggttaatcaatggctaaaatctttggaagatttttttacttgagaaaggaaaattggtgctattagtactacattaattaattaaacatttgttgaatacatttaagacacgatgtttggactaaaaagtacaaaaattagtaaaatatactatatctgtaaagaagttaacacctcatgcttactttgcaccccttatttcattgaaagctaaggttggggttttttggtggggggcgggaggggtggtttttttaaaaacagggtcttactctgttgcttgggctcaagtgatcctctcgcctcagcatcccaagtagctgggatcacaggtgcatgccaccatgcccagctaattttttattttttattttttaagtttttttagggtctcactctcacccaggctggagtgtggtggtgtaatctcggctcactgcaacctctgcctcctgagttcaagctattttcctgtctcagcctcccaagtagctaggattgcaggtgagtgccactacacccgcctaatttttttgtatttttagtacagaccgggtttcaccatgttggccaggctggtcttgaactcctgaccttaggtgatctgcccgcctctgtctcccaaagtgctgagattacaggtgtgagtgactgtgctgggccccagctaatttttaaatttttttgtagaggcacgggggtcttgccatgttgcccaggccagtgtcaaacttctgggctcaaacaatcctcctgctttggcctcccaaagtgctgggattataggtatgagccacacgcccagcctaaagctaagttttatgtcagtaaatctgtaattaggaaattcagggtctttattttccatttactttaggaacttgtacaagccatttattctacctgtttctatatcttaacttgcttcgtatcaatctttggaaagatcttgaaggatacacaaggattatgtattacttgtgaagagctctgtcttcataagaaattgaccccttctctttacaatagacactattcctaaattgaggttgaaatttttttcagtccattattgccagtccatgttagtcttcttccagaggctgttgagtgtagaattggattagaattaatctaattaattagttgtctacaatctactgcacgatattgtttccaaagttgtcttcaaaatatgactcccctttataattgtgactggctactagagagcagattttatactttggttctttttattatgtctatagataagtttatttttccattgaaaatgatttcagtaacatgtgtagcactttgccaagtagtaatacatcagaaaataattgaaggggccaggcacggtggctcatgcctgtaatcccagcattttgggaggccgaggcagggggatcacctgaggtcaggagttcaagatcagtctggccaacatggtgaaacctcgcctctactaaaaatacaaatattagctgggtgtggtggtgcacacctgttatcctagctaatcagaagactgaggcaggagaattgcttgaacctgggaggcagaggttgcagtgagcctagattgtgccactgcactccagcctgggtgacagagtgagactctgtctccaaaaaaagaaagaaaataattgaaggatgtgaaatatttacttgagccaasatagtttttctgctattttgtcgggaactaataattgaaatgtagggctactgagaccaatatgaagtatattctcatatttatagatatattaaaacagcttctggattcaattcttagagtgaacaaagctttattttaagcaagaaaagagaagaaacatgcagccatagattaggattggaaattatacagtgacattttagtttagtggagacttttgggacatttttcttcatactcttgacacccacacagtcattcaaatcaacaagattgtatctactaatttaactgatagctctcatgccttcctagaatgagtcagattttaggtaattattttgttgaacagggcctataacaatgtatattgaactgttggctgaattactgggtaatttagcttgtcagatttttctttctttatactttgggctaaatatgtttatataagtattgaggttatgtcattaaaattagaaaagtagtcttctttaagacatctttgtctaatacgctttcaggttcatgcatgggagatctcagaccagttgttacagatccggcaggatgtggagtcatgctattttgctgcacagaccatgaaaatgaagattcagacctcattttatgagctccccacagactctcatgcctctttacgggactcattgctaacccatatccagaacttgaaagacttgtcacctgttattgtaacgcaggtaaatcctgtgcttctcattagagaaatttgtatggccatttggatttatcaggattgttttaattcgtattgctaggccatgtgaggtaatgttaacttcattacagatgtactgctatgttcttgtaagtggatagaaaacgaaattgttaatcttttgtattaatcttggagttcatttggtttcaaactaacttgataccagaagtggataaggtgagtatgtgttttcacaggcatgctaggtcagaggtttaggtagttgccttttaagaaatcctttcagggctgattggctttagtaaaggtctcatgaatgaaacgttgaactagagcatctgtcctttcccccttggacagggaaatacattagataggaaaactggaaacttctgtgagtacgtactcacatgtgttctctgcctggcatagaagtgcccttaaagaggaggcttttcttaagtcttcaagatgacaaatgcaaagagaagggaaatggcaatccattacttgagaactgagtcaraggtctgactttattagtagctttgacctttggcatagtataatttatatgtctgtgaagttctgtggtattgccaaataaaagtaaatattgatatattttgaggaatgtctatagtctgttgtttctgacttcttttcttttctttttttttagtttttaaaggttaactcttaaatttcagcaatttgtagctaacccaaaaragtttacatcagatgtatagaattggaggttgggagaaatgggggaagggggttagtcttagttgtcatattgtttggaagaaatgtttctttgcttcccaattaatatttattgtgaccctatttctgttcatctgtcttcatttatttaatctctcttattcagctggctttagcaatagcagatcttgccctacagatgccttcctggaagggatgtgtgcaaacactggtggaaaagtaagtaatttgtattgactctatattagcatttggaattgccattaacctacacagagaaatttgttagcaatagctagatatttgactatttccctgaactcttaacatagaattatgttattaacctttgttagattaaatgaaacttatctaaaattttaaatactactgaaatatattgtgtgggatgtaaaagactagtratttatgtaacacacacttcttgaattaattgcagcaaagtcttttattgccttgtggatcactctcactaactggcatgacagccattttgtaaaaatatagaatttaagattatattaaatgggaggttgttatgaatatgtgttcttactaattggagtttgtttcacgtttatcagaggggcaatattctttttagacacacagagcttgctactttgaaacaagtattccttctgggtcctggcaagataaccttgatatttgcttgcatttggttgggaagttatttttgaacaaagtagaattactttttacctccaatatagtgtgtcattaaagcattttacggataacttattatttattttattttattttgagatggagtctcgctcttgttgcccaggctggagttcaacggtgcgatcttggctcactgcaacctccacctcctgggttcaggtgattctcctgtctcagcctcccaggcggctgagattacaggcatgtgctactacgcctggctaatttttatattttcagtagaggcggggtttggccaggctggtctcaaactcctgacctcaagtgatctgcccacctcggcctcccaaagtgctgggattacaggcgtgagccacctcatccagcttggataacttttttaaaaattatttttatttttttggagacacagtcttgctgtktcacccaggctggagtgcagtggcacartcatggctcactacaacctcagcctcgacttcccgggctcaagtgatcctcccacctcagcctcctgagtggatagcttattttttaaataaaatttttattggggaaattgatacatgctccttgaaaaaattctaacagtatggaaaccttcaaagtgcaaaatgaaccccrtcctctctccctatccttatattttatttttgaaacagggtctcactctgtcacccaggctgaagtgcagtggtgtgatcatggttcactggaacctgcaactcttgggctcatgagatccttctgcctcagtctcccgagtagctgggattacagatgcataccaccatgcctggctgattaaaaaattttgaatgtagaaacggtctccctgtgatgcccaggctggtctcgaacttgtggactcgtgatcctcctgccttggcctcccaaagtgctgggatcataagcatgagccaccacaactggcccttaaccctgtattttataagcaaccactattaacaattggctatgtagagtttcctttatgcattttaaaataaataagtgcatatatattttaatgtacatatacctatatatttgttcacccatattcaatatgtttcatacatgtttttcacttactacattatggactttttttcatgttaggacatatagatatcatgttcattataatggctatgtttcattgaataactgtgtcctttttttaatcttaactaattatggaggacatttatgtttgtatcttttttctcccccttaacagtggtgggaatgttgcttttgttgttgtgagttactctgatggctgttatcttatgtgattgtgtattttctggctataaataacatatctccacttttttcttttgcagatacagcaatgatgtgacttctttgccttttttgctggagatccttacagtgttacctgaagaagtacatagtcgttccttacgaattggagctaatcggcgcacagaaattatagaagatttggccttctactctagtacagtagtatctctattggtgagtaagtttgaaatactaagttgctgcataaaggcagaaagccatggcggttattttgtaatcaattgcattattgtgaaatagctttctttgcaaaatttaatgatgatgctttggtatttatgtaacaccttaccatgacaacatactttcagaaactatgctttttaagtttctgtataatcctctwaaggtgacgttatctcttttatgaatgaaaaatggactttagagttacacaactgttaattcagaattggaactaaggccatctcattatttatcttgtgctcttctactgcttaatgctccaaactgttggctgttaataaaggatcatgcaaagggaagtgtgtataaatctactttactaagaaaggatcctttctttttttttctaattgatacatgatagttgtacatatttatggggttacatgtattacttttattttttgaagcagggtctctgtctcctaggctgtagtgcagtggcatgatctcagcttactgcaccctcctcctcctgggctcaagtgatcctctcacctcagcctcctgagtagctgggactacaggtgtgcgccaccatgcccagctaaattttttattttttgtagagatggtgtctctccatgttgcctaggctggcctcgaactcctgacctcaagtgatccacctgccttggcctcccgaagtgctgggattacaggcgtgagccactgtgcccagtgacatgtattatttttgtccaagtatgtaatatgtgatgatcagatcaaatcaggtgatgatcaaattgagatatccatcacctcaaacstttatcatttctttgtgtagggaacattctaaatcttctctttcagctattttgaagtactcaataaattattaactatagtcactctgttttgctgtgtaacactataacgtatcctttctattcagctgtatttgtgtacccgttaatcaacctttcttggtcgtcccctccccgttacccttcctagcctctgatcaccgtcattctactctttacctctatgagatccattttttttcactccaacatagcagtgaaagcatgtgatatttgtctttctgtgcctggcttacttcacttaacataatgtctaacagtgccgtccatgttgctgcaaatgacaggagattttattctttttgtggctaacgaatatttcattgtgcacctataccattgtttctttatccattcagccgttgataggtacttaggttgattccatatcttggctattgtgaatagtgctgcaataaacatgggattgtagagatcttcttgatatactggtttcttttctgggtatttacccagcagtgggattgctagatcgtatggtagtactattttcagtctgttgagaaacttccgtactgtttttcataatgactgtactgctttacattccagagcgttcccttttctctgcatccttgccagcatttgctattgatcttttgcccattttttaatttttaatttttttttttttttgctattatttgggtttcttatatattgtggttactaatctcttgttggatgggtagtttgcaaatatttcctcccattctgtaggttgtctctttacttggttgattgtttcttttgctgtgcagaagccttttagcttgacctttgtcgactttttttgctttagttgcctttgattttgaggtcttacttaagagatctttgcccagatcaatgtcctgcagcatttccctaatgtttgcttgtagtagttttatagttcacatcttacatttaagtctttaatycattttgatttgatttttgtatattatgagagataaaagaaaggattgtctcttaaagatgaactgaaaggtgatagaagattttacttgacctttgaggagtatcgcattatggatgagctaatacacattttttaaaaaattagatgtgattaagctcctttcagttagttgacatttttaatactctagagcaggagtgtgtaaatctatagtttatgggttggctgcctctttttgtaaataaagctttgttggaacacagttatgcccatttggttatattttgtccattattttggtctacatcagcataattgagtatttttcagagaccatatggcttgcaaagtgtagacggtttatctggttctttatagaaaatgtttactggttcctaaagtagatgctaataaattgattagcccatatctcatttttaagtctttatagtccagcttaattttctcaataatgtggatacaggttgaatatcccttactgaaaggcttgggaccagaagggtttagggtagggtaaaaaaagtagtatttaggatttctgagtttttaaaattttggaatatttgcattatactttgtggttcagcattcctaatctgaaatgctccagtgagcattccctttgagcgttatgttggcactcaaaaagttttggattttggagcattttggagttttggattagggatacttaacctgtagtaaattatttttcagagatgtgtttcagtatagcaagttcatagatcttttagtttgaaaaaaaattaaaattctattaaaaattgtgttcagttttgtattagaaattcattggagggctgggtgcagtggctcacccctgtaatcccagcactttgggaggctgaggcgggtggattacttgaggtcaggagtttgagaccagcctggccaacatagtgaaaccctgtctgtactaaaaatacaaaaattagccaggtatggtggtgcactcctgtagtcccagctagtcgggaggctgaggcaggagaatctcttgaacctgggaggcggaggttgcagtgagccaagattgcaccactgcactccagtctgggcaacagagggagactccatctcaaaaaaaaaaaaaaaaraaagaaagaaaaagaaaaaagaaattcattgaaaaataattcttttaagttaaatatatgtttttcacttagccatttattttaaagaaatagttttatggaaaattagaaaatatgtacagcaaatttcactcaaaccatctggagatcatacagttaaccctttaatacatatcctctatgaacatatttatggatatatatacagattttttaagcccaaatgaarttatactttacttattcttctgcatcttgctttttcagtcatctgcttaccttttcaagttagtaagttttcatatcatctgataaacccagaccatattcacatttcaccagttggtcctaagatattctttacaggctgggcgtggtggctcatgcctgtaatcccagcactttgggaggccaaggctggcagatcacaaggtcaggagctcgagaccatcctggccaacatggtgaaaccccgtctctactaaaaacacaaaaattagctgggcgtggtggcatgcagctgtagtcccagctactcrggaggccaaggcaggagaattgcttgaacccgggaggcagaggttgcagtgggccgagatggcaccactgcactccagcctgagcgacagagtgagactccatctcaacaaaaagaaaaaacaaaaaaagatactttttacaaagaatatccaatctgtaactatgccttgtatcaggttcttagtcacagtcccacattctgttccttgtttaaaataacatgacttgttgaagagattgtaccagtcattttatagaattatcttacctttatgattttctgattgcctctccttcgtttcctttagcatgtttttcttttctctgtatttcctctaattggaagttgtatctaaaacagcccttctcagtaggggttcctcaagagaattaagcctaaagctattcgttatatgtaatgaattctttcctctacattaataatggttctagctatataccgcccttaggataattaagaagatgggcactcagataattttctgaagggcttaattctrtacaattttttttttttgtagatatagagcttctctatggtctcaaacctggtctcaagtgatcctctctccttggcctcccttaatgatgagattacaaacgtgaaccaccacacccaacctataggatataattctttcctagaatcctgattgagaaaaactgagaggcttagaggattagttttttaaagttaaatattttgggctagaatatatcataggtacttgatgctatgtcttagtatatatacagcgttcagttgaccttctattagtgatgctagggttgaccactggattaagatgaaagtctgttccttccatttttaaagttcactttcctcctttgtaatataatgtagtttgtgtgatggtagcttgttagtttatgaatgttcaattccctatcagactttagcctaattgttttacattccagtagataatccctaccttaatcaataatttcattatgggccaggcaatgtggtttatgcttataattccagcacgttggaaggctgaggtgggacggttgcttgatgtcaggcattcaagaccagcctgggcaacatagcaagagcctgtctcaaaaaaaaaataatacattaaccaagcatgttggcatgcacctgtagtcccagctactcaagaggctgaggcaggaaggatcacttgaccccaggagttcaaggtggcagtgagccacgattgtgccagtgcactccagtctgggcaacagaacaagactgtctctaaaaataataataatttcatcatgggttgcaaaatgatatttgactatttctgttatttcttgtacatataagttggcattcttatgagctcctactagaaaggtaggataaatcttaattcttttcaaaatgaggatttattttaaagctgccttgaatttttttttttctggctttgtctttttgaagtatgatggactcatgttcatttaggtccaaccaggtgtctcctttccaagtttcagaatcccattctttaccaktcagtttcctaactttcacatgagaagtgtggagggactgtaaattcacctgttgtttgtaattcagcaagtcacacaactaagtttggtatacgagtttcagcagtactaactttgtagctacaaaaagtaagagctgcttttagactgggcgtgaaagctgtggtgctcagactgtggcctgaggtgagagttaatggacttgaatttgtcattttctttttgtaagcacttgtgaatttaaaataatcccatccacatgtattttgtgtcatggttactgccacagcagtcaactacagcagccacttgggcattcaaggcacgtgcctgacttagcacatcatgacaatcaatcacaggtgatattttgaggaactgtgatgcagtctgaaaaatatatttcctgtggtgcttaaaaatgtctctaattttgtcatgtagcttgtcatgttatagaacccaggggatgaaattagtccaaaatggccaagaaaaaaataggcatgtggctgtaatgccaggttccaaacccctcttaagaccttttctcatttagtttcctgcacactctcctttaatgattacattctgtcctatttcttgttagtattatacttttgtggtctgtcctaatggacccattcctaaacatggtgttgaactttttgaagttttaaacgtgtttctgcttgctctcatagctaaactgaacctgtgcttctaacatttttgtctcttcactttctattttgttaatctaagatctcaattcttatttatccctgctatctttttactggtgagctcttctggactctgtggcatttatcttgaagcttttgaggactttaagaggcagatttttaacatagcatagctctcaaagaggaacagaagataactgttagttctgatgttttagaatgtatgtttgatttaatttgcagaatttcatcttttcaaagagattagttttagaaacaggtttttttcagaatttggtctttcagtttgagtcartagttagaatgtacaagcaaatccttccacttgtacacatcatgtcttattaaaattgaaatatcattcaggaagtctaaaggccaagtgattatgtaatgagtttatatcaacagcatcaaagattcaattgagagtttgagacaggttgagggggagagagaatgagtatcagctcttaaagagaaatctctcagtggctccagttcatgttaagggaacttagttactccgttcattttgctactttcagccttgaaccgtattaaattaagtgctcctgtgcatttattagtttacgtattacatatttaaatatattgcatatattagtgtcatagtcttttctaaaaattctggccattttagtgcctggcatccctgaatattttctttctgagtttcaggggaacaaagaaagtcttgagtaaaaaatatctagaagaacttaatggggccagaaccatatttgtgacattttcttatctcatctagtgtgttttctggtgacttttaaagtgttgttttattttttaatttttttgtagagacagggtcttaactttgttgctcagattagtctagaactcctgggctcaagcgatcctcccacctcagcctcccaaagtgctgggattacaggtgtgagccactgcacgcaggctctgatgactttttacaaatactttcccctctaaagcaagggctcttagttctttcctttcctgccattcttccttcttttttttttagacagagtcttgctctgtcgcccaggctggagtaccatggcgcaatctcagctcactgcaacctctgcatcccagattcaagcagttctcctgccccagcctcctgagtagctgggattacaggtgcgtgccaccacacctggctaatttttgtatttttagtagagacggggtttcaccatgttggttaggctggtctcaaactcctgaccttgtgatccacccacctcagcctctcaaagtgctgggattacagccrtgagccaccacacccggcccctgccattcttccttctataaatacttggatatttactctgtgcctcttgtggctttagatagtgacagatgtctcagaagtctatatcctagacataaacttatgtgtatactcatagttacgtggttaatttctctgcaagttagctgcaactccacctttttccaacaagcatatataatgcaatatgcacaataaatgaaaatgagcggaagtgagtctgcatttagttagcaatcaagttctgatgttattcattacaaatgatgtatacttcaagctgacatgcttaaaactagtaaaatagttggttcatgtgtgatagatgattctgtttccccatgctgttaatatttcatggctttctttggtaatacacgaatcattatccaggtaaattagtatatagctagttacactgataataatgtataatattagtaagatagattattgttgcagtctgcctaactttacaggcttttgaaatataggaagtccttgatattaatcatatctttgttctatgtatgtaagcaagtttgggaggtagctatcgtgtaatggttaagatcatagactttgaagccagacttcttaagtttaagtcctggctatgctgtttcctacctgtgccatattgggcgagttacttgactgtctgcctcagttttctcatcagtataatggggataatagtatctgtttcatattgtggggattaaatgatttaatacatataaagctcttaaaacagtgcctggtgcacagaaagggctcagtaaatgttgcaatgactggtcagcttatttttcatgtacttttcttcctccccctgaaatgtaatggcctggaagagagagaagaaatagaaagagtcaagtatattaatatacttggacttcctttcttctgtcttctgagaaggaaaggtggttttttgttttgttttgctttgttttaaaggtagcttccagacccgaatatcttaaatagccttctgtgggaatgagctggtatacagtcattcattaacccctcacttctcttcatcttagcaacctagcattctttggagcacaataataaagacagtcatcttcaatgtaggtttatgtagtagatgaagctttgaacttgggaaattttcctgtgtagtttatatctgcattgtaaccacaaatatcactatttagatcttatttaataatacattatgggatttcacccccactctcatgcctcctgaaccccatggaaattatatttctaactcattgcttgcaagagctttttttaaaacattctttgcctagaaaaagatgcattacattttactttggaaaaaatatatatcacaaaaacagactacaaggagaaacattgagttttagtctaattctgttttatctcttttatagtatttatagtagtatcactttctgtgggatgacatgtttattattctattgccaaagctgaaacattagcttttcttgtggaaatatacagtggtatgcctagcttactctagcttattatctattctgtatcaaccaggtatataagtaagtaaattacttgtaaaataattttttggataatgcagaagtgggaactaagaaattagtaagttatttctgaaacaacttgggtaagtctgtaacctctctctacttcagttttcccattgagaaagtagagacaataatagcagctacctataaagttgtatttgggkattgtgttagtccagtctcatgctgctataaagaaatacttgaggctgggctcagtggctcatgcctgtaatcccagcaccttgggaggccaaggtgggcggattgcctgaggtcaggagtttgagaccagtctggccaacatggtgaaacccgtgtctactaaaaatacaaaaaaattagctgggtrtggtgatgtgcatctgtaatcccagccacttgggaggctgaggcaggggaattgcttgaaccagggaggtggaggttgcagcgagccgagattgtggcactgcactccagcctgggcaacagagcaatactccatctcaaaaaaaaaaaaaaaaagaaaagaaaagaaatacctgaaactgggtaatttataaagaaaagaggtttaatcagcttatggttctgtgggctgtacaggcttctgcttctagggaggcctcaggaaacttaacaatcatgggggaaggtgaaggggaagcagacacatgttcacacggccggcaggagagagaaggaggggggtggtgctacacactttgaaacaaccagatctcgtgagaactctatcacaagaacagcaagggggatgttcattcccatgattcagtcacctcccaccagaaccctcctctaacactggggattacaatttgacatgagatttgggtggggacacagaacgaaaccatttcggggattaagtagataagttgtatttagaacagtggtgcctagctggatgcagtggcacatgcctgtagtcctgcctgggcaatgtagcaagaccctctctcttaaaaggaaaaaaaaaaacagtgacacttaaacttaaaaagcactttyaaccgttggctgttttattgccatctttctcattattatacttgtaaggtgattgaaataatggtttaaatatatagattaacattattcattttaagtttttttctctattcagatgacctgtgtagaaaaagcaggaacagatgagaaaatgcttatgaaggtttttcgctgtttgggaagttggtttaacttgggagttttggacagtaacttcatggctaacaataaattactagcactcctttttgaggttttggtaagtaatgaccttatttatcaaagtatttctgccaatcacttttcgtaactaacctgctgggacataaaaacgtttttaaatttttgcacagtaactggaaggcgtgtattaagaatgcagcaatgttccttccttgctacgaggtaccaaattagaagtatcagttttaatactcctaataggatatagttatgtttaagaggaaaacartcttatatgttgatacatgatttacatattaaaatccaaataaccattggtatctttttccttgttttaaaaatatamaattatgtatttcaataatggtcattgaatcctagacatttccatgatataattatgtgtgcatcacaagtttaggaaaaaacagaacaggaagaattaaaaattatgtttagtgcatccagagacaattatagattaagatattatctttgtagttgagattagttaaacatcgtatatgcaaaatggatttgggtttttgagattagtagaataagtactaatgtctttttatatacttgtgcrtttcttctttaagctttgaaagtagcagtgcctagtaatatagtcttggtagataggagttagggagtgattagaataagattacattttagaacaagaaacataacattatctcaagcataaatattattgaaggggtctttggagacatgaaaaactttgtctctttctgctggagggtttccttcaatgaagatatattagtatggaagctgcatgtattgtgaatgtatgccgatgcgctattactcagaagatagtaccatgatgctagattgatgmcactgtgaattaaagaaaagaaagacatttttcaaggagacatttggcatgtcattggtgtgtatttctgtgtcatttttgcatcagaagctaagccttaggaaaattaggatgccaatcattgttttgcttgccattgtctgtctccatttatgttggtatctttcctcaataatgataatatttattatcacgtcaacaaatagtgtgaagagtaatcactgtaaataaagtcatgtcccacttttgtttaaaaaatgtacatgtgattacatataaatggaggacagtgtagaatacacttcaaacttaacagtggtaatttctgggaattggaattggagtaaggaagaagttaattagtgttccaggattatattatctcctctactgatccagtgtcaggactcctctgtcactagtaagagtgtttatctagagtcagggtaaaatatattcttatttttacattcattcagtggtttaaaatcatgctactttttttctttttagggggagtgtcacagggagtcagggtgtctccctgtcgtccagactggagtagctccattggcatgattgtagctcactgtagtctcaaactcctggcttcaagcaatcttcctgcctcagcctcccaagtagctgggatataggcatgtgccaccatgcctggctaatttttaattttttctagagacagggtttctctttattgcccaggctagtcttgaaccggcctcaagcagttctcccacctcagcctcccaaagcactgggattacagatgtgagccaccacacctggccatgtcacattttattttgctgtatgtttggaccatgactttctggtacaactttcccccaacagctcttaaaaaaaaaaaaaaaaaaaaamcctaaaawttaaaatacttcatatatacaaaagaataagtatgaacacttactrtttatttatttatttttgagacagagtctcctccctctgtcgcccaggctggagtgyagtggcacaatctcggctcacggcaaccttcgccctctgggttcaaatgattctcctgcctcagcctcctgagtagctgggactacaggtgtgtgccaccacacctggctaattttttgtatttttttttttttttttttttttttgagagggagtctcgctctgtcgccggggctggagtgcagtggcgccatcttggctcactgcaagctctgcatcctgggttcatgccattctcctgcctcagcctcctcagtagctgggactacaggaacctgacaccacgcccggctaattttttgtatttttagtagagatggggtttcaccgtggtctcgatctcctgacctcgtgatctaccggcctcagcctcccaaagtgctgggattacaggcgtgagccaccgcgcccggccaattttttgtatttttagtagagacagggtttcactgtgttagccaggatggtctcgatctcctgaccttgtgatctgcccaccttggcctcccaaagtgctgggattacaggtgtgagccaccatgcccagctcgaacactgactttttataacttggtaatataatgagaatctttgaacctactattcaatctaagaatacctaataaataatttgcatctttgtgctctcccaaacctgcttatatacctttttgtcccactggagattttaaatatccttttaaaaaaattattcaaggaagactaatacgcccttactaagtgtattcaacctctcaactgtactctcttcactagaaacccgggaggattcccttcttggaccttttggtctgctctgatttgcatcagttgttctttagatctactccctgtcatcttgggacttgtctttactgtgctttctggattaggttagctgtttctcaaaccccctcaaataacttcttcagaaaagatataatggaaagtaaacttggaatttttgcatgcctgagaactatttttattttgctttcgatcttgattgatggctcagctaggtattaagttgtaggctgaatattattttccttcaaaatttcaaaggccttgctctcctttactagcatgcatcattgttaatgaaaagtcagagaactctgaattctgctccttactattacctcctcctctcttcccctgaaattttacagacctttgtttaactctggtattctgaaatttcacaatgatgtgtttaggtatgtgtctttgatacttgttgagccctttcattttaggtagtacttgagtatcagaaaaaggatggaaaagatttttcacacactagaatagggtagggaacacatggctttccatttggaggggctggtgtgaacaagaacatggagattagaaatgatacgaccatgacttcgggacagaaaggctgatttgcttgacatataaggaaatagaaataagattgggaagattgatggatgttgtctcatggaaggctatgacttgactgttacacatttaaagtacatgttcagaaagaggctataattgaaagaaagaaagaggctctaattgttttcctattacatttatccatcactrtcttcaaaggattggttccaggaccacccactacccctgcccctctgtgcacagtttccaagagatgcagatgcccaagtcccttatataaaatggtgcagtatttgcatataacctatccacatcttcccatatactctaaatcacctgtaaattacttataatacctaatacaatgtaaatgctatgtaaatagttgctatagggtaatttttaaatttgtgtttttcattgtattattatttacttatattttgaatattttctatcgatggttgattgaaccctagggtgtgcagggccaactgtagatcactccttagtgatcatacttcttgcttccctattcctgctacctccccagcaacaggataagacctcgtctaacctacatgaagctgcttcggactgtgtatgctcagctctstatgccattgagaatgtggagactaacttgccattagccatgcaactttttcagggagtgctgacattggagactgcctatcatatggccgtggcacgtgaagatttagacaagtgagtaattgtttaagtctggagccctgggtttaccyacagtctggtcattcttttaagtcactttttattattcgtctgtcatttgtgattctcagtgattctgtaaagtacagatagtgcttcctaaagatgctctactatgctcttctgaacctagagtggcaaattgggtgcagggtttgtagaattaccatagaaaggtaaggctttaaaagttggagacaaattttaaaatatcaagtgtgatttgatgggagtttttattcaaatgttttaataattgagaatttgaactgacaagtcacttgcgtaggagtgtacgatctaggtaaaggtgtctgtcatggggattgtgatacagcatagtaaataatcactagatgtcccttagactgaggaaccttttatttatttgattaactgtgcctgtatatacttataatatccagatttctgactcattgttctcattcccctgtcttctacagagttctgaattactgccgtattttcactgaactatgtgaaacttttcttgaaaaaattgtttgtactccaggccaaggtcttggggaccttcgaactctggagctgctgcttatctgtgcaggccatcctcaatatgaggtagtgtttatgctattcaaaggccattattctccaagttgtgtgctgcatattatctatatttcattacctcgtgcccaaatttttattgttgagaaattacagtcttgtttttaattaatgtgatttcatctgttttggaatttttwaaaaaaattatatttgggtttctgcattgtgtccatttctrttttcttacctggttggctgggctgttgtaggcccctcaaggaactcgttagaaagcaagcctttccaatgaaccccttgtctagcttgacttattctctagagygttacagctaaaaaacaccaaattctaactatacctccacaagtcttaacacccccaatttttctccaaatgatggatgagaatgacaaagggattgaaaggacttaagggtctctgtcattcagaatccttgacatcctacttaccgaggtttgctagattttttaaaatctcatttatttgagaagttttacctctttatagtataagaaatgagaaagggtcggggttggtggctcacacctgtaatcccagcattttgggaggccgaggtgggcagatcacctgaggtcaggagtttgagaccagcctggccaacatggtgaaaccctgtctccactaaaaatataaaaattagtcaggcgtggtggctcacacctgtaatatcccagctacttgggaggctgaggcaggagaattgcttgaacctgggaggcagaggttgtagtgagctgagatcgggccactgcactccagcctgggagacgagcgaaactccgtctcaaaaaaaaaaaaaaaagtgagaaagaagtgctcccaagttgggcattgttttaaatagctctgttttggatccttgatgggaaaaggatggtagggatcctcttactgtgccttaggcacagtggtcctgtgactctcggcctgttttctgttatcacatacaagacaacgtttatttgttttacataatgttacgaggatacctagatttgaatggaacccaaaacatttctgggagaatgtaacaccacgcagttatcactcctttaaacagtaccatatggaaaagaggctacgagtaaaatcccaggctttttctccctttctctcacactcaaggaaacaggtgaataaaagtgacatgaagctgaatcagttatgttcaggagttacagatggtttgccaagtaagaaatgttctaatctcaaacattcaatgaaatgatttcagaattttcagaaaagtactttaaaaaagacttctggccgggcgcagtggctcacgcctgtcagcaccttgggaggccgaggtgggcagatcataaggtcaggagttcaagaccagcctgaccaacatgatgaaaccccatctttactaaaaatacaaaaattagctggggtgatggtgcgcacctgtaatcgcagctactcaggaggctgaggcaggagaatcacttgaacccaggaggtggaagttgcagtgagccaagatcacaccactgtactccagcctgggtgacagagcaagactccatctcaaaaaaaataaataaataaaaataaaaagacttctggctgggcacagtggtttatacctctaatgaggttcatacctcttaacacttttggaggctgaggtgggaggattgcttgagcccatgagttcgagaccagcctgggcaacaaagcaagaccttgtctctacagaaaatttaaaaaattagctgggtgtggtggtgcacacctttcatcccagctactcaggaggctgaatgggaggatcacttgagcccaggagtttgaggctgcagtgagccatgattacaccactgtactccagcctagatggcagagcaagaccctgtcgctacagaaaattttaaaaattagccagacatggtggcaagcgcctgtagtcctcctagctactcaggaggctgtgtggaaggattgcttgagcccagaagttcaaggctgcagtgagccatgattgtgccactgtgctccagcctaggcgaccctgtctctaaagaaaatatatatatcttttgagacagggtctcactctgttgcctaggctggaatgctgtggtgcaatcacagctcactgtagcctcagcctcctgggctcaggtgatcctccaacctcagcctcctgagtagctgggaatacaggcatgtgccacctacatgcctggctaatttttgtatttttttagagatggtgtttcgcgcctggctgaaatttgttttaaataaaataaaactatgtggtggctcatgcctgtagtcccagcactttgggagacctaggtgggaggattacttgagggcaggagttcaaaaccatcctgagcaagatggcaaggccctgtttctactaaaaaaaaaaaaaaaaaaaaaaattagctgagcttggtggtgtgtacctrtagtcccagctacttgggaggctgaggcaggaggatcrcttgagctcaggagtttgaggcagcagtgaactgtgttcattccactgcactctagctggggcaacagaatgaaactccgtctctaaaaaataaataaaaataaagacttccatgtctgttattgttttctctaaattcaaaattcagtatacttttggaggcattacctcaggactaaatggaatgtaaagccagtcattctaaatggagatttgggcctaacgtgggaagacaatttggggagataatagtaaatctgctagagaaaaggtgacttcttaactggctccactcatattatttaaaaatatatctttcttcctatatggtcgtggtgataataaaatgtcttcttattctattcctttcccattcaaataaatcatctcttttaacctaacaggtagtagaaatttcatttaacttttggtaccgactgggggaacatttgtacaaaactaacgatgaagttattcatggcatcttcaaagcttacattcagaggctgcttcacgccttggctcgacactgccagctggaaccagaccatgtaagttcccttctctacctcttcaaatcttaatttcttcctcttgtcagtgccaacttgaaaaggaactgagaagatagataataaacctggctgggcaccctggctcatgcctgtagtccagcactttgggaggccaaggcagatgaatcgttagagcccaggaattcaagaccagcctgggcaacatagggaatcccctgtctctacaaaaagaaataaaagaaaattagctgggcctggtggcacacgcctgtagtcctagctactcaggaagctgagttgggaggattggcagactctacagcttatactgaagaagtcagtaccagtataatctgttaggtctatttagggaaaaaaaaaagcaaaacactccagctaaaccagtaattcttttcctgggagtatatcttaaatctgcagaagaaaaaaacagctattttatatacaaaatgttatctgtaaaagtaaaaattataaacccatgtacagcagtataacaagagttatatgaattatataagaagagttatgatttagcaacttgatgcagcaattaaaaggtagtgaaatgatgatatggtaagagaaaaatcagaatgtaaaattatgtactctcttttttttttttttttttttttttgagacggagtctcgctctgtcacccaggctggagtgcagtggcgtgatctctgctcactgcaaactctgcctcctgggttcacgccattctcctgtctcagcctcccgagtagctgggattacaggcacccgccaccatgccaggctaattatttgtatatttagtagagatggggtttcaccgtgttagccaggatggtctcgatctcctgacctcatgatccacccacctcagcctcccaaagtgctgagattacaggtgtgagccaccgcccctggccaaaattttgtaccttattaaatagtagaaaataagtggttagatgaaaactaatacaaaagtgaaatatttgtgtgtatgattttgccccatgaagatacacattttttaaatcttatttatactgattttgtagtttaaaagaatatagaaatctatttgcttagaaaaaaatactagaaaattattagtttattagaaaactcttcaaacatcatgcttagtctcttcaaattttgccacatcgatttcatcctgttggttggttgaatccgtcctttaatctaggacctgcagtaagttttattgcttacaattaaatcccacgtgctgttctcttaattttaatgttagtattgtgtttgagtcatggtattttgtatctccacacaaccttagtcatgatttagtctggtggttttcaaactgcacccacccccgctattttttaaagtgaagaatccaactgggcgtggtggctcatgcctgtaatcccagcactttgggaggccgaggcgggtggatcacttgaggtcaggaatttgagaccggcctggccaacgtggcaaaaccccgtctctactaaaaatacaaaaattagctgggcatggtggcaggttcctgtaatcccagctactcaggaggctgaggcaggagaatcacttgaacccaggaggtggaggttgcagtgagccaagattgcgccactgcactccagcctgggcagtagagcaagactcagtctcaaaaaaataaaataaagtgaagactcctgtcttcaaccacattttacttggaagcctgatttataaagcagggcccctttggtttaaatggctctgtgcttgatcccttttttgcctttgctaattctgtggcaccatttcccttgcgggtaatttcttacacttgtaagtgtatagcgctttataatttgtatagtgctttataatgttagccattatctcatctgagatagccatcgtttcctcctcattccttcaccttaatttcttcatcttaaagcaaggagcttgaactagattagcaattctcaatagtactaagggcttttcctaggtatttgggcccaagattcttgtacgtgcctttaaccatcttataattggtaactctgtttacagaagtgtgtcagaataggaaagatacagaagtgtttggaataggaaaccatggaatataaatgatctttaaattttttaatgacaaatttcaaatgcacagcaaayataaaataatgtcatagagaatatctgtatacctaccacctaaattccactattcatattttactatgcttgttttttatatctgtccacctacatgaaatgttttaagtttaaaattctgggctgggctcacatctgtaatcccagcactttggaaggccaaggcaggaggatcacttgaacccaggagtttgagaccagcctgggtaatatagtgagaccttacctctataaaaaaattttaaaaattaactgaggccaggcacgtggctcatgcctataatcccggaactttgggagggcaaggcgggcagatcgcttgagctcaggagtttgagaccagcctgggcaacatggcaaaaccctaactctacaaaaaatataaaaattagccaagcgtggtggtgcatgcctatagtcccagctgctccggggctgaggtgggaggattgcttaagcccaggaggtcaaggctgcagtgagccgagatcatgtcactgcactccagcctgggtgacagagcgagaccttgtctcaaaaataaaaataaaagtatattttctgtgtgaagttattgtgacagtggttgattttggtagatcttgaaacataaatcttcaatttgtttgtcactaaagagctgaccttctctagataggcttatcacttaatttactacttcttccaggtcacttctcactctccccaagccacatttttccaacaacaaaacaagctgtagcttagaaatacaaaacacagcagggcatgccggctcacggtggctaacactttgggaggtcgaggtgggcagctgacttgaggtcaggagatcgagaccagcctggccaacatggtaaaaccctgtctctactaaaaatacaaaaattagtcgggtgtggtggcgtgtgtctgtaatcccagttacctgggaggctgaggcaggagaatcactggaacctgggaggcggagggtgcagtaagcagagatcgcaccactgcactccagcctgggcgacagagtgagcttccgtctcaaaaaaataaaaataaaatacaaaacacacacacaaaccaaagattttctcctggtaaaggcagagaataggttgtcttgacttggcatacctcacaatttaggaaaccctctgtctaaaataaaataccctcgtgatttaggcaacttttgttcattgaaacttgactgcttaatggtttttttcttcttcttgattttatagaggtcattgaaagccgcagtgagtttaaagcagatgttatctgatttgatattttaggagggggttcctgaggagactgatgactttggggagtttcgcatgagggtatcagacctggtaaaggacttgattttcttgatagggtctatggagtgttttgctcaggtaagcctatttggagattgtttccagttttactagtcaccttaattgtattcacttctgtgtcttctgtgaatgttccatcttatttcttcaattttagtggctgaatgagataatagatatgcaagtgcctagcacrctgcctggcatatagtagctatgtttatttaacattttacaagtcagttgcagtttatggatgattcggttatggtttactctgtatgcttgcactgattgctgttccacttgtacasctggaatagaagatcatagataagcattaaagcctctaggatacttatagggaatttggacctagccaggaacaataggcaagtgtttctgctttagtaattacgtaccaactcctggtaactcttgtagttatttggcattatctttgtccacacttatggttagattcctgtgcagtttcgtcccagaggtgactatgctagagtagaagattcatagtccaggggttttcctgacaatcactgagtaacattttacctcataaggttacaatcatcatcattccatatcacttaacattagtttaatttcaggcagttttcatattgctgtattatattctaatgagctctgaaataccactttggaagctttgtcacagcaatactaaactaacctaatttttttttttttggtaactcagtcattttttgtatatttgggtgtaatatgatctaaaaagtattaataaaagtataactattttcattatattaagcaaagcatgcttattgacccatctatgaagagttgaggattcttagaaagccacttaaatgagatccctggatcttagacagatgacctctgctcagatttcagctcatctctctttagctctatggctttgagaaatcctttgatcttctcaatcctttgacttaatttacaaattatgtaaattatcaatgttgttcaagatatagtctgtggaacaccaaccccatgagatattttttgccaaaaaaaagttahtaattaaaattaggaaatggtataaatagtatattaaargctctgtgaagttgtataataagagagctgtttaattttgcctttcctagcagtgtctgttatttcactataaaaatattatttagtcacattctgtaggtggatataatctgggaaattgtggaccagaacatctctgagtattctgctaggtgtacctttttttaaaaaaattaattctgcttggatacagtattgtgataggtgcttctaaacagctgctttttaggaattcagtcagtactaccagtgttgatgcagacaagtagttaaaacaatagaaatgtaaagccaatacatatatagaggatttacattgtatctctattttaagtgtgtttatgtatttatcagttattatcaggaccaggaaaagacactcatatactgtgttttgtttttctcatagtagtcattttctgggggcagatgataattttgataaactcttgcgggtctaaatgggtttatttcaaatattaaaatagttactcctagttagtgatgatataaaaaaaagaaaataatattctcatctggcttgagaggtaattagatttagaaacaagaagcaggatttactttaactggattttttgttttgtttgttttggcattctgttttccttttaatggatccataatccacctcttcttctctagttatattctactctgaaagaaggcaacccaccctgggaggtgacagaagcggttctctttatcatggctgctatagcaaagagtgttgatccgtgagtgtctcataagtcttttgctgggaactctaaatatcaagaggaaggaaaatgacactattttttttttcttatatggtatatacctggagactttcagaacttcttacttctgttgtgccgtctagtcttctgacttctagagtctagtccagggtagcctgaattgctgataccatgttttaacagcatttcctagagttgaaattattttattcttgatgctaggaatagaatgctgatttatttttccaactgaggctcccttgtgaaagttggtatggtaaagaatttgttagactgtttaattgttggtacttgcttaaaagcaattgaatagacactaatttgggtttcctgcttttgtgaccttgggtaagttattcttacaaaattaattacattgtttcagagaggcaaggcataggcaccttttcacctaaaagagccagatctaaagggcaattactgtttttgttattgccattgaaaaatttcaaattattcaaattttacttctaattccatagaaattctatttatgacacgaagccctagagacaaaatttactttgtgccatgagtatataaatcgatgttaatatctgccacgctgaattgtgacctgatacctgcagtcaagctctgtattcagtcttgattggagagatggttaaggcagatatttataaaaagcacaatgcttctttcttagctgcctttcagggcctcgtcagtggcatattgtttctaatccagtaaatattcaaggaggtcgaataggtttatttttctctgttaagaagtcctggtccttaattatgtaccacactatttactcttaaaccaattttggtgtcattttgaaccttctgtgacaagtctgaagattattaaaatcattaatgttctaactaatatgtcttggtttgaaaaatgatggctagatagtcttcgttaattgacttagtgtccctaggaaacataagtcataaatgagagatttgatattttttttgtttatatgcatttcaagccaactgcatgattataattttttagtgcatataaaaggacttaatagactagtttattagcagagggtggtcttgctgtaatccaggatattatttacattttaaacatctttcatttctggattaagttctgccactttaggggtatcctccactctactcaaaaggccgttagccagtatattttgtgggggacagagggaggagagggaacagataaactcatggagctatggaaagtgtttggttaactttaattttccctcatgttccaaatcggggcaacttaatctattcctgcagcttattttcttgttctttcaattagtgagctgcctacccatacttaacctgttcttaaagtttccaatatccagctataagaaatcttttggagcaaaacaacagagaatggtctatgagaattattcattcatctgtttagccattcagcaatatttattgagtgcccactatgtgccaggcactgttctaggtgctgcagctataggactaaataaaatagattctttagaagaagacattcatccacagtaaatgtctgcctctccaatttaaagagcctgcatttgatagcttgatgtgtctgtaggcactttactggcattcagaagattaaggagcagtatgcttttcctgaaacaatatctttcatttctatcttttcctcttttttgargatttgaaaatctttcataacaaataccaagtacttttatcttaatggttgtttagaaagaagccctttagcaatgctgtgtgtcrtcacagcctgttatttggccagaatataacctctgaaatcagtaactgtgagtacttaccgcctgtactcagggaaaacaatccaacacttgtggaagtcctagaaggagttgtccgcctcccggagaccgtacatacggctgtgcgatacaccagcattgaattggttggagagatgagtgaagtcgttgatcgaaatcctcagttccttggtatgtgtaatctctctcctcygccacttctaacttgtcatttttctgatttttcttctcatctcttacttttgcatgtgttttcctttctgtttttttaacacggagtgtttatagaaactgagagtaaacaatatgttgtaagttagtgcttatttgatataacatttataatctgatctgggagaaggacctttgaaagattagatctacagatagggaaacagtgaacaatttgcttctagtactctgtttaagcatgaacatttctatctctgttagtctttggcatatgcttgagctaatcagaatctcttacaattttaacatactagaagctactcaaggaccaaagcaaaggagataatttttcacttgtaatacatgcttcatttaaaagccaagaattattcaaaactaaataactgcaaattaaaatgaagacttatataacctctgggtgtccttattgacttgaaaaaataactaaagatcgtaacaactttagaattgaaggtaaagttagaaatgatttattctaacctcctctttttatagacaaggaaactgaggcccaaagagacgaaatgacttttccagggtaatatatatcaagccctgacatttaagagggatacattctgagaattttaggaataccaaaatttgtgattagtattatatcattaagtttgatgtgtttcctgtgtatatctttattatcgcctttttacttgattttattttatacatctgtttttagtgactgaaacacatgctaaaaagagtgaatgtgttctttgtttctatacactgagctgctttctaagttcaacgtactatttcttttttttgttgtttttgtttttgttttttgttgttttgagatagagtctcgctctgttgcccaggctgaaatgcagtggcctgatctcagctcactgcaacctccacctcctaggttcaagtgattctcctgcctcagcctcccaagtagctgggattacaagtgcatgccaccatgcccactatttttgtatttttagtggagacagggtttcgctatgttgggcaggctggtctcgaactcctgaccacaagtaatctgcccgcctcagcctcccaaagtgctaggattacaggcgtgagccaccacgcctggcccaacatactatttccaagtgatttcaatatggctgttttttagttcttagatttctgcactttatctggctcaacatttggctttcttttctgaaccatttttccaccaagaaacatagtagatttgtttgttttaataccttcagttaatgtccagaaagcagcaaatctaggttgacttgcagactcttatcaaaagatttatcattcagtgccaccttgcagtatctcattcagatttgtgcctcagcagtagacagattgctctatgttcatactcagaatagtcaaaaccacaaacacccaatttgggaatcacagaagtctacattattagagttgcttgggctaggttctagattctaggtcttttgattcctagactaaacagggtggggttttggttttgtttttttctttttggtggaggtaggcagattgtgctgagtttgggcattgtattgatcattagactagaaatggacataatggttttaaatgggctttaagacattattattggccaggcatggtggctcacacctgtaatcccagcactttgggaggctgaggcgagaggatcatctgagttcaagagttcgagaccaacctggccaacaggcgaaacctcgtctctactaaaaatacaggaaaattagctgggcttggtggcgcatgcctgtaatcccagctagttgggaggctgaggcagggagaatcacttgaacccgggaggcggagtttgcagtgagccgagattgcgccactacactccagcctgggtgactgagcgagactccatctcaagaaaaaagaaaaaaaaagatgttattattttgattctttccactttttcacagtttgctacaaggtcaatataaagtactcacaatgacctttaacaacacatggttttttgcccaggcgtggtggcttacagtggtaaccccagcactttgggaggctgaggtaggcgtatcacttgaggccaggagtttgagaccagcctggccaatgtggtgaaacaatcgtctctactaaaaatacaaaaattagctgggcttgacgcatgcctgtagtcccagctactcaggaggctaaggcaggataattgcttgaacctgcgagatggaggttgcagtgagctgagatcgtgccactgtactccagcctgtgggacagagtgaggctccgtccccaaaaacaatatatggtttttctaaggtttttttcctatagaaaaaaaatctgatttttataaaagaagataaaaagatgagtagaattagctctatagaaattcaactttatgataaactttcttggagcacttacatttggtaaaattaaaacatactgaattaattcatctagaagtgctaaagattcatctgcctatttttaaggccttttgtaactagaaagaagcaagtataaaagtttcagctttagacaactatccttgtcctgattcatataggctgttttaccaagtaattcatccctcggtataattgtaactccctgagctttgcattctttcttacattgccatattcttaatacctggattgccatatatgctcttaagtcagtggtttacaaactgctctgtgaatccctgggagttaacgttgactgccctgagggaagaaatggaagatgaaatagatgggtctcagggcctgttgacaatatgtaagtgagatcagctctatttttatgtgttttatttattgtggttctgaacacatttcactttttaaaagggttcttttgctttaaaaaaagaaaagcaagtatacctctgttttaataaactagaagttttcctttagtttcagatatgtaatctctgcttggcttttcttcttagaccctgtgttgggctatttgatgaaaggcctgtgtgaaaagcccctggcttctgctgcagccaaagccattcataacatttgctctgtctgccgagatcacakggctcagcactttaatggactcctggagattgcccgctccctcgattccttcctgttgtctccagaagctgctgtgggcttgctaaaaggtactcacttgatgttaaccactaatagtcacctcaaagccactacctggggtaatcttacatctgtcatatcccagtttttcagttgcaatgtacttagtgtttaagaatttataagatgaggaagatggcttttccactagaggggatagtgttgactatatgtacatgcattcttttcttggattatcttaagcctatataattaattaatactacttgcggyatatatagcaccgacctagatttgggtagagacaacatattcaaactaaacacggctgctttttaagttggaagaataaaaagggagaccaaagaagcattgccataccaaagaggtaaatgggagttgaaaggtagtatacatggatcagtgccatgagtagaagtcaggggtcctggtctcttagcagcctttaaccattactgatcagcttatactgagtgattgtctatccagaggcaaacagccattgtgatgaggctcggacttaatagaagaactagagatattaaggctaggggaaaagacttagaacagcctttaagcatggtagctatttttaaatatttgaaagatggtcttataaaagaaggatcatatttattttatgagtagtcacttgtcagccatttatagggaagcatatactggctctaggaagaaaacacttaaccatactttctgaacacagattggggtgccctgtgaggtaatgaaattcttatcactggtaaatcagagagattgaggtatattaaaggattgggtaaaataacctgtgtgatatcttctaagcctctgtgacttgttaaacaattagccttggcaagagtggatggcttatttgtgaattctgtcctttgttattcatatgaccagattccttaccagctagtgtgactgtgcttttttatatcagattttctttttgtaccttgggtttttgttgtttcccttcataggcacagataaatcagagtcaaatatycttgtcattttctagtggaatttattaaccttgacattgaagtgaggtctaacctgtagtacaatgtggcctcccaattttcagtggtatctaatagatgtagaaaatggttttcaatttttatttatttatttattttagagacagggtctcgcttgttgccaagctgggatgcagtggcatgatcatagctcactgtaaccttgaagccctagactcaagtgaccctcgtgtctcagcttcccaagtggcaaggactacaggtgcacaccactatgcttagctgattttttaaatttttaatagagacagggtcttgctatatagcccaggctggtcttgaactcatggcttcaagtgatcctcctgccttggcctcccaaagtgctgagataccaggcatgagccaccacacctggctgaaaactttttaaagtaacatacttttctataggaattaattaaaaggaaaatcatgctgaaattaggcttttccctcctagttttaaagaaaagtctaactcgtctatggcttatagatggccaagaagattcactctgtttttttaattcaaatttgaaggtttagggataaattactgttctgttgaatgaaacttcaggaagtgaaaacatttatattcaaggtgttttttgacctagaagggacctaggctaatacgtaatcctttggatttggggaaggtgtttcagcagttggtggggttagaatggggattgcagcaagagggaggctgagtaggaaggrtctggaccttctgtctccacttgaacctaactgcctcttttggtttttctttttaacctattttattggagttctaagtcaagatttgtttaggagggaaaaagaaagggggtaggaggcttttgtaacttttttttaaaatgaaagaaaggcaaatttaactgttactttgctgttcaagtcacttatttcataaagaaactgaagcccaaagaaaatgtctcttataacctcacagagagtgttatggtgtaagagtgaaatctctaattgcagcccattcttctaaaagcattatgtcagaatttctcttgtgataagaattgctggaagtatttatcaaaaataaagactctctttgacccactaaatcagaatctctgggaagtctgagaaacattacactatggtatacattttaaaatagctttgccattggctttgtgaaggagattttaaaagtctttgacaaatattaacttcagttgtaagtgttaatcagtcttagccttctgagcccaataaagaataaagaaaaaacaactgtaaataacaaagtgttgtcattttaaaaaacaatgctgatctttttaaaagaatggaaccaaaccagttcgctttttctggtcactcacatgatgtagtccagttaagttacctcaattcagcgtttatttttcatttgtatcttcctttgtttttcagggacagcacttgtcctagcccgattacctttggataagattaccgaatgtcttagtgaactatgttctgttcaggttatggcattgaaaaaggtaagtccaattaaggaaggtgtgaaacaaatataagatgtttacatgttaaaaatgaaaagatgaaattacttatttacagatcttttgtctacctagaaaatccaagaaaatgcactaagaatttattaaaattaatgtaatcaaaktagctgcatacaataaatatttcagaattaatagattctcattatatcagtgttaacagaaaaaccaaattttataaaatgttttaaagaggtttgtcctgagccagtatgagtgaccacagcccagggaaacccagtctcgaggagttctgagaaagtgtgcttgaggtggtgggattatggtttggttttatacacttcagggatgtaggagttacaggcaaatacataaatcaaaatatggaaggtatacattggtttagtctaaaaagatgggctgtcttgaagtgggggcttacaagtcataagtggattcagagattctttaatctgcagttggttaaaggaacaaaaagcttggagctagcagaaaggaatgtttaagttaaggttgctatgtcagggtcagccataactctgacagtttaataagattgatgggctatagatgtgacttaactcttgccttctgtggcctcagatcttgtttataatttggtaaaggagtctttgatcagccgggtgtcgtggctcatgccagtaatcccagcattttggaggcctagacaggtggatcatttgaggtccggagttagagtctgaccaacatggtgaaaccctggtctctactaaaaatacaaaaaattagccaggtgtggtgacgcacacttgtaatctcagctactcgggaggctgaggcgggagaatcacttgaacctgggaggcggaagttgcattgaaccgaaatcgcgccattgtactccatcctgggtggcagagcaagactccacctcaaaaaaagaaaaaaaaagtctttgattggtcttatgatctccatttaacattaatgctggccacttgcacctaaactccgaaagatagggagtataacaaaacatatctgacctcccttcccatcatggctgagagctccgtttttaaggtttctctggggtccccatggcaacaggagggacctattcagttggtgggagacttaggattttatttttagtttacattggtaatcatcagttagaaaatgtaatgggaaaagaattcattcaagttagcaatcaacgcctgaacctaccatgtttccttaaaggatataaagatgtcaactcttctccagttatatttatagtgcaataactttagacataccaatgggatttttagaacttgataaaataattctgtagttcatctctgatgatttactaatgggagtatctaagaaattttaggaaagaagagtaagagacaatttgcttaaaatatattacaaagctataataattttaaagccttataatataaagctaaatatataatcttttacatattgtgtaacataacatatatacaatctatattatgtaatatgtaataataataattaaggtaaatgggaaaaaaatcaaatgatactgttttctactcctcagtaatcagacagtaaaatgtagcaatatgtagtcttggccaggatgcaataagatggaggaaaataatttgacaatataaattaaaatttgcgccatttgagtaacttttaggagtttatatacttttaggactttatataaggaaataagcagagattgagacaaaggttgatgtatgttgcagtgttggctgtagatttgtacatgtgacaattgggtgttaatgtccttttgtctcttcagctgttgtctcaagagcccagcaatggcatatcctcagatcccacagtgttcttagatcgccttgcagtgatatttaggtaagaaaggagactctggatgccttacttgggttaaaggctcaaatgaaaccattgtatattgaagtaagcaagtattttttcctcatacttccaagtatctccctatgtttggagactaattaagccagctgttacctgaagttctggggcaaaggcaaattctaagaattcattcctggtaggtctttgtgttaaaatactctttaaaaagtggaaggccgggagcgatggctcacacctgtaatcccagcacctgggaggccaaagcagacagattgcttgagctcaggagttcgacaccagcctgggcaacgtggcaaaaccctgtctctaccaaaaatataaaaaattagctgggtatggtggcatgggcctgtggtcccagctatttgggaggctgaggtgggaggatcacttgagcctgggaagcagaggttgcagtgagctaagatcacatcactgcactctagccggggtgacagagtgagaaccccatctcaaaaaaaaaaaaaaagactctttaaaaatggaattcttttggtctccagttctgtggagaccaaaagaccaaactttcacatatatcatcattccacatgcatcagaatcacctgggcttatcaaaacacagattgctagatcccatcccctcagtgtctgattcattagatcttgggtaggacctgaaaatttgcatttctgataattcccaggtgatgctgatgattctgcttgctaatccagagaccatactttcagaaccatcgctgtatatagtgtatgggtacaaaaatataatgaagtttcttcagtgatcaggtgaaattaatgcatctttgaagtgaagaggaggagcctaatgattaaaaaggcatttgagtgacagttttcaaagagtaattcttactgagtaacataatttataatttttgggacccatgtataactggaatgttatagtaatcattgtgtagaagcctatgtgggataaatatttaaaaaggtgatgtgttactagttattgtcaacagatatctttctctcagttggtgcaatgttttccttttataattaggagagccctattaacatgctattctgagaacctattaacagtaacccttatttcacagtaaatgaaagaaaatctgaaatagatgtaaatacttgaattaaagttaaatttttattaagttgctgttgagctttttaaaactaaagagtagctttcctttaaagtagtttgtagttaattatgtgtggtttttttttcctgcttttcttcaaattgtgagctatcgaactagacagaggagttgtatttgactgattgtggaaagtacattggattcaaactagaactacaacatctttggactacagttcctatagcttttagtcttttaatgcaaggaatgaagcaatacttggtttctagtagtggatttagacaacctgtgtatatttttttgttaattaggaagaaactacatattcaggtttggttttgttgttgttgttgttgttgtttttgtttgtttgtttttgagatggagttttacttcatccgcttgttgcccaggccggagtacaatggtgtgatctcggttcactgcaaccactgcctcccacgttcaagtgattcttctgcctcagcctcctaagtagctgggattataggcatgtgccaccaccagcctcccaagtagctgggattataggcatgcaccaccaccagcctcccaagtagctgggattacaggcatgcgccaccacgcccggcttatttttgtatttttagtagagacgggttttcaccatattggtcaggctggtcttgaactcctggactcaggtgatctacccgccttggcctcccagagtgctgggattacaggcgtgagccaccacacccagcccatatttgggtttataaagggaaaaatggaaaagayagccatagtgcctcacagcccatctacccaaagttggattgaatttgcgtgttctattggaagtgacttaaaggtggccaaaaaatgataggatgatttaaaggatgtgcttataaaggtgatgtaagtaaatgactttatcatctggttttctttatttggtgaaaatgatactaagtaagcaagcagggatcagggctctgggtcctcagtgaaattggtctttgttcactattttgggctgttgtcttttcccaggcataccaatcccattgtggaaaatggacagactcatccgtgtcagaaagtcatacaggaagtaagtgctaatggatgcttgtggaatcaaggcttgcttcttttttccttacagggctttgggtaactcacctgagaagatactgtcttccaagttcatagggagattcagtttgttgatgtggtttcaatgaaatgagggacagagccatccaaatgtcttttattttagatttgataacaaaacaggctgcaagggaatgccttgaaagaccagagaagtggtagaaagagattcactgtgtgactcctagagttactaggaggcctgatcaataccagcagaatatttttgacaaagctagtgacttcgttttcctcagtgatgacatacttcccctctacttttttcactgaaggttatgtgaggatcaaaagtcatgttttaagaattgcttttgagacttcagaggacaaattacatcaacactaaatactcttaagtgtccaatggtctcaaatgatgccatttccttaactctagtccttttgttcaaattcttccaccttccaggaactatctttaaacatctcttcctatatagctcgtaccaattcttttcatagcctttcgggaagtctgaagtttaggaaattgtgtatctctgtcwtttagcaaagttagacatgctcttccagttctaaagaggcactgttttctcttgttaagtgatagggttttgtggtgggtagtctattgaacctgagcatgctggccatgtgtgttcctatacagaaagttttgtcccagttatttaaaagctaaatgaggtgttaccaacttagcagtttttcaggtcctagttgttgattattttctttcttgtgctcttttacttttgacccagatatggccagttttatccgagactctaaataagcaccgagctgataatcggattgtagagcgttgttgcaggtgcctgcgctttgctgttcgctgtgtaggcaaaggatctgcagcactgctgcagccactagtcacacaggtaaagttatctgttgcggggggacgtgttccatgtacagaatttgaaataggcagggtgcggtggctcacgtctgtaatcccagcactttgggaggcctatgcaggtggaccacctgaggtcaggagttcaagaccagcctggccaacatggtgaaaccctgtctctactaaaaatacaaaaattagccaggcatggtggcgggcacctataatcctagctactcgggaggctgaggcaggagaatcgcttgaacccaggagctgcactgcactccagccagggtgacagagcaagactccatctcaaaaaaagaatttgaaataggagcctttagaacaaaaactttgctgatgaaatgaaacacttttgtatttattaacaaactaaaaaaacacttgaaagagattagtgcctgtgataggtacattgtctataagggaaacagcctaaaatcgcttctgtatagtagctatagcagtattctaagtagcaacacagtccattgtgaaattctgtgaagcgaatgacttgggctcagtacttatatactaatggtaagcatttttatattgagatccttggggaaaaaatgtagcaagtcagactttgctgtttctttgcccaaagggattttcttcaatcttggccacagttagttgtccacagaagtctcttgtcaaaaaataaatttgactcttttagtcattaagattgatatgtaattatgatggtatgactcactaaatgatgttctctaaaatcatattctcatctagaactgtatgagatgcctatgcttaagtcactaagtaattgtgttgatgttaaccttagagcagggccaggatgccagtgcctagggcacaagatttagggacacaaggcaaagtgccaatcctgcatttgcaggactctgaggtgctttctgaaattttgtacccatgctgtgaggaaaacagtcacagagctccaggctagagtcataccccacccaacctgaagtgaccatgctccacctagggagaggagagcacctagggtgcagattttaaggaggtcctggccttaagaatgagttccccctggccaggtgcagtgcctcaygcctgtaatcccagcactttgggaggccgaggtgggtggatcacraggtcaggagttcaagaccagcctggccaagatggtgaaaccccatctctactaaaaatacaaaaaattagccgggcgcagtggcaggcgcctgtagtcccagctattcatgaggctgaggaaggagaatcatttgaacccggagggtggaggttgcagtgagctgagatcgtgccactgcactccagcctgggtgacagagtgaaactccatctcaaaaaaaaaaaaaagaaaaaagaaaaaaagaatgagttcccccttaaattctgcatcataggtgccctcaaccacaggcacaggcatgctggtgcggtgttggtacttggataaccttgcctctctaaattatagatttgattaaagattgtacaggtaaatatttcaacagaattttaatttttagtgatttctctacttccactatatgctgagcacaataatgtatgttcgcatttaggcgattgccacctctggtcaagtgtccccttcagtgcaatacattctgggtctactacaacttgatagactgcccctttgctgttggaggataccctcatgactttgatactgttttttaattcctgccagttaagtatatgactaacccaatagagtaggtagcactattatataggaagtgtgttctagagtcagtacatgtgacaaaaatgaaaattatccttaaaaaatcccttaactcaggagccagcaattgatagtcagtggccttgccacctatttttgtttttgtgttttttttaatgttttactgagctatagccataattcatttaagtattatctattggtcatttttgtgctacactggcaaacttgagtgggcagaagactgaatggtggataagatctatactttttacaaagtagccctttaagaaaatgtttggcaacccttgacttaatcattccttagtagagcatataattttgagtttacaacatggaatggattcatagctcccatctcatgctcattccatggcatatgccaacagaagaattaagttactgtatcctttcagtcccaagttcatagagttgaatttatgtaataagatcaatacatatgtactgtggtggcattttaaataggtgagtgtacaattgtttcttaattctgggaggatagtggagtaaaaattctaaacaaatcatttaagcgcatatcgtggccgggcatggtggtgcacacctatagtcccagctgctcgggaggctgaggtgggaggatcccttgagcctggtaggttgaggccacagtgagccaagatctcaccactacactccagcctgggcaacagagcgaaacccagtctcttaaaaaaaaaataataatgtgcatattgtgttaaaatttttgctgtgttgaaatccaaatatcttcgtagaaaacactattttttacttaaaagataaaataggtttaggagcaactcaaaatttaaacaatgctttcactgtcttctccaagatgaaggtgtttgatactgttttcccaactgtggctatatatcctatttaaaagtatgacttatctacagtgcaaatgagagcaacttttacgtactggatgaaatattctgtgctggggttttgcaaataatccatgagttccctgatagcttctagctttaactcttatacagcattgtcttgggaagatgaaaggtcaaagggttggaagaatagagaacctgaaaatcattgagatattgagccctgtgtttcacaaaatagtgctaagaagctttatactatgttgccttaaagagaagaagccaatctatctctgaatttcttcctggagacagcttcgtaagttggtactttttgaaggacgaagcattgaactaattgttttktccctcaacagatggtgaatgtgtaccacgtacatcagcattcctgcttcctgtaccttggcagtatccttgtggatgaatatggcatggaagaaggctgtcgkcagggactgctagacatgctccaggtatcttttccatgaggagtgtagaygcatcaggcctagagggtctgaaggcctagcagcgtattctttaccatgtctttaattctgttgcttctttatgttttcccccaggcatgttgatttcctaataacagggaggtggaagcttcccagttgttctctgaacaggcctgtttgagagaatgagagactgaccacatgagtgtaatgattattacatgttactgcctggtttatgctcttccagagatagggtgtttggaggggggaggaggtgagaaaaatgaatctctaagctcaagcattattgtatttttaacttcttgcctggaacagccaactgactagtttacttagcagcagggagggttttagaattaataatagcattggaaacagctcctcagatactgcttttccctcccttccagccacagaggggaatattgagttgaagaatgttgtttcttttcccaagatgtcttttcatttaaaattgatatttcataattattataaaaacttccactcccttagtggactatacctaaatagaatctttgctttcagaaatttctaaaactttgagatgacatctgttgagttttatcagctaaaatctgttttctcaaccctttcttaaatgtggacttcataggtgaaaactgtttatgtcaactgggaaggatttatgtgtttcttttcctgatcagattctcattacaatctttttcttttcccagctgtgcttttcttctttgttccttttgtacttattgtaataaatatttggcaagtctgaatgcygtggcatttctgaaaaagcatttcttttaaaatcactgttttgttttaggcactgtgcatccccacctttcagctyctagaacagcagaatggtctccagaatcaccctgacactgtagatgacctgttccggctagccaccaggtaaatccttctgaagagcccatttcttaattgctcatcctatcactgcttagtcttgccatctgacccttggttgttttattcttgtaaaatgaagtcactggagtaagtagattaatgattcataacccaraggtaaattgcaagctgatatatccccagcagtgacgcagagtattgcgggaagcaagggataaaggagctgagttcctgccaggaaggagggctcacacacaagacaatgcagtgtgcctggcaaaacacttgactagatcatctctacagtcctctgtaggttttaactgttcrtgctgttgcgatttcatgtttcacctcaaccttctctttgagaagcttagcatcctttagatataatcagtttcggaataaagaatgtttgggattttaagatgccttagcagttatctcatactgtatttctcagctctactcacagcctactttatcagtagcactgataatatgattgccaaacttctgcttgaattccttagtccctaactaaggaatttgaaccaaaactgttaccatatcagcattaaaaaaaaaaaaaaaagaaaaatcattattttcgaaacaacaaaagcccaactgttatatcatttacaaatgcaaagtaatgttgacttgattgtttcatcttaggattgattttttttcttttttcttttttgagatggactctcactctgttgcccaggctggagtgcaatggcatgatctcggctcactgcaacctctgcctcctgggttcaagtgattctcctacctcagcctcccgagtagttgggattacaggtgcccaccaccatgcccagctaatttttgtatttttagtagagacggggttttgccatgttgatcaggctggtctcaaactcctggcctcaggtgatccgcccaccttggcctcccaaagtcctgggattacaggcgtgagccaccgtacctggcaggattgaatattgaaccctttttttttgttagtttttggataggttagaaaaaccttttttttttctttttctttttttttttttttcagttgatagaattgttggatgggctgtcaccctctgttttctttttttttttttttttttttttttttttgagacggagtctcgctctgtcgcccaggctggagtgcagtggcgtgatcttggctcactgcaagctctgcctcctgggttcacgccattctcctgcctcagcctcccgagtagctgggactacaggcacccgccaccacacccagctaattttttgtatttttagtagagacggggtttcactgtgttagccaggatggtctcgatctcctgacctcgtgatccaccctcctcggcctcccaaagtgctgggattacaggcctgagccaccacgcccggcacaccctctgttttcttagggtatgtattccttggaaaactagtccctaaaaatgttctttatacaaatgatgaaacaagtttggagtatactgtacctttttctgaagagattctccctgtatattaaaggaacttagaaacctgatagtagtttaaaggaaaaaataaacaagcaaaactactttcaaaatccagcagcatttcccaagcttacctgaacacacaaccttttctttgagggattcctgttgacatcctgggaactggaattctgtgaactttagtttgggaaatgctgttctagcatctttaggactttttaacctaggagagtttctacttgtaggtccttttgactggtctttcttgatttataaaatcttagttggaaataggatgtggtgacacgtcttttaatatactaatcttaagatatggtcctttttttttaaagagcaactttaggttcactgcaaatttgagtgaaaagttgctcccatatacccctccctcctaacacacacagccttcccctctattagcatcccccaccagagtaatacaaacagtgaccctatatgaacacatcattatcacccaaagtccatagtttacattaggcttcactcttggtgtacattctgtgggttttgacaaatgtgtaatgacatgtatccactgttatagtatcatacagaatactttcactgccaaaaaaaatcctctatgttctgtctattcatcccttcttccctgaaaccccccaccaaccactgatcttttttactgtcttcatagttttgcccttttaccctggctgcttttatagcctaatcttgtcatttatacctagtctcactttccacaccaggtttattcagcgtagccctgtcaccttgctgcggagccaagtggtcatccctatcttacagtgggccattgcctctactaccctggaccaccgggatgccaattgtagtgtcatgaggtttctacgagacctcattcatacaggggtagccaatgatgtaagtataaaaatgataccatttctacttaacagcttttatctcctatctctttgtcattccttaggagaaaaccagcatcccagtatttccttacttgatctatattggtagacatatatcatagtggatcattcactagccaaaatatcaactaagacacttgtgctgggtgctttaggctatataaagcagtctaaaactgttcatgctcccaaatcatttggtgtctagttgaagagagaaacaagtttaaagagttaagtaacaacaagatgccagtgtttggtgtttttcatttgtttttgaaacagggtcttgctctgtcgcctaggctggagtacagtgatgtgaatctcaagggatcctcagctactgagtagccaggactacagacattcaacaccatgcctggctagtttttatattttttgtagagatggcatttcaccatgttgcccaggttggtcttgaactcctggcctcaagtgatcctcccaccttggcctccagtatttgattgtcagatgagtgataaaagtcatgattggtatgagatcagacgagggaaagctctagaccaaaaagagttggaataactttatggaaggggagggatttaaatgaagccatgaattagaggtagaattttgatggattagagaggcagatagtcatactgcctctaagccaagatcagagcaagtcagaatagtactaagtttgttagtagacaactaagcagtgggagtagtaaagtgcttcacaggaatttcgaaggtaggtttgattagatgtggagtagaattgtagacaggggagagcagtgaagaagtaagtattctgcattctatttaggctattcatttaagaagtttggcagtaaaagagagaagaaaataactagaagggaaaggcaatttaaaaaatatttttctcaaggtattagaaatacatgtgtatttaaagaccacaagaagggccaggcgcagtggctcacgcctgtaatcccagcactttgggaggccaaggcgtgcagatcacttgaggtcaggagttcaagaccagcctggccaacatggtgaaaccctgtctctactaaaaatacaaaaattagccaagtgtggtagtgtatgcctgtaatcccagtttctagggaggctgaggcaggagaattgcttgaacccaggggatggaggtttcagttagctaagatcaggccactgcactccagcctgggtgacagagcaagacgctgtctcagaaaaaaaaaaattaaagaccgcaagaagaaaaaaagggttttttttttttcgatagaaaaaattagatctctgatagacgtcttcaattctaatttcagttggttttgttttgttttgttttgttgtgacttggggttccggctgtgttacccagacagactgtagtggccattcacaggygagatcccactacagatcagaatggaattttgacccactctgtttctgacttgggctgttcacccctccctccttaggcaacccaggagtggttcctcactcctgggaggtcaccacattgatgctgaacttagtacaggcacccaattggtatagcatgctctagcccagaacactgggttcaagctgttcccctacctgcgcctttggagtggctgggactatggtgtgtgctgccatgccaggctgacttagtttttaaaaaaggaaataggaacacaagttatttttcacattaaaaaaaaattaataccatcacatagaagatgaagagaaaaaaattttaaaaattgctaactttaattcttaaccatgttttctgccttcaaatcatgaaaaatctaagcattaatctctgttgaaacccatgttcattccttggatactaataaactccttcattttctttctaaagacaaaaaacttctggactttgtgaatccagctgtcattttacacacacctgcatacacacacacacagccacgcgygcrcacacacacacactttcctattaaagagaaattactaaaggggaaagagtgcttggtctttgggaagttgagactagaatttatctgatgttcctgctttcctacatacagcatgaagaagactttgaattacggaaagaactgattggacaggtgatgaaccagcttggacagcagcttgtcagccagctgctgcacacctgctgcttttgcctccccccctataccctaccagatgtggctgaagtgctctgggagatcatgcaggttgacagaccggtaagattgttttcatgaggaatttatctcatagtccctaaatgtaataggctttggttccttaaggccaaccctaattttgaaactagccctgttttctgtccatggaaccaaatttaggcatattgccaaattagattggtagatgaagaggcccgtaaagatcagtaatttattattgagttctttaaagcatgtttctatgtcactgtcatagggggtatattaccagaagtaagtatcaagcattgaattcagttgtgtggctgtccaatgtgaaatttgttcacttgtgagagatgcccaaatgtcagttatattagttacgtattactcaagaagtatttaatcctttcagacttattctatagcactgtattatttcttggtgatacatctagccagaacatttggaagcacataattgtcaaagtaacccacaatgtacagttggatatatttcccctttggatttctttgaaccagatcctttatcacccacctaaggatggagttgtttttttaaagctatctaataatgcccaagtaatttcagtactgggccacatgaccataactcaggttatgtgtactgtgtgaaagttgagtagaatggtaaagtataatataacctgaaatcatttttaaaatggaatttataatttttaatattaytrtaaaagcagttcaggaaagtactcattgggacctagttaaagtgagctgtcttacagaaccacagaatataaaattgataataataatatataacagatagtacctattcctctctggttcaatacacatgttccatttcaacctgatagagtagcatatttgtttttctaaagaaaagtactttttgagcctccaggaatcagcaaatttaattcaaaagtccttgacctgagggaaaaagtcttcatactctgcttaaacttttttacaaatacatttggttcccaagtaacagaaaacttatgtaaatctaactttatgaaaacattcttgattgtaagcatattgttaagtgcgaacaacaacaacaaaaaatgagaacaagaagtttggacaggaatagaaaccaggtagccatgtactctaaggagtgtactgtatatcagccagacacaatggctcatgcctgtcttcccaatactttgggagaccaaggcaggaggatcacttgacgccaggagcttgagactaccagcctgggcaacatagaccccatccctacaaaaaaaaaaaaaattttttttctttttaattagctgggtgtggtggcatacatctatagtcccagctactcaggagggtgaggtaggaggattgcttaagcccaggagttccagcctgcagtgagctatgatcatgccactgcactccagtctgagctgcatagcaagaccctgtctcaaaaaagaaaaagtttgctatataacaactattatgtatttttaagaattaaggagctgttatgtatccataattaagaaatgcttagtacttcatgagcatttataatacttttgctctggcctattatggccataaatgaatatgatgggaaaatatataatgtaaaaaaaattaggtataaaagagtaattttacagcccaaaactatgactgaagtatacattccacttaagaaagggatgaagaaatattagtgctgacccaaaggacaacaattaaactgaaaataagaacccagaggaagtctgtagaatttttattttagaaaggaaggaagtaaagggagtagacaatttttgtgcatagraaaggcataaagagaattcttagatatacttatataaaaaatatataagtaaattaaacagcaacaagagcaaggttttttaacacaaagaacaggcagatatcacaaaggaactgaatggataggacttattctgagagagatggccttaaaatccttaagattctggactcatatgtctcatatgtatactttctgacatggtggcttagtatactttttgcccctgctctttcaggtatctgaacctttactctggatcacttttgatctttaagctcaagagtttttggaaatctgtttaattttaaaaatatactggtcaagtgcttacacctgtagttccagcactttgggaggatctcttgagcccaggagtttgagaccagtctgggcaacatagaaagactcctcatctcttaaaaaaaaaaattgtttttaattagccaggcatgttgatggacttctgtagtctgagctacctgggaagctgaggtgggaggatcacttgaggctggaaggtcaaagctgcagtgcactgcacgccagcctgggcaacagagtgagaccctatctcaaaaaagagagagcgagtgtgtgtgtgtgtgtgtgtgtgtgttcatgttcgcatgtgtgcatatgtatatatgtcatatacgttatgacaggaacaaaacaatagcctcatcccgaagaaacttcacttctaaggtgtagaaagtcgttttctgaaatgatgcccgctgcccctttgaagggaagtctaggcatgcatatgcagactgcatcaacccagagggtttgaagggctaatgagagcacttttgttgattcctttacttgctcccaagtgtagggaagtaaatgctactaaggaaaatttgtgggrttttgttagtatctgtagggtctcaggtgagtaagctatgcttccttttaaaactcttacccctctttcctatacagactttttgtcgatggttagaaaattccttaaaaggtttgccaaaggaaacaaccgtgggagcygtcacagtgacacacaaacaacttacagacttccacaagcaagtcactaggtgagtgatactgggggttcttaaggaggtgtgggatgtgggaagaaacatatctttatttcttatgtgcccttgggaaatggacaatttatagtttgtttaaccttgaattgcacaaattggcattggaagccaatctggtgggaaaacattcaccatgctgtgtatgtatgtacatatatttaacatatgtgataactggtataagattttttaacggtaagtggaggcactgtttctcccaaaggaaaatgcactgagcagctcactccccgtcaggagatctgtctatatttttctaagtccttctgagttttcatccacattcgggggtcaggaatgtaggtacctgagtaaggcaaagcattggttataaaacatcagaaagtgatgtagatgacagtgaattggagaatgttcaccatgcctaaagatagtcaaattctaatttcaaagaagttgtgtagtccaaacagaacatctgcctgggatacattaggcccatgaggaacttacaatctctggattacagcctaaaatgtaaagtgtgtgtgttttttttactgtgaacatataaatatttttaatacagttacatagtcttcctaattattgttttatagccataaaggtgttacttgatttccttataatgcctctattagtagacatttagatcatttttcagttttttagtattacagataatgtcaaaaatagagccttttccttctactgaatattttcctttaaaatgtaatcaccgaatcaaaggttatgagacttatggtcttaatggtaatgacagcaacttaagttggattttatagctaagtgttcctttgccctgatagtctttttgtatctagagtctttagagttttgtctaaattttagacaatgacttataatcatacagtgtggaaagatatatgggtcaaagaaggaatgttatagcaaggttagtagtagtgaaaaaactggaaatattctaattgcccatcaatagagaaaagttaaataattaacagaagcttatactagtaaatagtcccaaagatgaacaaggaagaagaaatatgtgataatacggaaaaatatacaagataaattgtaaaggttaaaataacagtattacataacctaacttgagcttttaaaataatttgaaaattttttaactgttataaaaatacacataacatgaaatttacagtattaaccatttttataaatgcatagttcagtagggttaagtatatattcatgttgttgcacaaccaatctcaagaactttttcatcttgtaaaactaaaactatacccattaagcaacaattctccattctcccctctccccatctcctrgcaattaacttcgtacttaatgtttgagtctgactactctagatacctcatataagtgagatcatacagatttgtctttttgtgattagcttacctcacttagtataatgtccttaggattcatctatgttgtagcgtgtgccagaattttcttccatttaaaggctaaataatagtccattgtatgcatataccacattttatttatcctttcatctgttgatggccatttgggctgctgttgtgagtaaggctgctataaacacaggtgtacaaatatctctttcagcccctgctttcaattcttttggatacccagaggtagaattgctggatcatatggtgattctatttaatcttctttaattttttkaagaaccatcatactgttttccatagcagctgcaccattttacattcccactagcagtgcacaaagttccaatttctcyacatcctcaccaacacttgttattttctgggtttttgagagtagccatcttagcatttcacaccaagtgtgaagtgatatctcattgccgttttcatttgcatttccctaatgattagtgatgttgagcatcttttcatatgcttattggccatttgttttgtcttcttggagaaatgtctattcaagtgctttgcctatttaaaaattgggtttcttttgttgtatagttgcaggagttccttttatatttgggatattaattccttatcaggtacatgatttgcaaacattttcctccattctttaggttgccttttcattctgttgattgtgtcccttgatgcacagaagtttttaattttgttgtcgcctagtttatctgttttgcttttgttgtctgtttggtgtcatatctaggaaatcattgccagatttcatgtcatgaagttttccgcctaggttttcttgtaagagttttacagttttaggtcttatatcaggtctttgatcctttttgagttaatttttgtatgtggtattaggtaagggtccagcctctttcttttgcttgtggatatccagttttcccagcaccatttgttgaaaagactgtcctttctgcactgaatggtcttgacatccttgttgaaaatcatttgaccatatacaggagaatttattaatgggctccctgttctattccattggtctatgatgtatttctttatgtcaataccatgctgttttgattactgtggctttgtaataaattttagaatcaggaatatgaggcctgcaatgttcactttaaagattgttttggtggccaggcgcggtggctcacgcctgtaatcccagcactttgggaggccgaggcaggcagatcacgaggtcaggagattgagaccatcctggctaaaacagtgaaaccccatctctactaaagacacaaaaaattagccgggcgtggtggtgggcacctgtagtcccagctactctggaggctgaggcaggagaatggcgtgaacccgggaggtggagcttgcagtgagccgagattgcaccactgcactccagcctgggcgacagagcgaggctccgtctcaaaaaaaaaaaaaaaaaaaagattgttttggccacttggggacccttgaaattccatatgaattttagggtagatttttctgtacaagaggttgttgggattttgatggggattgtattgaatctatagattgctttgagtagtattgaaatcttaacaatattaaatctccaaatcgacaaatacagtatattgttccatttattggtgtctttaatttctttcagctacattttgtagttttcagtgtataagtttttcacctccttggttaaattttttcataagttttttttatgctattgtaaacgaaccaacttgtactttaaagagctgttttattataaattatacacatacacagaggctactttctgcacagtaagttttcagaaagatatataagtgagactaggaggggaagggaggcttttcttttcgtttcataactttctgcactatgtgcacttttttatgagcataaattacacttttatgggtaaaatcagatatagaagggaaagaaaatgaactttaagcagtggtacaagagctagttgtcttttctcagaattgatttcttaatgtcactttccaaaatagtttactttctcatcttctggaatgtctccagcaattttgttaatgttaaaatcccaaaccatggaatgctattattttatagttcactaagtggcttaagtagtaagcccagtatgccccagaaataactcacttttagccatagatcaagtgacatgcatgactgaaaaatagcatgtgacccttcatgacacattttgccagaagtggggatttcccctccactgggtaggcatatattgactggggtgaccttaaaaattctttgattgcttttactatgaatcttctcagtagaagtagtattctgtctacaagctgtttcaggggaaagaagtgtagtagttgcttctctctgcttctgttttgcattattccattcagtgctgkttacagtataagggcaggatcgtattggctctaattttcctaaagcaaatgggaacctaggggaaaccctccaaagatggggtttggagtcaagtatgttggtttgaatcttgccacataccstattactttgaacttcagtttatttatcaagtgaaatagggttagtactaccagtctcataaggttattatgagataccaaatggaaatctaaagaagatcttgcacatagtatgtgatcagtgaatgttaactcctttctccttggaggagaaacttctagaatgtcattatgtacttgcaaaactagctggggcatgtctcctgttgactctaaggcagccacccacacattctggaatcccacacattgtagaataagtctttgtcaagccctctttccctcagtgggactaatatwtgacagataaaataatatggtaagtctgaaatcaaggtcatagatatcctttcctaatttaggataaatcttggggcaaggaaaagagacctaagtaaagcagtgctgtgggggaaaaaaaaaacctgttatctttgtcctgtgatatgggaaaataaggtgcaccaccaacctgacctacttgatcttccattgctaaacaagttttgcagctcttcctatagcaggctgtaacatatgtaacatagtggtgggaaatgaacagaagtaagagctaatgtagaggtgctagagaaaggacttgagattgctcatcccctcttagtaattctcttcctctagaatgcctgtagtagacaagacagaaagcccttgaactttctgtcccatgcatgactcagtctcccttttgattttaaggtccgtaacacctgcctcaacatgctactttgtttgccattctggcagagagggtgaactggtttagtttcatttcagcaagtccaagcctgcttttcacatggtactggtaattaattccctagcttttttttttttttttttttgagacggagtctcgctctgtcgcccaggccggactgcggactgcagtggcgcaatctcggctcactgcaagctccacttcccgggttcacgccattctcctgcctcagcctcccgagtagctgggactacaggcacccgccaccgcgcccggctaattttttgtatttttagtagagacggggtttcaccttgttagccaggatggtctcgatctcctgacctcatgatccatccgcctcggcctcccaaagtgctgggattacaggygtgagccaccgcgccyggccaattccctagcttttttagttggtcaacttgaagaaagctgggacgtttcagtctaaaataacattcttgctttccaaatgccagatgaacctatcattaactaagaccaattgggactagaagaaaccctgccatcatttccatttctccatcttggtgtttattctatgactacttgtcacttgcctggggctcttcaaagccaaaaggtgttgaacatgggaagcattgatactggaattagaggccagtaaggggttgaatccctagtcaagtcatcagagtttcattattttctgttacctaccaggtcatcggatcaaaaggatctcatttctcagcactcctctagtaatcttatggggctcgagaaatagtgaccataaaagctttcagaaatatggtggaaggataggaatttggggactagaagccagaaaacagaatctaaaaaatactggcagttaaaaaagtaaataaatagaaagctaagaaatatcaaacgtcagaaggaccgagacagaaaatacagtcatgtgttacttaatgatggggatatgttccaagaaatgtgtcattaggtggtttagttgttgtgcaaacgtcatggagtatacttctacaaacctagatggtatagcctaccggacacctggtctatatagtgtagcctattgctcctaggctacaaacctgtatagcaggttactgtactgaatactgtaggcaattgtaacacaatggtaagaatttgtatatccaaacatatctaaacatagaaaaggtacagtaaaaatacagtataaaagagaaaaaaaaaggtatacctgtatgagggcacttaccatgaatggaacttgcagaactggaagttgttctaggtgagtcagtgagtgagtggtgagtgaataggcggcctaggacattaccgtatactactgtagactttttatagatactgtatacttaggctacactaaatttataaaaaaatttttttcatcaataataaattaacccttggccaggcgcggtggctcatgcctgtaatcccagcactttgggaggccgaggcaggcagatcacttgaggtcaggagtttgagaccagcctggccaacatggtgaaaccccatctctactaaaaatttaaaaaattagccaggcgtggtggtgggcacttgtaatcccagctactcaggaggctgaggctggagaatcgcttgaacctgggagacagaggttgcagtgggccgagattgtgccaccgcactccagcctgggcgacagagtgagactctgtctcaaaataataataataataataataataaattaactcttgcttactgtaacttttttactttataaactaaattttttttaactcttggactcctttgtaataacacctagcttaaaacacaaattgtacagctcattaaaaaattttttctttatatctttataagcttttttctattcttaaaattactttattttttttttttagcttttaaacttttttgttaaaagctaagacacaaacacatattagcctagacctacacagggtcaagatcatcaatatcactgtcttccacctttttacatcttgtcccacttagaaggtcttcaagggcagtaacacacatggagttgccatctcctaggataacaatgtcttcttctggaatccctcccgaaggacctgcctgaggctgttttacagtaaattttttttttttgtaagtagaaggaatatactctaaattaatgataaaaagtgtagtatagtaaatacataacccagtaatatagttgcttatgatcaattattgtatactgtagataattgtttgtgttgtccttttatatgactggcagtgcagtaggtttgtttataccagcatcaccacaagcatgtgagtaacgcaacatgcagttgttcatctctattatactcataggatcactgtcatacatgcagtccatcattgaccaaaacatcattgtagcacataactatagttctaacattcatggagctttttcgtttttttgagacggagtcttgctctgtcgcccaggctgaagtgcggtggtgtgatctcagctcactgcaacctccaccccctgggttcaagcgatcctccagcctcagcctcccgagtagctgggatcacaggtgcccaccaccacacacggctaatttttgtctttttagtggagatggatttcaccatgttggccaggctggtctcaaactcctgacctcaggtgatctacccgccttggcctcccaaagtgctgcgattacaggtgtgagccaccgcgcccggcctcaaggagctttttgatccatttctatgggctccccaccaaggacacttcagttaaacatttggctgaagtgtttgacaccaaagcacttgcagataggattggggcagaagccaagttgacagtgtcacctgtccctcatttcaccctatcgcactaaagttctcccacacttgcatttcagtttcaatactttttctcatgtgccacaaaggaggctgtgaagttatcatttccaaagtctctgctgggcacagtgactcacgcctgtaatcacagcactttggaggctgaggcaggacgatagcttgagcccagaggttcgagcagcctgggcaacacaatgagaccctgtttctatctgttctgaaaacaaaacaaaacagaagtctcttgargaagggtaaaatttaaaacatgtaagacattaggatagcaaaaaaatctcggtctccagcactgtcctaactttcagggttttctgttatcctagtcccttgtgataacacaccacatagcaacttctcttgggttacagatcttcctccttcctgacattgggagcatgagtgatatgggctcacataccctggctgcctccttaacagtcagtattaatttggaagtaaaatgagaaatgtaacacttaaattgaagcttattaaatccacagaggtaatggcaattccaataaagccaaaagacctttctcattttctttcttttttcttttttttgagacagggtctcactctgttgcccagcctggagtgcagtggcacaatcatggctcactgcaacctcaacctccccagctcaggttatcctcctgccttagcctcgtgagtagctgggaccacaggtgtgcaccaccacacccagctaagttttaaattatttgtagagacggggtctccctgtgttgggattacaagcatgagccactgtgcctggccacctgccttattttcattacatttttaggatggagagactagaagaaagtttctagaatgttctgttgaatcaagtcatggagtctaagtcaaggttcttaatgatgtttcagaacttacaatggatggggaaatctggatgtaggaacctaaatggatagctctattttcaccttttctgttggatcgcttagagcagtttcctcccctggtgtttaaccattatgagatggaaagtgtgttttcatctgcattgaatccttggctgtaggcactggtatctgagttagttgagccagggagagggctacagsaaggcaagcatattaagaattgcttcctggctgggcgcggtggctcatgcctgtaatcccagcactttgtgaggccgaggcgggcggatcacaaggtcaggagttcgagaccagcctggccaacatggtgaaaccacatctctactaaaaatacaaaaaaatagtcgggcgtggtggtgggcacctgtgatcccagctactggggaggctgaggcaggagaatcgcttgaacctgggaggcggaagttgcagtgagctgagatcgtgccattgcactccagcctggatgacatgagcaagactccatatcaaaaaaaaaaaaaaaaaaaaaaaggaagtgcttccttctccactgctttagcttttagcttagccttatgttcatttagcaaaaactgttatgaagacagatacagtagaatgaagctggcatcagctggtttcttggtgacagttttggacaaagggaggtcggggggcttttgaaaaaacagggtcagttgaatattgggctattcatatcacataggcatctcctgctttgtctctctttctacatgctttaaccctttcctctctccctcctcctcccacaggaggaaatcctgagcagcctgttcaactagaaaatcaatgactggtggagacttagttgctagaccggcctttgtaaacaaaatctatctttggaagagaatgaggaaacttatgagagccgtagcaaccaagtgttgttgtagcagcctacatttattgaatactattttgttcactgctctattttcataagcactctgtrtgtggacgattttaatcctctaaacagtgttatgaagtagataatattaatagatgaggaaactgagacaaagattggtaacttgttcaagggcacagtggagccaagattcaaactcgggcagtttgtgtccagagtacaccctttgaagaccaccaagcttataacttttctcatatataataatttttgccctgaattacagaaagatctgaagccaggatcgctcaggagacgatggagagagctcctagcagagttgggacggttctcagtgtgccccaatgttgcagttgtttttcagcatattctgtctttctcctcagtcaaggaccaacctaccttttcttttctagtgctgaggaatgtaaacaagtttgctgggccttgcgagacttcaccaggttgtttcgatagctcacactcctgcactgtgcctgtcacccaggtgaggatacatagttcccagcttttgtccggactgtcggactgttggggatgcctgggaatggggataggttttaatgcctatcatgggaccagtcttatagctagagtcagggaaggactcagcagtttaactgtggtgaacagctggaatatacagggcccggattttcttgggcctgggcagccagtaattgtcagtgtctttggggtaccattttcacctccataagaaagtaactgttacacagtgcattgaaacattttcttcccccttccccttacagacacttctaagatggtaagtgtacatggcaacaaacaaataagtatttttaacctggccactttggcgaaaacaacctcaagttgactgttatatgtggtgccagtctcctaaaactgaccctccagatgtaatgagcaaagagcttattcttatcacttttatgacctgaatgctgaagtgccagrttttgaccagggcaggaggtatgaattgaatatcccttatccgaaatgcttgggatttcggaggaaaaaacactttcagaagtgtttttcaattttggattttttgggattttggaatatttgcagaatgcacaccagttgagcattcctaatccaaaaatccaaaatccaaaatgctccaatgctcattcgcttgagggtcatatcagcgttcaaaaagtttcagctgttagggatgcttggcccttacaggagaggaggagcatctttggctcccgatgagcacttttctccacgtgctttccgtctcctggttctgaagcaaagcaagaagcttagctgaaaggagtgggtagtagaatttgggtgccagtttcttgatggagagaagaaaggtagctctcctctaagcccaccctttgatgtctcaaggtgagtttcttctcccaggaggcaattcttgatgaatctgtagcactcactggtagtttctgtgttaaatgcattcataggtaaaagtgatgttcagcagtgccttgccacacccaaaatcatttctcaactttgattgttttaatgagtaataatatcatttgggatgtcctggttttgcatggtgtctgggttagctgacattgatacacctcataaggttgctcatggacagctgtaggtgttcatggttaacttttattgtgcccttactgtgtgtcagggcactgttttaagtgttttagatgtattaactaagataatcctcatctgcttttctggatttgttactatttttcccattttacaaatgaggaaattgaggttcaacaatgtttaacaatttgcctgacagttattcgtggagccagaattcacatgtagatattctggtaccagagtcctcactttgaaccactccgcttaatacagtatcctttcgatagcatctaaattggtgttttgttttgttttgttttcaactgttattagtaggcaaagccttctttcaaaataaaatcgacatgaagcctgtgggatttagcagactgaggcaaagcttccctggttgctttggaatgggaggcctggacctgctggctctttgccctcctgacacatcatcccttgtttccacagcacactcagcattggaagcacactgcagacggtgtctcattaaagcagtagctcccttgaacccacargttaaaacgccagacttttatttatttgtttattttttctgagttcttattggcagacttcagaatgaggtacctgaggaaatatagaaacctctgccttaaggttgattttactaaatgctctattttctggtgcagttattgactgtcttatctcttttgtcaggaatgtcttttttaattagaagacaggaagaaaacaaaaaccagactgtgtcccacaatcagaaacctccgttgtggcagaggggccttcaccgccaccagggtgtcccgccagacagggagagactccagccttctgaggccatcctgaggagttcctgtttgggggtgtgagggaaaatcagcgcggattttaaaaagatggctgtggcctgcccggcgtggtgggaggggagctggtttcctggtgaactttctaaaaggaaaaataattttaagtaaaraaaaaagraaaaaaaggaagactaaacagaaaccagaactgaaacattcacctggtagcaaatgacacatgcacgcacacacacatacacgcacaagcgccagtgcgcacgtgtacacagaaaaacaaaaggacaagctttctgtgaaacaaaatatttacttagggataatgtggggattcacatgaattaaatagctgcaattggaagaagagggtcagggtcatttgttcaggttttctattgttttgtcctctctttcctctcctacccttccttctctttctctctcccctccttttaaatgcaaatgagtagaaatttcttctaccttccccagctgtttcttcccacctttagagttgtttagacaaggaggagtaagcaaggaacttgttctgctttctatcgtggtcacattggtgatgctcrggacctgccagggtcagaatttatggatatctgaaccctgaccccgttcattctctcagtccacttccaatccacatcagtttgttgtctgccttggagagaagagccaaaactggggtgggcgggtgggtggggagtgcaggatataaatgtgtaagtttttgttttttaaggtttttttcttagtgaattattcacccacagacatgagagaaaaaaagagggagggtgtgtggagaaaaaatgtttacagggctaacaagggatgatgtgtcatttagtatgttactaaaaagtgtggaaatgacttgattttaaggggagggtgaggccgaagagggaagcccaaagcagatcttaatgtttcaaaggagtgcagcccttcacagccatcagatatgagggcactgttctgtctggtgttgtagccatctcaagaacaaatcaacagcaacaaaagagaaagaataaatttttaaaatttaaccagtgtttctttgtttttactttcattcactgccttgtagctcggaaatggttcagctagactagctatggaagcagcctttggtacctgatagacatctggggatggagttgaaagggcaggcccctgccctgatgccacagacccttcagacttcagggaagtggttcattctgcactttttattctcctaattcacaccaaagctcatcacgcttacattttacccttttgtgtagcctcagtgggaaagggagttgggttactctttcagttaaacagtgtggtatggtttttctactatggccacccaagtagacagtttcctgacctgcagatttattggtctttaaaaaaaaaaactttattgaagtatcattaacataatttgcatgtgtttaaggtatacactttgataagctttgacataagatacatccatgaaaccgttatcacaatcagggtagtgaacatactctttatttccaaaagtttccttgaacccctaggtaatacctgtttcctccctcttcccatccatccccatttccacataaccactggtttgttttctatcactgtagattagtttgcattttcctgagtttttaataaatggaatcataacagtctgttatggcaattgggctttgagctaatacctgcagagctgtattctaatgtgatagatctggcagtgttgttgatatactgacacttctctgccttttctttgcctgtcactttaactttttcactcctgggcataaatcctcaagctacagaacaataggaattggtgaaacaaatcttccagcataacatcagtggtacacagggttttaatctctaaagaggcaatattagaaggagagaaaaaaacttgagtgtttatagagtgatatcagattccagggatcagcacattaccccagccatccctctcatgttctggctaaataataaaacctttaagttttgtccaaccataggtccttgaaataaccagttgattttgctctgtttaaggaatttggctgttttcacaggcaattgtgtggggaactgaaaaaaatgtgtggaagacttaatgcagccctccttagccactgaaaaacagcatgtggaatgcatatctaaagctatagctttgcaaacagccctgtgttgttaatggtgtcagaacctcactgcttacttaagccttacagattatttgaaagggctgctctgaaactttcggcagagcaaggatgcccatctagattttaatttaaaaaggaactgttcaggatcagctcacctaatggagatgctgtgtttctgcatggcattgtctagtagaaataggatgagtatctcccgtccatgtgggcaggtcagctaactgcacctgaacttgcctaagtcatctccccacagaattgtctgttccgtgataggattagccatgaaatgttggccatgattatgtggaacacagatcatcagcattggggctatttccagcaagactgtactaaaacacagtaacttgtaatccttatgtatctgaagggaattgttataaagaacagtaactgagaatgcacacctaagacataaaggaaactgtgcttttgaatggcatcaacattcatgagtttatttaaatgtctaccttgtgtggccctgatttaagtgaatcataagatgaaagccaaaaccaagagaccttaaaggttcaagattttgcaacaagatgtgcctgattctttgggatagattaccagcaaatgagaacattgccttccaagaatgctctttcagcaaaaatgggaaaagccattgatatcttctactctacagagactgaaaagggtacgttttttctttttttccttttgttttgttttgttttgttttgtttttttgtttttttttttttgagagggagccttgctctgttgcccaggctggagtgcaatggtgggatttcagctcactgcaacctctgtctgatggggtccagcgattctcctgcctcagcctcctgagcagctaggattacaggcacccaccaccatgaccagctaatatttgtatttttagtagagatggggtttcaccatgttggccaggctggtctcgaactcctgacctcgtgatctgcccacctcggcctcccaaagtgctgggactacaggcgtgagccactgcacccggccagggtaggttctttatgtcaaagagctgagagtcttaaaaagggtatatttagttggttataaggatgaacttggtggggacaaggagcttgaaagaagggagagaaactgctggggctaaagggatgcattcatccccaggatgtgggcatcaaggtcctgtgggttccaacttaagctccagcacaggccaccagagcagccaaaagctattaccaaggggagccctagcctggcttgggagcagtgaattgtacctcacactggcctgcctttacctctggagtttgttacatctgtcacttctggatactgttcatccacagctggctactacaacacagagatctgtaagtgacagccaggttttcattgctgttttcattttagttttaggaaaccaattaatacaaattcagggaagatttttggcagttactcaactgctagcagtactggggaagtcagcccactcgtggtcgcgaggggcacctggcccttccaagcttccccaattcatctacactcagtctccctgctccaccattcatcaagggttgcaaactcaaatgcccttagggacacggagagcagtgaaaggaagcaggccaggagaggaccgtattgaactgggagaacattccccatccagagttccagctgatttttgcctttgaggaatgtatgacagtgttttcatatttgccagttttttggaagaagctggaaaccagatatgtgacatctcccttctcctaatctcaaaacattgacaattgcaagagggagtagaactgcacaggcctgtgaagaaaaaggtgcacacctttgtaaatgattgaaaactaagacaaaaggagcactacgtaatcactgtactctagttggtgaagtttaagaggatgcaggtgaataatactaaaaccacggtacctgtgtacatatagatcagggaggatgaagagtaactatgatagaggaacctatcactacctcagtcagaaacagtgataaatcaggttaatagtatgcacccttgatatgatgtagtgggaatgatgcttcacctctgtggtcttccatacaaaaaccatgagaaacaggcggggcacagtggttcacacctgtaatctcagctgtttgggaggccacggtgggaagatcacttgaggccaggagtttgagaccagcctgggcaatatattgagaccaggtctcaaaaaaaaaaagccaggtgtggtggtgtgcacccgtagtcccagctacgtgggaggatcatctgagcccaggagttcaaggttgcaccatggcactccagcctgggcaacacaaagaccctatctctaaaaacaaatgagaaatacatcagataagcccaaactgggggacatgctttaaaaaatggccagtattcctcaaaaccatcaagaccaacaacaagaaaagtctaagaaactgtcatagaccagaggagtctaaggagatgtgacaagtgaatgtaatgtgatatcttggatagtatcctggaacagaaaaaggatatccgaaaaactcatgaaatccaaataaagaagttgagttcatagtaattgtccacatggtttcattattgtcacaagtgtgccatagtaatgtaagatgttaacaattggagaaagtgtgggtccataggaactctattaggaacttttccataaatctaaaaccattctaaaattatttaaaaaaatctgtacaggccacttaaccatgtgaaaagctactcagccttgctgataatgagaagtggcactgagatactatctcacctgtcaggttggcaaaaatccaaacagtgacaatatattctgtggacgaggctgtggggcaaggtatccttgaacatttatgggggtttaatctattttgcgttgctgtaaacgaagacccgaggctgggtaatttatacagaaaaaggtttatttggctcacagttctgatggctgggcatcaagattgggcatctgcacctggtaagggcctggggcagcttccactcaatggctgaaggcagaaagtgggctggagtgtgcagagatgacacagatgaagtgagagcgggtaggtgccaggctctttaacaaccagctctggggggactaagagaactcactcactgtccccacctcgggggacaatataataaatatattaaatatatcaggatgatttacatgcactgccctgatatatttaatagcacaggaatatacacaagagagtgacagatttgaatggtcccaaatgcagctgcaatgctagcccacccttttatgggaaaactgattctgacagttttccagactgtgcacacatttaaaattccacacccttgcttcagccagcttcctcctggaaagcaaagccagccaggtgagtgtttatgaaggcccaactgacccatcagcccagaagccaggccctcccagtgccaatggtcgcaagctgggggcaagtgcttggggagtgggccagttggcatccgaaacagggcctggtggagcagcatgggagcaactggtagtagtaaaaggaaagaaacagctgagtctgtttttaacattcattaatccaaaaatacataaaaattatttctgctccaggttcttggactctcaagaagggggtagctgccagccttgagcatctgatatgatacctaagtgctcactcatattatctcagaggacagggagatgaggaagtgagtctcaaaccagggaaatcagggccatgccctgcagaggccctgtggggggacttggcccacaacactctggcttttgttgccagaggaaatggggcaatcacaagagtgggccacccttaggcaattcctcctatacagctaggccccagggttgggagagttctttccctgctcatggctgaatttcccgagagccaggctgaccagaccagagacagcccaggagagaaaggcccgggaaggcaggggctcgggcctttctccctctccttcttggcccaaatccacttccaggaaacccagaggtaggaccctgcagccagccaggtgctcatcggggctgtcacatctccacatcagtccgcaccgccacccaggaagccagggccagtcaccgtctgcagccttgttattgcatgccagctgggtgcataggccagggcccctggccaacaccaaggcctgctccaggaggggcctgggccacaggctgcaaccgctgctgggactgccagatgtgatggagctccttgaattgctccaccatgcggtctttgaggtctgggtttgagatctgtagccggatactatcagctgaccaagatagctcccctgagaacatctccagcagcagtcgagctgctacaggcaccacctgggaggcaaagaggagatgagacagggagacctgtggcagggctgccagatccagctgtgcatgaggacagccatcaggggtgagtaatagaccgcattctccggctctgagccttgatggtctctggccgccaagttcacactgctcagggagccctgagcctccagcctggggcaagggcctagccccaggattccccagttttcaagccaaggccgactttgggataggggagatgtacctgtacagtaatgagcttcttctctcggggtttgcggtcaggccattcttccccaaagcagaagaagatctcgaagggtggtggggtgttggtctggcccttttggaacaggatgagctctgcatcaaaatcaaggtccctagtcag

SEQ ID NO: 98232 - DNA, 14611 bp, Homo sapiens
gtttccttccctttttccccttgtctccctccactggatccttccagaggatgctgcatcccactggcgccagtgctaaacactgctgatgttggcaaagcagtatttttcccagtgaccttggttttattatttttaattccctaggtccatgtcaatgttgtaatacagtcaattttacagtccacagaaatgatagcgctgccttgagaggcatatggcaaaggggtcacagtgcagagccccagctctatggcagagagcctcacccacctccctgcctccacatcctcaccatggaaataggagcactgttggtacctacctcgtgagggcggttctggaattactcaaacacatcatctaagatgctttgtacagggcctggcacattgtaagcacttgtcagttcctgttgcacagcatcctccaggccctgtttgcagagttaattgcttctggtactttttttttccttttttttttttttttttggcagggggggtaggggggttgggacaagagtcgtgctcttttgcccaggctgcagtgtagtgacgtgatctcagctcactgcaacctctgcctcccgggttcaagcgattctcccacctcagcctcccgagtagctgggattacaggttcgcaccaccatgcctggctaattttttgtattttcagtatagatggggttttgccatgttggccaggctggtctcaaactcctggcctcaagtgatcctcccacctcggcctcccaaagtgctgggattacaggcgtgagccactgtgcccgaccgctttctggtacatttcttaatgtcctgtgaaacttcacctggaatgggatttgctgggaattcattttgtagacaagggaaggatgcagtcttgtcagatatggtgacttaaggatcatcttaaaggatttaggtttcctaatatcgccaacagccacatgggtttaaatcctcaatactggtaggggctgggcatggtagctcacacctgtaatcccaccacactcagctgagttttgaagttctgttttttgtagagatggggtctcactgtcttgtccaggctgctgaggcaggaggatcacttgagcccaggagttcaagactaacctggacaagacagaccccatctctacaaaaaacaaaaccccaaaactcagctgagtgtgtggtgcacgcttgtagtcctagctccttgggagtctgatgtgagaggtttgcttgagcctaggagttcgaggccgcagtgagctatgactgagccaccgcattccagcctgagcaacagagcaagaccctgtgtcaaaataaaaaagacctatagaagcattagtgcttggggtaactattagcatgtgctggcagagaaggtctagtgcctttaccttggtgctaagagtccctccagattagtggctttcccgtgccctttctcttctctgggctgctaatgccttccttccccttattagtaatattactgataaacaaattgtacattctctgatctcacttcagaggctgtttctgtgcactgaagatgtacacacagtcttaattcaaaagagatagcatttatgtgctgccacattaaacagattgcaacagtattactattgagtttgtgttggctctgtgcaaccctcatggtgcccaggaacagatgaaaccaccagagacttggagcctcaggttcattcaatggtgtcccagggaacggggttggagggcttattcccagaaggcctctgaaatgtaagagctattaacaaggagttataagtcatttttggtagctataggcccaggcaatgggtagagatcaagatgggataaatggtaagatcagtagagtattgctcagataaatatgtaagctattttactggcacactgtatctagtgatattaacatgataagctataggtaggataatttctcatcagattgcagaaatacatttatagcctatttcctgttatataatgaaaagctactaatggggtagtagacaatgatatgggtaatagcttaaacagccttcgttgtcacttacctgaattcaggaatgacaggtttctttcatgcatgaggtactggatacattaaacacacacacacacacacacacacacacacacatatggcattgagttctagtcatatcctaaagaaaaactatggtgcgctatgttatttatagtactatactctgtgtgagtgactctgtgtgtatgtgtgttggtggaggtcagggatgacttgtttgtaatataccttaaggaagtctgtccgaatttgcccttcaaatactaaataaattcatctctcacctcaaactgcctttcagttcccttttactaattttgtttaaaagaaaggcaagtgaaggccaggcatgggggctcacacctgtaatcctagcactgtaggaggtcaaggcaggaggatcacttgagctcaggagttcaagaccagcctgggcaacatagggagacgccatctctacaaaaaaaaaaaaaagaagaagaacctgggcatgtggtcgcatacctgtggtcccagctgcatgggaggctgaggtgggaggattgcttgagccagggattgtaccactgcactccagcctgagcaagaccctgtctcaaataaaaataaaaataagacagctattttaccctgtcttcacctaaataagctcatcttattttttgcctgaaactcttgcaaactcccaggtctgctagttttgagaaaccttggatctcaataaggaatagttctcaattgcttataagcataatggatttcttttggcttaaagttcaaaactggcaacaagcagcgctagcaacccatagagagatacgcagaccatttcgatagacgtgtttgctgagtgaacaaggctgactgaatttttttttttttttgaggcagggtctcactttgttgcccaggctggcgtgcagtggtgcagtagtggctcacagcagccttgaccttctgggcccaagtgatcctcccttctcagcctcctgagctcctgagtaactgggaccatacgtgcaccaccatgcccagctaattttttagatttttttgtctccctatgttgcccaggctggtctcaaactcttggactcaagccatcctcctgccttggcctcccaaagtgctgggattacaggtgtgagctactgcgcccatccctgaattcttaattacaactaaactagatgcttatggattttcctgttttacaactcttgcctcttttatctgtaattttaagatcttgacagcttatatttggctttgcttttgtgtctcaagagttctttccttgataagcctctgtggaaactacagaatcttacaaatataaaacatttccggaaaaaatacaaaaatggacacctgacatttacactccctaaggtcgtgatcctgttgaagaaaggagatgaacgcggctgcttttcagtagttcttcacttcaccttaccaggttcttcatctggatgctatgctatgggggccagaggaggaggctgggattgtgatggatcctactagattttacagctggagctcccaggaatgccctcatagggaatgtcctgaagggaatcatgggtaacttgtaagctacctcaacttatttttggaactatgtaaggtataagatggatggagctgggttcctgtgcctttctcaccttgtccgcatagagatgcagctgctcctgcaggccaaagttctgcaccaatcacctccacctgcttcccactgggagacaaaggtttgaaagcctgtttggcgatgaaccacgatgatctgacactcaagccactcctgagaaagtcgggtttctttctgtttccatttatatatgtaattttcgcttcaaacaaacatgacctcgctattctatgcacagttttgaatcctgcttttaaaatgcgatgtctgccttgtctttaaatattctgagggggaggagaggagatgtgtaatgcgactgtctataatttgaaaccggacctcactatttagcgtctcagaaaacgcggggttcattgccctggtcccccccgccttcccccgccccccgaaccttccggctggctctcttgcggtccccgcctcggcgctgatgtggtctggcagtggagattggcgcccgggcggagcacgatgggcttccccgcggcaggcaggcaggctgctgctgcaggtgggtcccggcgcccgcgccgccccgcgcctcccgcggtcgccccgcccctgcccgcccgctccgctccgctcgcattggcgctgcctgctgtctgtccccgcgcggtggggagggggcgcacccggcggcgggctctgcagagggcgccttgctccgggtgcgaccgcggctccctggaggcctgggcggcgggccccgcgagcgcgccgccacctcgggagcagtgttggccaaggaccccgacgccctacgtaagtaaaggcagggcggggagcctgcgggggaggagggtcgggggcaatgtccggtccgcggaccgcggagtgggcaagaggtgcccactggatacggggtatccgagccctctgaggtgctgggagtaagaacgcgggaggtcgcttgtccgctggaatccgcggccagggcgaccctcatcaggtctgcccacctatccccttcgcgttacagcttgtcttagaagcatgggttgccggtggcttttttccttctttatccctctttgagaaatgtgattttgggtttctggccattacattataattctgcagacagcctgaagctgggttatctgttccacgcccccggcattttcctttttgagtactttatcctgcgctctgtctcctgccataaggggcgtcaagccagaattcgagattccttcctccaggaggaagcttcgtggtccgtatctggtgctgggaaagatgcattgctttcctcgggtactggctgctcaagggaaaaaggaaagggggtgttttctgtgacatgagacttgcaattccatcaggaaatgagcacagggactttaagatttcctgaggcgataaagctacccttgctggttaagagcgaatcatttgcagtctgacattctgcaaagttttattgtctacagactgcattattttccctcgttagttaagtttctgtttgggtattcgttttatttctagtatgtgagatacattcaagtgagcttctcaaacgattgtctttgcgcaatccaggttagtttccaatgacagactcctaaacatctcatttcaatatttctattatgtggtaatacagcctctgcttaacaaaaatgctcaggtgctgaaaactcacaagaggtgagaagatttaaacagttatcagcttaggttctagtgctcactgaaacattgtgaggagaaacactgtcaaatgttcatattttagttccgtcattgttctagaatgactttatctttctgttagaggcacacagtatgaaacacccaacctaagataatatttacttagatcataaactgattttcagggttccagttccttctacagttcataaaattatgggttacccaaatgaaacttcagtgaaggatttacataaaaacaatataaagaatgagtccctttgcttattttagggcatccacccactaaaattcataggatctttgttggataatcacctcccatttccattctttggtgccatcataccattctaaggattaaattttcaatacacctttatattatctaagtttgccaattgcatagtttgccaacttatttttggcttttaaattagttcctgaaccaaaaaaataaaatataaagaatttcaaaagcttggttttcaaatgacaagaactcagtctactcgtggttcaattatgagttgataagtgccttatggttaaatgaccattaatcaattttttaatttttttactaatgaaacactgcagattagtatccccaaacaattcattttctgacgaaactcttaaagcccagtttcagaacataagctttaagcaacaagcaatcttgtgttaatctgagctctgttacagctctgccgtaatctcagccaaattgcttcatctgtacgtggtgataccaccatctttgtaatattgtggtgaggattagagatgtatgtaaaagtgcatgcactgcctaatacccaagaattgctcaataaatgtcagctattactactcttactgacttccaactatgtgcagattatggtggaaacatgtgatacagcagatacagtacttaaatgaaaatgtcaaaattgtacaactaatttaagagtgggaaatgacagtaatgctaaattttcctaagaatatgtatgaaaaatagcacttccttgatggaacatacatttttagaacagaaaccttatgttataatggtaaaactagagagtcaaagtctctagttctaactctggctatgaccttatctagttgcatggcttttgacaagacaactgctcccctctggagttcagttttgtcatctggctggatttgagtaatctcaaataatctctaaagtcctttgcagctttaaaattatctattgagtgtgataaagattacatcagcttgcttttcatcctgcacttcatttttggttcttgttgtttgcttaacttgcactttagagtcataagcaattcacacagacaacacaactaaagaactgataatatcagacttgcagggtaatccaaaatgaagtttcaacaaggaggataaaacaaaatagaatcacactgaactctttaatagggccaaagtaaaccccaatgtttattctccagtcatttcattaagttattatatggaaaatatgcctggtagaatcttatacattcactgaaatagtctccacagaaaataataggctcatagtgaaataaaataccactttcttttctctcatcaggttgatctttaaataaagcaaaaatttatccaaagaagggctttcatcaagaaattaaagagagaaattacaagccatagagaaactgggcatttctatactagagaaaccacctaaaacaactgtatggagtaagatgaaaggtatgaatatgcctggaagaaattktacctagtgtgacatttttgctcatctttttgtcacaaaaggctgctaaggaagagagaatacagttttctagagaataagagtgcagtgtaaaaatggaaaccacaatttcagaaattcatgtagaaaacaaggatgagaagagatcagcagaaggtagtcctggggctgaaaggcagaaggaaaaggcatccatgctttgcttcaagagaagaaagaaagcagccaaagcactgaagcccaaagctggctctgaagctgctgatgtggcaaggaagtgtccacaagaagcaggagcttctgatcagccagagcccacacggggggcctgggcctcactcaaacgtcttgtmacacgcaggaaaaggtcagagtcttcaaagcagcaaaagcyattggagggtgaaatgcaacctgcaataaatgctgaggatgctgatctttctaagaaaaaggcaaaatctagacttaagattccctgcataaaattcccaagagggccaaaaaggagtaatcattccaaaattatagaagactcagactgcagcatcaaagtccaggaagaagctgaaattttggatatacaaacacagaccccattgaatgatcaggcaacaaaggctaagtcaacccaggatctaagtgaaggcatctcacrgaaagatggtgatgaggtctgtgaatcaaatgtgagcaatagcayaacttytggagagaaagtgatttcagtagaacttggattagataatgggcattctsctattcaaacgggaactctaatccttgaagaaattgaaacgatcaaggaaaaacaagatgttcaaccccagcaagcaagcccacttgaaacttcagaaacagaccatcagcagccagtactttctgatgttcctcctttacctgcaattccagatcaacaaattgtggaagaagccagtaacagtaccctagaaagtgcaccaaatggaaaagactatgaaagtacagagattgtagctgaagaaactaagccaaaagatactgaattgagccaaraatcagattttaaagaaaatgggatcactgaagagaaatccaaatcagaagaaagcaaaagaatggagccaattgctattattattacagacactgaaatcagtgaatttgatgttacaaaatctaaaaatgtccctaagcaattcttaatttcagctgaaaatgagcaagtaggggtttttgctaatgataatggttttgaggatagaacttcagaacaatatgaaacactcttaattgaaacagcctcttctctagtcaagaatgctattcagttgtcaatagaacagctggttaatgaaatggcctctgatgataataaaataaacaatcttctacagtgacttactctccagagtcacggcagaaaaaacaagcttaatgaagaattcttttatacatttgtggcatttcttactcagtaacaaatgagagatttatcatctctagaacttaaaaggtacaattccagcgcagaagtgctaaagattaagtcaagtttataaaactctaccactgaaatgcagtcacttctggattggaggaagtcagcacagattgcagtgtaaaatgacataacatacagggagttgctaaaatggcatatggagattggagtgctttgggggaggaaggtgtatttattgagcacttatggtatgccataagctttttaatgacctctgatataacaaagtctggtttccttttgataattcagctctgtgtataggctaacatcacattaagtttttaaaaacttattttttacagtgcacatatatgtttaaaatggtgaataaggtgagctacttttgtgaatgtgatttgtaattgttacattcctaagcagcaggcttaactcaaaaaatacattgcattttcccaatttcagcagatagtgtgcagaatatgcatattgatattaaacgtgagtggtttcctagtcttaagtctcttataagcgctatttggccaggggcagtggctcacgcctataatcccagcactttgggaggccaaggcgggtggatcagctaaggtcaggagttcgagaccagcctggccaatgtggtgaaaccccatctctactgaaaatacaaaaattagctgggcgtggtggtgcacgcctgtaatcccagctacttgggaggctgaggcaggagaattgcttgaacccgagaggtggaggttgcagggagccaagattgcaccactgcactccagtctgggcaacagagcgagactccttctcaaaaaaaaaaaaaaaaaaaaagagaaccattcacaaatccttcaatcaggcaaattgttactaagtgcaaaagtgtagaaacagggagagtgggtttttcccccgcttttctttctgcctcaacagatctgtatatatccatttctgcatggatttatctgtgaaaagttaaaaaatgaaacagcaaaaacaaaacaaggggaatattattcttcatccaggagaagggaaaattcccaagtaaattatcacagataatataggattcatcttgcagaattacttctttaagagccatattcatcaacttctctccaaagaggggagagtagattcaaagccagcctggtagtaatggtcctggaaaatcctaataatctagtgcaaatatttattctcggccaaaaatgagccatgaatgtgggtgaatagaaaagtgaaaagttattgctaaagcacattataatttaaatgtcagtattccttcatgtctgtgtgttgagaccagtaaaaagcattttacatgaatattgaaagttaactttttcatcactattttcttttcttttttttttttttttgagatggagtctcactctgtcgcccaggctggagtgcagtggcgcgatcttggctcactgcaagctccacctcctgggttcacaccattcttctgcctcagcctcccaagtagctgggactacaggcgcccactacaacgctcggctaattttttgtatttttagtagagatggggtttcaccgtgttagccaggatggtcttgatctcctgacctcatgatcctcccgcctcggcctcctaaagtgctgggattacaggcatgagccaccgcacccggccttcatcactattttcaatccagatatactttacaaaaatgagaagggcttatttgcatttttatttacatattgaaagggaagcatctgatctcatcaatgattgccatattttttgaaaaagtaatcctatttcaatctttccttgtgtgaaatggccataataccagagtgcacttccctacctcacaggttaggattcaaagtgtgtattcccccattgtgtaaattgagtgattgtgttactacttgaaacagatgaagtaataaagatgaagtatgagatgtaaggtatttgttcaagagctccacttggaggaaataatgcacattagatgattttaaatgatctgggtgaattcttgcattgtgtatggattgcatatagaaagtatttgctactttgtcctacagaatcatcttcatttctttctgtaaatacatattgagacctctaacaaaagaaactaatctgacttggaaattgaaccaaatcatggatattattagcaagattctttgctgaagtgcaaaaatatttcccccagattttcctaccttcatgcttataatccggggaggagggtggaaatcctgagcaagatgaaaagtgtcattcaaaacacatgacccaagaagtcaatttcttttaattgtacaacttttaaacattaaaaacaaaaaagacgagtcatcttctctgaaaacactctttaactcactatatgtggtgctaatggacttggacagctaccagctatcatatttaaaagtgaaccattttaaaaacctgactaaggttggtgcattttacagtgtattgaagaatcctgccctcatttactgcaaggatgcctccaagccaatacacttgcattgtaaatgtttagtaatctcatgaacaagcaaaaagtatagtacttagcagttattggaaatattttgggggatttttaaaaaaacagataaatggtaaatatgtgcaatgaattttttggttaagaaagtaaaattttatctaatactaggtttttacttttttcactgtggtttgatatatatttttggttagaatgtactgattgtttttatgataagatgtatattttacttgcattcattcttaagaggtttctgtttttctattgagaatatctgttgaattaagtaggatttcagttagaaaaaggaattccgaaattaactggtctcaatctgattatatgtgctacatggccaaatcctattacagtgaattctaaggtgattcaaattgttttattgttatagaaatatgcagaaatcagatggcttcagagtcataaaatatttttcttgtaatagtatttaagcaatttgaccttatatgcaaacgttaagtgaatataaataagttctgtttcaattcatgtccatttaacaacattaaaataattattaggaacaccacatgaattttctttacatttgctgtggtataaattctgcttttaatgaatgtttatttatttattagccaaaattcagtttctctttgaacccagaattttgcaaagctgggggttggggagggggattattagctacttgttaactttttcagcatattatcattcctcttttaagactcaagtattattcactttgcttcttacaacccagagaatgtgaaaattctcctctattttatgtagcactattcacttaacattttttcaaagcactttataggatataaaaatagtacccggtaacatttaagtaaaggtagcagaaaacaaaagaactttcaaacagaaattatgttccctgccacctcctccacctcaaagaataataagcatgtggcataaatggagttgttcagaaaagctgtctgcataattttccttcaaggtaatgtatttgacagcatgaagtttgtgatgatcttacttggtctactactcagcggagtcttagaatctcttttatttacttctgagagattgttatttcaccagtatatgtgaacaggcttgctaaaggcattaaagatatggatcatggaggcaccaaatttggcttctgtatgcaatccagcattaacttcatccatacatttctaacttcatccataaatttctaacttcaagttaccttattttttatagttaagaatgtttttcgaggtttacaacagaatttaaaaaataattgttaggctttagaatcccactgtttgaaaagatccttttaatgtcaactttattgaaatatgtagtctactttctaatttcatctgataatatagcaggatttgatttttctgcctgccatttgtgcatttaaaaaaaaatcctcatttaagatttagagttctttaggttcaaattcctatgatgttttattgggtaacatgaactctcttatacataattcaaaatttcaatccatggtatattttatggtacattttgaaaagaaaatttgtaatgctccttagttacaaaaattagaaggaagctacataaaattcaggtgtcctaattaaattcaatttgattcaacacacgtattaggcataactcatacctaacactatttgataagggagacaggctccctgccatccaagaactcaacctagggagcagtgacaacagaaaccgggttgggttaaggcaaagagccatggataatgctgcaacatgagtggcacagaggggagtacacagagagagcaattaatttggtgtggggaaggtggtgatctgaatacagcagcagtttgaaagtgttccgtttttaaataaacagtatgcttattttgatttgtgactaggtgtagaaaaaagcctgcatagtgttacatatttatagtagttctttgtaaaaatgttaagtggatgagctattatgaaagtaaaagtttcattttttctcattaaaattagtactaaattactatggatcagatgataatattaaatagtactctgtagaaaaaaggtttcaagttgaattaatttatgtactgattattaatacagaataaatgttatattgactcatgtttattcagatcttttaaaagaactgtgggcaaactatgttcatttcctataactgtaaagatcacattgatggaactactgagttcgcactaccaaaagttctactctgctaattgggaattggacagagattttacaacaacactcctaaaacagtccttcagcaagacaaatataaacacctacaatgctgaactaattcagccaaaagggcagttctgaatttgatgacatttgtgaatttgacaaaagcacactgttttcatctcttgatatactcattattttctgcattaacctatgaattgttcatctttatgatttttcaaaagactaatcaatgtgaaaatgctagaattattcagacggtacatactaaaggtgggtgtttaaaaagttctgtgtttactaagacactgatttcattttggtaatgttaacactctatcttttcgtaaccacagcccgatgataacaatcaggctctaggaaggactgtactttccaaatcttggaaccaatttaaaacttgataataccttaaaagtcctaaaacgaatctggcttcaaagcaaaatgtcttcttaatgtacaaacactgtaatagggtagctaatatttcacattttgcaggatttttaaaagttttatggccgggcgcggtggctcacacctgtaatcccagcacgttgggaggccgaggcgggcggatcacaaggtcaggagatggaaaccatcctggctaacatggtgaaaccccgtctctactaaaaatacaaaaaattagccaggcgtggtggcgggtgcctgtagtcccagctactggggaggctgaggcaggagaatggcgtgaacccgggaggcagagcttgcagtgagccgacatcatgccattgcactccagcctgggcgacaaagcgagactctgtctcaaaaaaaagttttattaaatctcttcttggtttaaaaaaaaaaaaaaagatacactacacttcacaaaagttgtcctcacaggcaattctgctaatccctttttagacctacctttaatgctgacgtctggagtccccaacccttttgtgaatacctacttttctttctttcttccttcctgaaagcttaagcttactgggggttaagttcccgagcttaggaaagagagtatgcgtgtctgtgcactacacattcacagaaaatcctct

SEQ ID NO: 98233 - DNA, 40987 bp, Homo sapiens
  misc_feature (1)...(40987): n = A,T,C or G
cactgcaagctccgcctcccgggttcgcgccattctcctgcctcagcctcccgagtagctgggactacaggcgcccaccaccacacccagctaatttttttgtatttttagtcgagacggggtttcactgtgttagccaggatggtctcgatttcctgacctcatgatccacccgcctcggcctcccaaagtgctgtgattacaggcgtgagccaccgcgcccagcccagattctttttttaaaaagcttcccaggtgattctaacgtgactgctcagttaagaaccactgcctcagaagaacacgggaccaaggaaacccaagaaattatttcacactctacaattacattgatatttaagagacaataaaaactttctttactttctagattgtataactctggattagttcaaactaagtaagatagaacaactttatactagtctctataaataaacaattccgtaagagtgttcaaagtatggaaattatgttgactacattaaatgaacaaatataaacaactgtaattctaattgtaaccttaaaatattggccagattaagaaacaaaagtgctccatggccaggcatggtggctcgctcccagcactttgggaggccgaggcaggtggattacctgaggtcgggagttcgagaccagcctgaccaacatgaagaaaccccgtctctactaaaaatacaaaattagccaggtgtggtggcacatacctataatcccggctactcgggaggctgaggcgggagaatcgcttgaacccaggaggcagaggttgtggtgagctgagattgtgtcattgcactccagtctgggcaacaagagtgaaactccatctcaaaaaaaaaaagaaaaagaaaaaaaagaatcaaaagtgctcctaaactggcaggatgggcatgggtgggggggtggaggaacacactattttcagacttcttttcaaatagtatttaggaaaaagaaatatttactctcttactccattacacctagattggatttcataacacctaaaaatgatacagaaattctaaatctgaaaatactgtttgaggtaaaatctgctgtaattccagacatctgcttattaagatctactgagaatgttagcaaagagggtatggagggggtagatgaaacaggaagagtagttatgctctagaaacctttaatggaactgggaaacgttagtttggggcctcctgcctgttggcagacatagccaacctccaagcacctctaattcccatctaaccaacattacattgtaggatgcctgataaagccaagcacacaagaatactaacaacagtaagcacaaattgttaatagacctttaaaaaaaatcagaacccggagaaagaaaggaaaagattcctctcagtccattaaagacaaaccaaatttctaaaagaaaaaataaggtactcaaaggacaggagaaagatggaaaattataatgctagtacagacctagaatacagtacaggcaagagtaactaaaacttctggatacaagtaaaccaatacttctttcgcaatggaagtatactcccatgaacacactactcaagtgggctaataaaaacctttgcttaaagtgcttggagatttcagaaaaaataaaacatccatgcatgactgatttgtaaccagagaagaaatgaattagaaaaatataaaaaataactgaacactctaagcactttttctcccaataaagcaaaaaaaaaaaaaaaaaaaaaaagagagagagagagagaaagaaaattcctgctagcaaagggaaagcagaacggtaaataaatgcctataatcccagcactttaggaggccgaggagggtggatcacctgaggtcagagttcaagaccagcctggccaatatggtgaaaccgtctctactaaaaatacaaaaattagttgggcgtggtggcagacgtctgtaatcccagctacttgggaggctgaggcagaagaattgccaataagggggaaaaactcaaatgtccatggatagtcaaatggataaagaaaacatggaccaggcacagtggctcacacctataatcccagcactttgggaggccaaggtgggcggatcacttgaggtcaggagttcaagacccgcctggccaacatggcgaaaccctgtctctactaaaaatacaaaaattagccaggtgtggtggcaggcgcctgtaatcccagctactcgggaggctgaagccagagaatcgcttgaatgcaggaggcggaggctgcagtgagctgaaattacaccactgcactccagcctgggtgacagaggtagactctgtctcaaaaaacaaacaaacaaaaaaaaccccagaagtataaaaaaatttaatcaataatcctgaaactgatgtttgttacaaacactttcttcttcctcctctatccctaagcaggttcaagtagcaatatctttcctttttagggagaatactattctggttattttcaaaacctattattataataaatactatatgcgaggccttgtgctaagtgctctatatacactatctcttaaaatcgtcactgtgatgactaatgtattattttcatttccattttacaaatgaggaaaaatcctaagcttaggacacacaatcagcaaatggtataaagtggagataaaaagccaggtctgtctccatagcctgtgctaataaactggagcaatattttcttagctttctcttcttaaaagactgaagttcacatgctatttggaataaatacacagaaaaggggcacaggaagtggtgcagaaagaagcactttataacttatcaagataagagcacctgcactgcttttttaaaacaaggaaaaaccctgcaataatataaaacccccaactcttttctggccctgttattgctaaaatggacaagttggtcaggcaccacctacggaccatagcaaataaatcactttggttcagtggtggggaggacattatgcaacacttcccagcacagccctggccaggatattttacggccaaggcacctcctccccagctagacagcctggctccttcacattcccctcaggagatagggtggaagctcacagctccactttgtaaggcatagagggcagctgaaagtcctgcttggcctctctgggcaaccacaggcgccaataaatcagccacaggcgattctctcattcccttcccggctgaaacaggagcaagatataatgcaaaacagcactgattggacttgagagataagcgatctaggcttaaattctactgcgaatgactgtattaccacagcccaggtaatgagcctgtttcctcaggcttgtaacatgaagacagtaccatctcctttttggtaaagacacaaagttcatctacgaaagcagctagtatgatacttggcccactgcaagtactcagtaaacagcggccaacttgagcagaatccatctctactacatgcaaataagacattcaaggtaggactggacaaaaaaggtgttagcaggttacgtgggttcctttctgttttcttcctgaccacaccttgatatttcactgactgccagctctcagaattaatctgttccatgtcatatcccatcagtgttctgttccctattaaggagttgatgtccgataacggattcacgatttacccttaactaaaatatatccagattgttaaagaagactttgatgccttaacataaggaagcaaccaatgctgcaaataatagagaacagcaatgaaattttcaggggtggctggggggtgtaggcttttagttccaaaaatacaccataggcggcctacctcacctagaaataccatcaaacccacacagtggccatgcctgacttctccataacctgaatcaagccaagtatatataatgacctccgccggatacattctctacaggtgagtggggtaaactggcactgcggtcctggcatggtggagagtgcaatcaccaaggtgtctggagccttggagtcttagctatcaagaggtgtagctagctccagctacatcacgctcttcaggcctggtgtcttctctgtaaaacgagagggatgaaacagattttctataaggcacctctcggctctaaaatttaagattccaaagtgtactttacatacatgacagaatcttgtgagaggatcaacagctctgccaggacttgagtctcaagagaaagaatgccaaatttaatcccttggggtgatgcgggcgctaactgttgaaacatgctaggtgccgtcaggttccaggtactacgttgtgctatgcgctgcctccgcaactggtaacaactgattactccaaatactgagtgccagagaagacggtgataagatgggtcaagcttcaaaaagaaaaaccggatatgcttagaacaagataaacataatttgaagatagaaaagggggggatgtcttcttgccctagaaacgaggtaatcacaagctgggagtggaaacagtagccgcagcgtcctcccagcatctggaaagtcgcccgctcgtaagaggggtcggcgctacccgagggaggccgcaggcctactggggtttcctgctgggggtcgcacccggacccgcggccgggacggctctgcaccttcgcggcaccccgtgtgccaccctgaatcaggccccggcagccgctcctacgagcagcaaagggtggttctgggtattgtcggcccagcgctcactcgcggatgtattttcctcctgtgccctgcctgacatctcaatcggaccaaaaacacccctctccccagctacttgcatctgtcccgcgactggtgcagctgcaggccgccgccctgggtggctcgcggcaggagggactgagcccggggcagcccacaggggcaggaccgcgtcgcttacccagatgccgccgcggcggcaggccgactcctccgtgcaggaggggcgggctcccaagccgcgcactgcaagcagtggcgccggctcacgcacccctcggccgcctctcgcgcggcttcccgcgccggcagcccgcgatggccccacgtgaccgcgtgtctggtagcaggggaaagaggggcgccagggccggggtgtgcgtgcgtgcgtgcgtgcgtacgtgcgcgccctcccgcccgcccgcctcagtggccgggcgggggtcggcccgcgctctgagtgccgccgccacagttcgcagttgtgactctgtaggcggaagcatagggacaagcctgagcgtcacaggctccccacaaacaaccgcgtgacccggggactttccccagggtgtgcaaaagcacaggcaccccctcagttctggggtgaaggtgggggtggggaaggatgcgcccgcgtgttcgctggggaagggatgagggcgcggggccagggaggccgagccgcgggagcctgggtggagaggcggactgggcgaggtggggcatggcgggggaagtgactcagggccagaggcagcaggcccacggaaggtggggtcgggggggcgcggggactgggcgaccctgaaccgacggggcagggcgaggttgccggagcactcgaggcggaccgcgagtgacggcccagctgctgggcccaacgggcaggggtctgacatctggacggagtgggaaagcagcctcgcatcctgccctggggagtcgggaggagcccagttccatccagctgtgcaaacaggaggaggaggaggtcccaagcctacccttgagaggggcaagaggggtggtcaagccgccgccgccgcgacggcccccgcggtgcgggttgcgccagcctcctcggagctcgacgcagaaacttgttgcaacaaacaggcgaccgcgggtgcccctagcagccagcggcagagtgggtgggcgggcgagagggaggggaaggctggcggacgccgcagcgaactggtgggcagacccggagtcgccgcgtaagcggggccggctcagtgcggtgcggcaggcgcggctgtgcggcagcggaagtcctttgttgcagcacagtccctggcagagccagagcctctccgcgcagcccagcccgagcgccgagcgccgcgcgccgccgccactgcagctcgcggccccttcgccttcgcccgcctttcccgcggctgatttgccttaaactccctaaaatctccgcagctctggttcctgttgcggccggtaagtatttgccagttgtggggctatttgcgcaactttggcccaggccggagggcgacgggccgcgggcctggcggastgcggggccggaggggcgccgatccgtgcggggagccggagcgcggcggacgcgctgcgaggacccggtgacgggcggctgccaggccgcctgcttgttgccggcgcgtcaggtcccgggcgtgcggcctccctgagtcggaggcgaagcccctacggagactagttcccaaattagttaccttcttttctttctttctctgcctttatttttttcgaggggggaggggaggtgtagacgggaggcgggagaacccggttgattgacgtgcctagagcccgcttctctcaacttacagctgcggctcggcggcgggtgggaggggaagtgtcccggagcccgaggctgcagacttgggcgcgctccgagggaggaggcgtaagatccgtgcaaattcttgttacgctgtttcccaccccctctcgccggcacacacgctttttgttcagtaaaaagtggaaggtctgagtttgggaattttaagtggaaaagatctgtttcttgggaagggagtgctttcgcttgcagcggtgggcgcttactagaagttcggtaaatgtgttggatgcagatcgggagtcgttactactaaagtatgtaggcagggtctgagctcagccaccccacccagtctccctttctacctaagcaacgcgtgtacatgatctgaagggttgacatgacattttctaaattgggcgaatcaggaagaggttgatgaaaatccttgacgttttctggggataggacatttgtgtgtgataacgttcttaagtcgaatttcagtgtggcagtgcacgcagattcttcattggtgttagtgtatttccatacggtatgtatcagtacaagaaatagtgttccctttgacactcgaacccaaggagtggtccgaggctttttgaggcaacgtaggatcaatgtctctgaagcagatttggtgaaggatgcaggtctcataatttacagagcaatcacagccttctttgaaacggagaaattagattctatgaaattttgtcagtgcagatagatatgatgtggagaaacggggaaaattgagtacaaaaagatgaggcttgaatgatggctggccaacatttgctcagaacctcaaaactttgcttttgaatcacttgctggatatctaataaagtctcaataataactggatgactttgggagctagaaagggggttcctcctcttaaagaaacaggaaactgggccgggcgcagtggctcacgcctgtaatcccaacactttgggaggcygaggcgggtggatcacccgaggtcaggagttcgagaccagcctggccaacatggcgaaaccccatctctactaaaagtacaaaaattagcctggcgtggtggcgggcgcctgtaatcccagctactcaggaggctgaggcaggagaatcgcttgaacctgggaggcggaggttgcagtgagccgaaatggcgccactgcactccagcctgggcaacaagagcgagactctgtctcaaaaaaacaaacaacaacaacaacaaaaacaggaaactgaagcatagtagaggtgaaatgcttttccaaaggttaataaacataacgtctacagtagagtcttcagttaacctcttacattcgttttatgagcaagcaggctttctccattaataccacattttcatggtattgaataactcaggttgaacagtctttcctgaagcctttctattcttcccactcctaatacgatggcctacttttttggggtttttgtggggaagggactggtgtatcattgtcagagaaaagagaaaccatatttaaccagggccttagcagggcatgagcacagtcacagccacttgctcttgaccttgtgctttgatttcagtttaacacttctaaatttttgtactgcttcctcattctcctcttttgccaggctctggggaagatatagttcatcgacctttttaagagtatctcgttttctttgtagcatcatttccctttctaatgtgcaggagaaaagaagtacctgctttcagacttgccctctagccaggaaaagcactaagcctttggtgcaaaggagaggaaactatttggtatagaaatacagaaaaatttccatagatttttgttaataagctgcaatctgttgtcttcccaaaaaaaatgaggtatatttgagaaacatcttcttgagaggtcactttggtctctatagaatgttttctcctgacattttcttctgtgctagtatctcatgctaaaatggtgaaattattttttctcatattcttatgtgaaccaaattaagggttactcgtgtctattttttctcaaaatggaaatgttttttattataaaatccatgctctttgaaaaattcagcctgtattgaagtacataaaatacaaaaatgaaagtcattttgactcccactccccagagataatcaccntgtacagttaattccttgtttaaaacgagagaaggcaacatttgatcacagctgtgtgtgcctcactctgcctggggatggcctrtggtgattcatggactcatgttctctgttcacattactcaggttggtaagaattgccaggtagaggaaaggggagtgttttgcattgggctgatttaaaattatttgattaactgggctgctattttaggtttgtccttattaaatacttactgtatcatggtgggctatttttcatactttgttcatgttaatgttgttgcccagcctctgatggattgatttacagcagccaaacacatgaaaacaaaagcaaaccctcacctttatagagagtttcataatttataattaggaaggagtgggtatacttgccatgaagaccactgccaatatatccctgtgctgatatgggatggggttcctcttgatcagcaccaaagattgcatgctgaacatatggaaaggaaattggacgaaagaagggtcaatgaccgctgttttcagatgtggcatggaagagactgatactggggaggaagcggcagggtctcactccttagccatgtgtatttaagaagaatgaactgtgaagaagttgatgatgatctaaaaacagagccccaaaatagtacatagaaagttaattacaacattggttatttgagagtgttggggacgtgggtggtttttatactactctgtctttgaatttaaaatagttttcaaaataaaatttgaagattaaagaattaaccagattttcttttgtctatatgagatgcatgcagtcgtttttagagatgagttccatccccactttgaatctgaagtattagaagaggcatgctctggtggacagtggggagttagcagatggaaggggatttagggaagggactggacattcttcctgcaagatggagcagtaagagaatgatgagagcttttagattcatgaaaaaggtgactctaggaggcttagaatgttccaaaggggcacttcagctaatagtcatattcagaagagtgttgtctggtttacacaaactgaaacttagggctttgaatcaagagtctcagcttctacttacaagataagcagttttggggaagtcagccactgaacctgtttcttcatttgcaaaatgaggataataaaaatacctatctcagggtggttgtgagatcagttgtataatgtatgggaaaatgctttaaattttaattttaattttaatttccaaccactatataaaagttgccatgattgaaataaacaaaaaattgataagcaaaataaaacttacctgtttaaacatttattcattcaaaaactcatcaagtatcaactaaatgtcagacattcagtaatgactgagatactgccctgatgtcaaggagcttgcagtaaagcaggggagccaaataattgcaatatctgccttaagygtggtaacagagcatcacagttgggatgatgcattattggtaccatattgttgtatgtataggctgttttggcagcacagaagaggcatctgcctcaccctaagatcagaaaaaacttcccaaagaggccaggcacaatgtctctcacctgtaatcccagcaccttgggaggcctaggcagrcggattgtttgatctcaggagtttgagaccagcctggccaacatggcgaaaccctgtctctacaaacaatacaaaagttagctgggcgtggtgccgcatgcctgtagtcccagctattcgagagactgaggtgggaggaacgcttgagcctggaagggcggaggttgcagtgagccgaaattgccccattgcactccagcctggatgacagagccagaccctgtctcaaaaaaaagaaaagaaaaaagaagtcccaaasagagtgagctagacattgaaaaggttctaagcaaaggaacagcatgtgtgaaatggcaaggcttttggtgtgttaggttatttgggatcgggggaatcttaaagcttaaaaatggagttaagtttcttagaatgaacatgcattttatgattttttaaaattggtttcattttgttgaatttcaattatatgattgtgatgttttcaggattttggtttgaattaaacaaaactggagccacaaaattggaaacaatacaattttttttaaaatgtgtaggatctggccgggtgtgtggtggctcacgcttgtaatcccagcactttgggaggccaaggcaggcggatcacgaggtcaggagattgagaccatcctggctaacatggtgaaaccccgtctctactaaaaatacaaaaaaaaaaaattggccgggcgtggtggtgggcgcctgtagtcccagctactctggaggctgaggcaggagaatggcgtgaacctgggaggcggagcttgcagtgagccgagattgtgccactgcactccagcctgggtgacagagcgagactccgtctcaattaaaaaaaaaaaaaaaagtgtaggatctgctcaaagaaggaaactgggtaatccctcccatcatcatagagctgtctcaccagttattcattcagtaacacttactgaatacttaatattccagagaaatgaaaaagccaaagtcctcgccttaaagttgctcacaatctcatgggggagaccaacacataattataaccaattcttatttagcacttactccatgagagatatacttaacaataattcttcagaggtagaaaggattaccatcccttcttagagaattgaagcacaaattgactaagcaaccttctcaaggtcacacacttaataagtggcagagccagaatttraacccaggcagtctggttagtttgtgctttaacacctactttatgtagctgttctgattattaaaatacagtgtaaaaagtgcaaaataaagaggtaatacacaatgagatcaaaacctaaaatagtgggagaggaaggtgttacagaggctttctgcaggaggtgataaactgatttttaaatgatatctgggaggttcagacccaaagaaccaatcggcatgagtaaaactgcaggggaagtaagaaatttatgaagtatactggatgtgtgtggaggagggtgaaggtggtgatgagcagttttatgttgcttgaacatgaagtttgaagcaggcagtaactaaacatgtaagactagatgggtgggcatggagggctttgtatgcctcaataatgattttatactttagtctgaagatatgtgaggggaaccatggtagaatagtgtgatatgatttttcttcttcatgaatcatcttcaaaacagcattgctctgggaagaaaaagattacctgagagtgaaggatttgagagactggttgagcctattttaataactcaggagtgataacagaggccttgcaagagcaggaaaggtagggatggagtagatgggcagatttgagaaatatttaatgggaaaattggcaacacttaatggttgattatgagggagaagttmtaggtagctcccaagtagtctaggtgattggtacatagtggtggcagctgagacaaaatacagggaggggcatttttaagtgggttccagacaaaatctgagtccacagaattagtactttgaaatagaagtcctacaaaacgaaccctaagaatatgaatgccatgtgcaataagggatttcctggtgaagcgtttttagctgagaaaagcctactgtttacacagtgccctctggtggtcagaagatgctgtgctgtctcgttaggatgaatggattaaaatgtacttttcctcctctgcttctggagagggagagaggaatattccagaagccactgtgttccttctgctttctgtgtgggtaagttcatttcttagaatataatgcaactgaactacaggaacatctcacttatttgtaagttatttggttggcaacctcagctatccagtgccttggcctgatgcaaaagaggaaggaaatatgatcgcctgtcagcaaaattcaggaattaaaactttacatcttatgagcatttccctagatcttcagaagatgttgtgctccctctttaggatgaatggatatgtagattcaattttcaatgagtttttgtctaatttcacagccaagaagagattgaaatggtgggccacaggagatcagcacacctttcagaagtgacagttgttggcttgcaagtaaagagacagaaaaatactaactagccaacaaagcccaatctccaaaagcataacagtctgaggccattttgtgtaggtgcaaacccttgcaaatttgaacaactactatgtttcagcaaaacataattgtttcagaggagaaaacagccagccgggtgatgctatatgtgtaggctgcagttagagtagtatgaagagccctagaccaggattgaggagaccaaggtcttatcctgacagccactaaaactaaatgtgactttgaacataccacttaacctcttagggcctcagtttgctttttgatctataaagcagtgggttgaacttgatcatttcataaaattctataaactgtaattatgacattaattttttttaaattgtactgtgcttggattgaaaaggcaaaggaacatttgtcatctctaatttatttaagagtcctctgagaagtatgattatcccaattttatagatgagaaaattgggcttaaagaagttcccgcatagctaaactagtggtagagtttgtattcaaacaaacagtatatgctctctggcttcttttttaattccttcacttgacaagcacatattaagtgtcaactatgtgggaagagtgtgctaggcacaaggaaaacaaaggccattaagccttgtccctgtctttgaggcttcagtacagtaggcattgctgtatcacactgctccttggatctcttgtcagtgctaatgatacaagtaatactactgcactgttaggcttaatatatagctccattatgtctttagggtgtgggtataaaactaagccaccatttatattattgtttctatgggaatatgtgtttcaagttccaaataaattaaaaataaagttttaggatataacccagttataattgcagaacttcctgtactaagtactgaatttggagtctaatgcacagccaccagtgcagatagtgcataaaattttctaaacttgatcgtgtttgtcacttaagtgcgttgaaataaaacctcttatctttgggagcctctacaactggttattcctggaagtttcaagragaaacctagagaatgtaatagagattggaccctataccctgcaagatggtattctaggaaagaattttgccaatgtgacattatttttatagatggcagaatctttaaggtcatgatcttgggcttagagtcatattgcctgtgttctaatcccatgaagtcctctctttgtgatattacaaaggttatataacactgtatgcctctgttatttaatcttgaaaatgagtcttatagcagcatctactttgtagggtttgttacgaggattaaatgctaaaatgatacttatatatgcatacatacacataaaatgatacctatatatggatacatacacagatatgcacacatacacacatacatgtatatacatacatgtatatatgcaatatatgtgtgcatatctcacacatatatattgcatatatccatatatatccatatgtgtatatgtgtaatgtatctgtgagagatatatatacatctccctatacatctgcctggaatagagcctggcatayagtgagacataacaaatgttagctattcatattattattgtattacagttgtcatttactctactttgataaccttcatctaccagtccagtaaagcaaatctaccttctgtcctgttacatttccagccaagctgctgtgtaccctcctcaattatttacatacacatctatataaatactcgaaatgcctcacccttgctttctgtttatcctactcattcatcaaggctttactcaaatcctacatccttcctaaagcctactattttggtataattaacgcttttcttctaaactcttgctgaactttattcaatatagtttatttttatttttatttttatgtttgagatggagtcttgctctgttgcccaggctggagtgcagtggctcaatctcagttcactgcaacctctgcctccaggttcaagcgattctcctgcctcagccccccaagtagctgggaytacaggcatccactatcatgcccggctgatttttgtatttttgtagagacagagtttcaccatgttggtcaggctggtcttgaactcctgacctcaggtgatccacccacctcagcctcccaaagtgctgggattacaggtatgagccaccgcaccggcctcaatatagtttattaaactcctcaaattgtttcttggtttcaaatttaatccctcatatacagttatctctattgtacaccatccttctccaccctccatttcaatgctctatccagtgttaggaacattatgagtattcaatagattctgatattctgatgttaaaatgtaagaatcctttcattacattttagacttttaaaatactctgtaatcctcaaatccatatgcatacatacattcaacctataagacatagaaataggtaaaaggaaacatatatacataaatcttccttgagatccagaggtaattgtaagtcagagattggggtgctgaattgggactgtgatgctaggctctctagactttcactgaggctaagcgaatcatcttcaaatgcctcattggtgctgcaagtctgtgacacaatttagagggtgattatttgcctcacagaaacactttaaaattcctttaagttacttctttattcattggatatgcttatttatagacccttaaattatcatttaccaaggctggagcaagagaaacttccagcaaaactgttatttccaatttgagagatctagcaatggaggaaaaatatttctgaaatcttactatgtcagtgagaaatttactgaaatagcttacacagtataacttagggaacacatctattgaataagactagattgacatgtatggataaagccacattacagataaagaattcagattggggtaatcacttgctcaatagcatccaaccaacaaaccctgtattaaggactcatgccctgtccttgtttagtgttctttccggaagaccatactgtatagtaccaaggaagtgccatatatagaggttattactatctgggtggtcaggagtccttagtcctagtatgtgcttcagcacagttaactataccctgatacattaaaaaccatgtatctttgccttctatggaataagaatgttagactagattagatctctctaagctctaaaaatgtatgattaaattacttaatatgcttaatgtgcttggtgactgtttttaaacttgagatgagccgttaaactttttcagactaaaattttaaaaatccagtataaaactttttggatcacctaactccttaattcttgctagagttctgcacagtgggtatccttctagccttagtgtaactcttggcattatatagcttgttttccttatccaaatgacattaagtcctttgagtcacattggaggttctgctctcagacctgagcccttgacttctagttgtgctaaacttgtcctaccagtgatgcagctagtagtacaaacaaaagcaatcacagatttcagtcgtaaaaacaagaacagctgaaatacaagctgtccatttacttaaaaccttttataggctttactagaacataaagttcattaactttttttggcagcattaataaagaggtcaaaaaaatgaaaaaagagcaaactcctcttggaatttgagtgaaattataatttaatgaaagtgaatgcctcataattttttttttttttttttgagatggagtcttgctctgtcgcccaggctggagtgcagtggcacagtcttggctcactgtaagctccgcctcccgrgttcccgccattctcccgcctcagcctcccaagtagctgggaatacaggtgcctgccaccacgcccggctaattttttgtatttttagtagagacagggtttcactgtgttagccaggatggctcgatttcctgaccttgtgatccacccgcctccgcctcccaaagtgctgggattacaggcgtgagccacggtgcccggcctcaaaaatttttaatgaaaaaattatcttcaagagataagctaaaagtctcacaggaatttagatcyctcctcccctgccgcatactcctctacctgtttttggtgtagtaatccttcttaaagcttttctgggctaggcacagtggtttatacctgtaatctcagcactttgggaggctgaggtgggaggattgcttgagcccaggaattcgagaccagcctgggcaacatagcaagacctcatcactacaaaaaatatacaaaaattagccagtcatggtggcgtatgcctgtagtgctagctattcagaaggtgtgaggtggaaggattgcttggagaatgagtacccatattaaagcaggaacagaatgctattgaggacattctgagctatgatggcaygccagcctgggtaacagagtaagaccctgtctcaaaaaaataataattaaaatttaagaaaaaagcttttctgaatgaggtgtaacaaggacagagtttctggtactaatgtgtcaatgattgctattataagttactgtgcctaaaatcagttttactcagaacttggacatttgcataataatgttacttaaactacaattctaggtcagcctaaaaactgttgtgttaggattaaaaattagacacagcatttgttcagcttccatttgttcagcttccagctctatagggggaatataggagtataaacatggatgcagtgggattcacactgtgatccgtctgactgagagcacttgttctttctactacagcatgatgccttcttctgtagagtgggcgctttgcagaatacgtgttgaatgaaatcactgatctaggaaaagtaaaaattcctcaaatgaatacagaatacttgtgctactgctgatgatcaacactttatacagtgcctggtataccaaaggtagtcartaaatgtttgttgaatgaataaatgtgcattaaaatgctataagtgctcttatttaaatgtyttagtgttttatgttaataaaagaatatgtatttttactcagttgaattgtgactatagctatagatgtgcctatcatattgatcttctatgtagttgtattaattttggttgctgatgataaaactgctgctcatctagataagaaagggtctttggaacttctgtgctctttatatcattatttcaagcctggactatttaatacttgaaagtttttatagattaactactggctttctaatggactgttatttggaaggaaattttaaggttatcaactcaaacttacctgatgcttaaataagcatcaccaccattacaacatccactattactttcattattacatgccaagcacgatgcattttacacattgcctctgtgaatcctcatatatgatactgtatttgaggtattatccctaccttttcagttcaggaaacttagggtcaatgaggataagcaagttcccaaaagtggcaaagctagataagaagccaggtctgtctgatcctaggcccatgctcttttcacttattatactgtcctcaatagcattctgttcctgctttaatatgggtactcattctccaaacaagtttgtttcattcttgaattactcttattaatagaaagtttggttttttagaaataatacctatccctctgcctcttactctatagtttattatttattaaatgtctctctgaatcctagaaaaatgactatagacatagaaatttcatcctacttaaaacgggcttgggtcaacatttttgtgtatttttttcatcttttttccccccaccttttgaataaggttgtggcgtggatttgttttatataattctaacataattatgtatcctgtgtttrtttatttggctctccatcttgaacatttttcccacttctgtagttgccatttagaaatatatatatatatatatatatatatwtttttttttttttttttttgagacagtcttgctctgtcagccaggctggagtacagtggcatgatctcgactcactgcaacctccctcagccaggctggagtacagtggcatgatctcggctcactgcaacctccctctcccaggcgcaagcaattctcttgcctcagcctcccgagtagctgggtttacaggcatgtgccaccacgcccggctaatttttatatattttttagtagagatggggtttcaccatgttggccaggctgatcttgaactcctgacctcaggtaatccgcccaccttggcctcccaaagtgctgggattacaggcatgagccactgcgcctggcccagaaatacaatttttaattcactgccacatgacagtgaattctggggcgtagatttaccttaagactcctttttttactaggcattcaaatgagaagtaactcattaatgactatctttgtgcatacattgctttttgtatttagatacatactgaacatgattcctcacagctttttacagatacctgagttacagaggtttgaaatattgtacttacttgaaacttgatctggcttccagaaaaggtgcagtggttgcaattttaagaaggcagcaggtttcatcataagccatcttcatttcaccagtcctgtatctctggctatggaactttatgtcttagaggtggcaggatgggcatataggtagtaaaaggggcgtatgacccatatgtgatcgctgaggaatggataaaaagcaaatagaagtaygtaaacgtagatacccttaattactactacagagcttgaagagtgaacattttatttctctaaacagcttgttacatgttctttttaagttcagtcaaattgcataggaacttatttttaagtagaagatagattctgaagctttatgtatacggattaaaaattgaggctaaaatttgatcttattttaactttataatatgataggatttctagtgcttttaatacttcctctcctttcttccttatccaaagtcagctccctacactaaaaatacttaaatgcccactaatattgtctaatgttaaatgaagaaaactagttgcagagaggtatatatatatatatatatatatatatatatagtatgataccatttaggttaaaaaacacaacaaaagcaaaactatgtgcctggcatctcataggtactcaatatgctaactatgtacatgtgcatctcaacaaatctgaaggtatataatccagagtgtttggaggggttacctctgaaaagaggtgtgtgatctgaggtgtgtttttattctatatgcctctatgtttgaattttttgctacttttttttttttttttgagatggagtctcgttcttgtcacccaggctggagtgtagtggcacaatctctgctccctgcaacctccgccttctgggttcaagcgattctcccgcctcagcctcccgagtagctgggattacaggcgcccgctatcacgactggctaactttttttatttttagtagagacaggttttcaccgtgttggccaggctggtctcgaactcctgacctcagcctcacccttccaaagtgctgggattacaggcatgagccaccgcgctcagccttacttttttcttttaacaattaaaaaaaaaaaaaaatagaagaggccaggtgcagtggctcacacccacaatcccagcactttggaagcccgaggcaggaggatcgcttgaactcaggagttcaagaccagcctggacaacatagcaagaccttgtctttactaaaatattaaaaaaaaaaaaacaaaaaaaaactgaatgtggtggcatgtgcctacagtcccagctactctggatgctgtggcgggaggattgcttgagcatgggagattgaggctgcagttagctatgatcatgccactgcactccagcctaggtaacagagcgagaccctgcctcaaaaaaaaaaaaaggaagaaaactttacactctaaggataaataaaataccttctcaaataaacccactgcttctttataccctgaaatgcatgttgagcaacatgagacacattctaactctatagaattattgcttctttgataattcaagaaaagacaaaggcactgatcaaacttgtttggtgccatttctatataatctaataaggttgttgttgttgttgttgttgttgttgttttgaaayggagtctcgctctgtcgcccaggctggagtgcagtggtgcgatctcggctcactgcaagctccgcctcccaggttcatgccagtctcccgcctcagcctcctgagtagctgggaatacaggcgcccaccaccacgcctggctaattttttttgtatttttagtagagacaaggtttcactgtgttagccaggatggtttcgatctcctgacctcgtgatccgcccgcctcggcctcccaaagtgctgggattacaggtgtgagccaccacacccagccctaataaggttttttwaaatttttatttttgggatagagtctcactctgtcacacaagctagagtacagtggcgtgatcatggctcaccacaacctcaaaatcctgggctcaagccatcctcctgcatcagtctcccgagtagttgggactgcaggtgcatcatcatgcctggctaatgtttttttgttttgttttgttttgtttttaaggcgagatcttgctatgttgcccaggcttaatagggtttttaaaatagattattttaacaacacatggccaatcttgtatcatctattgctccccacacccaccccatttatttttaagcatatctcagatgtatcatttcatctgtaaatactaaagtatatatatccaaaagataaggattctttttaacacaatcaaaatacctttctcacacttaaaaaatgagcaatagctccttagtattaatcatttaataagtttttcatactttacaatctaattgttaactttcagtttaagttgctgttttatttactttcattactcatatccttcaagagttgttttctttttttttttttcttttgagacagagtcttgctctgtcatccagactggagtgcagtggcgtgacrcaactcactacagcctctacctgtcgggctcaagtgatccacccactttagcctcccaagtaactgggactacaggtgatgccaccacacctggttaattttttaaacttttttgtagagaagaggtctcacactattgcccaggctggtctcaaactcccgagctcaagcaatcctcctgcctcggtctcccaaagtgttaggattacaggcgtgagccactgcactcggcctccttcaagtatttttaaattaatgtctttttttctgttcaaatttagtgtacatgttccccccaagagttgtaatgaaactaaaactgtcttttgcttttgatgcctttgttcaatatgaaaagcctgaataaatggctggatgtcttcatcttcaaatttaaaaaatgattcaagtatatattattgagttttattagaatggaaagctcttaatttcttgattgtaatagcagtcatgcaagtcacaaatcatgataaaagttaattttgtcaagtgcttttctatatcttgtttgactttaatatttttgttttacataggtctctaattaacagaagatggcaaagcccagccacagcagctatgtccttcagcagctaaacaaccaaagagartggggttttctctgtgactgctgtattgcaattgatgacatttactttcaagcacacaaggcagttctagctgcctgtagctcctattttagaatgtttttcatgaaccatcagcatagtactgcacaactgaatctcagcaacatgaaaattagtgcagaatgttttgatctcattttgcagtttatgtatttaggaaaaattatgacagctccctccagttttgagcagtttaaagtggcaatgaactacctacagctatacaatgttcctgactgtttagaagacatccaggatgcagattgttctagttcaaaatgttcctcttctgcttccagcaaacagaacagcaaaatgatatttggggtaagaatgtatgaagatactgtggctcgaaatggcaatgaagccaacaggtggtgtgcagagccaagttcaacggtaaatacaccacataatagagaggctgatgaagagtctttacaattaggtaattttcctgagccrctatttgatgtatgtaaaaaaagttccgtgtccaaattatctactccaaaagaacgtgtgtcaagacgctttgggcggagttttacctgtgatagctgtggatttggctttagctgtgaaaaattattagatgagcaygtgctaacctgtactaacagacatttataccaaaacacaagatcttaccatagaatagtagatattagagatggaaaagacagtaacatcaaagctgaatttggtgaaaaagattcttccaaaacattttctgcacagacggacaaatacagaggagacacaagccaggctgctgatgattcagcttcaaccactggaagcagaaaaagtagcacagtggagtctgaaatagcaagcgaagagaaaagcagagctgctgagaggaaaaggattattattaagatggagccagaagatattcctacagatgaactgaaagactttaacattattaaagttactgataaagactgtaatgaatccactgacaatgatgaattagaagatgaacctgaagagccattttatagatactatgttgaagaagatgtcagcataaaaaaaagtggtaggaaaactctaaaacctcgaatgtcagtaagtgctgatgaaagaggtggtttagagaatatgaggccccctaacaacagcagtccagtacaagaggatgctgaaaatgcatcttgtgagctgtgtggacttacaataaccgaggaggacctgtcatctcattacttagccaaacacattgaaaatatctgtgcatgtggtaaatgtggacaaatacttgtaaagggtaggcagcttcaggaacatgctcaacgatgtggcgagccccaagatctgaccatgaatgggttaggaaatactgaggagaaaatggacttggaagagaatcctgatgagcagtccgaaataagagatatgtttgttgaaatgctggatgattttagggacaatcattaccagataaacagtatccaaaaaaagcagttatttaaacattctgcctgcccttttcgatgtcctaattgtggccagcgttttgaaactgaaaatctagtggttgaacatatgtctagctgcttagatcaagatatgtttaagagtgccatcatggaagaaaatgaaagagatcacagacgaaagcatttttgtaatctgtgtggaaaaggattttatcagcggtgtcacttaagagaacactatactgttcatactaaggaaaaacagtttgtttgtcaaacatgtggaaagcagtttttaagagagcgtcagttgcgactgcacaatgatatgcacaaaggcatggccaggtatgtctgttccatttgtgatcaaggaaacttcagaaaacatgaccatgtacggcatatgatttctcatttatctgctggtgagactatatgccaggtctgctttcagatattcccaaataatgaacagttggagcagcacatggatgttcatctgtatacatgtggaatatgtggagcaaaatttaatttgaggaaagatatgagatcacattataatgccaagcatttgaaaagaacctgagtgattttctactgtactaatgtttagatgatagcagataaaacaccaaagcaaaggatatgagctatttaggaattgattatataagatgatttgttagaaacaaatttcaaggcccttttaactttaatatttttgtttaggattttaagtatctacatttaggtattaaatgtttatcatttttgttgtttcttaatagaattatttgtttttagtttttyttagctatgattaaaatttttaaatgtagactacaagyggttgttacccattcaatgactattaaactttagtttttcatcaataaggtgatgacttcactatttctatgtgtttttttttttttaaggttatcctgtgaaattttaaacccagaatcattggccatttctgtttaaattttaaaaattccttaagtaattatttgaaactatcccgtttgcttttagtgagttaactactctttattcccccttattaatgaaattcatattcttaaattgacaagcttattaggcaagttaggtgcactgaatctaacctttaaggttgacatgggctcaaacttggcctaaaaagattgatgaacctgaggaaatttttataaatgaatatttcctataattgataaaatattatcatttaattatcacatttaaaacttatattaagtgtaaattccagtggctttacctcacttgaaaaattagtggggataagccattttgttttgtgatattaaatttaactatgatagttaattaaaaagacatatcttgtattcattaaaaatattttaatttaaaatattctgatttctaaagtgtgttagcttatcaattatttttgtttataaatagactttaatagctctctaagaatatgacctctaaaggaaaagatgattttttacaatacatacttctggaactttgagatttgagaaagcttccatgtatattgataaatctaataaaataaagagatcaattataaacctggttgttctataaaagtagagtgcacaaaaaaatgtcttgtgttttatactgtctaagatttggaggaaatgtggcaaattgcagtttatcgccatattttattatcatttttttctgtaaaagactataaaacttgaggattataaaataatcacagagtatatcaatggaaacagtttatcattttttcagttaaagtagtagtattgttagttgttgctgacacagggtctacataattacatgtgaattaaaacattggcaaaactgacccaccaataaacacatctattgaatagaatgccttttaatgtgaattacttgcaatgtagtacccttttcataatgaaagggattttaattaactcctaattttaaaaatataaatttgtgattctgaacactaatagcattgctctttttgttcacatcatatttaaaatatgcaaatcatattttgtatacaatttacataaaagaacaagttgccaaaagaactgagagacatactggtgagtacagatttagttgaaagcattagagcaccatgtgagctcagatttgtggggatatgttgaagtgttaagtaaggataggaacagcacaggaaccaagtgcagaattcaaataacgggaagtaggcaggggacgggtagaatacacacaaaaattaaaaatttaacagcaaaagcaggaaaagtgattcatcttacccttacttagatacaatagtttatcaagtaattaaatttgaaatccaacttaaaatgaaatgtggtatgtatattactgataggaaccagataaaagttctctaacccagagaccatcagagagtggtataaagagatcagataaaccaagtttccaaactacagtatatagtatcataatggacataatttatttgagatcacttttttcgtgactcatcaaaatttttcttgcagtggctttccccattgttaaagaatagggctttttctaaatactaccactttttgaagaaacgattatctattccattaggaagggggcttaatttagtcttttgatatgtactaacagctaacaattagcaagcaaatatataaactttactctctaattttacatgactgagatgtttatagttttagaaagccatacctcaacttattttttattttatttatttatttttcttttttgagacggagtcttactcttgcccaggctggagtgcagtggtacaatcttggctcactgcaacctccacctcccagaatcaagcagttgtctgcctcagcctcctcagtagctgggattacaggcgcatgccaccacgcccggctaatttttgtatttttagtggagacagggtttcaccgtcttggccaggctggtgttgaactcctgacctcgtgatccaccggcttcagcctcccaaagtgctgggattacaggcatgagccaccgtgcccggccacctcaatttttttttctgagtttcatgttacacagaacatacctttttgttttggagctagctacagggaagcacaggcttctctagagtggaatgtacaattcttatcaaggcaaaaagttaaagactacttgctttttaaaattagggagaatgaaaaatatccagcacttttccccagcccagttccctaatatctccttcctctcctggggcagagctgcagagctgtcattccttgctgttgcttcttgccctccctgggtgtgaaggtaatgaaacaagtgtgttgaagctgccagatcttctgcctttgtaacttaggtgttcaggttccaaatctaaaaatgaaaggagaatctacacagatatatagtggaatcaaattctctttctgtctcatgaacaccatgagactcttttgctttggcccttttattctacacagcaagaaaacccagaggaatggttagcaagcttgccatcaactatagtacaatacaacttgcatgttctacgattccttagtaaacaggactaagaatctcagaaattaatagagcacaaccaaggcagcagtagattaggactcagaaatgcgtcttcatctcccccatgtttttaaggtaaaaatattcagaggccaggtgtggtggtttgcatctgtagttccggctactcgggaggctgaggcaagaggattgcttgagtccaggagttccagaccagcctgggcaacataacaagaccctatctctaaaaaaaaaatttgtttaattagcagggcatggtggcatgcagctgtagtccccagctactcaggaggctgaggtgggaggatcaatagagcctaggagttcaagggagcagtgagctatgatcatgccattacactccagcctgggtgacagagtgagactccatctctgaaaaaaattagaaatgacgcacatgggttaaatggtatatggcaaactaacagtttgagtatggacaaaaattcaattagaagaaaggatcccagaggggctaataattwaaaaaaaaaaaaagtttgctagagcagtcaggacactaattaaaaggaaaagtagaggctgggcaccagcaccttgggaggccaaggtgggtggatcacctgaggtcaagagttcgagaccagcctggccaacatggcaaaaccccacctctactaaaaatacaaaagttaggccaggcgcagtggctcaagcctgtaatcccagcactttgggaggctgaggtgggtggattgcgaggtcaggagttcaagaccagcctggccaacatggtgaaaccccatctctactaaaaatacaaaaaaattagccaggcatgttggcacaagcctgtaatcccagctacttaggaggctgaggcaggagaattgcttgaacccaggagatggaggttgcagtgagccaagatcacaccactgcgctccagcctgagtgacagagcgagactccatctcaaaaaaaaaaaattagccaggcgtggtggcgcgcacctgtaatcccagctacttgggaggccaaggcaggagaatctcttgaacttggaaggtggaggttgcagtgaactgagatcatgccacagcactccagcctgggcaacagagcaagactccatctcaaaaaaagataataatacacacgaaaaatcatgttttactgtagctgaaaaatatatgaacaggatataaaaattgaataaaaaacatttgaaaattataggtgagatgagtagggattaaaaataatatgactataattatagaatgcctatggaacaattttatgaacatgccaaggatatgcctaaataattgagatttttgtaagtaatgatgagagaggaaaaagtaattgagatattatcttttatattctaaaaaaaagtaggaagagaagctggtggtggttgacaactttttccctggttaaacaatactcatttctctaagtcagtagttaaggaactttgtatttaataaatttctggaaaatcttccccaaaaccagtttagccattgtaatatttaaattaaacataaaacttgtgtcgttgttaacaaaaagccaaatcactaccaaaagaaaaaaatctgagtgtatgtgcacacatggttaagaataaagaaatctggtatacctaattttaactgggtttttatcatgaattaaaagttaaaacatttttcttttcttttttttttttttttttttgccattcatctattttgatcagttagttcctcaactttccttactactcccatctcctttgtaacatatacttctcagtaataaatggccagtgctctccagacatcctagcatcaacaacttctgggattgcagggtaccaaaaagctctgggggaacatacccttgtagaatccctcccacatccttgataacctgaggtgcagtaaactggggatgataggatgaatgccaggaaactaaaacaagtagggttatatttggtgttaagaacttgaaattgcatcccatatttggaaacccatgatccatccatcctagggctctcacttaataaccccagcatccatttatttagcactctctatactctgcaaagtgctctacatacataattttaattaatccccacagccttatgaggtaagtatcatactaattttccagatgggggactgaggttcagagagattatttttcctaaatcacacagaaactatgtatcttagaactggagtttgaacctaggtttctgacttctacattcctgtactccacctatcaagaagtacaaagaagggccttttcagcctagaaacacatgtgataaarctcctatgagattgtgctccttgttcatctgtcatctgctgtgctggtaaggtggctagtaatagtgggtacccaattaacatgctgaataatgtgaaaacgtgagtggaaaacaaaactttatttaaatggttgattcagaatgatgttttagaaataaatattaaatgctgttatgttttgattttccttcatttaaacttaaaacagttagtggtactgtcagcctttttgaggggcccatagtaggtgggctcaattaaaaattaatttgaattcaacttccacatttctatgtctgtgaccttttcttcctttatttcccctattcctgtcctttatgttttaatctctcccgccaatctccatttccttttattggttataagactgttgagttgaaggactcaaatcatttgaaaataaatattcccaagaaaaagcaggataacagaataaccagtttcctctttttgccttaacagattatgtggataagaaattcatcatcttagccaggcacagtagctcatacccataatcccagcactttgagagactgagttgggaggattgcttgagcccaggagtttgagactagccctggcaacacagcgaaaccccatctctacaaaaatttaaaaattagccgggcatggtggtgcatgcctgtagtcccagttacttgggaggctgtggtcagagaattgcttgagcctgagaggtcaaggctgcagtgagccgtggttgtgtcactgcactccagcctgggcaacagagcgagaccctgtckcaaaaaataaaaacaaataaattcatcatatctttgactaataaacagaagaacccccttccccagttaccataggtgattgatttgattaagatttatagagcaatctaagtttgcctaaaaacaaatgttggttagtctagccacttataattcaatttcccaaaatacctatggatttttagggtaaacttatagagacagttttactcataaaacaaatgaaagataatttcaggaaatgacacatagctgcataaccaccctaacctagcagcaaactttaaaaaaggttatttaatggtttaagtgaaacaatctccctcaatctaatattattttaactttatgcgtctattaccttatttctatactactatgttaaacctactactttaatgatctggctaccgtctgccaaatgtcacttttcaagtgagaacagaagaatgagatwgtgaagattcygtggacaatgtctatataatcatttaagtgttaaatataaactaaatgacaatagcagcttgtaaattaatgctaattctggctgggagcagtggctcaggtggctcatgcctgtaatcccagcactttgagaggccgaggcaggtgaatcagctgaggtcaggagttcgagaccagcctggctaacatgatgaaacctctctactaaaaatacaaaaaattagccgggagtggtggcacatgcctgtagtctcagctactctggaggctgaggcgggagaaccgcttgaacctgggagatggaggttgcactgagctgatatcgtgccactgtactccagcctgggagacagactccgtctcaaaaaaaaaaaaaattaatgttaattttgaacaaacttaatatcacttacatttatatgcacacaattggttgaatttagcattaagaagtttaaatcttacttaagttgttctcttattcaggagaaccaaatcactgaagtcaattagtagtgtcaaaattgctcattctttccatcaaaatctaccacagatcactaagggacagaaagccattataatttctcattatccatctcaattgctgaccaaaaaagatagtatgaagattacaattaaatacttggctctgaactgaacatatcaatgtactaatcattattgtattaagtgaaaacacaggaatgtctagggccaagggatgaccaaaatttaaaagattatttcatatcagagtcagggatattaataattttatgtgagaaaatttgcagtttgttttctcctatttgaggaaggaacagttaattatacagcttaaaaagcccctacttacttaaaaagttaacatgtttttattctccttaaactaactgctcatatcaaacacaatcaggagagctcatttttagatgatagaaacattaattctaagcatccagattatgaaccatcttttttttcaaatgcttatgtttaaaaaattttaaaaaaattaaggatcttattatgagggaaaagcactgttgccaaaaatataattttactcagaatcactagggcagattaggaggcttataagcctaggaatttgcaggaaaacccctcctcttcttttgtgcgtgtatgtgtgtgtgygtgtatgcttcattttcatttgcagagtggctgaagacagtaaaaagaatatgaactttaaaaaaattgttagatttatgtttcaatcagagatttgtcattaacaagttaaagtacattgtaaaatcattttatttgaaggaaaacacttcttaactgcttccttcctccctactttcctctatttgtctgacccctatctttttttatgttatatatttatatgtcctgctgatagattaataagaacatcttatatttgaatggtacgagttacattcgggaaataattaaatttaaattctaggggctatgcttgtgtttctattctctrttctgttaacagtgtgttggcctagtgccaaagccaagaaattctgatctaagaattatgttgtatcttgtagagcagtcaacttgtaatattatttttcttgagttttgtctttttctgtgtggcagtggtgaaatagggccttctaaacctgtggagaagtgagagatctgaatttggagaggacatggggaagaatcaatcttcaacagataatctttaagtacagacccaggaatatcagatctgaagtggcaccatcttttctgtcttcctgacaaacttccatcaacccaaaaagttccagttgcaaagatccaagaaaactcagtaaagatcactttggaatcactttgttgtaacaaaattgattcatggtgactctaatatttgtgtaaatctgctgaagaaaagtaactagaaaattcatacaacatcagtggttacagctatactaaaataaaactttatatgctaattatcttcaagggtctttctaaaataaaaggggttgttaggctactgcaaatataaagagacataatcacaaatctatttatatagatataaataattctaaacttaaaatcactagaattatagcttaaatattatgaaatgtacttagtcaacttaaaaacttacaccaaaaatctgtagtttagagtgtaagaagtaatgggtacagagaaaaaaaatttaagaccaatattttaacaggataatttggttattactcactatagtaaaacacttgcccttcttccttttccactgtatatgccagtcacaatcttgatcatttatatgaatgaaactcccttttaaacctgttaacttgaaggagaacagaaatggtattacttcaatagtggtagatttccacaaatcagacacattattttcttctgaacttggcaatataacctaataaggcagaataagtttctgttaaaatacttattctcaatatttatgtataaaccatgcttctcagctttcaaatttcaagataaaatttaagtattcagtaaaatgatggttaacatgttttaaaaaatctttaatggagaagttaaatatttggtgagattttagtctggctataaatgctttgtttgatatatatatgtgcacatatatatattacttaaccatatgaattttatttccttattctgaatatacttgtagttttacttctttctgtttatgtacccaattccttatgattattttgtttcttctgcaatatcaagatgttatttattttgagaaatgcttatttttatgactatttattccaatgttttaacaagaagcacagagatttatagtattcttaatagtatgtgcagaagttacatcatttaaaaaacccttgctgtaaagtaggataacttgaatattcattctaataattagactaagtgaaaatctgagaaagagttaattgcaatgtgatagtgggtagaaaggagagaaaaacccactgaagggttcaaatacatgtgaattctactgctttaagagaaataaaacaaataagcctagggaaatattagagtctaaaaaaccctagagttamtctcttttgggaacataaggaggtatacagaactgcagacctctaaacataagtaggaaaaagaaaaataaaagaatattaccaataattaaaggtgccagatcaaaatagtaataaatcaacaaataatttttgattgactggtggaattagatttactaaataaaaatggcttaaattttgactgtactaactataaatgtaatgaattataataattataaatggtataaatgcattctacaatgtgattattttctgtattttagtatatagtataaaatggaattattgggttaaagtacttttattacatttcttaatccattgtttttacctaataaaatttcctcctctatattccaaagttaaattgtctgtatattacttttatttatactgtattttttccaatctggccatttaaaaaaattattagtttgaaaattattaactccttccatcctctaataccacaataataaagtatctgatatagctaattatgatgttctcaggtagcttaagatgtgcacaaagagaattagctaaaattcttattgccagatcctgatttctttcaatatagaagaatgatctgttactcagcctggaaagtagtgccaagattatagctcactgtaacctcagacttctgggctcaagggatcctcccaccttagccaccctagtagctaggactatagattcccaccacgatgcctgctaatttttaaaattttttgtagagatggggtctccctgtgttgcccaggttagtcttgaactcctgggctcgagtgatcctcctgcctttgtctcccaagtgctgggattacaggtatgagccactgcatctggcctggatttccttcttaatacacaaagaaataattatttataaatatccattgataaagtgtttagctctttcagaggcttaattcatttttcaagtaaacacaatttactgtcagagaaataactactttgccagtataattcatttttttttcagtttaagaattaaataagtattaacaataattgcatattgaatctgattctccaagtataggacagcctcacttcttccagattatttcaatctattccacaagggtctataaggttagcactaaaagttgaagtaggtataatttgtctgctgttgtcatagattaacttctcttttggaaaaagccttccaggttcaggtctcttacccttccataccaggcatggaaatgtcttaccccagcctactgtgtatctacagcttaagtgtaacttcaagactgaattttttaagactcaaagaaacaaatggcaagttttttcctgtagtgataggtgaagaaatattttaggacacagcactttgtaagaattataaaatggcagtatttatagagatcttaaagataatcattagttgaatttcagtttgctcaagggccctcaaattagaggctgttattccatcttttcttcaggccaacattatctccttaagataatctacaacccttgtgaaggttgttcctgggtagagactgagaggattttaggaaaattcacgagttggggtttttttccctagtaattctgcaaaaatgtattattgctcagtctccttagggcaggtctaacacccaggcacatagttttaggccgtatcttattcacctttgtatctctagtacaaatattttcagatatgaatttgtttcaacttttggtctctgcagtgtcatttagtacagaaatataagaggtaggcagtgtatcttcctactataaagaaaaaaactaaattttttttttgttaaataatgtgtctcaggtcacttttaataaatactaagctagtgatttactactgctttccaggcactcttctgggtgctaggaattaattacagaggatttgacatatgttaaagctcttgttttttccaccatttaatctgtggagccttagtctttggattttaaaaatactttgaaacaccctagtatttataatctgccaaagagagagttcacttgttgaaaatcagcaataatttctatgtaagactaatagactttgtttcaactgttgatatggtttggctgtgtccccacccaaatctcaccttgaattgtagctcccataattcccatgtgttgtggtgaaagataattgaatcatgggggcggtttctcccatactattctcgtggtagtaagagctgatggttttataaggggaaaccccttttgcttggttctcattctctcttgcctgctgccatgtaactggtggtagtgagtaagatctgatttttttttcagcatccaaaatctttttattaagagggtaggatccaaggttagtttttgtagcctcggctggcctgtcggcctctgatgcactcgaacttccagcccttggagcagacatagggtttggtgtggctgtgcggggttcccgggccttgctgaaatgctggtacacctttcggcccttgcaaatactggagagcaggacagtaccgcagccctcgggggagtccaccccttttgcttggttctcattctctcttgcctgccgccatgtgcctttcgccttctgccgtgattgtgaggcctccccagccatatggaagtgtgagtccactaaacctttttttcccttatagattacccagtctcgggtgtctttatcagcggcgtgaaaatggactaatgtagctgttaatagtcaagttctcaaaatcaattgtaaaagcacagtaaggaaacttagaaaaattactgataattctaccttctagataaccaattttgatgcattttaaatctatattagattatcctacatataagaagatacaagtttcatatattttattcacttaattataccaagaacatttttccgtgtcattaaaaatcttgtaaaccatttttacggctgcgtaagaattcatcatatgcatgtactataatttaggtaatctcttatttttggatatttaaaccatttcctttctattatcattaacataaataatactacctgcattttctattatttccttagaataaatcccacaatgagtaatgctaaataaaaggcatgatcatatttaatgtaaagaaaaaatattggccaggtgtggtggctcactactgtaatcccagcactttgggaggctgagactggtggagagcttgagctaaggagttcgagaccagactgaccaacatggcaaaactccatctctacaaaaatacaaaaattagccgggcttggtggtgcatgcctgtagtcctaactactccggaggctgaagtgggaggatcgcttgtgcaagctgtgagcctgccactgcattccagcctgggtgacacagcaagtccctgtctcttaaaacaaacaaacaaatttttaaaaacccaaaatacaaatacagtgtcttttttgggaaaagcttaggatgcctcttaaactatggaacatacaaaacacaagttagggcagaaaaaaatatacatggctaatgaaaatgtgggtataattgctactgtggtttcagaaacctgtgttaaagatgaatgtggtggtcagattgcaagatgtgtttgtaatatctgggcacagaggtagcacagttattgtgcaaaagaaactattcctctgaagctctaattttagtgattctatgtgagaactctggcctgcttgctcttttgcaatcttggtttgcttgaggtgtgttgagggctgactgaatgcaagagatttaaagaatttgtgtttctcacattctttgtttcagttgtagctgagactgtatctctaagtcatatatcatcagttctacaaagaatatgcattgcttccagcccactaattcccttttctaaaaaaacaaagaaaagaaaagaaagaaagaaagaaaaagaaggaaagaaagaaagaaagagaaagaaaagaaaagagagaagaaaaactcaggcctgtaatcccagcacgttgggaggccaagatgggcagacaatttgaagtcaggggttcgagaacagcctggcaaacatggtgaaaccctgtctctaccaaaaatataaaaattagatggacgtgctggtgcacataagtaacccagctatctggaaggctgaggcacgacaatctcttggaccaaggaggcagaggttgcagtgagccactgcactccagcctggcgacagaacaagactctgtctcaaaaaaaaccaaacaaataccccccacccccaaactacacaaaagacaagaatttccaagaataaaatcaagagatctgtactcacaatttatgacagtttcaattagaaaagtctgggttttatccttgttttcctaatattttcttttctttttctttttttttttagacagagtcttgctctgtcgcccaggctggagtgcagtggcgtgatctcagctcactgcaacctctgcctcccggattcaagcaatcctctgcctcagcctcccaagtagctgggattacaggcgcccaccaccaggcccggctaatttttgtatttttagtagagacagggtttcaccatcttggccaggctggtcttgaacttctgacctcgtgatccacgcgcctcggcctcccaaagtgctgggattacaggcatgagccaccgcgtccagcctttctaatattttctttaaaacgtcccctttttcaaaattttttcaaattcatggaaaagaggataggaattatggttaaaattagtactaactgatgacattaaccgattaataaccaattatgttcttaaaaactggaaatgatatacaccactagataaaataatcttaaatgttcattgactttatagaattctctcaacattactttttggtcacagataacttctgggttgacaaaagcttttctccagcgccatttcatacagcttttacatggctgcacatcactagcctgctttaaaggacggtgctcccagcccaaagcctcaggaaaaagaccatggctcaaaaagctctgagatgtatcctatccacctgaagagcctattgcttgcctgtatccctcccttctagtgacactaatcttctgtacagaaatcctagtccagcaaacattgctctcatcttcgcccatacacaatctatgtaaagaatggctttcctactctttgctggcgaacttcagctcccggattaggcatgccacctcttccaggtagctctcagcaacgcacttttccatcagcctgggtgtgcccctctgtgttcccatggcgctttgctttcagcgcttctcccaaattatgtttacctgtttattagactctccacctctgaagaccaggccatttcatttggctttttactgccacgtagtaggtacctgttcaagcttgatggaaggacttccccagcctccccacacatattatgtaaagtgatcgctgtctttgcttcctcctggagaccatttattttatttttttgagacggagtctcgttctgtcgcccaggctggagtgcagtgtcgcaatctcgactgactgcaacctctgcctctcgagtagctgggactacaggcgcgcgccaccacgcccggctaatttttgtatttttagtagagacggggtttcaccatgttggccaggctggcctcgaacttctgacagcaagtgatccacctaccgcggcctttcaaagtgctgaaactacaggcatgagcctccacacccgtccaggagcccatttatatgggagcctgcttctaaagattattacctggtgccagggtattttccagacctgtcctcacattcctgttaaacaggaggaagtgaatcgcgctccttttcatctaccttctcggagggtttatgcctccaatattaacctcagcacagccaaagaaaatcattccattccattgagcggagtcagaaacatgactaggtcacgatcacaaccccgtgtgtgccagggtgaccgagactgggtgactttatggtgtttcaacgtgtgggttttgactgattatattatgggttttccagtcaaaaactcaaagcagtggataaagcacttgcgacctaaaataagcaatggaatgaacaggaaggcgaaaccagagtttaaagcggcaggacaaacaggaaaaaggaagagtgaggcaggaagggtttaaatgcaggctcctcggaggacaagtcgccgccacacccctgtctgccgtcccgccagccgccctcacgcggcgcgggaaaacggtcggcctcgccctgggctcaggttctctccgcccgccaggcagtggggtttttttttg

SEQ ID NO: 98234 - DNA, 42363 bp, Homo sapiens
tttatagaaagctgtttgttattaatgtctggagttatagttggctttatttcaaaatttcctaagttattctacttaacattcagaagatggaaaaaagaaccaactttcaggtaaggacaaatactgcatgatcatttatgtgaggtatctaagatagtcaaactcactgaagcaaagaataaaatggttaccaggggctggggggtggggaaatggggagatgcgaattaattagtataaagtcagttacgcaagatgaaaaggttctagaggtctgctgcgtaacattgtgcctgtagttaacaatactctattgtacacttaaaaatctcatgtttagtgttcttactaccaccacaaccacccaaaaaaaggactttaaaaaaaaacctttaggtcgggcacagcggctcatgcctatagtcccagcactttgggaggcagaggcaggcagatcacgaggtcaggagagtaatttcatttaaatagtcatccttaatttctcactataaagtttgtttgttctgttttgttttgttttttgagacgagttttgcgattgttgcccagtctggagtgcagtagcgcgatcttggctcactgcaacctccgcctcctgcattcaagcgagtctcctgcctcagcctcctgagtagctaggattataggtgtgtgccatcacgcccagctaatttttgtatttttagtagagatggggtttctccatgttggccagaaccttataaatatacagtgcttatatataaatgcttataaatatataaatgcttataaatatatgcatatatatttatatacatatatgcagaacctggccaacgtggagaaaccacatctctactaaaaacacaaaaattaggtgggcgtggtggtgcacagctgtagtctcggctactcgggaggctgaggcaggagaatcgtttgaatctgggaggcagaggttgcagtgagccaagatcacgctgctgcactccagactgggcaacaatagcaaaactcgtctcaaaaaacaaaacaaaacaaacaaaaaacctttaatttatagtgagaaattaaggatgactatttaaatgaaattactcatagttaaatagaagagctggaacatcttcatcattccactgaaaatgcttattaacattaccaaagacttgcatcttgctaaatcctagggcccttctctgcccttatttaacctctcagcagcattcagttaatacttactgtttgaaatgcctgtttctgtgacaccgctctcatttatttccaagctccttgtccactgtcttttaccaaaaaatactttcttagtcttctcatttcatttaatcataccactgtctaccagttactcagtaacaaatccaagagccatccttgatgtttctctccttcataacccccaatttcaactcataagcaaatccttgtcagccttatcctgatcttacccacttctcctgtcctagtccaaaaatctccatcatttcacccagacttctgcaatggactcctactgtctctcggcccacactcttgccccatacagtaatttttccacataatagccagtatcatcttttaaatttccagtcttcccagtgtattcagagtaaaatctcagctaattacctctaagactacacataatctggtccccgcccacttctaaagtcttaacatcataccctgcctcgtttgaatctgagatacccatctctacgaatatgcacttaacctctgcctgaactgctcttcctctagatctgcatgtccagcttctttcctcatttaagtgtgaaataaacttttattgataggatttttctctaaaatcaacttgtgtatctgcctctccccatacagctaagctctttgagcacaaggataatttattccatatggtattcttcaactttagaatggtccctagcacatggtaggcacaataaatacctgtctcaatagattaagcggttagagaaaggatataacccttttagtattctagcatgtttgaattcctttctttacctgttggtggtaaagacggtaataatgacagtgacttaagttttaacaaccaaccttaccttacccaattagtacattagtttatcatctatatttagtcccaaaacttgagacaacgtctgtcacccaggctggactatagtggcatgatcatggctcactacagcctcaacctccgtgggctcaggtgatcctcccacaacagctctggagaagctgggactatgactcgtaccatcatgctggctaatttttatatttttttgtagagatggggtttcaccatgttgcccaggctggtttcaaactcctgggctcaagtgatctgcccgccttggtctcccaaagtgctgggattacagaagtgagccaccttgcctggccacaaaacttattttttgagttaggtaactcttcttcagttgaagaccactaacctacagtggttcataatccgaggcttaaaataggtttctggaaagaaagaaaaaaattccattcattactctaaaaattgagagttgggaatataaaaccattaagtaccacaaataaaataactcaaatgtcagatgtatattgcttatgtagtttcttgctgggctaatgctatcaacataataccacctaccactgctgtgtgaaatgcagctgaaatagaagtagctaatctgtttcactcctcttctactcccacaacttggaaggccaaaggatttgcaatgacaatttgcagtgacattagttttagacacttacattggaaccttggttatacggctattagtctgaaagttcttttgactttcaagagctgtctgattgtgttatcactgtactttgagattagggtggtccattccaccaggtgaatgttacatctgagaacattatttttagatatataataaattcacaagtggtttcttagatgttgcagtccttaaatagttcattttaaagcaccataacaaggcttacaaagcttgggagagaacatttcttaccccacgtctttccttggcttaatttcctgctttaaagtgtttaattttatactgaaggaataattcctgagacatttgtttgaaacatgaattgttccaggtcagataattaaacagctcaggagagaacagctcctccatgaatgcttcaaagcataataaaaaggtaatcttaaacatggaaaatactaaaatcctttcaaaccaaatgaacaagattttcagtactttagagaagcattcttaaaacattcaacagctattttacagaagtatacatttttgaagtactagatcaaacataaagttactgtgctgatcttgagcattgtaactaatgttaacacagtaaatacttaagaagtagattacgtattttttattaccaataaggaatgtgcacttccagataaataaaaaaacccttgagtatttaagccttacagcatcttatgacacatcctgcacatataatcagttctcaattattaattggtggaactgaccatttcaggcagacatcctgttacattcctaatcacctactacttccttcccacctagtgttagctcaaggaatttgataccttttatattagcttatcataaacaaaatggagaaaatttataatgcaaccaattatgtaacacattgcaaaaccaaacaactttctattttccatgtcattgctccatttcttgaaatatattttaattttcttcagtgttatttaaaatagatgcataaaaatttattactgtcgtaaacagtaagggataggcaaacatttgaacagaaattagatactcaacacttggcattaatatgttgctaataagcatgccaaaacttttgacaacttcatgggatgacgctagagattactttttctaaactctaaactcccataaaatggatgtacaataaaacaacctttagcaattaattttaaaatgcccttacttcagaattaaaaaattactctagattatgtaaatttggacagtcttccacatgaaacctagtcataacacgcaagttactggtacactggtaattcttttcatggcatatgacatttgcctgtgtcagaaataagtgatattaagtaaaatagaaaactggaaaattactgtgataaactggtgatgaattttgtactcccacaagtatgtttcacttattacatatgtatacatatgcacacaaaaaagttttggtcagctattcatgtggaaattctgagcaaagttcataattttgccaacacggaacaaagttgcccccgaatagtaagtacttaagaaataattttttcttttttcctgtcacagggttttaaggtagacttggcatatacctttgatgccgtaatatttttaactactacaggtagtttagatattattatacgtgacagtaaaaaagtaaaattttagagaaccacacactggtttcttctgagacattacctaagacgaatctccttaaaattcaaaagcaagtaagtgatgctaaactttagcattttgagaaacatgtagaatcactagttgacagtttaaatttgtggtgcttaatataacacaaatcctccaaatggcatttaaactcacattttaatggcccaagaagttactataaatttaataatctcgagttaaagagaacctccaatttgtcttcgttacgaaatttctgccaaattcctgcttaaaactgtatcaggctgggcgtggtggctcacgcctgtaatcccagcactatgggaggccaaagcggtggatcgcctgaggtcaggagtttgagaccagcctggccaacatggtgaaatcttgtctctactaaaaacacaaaaattagctgggcgtggtggcgggtgtctgtaatcccagctactccggagattgaggcaggagaatcgcttgaacccgggaggtggaggtggcagtgaactgagattgcgccactgcactccagcctgggtgacaagagcgaaactgtttccaaaaaaagcaaaacaaaaacaaaaacaaaaaaaccgtatcaaacaaatataaataggatgctgatttgggggaaaaaaaaacctaaaacaatgaaaactaaaagaaaacctccagaaaaagaaaaaaagaggaaaattttaattgtggtcacataaatgaagaccaaatgccttttgcgtcacattctgaaacctgatactccatctcttgttctggatagtgttcttaaacactttgatacaaaatagttaaatgtcaaattcctttttttgttatatacttcagttcaaaatgtttatcttcttcaaaatgctagaaatatttagtcataaatcccatatgaagaatgaaactcccagctttacttgtgtatgctcaagcctcacttcaaaaatctaaatcaaaagagaaattttcaggtttaaaagtgactaaaataatattttaaaaaatccttagtaaattaatgattacagatctctgagcttcttaaaaagaggtaaagggaatccactaggcaaataattttttgtcttatggactaactgcttcacccatagatttagactgacactgacaccacaaaagcatacatacctgtgtttactgaagaactgtaactattgattaaaaaagaaaatttcccacaaaatttctaccatcatggatattttaaatattaagaataagagtttttcagtctaagacaaacctaagtcttacataaggtaacaaacactaccacccacagtatagctcatttaaaataggcctcacttaaatattaggttctcagttttcctgaaagatgtatcagcctgtagttagaagggactcatgtaatgagagcattacttagtacatatatactcatctttaaaaagaaatcagttatgttacattaagatgtagagaaaaagtatttaatcaacaactttaatgtaagagcaagagtgagtaatggaaatccagctctkgtagtagagagcatctacttgtggcagccaaagatttctttgcagtaacttttagctaggtttagggataaaaagaagaatgagatgaacacattacaatatgatgtaaaccactggtatggttttcacaaaagtggaaaagatttaatcagtgaataaatgctacaaatttgccaatcgatttttaacttcccctaaatttatatttcgataagcaatctctaagatttcaactctacaatatttgatgcacaaaaacacagaaaaatgttttaagggaagaataaattattttaagttagtcagactgttaagatatatttaaaaacctgtattccagaacaaaagtcacagatgactaacagaaaaaaaagaacgcacctatatctgggtaaacaaagctatgtaatacacaattacaataaattattatggtataactttggatactgttatatatttagcccagttttccaaataacaagtgcatgctttctctctagaaagtggaagatgcactattgtacaaagcaaagatagcacaggagaactgggcactgtaagaattggaggataaaggttaaatcatttcattcaaatctttgaattctaattccatcaactcaaaagttaagaagggctttagctttcaagggttatcacatgcatacatatttgaatacaggcacaaaaactcatcatttttatttggataacaaagggtctccaaattatattgaaaaataaatcctaattaatatcactcttgtaaaaaaagtttagcacacttttcacaaatgatttatgtaaaagagaaaatacacataattttataatatcttaaacttttattccctaccatagacattttgtcttttgttttctttccgttttctacaatttccaacttgtacctgtgtttaatactgctttagtctgctaaagacattaactgattgcttttctaaatctaaggattatatatttttagtataaatatatatcacatattttcgtaaaattttgacaaaaccgaataagcatgccttgttttaagtccatgctccttccactgtttataaaatctgatttaatgatcaaaaaattcttggttgtcactcttctgtaaccacaatcttccttctgaactgccacccagtttttacataataataacaagcaatagaaaaaccaaagaaattatgttaatcctagttcttcctttcgacactataaaataatgtgaactttttaaaaaatgaaacaaatacatccaaaactcaatacattcaaatgagctgagttcctttaaggtagttaccttggaaggccacagttcattctcctaagtatactgccactgctcaaaaaacctttaaaactcttttgggattgccttcaaagccagttatatactttctgcattacctcaaagttaggtggaagttttggaaactttcatttggtgccaagtaatggtaactaaaaataatcaagcttcctaatactatattttttaaaacaatgtataatcataaagtttagtgtgtgtgacaaattaactttgaatgcaattctaaaagagtaaactcagcaggttttgggcaatggtagattgctggcattaggaaataaccttccagcatgatcactatgcagagtaacattcatttagctgtctatgttctggcatattcgtttaaagtgaacattctgagagttagtattcttttgaaaaggaatatcactctttaaaaaaaaagaattttattcctttaaagcatcactgtcataactatgcacgtgttttgttagaaagtagttctccttactctatcaataaagactacttttaaaaacttgaaagcaaataaccaacttatttgcccccaggctttttaaaatcattaactgaagataaaataatttgaaatttcgaaggtactaaaaaacaaaacaactccaaatgtaataaaaacacatcaagaaccaaactacaatttctgagctgcactgtttattttgctgcttgaaacctaagtgacagtatgccactataattatggggtttcgtctaaacctttactacactgcaggtacagaaatatacggacacatttttagagaattgacattttgcaaaatgcagcaaacattttaatttatacatgagaaaaggaagtgttcaaaagggtatgcatttcaagttattgcaggttatttgtgagagaatttctgcaggtaaaacatgtttaaatttaaccaacagtagcgtgtcagtgtatttaaaatcatgacaaaaatcttctctctggtcatgttgcccatgacaaattactatgatgttgtacgtttagggcaagatgtcaatacagcataaatcccatggtattttggttttcttctggagattaaagctgtttttcttgggataaatgcagcagcaaaacacaaaccagttgatcaaaaaagcacttctgccataactccaataattttcaggacacatcaaccgacagtagttttgccattcccagttcttttaaggattacatctctgcactgttgccttaaggacgtctgtaaaagcttgttctctgttaagccagtttactgactacagcctggttgagagaatttagttggttggtccatttatctagtgcagtatatcgtgcaccacccctcttctgatgatccagttcaaggagttggttgacttgatcaattcggccatgaatagtgctagaaagaaataaataagatgtgtctacaaaagactttcatcaagcacagtttctggattaatgtttcataaaatacagtatcaacaaatgccaaaaaaaaagcagctgcctacattaaatgagttcagtgttagttttaacttcactgtgttattcaaactctagatagaaaccagatttcagatacttttcatcagtttcactgaaagacccataaggcatagatttatccgattaatcaaaggcaagtatcacctgtgaagctttaaacaatgtactgttttcaagtaagatacaatttcaaaaatgttatgtaccacataccctatacttaaaaacatacataaatactattcattaaataattctttggctgtatataataagaaatccttctgaaaaatcatttagaactttttctgagatgtgtttaatacgctcattcatcaaaaaccatcacacatacatatatatctcttctaatagaaaaccatacccaagggtgctttttatgaataatcaagaatccaattgttacctttgtcactattattcaaaacttacggtaccaaatattttgtgataaaaaatagtaaagtacttacttatccaatatgcactgcaccagcaagctctccacatcagctacatctatgtttaactcctaagacaaaagacttgttatataccaattaacattttaaagacttcataattttacacaatcattctaattttaattcatttctatcacttaaaggaaaattagtgaagagaagatttttaaacatatttcattatcacttcaaaatatatccgagaacacaggtatgataaagacttaaatttttaacttctgaagcacattcctgcaacaattttattgtggttgaagttaacccttcatcaattacatattttagccactactttcccctacaattttctctgagggtgaaagaatccttaaaaagaaatttagtgattcctaatttctttgttacaatgttaaggctcttttctgttaactcaatttatgccaagaaaacagaaaaattcacattaaaagtaaagcccagtcccagctactcaggaggctgaggtaggaggactgcctgaggtcaggagttcaagactacagtgtgccacactgtgcctgtgaatagccactgtactccagcctgggctatacagcaagaccctgtctcttaaaaaaaaaaaaaatgattaaaagtaaagcccttaagttatgtttaatttaaaaaatgtattattataataaaatgttaccaagttagagtgactcttaaatgcaagactggtatactgcatttataactataaattataaacatcattaaaatctatgaatataagtaccttagaaataaaaggaatatgtattcttgwgtaaggcttaattaattttataagcacttgtgttctgatgtttcgcaaaagctctgaaagacaaaaaattaaaataacattttatttaacagtttgtatgatatctttatggatcattatgtactcctaattatcttctcaaaatacatcttcctgcttggcaakgatataaagtgtttagattttaaaatacctgggtcaatggatggacagtatgatcagctgctgcctatcccataatttcttgttcccacctccttgattttgttgacattgagactctactaaaatattattttgccttctcaatattacactacttatcatttcctcaacagttaatatctttaaagaagctctgatttataccagccagccaagttccttgttttagactctctcaaaacctagagtactatattttatataatgcttttacaatttcctccagttttgtctgtacaatagttcttaaaattttttaaaaccaggttgaaattcatgtacaaagattctacgtttttctatatctataaactgcagtatcattccaggttcatgtaagaacttttaaaatgtctgttgattaaaagagaaagaaagatggggaacagaacattacttctgatgcatctgaaatttagttccaaatggtcatttaaaaaccttcaaatagctccataataggtgggaaaatcggagctataaaagaagtccaagagcaaagagatgattgtagtctttggtaattcaatataacttgctaaaaacctcattcacttactggtatgaaaccttcacagtgttgccttatctttcatagtacatatatcttagcattatctatagcaggatattttcataacttttgttatttgtcaaaaataaaccttaaaaattaactttgaacctaagcatcaataataaacatgcaacagcatctatattagatttttttaaaaagggacagttaccttaaacaaaatggacattatatataaacttgactatagtaatatgaaattggtcaatttctttaaaagagcttcataattttaaggaatatcccatccaatgacagcatttagaaacatatctatactttgcaatagacagaamgaaaacagcttaatgccatgcagcttcattaagtggcatttctttgacagtggcaaagaaagkaatagaatccagttggcagaaagaacataccttcaatgtgttctcttatgaaaggatcatccatgatgttgctgtgatttgtttttagaatcttttcaaattcagtgatgtcattattctgataggcactaatagaaaaacaaagtgtaaattatgtcaaacatgaagaagttatgtattaaatcagataatccaaagaccctgcttctcaaytttcatatgcaaaaatctaaatratattatactttctgtcatggaaatcacagttaaacaagcacacataaccttctgccaaaaaaaacataaatttccttttcatgcttttggttttttaaaagaaagattaaataaatcttcttttggggttatatactatatttatacaaagttaattaaaatcacctcaatatcttacttctcttaaaagttggcaataaaacatttaacaactatttaatgtttgatgttttcmaatgaaattgtgyatttaattcctaattgttcataatgaaaggaaccaggyttcatgtacactacatgaaggggtgtagcctcgtctttcaaatgagaaagcatatcctctgtgtaggttattcagaaaatgcagcttcttaatttttatmttctagaaagctaccagcaactgtgaaaattttcaaaaggaacatttctcaatcccctgttgcagaaggccaaagactgatttatattcataattctctgaggtatctagtatctcctcttgaaataattctgtaaagctctatgggaattgctaaaggtgctgagaaggaagaatccaaccttgtggatatggcaccattgtctgctttatacktaagacattatcatcagctatactgcacgccctctgctagtgcttccatctgttgggtcccaatgtaacctcatattaggggcacgtgattcaagtgctttgacaggaattattttcctctagtctcctggcaactgactaggaagacaaaattaggaagcattactttcttacctaccccaaatacactgctgtaatatactataggaggacatattcaagcattgaaaacacttgcacaaacatttgttttatatttgtgtacatacatattttaaccgtaagacattcttccatttcttaagtggggtttcaaaaaaracatcttatacaaaattgtgggacaccatgcatcacatcatgtgggtcaaaatttaccattaaaataagttttgagttctaatacagtggctttgctggagtagttggatataataaatttataaatgtcattatatattctgatataggtcagataaaggtctgacaaatcagtcctttaaccaattttaatgtacttagccaatttaatttatacaaaatatcaatgtctagggtaaagcttttcctcaatatttcttagagttttaaaagtgtaaactgctgcttagcaatttaacattataaacaactttggttcttrgttaatgtgaccaaatgtgaatgaaataaactatctgaaataaagatgacgtttcctttaataatgaaaagcaacctaattcaacaaataaattaaaataaagtaaacaataaagaaactgatttaatgtggtaacttaaggtttttaattccaaactgttcttagtccccctaaaaaaaaacgcttttttttttacagccaaaattaaggtttctttaaaaaaagttaaatgaggacattttacacaggaactttaatatcatgaaataagctatcttctccaagtatacacaatttrtatgtaggtgacccataatgtacagtctaatagtgttttctgttaaatgaaaaagtactataaatagaacttctggtcacctaaattatttacatatatctgcaaaaaaaaaaaaaaaaaaaaaagccctgcttcatgtccctaactacatttttccagctgtggtaaaactcagctgtacaacttaaaataaaagacttgaagaaatttagtaaatttcttatacttttttaatgaataaaacccacaaaaaccctgggttccatttattctatgcctggaggaaagtttctcttactcactaattccttttgcaaaaatgggccttttcttctaggttttttgtttggtcttatcttccataattttgtcgaatattaattgactatggtaggttcttcagtggttaaccatcattacatcttcctccacagaatcattcaataaatcttgggtttcttaccagtacgacccttctgtcaccccacactccacctcagaaaattatccattgtaaacattttttttttttttttttgagacggagtcttgctctatcgcccaggctggagttctgtggcgcaatctcagctcactgccacctctgcctcccgggttcatgccattctcctgcctcagcctcccgagtagctgagactacaggcgcccgccaccacgcccggctaattttttgtatttttagtagagacggggtttcaccgtgttagccaggatggtcttgatctcctgatcttgtgatccacccgccttggcctcccaaagtgctgggatgacaggcgtgagccaccacgcccagcctatccattgtaaacatttttaaaaatactttcatcttgtcattgagaaaatatatgagtaaaaaaatatgcttatgctgtcttgtcttactgaaaattcttgactcatcttggactagttcgtaatttcattctggattaagagaggtataggcagtatcattgtgaaataatgttttaagacatccacaatcagttttccactgaaagacacaggtgcattcgtgcgtgcgcagacagacagacacacacacatggataataggaaaactaagtagtagatactttataaaatcttgtggctacagaaaatagcgkaataaataacctcagaagataaaaattctacaaacttttctaagaaaatacaaaagggcaaatgttgaatattaactgagttctgaaaagttttctcactctttcctttatgaactgctttaaggaaatttaccttaactgaaatacaaaatcttaccttactaaattcgtcattgctaaaatttctggatcatttttgtacggcttggcctaaacacagtaaagaaaaaaattaaatatatgtacaaaraaacaacattttaaaaaaagaaataacatttatttccagatagctgataagagaaattaacaattaaaacacacgtacctcctgtgagtcaaatggatttattcccgatttcataagcatatttgctaagaccaaatattttaagcaagtggttcgtcttggacttccagattcatcataattcttgaaggcttcaaaaaaatcagtgtgtgccttttcaaattcaccttccctcaagtgcattttaccaccacattctgtgaagaataagacatgagaaaataggacattttcagttctgtaataacaaaactgaccacctcataaatgccaaatgaaaactatttcagtgcctttcagtttttaaattctgtaacttgaatactactggccccaaggtatacactgaagttctaaaaagcaagagtttaattaaacactttgatatctccccatgccactgcccaccctctccaaaccaaacttgcctctgataactcccataatcagtggatgagggatggcagacttgatgtgaagtgactgttcatagagtgctttaagttttttgttatttttctgtgctgtgtacatttgaatttccaaagcatatatttctaataactgtgtaccttttttcagatcatcttctccatcatcagtctaggaaagcaaatatttaactttagacaagatagaattcagacagtaattcttatttgcattagcctggaaatcttacatttataatactatttccatgtgaaaacacaacacaaattttaattgggagctacagtactaagaataccacttgtaatggccaaaaagaaactaatacatcctttctactttttagttatgagataaggaaaaagtagccaaaggttttttttatagtagtccttccttatccacagggaatatattccaagacgtccagtggatgcctgaaactatgtatagtagtatgttttttcctatatagtaagtcctcgtttaacactgtcgataggttcttggaaaccatgaccttaagcaaaacaatgtacaatgaaatcattttttcccctcatcaatgtagtgttgaacaaaacaacattaaatcacagtttctaagaacctattaacaacgttaagtgaaaacttactatacagacatacctatgattaagtttaatttataaatcaggtacagtgagacattaacaataactgatcataaaatagaacacataacaatatactgtaataaaagttatgtgaatgtgatctctctctctcaaaatatcttattttcagaccacaggaaataagctgaccacaggaaactgaaattgaagaaagcaatctgtggataagggttgggaggactgctgtacgtatgaaatgttttaatgtttatgtttttatctaggagatttattattgtcttcccmaaatcttcacaactgctttagaaccacttattcaattaaaaagcccttcctaagtcccttccacatgccaggcactgggtctgtcatggggaaatacaaagttaaaaaagccaaggttcycggtctcaaaaagttcacactctagtagaagattaatctgtcagtagataaattacaatgtaagtgacaatgactaggtgaagcataaaccaagtgcctaggagaatgaaatagggactaaccttcctggaggacgtcacaggaatcacaaaaaagtgctgacatttgagcatgactttaaagttgaccaacagcccatgaaatgtgggccatgaaaaatagcaatatgatcaacaggaagatattcataaatatctcacactgacatacactaagccaaaatttattgggtcttcaaacttaaaattctgtttaattattcactaatgaatcataaccagagtaaaacatacaatatacaaaacaatttatacatctagagtatcctgcatctttccctgaacatacttccatcaaagtactaagtaatataatgctatttaccatcctgatagcatttttatgttcttaaagcaaaacttcttcaaagggttttctcaaattccttatatacatactgaaagaccctccaccattcagagatggctgttccagcatttccatttcatagggaactgaacctccagttggttatgcatcagactaaagcatcttaacaatgtgtagataagaaataattcctaagtgactaatctgctttacaaaacaaaactattgaatatctgcaggtgattcatttagaacagtttcttaatcgtttctcccattcacagaaatgacacatatatcattaaaataatactacatggtggcaagcgtggggaggggttgaaaaaaagtagtacgtggcattggaagagtttaaaaatatttaaagcagtatttccacattcaatttaaactagtattaaatgatgtatttggttaagacaaaaaagggaatataaaatgaaagcctggttaaaaagttatagagccattctgtcctgaccatatggcttttcaaatttaaagtaattaattacagaaaataaagaactcagtacctctgtcacaatagccatacttcaaatgcttgatagctacacatagctggtgctaccatatttgataacagatatagaacattcccagtatcacttgaagttctgttggacagtgctgctaggattcatataaattggaatataaaaatatctttattacacgtttgtaatatcctggctctgttttcacagggtatataactacatatcaatataatagtaagtattacaataggcctgtttgtttattgatactggtacctcattagacaaagaataaagattgaggggccaggcatggtggctcacacctgtaatcccagcactttgggtggccgaggcggtgatcgcctgagctcaggagttcaagactagcctgggcaacatggcaaaaccccacctctacaaaaaaatacaaaaaattagctgggcatggtggtgtgcacttgtagtcccagctacttaggaggctgaggtgggaagactgcttcagcccaggaggtaaaggttgcagtgagccaagatcgcaccactgcactctccagcctgggtgacagagccataccctctctctcaaaaaaaaaaagataattttataacttattttctaaattttatttttcagataatgcttaaactaaaacatccctaaacaatattttgaatataattattgcttatactttttttttattatgaagaaatattcagaaaaaaataagggaaagctacctggcacgactgatgtaactggcgtaaaattttttgaagctttccatattcctctcgttctaartataattttccaagctgcaagaaagcaaatttattaaaatcaagatttcaacagaagatgtgcatctttaggagactttattaaaaacacccacccacttttcaaaagaaaagtgtaagtattataacggttacctttgtgtttgtcttaaaccacagtctatcattcttagcatctttcaaagcttccagtgttgtttcatagaattcctgcagtaaatccatctgacataaaaaatcagaattctataattgtaaacagcaaatttgtacctgttaataaagttaatttgaacaaactaaaagtgcatctttgaactttaatacacataagatacactatctgtatcttactgtcttctacagtccaaaaaattaacaaactgaagcaaaatacagaccaaatttacaagtaccatgatgcgttgttttatagaacccagaaaatatttccccatataaacatagtgctgtaagttctcatgctgtaatagtacacgtttgtccttcccaatctaataatacattctgtattttattttactttttaaaaagctattcaagtgaagcagtgggagtggagaaggaacaaagtaatctgtaactggttgtgctcaattagctgtaaataccactccactcacatcagccactcatttcatattaacagcagtaaatgaaatgtacatagaactagttgtattattactaacagtgtatatcttattcactcaactcttatttggagcctacaatgtggcaaacactaagcatgctggtgaagaaacaaagaataagctccttccctcaaaattcttctataaatatgactaagtaactcaactgcatagcttttaagtcactggtaaaccatggaggtgggtggagagaaaagtctagtataattttagctatgtctaatcaccaccaaatcaccaatctgtgtggcattttttcacggaaatcattatttgttttacatcttgttaagttcccctgcccaccctcttccccccgcttctggctttgcctttgtttgaatatctaattctctgcttaacaggatcaagaagaggactgtaagagcaggaaaatttcacattttcagaaaacactctctatttatgcatgactgctgatggcatattgaatagaacagagtaccacccacccaatatctgttgttactttcaaaagacaaaaaccttacatataaccacacacagagcatgcagtcctgaagtttcaaaatcactcgattccctctccctgctccaattactggcataatatttataaacagtatacaaaatatgttttgatgacacttgtttttaagagttggaaaacattttcccactttaggaaagctccatgatatatagcttaactctagaattagtgtcattaagtgttaatattctaacaaaacatgtaagtttaccttcctctattggcattacataaaatttaaatgtaaagagtacaaactgcctgaaaaaaatgayatctagtagaaaagacattaaatgaggctgattctgatctgaacattctttgattacgagtacaaaaagtatcaaatattctaagaaatactaaatgacatagagactatatcttgtactcaagtatcacagagtaagaggacgaaaaactaaaactgaggactatactgcttacaaggataaggacaaatgatccaattaaaaattatcttagcaaaaatatatataaaataatcattggttttcttaataaccaaaatctagactcataatgaaagcactatcactcccaataccttctttagtttctttcatcagtagctcttctttcattatccacccatcctttgcagaagcatttactgagcacctgttgagtaatgccaaacactaactgataagagcacaggcacttctcaaagattttaatataaccaaatccacacaaataacctgtgattcagtgtatttaacacctcagaatggctagctaaagtgttaatgtagtttattagaaggacctgtggtagcaactgtataggagtctaacataagcctgaaaagttgtttacagattttagcatctgaaggcattatttaaagagatcaagctggagttattaccttttactattatataatcagtaatataaccaggaaaatagtacttatcatttttaaagcatactaataactagcacaactacttaaatagaagctctaggcctttccatctataaagaacaaagcccttactataaataataaacacactgatcgtcccaagaggggaaaattgagtctaacctgtttagaagtagagatataatcaagaatagaattaatggatttttcagaataatttcttgtgactgcactccgaatataggtcaatagctgcttatatctattcatcatttctggaaagtttgtctgtgagaaaagaaaaatgaatyatcagatgcaaatttaggtactaaaayatgtacacatgattaaggttatagaatacactactacataatgaaatgtagttcatatagttcctgatatagttttgtaaaagaggaactatgtatgacaggaacattgtaattaycttaaatttgaaatgactagattactcaaaccaaatgtataaagttascttatgaaacaagtacaactgctaaattttccaaatttcagaaattgtcattgcacaacatatttaaatcataaaacctactacaatattcataagccaaaacatacaaataaaatccaagtattttctttttttttgagacagagtttcactcttgttgcccaggctggagtgcatggcgcgatcttgactcaccgcaacctccgcctcccaggttcaagcgattctcctgcctcagccctccaagtagctgggattacaggcatgtgccaccacaccgggctaattttgtattttttttttttttagtagggacagggtttctccatgttggtcaggctggtcttgaactcccgatctcaggtgatctgcccgccttggcctcccaaagtgctggaattacaggtgtgagccactgcactcggccaaaatccaagctttcaaatgccttgggtacctgctatgcaggatattagctatattcttccctgtaattttatcccttcctcaggaagctctgcaataagagttacctgtttcttttctccctacaactggctggttatatataaaaatgtgaaattaaacaattttttcaagcctcaatactcgtttcaagtcaagaaaagaccccccatctaaggttctattcaaaagtagatatagtaaatgttgttattccttgtatttgtactattgaggttgttccaggaaacaagaaaggtctaaaaaataaaggagtactgagacttattctgggagaggtttaccattcctaagtatatcctgtaagtcaatttataagtctaaccttataacctgcatccacaatcctcataatctgcaattgctgttaacctctctttttactgagttctattttctttttttttttatcaaagacatgaagcattggcagatacaaatgcttctttccttgactaactgaacatatgtatttattagggtgaggaataaactaataatgctgcaattatcttgcttatgacaatacattctgccytgaggcacagcacaaagaacaagaaaacttgagaacaatccctgaaacctaaccaagaattgaattacaataaagaaaacagcagaggtggatgggacaaaaaaaaaaaaaggatagaactatggaaatatatacatatataaaaccacttctgtttccaagtttcatgtgggggtaaatgataggtgacatcctgtcaatragctgctaaatccacattacagtacatatcttgcagcaaaagggaaatcagagaaatacgactatcctaactttgaagctgtatcttggcactgaaataggagttttgcaaaaagttacagtttttggctgggcttggtggctcactcctgtaatcccagccctttgagaggctgtgagcattgcttaagtccaggagtttgagaccagcctgagcaacatggtgaaaccccgtctttacaaaaaacacaaaaattagtcaggtgtggtggcatgcgcctgtagtcccagctacttggaggctgagggaggaggatagcttgagcccgggaggcagaggttgcagtgatgcagtgaaccaagactgcgccactgcactccagcctgggcaacagagcaagacttcatctcaaaagaaaaaaaaaaagttagctttgaatttatctcatgttataataatttatagctcatttaaaaaacaattacattctaattaaagactgaaggaagagtaggtaaattggtcccagagaagttgatagtgaacccttccaactttttactataaaatcaccacacataacatagctcctactctgagtccaatcagaaaacgagaggggcaggtacagaagctgaaatcactcttgtgaaccataacttattcacagatgctgctacagcaaacaaaaggtagataaggtaaacaaaataacataaaatgcaaaaaaccctctcccttccttcccactctgctcaaggtaaaatggcaaaaccaagtcttaagggtagcacagtgttcaaatggactcgaaaccactgctagtacgttaaaatagcagatttctatagggactcttggtattatctcaaatcacagaacctacgagttaaacattcagcccctaatggcactataattgtttaatcacaaatttctgtcccttgaaacacttggtgcttcttccacagccttctaagttattaatctgaatacagtaaatgtttgtgtttaatattcttgcaaacagaaaatggaaagaaagcatggggctctgggcaacatagaaatgttttgagagtatcaaagcagtaggagtagaaagggtaaatataatgtagataattttcattctttaactagatttaagtgcaatatacaatatacttaataacatttaacatgttttgaattgttctgatgtattttggggaagaaatgaacaaagacattttgtcaacagcttctgtaggagatgccatggagtgcccctcctattaaaggtgagataaaccataccagagtgacagtacctcaaaaagaagaggtacaagattagtagaagttaacctggatacaagtactagtcagacgggatagagaagctaatggagaggtggaggaaacatatcatatgggaaatacaaaaacaggggaaaaagaaagtggtaacatatcagctattcttcaatttgccatagttcctgaaccttccaactgcttcactccctgctcatctgagcttcaacttcatctttctctcaaaagttcttctcctttagtgatctaagattcatgtttgtacctagtcctatcatctcctgatcctttttccctccgcttctaccctgtattctttaccagtttaaagaaaccgaggaatgacattttgagtataatgtcataattccagtttctctagaataagttatgagttcattcaataaaatatttgagcaccaaccaaatgacagtcaccattataggttctaagattataacaacgaataacacaaagtcctgctctcatggagcttacaatttacttggggggaggggtggggtgaagaggagcaataaataatagatcacatggtgacatatgcaaagaaaaagagcaaagaagaaatttaagtgacgatgggaagaatgctattttatatcaggtggtcatgggaaggccatcctgataagtggtgccattgagcagagacctgaatcaaatgaagaaaaaatccatatggttatcagagaagagcttctgaggcagaggaaacagcaggtgcaagcctttacacaggattgtgcttgggatgacttgaggaacagcaagaaggccagtgatggagcaaataaaaacagcagcaaaggatgagcttacatagggatctgtaggtcatggtaagaattttggattttactaagggagatggggaccactagaagatatggagcaaaagaatggcataatctgacttacattttaaaaggatcactctgctacttgtggaaaactgtagcagggtaaggatgaaagtaaggagaccagttaagaggctatctcaataatccaggtaagaaatcatggtgccttggaccagagtagcagaggtagaaatggtaagcacagtcatactggatgtaaagccatgtggatttgccaatggattatttgtggggtaatagacaatgagaagagttaagcataatgctaacgttttggccctagtcaatggaagagaaactctttataataaacaggagaattttaaaactccaaagtaaacactaatcctttgtggaaaagtcaatctattaataatgcagccctggcagggtgcggtggctcacgcctgtaatcctagcactttgggaggccaaggcaggcagatcacgaggtcaggagatcgagaccatcctggctaacatggtgaaagcccgtctcttctaaaaacacaaaaaattagctgggcatggtggcatgtgcctgtagttccagctactcaggaggctgaggcaggagaatcrcttgaacccaggaggcagaggttgcagtgaaccaagattgcaccattgcactccagcctgggtgacagagcggggraaaaaaaaaaaaggcaaatactgtaaatgcatctaaaagagtaagttttcttaaatagaaaacttctgtatcctatgaagaatttgttttttttacttagtattactatagtcccaactgcagagcagactaaatataaaaacacatccaaagaagtactttagaaaagaagatataatagtactttgtcgtgatgaggtttttacctacaaaatttattagtttaattcccctcaaaacaaatcttaccaacttgaagttaatcttaatcatttgtttcagtgctttaaatccccattctcctttttcaccttcaagttccaaaacctaaaaagaggaagaaatttttagtttatcttaatattaacacattattttctaatgatgcccaatgtgtaagtattgaattaattttatactatatgcataaaaaacatttccccaaggataccaccatttctcaatgtcatttttcagtctttaaaaaaaacaagttgtaagatgcctacataaggataagcaagcttaaagttccttcatcagcaaaataaagagccacttcttgattattatatagtttctgaaatattttttcccctgaataaccaacctatggtaaaaataatccgtaagtgtatcagtaagtcaagaaatcaagctattcataataatgaaaccacaactgtatgatttacccctaaaagaaacaagattgcagtgataatacctactgaccatcatgttggtggttcttctgccagaaccatcctagtttttcaggacaatggccctgctccatagacagcttgattggaaaaaacatcaggataaccgttttgaaacacttgcttgtgctgcctaatgctaactgataggataattaagtattcaaaacacatttctgagataaaatcacctgggacttatttgttctagcatatcattaaaaaaattaacacatagaatcaaatggaaaagaatataaaccttttggaaactgcttaatgccgcttttgggtcatcttcttttaatgctttggaattatagtactgattttccaaatccacatttggctcggagttactatcttcagagtattcctgtgttggaaagaaagaaatattaaaagaaaaaaagaaaagaaacccacacgtagcaacgtaaaaagtgaatgctgttaagacagaaaaaccacatatttttacaaaacaaaacaaccttgaatacatacgtaaaatgccactgatattcaactgttatataaaaccaggggttgaagagaggaggaaggaggagtcaaaatcaagtgtatagcagaatataatcattactttctttcagatgaaagctaaaatttctatagaatcaacataaaagaagaatgcaacctaatattggttaatgaccccaattctgtagttgctaagctttcgttagtcatgaaatctgagggaaacctaacgtagatgtgttctaattattaatctttggttctgtaatctaatttttctattccccaagtctaaatttcattattgtaacacggtttaaaaccagctaggatggtaatctacacatggcaaagtcatctagcactaaatataattatgttaataagaatactttccttatgtgcactatacaacagctgtttatactaatgttaacttaatcagctttataacaaatcaaaataaataaaacaaaatggatttatataattttatgagactttctattacatgagttcaattcttagtggaaaaaaaacaaggcagaagggaaaactggaataaaacaactattttgtggagcagtataaacaagagtgttacacagttccaggacattcaacctaataatgaggattacaaaatacacatggattggtataatggaaattattatcttatgagtcataagatatagattatttccttctcagctttaagtcattacaaagggcaagtttatatcaaattaagaatagtacctggaaacaaacacaaaaagacaagaatagttttatagttatttctaaatccaaatacaggtaacaaatttctttatgagatatttatgaaaaattctgttacagtctcataaaagcataggagtgaagaaaggtatgctgtgtataataagttacttgaaagctcaaaaatacattaacacaagatgaatttttcaataatcaagagtggctttgtaatgtgcgccctctggaggataattccttcctcgtgtgaagacctgagtctgtcagtcttacagatttaagacctggaattccattctgtttaacatatgaaaatcacttggaacacttcttttagggacaagatgaaactaggtagtaaataagtttcataattattcatttacttcttaacccttgtaatctaggcttgactacaaagaaactgatcaagctaaaaaaaaagagaaattagtaaagaatgaataagccaaccatacacagaatgatgctgtgacagtgatggcttcaaacctgggttttgaaagataaatggaagtttgcccactagacaaaacaggagaggataaagagaatagtacacgtagtaacagcataaacaatgaaaggtaactatttgttggaacataaaaatccttattgactctaccttcaaaataaatctcaaatctatccactcccgaaccccctgcctgctaccaccctaccctacccaactactttcatctctccacaaactttagcagccttctcattctcctttttaagttctaatatcctcatggttaagcaggtgaaataattttcacaaaatgtaaattatcttattcctctcctcaaaaatggttcctattcctcttaaaatcgagagcaaaatcagcaaaacttgactcctgtgtccaaccttatctcctatctagttctccctcattcactttgctgcagccatcctggccttaactcaacaagtgccaaattctcccacttttatgtgctatttctctctctttccacctctacctctacctctcttcatctagttaactactgcttatcatttcagatctcagcctaagggtattctttagggaagacttggagtaaagaatcacagctataaaacctactctatgccttcggaaatcagctcttttctaattgttttattaagttggaacaaatataaacagatttaccatatatgatttatcatacaataactaaaataaaaacttcacktaacagtgttgaataagatagaggaatagcttgctgaaccagaaaattacttttttttgcaacccaaaccttcagaatgcagccttgaacctggaagtaaaatgaaaagtatttctgatttacattgatcacaaagtaaaaattcagagtccatttatttttggtttcttggctcaaaacaaattagaaaaaacaattaggtcaggtttcgagaagaggaaagtagaagctgaaaggtatacatgacaacagtaggactagtattttggagcttcccagcaaatgagaaacagtattttagaaagggaagagattaacttcaattatctggaaattactgaaccaattataacattgttaaaaacaggatccttgacatttcctgtcatatgtcacacagtgtcttgtcattcagtcacggaatacttataataagagtagttacctgtaacttctgggacctgatagatttcagatagagatttctaaactttagatgttacaactccaaaaaaaaaaaaaaaaaaaaaaatcacaatgactgagaaaagatttgattcagccctcttcgttttgtgactacattcttttggtttttcatatcatacggattaagaaatggcatgtataatgtttttgcataactgcaattcaactcttaaacaaatgttattgctaaaatatataaatacatgagaatcggcacaactgatgttctactgattgactacaaatagacagttccttgttatgatctgcaacgccatgttcgtaggcttgaaccagccatcatgacatcactaacccatcatttgcaccccactgaatcaattatcacaagctgtgcactactgcaaattattcttcagttattacacaggcataatttttcaaactcatgttttgaagtctttggaagaacaattctattgtttaggtgcttctactatttatactcaaaaatcatgatctttaatatatgccagcaattaattattgctcacagaaatccaaattaacaacccttcccctcaaggtattcatggtctattaaggaacagatatgcaaacaaaaccgtaatataatataatataatataagcaataacagacacacayactaagtccactggcatctcaaaaaggagtaatcaactacttctgagttagaggaaggaaaaagatacccaagtcaggtataaaagtatgaataggaatcgccagcaatgaggaagggcagctgaaataaagcaattaacatgcaaatgcaaggaagcttgaaacagtatgaatagtttgggctgaagcacaggatgttatgtaaagggctgatgaaagatgaactggtattgaacagaggaacaggacaacagaagtcttacaaggagatgagatccaataaagagcctctaaaagattttacaaggaaatagtcagatttgtgtttctggaagcaatgaagagcccattggataatcttaaaagtctggccaggagctgtgaaggcctgactccaagaagcagaataaggagaaaagttaggggacacaataaatgatggaataaacacagaagatgttaaacaatgttaaggatgtaaaataaaagtgcccatatgggcacaagataaaggaaaataaagttatccataatgactatcaaaggcttggtaacacatgatgccattactcagaataggaaatctagaagtattgagtaagtattgctaaactgaattagttacgtcaaatgaaaaagagataatttgtaaaagtgtaaatgttctttaacagaagagaaagtgaaattttaattagtatataaagaatgctttaaaaacaaatgaagaggttaagcaaattatgaaaaataatcaagcacttgttttacaagaacagttgtaaaagggatyaaaaataaaaaaaccccctaaagttcaataatagttccaacctactcatgtcctgttatttcccccaagcaatttgtgatccatccacacwaccaaaatctactctttctcaaacatgccacacaattttaaatctctgctttggcataaactgctctttttgctagaattctaaaccactttccctcctaacaaactttctgattttctcctaagatactcccctgccctaatactgctggraaatgtgttcatcaactcatcttagcatcactcttcttagcaaactaaattttttttctcagtcatgcttccatatgacatgcatctctctaacatagagctttgtatgttaaaacagtccaaattgtgaacttctcagaagcaggaactttcttattcatctgtgtattctgagagcctgggatattacaaaacgcttagtragtgtttggtgagttaaaataaaaggtggataaacattccaaaataacacaacacagagcagccagggtcaattttgactatatctggaatgtcgctactgctgaacaggatcagttccatagctcatttacttactcttgtatttaccgccaatagaagtcctaagaaatgtactttaggaaaacaatactcaccattaacaatgctttctgagtcttgtctaacagctgtaccatatgttggcacactaagaggtacatggcagttgtttcattatccttaaaaaccagacacgattcaaatcctaggtagccatttatggtttagctactgataaagttatccatttaaaaaaattcacacaagttaatgggtgctgatttgttaactatggagtaaattagaattaaaaaacaaaacaaaacaaaaaaactgtctgctgggcacggtggctcatgcctgtaatcccagcactttgggaggcggaggcaggtggatcaccaggagttcgagaccagcctgaccaacatggagaaaccctgtctctactaaaatacaaaaaattagccgggcatggtggcgcatgcctgtaatcccagccacttgggaggctgaggcatgagaatcrcgccactgcactccagcctgggcaacagagtaagactctatctcaaaaaaaaaaaaaataaataaaaataaaaaaataaataaataaataaaaccattgataatttatttgcagacatttttctatatttttcccacctaacaaaattgggataatatggattataccgtctttgatattttttgaacttaacatttatattgaatacatgttcrctatgtacatagcactggcaatcgaccatcatctttctactgatctttttattaaaaggatgacaaatacgagagtctgtaagagatcctgtagctaagactcatttacctccccactgcacacaaaaaaatagacaaataagtaaaaatgtagagcattaaaactgctataccataaaaaataatggcaacatgggtggagctggaggccatttttcctacccaactaatgcaggaacagaaaaccaaatactgcatgttctctgttataagtgggaactaaatgatgagaactcattaacacaaagaagggaacagacactagggcctgcttgagagagaagggtgggaggagggagagcagcagaaaaaataactattggatacttggcttagtacctgggtgatgaaataatctgtataataaacccttgtaatacgaacttatctatataactaacctgcacatgtacccttgaacctaaaagttaaaaaaaataaataaaactgctatatattaagacaagaagaacaatactagtaaacatttatcccctaatcccaactatgagcttgactaggggaatataatgaggctcacagctggtcatatggtcatatatttaaccaagtggaattattctaacttttagacaatgttttccttgtaatacatttaaataattatatccaaatataggccaggcgtggtggctcacgtctgtaatctcagcactttgggagggcgaggaaggccaatcaccaaaggtcaggagtttgagaccagcctggccaacatggtgaaaccctgtctctactaaaatataaaaattagccgggcatggtggtgggtgcctgtggtcccagctattcaggaggttgaggcaggagaattgcttgaacccagaaggtggaggttgcagtgagccgagatcatgccactgcactccagcctaggcgaaagagcacaactctgtctcaaaaaaaaaaaaaaaaattatattcaaatatataatatcctacatataacaggacttactaaagactaatttttggaataaagtcaattggtcttaaattctttctaaaaagattattagaagtttcacggtagaacgattggactgcggaattaaaacagttagcttatcaatggccttaccaacttaatgaatggcactatgattattatttagtgttactggatcagcaaataatctataaacctgtaaaattagcattgcattaaatgtcatttactagcaccatcacctaccacagattactatgtttagaaatgcctgcttctgcctctaatgaaaatcaaacagatcttagaacatacatgatcatgcatgtatgttgaatttcttttatattcgtttctttttttttttttttaaataacaagtttgttttattttagattcttcttsggcagaaatcattatttactttcttgggtaaaaacagtacagttttagaaacagacttaatttttcaggtggtatcctaactacctatttctaccagattggggaagaacaaagtgatttagggtgttaaaatatatcattggacgaccaataaagatatgctgagtatcactgtggtcagcaatactcactgctcttagttaacactttaactaaaacgaggtgatgatcaattttccaaaaaacaatacattttttataaaaataaatcttgagaaaacaagtcaattacgcacattttttaaatactaagaaacakaaaaaaaaaaaaagaaaatcccagacaaaataactattttaaaaaaagaaaaactcttttggcaaaaggtaagcatgaaatggtaacctgcttcattaatcttttttttttaaatatatgatttaaggaaatgaaaaacaaattactaaataagttttatgccaccaaaagttttaactgttagtaaattgatcatarataattttacaattagacacctgatgagagacagatgaggggaggaagagctatttaatagaacgctagggaaagaaaaacaaaaaacccaacagaaaactccaacatttcatttcattatgtggtagtgcaaaatcttactttaagaaataaaaaagttaaaacaaggctggttgtggtgactaacaccggtaatcccagcactttggaaggctgaggagggcagatcacttgaggtcaggagttcaagaccagtctgaccaacatggtgaaaccccgcctctaataaaaacacaaaaaattagtcaggtgtggtggcaggcgcctgtaatctcagctactaaggaggctgaggcaggagaawcgctcgaacctgggaggcggaggttgcagtgagctgagattgtgccactgcactccagcctgggcaacagagtgagactctgtttcaaaaaaaaaagttaaagcaattatatattcaacttcattttactgctcatgtagcgtaggccctaaaaggctgggaaaatatgaccaagttaaaacactgtatgtttaataaaaaatcttgcaaaagttaatcaagtacttcatgggacaaaaagattctcactgctattgctacattacattctcaaagatgatcrtcagcttratcacagtgctaataagttatgtatccaacagactattgcttaggaaagaggtaagcagaaacacttacaaacacaaactaataatacaaatgcaatttctcaagagatgacatacagctgggcatggtggcacgtgccagtagtctcagctacttaagaggctgaggcgggatgattggttgggcccaggagtttgggcccagcctgagtaacacagcaaaatcccatctctaaaaatatatacatgtgtaaataaataaagaagacatacaaatggccaacacatacatgaaaaaaaaaaaggtcaatatcactaccaagaaatgcaaatcaaaaccacaattagaatggttattaatcaaaaagacaaaaaataatagaatgctggcaagaaagtggagaaaacagaactcttctacacttttgatggagatgtaaattagtatagccattatggagatttctcaaaaactagaagtagaactaccataagatcttgcaatccactcctgggtttatccaaaggaaagaaaatcggtctattaaaggaatacctgcactccatgttcattgcagcattattcayaacagcaaagacagggaatcaacctaagtgtccatcaatggataaacggatgaagaaaatgtggtatatatacataatggaatattatttgactataaaaaagaatgaaattctgtcagtttgcagcaacatggatctggagaattaggttaagtgaaataagccaggcacagaaagacaaatatcacatgttctcactcagatctgggagcaaaagaagttgatttcacggtggtagagagtagaatgataggaagggtgttgtggggggaagaggagtggggaagtaagagaagttggttaatggtatgtacaaaccaacagttagatagaaggagtaagttctaatgtttgacagcggagcagggtgactatggttaaaacgtattttatatttcaaaatatctagaagagatgactttaaatattccctagacacagaaatgataaaaacacaaggtgatggatatcctaaataccgacttgatcactacatatcctgtgcatgtaacgaaaccccccataaatatgtacaaaatactatgaatcaattaaaaaaatacaagcacatataaaagaaacattttgataacaaaacacctgtaatataaataaacaggtaataagtaaaaatggacagatacatattcttaatgaactgaagtcactgcctacaactggcttgcacaaactaaaatgtaaggtagaaaccataactattagcgaaactacatttaactttaaaaattataaaaatctctactatgactttcaaataatagcgagaatttcctttctcccttttgcaaagtgtgccttattttaaaatgcaaaaaactgaaaatatatacgaaaaagttatagactaattcaaaacaatgtattaatattttgacaatctctggcacttaaaatgagtcagacgtcccaaaacatctatttcgtaactttatgataatgcagcatcaccataaaagaaccatatgaaacacccccaaaataaagaaacacagcaaaattgacgttaattctggatcaagataattttctgagtttccacacgatgtttttgaatagcaaacgttattcaaacttgcaaatccattaataaatgaagctttgaatctttaaaaatctccattcggtcagaaaaattcgtttatttctatgctgttgctgttttaaactttgtatactgggaaatttctaagggaaaagccatgggttcaattatctttcacccgtcctccaaaaacaccacaagcaaaacctcctccccagcttttctttataaagaactgaaaaagtggttcgactacctttttttcagttatctttgctctgaactctcccctacacacttacctcggaccaaaactggccctggcaagactatttaagctatgtctccaggagactcacaagttgcgtttcgcagtcaggcctgggagcagtaaggacacccccgttttctgacttctcctagcatttcgcacccgctcagttccagtgtgaagaagtgggggcccggaacgctgggcccgaaagggcaaagccagggcctacaccgcagcatggtcaccgaggcggctagcgcggtggggaggcagaagacagagaaccgaacgcctgggaccaggggcatccgtgtaaaccgaagaggcgctcagactcggagggcaaggcccggggcccccttcgctgcctcctttgccctcccttcccccatgctggagaagcagggcccgggcccggtgcgggaacggggaggaggtaaaccagtcctgtcaccgcactgagagaggctgkaaacggcacatgctctacggggagaggccgcgggcgccccggcccggaccccgaaaacaagacacatcaccaccctcagagttccattccctgcgcctcaccaggtcgtagtcctcctcatcatcgcacatgaaatcatcctccatgtcagacatcttggccgggagggggaggagaaattggagacaacctcctcccacaatcctccgcggctcagaggcgtcactctcagcttctttccgccttccagtccctcttagaggagctgtttcctgccggaactaattatctcgacttgtagctgattcgctacgactccaaaagagactgcaccaccccccgtttcctccgaagtggttggtgccttagcaactaaagctggcaactgggacatcgtccggtgctgcaggtctcagccgaagggcgtcggaaactgcgctcgcatcgagcagtttccagcctcctgggtaaaggagcagtctcctcccttgcttgggactctggacgcatctcattccggtgaaagtaagggacagcttaggaccagaagcctttcgcggagaaaaggctgacatgcccgtcctatatgacaggtattatttctgctatcattgtacgtgtgcatttagcccacacattgcggtgggtgttcctaagatacttggagtacttttcagcaacacagtttacacttaatgcttgttatatttgtagttgacaaaacaattctatggatatcctaaattaggtatgcagctatcagttgagttgccttaaatcttactcagttgttcaacgagttgtaaactgacctttacagcccttgggaccaaattaaggtaacaacgactggtttttaaaaaatacattactgtgaacctgagggcatcatgttgtaaggagatgggggctgcggtgactcgcgggatcaggaatttcaagagaaccgagcggaaagggaaatccgcaacatgaagccctctctcgctcccaggcacccctctaccagcagcctcctgccagagcagattagtctctatccagaaattaagggagagattgctcgtaaagatgacaagctgctgtcatttctaaaatatgtgtgtgttgattccaaagatcctgtgtcttccgtgcagctgaaagctgctgaaacacgtcaggagccaaagaaattcagattgccgaaaggccatcactttgatatgataaatattaagagcattcccaaaggcaaaatttccactgtagaagcattgacacttttcaataatcataaactttatccagaaacatgaactgctgagaaaatagcgcaagaatatcatttagaacagaaagatgtgaattcccttcttaaatattttgttacttttgaagtcaaaatcttccctcctgaagacaagaaagcaatacaatcaaaatgaagaaaatcacaaaaatttcctatgtgtactcctcatccctcatcctgtatattttcttatttttgcatattaaattatgttaattaccaagtgtttaatgctctcattgtgagagcatcctcttaatatttattgagctccctgaattttcaagattgccatagactgtattttgttttcttttaatttggtttaggcatatttcatatgtacatgttagcatgactaatcagcacatctgtacctttattataagtaaaagagttaatttgttattttagacacatcataccaacttttaaattggtcatatgaccccttgggaagtgtcctgaatccctcatttaagttttcctatccaatttaggtgtttagttcattcttcatatgtgatagtgaaagtaaaagctttcctgactcttaagactgacattttcttgctagggaaagagactcgatagtaaggtagactaacagtatttcccaaataaaggcacataggagaaaataaagaatcaataaaatctaattaaaattactaccccagggaataagaagtattgaggatttattttattttgaattggttttaagtatggaataattgtctttacagttataaaaagtaattagtggtgtttacgaaatgttgggaatttctgctttgacaaatagttaagtcccatggccttcagagagagaggcagtagtagaaactttcgaaaaagtaacatttctctggatttaacatggaactagaaaaatttaaagaataattaaaaaaccatggtaaatgaaatttggtgattatatatagttttggatgttaatgctagttgagagaagagagaaaaaatagcaagtagaagcagagaacaggatcattggaagggacctgagaaattgctgctttatccattttagcaaacttattagcacggcatgtaccagtactaggatcttgagtaagagtgtgtgagtttagctctgcctaatatattactacttgtgggatctttgggagactatgtcctctttgagattgaatttcttctataaaatgagcataatgctaccttacttaaatttaagggttatcatgaagataagtgaaatagtaaaggactacaaaagaccaagggaataatgaattttttttttgtagtggagaaacgcctggggagaatatatgacctaaggtttctgtagtttatgacctaaccaggcccagaacttagtttttcaaatcctagtagtgtgttttttctgatgtgccaaaaagcagcacacctcagagaagggaataagtgtgaattgtgggtatattggggttatcagtgtgcttctgagggaagataggcatcactacttcccagagatgcccctggaaatgatacagaagatgctaaagaattcaacaagatgacggaatgaggcatttgtagtaatgctgagaacagaaaaatgaactaagtggaaaatttgtaagcatgtctttgaatgtagattggttaggtgaacaaactacctagtttatttttagttcagtacaataattgttttaagaaaacatgaaataactactcaatataaaatgcattttaaaactcctgtaaatcagtcaaaactttattccatttgtcataatggtaactagttgagtcactaatactagtacactcttatttctgagccatctttattcatatctacattgtgtggttaggcagctgttatgtggtatcacatgataaaagatttcttcccataccattaaaaaaatactattacacaaaatcattggcagaattcaaaataaagaaaaaaatgaaataaaggggaaaaactgcttttcaaataggtagcattttccacgtaaacttccagatctgtccacgtgactccacaaatggttatgtagttaagcatatagatttggattatttttgcatctatgtagcagcataggtcaatatttggttgtttatatttagagacaagatcttgctctgtcacccaggctggagtgcagtggcaccatcatagcttactgcagcctcgaactccttggtttaagtgaccttcccatctcagcctcctcagtggctaggacttcaggtacatgccaccattcctgactaatttaaaatattttttttgtagagacaggggtctcaccatgttgcccagactggtcttgcaatcctcccacctcaaccttccaaagcactggtattacaggtgtgaaccacattgcccagtcttaaaatatattcctaataataattattttagtggctgtgtaataatccctcgttgaatgtacccgtgcaccataattcatgccattattgttatacattcagagtattgcagaaataacactattttaagcaattctgcagtgaatatctttgaaattttattctttaaaaaataattccggctggcgcgctggctcacgcctgtaatcccagcactttgggaagccgaggcagacggaccacctgaggtcaggagtttgagaccagcctggccagcatggcaaaaccctgtctctgctaaaaatacaaaaaaaaaattatccaggcatggtggcgggtgcctgtaattccagctggaggctgaggcaggagaatcttttgaaccagggaggcagaggttgcagtgagccgagatcgcaccattgcactccagcctgggcgacagaacaagactctgtctcaaaaaaaaaaaaaaaaataaaataaaataaataattccaagaagagaaattacaggcttgattcttttttagtaattacttgaattgacacctttttggtcatagttcttttaagttatatttgtgacaataatgtgttctcacctatacatacaaatgtttttccctaacagtcttcttctcaatattttattatgataaatttcaagcatacataaaattgaaagaatagtatagtggacatgtatatacccattatcagctttgattgtatgtatgtgtgtgttccctgtatcagttgaaaggattcggatatcatgacacatcactcctaaatgcagctgtgtctgtttcctaaaaataagaacattctcctatgtaatcacatcattattacatataagattaataatactggccaggcacggtggctcgtgcttgtaaacccagcactttgggaggctgaggtaggtggatcacctgaggttaggagtttgagaccagcctggccaacatggagaaatcctgtctctactaaaaatacaaaaattatccaggcatggtggcacatgcctgtaatctcagatactcaggaaaccttaggcaggagaattgcttgcatctgggaggtcggggttgcagtgagccaagattgcgccactgtactccagcctgggcgacagagtgagagtttgtctcaaaaaagaaaaaaaaagattaataataattccctatcattcaatatccagtctatattcaaaattaccatattaaatgtataacttagaattggaagagcctttaatgatatcactttacagtataaggcttcccaaatcccacagtagagattctgattcagtagttctgagtggcattcagaaacctatacttgtaactttacaacaaaacaaacctccctgtacctgggatgactatacatcccagttttcctgggactgatctcgtttactactgttgacccatcataatagtaatagtacccaggccgggtgcggtggctcacacctggaatcctagcactttgggaggccgaggtgggtggatcacgaggtcaagagatcgagaccatcctggcgaacatggtgaaaccccgtctctactaaaaatacaaaatacaaaaattagctgggcgtggtggtgtgcgcctgtagtcccagctacctgatgctgaggcaggagaatcgcttgaaccggggaggtggaggcggaggttgcagtgagctgagatcgtgccactgcactctagcctggtgatagagcgagactccatctcaaaaaaaaaaaaaattaatagcacccatcactttcagaagttagacagtaaatcacatggttactctacttttaattgttcaaaagagaaaataggatcccgaggtagttaagaggtttatttgctcagagtaatcaaagtttcatagttttactttgtactcaagatagcagttgcaaaatggataatatgcttaacaaatgcatactgatcacatatatgaaactgcatgttgatttacatttaaatatattgcataatttgctgcttttaaatgtaatgccttattcctacaatgggaaaataagtatgcaaataagctggtaagtaggaagactgggtgaacggcagctaaattttgagtataatttccttggccatgaccaaatttattaagtctagtctggaaatttactaacagcagttgaaaaggtcttcactgtgctgagcatgctgcttgagtacacaggtgctaataagtgctagttggataaataaaaatgttaatagattaatctttctgtatcacacatcaaaatatttttctgtccttaaaaatccatgtaaatgtgaccttattcacatagcctatcctgaatactttataccgttaagatactctcttttattttttcttgacattaattttattcaatggtaaataatagaaaattgtaattttaacagagtgtatttgtgtgacatgctgcccttgttgaaagtggatcctatgtttttaaaacatattttcataaaatggcattattgaggtattattcagtagct

SEQ ID NO: 98235 - DNA, 189046 bp, Homo sapiens
  misc_feature (1)...(189046): n = A,T,C or G
aatggtgtgaatctgggaggcggagcttgcagtgagccgagattgtgccactgcactccagcatgggtgatagagcaagactccatctcagaaaaaaaaaaaaaaaaaaagaacagtaatcaagtgagacaatattcccccatattggctccatgataacgtttatgtgcatcaggtgggggccaggaaacaagatcgaccacgacaatgataataatagtgataggagcaaggatattcagcagcgtgaactcagcaggtgtggaccctcttccgggaacacgtgcatctcccttacctgagcctggagtcagcagccctcccagtcactgcccccaaatgcagctcccatgccctcctggggcttgtgtgctcaggtaggcccttcattctcgttccccgggactagatgggggtgcagcctgtggggggagccccatctccacgctgtgcactctgaggctccgtttgctgtgtgtcttgcagagctgggcatcctcaccctatagagagtgaggggctcaggagtcccaggagcagcgggcagtatgactagcagcccgtgtggccggccactgctcggggccagcagcatcgtaagtgtgtgtgcatgcacagggctcactctcagcatggtagccacggagcccggggctcaggctggtctctgctctgctcagggacagtgtggtgggcacctgcacaggcagccaggcaggcgcagaggggtagagcccgtgcttggccactaggggccagtgcagccctgagatgggcccagcaggcacaggcagtgtgggtgagcatggggcgagggcatggccacaggaccttgttgttcctgcccacccgggctccccagggagatgcaagagcagttttggacacaagacctcagcccattgccctgagcccacagcatttccaggcaggctggagatttgtctctggcttttgtgcgtgccggctaaacttcctggagctttccagaaccttcttggggctaaagcctccctggagcaggtcgttcaagtgctggcatctcagggagcacctgagggcgccgagctcccaggaggaggcttcacgaggcggcctgggtagccgtacgcgacagcccacgggcaagaaatcccagcttttatattagacaagttctggcaacttccaagcaggaaaacatgttttctttgtagtcataaagttatcctggccttccagggaagcgctagtacataagacgtgcttgattaggatctaaattctctgtagccccttgcctctattaactctatgttgaggcttcatttttgttccgtgttctaactttcacaattttccatgtgtcaaaccccaccaactgtaaggcatcgagaggaggcagaggggtgcaatgggcctgctcccaagatgtttccccctgaattccaaaaatagggcaaagtggacaaagtggagcttggcctgggctcactcggcttttgcctatgagtgatttcttgtggctccttgctgtttaccaactggcccaggaatttactgtgtaaggaacagattccagaagtcatgtagcttctggttgcggcccctggcaaaacgcattttcaagtgctttctacagcacgtacaacactagaaatccatcgtgtctgccttttttttttctaaattctatttttgttttaaaaaatgctcacttcccgtgaaacacctccgggcaagtgcaaaatacaaacatcaattacaatccattgagcccctgagaaaggccgcaagcagcgattctaggcacagaaaactggtcagtggctctcagggtgacaggtgcaagaatgacccagggtgctgttactgaactccaagccccctccccgccctgagagtcatgagtgggccactgaccccagagatggtgggcacataggggccggggaggagagaccctgctccaagccaattccaaaggggaaggatatgagccgggcagtgacctgtgggagccgcagactcgggcagtggacaagcccaccacataggtcgctgccctttacaaaaagccccacatatatcccttctgctctccaggaatcagctccactttctggaaacacattgggtggactggatcagtgtccaagtacagaccccttgggaaatcagctgaaagctgcagcccctgcctctgctccaacacagatgtgtgaccacattcaattcacataatgaagacagagaggaggcagccttgaactcatgctaggaaacagcaactgtgaaaatagtaaatgctattactggcagatccatgcctgagccagaccctgtgccgaccgcttcacgcagattgtcttgttaatccttcaacaacgctaggagtctaggactattgtgtccagttagaacaaggagttaggccttggcgaaggtcacacaactagttagtggcagaattaaagctcaacccctcgaaggtgccagtcattccaaactcgtgatttctgatgcggccggaccacctggccgtctcagcacaagctgcggcctccgtcttgttagtccctctcccctccccacttacttaaaattgtggattctaggcccggcgcggtggctcatgcctgtaatcccagcactttgggaggctgaggtgggtggatcacctgaggtcaggagttccagaccagcctggccaacatggcgaaaccgtctctactaaacatacacacgttagtcaggactggtggtgtgtgcctataatcccagctactccggaggctgaggcaggagaattgcttgaacccaggaggtggaggttgcattgagctgagatcgcgccactgtcctccagcctaggtgagagagcaaaactccgtctcaaaaataaataaagtaaaataaaataaaactgtggactctaaatagggtgtggtggctcatacctgtaatcctagcactttgagaggctgaagtgggaggatctcttgagcccagaagtttgagatcaacctaggcaacatagcaagaccccatctctatttagcaataaataaaaataggccaggcacggtggctcatgcctgtaatcccagcactttgggaggccgaggtgggcggatcacgaggttgggagttcgagaccagcctgaccaacatggagaaaccccgtctctactgaaaatacaaaattagccgggcgtgaggcgcacgcctgtaatcccagctactagggaggctgaggcagaattgcttgaacctggaaggcggaggttgtggtaagctgagatcgtgccattgcactccagcctgggcaacaacagtgaaactctgtctcaaaaaaacaaaacaaaacaaaacaaaacaaaaaaaaacaaaaactgccgactctagatgcaggcatagggaaaagtacgcaaatcatgtgtttggagttcaaagtgtgatcatgaagccgacactctggtaaccctcaggtccagaaggggatgcccctcctcccccagagccctcctgaatgtgcccataatcacctccttgtttttcttcatctttcccctatttgtgcacacctctaaacgttatggtggagtcgggcttgctgtcggtctaagcgtgaatggaatgatcttttgtctttgctggacatcctgttagtgagattcatccatcctcccctgtccctaggtgttgggcagtccctgtggttacctcgcagcctgcaggtgccttattccagaaaagcaggcccacacctgaacccactggctgcagctgagttttgtttatttaaacccaacccactctgcttaaagccttattgcaaaacaggcactcctggggttctctggtttttcctcctgcctgggtccccttcaggtccgcccagtagccttccactgggaggctccgggctcagggacccgccctgccttccggccccagaactcctgtcctttcatccttcccggaaaaatcccagtggaagggtatatggcgggtggggaggtcctggaccgctcacattaaggagacggacttttctccttcctcccctccctccacacacacatttcccaacaggactctccagtggaaacctcgaattaaaaggttccaaagcaactccaccttttagatcaatataacgtgttcaaatccttgctactgggaagaaaatgctcacattgggcttcagcacaaagacactgtttcagcagctttgagcgaagttggctgagtatgcgtgtgacacacacacagacacatcgctccgggggagaaacccttccggttctccacagccgcccacggtccccgttgagactggactcatctcagctcagctcagagatttggctgcaggatccgaccctcccttgccaaaaagacccgttctaggggtgactgcgcattactcccacccccaccgctccgaccggccccaggagaagcccttctaggagagaagaggcgacccccacctaccgtccccgaccactgggaggcctaagggctgcactggactctggcgccccgagcgccaccaagggagtgcgcgcccttcccagccgctggtggcacagtcccaaagccccgcccatgcggggggtcgccaagtcctaagcctccaccccctttatccctgtgccccatccggaggcaggtgtacccgtcacgcaaacctaaagctgcccccggccccccgtggttccccgcaggaggcgggggtgtgtgtcacttttctgaaagctctaaggtctctgccccccgccccccgctgtcctccgtaggagtctgggcaggggctgtggcacagctctaaatccctgcgggtgcttgcttgccccaggcagcttccaggacccgcagccccccgccttccccgcaacccgcttcgggaggagccggacgctcggggattccgcgatgcgtccgcgaacgctcgggtcgggccgcacgcgggagatgagcgcgcctccgccgtcctctccaaatcccttatgtcaaccggggttttcttctttcatttaaaagttgcgctttaaaccaagtgggacgcagatccggtagctgcctattgggcttcaaagtccagggagttttagtcggggtgaagcattttagcctccgtgcgtcttgctgtaaaatgggtaaccctcctcgacagcctccgcagtccttaatgggtggggggggggctccccggcctctcggccccagtcctccgcccccgggtcctacccgcgcggcactcctggcggcggtctccgtggatctgttctgccggggtggggagccaggctctgagccgcggccccgagcccgaggtgcggagccaccgccccacgggtagcggccaccgggggccccagccccacctttcccggccctgttgcctcggccccgccccaccgggaggctgggtggggaggcctccggggagtagggccccagtccccgtcccggccgcgccctcgcgtctccatagcgatcctctcggcgcgcacctccgagccggctccccccggggccgaacaatacgccgctgggccgggggcggggcggggccgggccgggggcggggagagcgcgggcggagtgggcgcgggccaagcgcaccgcccaggcagcagccggccgccggggtctgcgcggcgcggagctgcccagcccgctccgggaactcagcccccgccccgcgccgggcccgccccgcttcccacgcccgtccggccgagcccgcgccggagccacctggagccgcctggagccgccgccgccgccgcaggttgatgcgcggcgccctcccgggacgcgcggaggagccatcttgaaaccaacttcgcaaactttcgcaaagtgctctcgaagtggaagctgcgggggaggccgggcgcgtggtccccacagtccccgccagggcccccggggaggcgggacgcggaccgccccgagggccgggcgcccgggagccgctccccggcctcgccgggtggatgcggaggcgcgccgggtgcatggattgtgttcgggcgcccggctcgggctcgggctccgggccatggcgccgccgccgccgcccgtgctgcccgtgctgctgctcctggccgccgccgccgccctgccggcgatggggctgcgagcggccgcctgggagccgcgcgtacccggcgggacccgcgccttcgccctccggcccggctgtacctacgcggtgggcgccgcttgcacgccccgggcgccgcgggagctgctggacgtgggccgcgatgggcggctggcaggacgtcggcgcgtctcgggcgcggggcgcccgctgccgctgcaagtccgcttggtggcccgcagtgccccgacggcgctgagccgccgcctgcgggcgcgcacgcaccttcccggctgcggagcccgtgccsggctctgcggaaccggtgcccggctctgcggggcgctctgcttccccgtccccggcggctgcgcggccgcgcagcattcggcgctcgcagctccgaccaccttacccgcctgccgctgcccgccgcgccccaggccccgctgtcccggccgtcccatctgcctgccgccgggcggctcggtccgcctgcgtctgctgtgcgccctgcggcgcgcggctggcgccgtccgggtgggactggcgctggaggccgccaccgcggggacgccctccgcgtcgccatccccatcgccgcccctgccgccgaacttgcccgaagcccgggcggggccggcgcgacgggcccggcggggcacgagcggcagagggagcctgaagtttccgatgcccaactaccaggtggcgttgtttgagaacgaaccggcgggcaccctcatcctccagctgcacgcgcactacaccatcgagggcgaggaggagcgcgtgagctattacatggaggggctgttcgacgagcgctcccggggctacttccgaatcgactctgccacgggcgccgtgagcacggacagcgtactggaccgcgagaccaaggagacgcacgtcctcagggtgaaagccgtggactacagtacgccgccgcgctcggccaccacctacatcactgtcttggtcaaagacacyaacgaccacagcccggtcttcgagcagtcggagtaccgcgagcgcgtgcgggagaacctggaggtgggctacgaggtgctgaccatccgcgccagcgaccgcgactcgcccatcaacgccaacttgcgttaccgcgtgttggggggcgcgtgggacgtcttccagctcaacgagagctctggcgtggtgagyacacgggcgytgctggaccgggaggaggcggccgagtaccagctsctggtggaggccaacgaccaggggcgcaatccgggcccgctcagtgccacggccaccgtgtacatcgaggtggaggacgagaacgacaactacccccagttcagcgagcagaactacgtggtccaggtgcccgaggacgtggggctcaacacggctgtgctgcgagtgcaggccacggaccgggaccagggccagaacgcggccattcactacagcatcctcagcgggaacgtggccggccagttctacctgcactcgctgagcgggatcctggatgtgatcaaccccttggatttcgaggatgtccagaaatactcgctgagcattaaggcccaggatgggggccggcccccgctcatcaattcttcaggggtggtgtctgtgcaggtgstggatgtcaacgacaacgagcctatctttgtgagcagccccttccaggccacggtgctggagaatgtgcccctgggctaccccgtggtgcacrttcaggcggtggacgcrgactctggagagaacgcccggctgcactatcgcctggtggacacrgcctccacctttctggggggcggcagcgctgggcctaagaatcctgcccccacccctgacttccccttccagatccacaacagctccggttggatcacagtgtgtgccgagctggaccgcgaggaggtggagcactacagcttcggggtggaggcggtggaccacggctsgccccccatgagctcctccaccagcgtgtccatcacggtgctggacgtgaatgacaacgacccggtgttcacgcagcccacctacgagcttcgtctgaatgaggatgcggccgtggggagcagcgtgctgaccctgcaggcccgcgaccgtgacgccaacagtgtgattacctaccagctcacaggcggcaacacccggaaccgctttgcactcagcagccagagagggggcggcctcatcaccctggcgctacctctggactacaagcaggagcagcagtacgtgctggcggtgacagcatccgacggcacacggtcgcacactgcgcatgtcctaatcaacgtcactgatgccaacacccacaggcctgtctttcagagctcccattacacagtgagtgtcagtgaggacaggcctgtgggcacctccattgctaccctcagtgccaacgatgaggacacaggagagaatgcccgcatcacctacgtgattcaggaccccgtgccgcagttccgcattgaccccgacagtggcaccatgtacaccatgatggagctggactatgagaaccaggtcgcctacacgctgaccatcatggcccaggacaacggcatcccgcagaaatcagacaccaccaccctagagatcctcatcctcgatgccaatgacaatgcaccccagttcctgtgggatttctaccagggttccatctttgaggatgctccaccctcgaccagcatcctccaggtctctgccacggaccgggactcaggtcccaatgggcgtctgctgtacaccttccagggtggggacgacggcgatggggacttctacatygagcccacgtccggtgtgattcgcacccagcgccggctggaccgggagaatgtggccgtgtacaacctttgggctctggctgtggatcggggcagtcccaytccccttagcgcctcggtagaaatccaggtraccatcttggacattaatgacaatgcccccatgtttgagaaggacgaactggagctgtttgttgaggagaacaacccagtggggtcggtggtgkcaaagattcgtgctaacgaccctgatgaaggccctaatgcccagatcatgtatcagattgtggaaggggacatgcggcatttcttccagctggacctgctcaacggggacctgcgtgccatggtggagctggactttgaggtccggcgggagtatgtgctggtggtgcaggccacgtcggctccgctggtgagccgagccacggtgcacatccttctcgtggaccagaatgacaacccgcctgtgctgcccgacttccagatcctcttcaacaactatgtcaccaacaagtccaacagtttccccaccggcgtgatcggcygcatcccggcccatgaccccgacgtgtcagacagcctcaactacaccttcgtgcagggcaacgagctgcgcctgttgctgctggaccccgccacgggcgaactgcagctcagccgcgacctggacaacaaccggccgctggaggcgctcatggaggtgtctgtgtctggtgagtggccgtcggggtgggaggagtagctcctgatgggcctcctggagagcctcaggaacccgccaagggctccgcctggcatgccggggcgcaattgggccgggcccgggcaactctgcaaggatttgttgccgccggttggatgctgggggtgggcgccccgcctaggcccagcgagggggagaggcaccgcgccgcttccgtcagcattttcctgggagcaggcctgcggttctcccaagttcaagaccggggatcagcgccttcctcagcaggctagtggctcctgagtacagctattaaaaagtggcctccaggtgatctgggtcaccggatttgcttggggatgctctttcgtcagccagccacagggctctctgggaagatcagaggtcactgccccttcccagtgccaattaattccagggtgggaccgttggaattgtcagatgggtccctgagtcaccctataatgcagccggtgttcccttggtctggcttttctgtctcctgcagataataacagtcgggcttaggtgtgtagggctttgtgcaagctctttgaaaagcatagcctcatttgatcttggcttctgctcctggatgcgggcttgtaatttgggtgctgttgaagaggcctgcccagttagtggtggagccagtgtgggcacctcgctcacctgctctggggctggaggtgaacaggagggagaggaaaccttggctcagcagtcagaagtttggccggtcctctatgcctctgaccctgtgtgccggggctggtctgcggtgctggggagggggactaatagaaagtgttggaattgggagacacagaagagagagaagaacttcgaggggcctgggggaacagtaaaggtcccccagtggctctttgaggtttgcctgaccgtgcatccaaggatgctggtgcaggcaggtgaccttatttataagcccaaactactgccaagaagagctcagattggctggctgtttgagtcagtgtttcagagaaattgtttaaacagtgagttattaggatacaactttgccacaggagccctggaataattaaaaagttaactttctgatttgtttcgtttccaaggttggctgttattctgtaatataggaagggttggatagctaacagcttccagttacagtttgcttataagatgtgaaacttacaggttcagttttggtataatacaaaccttccgcacaattttggcagtacagtctatttgtyggtgaatattttaggtttgtgagattgtaaaygtgtagagaatatggaataggcccttaagggcgaattaaccggggttatggatattcttaggaagtttttcttctataccactttatcttatagataaagcacaatgggaaatttggcctatttaaaaatgacttggcccaataatagggtttagatttaatgagggacgagatagtgggaacagatccatgctgggggcagggatgttttgtgtgtctgtggtatcagtaatgtgggcccccccgctgttagccagacagcagggtttaggatggattcccttccaaggaggttggttcctgagagctgtctcacctggggcgcagcttagaccacagttgaaaatgggctgggggctccacactatgtagtcactgtctcagtcatccagttattggctctgctcctttgtggacacactcgtactctcgtgtaaatcaggtgctgtgtcctcatgcatccacaccaccccccagaccaccaccgccccaacacacacccggatgacagtggttacctttgactgggttccagcaggcggttttctttactcttttatttgcrctstcatgtgtttccctggtaaccgggagctgagtggtgtcatgctgctgctcattttacagatgcagacactgaggccctggggtgttgagtggccttctcaggactgcacagccagtggggggcactcggcgttaaaccacgatccgcagaaagcagcccgctcttcgcattcccctctcttcctttggagaacatttttgacgaattagttgctaaactgaattattccagggtcaaatgggtgctttaaagcaggcatatgaccaggcgcagtggctcatgcatgtaatcccagcactgtgggaggccgaggcaggtggatcacctgaggtcaggagttcaagaccaacctggccaacatggtgaaactctgtctttgctaaaaatacaaaaattagcctggtgtggtggcgagcacctgtagtcccagctactcgggaggctgaggcaggaaaattgcttgaatctgggaggcggaggttgcagtgagccgagatcccactgctgcactgtagcctgggtgacagagtgagactgtctcaaaataaataaataaataaataaataaataaataaataaaaggatgcgcagaaatctcagaccattcgactaggatttaatgctccaaataagtaaatcactattgactataagatctatggttccagacagcaaagcaccggatagaaaacagaccaaacaaaaagatcagcccttgaattatctggaggttttattaaggaacaatgcggggaagcggtggtttcaaactcatccactgttttcaatggagtgttgttgcttccccaggatttacagccatgccctaaagcctttgatgcaatatgaccagcctggaggtgctgtatgcaacaggccagccatcgactacgtttagtgggagccattccaggaagggctgccagctttcagcagaggagcccaggagggaggagcgcattggagggcggtgcctgggaaggcccacgtggtgggggcagttcatttagcctggcgtggggttgaacactgtgactgtgactagatagttgttggtggttttatgtagcccaccaaggagaaaacattttttgaaaattttttgaagtcagaagatagtgaaattcaaatagctgccagttttgaatgacatccagcgatacaagatgttcattttttgtgatagtttttgaatgagattttaaattctgtgataggaactttttattatgagcttgtataaaggctgtgtttgcgtttttcagggcaacgtggctgatgacccagtggacaactcaagccttgaatgtgctctgccttctttctggacagtggtctttcagaaacattgacattctttgttttatttttatttttgaaaaacaatttatatataatgaattatatataatatataatatatgttataatgaattatatataaattatatacacaaatttatgtgtgtgtgtatatatatgtgtgtgtgtgtgtatgagacagggtcttgctctcttgccccagctggagtgcagtggcatgatcacgattcatgtcagccttgatctcagctcattgcaccaccacacctggctgatttttttttttattatttgtaatagagacaaggtctcactatgttattcagtctggtctccaacctctgagctcaagtgatccatctgccttggcctcccaaagtgctgaaattataggcatgagccactgtgcctggttagatgtatgtatttatgaggtacatgagatattctggcacaggcatgcaatgtgtaatgatcacatcatggagaatggggtctccatcccctcaagcatttatcctttgtgttataaacagtccaattatactcttttagttatttttgaatgtacaattaaattattattgactgtagtctcactgttgggctaaatactaggtcttactctttttttttttttgagatggagtctcactgtatctcccagcctagagtgcagtgacatgatctcggctcactgcaacctctacctcctgggttcaagtgattatcctacctcagcctcctgagtacattggattacaggtgcacgccaccacacccagctaatttttgtatgtttcttagagacaaggtttcaccatgttggccaggctggtctcgaactcctgacctcaagtgatctgcctgccttggcctcccaaagggctgggattacaggcgtgagccactgtgcctggccttattcatttttttagctatttttttgtacccattgaccatccaccttcctcctgctacccccttcccagcttctggtaaccattcttctattctctgtccccatgagttcaattgctttgatttttagatctcacaagcaagtgtgaacgtgggatatttgtttttctgtgcctggcttatttcacttaacataatgacctccagttccatccatgttgttgcaaatgacaggatctcattcttttttttttttgaaatggagtctcactctgctgcccaggctggagtgcagtggcaccatcttggctcactgcaagctcctcctcctgggttcacaccattctcctgcctcagcctcctgagtagctgggactacaggtacccgccaccacacccagctaatttttttgtatttttagtagagacggggtttcaccgtgttagccaagatggtgtcgatctcctgacctcgtgatccacctgccttggcctcccaaagtggtgggattataggcgtgagccaccgtgcccggcccaggatctcattcttttttatttttattttattttattttattttattttgagacagagtctcgctctgtcgcccaggctggagtgcagtggcgcgatctcagctcactgcaagctccgcctcccgggttcacgccrttctcctgcctcagcctcccgagtagctgggactayaggcgcccgccaccacgcccggctgatttttttgtatttttagtagagacagggtttcaccgtgttaaccaggatggcctcgatctcctgacctcgtgatccgccckcctcggcctcccaaagtgctgggattacaggcgtgagccaccgcgtctggcctcattcttttttatagtggaatagtacaccatggtatatatgtaccacatttcttttctccagtcatctgtkrccgggccacgtcatttttaattcactttgagtgtgtgtccgtgggtgcagggctgtaggcctcttgttgcagaatgcggagcttgggagaaaggcgatgtccctgcctctcctgctgtgtgtgttgcagacccatggatgtaggaaagtggcgtttgtgggtgagaatgattggcggatgagtcattcaggcatgtcagaaaatactgaaactcggcgaaataacaggattgagtaaccttctcgccgttgactttggtggagagtggatggtataaagtcgtctaggcttgataaagcttccctaagtgtttgcctagttaaatacaggatattgcagtggcttttaaacagacgattgcaaagaaggaagtaggggcgggctactgttcaggcattgtctggatgcatggcagcgtgcttttctggaactcacagggtagggaaggatcggacctttttttttttttttttgagacagagtcttgctctgtctcccaggctggagtgcaatggcatgatttggctcactgcaacctctgcctcccgggttcaagtgattctcctgcctcagctgcctcrgcttcccaagtagctgggattataggtacccgccatcatgcctggctaatttttgtatttttgtagagatggggtttcaccatgctggccargctggtctccaactcctgacctcargctatccgcccgcctcagcctcccaaaatgctgggattacaggcgtgagccaccgctcccagcctgggtcggaccatcttaaattgcttcagtggccaagcaggattctgccagtgtcaaaccttcccaggagagttcagtgcttttggcaatgagttaaccatttcagagctctgataagtctggagacagtggcttgctcataccttgagaaacactgcctcagaaataaggagtgttggtttgtttattgagcacctgctgtgtgcgaaagccgggagagccagtgtggtcctgacttctgcggctgggtggagatggaccatccgatgagcaagggggctgagctcaggggtagagtggtgacaccaggtgcaggcaagggcgggctgggactcttctctacccccctggacgtgtgcagtgtgtgatgggcagggagaccgggagtcagatggatcccccgggtcgagagagggctgactgtggagggtttggtgggccccctcgggaggatttaggcaagagctgggtcccatgtcccagctgctgggcggtgagagtggaggggagggaagctggggacatcatgcttgctccagcatgggggtggctgaggagggctttgccagcttagatggtcagacacatctcagccgatgtgctccatgtgccgggaaccctcccaggctctgcaggccccatcgcttgcagttttccagccgccacactgtggyatggaaagtaccgtcgccacctccatcctagagatgagcaaaccaaggacagggctcccagggcaccagcttgtgatggcagcagtgggatttgaacctggaccgggcagctcctaaggcatgttccctgtctgtgccttccagaaaaaactggctctgggaggatgagagtgaaactgagagaggttcgttccctgagccagagtccttaccgggaatcggctttggtgagaagacgtgaggccatttttggccccgtgtggctgggcgtctttgagagtgtcctgaagttgattgtgtgtgcaggtccagactggggagaccagctcaggttatggacacagaagtgagggtgctggcagttaggaggggacccaggcccagccttgaggagccatggcccgaatagcctcctgggtggggaacrgtctgcttgggagctggagcaggaataaccacgtgcaggggagggcccacgggtgcaggccctggaggctgagggagggcragtgtctccgagggggtcatccgtgatggatgccgtctggcggttggagagcctggggacagagatgtgatgggttagccaagggcaggtccttggtggcctctgtgagatctgagtggagtggtttgggggtgcctctgagaagcaaatgacaaggttgctggcatgagtgggatgggaacaggacccagcctcagagggaaggcagggtgtcatggggacaggcctgcacaaggctgagctaaaggcccagcagagttggcgggttacgcacagcacctagctgtcctgcagcctagcgtggcactggcccgtctcaggggctttgggagtgggcagtgtcaggtcttcctcattgtctcccaaagggctactgtggccaagcttcgtagacgkgtttgccaggacagtaacttctgcctctctctgagtcatcagacctggagggaatggaggagcaggaggcggaygggaaaaaggggcctgggagaatggaaggggccacaggtccacgggacatggactcaccagggcagggcgcccacctcagcaccagctgcccggggacaagaggtctatgtctggccccatgtaccgaccagggtgttgagagaccatttttaaaagtctaggtgaagtagcaggcaggtgaaactccgggcaagttcccaragccctgggcaggagccggcaggaggggcggtgctggccacgcctggagcgggcccatgttgctgggcgtgccagaaccccacgcyggccccagtgtcgctgctgaagggtccccttgggtttgggctggtgcctgtgcctgcacattttgaaacccgatagcagaacctgttgaggaaggggataggtgggtagatggggtctggggcccctggcagcggccaccttagctggggtgtggcctgtggcccggtgccacggggctcatccctgccagcacttggattcaaacagaattagatgttatcttctgggtgcagcatgtagaaagcagtcctgagtttggtgtgatttcttcagttcacagccttgggggaaatcgttttctaattttttcttcttttcctgtaacctgaacacacgggttcatataaatgccccaaattccctagaatgaaattccttaatgctgggaggggttgtagtaaacraccctcttttttttttttttgagacagagttttgcttttgttgcccaggctggagtgcaatggtgcgatctcagctcactgcaacctctgtcccctgggttcaagcgattgtcctgcctcagcctcccgagtagcggagatgacaggcgcgcaccaccacacccggctaattttgtatttttagtagacatggggctttctccrtgttggtcaggctggtcttgaactcccracctcaggtgatcygcccgcttcggcctcccaaagtgttgggattataggcgtgagccaccacgcccagccgtaracgaccctctttaattcagygacccagccttcctcttgcttgttttgggaggaaattcaggtggaagttcaagccatgagggtccagaggccagtcttgcagtagtggccgctcctcttggaggcccctgggcttccctgtcctgaagcctgtggacctggggcctggtaggcggtgtggattatttctggaatgagccggaggggaccctcggaggggtgaggggagggggctgcctgccaggtggagggcccagtgcctttacttggggtacaaggggagcygcgcagaagcacggacagcccccaggagccgttttcgtttcctcccacacgtgctgagggactcgccctggtgaagggatgggcatttttcaggaaaacaccagtgactgaattcttaggcttttgcttcgggtaaggacttgtggataccttagtaatcaggtcccccttttgggcgtgaacattccatagctgggaaaagccccacagcagccttttagtggggtcatccctctagcgcctgttctcttgtcctggatgaaggccaggggctcttaaaaagcaaacaaaacacacasacasacrsacacacacacrcacacacacacacacacacgcacacaacgggggtgggggccgttttcaaggtcatcgtgtggggtaacacctttccttccagccgcccgacacaccgacttcgccccttccagttgtcatggggattgtgcaggggacaggatgtgtccctcagagctgcgggccttgtttggaggcttacrcgtgtcccaagcacagggggcaggcctgtaagaggggaatcatgtagcaaggaggctggcccagagcaggggtgattgagaagtgggcrcgggaccgcctgggtctgtgtgcttcccaccacygcggtgcctgttcagtctgtgcctgcatcgtctcagtgaaatcttacrggatccccatggtaagggcagagaaactgaggctagagagcttgtagcgacaggaagagccaggcgcagactctggggtctgtgtgctctaatcgtggtgctgacagccatcttcggtcccctctgtctgtcagtggcgaggccctggggcacagagctggaggtttctgaggacggaagctcagtgcaagtgactgcrttgcctgaaacgggacggctgagagttacctgcacatggtgcctgattgtgggggtgggcgacagtggcagccgtgctgcaggactgtgggaggggctgaggctggagaaggggctccttggagccttctctgggtccttgtggggtctcttatggtagagctgtcacaagaagctgtagagtgaaggactggtgggcaccaggtgcagggaggcaggcatgtcactggtcagagctggaggctcttatttggggagcctggggagggagataccagatgaggagcctgctcagagcaggggctgacgcacctgttgaggggccttccagctcagagaagctgcattgtactagccggggagtcgcctttctcctgccctgtattcttccctccctccctccttccaactrtccatccacccatcaagatttttctttctttttattttatttatttatttatttatttatttatttattwgagacagagtctcactctggcacccaggctggagtgcagtggtgcaatctcagcccactgcaacctccgcctcacaagttcaagcgattctcrtgcctctgccccttgggtatctggactacaggtgcccgctaccacacccagctaatttttgtatttttagtagagatggggtttcaccactttggccaggctggtctcgagctcctgacctcagctgaaccgtccgccttggcctcccaaagtgctgggattacaggcatcagccactgcaccaggctaagatttttctttcttaatagtctgtttttattcacagttttgtatcttcttttaaatattttttaggatttttgttcatatctaatctaaatgacacttggttaaagtaaactaacagcaactaattcaaataaaatcacatgccctgttagcattcggagataagaatgctcttgcagggcaataaccatttgtcagtgagttgattgttgcagggcggttttcatcatcagaatgaagttgttcagctgccctgcagttccgctgtcggccaaggccccaggggctgtcctttgatgtgttgtgatgctgggcatgggcccgctgagcaggtgttctcccagcattggagacggcctgagatttcaccagagatgaggcctgggctgttctccactcactgcccygttcagattgcctgaygctgggtctgcctggcccyctctggacctccgaaggtggaatggccatcccctggggccccttccctgctgcctctcacccttctgtaggttggggaatggaaaagcagagatccagcctggagatctgactgtgattggggaaacctcctttttcttgcccatgtatgtctcaagctctgagaaagtatcccatttaaaaactgttatgaaatatttgcaaatcctatatgtgataagggattaatatccagactatgtaaagaactcctacaatttagcaacaagaaaacaatggaattaaaaaatgagcaaaggacttgaatagacatttcttccaaagatacaagtggccaataagcacaaaaaaagatgctcagagtcattagtcaacagggaaattcaagtcgaaaccgcaggcgtgggggctccagcctataatcctggcactttgggaatctgaggcaggaggattgcttgagccgaggaattggcaatttctaccaaaaaaatatacaaaatataaaaaaattagctgggtgtggtagcatgaacctgtagtctcagctagtcaagaggctgaggcgggaggttcgcttcagcctgggaggtggaggttgcagtgagctgagattgcatcactgcactccagactgcacaacagagtaagaccctgtttaacacatacacgcttttgcagggcaataactgtttgccagtgagttgactgacacacacacaaaaaaaccccaaacctgcaaggagatgctacttcatacccattaggatgactgtggtcaaaaaaactcagaaaacacgtgttgaaggatgcagagaaactggaacccttttgccctgttggtggagtgtaaaatggtgcaggtgctgtggaacacagtatggaggttccgcaaaatatgaaaaatagaactaccatatgatccagcaatcccgcttctgggtatgctctaattcaaaacaaggtctttatttttattcttgcttttgagacacagtctcactctgttgcccaggctggagtgcaatggcgcgatcttggctcactgcggcctctacctcctgggttcaagcgattctcctgcctcagcctccccagtagctgggattataggcgtgtgccaccacacctggctaatttttatatttttagtagagacggggtttctccatgttggccaggatggtctcgaattcctgacctcagatgatccgcctgcctcaagcctcccaaagtgttgggattacaggtgtgagccactgtgtccggcctgactgaaaacaagatcttttttttttttgagatggagtctcgctctgtcgcccaggctggagtgcagtggcgcgatctcggctcactgcaagctccgcctcccgggttcatgccattctcctgcctcagcctcccgagyagctgggactacaggtgcccgccaccatgcccagctaattttttgaatttttagtagagacgggatttcactgtgtgttaggcaggatggtctcsatctcctgacctcatgatcctcttgcttcggcttcccaaagtgctgagattacaggcgtgagccaccgcgcccggctgaaaacaagatctttaaagaggtatttgtacacccatgttyatagcagtgttattcacagtaaccaaaaggtggaagcaacccaggtgtctgtgaacagacgaatggataagcaacatgtggttcagttgcatgatggaatactacttagcctgaaaaaggacggaaattctgacacttactacaacgtgggtgaaccttgaggacattatgctaagtgaaataagcaagactgaaaagcacaaattctgtatgattccactgaggtccctagaggagtcaaattcatagagacaggaagtagaatggtggttgccagggggtggggaggggacaggagttgcgtttaatggggacagagtttcactttgggaagatgaaaggctctggagatggagggtgatgatggttgtataacagtgtaaaggtacttcatgcccctaaactgtgggtgcatwtaaaaatggttacagtgggccacacctgtaatcctagcactttgggaggccgaggcaggtggatcacatgaggtcaggagctcgagatcagcctggccaacatggtgaaaccttgtctccactaaaaatgcaaaaaattagctgggcctgatgacgggtgcctgtaatcccaactactcaggaggctgaggtaggagaattgcttgaactggggaggaggagattgcagtgaactgagatcaggccattttacactagcctgggtgagaagagcaagactccgtctcaaaaataaaagtggttaccatgttaagatccgtattatgtacattttattacaagaaaaaaatgctagaaggactaatgcaaactgttgcagacrctcaggtgtgggaggcgtgggagcrggtgcctgtgtctgtggtttcaggtatgatttccctgagagcttgagcactgaacgggttcctttggtcctgtcctggggttcgaggccatccagggcctccttctgggctcggggctcttcttccttctgtgccttttcctgtgctcttagaccatgtcttgagatcacaaatggcaatagggggctgggcgcagtggctcacgcctgtaattccagcactttgggaggccgaggcgggtggatcacctgaggtcaggagttggagaccagcctggccaacctggtgaaaccccatctctactaaaaaaatacaaaaattagctggatgtggtagcgggtgcctgtaatcccacctactcgggtgggtaaggcaggagaatcacttgaacccaggaggcagaggttgcggtgagctgaggttgcgccactgcactccagcctgggcgatgagcgaaactctgtctcagaaaaaaaaaaaaaaaagcaataggggtaggtactgaactataaatcttgtgcctggtacatggatcaaatctctggttatttgactgcattatcaacagccacacaaatggacatgttccctgttttaggggccctgggtgcaaggaaggcttcgtgtttctggcggcacctgagcagggtccagtgtttcctggtttttctgcaggttctgggaccttgcatctcaggggcatgggagggggtccctgggtatgtggatgtcttgggcacctcccaaccccgcccaggaagggagaccagctgggcattcagacctgatgcccaggctctgcctggttctaccaacttggacaagaggtgagctgtagtgggcggctgagaccgctgctccccgggccaacccgggggctcccaaatcgtagccctgtgctctgtgtggcccagtgctggccctcagcaccctctcttcatgaccaagccttgggtccaaaaccaccagtacacacgctggttcaagtgtatttgtatcagcatttggatacactgaagcaatttggctggatctttgtccttgtttgtttctacggaggtggaattcacagaacgtgaagttaaccattttaatgtgagccattttgtggtgtttagaacatcacagtggtgtgcaacacccccaccctgtccagttccaaagcatttccatttccctcaaaggaaagcctgtaccctctggcagccccaacccgtgggcttttgtgtctggcttctccccggccagtgtcatgttttccgggtcgtgcacagcgcagcacgtggcagtattttcttgtctttatgttggtgttttttttttttgatacagagtctcgctccgttacccaggctggagtacagtggctcaatcttggctcattgcaacctttgcctcctgggtttaagcgattctcctgcctctgcctcccgagtagctgggattacaggcatgcgccaccacgtccagctaatttttgtatttttagtagagacgggatttctccaggtttgccaggctggtctcgaactcctgacctcaagtgatccacccgccttggcctcccaaagtgctggattacaggcgagccaccgcgcccagccacaactggagtctttataagagagaagacagagacagacacacaatgaggaggccacaacgtgaagatggaggcagagaccgcagccacactcggattacaggcgtrggccaccgtgcctggccccatcttaatttatatcttcatctgcagcctttatttccaagttaggtcacatccacaggtactgggcattggggcagggtagtgaacccactgccacgcctgccttcatgtttgtgtgtgtgactggtttcttcgtgttaaatcagataaccgaggcctcccttctcagtgggatctgcagtctgtccacccgaatgcccgagcacaccatcggtttgccttgtcgcwgtgcaatgtggtctgtgggakcccactcccttcgttctcctctaacgagactgagtgtggcacgggctgagcgcccctgctgatggtgcccccacaggctctgactcctcagtaaggtctgctgtgatagcagcgtctgtgctgaggggccgcgctgtgctttgagatgtcctttagaaaggggatgccgaggccaggcgtggtggctcacgcctgcaatcacagcactttgggaggtcgagatggatggatcacatcacctgaggtcacgagttcgagaccagcctgaccaacatggagaaaccccatctctactaaaaacacaaaaaaattacccgggtgtggtggcacatgactgtaatcccagctacttgggaggctgaggcaggagaatcacttgaacgcaggaggcagaggttgcagtgagccaaaatcctgccattgcactctggcctgggcaacaaaagtgaaactctgtctcaaaaaaaaaaaaaaaggaaggggacaccgtgggaggtgtgtaataaacagaatatggggacacagggtggtgggtgctttcagatgacagctcaccctccctttccctctgggtctcaatgccaagtgccatagccatgggagtcgcctcttcaatgcagccctcgcttctaagcatggaaaattctaacacataatcgcaagttctcccaattcttcaaagaggagagaatggaaaatatgaaggtttattgttctgtgagacttcctgtctgtcctgcatgtggccgtcagaggtcaggggtgcgtctgtgtgtgcaggacgggaagctcaggggcrtgttttgcggcgtgtctgcaggggcaccttactgtggacagaggtaccaagacaagagccggcctggggcgccgggacagtgcacatcagccattgtggttctaccctccagataccgccttgtgccccgtggaagatgacaagtgccagatggagtctgttttgggggaaaaccaggccgggatgaccccgtaggcaggaaaccggtggctttggtgttggacggccgtccaagtctccggtttggcccgggaaacccattgcatttgtggcaggaattctctcttccctcctgtttttcctgcgggtcatcggcccagcattttttgccagagcaaaggtggagcagtgggaaaatgggccaagccccttcaggggccaaacttgcacctggcagctccatgctctgcagctgggaaaactgaggcagtgggggatggggaggtggtttgtatacctcaggggaatgatccattggggtgagaacctgccctggccagagcyagaccctctggattcttcccccagagtcaccagcctcaggaagtggatgagcccagctcatcccttatgggtgataaaggttcctttgctttaaaacacgaaaagggcatcccatggctttgccagccgtgacactggtttaggtgggattctgggcatgggtcagtgggggtcagctgcagtgggaaacggggagggagggtgaggggacagccctcggccgcctgccttcctgccagtccccaccccgcagcttcctgcctggcacaacatagggtgttgcctgtgtcctgagagagtcgtgtgcctgggtgagaagtggagggaatggactttgtggtccgttgggccggaggagccacataacatgagctggtcgaggaaattacctgggaggtgtcaaggtggcagcaaatgagctttgaaaagtatgtcctggccaggtgtggtggctcatgcttctaatcccaagcactttgggaggcgaggcaggaggcttgcttgaggccaggagttcaagaccggcctgggcaacatggcgagaccctgtgtctataaaaaaaaattttaaaaaaccccccaaaaccggtgtgctatccctccccactcccccaaccccacaacaggccccggtgtgtgatgtttcccttcctgtgtccaagtgttctcattgttcagttcccacctatgagtgagaacatgcggtgtttggttttttgtccttgcgatagtttgctgagaatgatggtttccagcttcatccatgtccttacaaaggacatgaactcatcattttttatggctgcatagtattccatggtgtatatgtgccacattttcttaatccagtctatcattggtggacatttgggttggttccaagtctttgctattgtgagtagtgccgcaataaacatacgtgtgcatgtgtctttatagcagcatgatttataatcctttgggtatatacccagtaatgggatggctgggtcaaatggtatttctacttctagatccttgaggaatcgccacactgtcttccacaatggttcaactagtttgcagtcccaccaacagtgtaaaagtgttcctgtttctccacattctctccagtacctgttgtttcctgactttttaatgatcgccattgtaactggtgtgagatgatatctcattgtggttttgatttgcatttctctgaactcattcctactttcttaaccccagtcgactgtgctgtggatgctggtcagtgctggagatctgcaggatgggcggaatgtcctggtgtatcctcctgccggggctgccttcctacactggctgctgggagcctgttacacagataggagcctgccaggctggggaggccccagtgacttagtcatcccctgatcccccagcaggacttacaaagcctcagcctctgtgcctttgagtccccagccctgagcactgtgtgactgaggcccgtcctattggctgtgtcctccacctccagcccccggggtgccctgcagcttgtgcacacccactctgcatcaggctcagccctcccagagctgacttcaccatggagacacagactgtcatgctttcctattttctgtctaaggccttcatagagtttgtgtttaaggtgagcctctttccctttaccctgatgaaacatgtgcaraccttcctacctgggggtcatgtgacttgggagcatccactcacaagctagcctttgtgatacgcactgagaccgctgggctgtggttccagctgtgctgccgacagctgtgcagctctccccaggagggcccaggtgggggtcacttgcctggctgtgggctgggagtggtgggcagggccatgaggtcccagagtgtggccagagggctgatgcacgggtggaatggctcctactgcccatgctgtgtcccatgagtgtccccggggggggttggctctgctgggacgctgaggggggtccacgctgccagacagccttttctcagcccaggctgaagctgagggggtgctgggggtgctttctagaaggggctggcgaggactaggctggttgccagggcccaagagggctggggtttggacagagccacttttgtggggaggcatggagtttggagcggatgccagctgcaaagagcacgtctgaggtgctcatcccccaggcctgagggctggattgacggcgggtacggacaggcatccctggggtgggaaggggtggcagcyccagagcttttcccgcagtgacttgtgcttgctgacttgggaatgactcagcgaggcaggacagggctgggcaattcattcagaaacacccctcttmttccagagcccagccgtgagcctcggccctgcagccccggctccctccggggagtgactyttctctttgatgctgggaggagggaccacagagtctggggaggtctggggaggtgctgagaggggccattgcattatccctgactttcagcaagggtctggcggtgatacacagatgctgttggggtgtcctcaggccacatccttcatgcccccactccccacctsaccaggactggttctgactgactggcagccagaggtgtgtggccttgggcccccggggatcagagtgcaggtggacctgactccagccctcacctggatggaccgtcggggcctggtgaaacgtctgggtggaagagcttcagcatcacataggcccgcagttgaggtgtggcttaaataatcacccttcagaaatgccggctccattgtgagtagtctcgcttactgggtttttgacactgtcatctcgaggactgggtgggattcccctggtgttggagcctacctgggtgggaaagacccacagtcaaggtcagatgattctgaccccaggaacctttcccaggtgggtgctgggatgtgagaaaagtgtagacaagacaagtaaagagctgtgaaaaattacaaatgagggccgggtgcggtggctcgtgcctgtaataccagcactttgggagggtgaggcgggtggatcatgaggtcaggagatcgagaccatcctggccaacaaggtgagaccccgtctctactaagaatacaaaaattagctgggtgtggatgcgtgcacctgtagtcccagctactcggggggggctgaggcaggagaatggcgtgaaccccgggaggcagaggctgcagtgagctgagattgtgccactgcactccagcctgggcgacagagcaagactccgtctcaaaacaacaacaacaacaaaaagtattaataaacttatctatggctttgagcttctgggccatattccaaccagtatttattaggaggctctctgcgcaggtgagtgttggctctggggatgtagtgacggagtaaacagaagtgttgctgcccgtaggaagtgcacactgcagggctgggactcctatccctggtgcacgagataagggccaattataacagtgtacaggcagtgtctcattatggtaaacctaaggcctccccacattgatcttggctcctaagattttatggttgagaatattgcttgaaatactcaagttgcaacttgaagtgtgttggattgcctcmcttttagtgtacatgtttttgtgtgactgcattggacttcttggtatggtcaggtatgtgggctggtttaagtgtcctgtaaaactcaggaccccacgtggggaatgcttttgaacttgtatttttaatcctcttgcacacttacaggccatgttgcctctcgtgatcatgaacactcttccctgtgttgcctgatagtagaggaataaaggccgtagttggataccgcctttccttgagtgtttccttcatgtgttctggctcactgcagcagcgttgagcccacatggcctagtccccaggtgtattgtccccagtcgcgtgattttgagaggcgcccgtgatggtggtcgcgggtttgaatctcgccccagaagtcactcactggttaaatggcctcctattcactccactggggagggatggattcccgtcctaggatgatggggattgctgagcacctgacactggacagatgaggtcagcagcagtgcgtgagtagcacagaggcccagcctggaggaggacgtcgcctgccatgcggggccacccggggcagcactcaggagcagaggacagccaggtgctgtgggggacaagcccggacccggaaggaacaagagggtggggggcccctggttcttgcaggggcacatgggtagcttgtctgaataattcctctggatggcagggaacggaaacccgctaccctctataagcaggagctgtgcctgatccccgtgacaagaagggttgactgtggagggatcttatccgaaggagcagagtggggcgggggacctgtggtgaggccatttgaggcctcctggcttcagcagatgtcaaggcaatgcatagtattgggccttgattttttgttgttgttgagatggagtctcactctttcacccaggctggagtgcagtggtgtgatctcggctcactgaaacctccgcctcccgggttcaagcaattctcgtgcctcagccttctacgtagctgggattataggtgtacaccaccacaccgggctaatttttttgtattttagtagagatggggtttcaccatattggccaggatggtctcgatctcctgacctcatgtgatccgcctgccttggcctcccaaagtgctgggattacaggcatgtgccaccgcacctggccagtattggaccttgatttgggggctgacacctcagtccctgagtgcttcttggtcctcctctgcaaatccgggacacctgcccctagctgtgagccctcgagggcagcacgcttagtaagggcttatgagcgccgccgtcactcttgctgctgctgtgtttgccacactgagagctcctggcagcgtgggggccactgggctgggatctgggggtgggctcggggcacttcaggaccccagaacctgaatgacttgctgcgtttctcggaggcagcatgaaggacatcctggcagaattgtaagagctgacaccaggagaaaagcaggaggtgaccgtcatgtcatccgggcaggggatgctcttacctagtgcctgggatgagcagtgagcagagaggcgggtcattgtgtctaatgaccgagggatgtttacagagctggtagcccccgtcagtgggaaaagtggcttttcctggggctgccccataccagggagacacctccttccctcatctcaccctcttactcttcttctgccccctactctccctgccttccccactgttggycttcagcacatcaccccctggggtgtcccgtgatgcccgctgcccccaggggagtgtggcattgtgggggtgttggcgctgtcagccccactgactgccctgagcttctcaagtcctgggatccacagctctctgagctttgggtgcctggcccgaagtcaaggcctagtcagygtttgttgaaggaatgaacgacagcgtgccaaagaagctcagcacagtcactatcgtgttatgaaatagagcagaaggaaagtctgctccacgccatgctctgttttggagcgatgctttgacacacgtgttggtcccggttgggatttaagggcctggccaggaggttgtggtgggggccctgggctgtggtgagcagccagctgtgtagactggaagagccgggggcacctgctttgcgtgtggttctcagggagtctccaggtgtgcccttgttgcatgtgctttttctctgtgtgaatcatatttctgtcccacctttggtgtccatcttctatgtaaaaacaaaaccagaaaaactgccaagggtctataatgtgaagaaaaccagcactttgtgagtgtatgtgtgtgtgtgtgtgtgtgtttttgagacgaagtcttgatctgtcatccaggctggagtgcgatgacacgatctcagctcactgcaacctccgcctcctgggttcaagagattctcccttctcagcatcctggtagctgggattacaggtgcctgccaccatgcccagcgaatttttctatttttagtagagatggggttttgccatgttggccaggctggtctcgaactcctgacctcaggtgatctacccgcctgggcctcctgaagtgctggtgggattacaggcatgagccaccgcacccggccagcactttgtgtttttgaatctttaaagctttatcaggagcactagaagttgcttttcagaataggaatatttttggtttgttcacaaagataagcacacacactctagaaaattttggctgtaccaaaaggcataaaggagaaaggaaaacacccccaaacccaagcccaggggccttttcctttatgtcttaattttccttccgctgcgctctgacttttctggggctgcgtgtgagccragatgaaggcggctctcgtccccccagcgtttaccgcagcgcctctcctgttggcaggggttgtcatggcgatgggccctccctgagccaagggggcacctcatggggcccttacattgaagagcggtccctttgtccagggacaatggggccctgaaggactgtttgtgtgtctggctcactttaattacctccaaggggaagctccgggaagggggtgcgttccagcctccgtggctcggaaagggggtgcattccagcctctgtggctcaggaagggggtgtgttctggcctctgtggcatgagctgagcaactagatatttcctttcctgaaaatgcttgagcctggatccctcgttttaaaaaaatcatttttttatttcataccagaagaccttagctgttattattacttcacctaaatgggtgagagacagacgcagagggtgccacgtgggccgtcctcgtctgctggatgcagagggttaggagctagcccagttcactggttttagagccagccttctggacatgttcttgcctcctgccctggaaagggacatgggctgtccttcctgcatggcctccagccctgtggccagatgtggcatgaagtccccagccttgtcacctgcaccctgtgagtggagccgggcagcggggcacttcgtgtctttcgttcctcactggacgcatcatgacatcttggagaaggactcacctgtgtgccgggtccctggactgagcccctgcattgtgcatgggtactgccctgccgcacctgctaccctsttgacccccacagccatcccctcgtgaaacccctcctcccagctccctgaggccagccatcctcaggagccccacagacccckccacctcactcccgtactcactactcacttgagctgacagcagggtctcccccagcaccgctggcactgctgatrttcagggcctctgtgacgggacatcctgagcactgctgggtacagagcagtgacctggcctttacctaccacgtaatggggtccagtagcacccactgtccagttgagatgacccaaaatgtttcagaccttgccaaatgtcccctagcccctctcccccactgagatgactgccatggaactgggctgccctctggatggccagtggcatgggctcagggctccttacactgtgacaacgcagtgaccaacaccgacagaacagtagcctgtgggtcccaggtagagaggaggctggcttggcccaaccctgccctgctcagtggtttggggtacccatcaccccctctgcaccycatctcctcatctgtagaargccgtgatgagagctgccttgcaggtgtcatggcacatggggtcattggagcccccgcttkgcaggtctgcacccccttgtccagaccctgtggtgcctgtgaacctggccatcttggggactctctaggacttggccatgggagcagagaagtgtcctcgcagccccccagcccctcactcagtgcaggccctgggcactggaggggtgccagatacagggacaggatgcctaggaggtgtcgtgtgatsatgacgcctttaaaatctagcagagaaaatggctgagcgctggcctgtcctgcccagatggaggccactggttggaaagaggtgagggtcgtggctatcctggagccttctgggagctcggggttgctttgaccatcgtagccgctggccttggcggagacaacagcagggtctgactgcatggcggtccccggggcccagtttcccaggttcacagacacagggaacgtctcagggtctcagagaccattctcacgcggcaggcgtgtctcggcattcccatggggattgtgttatttataaactgtttaacatattcattcttagaaatctgacatttctaaattccagccaaactgagactcacaccgccttggaaggygacgcgccatggggtgggggtggctctggagaggcccctccctgagccctggacgccccaggcggtgagggggtgggaggccacggtgaaggggctgagggacagctggaatttggcaagtaagtgaggccctttggtggggaggggaccccggctgtgagaaatgctcagcaacaaagggctctggcaggaggacagtgaggggacagcgaggggacagcaaggggcgggggtgggggggccacagggtggggatgaccaccacgcaggggacggtcagggggaagcaggcaggaggcagggcccatgtgcccctcccatcccaccctccacccccatcaccctcaccttcctcccggggcaaatcctcccgcacacctgctgggtgtgtggacgagcagggctggcttctgtcccgtgggggccagttggcgcccaggatctgttcacctctgtggccagggcagggcgagagtggcgagagtgggtgggagggggtcagctggtgtcctaggagccgtgggggagggggtctacgcctgcagggccgagtcacaaaggggcatgtacaggctgtgccggtttatggaaggcctgtgggccaggaccagagctgggcagtgatgatgacagcgttgctggcagccagggctatcccggcgggaccaagctatccccagcatggttatcccacctaggagcctacggcctgggaacagccagatgggtggccacggcacaggacggctgaggtgggaggtaggggggtgtgaggaggtagccatgtcctttctccatgcagcccccccagtgcctcctctgactgcccactgtactctgggctgtgttaggttctgggaaagaggcaggctcgccggcttcacagtgctcacctgtagtggggcccctgccccactgaacaggctccccagtactctaggggyggggcttckggcggcacagccagcaagtttcagggatgggagagggagtccagactgcagcctgtgagcccagactgcgggcgaggcaggaggaggaggcgggtcacagcggggcccctgcactgaggggtgcacgtggcctggtgaggggttggggaggagtgttgggctgggactcacaccgcaggctgttggggcctggggcacaccgagtatagcccacctgagccagggccacacagaggccggggagggagggaggcgctggggcagctggagtacgctgcagctgctcggggtgctgtgggggtcatcatgggccccctgcctcggctgctgaaggggaggcagtgatggtgtcttcttggtagtccagtagctccctggctacccccccgacttcagcaggcattgtggtgctggacggaggccccccagccgtggcttctcacctgtggcctctgtgctctctctggggtgcttggggttgctgccccggtggctccattggaatcggtttgttttttattttgttttcttttttagacagagtttcactcttgtcgcccaggctggagtgcagtggtgcggtctcagctcactgcaacctccgcctccctggttcaagcgatcctccagcctcagcctccygagtagctgggattataggcacacaccaccacacctggctaatttttgtatttttagtagagtcggggtttcaccgtgttggccaggctcctgacctcaggtgatccrcccgcctcggcctcccaaagtgctgggattacaaacgtgagccaccacgccccgcctggaatcggtttttatgtgttggaraaaaggacttcctgtgtgtgcaggctgtgtcctggtggtgcgggtgacagaccgtggagaagacacccccgggcttggcctcagcttcctgttatcgggcatctttccggagagatctcagcatctgtccacatttggatggtggcacagagatcttaaaattagaacgtaactctggatttgggcttgtctcagcggctgtgcgtcactgcgggtagggagggtatgccctgaaaactgatctagaatgtagatgttgaaagtcctagaaacatcaccctaaggaagtggtcttggaaatgggtgagaattccaggaggtgagacagctctctggacttgtgagacttggggggctggggctggggctgaggctggcagaacgcagacctgaggcagggccggttgggctggactcttgctggactgtgatacacaaagggaggcctagtgtgaggcctgcaggggttgagcccaagtctgagatytgggaaactgaggggctcagtaagtctgaggagggaggtggggcctccccaaaccccaacagggcctgcggggctctgctgctcccccaggccaggcacggtggaggtgccaggcttggagggatcatggcgggtgctctgcatgtccatccagaacccagcaatccgtcagtagtcagtagtttcttttctgtctttctttctttttcttttttttttttttttggagacagtctctgtcgcccaggctggactgcaatggtgtgatctcagctcactgcaacctcgtcctcccaggttcaagtgattctcctgcctcagcctcccgagtagctgggattacaggtgcctgccaccatgccctgctaatttttgtatttttagtagagacagggtttcaccacattggccagtctggtctcaaactcctgacctcaagtgatccacctgcctcggcctcccaaagtgctgggattacaggcatgagccaccacgcccagccagtagtttctttttgacgggaaggcaaggatgggyagaatagatttattttttaaaatccttaggaatctcattaataaaaaaagtaaaacatcattgtaaaaattcaaagagaggtgcataaagtagcaaatcaacgctttctgggtgtctttccgaacatttttctttgggtataaacatatacaccatttctgtgtttccccacccacctccaagtgcaaattgctttttatttttatttattaatttattttgagaccaggtctyactctgtcacccaagctggagtgcagtagcatgatctcaactcactgcagtgggatcttgactcagtgcagcctccactctcaggctcaagcagtcctcccacctcagcctccccagtagctgggactacaggtgcatactcacttttgtattgtttatagagaccaggtctcgctgtgttgcccaggctggtttcaaactcctgggctcaaacaattttcccacctcagccttccaaagtgctgggattatgagtgtgagccaccgcgccyggtttgcaagttgctttttaaggatgtttgattgcagaccttgcgttctagcaaatgaagacctgccttgctcttttttttttttttttttttttttgagacagagtcttgctctgtcgcccaggctggagtgcagtggcgccatctcggctcattgcaagctctgcctcccgggttcacrccattctcctgcctcagcctcccgagtagctgggactacaggagcccgccaccatgcctggctgattttttgtatttttaatagagacggggtttcaccgtgttagccaggatggtctcgatctcctgacctcatgatccgcccgcctcggcctcccaaagtgctgggattacaggcgtgagccgccgcacccggcctttccttgctctcttgagatggcctcattttccactgtgttgatgtattgcaatatattcagccagcactcttttttatatttgtttccaagtttctttttcatataacatttcagggaacattagtttgatgtgtggtctgtgtgtgtgtgagtaacttttgaggttttgctgaggaataaattttcagaagtgaaattactggtgcggaggatttgcatacctcacatttgataaccgtggtcaaatggcctcgggaatatttgtgctaattaatactagagccagccgtgtgtgaagatgaaatctgccatattttcatcctcattggagagattagctcttttattcttttctaatcctgtaggtaaaaataaatgtcttccttttttgatttgcatgtctctttggggaaaatgcagttttttatctgcttagcagccattcctgttttttttttttttttttttttttggagacagatgtcgccaggctgggatgcagtggcgcaatctcagctcactgctgcctccgcctcctgggttcaagcgattctcctgcctcggcctcccaagtggttgggactacaggtgcctgccaccatacccggctaatttttttgtgtttttagtagagatggggtttcaacatattgaccaggctgatctcaaactcctgaccttgtgatccacctgccttggcctcccaaagtgctgggattacaggtgtgagccactgcgcctggccagccattcctgttttttctgtgaattgccagtctgcagtttcagttagattgcttatcttttatcgatttacatttctttaactattttgaatttttaacttgttgcaaatatctttcataattttgaattttattttaactcaatggtctcttttgccatgtaggtcttaaatgtttatgtttttcttyttctcttcytgagacaaggtcttgctctgttgcccaggccggagtgcatggtactgtcatagctcactgtaacctcaaatcctgggttcaagccatcctcctgcctcagcctcctgagtagctgggactacggatgcacatcgccacacctggctacttttaaaattttttagtttttatcagaggtcttgctgtgttgccagggctggtctcaaactcctggccttaagcagtttctcctgcctcagcctcccaaagtgctgggattaccggcgtgagacgctgcacccagccttaaatattttttgttgtgggatctccgtcttgttcattagtggcttctgtgtgccattggacaacttgcttaacttctttgggccccgttttcggtttttaaaaatagggacagtaatactgaccccgtagggttgcatgaggcttaagtgaaggaacgggcggatcaagaagtgcctggtccggcctcgggcctcttggcttcctctcgctggatgcagttggttgagttcatagtgaatgtggttcttcctgtgtctcagtagcctcccgtggtcacagtggggacggctgtaggggcctcccctgtgtcctcaccaccatggggatggcagggaggggagatcagtgcacccaggctgggaaacagaaggaagtacaggtgtggctcccgtcctgcgtgctcagcaccctctcagctgccctggtagcgtctggcatgaaagggtcgctggaagcagaggctgaatctcccagcaaagggtctgctgccctcctggctggagcgaggcaggttggattgctgggggctggcctctattccaagggctccaagtctgcttggstcttaggtcctgtccctgtcctgtgattatagctaagctgagtcttgtccatctgaggccatcygaggccacttacctcatcaggagagagcctcccccgactgttaagggacaaagctgctgcagagggtgggcacggagaaggggggstgtcctggagttgcccatggagtgggcacttccaactcgagcctttgatcttctctccgagtgccgkggcctgcggggacctgctcccggggtgcacactcttgtgcagcttgctgtctcccgggaattatgttaaggtcagcagtggctgtaccacctcttacggagcatgcttctttaaaaacgccttgctgccgattttggccagggtggtttaatagttaatgttaagggggaacagttagagagagtcaggagagtgtggggctatgatcatggggttcatctgtcacttgcctggtgacctcaggtttgtcactcagcttctgagaatctcgatttccccatgtgacagtggggtggtgagaccaatttcacagggatttgtaaagcacaaagcaaagtattggccatgccactggggcttcggaagagtcagctttgtcactagtgactttgatcaccagtttctcaataacgtccctctctccctccctccttttctgcgtctttccctccctctcttccctcctctttctcctttccttccccttccctcccctttccccttccctcttctttccactttacccttccctccccttccctcccctttccccttccctcttctttccactttacccttccctcccctttcccctttcctccaactttccccacctcctctccccctccctaccctcccctcttcctcccctcttcctcccctccccaccctcccttccccttcccttccctttcttttcttgagatgaggtctcactctgtcacccaggctggagtgcagtggcacaatcatagctcactgcagccccgacctcctgggctcaagcgatcctcccacctcagcctcctgagtagctgggactgcaggcttgtgcgccactgtgcccagctactttattttttctggagatggagccttgctacattgcctggactggtctcaaaatcctgggctcaagggatactcctactttggcctcccaaggtgctggggttacaggcctgaaccaccacgcccagccctgttttctacagggcagttttctgagtagtttataaaaatgtaatgagcttcctctgctccttcagaatgaagtgagtcacatattactccctggagggtgcagatcagatgatttttctttgttttctcttcaagacaaggaagcccatgactgtgccagcgggggaactcttcgggaattctttttggggaattactcttggagttcatggaaagatccattctgctattgctcatctgagatgtcagtgttgaagggagtgatgtttggcatttaaaaacaaataacatttcagatctttgttgcattgactgaaggaaaaaaagcacatcatacagtgttttggctcacagcttgttttcagctttcagggctggatatttgcgtgtttccgtaggttcctatgagatgccacttcacgaaaaggtctcctattagcttatttaaatgtccgtttaaaacttttcttagtggggcagggcgcggtggctcacacctgtaataccagcactctgggaggtcgaggcgggtggatcacctgaggtcaggaatttgagaccagcctggccaacatggtgaaacctcgtctctactaaaaatacaaaaattagcccggcgtggtggtgcatgcctgtaatcccagctactctggaggttgaggcaggagaatggcttgaatcgggaggtggaagttacagtgagccgagatcacaccactgcactccagccagggcaacagagcgagactctgtctcaaaaaaaaaaaaaaaaaaaaaaaaattagccgggcatgatggcgggtgcctgtaagcccagttactgggaggctgaggcaggagaattgcttgaacccgggaggcgaaggttgcggtgagctgagatcatgccattgcactctagcctgggtgacagagcaagactctgtctcaataaaaaatgaaataaaataaaataaaaaataaaataaaataaataaataaataaacttttcttagtggaaacatcttaacatttcagatctttgggtctctggaggggtgttggaaacagggttctcagcacttggcatgtaaatgggctgattttcgggtcccatcatgggcgtgcttacaaggacagctctgcccgcagatgggggatgttctgagcctgagagacgcaatgtagtggcctgacctgctgctggcctcccgggcagctccagttgtggggacacggtggtgagcttcattctgaaactgcagtcaaaggctcccaggtcacccagaaaacagaccagataattataataaagtaagaaaaatggcatctgacaaaaggcctgcagagtcattgttgtaaactcccccagagatcaaaaaacacaggtgtgggctagctcgggcctctgttcttctgtgacaagttatgggtgtcattgacgccccctttggaagctcccagagctcccagtggcctttgtgctcagagcccattcagcacaccccagtcatctgaataagcccagagccttgccattgtccccatggttgcccatcaaccrttcgccctcctgcaccgactgccagtttccatggttaccgccaccgctgtaaatgtgatctctgcgccatgggggagggggctgtcagcggctccatataaaaggtcatctccagcaggcagttaaaacctagcgcggtgctgaaaaccgggcgccagggttttgtcgcagttatgtcccttccttgagtcctgcagacaccgtgagcccagctttcctgctgagcaatgctgggaggaccaggggctggggtgggatcatgctgggaggaccaggggctggggtgggatcatgctgggaggaccaggggctggggtgggatcatgctgggaggatcaggggctggggtgggatcagagcagagagtccggactcacagaaaacaacccgtttgggaagataagcgggagaggtcgccgctgagccttgagccaggcatggggtggaaatggacattcagggtggtgggggcggccgctgggtggtgatggtcactcctggagcctggcgtgttctggaggagaggaagaggcacggttctggcttttaggagaggggtttgcagacggtggaggggttttatgtctgacagatgagaaggatccagaagagggccatcccgggccagcgcctaatggcttggggttctgagggacgmgagcagaggatgctgggagatggtgtcccaagggtgggggaccaggagcacgcgggaagctgcctcgatacagtttgagaaaattctgcaaaatctcccgtggtagggacggatgggggtgtgggtcatgttacatttcttgctcttgtgactcagtggtgaccgtccttgggacaagtctttgcatatctgtgccagggcttcctgaaaatagatatatacaattggatggatttatcgtgtttaaagcttgatcacattaccaaattgtcccaaaaaagtgctttgctgattgatattctcgccactggcatctaagcctgttcgtctatgtcctcacaggcttgatgttatcattgtctaagatttttgccaatctgatgggtactaagtagcctgtgattttcaccttcctctgattcctttgccaggaagcttcgtttcagatgttgactggctgtctgtatttcttgtggtctgccaattcctgtcctgtctcagttttcctctgtggtttctgtgtgggggttagcattgctgagcccaggagtgtaaaactctcccatgtttaactttttttttttttttttttagatttgcaacagagtcttactctatcgcccaggctggagtgcagtggcacgatctcggctcactgcaaccgccatckcccgggctcaagcaattctcctgcctcagtctccggagtagctgggattacaggcgtgagccaccatgcctggctaatttttgtatttttagtagagacagggtttcaccatgttggccaggctggtcttgaactcctgacctcaggtagtccacctgcctcggcctcccagagtgctgggattacaggtgtgagccaccgagcccggccccatgttttactttaatggtttataggcttatttcccatcatgggttgctctttaatttattgagttaattttggggtaatgttagggggcggaggcttagttttcccagttgtcttaatatcttttatttgaagagtctctcccaccatccctgaaatgccaccttttatcataaacctcattccacagccacaggagaggaagcgtctgtcacctccctgtccatgtttatttctatcccataccaccrgagtgttgttttttctttttcttttttttttttttgagacagagtctcactctgtccccagggtacagtggagtgggacaatctcagctcactayaacctccgcctcctggattcaagtgactctcctgcctcagcctcctgagtacctgggattacaggccccctgccaccacgcccggctaatttttttgtatttttagtagaggtggggtttcaccatgttggccaagctggtcttgaactcttgacctcaggcgatccatccgccttggcctcccagagtgctgggattacaggcgtgagccaccgtggctgatcccactggactatcttttttttttttttttttttttgagacagagtttcgctttttttttttttttttttttttttttgagacagagttcacttgttgcccaggctggagtgcagtggcacgatcttggctcattgcaacctccacctcccgtgttaaagtgattctcctgcctcagcctcccgagtagctgggacttacaggtgtgcgccaccacacccagctaattttgtatttttattagagacggggtttctccatgttggtcaggctggtctccaactcccgacctcaggcgatccacccaccttggcctcccaaagtgctgggattacaagcgtgagccaccgtgcctggccccaccagactatcttaatcacagttacattctagcatattctgagaggtggtggagcacattttctcccattgttcttttacatagttttcttagattattctaatgggtactctcttctgtgtgagctcaataaatacattataaaggtctgttgaattagaaaagaaaaccccataggaatctggtgagaataacattgtgtttaaggattactccatgtagtaggttgaacagtgtcccccacccccagaagatatgaatgcccagaacatgtaacatgacttatttggaaaaaaagtctttgtagatataactaaattaaggatttttgagatgggatcatcctggattaggggccctaactccaatggcaagtccttctaaaagwagagagcaggagaatacacagacatagagcacagagaatgtgtgaagaccagagagtaggatgatgtagccccaacccaaggaactcctctggctactaccagagacccgggacagaggcctgggacagattctcccggggagagagattctccttgccagactttgtattaagtcccaggtatacaacattgtaatggaagtcttagtcaatgcagtaagacaagaaaaagaattgctataaacattgaaaaggatgagataacattgctgttattcacagatgataaagttacgtataaagaaaataaaataaaacatgcaaataaatgattaaataataagtgctttcagcaggattgctggatacttatagtgaagtgaggcataatgatgtttctgtcaaggacgggctgcatataggatggtggtgtcatatgatgataatggagctgaaaaattcttactgcctccttgcagtcacagccatgatagtgtcatagtgcaacacattactcatgtgtttgtggtgatgctggtgtaagcaaacctgtgctaccagtcgtgtaaaattctagcacacacggttatgtatagttcataacacttgatcattataataaatgattatgtcactggtcatttactgtatgtatttactgtactatactctttattattattatttcagtgtgtactccttctacttacatttaaaaaaaaaaagttaactgtaaaatagcctcagtctggcccttcaggttttccagaagaaggcattattagtatagatggtgacagctccctgtgtgctgctgcctctgaagacttcccgatgggacaagatatggaggtggaagacagtgatattgatgatcctaaccctgcataggcctaggctaaggtgtgtgtttatgtcttggtttttaacacaaagtaaaaaaaaaattaatagataaaagcttatagaataaggatataaagaaagaaaaaatatgtatattttttgagatagagttttactcagttacccaggcgggagtgcagtggcgtgatcttggctcactgcaacctccgtctcctgggctcaagtgattttcctgcctcaccctcctgagtagstgggagtacaggtgtatgccaccacaccaggctagtttttgtgtttttagtagagacagggtttcaccatgttggccaggctggactcgaactcctgacctcaggtgatccacctgcctcggcctcccaargtgctgggattacaggcgtgagccactgtgcttggcccaagaaaatatttttgaacagctgtacaatgtgtgttttaagctaagtgttgttacaaaagagtcaatttttttttttttgagacaaagtctcattctgttgcccaggctggagtgcagagtkcagtggtgccatcttggctcactgcaacccccacctcccgagttcaagtgattctcctgcctcagcctcccgagtagctaggattacaagcttgcaccaccatgtccagctaatttttatatttttagtagagacagggtttcaccatgttggccaggctggtcttgaactcctgacctcaggtgatccgcccaccttggcctcccaaagcgctgggattacaggcatgagccaccatgcccagccaagaaattttttaaattaaaaactttataaagtaaaaaagttatggtaagctaaggttaatttagtatcaaataaagaaaaaaatatatattttttgagatggagtttcgctcttgttgcccaagctggagtgcaaaggcacgatctcggctcactgcaaccttcgcctcccaggttcaagcgattctcctgactcagcctccaagtagctgggactataggcgcccaccaccatgcctggctaaacggggtttcgtcatgttagctaggctggtctcgaactgctgacctcaggtratctgcctgtctcggcctcccaaagtgctgggattacaggcgtgagccactgtgcccagccaagaaaaattttctgtataaatgtagtgcagcctggtgttcagtgttgataaagtctgcaggagtgcacagtyatgtcctaggccttcacattcactcaccactcacccacttacccagggcaacttccagtcctgaaaccttcattcctggtaagtaccctatataggtgtactgtttttaatgttataccatgttctcactgtgccttttctatatttagatatgtttagacttacaaatatttgcctttgtattacagttgcttacagtactcagtacagtaacatgctgtacaggtgtgtagcytggaagcagttggttataccacagcctaggtgtgtagyaggctgtaccagccatgtctaagcctagaagcagtcagttatactacagtctaggtgtgcagtaggctgtaccagctgggtctaagcctaggagcagtcggttttaccatagtctaggtgtgtagtaggctgtaccagctgggtctagctaggtttgtctaaggacactctgtgatgttcacccaacgatgaagtcatctaacaaygcatttctcagaatgttttccccagtctttaagtgatgcacgattgtactgtttttaaaaatgtgtttctgtgtgctggcaataaatgaaaagtgaaatatataacctacaatagtataaaaagataacataaccaagaataaatgtaatgaaagatgggcagaacactataaaatgttactcagagaaattcagggctgggtgcagtggctcatgactgtaatcccagcactttgggagaccgaggcgggcggatcacttgaggtcagtagttcgagaccagcctgccaacatggtgaaacctcggtctctactaaaaatacagaaattagccaggcgtggtggcatgcctgtaatcccggctactctggaggctgaggcatgagaattgcttgagcctgggaggcagaggtttcagtgagcctagatcataccattgcattccagcctgggcaacagaatgagactacatctcaaaaaaataaaataaaataaattaagaaggacttaaataaatggagggcttaacaatgtttatggattagaagactcaatgttatgaagatatcatttcttcccagactggtctgtagattcagtgcagtgccaatcaaattggtacagaataatttagaggaagttgaaaaaaattgacaatctgattctaaaatttatctgtaaataaaattggctgagaatagccaaggccactttgaggaagagctgaggtgggaggacttggttggctggatgtcaaggcttgttatagagccactgtaattaggagagtgtgtcattaagagtggccaaggatagccagataggccagcggaatggaagagagagcccagaaaacaggctcaacatatttaacagtgtagccagtcaagtcacaaggaataamgaaatcatagagctgaattgtcctccgcgagggtagattgtgtgtctgcctttttttctgaatctgtttcattcttaatattcttttttgacctgttttccagtttactagcttgcttagctgggtacaatctcatcttactcggagaagtaaggtattagtgtgttctcacmctgataataaagacatacctgagactaggtaatatataaagaaaaatggtttaattgactcacagtcccacatggctggggaggcctcacaatcatggkggaaagcaaaggaggatcaaagtcacatcttacatggtggcaggcaagagaaagcttgtgcaggggaactcctctataaaaacgtcagatctcatgagaccttgttcactatgacgagaacagcacagaaaagacctgcccccataatttagttacctcccactgggtccctgccacaacacgtgggaatcgtgggagctacaattcaagatgagatttgggtggggacacagccaaatcatatcactaatgaaattttaatcttttttttttttttttgagacggagtctcgttctgtcacccaggctggagtgcaatggcatgatcttggctcactgcaacctctgcctcccaggttcaagcgattctcctacctcagcctcccaagtagctgggattacaggtgcccaccaccacacccagctaatttttgtatttttagtagagatgggttttcaccatgttagccaggatggtcttgatctcctgatctcaggtgatccacccgccttggcttcccaaagttctgggattacaggcatgagccaccacgccccrcctgtttttattttttgagtcagggtctttttctgctgcccaggctggagtgcagtggtgccatcatggctcattgcagcctccaactcctgggctcaactgatcttcctgcctcagcctcccaagtagctgggaccacaagtgtgagccaccgtgcctggctaatttttttacttttattttttgtagagataggatctggctatgtttcccaggctggtctggaattcccagcctcaagcgatcctcccatctcggtttcccaaagcactgggattrtagacacgtgctttgtttagtctgttctcttacatactttttctctcccagagaaatattaaatgttttccatgctctttttgtctaccttctaatattttgtcctgttaccaagaacctggtttttttctgagacagagagtcactgtcgcccaaactggagtgcagtggcatgatcttggctatcttggctcactgttggcaacctctgctgtcctcctgggtttcggccgagcacggtggatcttgcctcgagcgattctcctgcctcagcctcccaagtagctgggattgcttacacrcccagctaatttttgttatttttagtagagacggggtttcaccatgttggccaggctagtcttgaactcctgatttcaggtgatctgcctgcctcagcctcccaaagtgctgggtttacaggcgtgagccaccgcgcctggccccaagagcctgtttctaatctggaagaatatatatccagrwgggaataacacaagctaccagtttttaaaacaaaggggtgcatttttatggaaaagaaaaaagaggtaatttctgtccctggttgaaattgggccagaaagactttgcgccgggaattaaagcaggactgtgtatcagtgtgccccatgttgttagtgtacatagataagaaacacgtaactgagaccattgagggctgacatattttaaaggagaattttacaatgagaagtggaacttgtgttttgaaatgagactagcctgtgaacgtggagatcttctgtctggtagcatctggcatgttggccggcttcattcctggaggaatgactgagcctgcagacctgctggagcctgggaagcagccccgagggaacgtcctgcttctgccattgcaggtcgcagcgccctgaccgttgccttctcgtggcagttgtttccttgtgtgtcttagctcagccttgcccagccttttgctaagcacttgcgaggtgctggtgaaacagacgtggggtgaagcctggaaagacatcacttacctgaaaatattaaaaagaatagagaggcgcgacatcgtggctcatgcctataatcccagcactttgggaggctgaggcagatggatcacctgaggtcaggagttcgagaccagcctggccaacatggtgaaaccccgtctctactaaaaatacaaacattagccgggcgtggtggcgtgtgcgcctgtaatcccagctacctgggaggctgaggcaggagaattgcttgaattcgggaggtgaacattgcagtgagctgagattgtgccactgtactccagcctgggtgacagaataacaccctgtctaaaaaaaaaaaaaaagagagagrgagaatagagactatgtttcctttctgctagttcacaagaaaracttttaaaaagttactttctcacggctgggcgtggtggctcacacctgtaatcccagcactttgggaggccgaagtgggcagatcacaaggtcaggagtatgagaccagcctggccaatatggtgaaaccccatctctactaaaaaatacaaaaattagccaggtatggtggtggatgcctgcagtcctagctactcgggaggctgaggcaggagaatcacttgaacctgggaggcagagcttgcagtgagctgagattgcaccactgcattccagcctgggcgacagagctagactctgtctcaaaaaaaaaaaaaaaaaagtgactttctggctagatttctttagtatagtggcactcagatggggctgcttttccccctaggagacatgtggccatgtctggagatgtttcggttgtcacagtatggagggcggtgctactggcatctggtaggtggaggtgggggatgctgctctgtgtcctggccatgtccaagggcccggggtggagaagctgcctcaggagacctggcgagcatggatgttggggggccctccatttgcaggcgtctcctgacttccgaggtcctgaacttgtaggggaacaaaatcccccgcctgtgggtgcagaggcagccctcaggtggccttgggcaagtcactggacctcctgatcctctgaggcctggtctgtagagcagcgaaaatgacacctggccatttggactgcctggaggatcagggtgcggcacgtgcagcagccccaggccagctgggtgctcgatggtgggtggttgttcacargagcggcaaaaccagaaactcactctgcaccctgtggtggctgcaggagttggttttgtagatttttctggtattttaaagtgtccccgcacacccaccactttcctgagtctgcagctgtggcgctcacagccatgcctgagggaggctccaygacgctcactctgcttagaacatttccctcccaggtcctgcttgaaaagtgggtttcggttggctgatctcaacattttgggaggctgaggggggcggctcgcctgcggtcaggagttcgagaccagcctgaccaacatggtgaaaccccgtctctactaaaaatacaaaaattagccagacgagatggtgggtgcctgtgatcccagctactcaggaggctgagggagaagaattggttgaactcgggaggcggaggttggagtgagccaagattgcgccgctgtactccagcctgggtggcagagcgagactctgtctcaaaaataaaaataaaacaaaataaaaataaaacctctccaggtgaccctggggaatccctcttttggctcctgtctcatgagatggaaattagagggcaggaccctgtgtgtctgagtgtgtcttatggctggaggagagcaggacccatgcactccaggtagaagtgccatgtcgacatgtgtacactttgcacttgggaaygttggttctcagaaagcggctcactgggtctctgtgcagccctgtggggtggccacgttaggtgttcccactgcaggggcggatgctgagatggccaggaggacgctttcccactaaccaggctgggcagcgcatctggatctgggagtttattgtccttggaacctggaggccacagagtgcaggaaggatgggcttttttttttttgagaaggagtcttgatctgtcaccaggctggagtgcagtggcgcaattttggctcactgcaacctctgtctcccgggttcaagcaattctcrtgcctcagcctcccgagtagctgggattacagatgtgcaccaccacgccccgctagagatggggtttcaccatgttggccaggctggtctcraactcctgacctcaggtgatccacctgtctcggcctcccaaagtgctgggattacaggtatgagccaccgtgcacggccaaagatgggcgttttcctggcagagtctgagctgcccccaggagctggtatgagagaaacccagctctgtccaagtgtgggccatgtctctcctcttagttaggggcagtctggggccaccaggggccctcagaatccaagcagtggatgtcccgtagttaggaggggcgccaggagaggtttggggcccccaagcttggggccttcttctccccagcttcagcaagtgcttcacggtggtgacggattgcaatttcttctcaagccaggacaggagggtgggaaggccgggtgggttaatagtcaaaagtgccctcgtcagagagcatggcatctccctgccccactgagccagggggaaggtgccccaggacaatgaccagctggtagttttgattgtgatgacgaggaattggggacaagaacagtttgttggcttatcattacaagcagaggaagggcacttcgccatccccaagccgggttccaaacgggaaataatcgtgcatttggaagagctgaattgcagttattctttgggttagtctgggtgaccagcaggaaggtggccctgccctgccatggggtgtgggtgtgtctgggggtctgagctgacatgtcccttactgccacggtgaccccaactgctgcatgctcaaaagggcagggctgggctgggcgtggtggcttccgcctgtaatcccaacactttgggaagccgaggcaggcggatcatgaggtcaggagatcgagaccatcctggctaacacggtgaaaccccgtctctactaaaaatacaaaaaattagctgggcctggtggcgggcgcctgtagtcccagctactcgggaggctgaggcaggagaatggcatgaacctgggaggtggagcttgcagtgagccgagatcacgccactgaactccagcctgggtgacagagcaagactccgtctcaaaaaaaaaaagggcagggctgtggcacgggagtggtcactgctgtgccgtagaaactgctgcttctggggactttccactgtggygcggggggtgcgtttgttctttttgtgtccctcagctaggcctgtggggcttccctctggcctgtgccgagtccagccttggtgtgggttcaagccgtgttcctgccgaaccgtcccactgagctcactggcacgcacgcctaggtgcacgctctatggcactacggtggcctcctgtgcygcactcgccggctgtaggcgagcagggaagctgcgggcttaggagcaggaagggctcagctccttagtgggactctcatcccccaagaccatccccctgtccccaggagggcagggcttcccatgtagcactggctctggggactatctgggggtcaccttcacctcccactgtcatgagtttcagtgagacaataggatggatgccagccctgagtggctgctgaccacagctgcttcctgctgtcacccagctgctgtcagcctgcagagccctcccctgaaactgaggtgcagggcaggacccctccccgtgcctccactggtacttgacacccctccctcacgmccctgtcagctgatcctgtcagcaccctggacatccctccccacacccccattagctggacacccctcccctacaccctcatcagctggacacccctcccatatacccccattagctgaacacccctcccccacaccctcatcagctggacacccctcccatatacccccatcagctggacacccctcccccgcaacccccagtagcaccctggactcccttcttcccaaccccttcagcactttggatacccttccctctacttccgtcagtatcctggactcccctccccaatacctcccacctgcaccctggactcccctccccctcaccccccacctgcaccctggactcccctcccccatacctccaatctgtaccctggactcccctcccccgcaccctggactcccctcccccgcaccccccacctgcaccctggactcccctcccccgcaccccccacctgcaccctggactcccctccccctcaccccccacctgcactgcaccgtggactcccctcccccgtggggctcaccatgctaattggccccatttgtcttttccaccaggccaaggacaccttgagggcaggactgtggttttccctcttggcatccctagatctcagcctcgtacacacagggcccgcaaatgtttgttgaattaatgagtgacagcaattttaattagagtttctttgcgtttaggttgcagattagaatctttaaaaagatattataccaaatagtttttaattatgaatgaattgcagacatcgtctgcaattagctcgagaactgaaatcctctttcaggacccttggggtactctaagagggaaatccaatttgttacttgtaagtcatctcttaatcatgcaatagcaggatatgtgatattagcgtcagctcttccatctctccagatctgagccaaaggtgccatgggaagaatttggagctgctgttcttgagaccttgggtgtgtggaagygggagtgggagtgggagtgagggcaggaagtggagggggcagggggcgggagcagacacacagtaggtgctcagtaaacgtgtgatgagtggggagcaggggccagaacagaaactgttggagagaggtgggggawtatgggcctggaggcatttcagaagacatcctgtgtggacgtgtcctgatgcatgactttattttaatttttttgttctgagacagagtcttgctctgtcgcccaggctggagtgcagtggcacgatctccgctcactgcaacctccacctcccgggttcaagcgattatcctgctgcagcctccygagtagctggaattgcaggtgtgcgccactacgcccggctaatttttgtatttttagtagagagggggtttcactatgttggccaagctggtctcaaactcctgacctcaggtgatcctcctgccttggcctcccaaagtgctgggattacaggygtgagcccctgcrtccagcctttatttttttttgagacagagtctcagtctgtcgcccaggctggagtacaggggcatgatcttggctcactgcaacctctgcctcccaggctcaaacaattctcatgcctcagtctcctgagtagctgggattacaggcgcccaccaccacgcccagctaatttttgtatttttagtagagatggggtttcaccatgttggccagtctggtctcaaattcctggcctcaagtgatccactctccttgcctcccaaagtgctgggattacaggcgtgagccagcgtgcccggccttgatgcatgactttaaaaagtacctgaggccgggcgcggtggctcactcctgtaatcctagcactttgggaggccgaggctggcggatcacgaggtcaggagatcgagaccatcctggctaacacggtgaaaccccgtctctactataaaaacacaaaaaattagctgggcaaggtggcgggctcctgtagtcccagctacttgggaggctgaggcaggagaatggcgtgaacctgggaggtggagcttgcagtgagccgaggtcacgccactgcactccggcctgggcgacaaagcgagactcagtctcaaaaaaaaaaaaaaaaaaaaaaaaaagtacctgaaaggttagagcatattaagagcagattagtttgggccacgacacatatcactgtcatagacaaacgacacaagcaggacatgctgaacaaaacgggttcacgtttgcagaacagggttctgtttctccctctgcggggtctgatggctccagtgcgcccatttccccagactgtgggaggcactgtgcagaacctgagcgtcaacggtccccgccacacaaaccccatgggcgcagacagcacaggtgtggatggagaggtgcatggagcctgctggccgcctgtcttggagatgagcttttgctcctcggcaatttggagatgctcagccagccagattttattttcagctttacttgtgacgttcacttctctcccggatcctccataatgagccagacagaagctgcctggcggccccgcatgcagcctcccaggcayatgggcctcctcccgtccaaacggagctttgagtctttgcttgaatcttcttactcactggtttcaaaataggcatccagctcattagcctcagggagagggagttgggggcgccactcacaaaggcctgggaagaggaacccgagccaaggtcaggatggagggcttgtcttccagcagaacccaatgtgaggtgagagtttttgttctagtctttgaatrctggaaacgaatctcaccatctggaggtggcaggggagagaggcctgaaagaaataaattaaaatactcaactacagaaaaacctcgaagctgcaatcaagacaaaagcaaggatgctaacacacacactttctctgttggctaaaactgagtgttttcacggggaggcctgcgtcatctttctctcaggtttcttccacgagagcctctagttaatcatctcaaatgacccttctaatgtcatgctgaatcagtctcttgaaatttaggactggaattttctcagcaaatatttaactagaaaaacgaaatctcagcttttctgttctcagcagtttcaatgcaagttgcaaattaatagacgtctgggccaatatttgatcttttcccccaaagaaaatgatttgctcgccattcactaaattggagggaggcgtccctggaagtaacaaggatgatatccttgttcctggaggtgggcttcggtagtgtttggagacctcaggcagcagccggacctccccagcacctgggcggggtccctgtgagcgctcactccagcatctctgatggccacagggtctctggggcagaacccccatgcccagccaaaacaggtgctgcagtgagtgggccaggtagctctcgtggtatgtgagcgcagctgccccttgccaggctgtcccgggctgcccccagctctaacttgaggcactaaccctatcaggggtcagtggcttaatatagcctctccctggtatttgcatttcaaaagaggtctctgtgaaattattctggaagggatttcagggcccctgagtggggacacrtttcaggcctaggaggggtggctcctccaagttcctggcagatgctgcagcctgcatttctgaggagggctgggcccgaggcagctgccaccatgggctgggctgggctggtggaaggagggactctgtcccctgcaggaccctcccagcggtcttgcttgggactgagcagctggggctggtgggccctgtggatgccaggtttactggtgcccagttcagacctcggacccgtccccaccrtcgtaayggctctccccagcagctccccttctcttgccctgtacccttggatttctgggcggaaggcctggggcgctcctccctacaggtgagtctgagagccagggcagagcgtgggagcccgtgggagcctgggaatgttctgtgctccgtgaaattgacagttgtgctcctttacctggaggcaagggatgtggcttctgagcctgttggtgccagtgcctttgttgttacacctttgctcttaaataggtacaaattattggtattagaaagccttgcagctccatatcctcattaagcctctgcagttaataattatttttctctcctgaaagtgttggtgtgaaagagctgagtagacacgtggagactgcaggcctcactctaccttgkcaggaagatggcgacctgcatccccaacagacagctgtgtgtcctgggcacagttcctgagcctttctgggccccacatcccttgtcactggggtagcagaatctgctctgcctccctgggtggttggagaggcaatagcagataatgggagcaaagacttacatagctcttgcaatcctcaggggactccaggaggcaggaaatccaatcacccggttttactgatgaggaaaccaaagcacatagaggttaagtgacttgcccaagttcacagaggaagtgggtggcagagtgggattgtcagggaaagcaccttgaatggaaaacctgtgggctgccactgcactccagcctgggtgacagagcgagactctgtctcaaaaaaaaaaaaaaaaaaaaaaaagtcaggaatagcatgtttccataaagagggtgtgctcaactgtgaggaccgcgccctagacacccagtgaggcgggtctcacagtttgtggcttatgttaattaatgtctcatcattaatttattaataaggttctttctaaagtccttgtttttaatgtaatcaaaatcatactttttcccctttacgatagtgtgttgtgtgtcatgtttaagaattgcttacctatctcaagatcataaacatgattttgaatgatctttgctaaaataggctttgtctttcctgcttaagtccttagttcacctggaattgatgtttgtgcttggtgtgaggtagggatccagtttcactttgtccgttatgtagacagctgagtggcttgggaccatgtgtgggaatgctcctctttcccatttgccagctctgttgtgtgtgcgtgtggacctgtttctgggctccatcttctgtccatcagtctgttggtctgctccatgccagcactcccttgtctacaggctataaatcttgacatcagatagagcttgttcccctcccctgttctccagggatgccttggctattcttgacctattggtcttctgtggagattagagaatcatcttgtgagttccctatgaaggaccctgtagataattttcttttttttttgaggcgggattttgttctttcacccaggctggagtacagtgcacaagctcagctcactgcaacctttgcctcctgggttcaagtgagtctcgtgcctcagcctttcgagtagctgagtttacaggcatatgcaatcccactctgccacccacttcctctgtgaccttgggcaagtcacttaacctctatgtgctttggtttcctcatcagtaaaactgggtgattggattttctgcctcctagagtcccctgaggattgcaagagctacacaggtctttgctctcattatctggtattgcctctccagctacccagggaggcagaacagattctgctctggctgatggcccttcctctstcttcagggccascagcatagaatcccctgacttcctctgtccccataagctctttctcccactcttcctccctcctctgcttttaaggatcctgtggccacccagatcctccaggatactctcktgggttaaggttgctggtgagcggccgtgcccctgtgccatgtggcataacgcagtcacagcttctggggattgagacatgcagctctycttgggaagtgagggtgagacattattttgtctaccacacatggccatggccaagatttataaaagtcagccgggtgcagtagctcatgtctgtgatcccagcactttgggaggctgaggctggtggatcacctgagctcaggagttcgagaccagcctgtccaacatggcgaaaccccatctctactaaaaatacaaaaattagccaggcttggtggcacatgcctgtaatcccagctactcgggaggctgaggcaggagaatctcttgaacccgggaggcagaggttgcagtgagctgagatcacgccactgcatgggcaacagagtgagactctgtttcaaaaaaaaaaaaaagatttagaaaagttcaaataactggggcagcacagggttgccactggggagctgcagcagctgcgggtgcaggaggtggtggactccatggtgaagagtctggagagagagaacatctggaagatgcattgtctcatgttctggtgcagcaccagctgttgtgaggacagtcaggcctccacggagcaggtgcaccagtgcatcgagtgccaccatgtgcctctggcttaagcccaggctttgatcaccagtgagctggagaagttccaggaccacctggtccggtgcaccaygcattgcaacgacaaagccaaagattcaatagatgctgggagtaaggagcttcagttgaagcagaagctggaaggtggtgtgaccaagtgtgtggatgaccacatgcacctgctcccaactatgaccgagaaggtgaaggaggctctctcatccattgggaaataaaagtctttgccagtggccatcggggctgagggcaataatgtattttttataaggaattgggaattttagtctttttttttttttgagacatggtcttgttctttcgcgcaggctggaaggctggagtgcagtggcacgatctcagctcactgcaacctccacctcccaggttcaagccatttttctgcctcagcctcctgagtagctgggactacaggcatgcaccaccatgcccaagtaatttttgtatttttagtagagacagggtttcaccatgttggtcagactggtctcaaactcctgaccttgtgatccacccgcctcagcctcccaaagtgctgggattacaggcgtgagccaccggacccggccggaattttagtcttttaagcaaagtttatgaatgaagaaatgaaggatggtcgtaagtgtaaagcatatgtcacttgcctctggacactggttcttttatgttttagtcctaaaaaatgaaacggaaaaaagtggtgctaaattgggtcagagatattacaggagagttttagagcttatatttcctgtggccagtgcttgtcctggcagtaaggatctcccctgtaacaagycagagcccccaaggcaccagactcttcttactacacaggtaccaacaggctggcaggttagagttggtggagtttgcagagagatatttcctcttcgttgccaacatcctgtttaccagaagtgtttctgcatcaytttccataagctgtgaaacaaaatccatgaggtcactcacttagaagggaaaaaatgttttctgtgtctttgttttcctggttttgtgtaatttatacaagggcatacaagttgattttaagatgtggaattgggagggaaactcatttggataagaactttgaaaggttccttatcatttggataagaactttgaaaggatccccatttctggtcatcaggatgtggatgtacttttcttaaaattttgacatgctgcatcttgagacatggacctcttcttgggaggtgagggggagacattatttcgtctaccacagcttggagaccatgcaaaaacatgacaggcgacgacacactaattgtgggaagcagaattactggctgatgggccttgaggctgtgtgtagcaaaacgacaggacaatcttgcagtaacactttgcccgtgaagagaaggggattttgattgtgatacatactagtatataggagtgaacagtagaagaggagcatttggctacttgattataacagagttatgaagtactggatttggaaaaacctggtttttgtagaacagatggaatgaagacctaaaccgagcattgcctacttagcccctgaattaasagagtccagtcgagacaaacccctggcaacaggaaattcaagggaggaaaaggaagcaacttgggctaggatgagctgactccctgagagtgaaggagaggcagcccycgttaccaaataccatttctgcctggggctttcgcagcttgcagtgttcctgctccggcatggcaccttattgttttgatagcaacctcattgtattctcaccagcttattacttgaaatgataagacagcctgtccatttgctgcttcccggctgtgatatattttcctagtggtttggttttaaaaataaataaggtttaattttctacccacccccggcccccccccaaaaagtccaaataaccacaaaaagtctcagctcactatccctggcccctggaacccagcatctcctgcccagaggcagctgtggtctctggctccgtgatgagcttgtgggggacatggctgcagtgccggttcagccaccgtgggtagctttttcccaaagacgaggcatctgcttgaggctcacctggagtggtaggggcttccagggcagggcccagacagttttcccctggcagctgccgcagcctttctgcacaggagggccttcgggctcrggggtaggagcggcttgacgcaggttggtccctggagatgagtcagcatttcagaggcactgctgacaagcatgggggtcgggacagacctgagtccagcaggtcattttggagggagagaagctcccaggattcagcaaaaccccgggagcgtccgtcggcggatgctgcaccagccgcaggtgtgagcatgcgagactccgggcaaggagaagaggaagatggagatagtggcacaggggcacgcagagggaggccgagggtcacctgctgctctggccattgaggtggctggatgaggagcctggctgggtgctggatagcacttttagacctggagcctggaatgttccagactggccctggtcgttcctgactccctgggcctgcggtgagcagtggctgaagagcctgagagctctgagcaggacctgctgcagggctgggttgggctcgttgctgtgtttactaagacgtctcatcttcggctgggcackgtggctcacacctgtaatcccagcgctttgggaggccgaggcggacagatcacaaggtcaggagttcgagaccagcctggctaacatggtgaaaccccgtctctactaaaaataccaaaaaaaaaaaaaaatttagctgggcatggtggcacgcacctgtaatcccagctacttgggaggctgaggcaggagaatcgcttgaacccgggaggcagaggttgcagtgagccgagatcgcaccactgcactttagactgggcgacagtgygagactccatctsaaaaaaaaaaaaaaattctcatctttattgtccacagytctcttgggctggcagtggctcgtggacacgtcgggccagggaacatatggttgtcccttggcaggtgctcagggccgcattgtcatgctggaaggcatcatttggctcagaaccaggtgcccacttgttctttgaaatttgttttgtcgtttaatctttgccttggggaatttggcccatttttccaggacgagggcagagaggtggctttctggttctggcagggaagagcgaggctggaatggctcccctttggcccagcccgtgtcaatctctgggctcagctggcaggggaatgccccagacggcgctgtcgggaggcgcagaggcccgagtggtctggcaaagccgggtgctgagccaaggagccctgagctcggtgcttcccgggcycctggtacctgctgagagtctcaggccggaaggggtccagaggtttgggtgatcatttccgagggctgggttttcagctggtgtgctgctgccctggcaggtgttgtctggagacatgtgtggtcatcatagcctggggtgggggtgctgctgacatccagtgggtggaggccaggggtgctgcccagcatcctcccgggggctggcaccccacagagagttacccagcccccacgagagtccacagtgctgccatggggtacctgtcctggaagctgaagcccgggggttcctcctttttcttcttatcttaaaacagcattggccaggtgccgtggctcaaggctgtaatcccagcactttgggaggctgaggcgggtggatcatgaggtcaggagatcgagaccatcctggccaacatggtgaaaccctgtctctactaaaatacaaaaaattagcctggcgtggtggcccacgtctgtagccccagctactygggaggctgaggcagggaaatcgcttgaactcgggaggtggaggttgcagtgagccgattgtgccactgcactccagcctggtgacagagcaagactccgtctcaaaaaaaaaaaaaaaaagccaataaaacaaaacaaaacaaaaaaacaggctcgttggccactcagcgtctccccacaggagttcccggcactccccaacaaggggtttcttgtggtcagacgtttggattcctgttcagsaaacgaatgccttcagattgttctgtgaggacttgaagcaaagcagagacaacagaaggctcctgataaactccaggtgtttgatccctgtcgaagtcccggctggtgccttcactgtggcgggtgggcctgtgtgggcttctcccatgatatttagctcatggtrtaaacagatggcgactttggctctacccaagccatactcagcatctttaaggtgggggagtttggtgtctccagggtcggaaggtggcttcctgctcttggaaggagaagtrgttccacgtcttagaaacctgttcatttctgacttcattcgacagcttggtttgaaggaaatggttcttgaaatgccctttagaatcgctttctccttttgtacaatgtcacgccaaaataagacaaatttttactaagaatcaattcttaactctttttgccttttaaaaaaattgaggtgaaactcacatacgataaaattaccactttaaaatgaacacttcagtggcatttgttacattcacgatgkgcaacctctccytctgtgcagttctagaacattctcatcacctgagaaagccccatacccagtaagcttaatcacttcyggtccctcttgccccttgcgcttggcaaccagcatggcttctgtctctgtggattctgggtgtttcatatcaatgaaatcatgattatgtggcctttcgtgtctggcttctttcacttggcggaaagtttgtgagtttcatgcacgttgtagcctggtcagtacttcctcttttttttttttttttttgagacggagtcttactctgttgcccacgctggagtgaagtggcaccatctcagtttactgcaacctctgcctcycaggttcaagcgattctcccacctcagcctcctgagtagctgggaccacaggtgtgcaccaccaygcctggctaattttttatattttggtagasatggggtttcaccatgttgcccaggctggtctcgaactcctgagctcrggcaatccacccaccttggtctctcaaaatgctgggattacaggcatgagccaccgcgcccagcctacttcctctttatggctgaataatattccattgtatgaatggaacatactgggtttgtccattcatacattggtggacgtttgggtttccactttgggttattgtgaataatgctgtggtgagcatttgtggacaagttgtgtggatgtatgttttcaatttttttgcattgcacctagggatagaattctgggtcatgtgttaattctatgttgagctttgtgaggaagcaatccttaactcttaaatgaaagttctgcctcctgacaagaatgcacttgctcaacgtctcagcccacaacttctttaggctggcgttgggctggctatgttgatgtgtgaacacaccttcctggggcacagtggggcctgttattatttcaggcttccagaaggttccatcaagcagagacatgatgagctgtgttggaataacakggaacaacttaatagtattaaatcctgaattagattctaacttctgccttaggatatgagctttattttgtacatgaaatcaggagagaacatttcttaataagtgttatcgaagattatgtgattttaccataaataataaatgtgggagtgacattgagaaggaggttttagatatcttcgtagcttcatttctccttgtttcttccccccccattcgtttctttatttttaattgcaataaactttataaaacgaaccatcttggccatttttaagtgtgcagttcagtggcattaaatgcattcacattgtttcatgggcgtcaccaccatccacctccagaacttcctcatcttcccaaactagactctgtgccaattcaatgccacctccccacagccctcccctagtccctggcactcaccatcctactttctgtctctgtggatttgactgttctcgggacctctcgtaagcagaagcagacagtatttgtccttttgtgaccggcctctttcactcagtgtgatgtcttcaaggctcatctgtgttgtagcgtgtgtcagggtgtctgtcgtttttaaggcctccttatttcttgtgctacctgaagttgggtttttttcagtaataataatgtgtaatgtttatcctgaytcatctaatgctgagggyctggggatgtggttctttcgtgctctcctccatatcttgtgacagaataattcttgtcatttctaggattttataatttaggagacgaggaaggatgttaagtgaataagtgtgcctttgaaacagaataatgcggcaagataaaatggcatttgtgtttgaatgatttgaagctctagaagcttttcagagcttttaacacgctcctcatttgcctgttgatgggcttcccagggcctgcctgtgcgtttccatttgatttgtgcttggccatgggagaagcggcttgctgttcttagcagatcccggcagcctctccaacaagttaagtgacctgcctgggacctgcagcttgagttcagggtggatgacagagtgagactccgtctcaaaaaaaaaaaaaaaaaagaagtagagagtagaataatggtcaccagaatctggggaggtgaggaaggaggaagagggggttggggagagattggtcaaagagtacaaagttacagtaggatggcaggaataagttctgttgctctattgtacaataggatgactatggttaataatattgtattgtatatttcaaaatagctagaggaaaggattttgaacattcttaccacaaataaatgataaatttacaagtaatggatatattaaatacacttatttgagttttacacaatgtctaggggtcaggaccaggcatcgggaccagacactggggcagggttggggtgggtgctggcygccgggggtgcttstctgaggctaagactaggtgggaccaacgggaggatgtgtgaggacccacctgcagcagcccgaggggatggcagtggtggggttacagagtgtggacttggattccaaagaggagaaaccagggaaaccaagatgtgggcttcctgggggtgtcaggagggctcctccttctccattgtccagccagtggcacagatggggacaaggaggactaggaggctggctctgctctccccagccctgcccccgggcagagctgcgccctttaccttgactgcaaggttaacacaggactttgttcccgaggcatcgtgagcagcacgtgggcctttctacagtccggcttgctggagacgctcgtgmtgggatgagactctgctctcctgggtccgaggctcactcttcctctcgtggcttgacatcctgacatgcgccgcacacccaaccctgaaagtgcttgtccccttgttcctgtgacgtgaacctgcattcgtgagacgcaggtcctagattgttgcccagaaaggagaaaagccacacgccctcaggtagcaggatcaacacatcgcacctgttgtctggccccaatctggcctctaaaacaaaacaaaacaaacccagaagagagagagacgcacacagccacttcaaagttccctggctttgaatgggagccaccaggagccaccaagcagggccctccctgcctgctgtgaaggcctcgggaaggacaggcacgcaccctgtgtctcttaccagctggacagcaagcaacgctctgtggatgtgatcacagccggccacggggaatgactctggaccccgagggcatcatgggctgccctaaccaggcctcgaggggcgttggtgaygggagagtggaggagccccccaggctttggtgcatggggtggtgacggagactcacagtgaataagtggcccctggttcctgcccggcactggctgcgtctccagctgcctgtggctccatctcactgggtcatctccaaggccccaggtgggtcacaaactggcctttcctcctccatgtcctcagcagaccctcccatgccaggactagggtcctcttggaccatctcctctgtccctcccatccaccatcactggggacttggcctcaggttaatctgggcccygccactcagcccgagtcaccttaccaggcacattcagcttctttgtgccttggtgtcctcacctgtcaagggccagcgatggttcctcgtggtgcgtgggtcctgtccacmcctctgcggacatttctccttcagccacccccgccgtcctgcaccragagcccacgaggccggcagcagtcggaggttcacccaccccctgcctccgtgcccgtgtctctccgctactctgcattcccggggttgactaacgtccccccaaaattcacatccacctggaacctcagagtgggatgttatttggaaataggctctttgcagctgtaattgaggtgttgacatgaggctgtactggcttccggtgcggtgaacagaagacagagccgtgacgacacagggagagccatagccacttggcgcagaggcagaggccagaggggtgcacctaggagccaagcaacgccaaggactgctggacscccagcccccagggaaaggggcccggaacagaccctcccctgagcctccaggaggaacaaaccccgccaacacctgaatttcagatccctggcctccaaaacggagagagtgaatgtcctgtattggtgatgcagcggcggccctttgctccgacggccccgggagctgatgccacccgtccccatgccttgctggttttgctgcttttcatgcgttgtgctctcaggaggcctgtccccttcactttgtgtggcaaactccattcttcccaggaaacctactcccctgtctcccggggccgtccagcatcagctgcgctgctcttcacccacagccgccaatcacctgccaccgagtctcggaactgcggcactgtcccctgtcccctgagggctgcctgctccttgarggccatgatgtgacctctgcccccactgccccacagcatgagcccaccatggggaacacaattgcagataacctttatcttactgcagagtctttcacgaaagtcggggactggacaggtcccaacctccatgaagacccagaaagttccttcccatgatgtggttcacgtttgtacagcacctgccaggagggccccgcagcctcgcgctctgccgtctgctctgtctccttcccatgtctcagccacaatgaggtgactcacccttcccgggaaagcaggggatggcacttgatcgcttttgaggtgccgcggagccgctccaggcctgggaggaatgcctggagcacgggcagagagagtgctgggtgggtgccgtgcctcccggaatcaagcagaccccaaactgtgaactgacctgtactcacacacagaaatgaaaccacgggggacagcgtgaggcagaaagtcgtcatcacctgaaggccacagaccgcagcccctgaaaactgtacaggtcccagacccagggaaggctggaagccaccacggtgcaggggagctgagtgtggtgtggggtcctgggacaggagaggacagtgggtggaaatgagggaaatctgcagagagaacaggcttcagttaataacctatcaatactggctccttcattatgacaaatgctgaggccaggggcagcggctcacacccgtgaatcccagcactttgggaggctgaggtgggaggatcgcttgaggccaggagtgtgagaccagcctgggcaacatcgcacggcctcacctctacaaaaaacaagaacagaaaacccagccaggcatggtggcatgctcctgtagtcctagcttctcaggaggctgaggcaggaggatcacttgagcccaggagctcaaagctcaaggctgcagtaatcacaccactgcattccagcctgggccacagaatgagactctgtctcaaaacaagcaaaagacccccaaacctaccatgctaatgtaataacgtaactaataggggcctgggtgtggggtctctgggaacccgctgtattagtaatttttttgtaaatctaaaactgtttcaaaattaagttttataaaaacaaacaaaaaacaaaatcagcaatgcagacagaaccactgtccacagtgccgatagctctctgggctcatgtagaaacattttttttgttttgttttgtgtgaaagagtaactccttccttttttgttgttgtttttttgaggtggagtctcactctgtcgcccaggctggagtgcagtggtgccatcttggctcactgcaacctccgactcccaggttcaagcgattctcctgcctcagtctcccaagtagctaggattacagatgtgcaccacaacgccctgctaatctttgtatttttagtagagacagggttttgccacgttcgccaggctagtctcgaactcctgacctctggtgatccgcccacctcggcctcccaaagtgctgggattacaggtgtgagccactgctcctggcctgtttcttgtaacctaacatcatgttgtcttgatctatctctgccagaaatggaggtttgtgctactgtgtggtttagctgcgtcatattccgttgtggggataggctgtgcttggctcagcattcccatactggtggcgtttagatgtgtgtatctgaaggcttaagctgcaggttggttcaaaatccaacccagactacttaagtaaaaagtaatttcaccgtggcccgtggtctcgaaggagattgatgttaggattaacagtaaggcactcatcgtgttctgtagcacacttcacagtcgttaatatttaatgctattttctgtctgttatgtcatcgttttatccctgagtgaagatggatgtccctagaatatgggtccttgttccggggtgtttctctgtgctgtgccttcctgggctgcccccaggaaggccccagtgctggagcctcctcccaacttgtgggggtcagagtagctcagggcaccccaagaaggcctgggcttctcactatgatacataagctcagacccaaacattaatcaatttttcaagtacctgcttattttcctggttaaaatcagtgtggcctttgcgtattgggccagaacaaacacatccatgtgtggtttaagataaaagcatgtttcataacaactgccaygaggaagtaaacagtaccctatctgtattattgtagtggaccctaaaaaaaaaaaagtcaaacaggcacaaaaaaatagctcacatgaaaaaatgaagtctcattatgctgtttgtgtcaatgttgatgttggagttaaagtgacaccatacttctctggcccctttgcctctccctccctccctcccctcctcctccctccctccctttcttccacaaatgtttatccagtggcttctgagtgccaggagctgttctagatgtgacggatgcagcaggaacaagacctacaggttctgggtcctcagggactcatggggaaagaaacaaatataaacaaataagaaaatcagagccctaggccgggtgcggtggttcacgcttgtaatctcagtactttgggaggccaaggtgggtggatcacttgaggtcaggagttcgagaccagcctggcctacgtggtgaaacctcgtctactaaaaatacaaaaattagccaggcgtggtggtgtacgtctgtaatcccagctacttgggagactgaggcaggagaatcacttgaatttgggaggtggaggttgcggtgagctgagattgcatcattgcattccagcctgggcaacagagcgagactccatctcaaaacaaacaaacaaacaaaaaacaacaaaacaaacacagagagccctgccactcttgtacaagaactgaagttgggatgtggcagatgggagtgaggggctcagcatggaaggtcctccatcgagggacccaggggtgtagccagtgtctgagaaggagggcagtgctccagccaggagatgcgcaaaggccccggggcaggaagagcggtcacacgatgacagggacagatcacgcagaccacaggacagaggggtgtgtattttatgctgggtgccattagggaccacaggggagcaaggtgatgaggtcaatattttaggaagacctctctggctgccacatgaggatgatggtggagggaaactgaggctggcagaccccaggggtgttcagcacatggccaagcaatgcctgtgggtcataggctatttttaagatttttcatttttaaggggagacagagcctctctctgtcccccaggctggagtgcagtggcgcaatcttggctcactgcaacctctgcctcccaggttcaagcgattctcaagcctcagccttccgagtagctgagactacaggcacgtgccaccacgcccaactagctttttgtatttttagtagagacagggtttcaccatgttggccatgctggtctcgaactcctgacctcaggtgatctgccgcctcggcctcccaaagtgctgggatttcagacgtgagccactgagactggcctattaaaaaaatttgtaattgtggtaaaatacacatacgtttaccactttaaccatttttaagtgtgtggttctgtggcattaagcacattagctttgctgtgcagccatcaccaccatctatctccagaactttttcatggccccaaactgaaaccccacacccactaaacaacagctccccaatctgcctccccacccgtggcacccatcattctactttctgcctctatgaatcgaactcctctagggacctcctgtaagtgcagcctcacatgtgaccggcttattgcagtgagcatcacgtcctcaaggtacatccatgttgtagcgtgtgtcagaatttcctccctttttaaggctggataatattccatagtatgcatggaccacatttttttttttttttgagacagagtcttgctttgttgcccaggctggagtgcagtggtatgatcttggctcaccacaacctccacctcttgggttcaagcgattctcctgcctcagcctcccgagtagctaagattacaggcatgcaccaccacgcccagctaatttttgtatttttagtagagacatggtttcaccaggtcgcccaggctggtcttgaactcctgacgtcgtgatccacccacctcggcctccyaaagtgctgtgattacaggtgtaagccaccacacctggccrgaccacrttgttttaatccgttaatctgtcggtggacgcaggtcacttccatgtttcagctcttgtgaatagcgctgctatgaacataggtgtggttgactcatctttttcttttgttrcaaaaagtagcaacccaaacggtacatgctaatcgtaagacagctgagtaacacaaaatgagcagtaaagtagaaaggtggttcactccctsccaccccatccttttacrtcctttgtaggagtcgctgcagcatccttccagagttttctttttcttttttttgagatggagtctcactctgtcgcccaggctggagtgcagtggcgtgatctcggctcactgcaagctctgcctcccaggttcatgccattctcctgcctcagcctcctgagtagctgggactacaggcgcctgccaccatgcctggctaattttttgtattgttagtagagacggggtttcaccatgttagccaggatgatctcgatctcctgaacttgtgatctgcccgcctcagcctcccaaagtgctgggattacaggagtgagccaccacgcccggctccttccagagttttctatatatatatatatataacatgttcgtgcataagtaaagcagccccctcacaaaatgggatcacactgtgcgtgtccctttcattttatttgcgcatattttggacacacttatgttcatgacagcgtagtagtccattgtgtggcttctctaattgggttgtgcatttcccagctgatggacctttaggtggtttctttgtctttggtgtgtgtgtttgggcttccagaaggatgattgctcaagcttagggtcgctgaatgtttacaatttatttttggcaaaggaatgtataaacgggatgtagcaaattaaagttatttatgagcattgcgtaagacaaaactatgttaacttacgttcacatttttaacacattgtttagcatgttaatttattttaattgaattaatatatgtcagtctgctagggctgccatttaaaaataccacagaatgggtggcttaaacaacaaacacttgttttcttacagttcttgaggctgcaagtccaagatcagggaggcagcrcggccaggttcctggaggctttgttttcctggctggtagacagtgccttcttgctgcgtcctgatgcggaggagaggagagctctctgctgtctcttcctgtgaggatgcaaatcccctggtggggccccaccctcgtcacctcatcattgacccacattacctcccagaggcctcatctccaaaacccatccccttgggttagaattttgaggagacacagttcggttcccagcaacacattaatatcttatatgccgggcagtgaggtttaatgttttaagttgatgaacggttggtctatgagtcgactgtattggttttggttgtctggtgctgtgtaacaaagcgtcccaaacccagtggcctccaactctggtygtattatctactcacagtgtggccaggctcagtgtggggctggtctctgctctgtggtgtccgggtcctccctggggtggcttgagtctcagcagcccggtgggtcacatctggggtcyggggcttccattggccggggccctggacgggagtgctgccttcttcccgatgtgccctcyctagtgtgggttctgggcaccaggaagaaagaggcagaaccttccagccctcttggggcctgggccaggaactggaggacgtgtttcctgctacatcctgtgggacccagccgtctcagggccaccctgctccagggcagggcagggcagtggaggcccccttcggagtgggagcagctggggtcggggagggaaggaacgcactctctgaggccgtctcccaccatgtcctttgcctcaggccttttggcctcatttgttttccccacctcttcttctccttagagccactggtcctctgcctctgggctctgcggacgccctctgggctgctccttcctgctccgaggtgctctgtgggagttgcccacagaactgagtagcctcgaagggctctgggtttatgccagagccagaggcgccctccccacaccgaggttgtacaaatattaatttcatgttctgagtcctgacttgccacgctgtcctgaaggccacctggcagagcaacagcacccagggcatgacccgagtgtcgttactggggtgggagctgggcatccccagccgggcctgcgtttctgggtgtgaaatttggcttctgcctccgttttcctcacctgtgaactgggggtggtgctggttctgttagaatctcttgggatcttgggtccactgcacctgcacgcatctgtggcttctgcagtggttgcatttctttgttgtttagacaaattacctgactccaggtccctcccagatgtgactggtggctcctggtgctgggaaagcgccgggtgcggagccacctgctgctcttgttccgtttcctcttgggatccccgcgtgccgctgtgccttgtcgggtgtgttgccgggctcggggtgacaaggtggcctctgggcctcatcaccctccaaaggcccagacacttcctcacagtccccagaatgagagggaggagggcctggccctctctggctccctgcccagctcctgtcctcctgactggggcagttactgaggcccaggactctgaggggtgacaggggccccacgctccatggaaaccagggtgggagctcttgtgggggccatgggcagggggcctcatggggtgggatggggtgggggctcctggaacacagaatccgagccaggcctggaggacctggacttggcaggctattctgcaaatcccaccccacatctgagcccgggcctggaggtggcaggtgagrgcccctgggcaggggccgctgctccgtccctgggagccactggtacccatgacccaccccctgaacgtctcatccaattctgggcctggaaccgatgatgcatgcgactttgcaaccaaggtgctccaccgtcttggcctcagactcctaagtacctcacttgatgatgtgtttactgctggctgagaggctgctgtgtgtctttgtaaagcggtgctcctcggcccctcctgtgtgctgggcatgtggagttgcgtggggtacagccgagctaagtgggaccctcagcacagcacgtcggtggggatgtcgcctgggcaggaccagggcgggcttgccaggcactgcagagtttgagctgagctgcgaggacaggaagaactgttgggaggttgggcagggtgggatccctggaggccagggcaggtgcagaggaggtagaagggggcttcaagtcctcatgtggctggaaccaaagcgtgtgaggagtttcaggcagtgaggggctgaatcctggtggtcgtcagggtgccctgctgagcaccttggggccctctgagggattcggagccagagaaagatgtgatcggagctgtgctttaggaagccagggcaggggttagggtgccggaggagggagggtcaaggtggtggtcatggggggcaggggccagggtgctgaaggaggaagggtcaaggtggtggtcatgggtggggaatggggagtggggatgcccaggctctcttctcctttgccaagcatgcctgaggctgmtcctgggatggggcctataggacctgtgactcccgcagcatctgaatgaccctgactttccttgtgtctgcagatggcatccacagcgtcacrgccttctgcaccctgcgtgtcaccatcatcacggacgacatgctgaccaacagcatcactgtccgcctggagaacatgtcccaggagaagttcctgtccccgctgctggccctcttcgtggagggggtggccgcsgtgctgtccaccaccaaggacgacrtcttcgtcttcaaygtccagaacgacaccgacgtcagctccaacatcctgaacgtgaccttctcggcgctgctgcctggcggcgtccgcggccagttcttcccgtcggaggacctgcaggagcagatctacctgaatcggacgctgctgaccaccatctccacgcagcgcgtgctgcccttcgacgacaacatctgcctgcgcgagccctgcgagaactacatgaagtgcgtgtccgttctgcgattcgacagctccgcgcccttcctcagctccaccaccgtgctcttccggcccatccaccccatcaacggcctgcgctgccgctgcccgcccggcttcaccggcgactactgcgagacggagatcgacctctgctactccgacccgtgcggcgccaacggccgctgccgcagccgcgagggcggctacacctgcgagtgcttcgaggacttcactggtaggtgcccgggctcaccctggctttgtgtacatgtccccaggtcacatggccgagggtctcaggtggtttcctctgtttacttccctccggggaaaacagctggaggatgggcgctgggcccaggtgtgggctccacgaaccttgagatgatctcagtaacggtacttttttttttttttttaacttttttgagatgatctcactctattgtccaggcttgagtgcagtggcgtaatcttcgctcactacaacctccgcctcctcggttcaagcgattcctctgcctcagcctcccragtagctgkggttgcaggcacaggccaccacgcccagctaatttttgtatttttagtagagatggggtttcgccatgttggtcaggctggtcttgatctcctgacttcaagtgatccacccgcctcagcctcccagagagcwgggattacaggcgtgagccaccgtgyccggccagcaatggcactttcttagccagctcggggcttccctgaccgtagcccacggcttmctcactttccctgcccgacttaactgcctgctttaggagaacagtaggacaaggttacagggtgagatccasttaaaagaaaacctaaacgcatgaaatgacatgagttgcttttaagtggccctcaggtgaaagtactttattccagattgcaggcttaattggttagcgtaaaacagtggaaccaggtggaaaccattgagccattaatcatttgggtcttgaaatcctgttttttcatgcctccctgtcaccgtagaaatttygtgactcatcctcccgcctctgaagatgctctttccttgatacctcctgactcatcaccaagatgaattactccaaatgtagccaacggtggtttttaaaaataaagagccaccccgagagtggtacagaaacacacattctctgcatctcagcgcacatcttgctttggtctttgattggctgttccacaaaatgacggctcatttgataagcgagtttacaatggtcccagtggtgaatagtctgtctttttttttttttttttgaaagctctctgggattaggcaggatttggttcataccggagataactttgagactcttccatcgactgtgtcctcgattaatctgtttaatataaacacctgagcaatcgttagctgctcgttaccagcacatagcacaagtttatcgagcttataacaagggtttgaggtattagcaggtatttatcaggcaggaagakcgcaggggagcagagagagagaggaaggatggcttccaaggttctctgcatcagaagtggagggaaaaccaccagcacgggtgttggcagcctgatgcaagggtgctcccggctctgacttcctgcgctccaggttggtggccctctggtcatatggcaggtggaaggaaggcagtgtggtcacctgccccgtggtgttcccacgcctgctagtctgtggctgtctgttggtgccgtctgggtctggggctcttccccccgctgtctctcactgaatgctaatcctaaattcctggctataccggggctcggctgtgggcaaggcaggcaggcaggcagaggcggcgggagacccccgcctcccacagcccacacctgcgttgggtttgggggtggggacgactccaggtatgagcaggcctgaaccaggycccctcctctgctctttcagtggattcctgttctgtgtcagcttccccaggtcccctycctcccctttgcccctcacggccttgagtgggctgctctgcctctctgaagggccagcttggatgtagcagtggccagcacggtcagcgccccttccccgagccagtgccygccatgtggcctgggtggggggcgcttcgtcgacttycctgcttcagatgaagaagccgtggccgcgggtccctggaaaggggcctgttacgctcccaagagttggcaaggacgccatctttactccgcagatagtacctactgtataccaggccagcgcacacagccagacctcccccagccygttctggggggtgaccaagttcatctgtgccgttggctttttcatgggtagaggggactgtgcaagcacccmccacctctggctttgtcagatgagtcaggagccctagggtaacgtctaacgtggctttgagacctgcatcggccttccaggcygccagtccaggctgcaggaagcttggggctgcactgggcaggggtggtcgaggcccctggggacccctgggccagcagatcccctckgaagatgattgacccattggggggaacccaccttctgagcttctcaggttttcttttcatcgggagagtcatttttagaaaactaatgactggggaacggccaagtctgtcatcaccagtaagacccactaacatgtaatgattggcatgagactaatttgaatctctttgggtaccaaaattatcatatgtatttccctcggagataaggctaattaagactgattatttctactccgtccctcttcctccccttttccctctttccctttgaagcgctcctttttctgcgtggaggtaattgagctcatttattcacgatgaaagtggtgctgtcggcagaggggttttattacttgctccctggtaagccgagctcgggggcctcrcggttgcaaggttggaatcggcccaagtggctgctgaaagcccctggcttcttgtgttgcgggacaggagacagcaggagytggatgaaggaagtagcaattaatttcaggaaaagctcaacaaatttgatgctggagaaaatactgatggctctcccgtgtccctgaaatccattttggccttagagaagtccaaggccccagggtctgtggattcccctgatctttgcagggaaaggagggctgccacccgctcacggcrttgggactgtggttggggtctgyagccatcccattctccgaaagggacgagggcaggaagccttaaggctccggcatcttagatgtgcctgggatggcctcccagtttctccgctctgcagagagtcctaaacaaccctgagaggcaaacacgggctggtgttcctcggttctcagcccctcggtctttttgtaaacatcgtagttgtgtttgttgttaaattgctcaggctctgacttggctcctgtgggtccagacacagggccctgttccgtctcccctctgcacctgccatcccttcatctgaaatgtgtctcctcsccatccatctgcccatcatgggcctccctcaaaatctgcttccgcagctgtacacctgctctgagaaggttctggaagtttccygacctcctcagatggatcataggtttcctcccttgaagcttcctgggtgccttgctkatgcttttgttggtccacccccatgctgggtgtggttcacacacttccatgtctctgtcccccaggatggcagggactgtagctaatgggtgtgggkgtgtgtgtgtgtgtgtgtgtgtgtgtgtgttttgagactgagtctcactgtgtcacccaggctggagttcagtggtgtgatctcagctcaccgcaacctctgcctcctgggtagctgggactacaggcatgcatcaccacgcccggctaattttttgtatttttagtagagactgggtttcgctatattggccaggctggtctcaaactcctgacctcaggtgattcgcctgccttggcctcccaaagtgttgggtttacaggcgtgagccactacgcctggccggattgtagctaatgtttagtggtgctctgctctgctggttactgctctagatgattctacacgtattttctcattgacttctcgaggcagctctatgatcccattttataatggggtcatagaaactgaggtacaagacatcaaagcatctagcccagtggttctccactaggggtgattttgcccccagggacatttgacaaaatcagacatttttggttgtcacagctgggggtgggggtgctggtgggttgaggccaggaatgctgcttgacatctgtagtgcacagggccgccccacggcagagaagcggcctcagcgctgagggcaaggaccctgctggcactgtggagggtggggtcaggattcaaacccaggcattctggcttctgagctgcagctgtagaccctcgagggtcaacggccggccaggtttaccagcttagatccttcctcttgcatcatttgtttaacagcattttgtgaaaggcgccttctgtgctggttgaaaggggcagtgtgatgggtggtatgcagtggccccggaggggctttgcagctgttaacctcacacctgaggggctgggaggccgctgttccttccccacaagaaacctgacctcattaaatcaggactggccttaggactcggttttgaatcctggtgctgctcttggtgtctgctctccctaattaaacaattacgaccactcactcattactaaaatgggaaccggctgggcacggtggctcacatctgtaatcccagcactttgggaggccgaggcacgtggatcacgaggtcaggagattgagaccatcctggccaacacrgtgaaaccttgtctctactaaaaatacaaaaaaccaggtgtggtggcacacgcctgtagtcccagctacttgggaggctgaagcaggagaatcgcttgaacccaggaggcggaagttgcagtgacccgagatcatgccagtgcactccagcctgggcgacagagtgagactgtctcaaaaacaaaaacacaaacaaaaaaaaacctaaactgggaacagtactctctactggtgaccaagaacggaagtcctgggctctgctctcactcggcctttcccatgtatctgtgacaacccaggaggtgggacagttgtcatcccagttctgtcaacacccaggtgcagcaccaggcgggcggggccaggattcgacttggggatctcttgtgagaggtgagtctcacagctgctcctgggagggtcagatgccccgggcctccagcctcttccctctggtcccctggagggtgtccccagtaccaactccagatactccctgctctgatcctgcttcctctccccatcccttatttcagcccacgggctcacagtggatgccccttggccccacgttcagcctcttgccaygacctaatgacgctgcctccccagcccagttcttctctctgctgcctgtccctgttttcatgttatcaccttggtggggccttctcctgccctccctgccaccctcgtcctgccctgacgatcccttcttcacggagcgcccaggatgcctggtgaagcaggcrtttgtcacatcagtgttcaggccttcctggggtgaccggtgctccagtataaagtgcagtcactgggcctgtggcactcagaggtctagcctcacccccggctccccaggctgaggtcactctggccttcgggacacacactggcctctctcaccgtggtgcttgcccctccagcgcaccttcccccaggtcttccctgaatgttccctccctgtccccactcygtcctccctgcagccctcacccccatggtggtgtttgcttgtcattgtcaccttcctccctctgcactagatgcagacagcagcgtcctccgcccaacagaacatgcccgcgggtctgcagcaggcaccgtgtgcaaatgagacaagggctggccatcccgcccctccacgtaggccagagataatgccctcggggcctgaaactcattctgtgttgtggtcagagtgctgcctgtgctgcctctggtgctgagctaggaggaaccggaccctccaatcacgtacacttcccttccctgtctcctctgccccttcctaggggacgccgaggtatgtctgactctgtcctgcccctgtgagcactggctaagctcccatgtgggtccgccctcgtgctcatcacagctgtgagcgggagygtgggctccaggcctctgggcattcccgggaagccttcctcatctctgtccgcgctgtgagcgggtgatttgtcatcacggtagcgtcttcgtcttcccatggggcgcattcctgagtggcagctctgatatcacaggaaaggcgggtttttctgcaaggctgaacatcttggagggggacggcaacaagtcactttcactcacctcatgtctgggtagaggcagacctgggtgcccctcctgtgtgcgccagtgggccggggctgctttgttagggttgagtttattcttgatcrcctgcttttaggaccccaggggctgcgagaataatctttttccccgcccccgagatgagtcttgctctgttgcccgggctggagtgcagtggcacaaccttggctcactgcagcctctgcctcctgagttcaagtaattctccggcctcagcctcccgagtagctgggattacaggcatgcaccaccackcttggttaatttttgtgtttttagtagagacagggttttaccatgttggccaagctgttctcgaactcctgaccttctgatcctcccgcctcggcctcccaaagtgctgtgggccctgtacgtccacgccacgtggacttcgggagtgtcgggtgctccctagctggggccktagcttggtttgggaatcaggaaccgagtaggtgagtagccacttgggagcgcttcagtgctgctggctttgagctttgtaccaactccctaggctgggacaatagcaattgtcctgtatgagccccccaccccccgccccaggtcatggtccccaactgtccctgcgagggcctcctggggccaaggacaatctgtgtaggttcaaggacagagaaacttctggtgtaaaaacataatcacctgtgtgctcatgggaaaatcttaaaaataaattctagcccttctgcgattctgttgtaaaatgtgtacgtcactccagctgtgagttttattttgggttctcttttttttttttttttttttttttttagacagagtctcgctctgtcgcccaggctgaagtgcagyggcacaatctcggctcactgcaagctctgcctcccaggttcacgccattctcctgcctcagcctcccgagtagctgggactacaggtgcccaccaccacgcctggctaactttttgtatttttttttagtagagacggggtgtcaccttgttaaccatgacggtctcgatctcctgacctcgtgatctgcccgccttggcctcccaaagtgctgggattacaggcgtgagccaccgtgcccggcctattttgggttctcttatcagagtcatgggctttccatcttcatgtgatctgctgacgcactcatccctcccagcctgcaagttctgcactttcagataaggtcctcattcatggcgagctgtgccatcaccctgcggagtgacgtctgcttagcgcagggttgcacgtgggccagtgctcgctgtggcttccaggattaaagcttcacttccaagtattcctagtaaagtcgcagttagtccttaaacttgagcgttaattatcattcaaaataaaactcattacataacctgtaattaaaatctcaaataaagcagtaacagaatcctttcttgggaaaacgtgcttttcagataattcaggattacttcaagtttttctctccttggtgcttctcaagtcttttgcatttggctttttstacagagtccaggttttgagatttgccatgtccctggtacgtagctgtaaagctggggcattatttcatttctggataactgttttctataaaaatcttgccgggggatcagggtgtgggtcaatgtagccagatatcycctgttctccactcaatttctttccccaaagctggggcttttgataaacagaattagcgtcctgtgcggcgtgtgcaggcacagcccaccagcactggagcccagcacggtcctcacaccctgcagtcctcctccggcttccgtgagcttcctggggctgctgtaaccgatcggcacaaactgagtggctgaagacgacagaaatctgttgtctcaagccaagtgcagtggttcacgcctgaaatcccagcactttgggtgggcgaggcaaacggatcacttgaggtcaggaattcaaaactagaacctctgtaatcctatcactttgggaggccgaggcaggtggatcacctgaggtcaggagttcaagactagcctgaccaacatggtgaaataccgtctgtactaaaaacacaaaaattagccaggcgcggtggcaggcacctgtaatcccagctacttgggaggctgaggcaggagaatcgcttgaacctgggaggcggaggttacagtgagccgagatggcgccactgcactccagcctgggcgacagagcgagactctgtctaaaaaagaaaaagagaaaaaagtctcttgtcttactgttctggaggccagaaattcaaarccaaggtccctgcagggctgtgctctttctgaaggctttaggagagggcctctcctggcctcgtccagtttctggtagccccaggtggtatctgactcacggatgcatcactgcagtctccgcctccgtcttcacactgtgttcttccgtgcacgtctgtctctgtccaggtttccatctcattgtaaggacaccggtcactggattaggacccaccctaatgatctcatcctaagtcgattacctctacaaagaccctatttccaaacaaggtcactttcaagggtactgggagttcgtaactgagcgtatctttctggggacacaattcagccgtgggtgctccttcgctgaggagctaaggagtttgggaaccagggctgttggcgcttctcactggcctgcctgtcgcgtgtctgcgaggaccacgggccactccagggtgggaggcaggtttctgcgatgtgtttacctttgcgaacgctaagcgcaggagcagagggtttcccgcgtcccacccggacagcttggaggtgggcgagctgaactaggtgtagaatgtgagtcagtgaggaacaaacatctgcccagaaatgtctggcccacagttagaaaagtggcctgaagacgagccgcatgcaatagaaacctcgctgtggtttaaagcacacgccgttccccgtgacttcgaagtctgtgctgttgaggggagacaaggctgcctggccgggctggctgcgggtcatgggcgtctgtgcgtgcactggagggatgctgcttctgcagagagagtgtgggctccgtgacagcagggctgggcacgctcgctcacccctgcacgagtctcctgtggccgctgtaacatttccacacacgaggggcttaacgcagcacggattcattcttactgttctggagggcaggagccctgcattcaggggcgtgggcggggctgctccgggaggccctggggagggcctcctgctctgccttcctcagctgctggaggccacctggtccttagtccctggcaccttcctcacctcactccgacccctgcttccaccactagcaccttctgcccctcaccctcccaccgcttacaaggagccttgtgatgactttggggccacacagtaatgcaggatgactgccccgtctcaagatccttaatcacatctgcaaagtcccttaggccttgaggtcacacatccttggctttcagagatgaagatgtggacgccttttggggtccattattttgctaacaaccccggctgctcctggtgtctcctctccctaattaaacaatctcgaccactcacacccggtaaatatttgttgaaggcatgcgtagtgagcaggtcccaccatcggcgctgtggtgggggtctggcagtctctgctgtttataaccggccacgatctggacccagggctgcygggagctgctggagagtccgaattgagcctctgccctgagagtagtgacccagacgacctcgggggcgagtgttctctgctctctcacccgcttccggtcagcactttcaagccttttctctggtgtggacagacaaagccgcctctgtcctgctcctgggggccaggggccaggttaatcacgcacctctggcctgccagggctgggtgtggtggggttacacttatcagatgaagctggctggacatagcgggggtagactttgtattaatgagggcagttcgtgacccccaactccaagtgatgaattaagaattcgtgctcattttttctggacgttgatctgtcactagtgcactgtctgtcctggcccgcactggtgtggccaggggaatttgaaccgttggggtgctgagcagccttttctcgtgatgagtgaggttttcgctagcattccagctgagcccgggcaygctgctgttcgtagttggcacggtttccctgcatgctgataacgaacgcaccgggcacgtcccttccagccctgctgtgcacagctgcctggctcaccttcctcggtcgtctttccatgtctagcaggagcatggccagaccctggccccacatccaggccccccaacctgcctccctccgaggcatggcagggccagccctctccctaccatcaggagccaagtgctcagtggggcgccaggctgcacagtgccctctcccctgggtggaagacctagacccatcccacctgaatgtccccactcaactctatcctccctggacaaggctgtttccaggctgtgcccamccccatggcccctggagaaaagcaactactgaggcctggagggcacaggggagccccgcctgcccgacagtggcactgtcttcttggcatgtgctgggccaagggcggcgtgaagtctgcgtccccctcactccaggaccaggaagtgttggctgggccctgtccccyctaggtaggacccaccaccaggctcatcctcatcttgggtcctggaggcctcctgagctgccaccaacgtccttctaaagagagccaagtccctggcccacgccttggcttggaaggaccctgggtttgttttgagggggttggaaacgccctgcagggggagtcgagatggggttctgtacccaggttggtgctggggctgtagggaccctcatgtcctggtgatcagcagggctgaccgccccctaagtgccagctgtgtgtacccccagtgccagggaccaggtgttgtggtatccagagtcctgtggttgcccctcccctaccagtcttggcaaccaggacttcccgagtccactcgggcccaggagacgctgtgtttgtttggcacactgggtcctcatgccgctgtcttcccggtgccataagagccctggcaaacaaggagtgttttatctcccgtggctccaggtctgtgtaggctccaggagatgctgggaggctttggggtgcagcttcctcaggagattgaccctggaagagggttcctgctgactggctggtttcctcggtgtgttctgggcctcgttctcctaggactgctgtgataagtgatcacaaaccggggcgctgaaaataacagacatgccttccctcagttctgcagctggaaggccgaaatcaaggtgttggcagggccggctgcgcttcctggaggctctaggaggagcccccctgcctccccggcgcctggtggctgcaggccttggcttgcggctgcctggctccaggctctgcctccctgtgcaccagcccttccccttgcttctcatctccctctgcgctcattttacgataattcatgttgtgattgcatygagcccacctgctaatcggattgcctcatctcaagatccttaacttaattgcacttttgccatataagtaaaattccttcttttgctatataaggtaacattcccagattttaggaattactatgtggacacttccttttgggggccaccgtgtagcccattacagggtgggttatttcctagtctctcctccrtcgtcggtgttgtggagaaggaggttgtagggagcccctcttctgaaaggctgtgtccccgagggtgattccaggctggggtcrcctgggcccgcatgctactggagccttyggcttggagctgctgcaagcaccagaagacggtcaaacatgcacccatccttcaggttcggcagggtttccagccctcagcgtgtaggtgactcccgtaagaaacagcaaagcagtggatcagtgggaatcatttttctttgctgctggaatgcatttcttatttttttaaatgggtgtgtctggagatcatctgggaatttgyttcagagacactaatgcagtcacgcagagaaggccagccctggacaagcggcttctgcagtgccgggctcccctggcctcccccttcccagctccctccttgtggggcgggggtctgggcctcctgctgagggctttcctggctaccttgccaggtggggcagggctgggcckcctgtaggtgtgactcaggagggattccaggtgcagagcaagtcaccaggaggtgagaaagtcaaacaatgcgtgaaacccaagggcagacgtgggtgctgacagacagcagttcccggtgggagctggggaggaggagagggagtggggcatggaggggtgaacagagggtgcctccygtctcaggaaggcagtgaggaacaggaggracagggaccagtaatagtaacctcgcccttgcgcaggtgcgtagctcacagccgtaccaaatgagctgtttcactcacatcagcctgttagtgctggggaatgctcctggcccaagagagacagaaatccctgccttgggggatggatttattacagmtggggaaactgaggcactagccaggatcttgctcaggaaacctctgtcctgacagcagtgctgtgggggtttggaatggggtgctgaggcccctgcaatctcgcctcctggtcggcctctcctatagggacattcggaggggacacctgtccagggaaggcagtgaggtgcactcattcactggacccgtccctgcaagctctgtgtggacattaaggcagatgcaggcttaactcccgctcccacccatgcagctgtgtgacccagcacaagtaactgccctctctgaaccttcgtgtactcatctgaccagccaggtgctgcggcctgccttgtagggaaggtcatgtgtggactgtgctcacctctggaggaggttgctgtgaaagtgctcatgttctcatccccaaatgtgaacctggggatacccagggtcagggagcgtcacctgagctgttgggacgccatgtggccctgccctgtctgtccctccatctctatgtcagcctgccttgcagggccgagttggtagcacgtcctcccccacagctctgttgctggacaaaggccctggtggctgggggcctctgctggcctggcttctgcctggggctgcatgccacaggggttctgaagtccccgggaagaggcagggtcctgactggcagtggactgctgtgcatgacccattgctgaggctgcagccgcctgggcttttctgtgcagctcctatctccggtgggggccttgctggtgtgggactgtcacgttgcagaacaggaaagggctggggctctgcctccactgccctgcggtgggaacccctgtgtgtgcctgtgggcatgcatgtgagtgtgtgtgagcatgtgagtgcgtgcatgtgagtgtgtgtgagcacgtgagccatgtatgttggaggctggaggtactttctcaggtttggttggaatctgatggggtggaaagggcttggcgaggagccttagctgtgcccaccctttctggtcctgaccctactttgatggctgccctgcctgaattcttcagcttgacccctcccctcccctccacctccatgccagcaccccttcaaagcttccccctctgctttttccatctgctataactcttcatgtatttttggtttttctgaacatctgacatttttttacctagatggaaactccatgagggcagggatctgttttgttcattcttataaccccactgcctaaagaatggcccaygctggcagtttattagatggatgagtgggtggagggacaggtgggcagctgagtgcaggtgagtaggtggaagggtggatagatggatgaatgatggatagttgggtgggtgggttgatgcatgatgggtggttggatggatggatggctgtgtgatgggtggttggatggatggatggatgtgtgatgggtggttggatggatggatggatgtgtgatgggtggttggatggatgtgtgatgtggttggatggatggatggatggatgtgtgatgggtggatagatggatgaatggtggatagttggatgggtgggttgatgcatgatgggttgttggatggctggatggatgtgtgatgggtggtcggatggatggatggatgtgtgatgggtggttggatggaagctgggtgagtgcttggaagctgggtgagtggatggaagctgggtgggtgggtggatgaacaatggatgggtggatggattcatgggtgaataaatggatggatggaagggtggaggggtgggtgaatgagtgggtgggtatatggaaggatggatagatgagtgaatggaataacagatgggcaaattcgtgtggtgttttatcatttctgacatacccttttcctcttagaaaccctgtaacgttcccctcttggcctcctatctgtgtgctttctctggtagtgaagtttctgacacatgagccacgctgttgggttgtgtcttcaagactgtgctttctgcatcctaggatccagtgttaggactgagctctttgatggggctttgagttgacttcaggttttgtgcatttgcgtgatatgacctgactttgaaattgccctgtgttcctgttcccgggcccttccactcactccttgttctctgttcttgtgtttcattttgatcgttaattctgcataaactaagccttcatcaagtgcttgagttttaccattgtggcctttggaaattctagtttttctagttcaaagctcttagctgtttcttaggaccagaaaggaattgtctttttatttatttaagaacttaagtggtcaatctttacacgcccttcccctcctggggcacgttcccagcgcgttcccagccctcccccaggtcctgaggttctctgcctgctgtgccccctctctaggtgagccctgagaccctgcatctctcttctcctagctcctggagcagccccccaggggtaagttctggagctcttgagccaggggttcacatcagcatcccctcgcgtgggccctctgcccccacccccatgccctctgtcttccctgggcttgtgtccagccccctgccagagtctccatgtaatgatgtggagaccctctgggcacccccttccttgttcacagaccaggagcacacccagcacccagcccccgcctgcagcaggtaagccgtttgctgaagccctgtgaagccagggcttttctggaagccccttaggccaagggttgatggctttggtgctagggtctctgggcaggcagggcagtgcaccagccccaagcctggtgtgggacaggtccccagtggcggggcaggtgcatgaggccatgagggctggatgggccttggctcctgggagcttttcttttgccgttaagaatgcttttctggccgggtgtggtggytcgcacctgtaatcccrgcactttgggaggctaaggcgagcagatcacctgaggtcaggagttcgagaccagcctggccaacatggtgaaaccccgtctctacttaaaatacaaaaattagccaggtgtggtggtgtgcacctgtaatcccagcaactcgggaggctgaggcaggagaatcgcttgaacctgggaggtggaggttgtgagccgagatcgcaccattgcactccagcctgggcgacagagtaagactctcttaaaaagcttttctgtactatagccaggaagctgagccctgcgtccctcctacggggagagggggagcttttggcaggctgcatgcgtgagtgagcacagcaataggtttgcccaggtggactctatccttggtgtgggaggcgaggctgccatggtgatgggggtgtgcagagtatgggtgaatttcccccaggtttgaatgactcagcaagcctttgactccaagcagaatcctagggtgtaaggagaacatcaaatttattttgaatgagaattcctagaaaaggaaagataaatcctgatagtcagcatagctgaacatttattttatgaaaatagtgtgtcttataaaagctctattagaaaataaaagatacagagctaaaagacacagagctcactaaatttgacctatttaccttcagatgattttagaattaaaaatctgtcatatcacatctcttttcaactcagccttggtgggagtgtttacaaatgccgccaattcaggattctccctgagggttggtggggagcagcccctccagttaccttgtttaaacagcgctgtaatccactcatgctagcagcccctccagctccctataaacagtactgtaatccactcccgctttgcttaactttatcttctgtgcagggctgtgctgcaagtgcttaaccaccaaccctcaggggaatcctgaattggctctgtgctaggagtcagccctaaggaacacagggacaggaccttccccggctggtccagttcatccagaacccagttgctcttggttctcatggtcctttattaaaaaaaaraaaagatgttttaactataaaattaattcatttcatcaacacctttcctgcactatttgaatcaaatatgggaattatgtcgttttgtaactcatggattaagtgcaggcatcagtcattggcttggaactggggaaatcctggcattttttgacttcatttcacaagtgtctgtcagtacctgctatggacccagctttcccccccaccgaccccctgcgaccctccctgccaggtgctcagcatatgccctgcacacaccaggcatttattcggcactcgctgtgtgcctgacagtctcagactggcccccaaacagaccctgtcattgcctgcacagagctggggagagaaacacacgggggaaccatcgcacaagcagggctggatgtggagctggtggggcgattgctggagaggggagattttgagtccatgagagcccccagggtcaccctaagcaggcaggtggcccgagcttccccagagggagagtgctcgaggcagaggacaggtacagccaggggatgcgggtggcctccaggcactggaaagccacatgcagagactaagagagaggacgcggggctggaggatggcctgcagtgtacgcacagggccatctgtagctgccctgggaggagggagacagtggggccggcacaggctcgtgagtatggtgtggagggggctggatgtgtggctgggggctgggccctgggaccccttaggctggggtctttatggagcagtgggagtctagccagtgggactgacacatggtgaggccagcgttgtggaggactgtgctgtcgcgaggcaagggacaagtaggtctggaggctgtgcggcaggagcaggggccgcgaggcgagggggcttgtggctgtgcagggggctgctggaggcaggaggggttgcagtgaggactccacctctccctggctgggtgggaggatgagctggcaaaggccaggagcagcatctcctgcaagcagggagaacagcacccggggagtcctggacgcttccacctccgaagcatcgacgggaaaggctctgccagccaggcgctgctgctctcggggcaccgggtttgcagaggctagaatgtacgcgattgcaattccaggacaaacacggagggccactgtagtgaattcagcagtggctcccaaaatccttgtccacacagactctcagaatgagacctcagttggaaatgggctctttccagatgtaatgagtttgggtccttaagtcatcgtggatttagggtggaccctaaatccaatgactggtgtctttattttttattcatttttttagagacagtcttgctctgtcacccaggctggagtgcaatggtgcaatttttggttcaccgcaatctctacctcctggattcaagagattctcctgcctcagcctgcctagtagctgggactacaggcatgcgccaccatacccggctaatttttatatttttagtagagacggggttttgtcacattggccaggctggtctcgaactcctgacctcaggtgatccacctgcctcggcctcccaaagtgctgggatgacaggcctgagccactacacccagccttattttttatttttgaggtggagtttcgctcttgtcacccagaccggactatggtggtgtgatcttggctcactgcaaactccgcctcctgggttcaaaggattctcctgcctcagcctcccaagtagctgggattacaggcgcttgccaccacgccggttaatttttgtagtagagattgggtttcaccatgttggccaggctcgggaacccctgatctcaggtgatccacccacctcagcctcccaaagtgctgggattacaggcacgagccaccgctcccggcctggtgtctttaataacaggaaggagagggagatttgacggccttgtgaggacagagcagagattggagagatgcagccacaagccagggacgctgggagccactagaagctggtagaggcaggagagatccaccctggagcctccagagggagctgggccctgctgataccttgattttggactcctggcctgtgcgactgtgagacaatgaatttctgttgttttaagcctccagtttggggtcatctgttacggcagccacgggaaacacatacagctactttctgaaaatgaaaacaaacaaaaagcaaagcaaatacaactccgcattaaaaaagcaaaccaaaccaaaccaacaattccatggagattagttttatttgccacatatttaaaggagcaagaccttttcagcgaggggcaaacacctgcggctgggtttgctgtgctctcacgggcattagcagccacctgttgatctctggtccctgcagaggtgcccccctcgggggcaggacaagcttatatcggtcagcctccctttcacggggcagcctgaggatatcgggggccactagaaatcaaatttggaagcaggaatgccggtctgcaagttcaaattcaaaccttccagatacaaagcgctgtcttcactcagggctggccaccttttcctgggccttttagaggaaatcccaggctggaggtgagaagccgaatcttccagccctcggatgaggggagagtgagttccgacccggagcaggtgggaccgggaagctacgtggaggtcatgggcctgggcctcactttcctctgggagagtctgagccccgggcccagcctgggttcttactacctgggacagacagaagcggctgtgggaagggcagggctgggccccacaggccctttgtttgccgtcgaggttgggtgagtacacccagcctctcccggtggctttgttattccagagtgtgctgtgcttggccactggctggaacttggaaagcaaacactcccaaatgtcacatattttaaaagtagaagcaagataatttgaagtgtccaaaggaggagaaatataccttaagcgtcacacctcccgtgaacgcacgggatttacaaaggccaggaagccacgagcactgacttgctcatatgagtgtgcagctgggtgtgcaggtatgcayctgtgtgtgacaggatgtgaggtgtctgtgagggtgtgtcaacrcatgtgtatgtatgtgtgtgtgtgtgaacaggtgtatggacatgtgtagacgggaaattgagtgcatgtgtgaatacatgtggaaggttataagcattgtgcaaatgtgtgtgcaggtgtgtgtgtgcacatggcccgcctgcagggcggcggggtgcagcatctgtggtgggctgacccccatagcggggagtggtagggrggttagcctccaggggtgctgggagcctggatgagggtctagggctsgctcctctctgcctgctttaactgagtggggtgggaaacccctctgttcccatttccctgggggcagcccctgccagtgcagaacaggcggatgggatcctgccctgactcctggggtggaggggaaagcacccccctggcctgtgcctggctctgacccggcgtcagctctggtgcctgtgagccctcggggttactggcgtggaggccgtgcatgctcatgaaattcagcaaaacgtcagcgatttcagccctcctcgttctcgagagggcttcatactggaatctggagtcaccttggcttagccagttacacattcttttttttttttttcttaagagacggagtctcgctctgtcccccaggctggagtgccgcggtgcgatctcggctcactgcaagctccgcctcccgcgttcacgccattctcctgcctcagcctcctgagtagctgggactacaggcgcccgccaacacacccggttaatttttttttttttgtatttttagtagcgatggggtttcaccgtgttagccaggatggtcttgatctccagatctcatgatcctcccrccttggcctcccaaaatgctgggattacaggcgtgagccaccgcgccaggcccagttacacattcttaggtgttgcaacctggtaatgaagagtgggagatgcctgggggaagcagagggagaactcagattcttcagaggcaccatttacctctgatgattgttatgctgattataaatcagtttcatttgttcttcaaaagctcattggaagcattcccttggaggattgacaggctttcctaaaacgactgaactcactgaaatcagcccgtggctgaggttggcctccctgagaaacagactccaggccccagctcaggaggcagccggtgtccaggagccttcaggagccacagctgggggcagggaggggccctggcctgggcagaggggaggtcggactgccctgcaggtatacaaggcctcagccaccccacagcgtgctgcagagctgggatggcccctcggggatggcctgcgttgggcagtctgatggtcactgtgtccaccctgacccattgctggatgggggctgccccagcgagggcagtggaactgggccgggaggcggaatctgagtgcagggtctcagctgtgagccatcagcaacccacaccccakagccccgtcctggaggggaagggtggggggtatacctcagcacctacccttgatagcacctgatttcttttttttcttgttgtttgtttgagacggagttttgctcttgctgcccaggctggagtgcaatggcaccatcttggctcactgcaacctcggctgcccagatttaagcaattctcctgcctcagcctcccgagtagatgggattacagttgtgtgccaccacacccagctaattytgtatttttagtagagatgaggtttcaccatgttggttaggctggtcttgaactctcgacctctggtaatctacccgcctcagcctccccaagtgctggggttacaggcgtgagccaccgtgatctctttatttttaaaaatggataataaagtttaatgttcactagtcttttaaaattgccagttgtctcatacatatctgctctggacagaatggtgccctcataaatttctacattgaagccctatgccccaggatgggtgctttaggaggtgattaggtttagatgaggtcatggggtggggcccccaggctgcaattagagtccttgtaaggagaggaagagaccacagccctctcccttatgcggcaagaaggcaccgtctgctagctagaaagacagacctccacagaggccacctcagctggaagcgtgatgttgggcttccaacctccagagctctgggaagtaagtgtctgttgtataagcccccgatctctcatgcttcattatggcagcccaagcagactgaggcgtcgtaagtgtgttttcattctgtctgtttgagttggcatcaaattaggctgccccacacggcagcggctgtgtgaatcccactggccgtccggagcgtggttggaggcctctcggggggacattgcaggtgcctgtccaaagggcccatcgtggagccatcccactctggggactccagcgaggtctgggctccaggaagatgctgccatttgaagggtatgctgggttatgcactgagyatcctcacattggatgtccccccagttccatctttatagcagtctctcttttttttttttttttgaaatgaagtctcgctctggcacctaggctggagtgcggtagtgtgacctcggctcgctacaacctccgcctcccgggttgaagcagttctcctgcctcagcctcccgagtagatgggattacaggcacccgccaccacgcctggctaatttttgtatttttagtagagacggggtttcaccatgttggccaggctggtcttcaactcctggcctcaagacatccacccacctcagcctcccaaagtgctgggatgataggtgtgagccattgcgtctggcctgtggcagtcttttaacaacccaagatgaccagagccatgaagaaaaaaatggataaatatgatcacatacagacaaaaaatttctgtggggctacaaatacataaaacctaatgttaaacattaagctgggggaaattgccatgaaaatgacaatagttccttccataatttacraggarcttctataacacaataagagcaggaccaaaaacccagcagaaagacaaactcaggcagcttctaggaaagagagtgtcaattgtcaataaaacaggaaaagatgctggcctcatcaaagataaatgcaaatgaaaagatcgttgagatccatttgtcagagatgcaaaatattttaaagattgatcatactggccgggcgcggtggctcacgcctgtaatcccagcactttgggaggccaaggcaggcggatcacgaggttaggagatggagaccatcctggctaacacrgtgaatccccgtctctactaaaaatacaaaaaattagcctaactccccatgtggtggaggcaggggaggcagcatgggctgtgcagattgcggctcaccatccctgtccgggggcgggagtgtcaccagccacacacctggttgctggaggatgcagcggccagtccaggaacaactgggtcgaagcatggcgaacactgagaccctccgagcagatgaggttcttagcactcctggtctgagggcggatggagagaggcagtgtgctgtgggctgcctggctggttttctgggaaagcttccagaaccttcctgtcacaaaagagtttaaactctaggaaggacatcagagtagggtggtgcctgcccttcaggagctcacaggctggtgggcgagacgggccagattagaaccgggttggaatccaggggtggccagacagtgcgaggggtctgtgtgaggggtgggagggcggacggcagtcagggcaggtggcctgctcagaaggtggcctttgggtcatgtgatggcagcatgctccaaatctctgacgaggctctgctgtgttctgctgtggcacgggcataggtgtggggaggggcctgaggtgctctggtctgtttctaggcgttcccctcagaagagtccagctcagcctgcagggtgctcagaacggggttggaggctgggaagggctcattgctgccatttctttgaccccacagagtgctttttggraaccccctggccaccatccttagtttgcccaccaggagctgggtgcagccgactctggcacggctctgggcaagtccttgagaactcaggggtttctgttcatgtcacagacctgtcctggagtcagtcgggttttctttcagcagctgactgtgtggctggggtgtgtccagggtctgcgacaggctcgttggcttttccctggctggtcggtaacctcctctctggcatcttcctctcgccccccaggagagcactgtgaggtggatgcccgctcaggccgctgtgccaacggggtgtgcaagaacgggggcacctgcgtgaacctgctcatcggcggcttccactgcgtgtgtcctcctggcgagtatgagaggccctactgtgaggtgaccaccaggagcttcccgccccagtccttcgtcaccttccggggcctgagacagcgcttccacttcaccatctccctcacgtgagtgtgcgtcccgccgcgccacacgggggtctctttaggaaagggrcgagcttctccgtgcaccccatccctctagatcgtgrcgttgatgtcctccgtgtgtggcctttgatagttgagtagctccaggccaggcgcggtggctcacgcctgtaatcccagcactttgggaggccgaggcgggtggatcacctgaggttgggagtttgagaccagcctagtcaacatggcaaaaccccatctctactaaaaatacaaaaatgagctggatacagtggtttatgcctgtaatcccagctactcaggaggctgagacaagagaaccgcttgaaccagaaggtggaggttgcagtgagcygagactgtgccactgcactccgacctgggcaacagagcgagactccatctcaaaaaaaaccacaaaagcttattccttctgtgtctttgtttgtaccccttaacccacttctcttcagccccttccctgctccctccccagcctctggtgaccaccactatcctctccacctccaataacgtttaattaaatgtctgcacaagggaatgttacgctgctgcttgtcagattctgtatgtctgagattattgcactggacaattatgaacagtttcccttatgtgtgacggtggctaaaccatcagagctgaccctaaatcaccgagggttttgtagggaatacctttaraagtaaaatcataaggtgcctccccaagcttccagggcagtgacactttgggagcagtgggggctgtgggcagggccctcttgagcctctgagagccgctgtgaggggccgggttggggggcgcctagctgcttttgtttcaggtgggtgctttcatagccccttctcctctttctagtttctctttgccaagtgtccaggctcccaagtgggctccgggctccgttcccagctgcctctcatccccacagctctttgttctttccttctccttccccggcccccttctctgggccttggtttctgttttctggcctctccttttttttgctttttgcttgcattgttccaaccctcccctcggctttgggtcccttctttattgctccgtcgccagcggtgtacgtgtgcttgccaggggggccgtgcaggactgtttgacactgacaccgcccaccagcccccacctgggtccaaagggaaccgcacagaagtgaaacccaccaaaggcaatcaggtatgacccaggggctgagtctcaggaaacaagcctgcactgagttggtcccgtcgtcattaagatcccttctccctgctcattccctgcccaagcatcagtgtgctgtgtgggtattcttctttgtgtttgtcgtcatttcttgcttgcattctaaagagagggggtttgggcgacagttgggaaccatcagttttttytttttttttgagacggagtcttgctttgttgccaggctggagtgcagtggtggtatgatctcggctcactgcaacttccgcctcccaggttcaagcaattctcctgcctcaacctcttgagtagctgggattacaggtgcccaccaccatgcccggctaattttcgtatttttagtagagacggggtttcaccatgttggccaggctggtcaacctgacctcaggtgatccacccacctcggcctcccaaagtgctgggattacaggcgtgagccaccggccagccgaaaccatcaattttaactccagagaaaaggctgaggtcagatgctcgaggctggctcgggccgactcctgctgcaggaaaatggataaaccaaccttaggttaaaaggagttcctgccgtgtatctctgatggtggagacacccagccagctcaggagccagtcccaagctcactcaggaggttgccaagttctctgaaaccagggaggtgggggaggtgttgtggtgatttgggtctgaagaccccctgcccggggcccctgggtgggagaaggatttctgagaatttgatgatctcctgcccgagcaggtggtttttgctcagcgtgctctaagttctgacaggcctgttcatgttcaggcgtctgttcatgcctcttcctttcatttattcaaacagcccatattaagcactgatatggaccagatcttctttgggttctggaatgcagcagggaatgagagctgcggttcctccccttatggatcatacattcttataaaccaatgagtcagcagcatgatttcagaaattaactgagtgatgtcataggctgatgggaggtaagggcaaggtagagtacaatgagtcagggcaagtacagctgggttgacccctgagtgatctgcaaagcctgggaagattgtttctggcatagggggcagctggtgcaaaggccctggggtctttttgacctgtgtttgggagccaaaagatgctattgtggctgagtgccggggggagaggccataagaatggtccttccatagcatcatccctgcctgggaaggtaccaggtccccatgccctggcgcacacacggggggatctgttcacagcagcagaaaatgtacagcacgtgctttgcccaaacacatcagtaacaggtgtcctggccgctggtcgtacttgtagcatgttgtgcaaatgggatattttttgcattctacaggccgtagtaaccagactccccatggattctggtttgctgcttccagaaaagaaccctgcttatcaagcttgatgggctgtctgctcctatgagaaggacgcatgcctgacaccattctttcctgaatcgtagccccacgtgcttgccctcctccggctggacttgtcattcctaggcagcctttggaccctggggtcttcatcctgtgatgtgcctctgcttggccccacaggtttgccactcaggaaaggaacggcttgcttctctacaacggccgcttcaatgagaagcacgacttcatcgccctggagatcgtggacragcaggtgcagctcaccttctctgcaggtggggccttctccccaggaagggcagctctgagcaattcacagatactttgtgggttaaaacgaccctcgccctgtgcagcgcctccaagctgcttaccctttcatccctcacttgtaggtctaggaagctgtcttatttaagaaatccaaagtacacaaagatgttcataacaggccgggcgtggtggctcacgcctgtaatcccagcactttgggaggccgaggtgggtgaatcacaaggtcacgagatcgagaccagcctgaccaacatggtgaaaccccctctgtactaaaagtacaaaaattagctgggcgtggtggtgcacgcctgtaatctccgctactcaggaggctgaggcaggagaattgcttgaacccaggaagcagagggtgcagtgaggtgagatcacgccactgcaccccagcctggtgacggagtgagactctgtctcaaaaaataataataataaaaagatgttcataacagtgttatttatagtgctggaaatgtggacgatctggttcatgttttcagaaaccaaggaatcattaaattgtggtacatctctagattaaaaatgtcaacactggccgggtgcagtggctcatgcctgtaatccccagcactttgggaggccgaggcaggcagatcacctgaggtcaggagttagagaccagcctggctaacatggtgaaaccccatctctactgaaaatacaaaaattagccaggtatggtggcacttgcctgtaatcccagccactcaggaggctgaggcaggagaattgcttgaacctgggaggtggaggttgcagtgagctgagatcatgccattgcactccagcctgggtgacagagtgagactccatctcaaaaaaaaaaaaaaaaaaaattttttttttttttttttggacaaggctggccaggcaaggtggctcatgcctgtaatcctagcactttgagaggccaaggcgggcagattgcttgagctcagaagttcaagaccagcctgggcaatatagcgagactctgtctcttttaaaaaaaatatatcgacaaggccattaaacatgttattccagttgttagaaaagaacatttctccagactgccaacaggtatatctgtgtttttytggcacacatgacttttttttttgtttttgttcttcttttgagacaaagtcttactctttcacccaggctggagtgcagtggtgcaatattggctcactgcgacctccacctcccaggttcaagcgattctcatgcctcagcctctccagtagctgggaatacaggcacgtttcaccatgcccggctaatttttgtatttttagtagagacagggtttcactgtgttggccaggctggtcttgaactcctgacctcaagtgatccgcccaccttggcctcccaaagtgctgggattacagatgtgagccaccaggctcagcctggcacacttgactttcaggagtgaattctgccatctcctccttcacctggaagttcaccaagatggctcagagctgcttccgtctctagaaccctggcccgtgttgaatgacatgtgtgtgatggtggaggatggagctttgttttctatactcaataaagaaagggaggcacctgtaacagcagccaaccaccatgggagaggtggccatagccctccgggctctgtgaggtgggattaggctattcccctggccagtgtctcccacacccgtttccagaactcctgctggttccctggagacggtattctctgcccgggacctggtacccaccgcacctgtcctttggtgcccctgaagctccttcctcccagctgctgctgctgactcagggttgtgccccagaatccccaaagggactcgcccgccccactccagcaggagctcaaggggtggaaatgacagacaccccaaagcagagatgcacaagagacgcgtccgcgacctcacgatgggacgtgttacgtggtttaagagttgttaaaagcctgagatgacatttatttgattaagtgacctaaagtggaattggttttgatgattttgtctacgttgatgcaatgcataggaaaaagggttcgacctctggtgcggtgtaggtgtgactgctgctggtacagacagatgggttttccgtgtttatattttttcatatttagaaaaggaacaaggccaggcgcggtggctcacgcccgttatcccagcagtttgggaggccaaggcaggcagatcacgaggtcaggagttcgagactagactagccaacatggtgaaaccccatctctactaaaaatacaaaaattagccgggtgtggtggtgggtgcctgtaatcccagctactcaggaggctgaggcaggagaatctcttgaacccaggaggcggaggtggcagtgagctgagatcacgccactgcactccagcctgggcgacagagcaagactccatctcaaaacaaacaaaaccagaaaagaggaacaagaattacttttgtaaccagaaaagaaaatggatggagtggtgggcgcctcccaccatggtgccgtggggaggggagggaggacgtggccatgtgcacctgtctccccctgatgcctcacagcrcaatcctcggtccccagtaggcccygccaacccctgttttctctctgggtctccctcccaccatgcaggygagacaacaacgaccgtggcaccgaagkttcccagtggtgtgagtgaygggcggtggcactctgtgcaggtgcagtactacaacaaggtaagatgggccccaccacttccccctggccccagggcggctcgagaaggtgccctggggcgaggcgcagtggctcacgcctgtaatcccagcactttgagaggccaaggcaggtggattacctgaggtcaggagctcgagaccagcttggccaacgtggcgaaaccctgtctctaccaaaaatacaaaaattaaaaaattagccgggcgtggtggcgggtgcctgtaatcccagctactcaggaggctgaggcaggagagtcacttgagcctgggaggcagaagttacagtgagccgagatcgtgccactgtattccagcctgggtaacagagcgaaattccatctaaaaaaaaaaggaaggaaaaaaggtgccctggtagattttctgtcttgagacatttgtgctctgaatttttttttaaatgtgctattggaaaaaatggtttaggaaatgcacatttgtggagggtctgtgtaaatacacctgagccctgtgctggggtcatagtcccacccagagctctgggtcggggggtacacagggaccccggagatctcctgcgctgggggagggacacagaaagggcttattcatttgcagccaccttggccagagtctactagtggctgaaattctgggctgttcatacacggctctgtagccaaaatcgtccactgtacctggatgtaactggcgagccagaacactcttcaaggaagtgccgtgaaggctgggtggttttggtttcactttattttgctgttcgttggcttgtaaggaaacacattgttttttgcatcaaaatgctgtgctttccacggctgtgattttgcaaatcccttttctcttcttgggaagctccagggtgtgcccccgcttgctcgtgggtctgcgtgggtcttaccggctcctcctggagcctggccacccccgctgtgccccgcttcccggacttcacaaggctggggcctaagcttggttggcagacgagggctcctctgtcctccaggagaatcgacccagtccttctatggagagagcatcttccttctttcacagccactgtgcctggctgcgactcaccagcagttggggtccagccactgggcctgaggtcgtagtgtcgcctccactggctttcactctcctttccatgctggccaccggcgtccctccacctccctggcccgcccctcccatctgccttgaatatcccatcatctcccaggcgtgccacacagactccaagtagtggtcacctgcacagagaccatagtttttgtcctctgtcccatcagtgccaacccagggcaggtggagcttgagcctcatttgggaggagggcagatgggaggtgctggtgaggtttgggagctgagtgcttgctcggggtttggggggatattgagagaaggctggcaggtgtctgggcagggtctgggctgccgcacattggatgtcacccctagtggggcttggctgatgtttggagaaccatgtgcttgacagaggtgcaggggctggtggggtgaggggctcagggctgagcaagaggaagagggtagccctcacagacgcggatttatttgctgccattgtccatttcaaagaccgagtcttttcttgatacggtgccgtcctgtggctgtgtggggcagtgctagccagtgtgaagcgcgttcacctgggtgagctgcacgggtggccgttgcgtcctgctgcctggcgctgcctactctgacctggtgacccttcctgttgtgcccttccagccagctggggctggacaccagagctcaatgccccctggggtggtgcctyccaagggctgggccacaggggaccctggagacggtgccccatcgtcagggaagcatagggcataggtggcgcattttccttcctgcacgtatcagaagaccaagtccagagatgaacgtttgttgctggggagggggtaggcagggggaggtcgagtcagccttggtctccccatcagtgctcaacactccagaatcatcatctgcctatggcagaagcaacagtgtgtctgcagttgcagagggactcgcagccaggacgccactgtggccacctctgtccacactccgccctggctctgaacacagtgagtgttcactggggcccgcctgtggccgcccctttccgggagctcagaggagcaaagtccccgtgcaggacgccacctgcactgtcccggaggagaggggcctcatgtaagaagatamacagaggacggtggattaccgggatccatggcttccgtgtctagggccgggtcctgtcagcggtgcctgagcacagcctcccgtgtgggattaggcctttcctgcgagcgccagatacttctctctcttgcctgaggttatttgatggaggaaaccaaccagtttttactgtgtcttcaggcgtccattaggaggtctgacggggccacacactaggatgtgttagcagagattatgagcaccagcccgagaaggagacagtactgctgctccgtgacttagtctccgagtggcagctctgacaaacccaggtgcagaggcctcctctggagtgcacctgagctgggggcaggaccagtcaggttgggagcagtgtgggggcctggaggggtggcgggggccagcttgaggtcaggaagacaatcttctgggggctggttcctctgctctctgggcctccactttgtctccaatgtcacctctggtcctgtcctccagcagccaccttgggggtgaccttgggccaccagggaaggttttggggaagacgacaggctcagggtgggaggggacccccaggaggaggaggcgttggggctggacgatgaggggtgtccagggccatgaccagttgagaggggctcagggctggggctgcaagggtgatcttgagggtggtgggtgacactgccgagggaacccccctgcacacgcgtccctgcctgccttggctgatgcrgacggtcatcccccctgccccgcccagctgtgtccttgccccagcacgctccatttacctgccacaccacctcgctggttttggtttttgcatttttggggatgatgaagaaaacatacttgaaaaaattcagcatacagcagtctggagagggtggaagcattggtgcgggccatgccgctgctgcccaccctcctctcttcagtctcgttctctgtcccccgccctccagagtggctgtgtctctgaggtgtgggccacctgcattttagatctgagcatgatctcccgggtgttgcctgtcagagtggcctcctgcactgcctccacgtgcaacctgcggggacccttcccccacccaccagtgtacagggcctgggagctgccaggctggtggagcagtcagggtccccacaggaagcagatggggtgctccagtgggaccagccctggaagggttatttacaaagggctgggcagggcatggggcatccatgagaggcggtgtgggacccagggctggaggcagtgccagcggagctgcgatggcccttagtcctagagcatcaagggaaagggcagattggagcccagaaagaaggggtcatggtcagaagccacaggagagggctgcggaccacccaggaggggcacagctaaccagggaccctcctgacacccctcccctccctcactctatcctcccgtctggctccccactggccaaagccaccagaagccatggggtagggaaccctcccaggcagggagcaggcagagtctgtttatttttcctttctgcctgatgacattttagacgagaaggtttattggtctaattcaccttcagcaaaaccaaagggtacattggagtcggacgtttttccaggacggtcttttcaaaggcaggcacttgtacatttgtgtggcgctccgccaagcacagatgaacaacacagcccccacgcccacagccacgccgggaggtttggggccgagtggagcattttcagtcgttgcttcaccccaggctggttttttgtttgtttgtttgtttgttttttccctcaaggctggtttgaaggtgtgtccacaacttcaaaagggtggacatgcctgacggaaaacgttctccccacttgagaatcggttttgccctcattatgcttaagtgtttgctgctcctccatcgccctcggcatcctgggtgtttgggaagtgtggggagaagcttattccccacggagacagtgctrgggaggggccgtctggaaggatggggatcctcggggctgcactgagcgggtcattcccttactgtgcttccctgaggctgcctgcggggatcacgtttagaccccaccttgttccaggagctcctggcagggtcggggacacagacgtgccagcaagatgtttaacggggccctggggaagcaagggtggctcgtgtccacctgacctgggcatcttctaaagccagctgagcctgcccagagcctggagcacagtctcctggccagctggggaggcagggacatgcaggggaggtagtgcctgacatggacaccaggcagtgtggcccgctggggacccgtgagtgagctgtgcagtgaggcagtgaggtggagcgccaggaggcccagagctgctgggagatcccgcatgaagcagatgtgggaggcggtgagcagccgcgtcaggatttcccacctgggcactgccgccccttggggacgatgacccttcattgtgaggcctgttctgggcagcattcctgacctctggtcactagactccagctgttcccctaacccggttttgacaaccaagaggtcttcatcattgtcaggcccctgaggtcatgccctggatgagaaccactgggctagtgagacgggagctcagctagsgggagtcctggtagcttcaggtggagatgcgagaccctgggccggagcttgaggcagcagcctctacgtgggcagcaggtggtctccaaggggcactcggcatccgtcacctggccggggacgatgctgtgctggtcgcgatcgccatgctggccacgggtggctagaccacacgcaatgaagccccatgcctgagctggctgctggagtccttgggactctgcctcggcaatttggcttcctctggttctggtgattctgagatggcgcggggctgtctttggcatgctgcggaaagtgcttttataaagacagcatgaggcccggttgcaacaaaccggaggaccggcctctgcttctgttgagcagaggatgtaagtgctttgagatttccatgaccttgagatgaccgctaggtcctgctgtcattagggattgctcacctgttgcttgtcaggtcattcaaaacctcttgrgtctgtgctgcacattaaaccccagagtcccaaggagagtgggagatgtacccccggagcacccctggggtcgggggagcttctccgtttctgcacatgttctaaaaactcgaggacttccacccagacacttgggtcagggtgaggttttttgatgggaccctttctgggctctacagatctgccgtggttagacagttgtgtggtcccctgggtgaggccacgtagccttccctttccctccctccttctctcccttccatgttaattgagtgccaattacacgcacagaatccaacttacagaaacgaacttggaaggtatttaatagaatataaggtcctccgacagcggaacgtcaacaaccattgccaacagtgcggtggggttctgtgcggtgatgaggggaggagctcccaggatcttgttactagattttaaaagccatagttgtagggtgtattttatttattttatttttgagatggagtcccgctctgtcgcccaggcgcctttgttgctgtcttggctcactgcaacctctgcctcccaggttcaagcaattctcctgcctcagcctcctgagtagctgggtttacaggtgcgcgccaccacacccggttaatttttgtacttttagtagagattggagtttcaccatgttggccaggttgttttcaaactcctgacctcaggtgatctccctgccttggcctcccaaacagttaggattacaggcataagccactgcacctggccgagcctggttcttttagtggagggtggcatttagaaatccagatctgggtgcttggtgtgctcattgctttggggtgtctcactcccagtctctcttactgggcagagctaggacatagacgtctgtgtaggtgtgtgtgtgtgtacatatatacatgcacacacacttcatattgatctttttttcctatttatctatcactccctattggaagccatgaacttcactggagcactgctgcgtttgctctgctctgcacattcacatccccctgatgccgtcccagcccattcgtgctgcctggtaacagaacacacaaggctgggtacttacaaaccacagagattgatttctctgagtcctggaggctggaagcctgagcacctgcaggtttggggcctggcgaaggcccattcctcataaatggcagcgtctggggtcctcacatggcggaagaatgcaagacagtggacccactcccatgggcccttttattgaggcccttatcccattcttgaggggctcaccctcatgactttaccacctcctaaagggcccatctcttgaaaccatcccattggccatgaagtttcaacacgtgaactttgggggacacttcagaccatagcacccccaaattgctatattgaaatcctcacccccaaggtgatagtattaggaagtgcagcctttgggaggtgatcagggtctcccgcgagtggaatgaatgtccttataaaagagccccaagaccgcccctcaccccttctgtcatgtgaggatgtggtaagaaggtgtggtctaggaaccgggtggcgaacccttgccagacgttcaatctaccagcaccttgattttggactcgcagcctccagaactgtgagaaacagatgcatgttgtttacaaggcgctcagcctctgttacagcaacccaagcagagttagaggtcattcttgttgtttttcctcttctatatgtgtaactctttaccagttagaaaccttgttctcattttcctcagtatagttagtgatttttctcaaccttccattatctaaacaaccttccaacctcaccaggctgcagcttcactcagccccctccccggctgcgccctccccagccttgctgctctgcctcactcagccctgatggtactagccgactccagcagttggagatgggtctgcatagagacgtgactgaaatatttcattattcaaaaaagaagggaggaagggaagaaggaaggtttttaaaacaaatttaaagggaataaaaatccaaaataacaaaagctgtgggctgcagctaaagcagtgctgagagggaaatgtatagcactaaatacttacattagaaaagggggatgtttcaaatcaataatctgagcttctgcttcaagaacctagaaaaagaacaaaataaacccaaagccagcagaaagaaggaaataataaagataagagcagcagtcagtgaaattgaaacagcaaaacaatagagaaaatcaatgaaacaaagagccgattctttaacaaaatcttttcaaagggggggaaaacttctagcgtgactgataaggaaaagagaagacaaattgccaatatcaggaataaaataggctttgtagatgttaaaaagggtaataagggaataattaataaaaagaactctacatgtgtacatttaaaacccagatgcacggaccaactcctcaaaaaacacaaactactacaactcacccaagatgaagtcagtcctttgaatggctgtataaactattgaggaaatagaatttgtagtttaacattcccaaaaaggaaatctccaggcccagatggcttcacaagagaattctaacaaatatttaaagaattacatcaattctgcaacatctcttccagaaaatagagagcacttcccagttcagttcatgaagcattaccctcattccaataccagatgaagacagactaaacaaaaccacagaccactgttcctcatgaatatagatgtgattcatgttgacacagaaacctgcacacaagtggtacagcagcttttcataatatccccaaatgggagacagcccagatggccgtcactgggtgaatggttaaacaaactggtatgtccgtaccatggaacagggaatacttcttagcaccaaacaacttctcactctgctgagtgggaaaaggcaacccccaaaaggaccatactatgtgattccgtttgtatgacattgtgtttttttgtttgtttgcttttyagacagagttttgccttgtatcccaggctggagtgcagtggcacgatctcagctcactgcaacctccacatcctgggttcaagtgattctcctgcctcggctcccargtagctgagattgcaggcacacaccaccatgctcggctaattttgtatttttagtagagaaggggtttcaccatgttggtcaggctggttttgaactcctgacctcaagtaatccacccatctcgtgcttccaaagtgttgggattacaggcataagccactgcacctggcatttatgacattcttaatacgacagaataacaatggaaaacagagtagtggttgcctgggattgggctggggacaggagggaagtgggtgtggctgtgataggacacaggcagggtccttgtagtgatggaacgttctgtctggactgtgtcagtgtttgtacctgggtttgatattatactatctttttgcagggtgtttccatggatggaaactgtaaggggtacatgggatatctctgtattattgttttacaattgcatgtacmtctaaaattgtctcaaaatagaaagtttcatcaaaataactttcaggccaggtgtggtggctcacgcctgtaaccccagcactttgggaggctaaggtgggaggattgcttgagcccaggagttcaagatcagcctgggcaacatagggagaatacatctcttcaaaatacaaagtaaaaaaaaaaattagccgggtgtgtggtgcatgtgcctgtggtcccagctgcttgggaggctgaggtgggaggattacttgggcctggaaggtcgaggctgttgtaagccatgattgtaccactgcactccaacctgggcgaaagagtgagactcttgtcttaaaaaaaaatttttttttaagatttacaatgtttgctggtatatacatatgtttttctgaaggataaccctatgctctccaaaacaacaaacttgtgttttttttctttgtttgttttgagatgcagtctcactctgtcacccaggctggcacaatctcggctcactgcaacctccgcctcctgagttcaagccattctcctgccctcagcctcccaagtagctgggattacaggtgcgcaccaccaccacgcctggctaattttggtatttttagtagagatgggatttcaccatgttggccaggctggtctcgaactcctgacctcaggtgatccaactgcctcagcctcccaaagtgctggattataggcgtgagccaccgcacccggcccatacttgttaatagtgctcatcggatagctttttcaaggtcataaactgcctaaagcatggagtctttttttttttttttttctgagacgaagtttcgctcctgttgcccaggctggagtgtaaaggcgcgatctcggctcaccgcaacctctgcctcccaggttcaagcaattctcctgcctcagcctcccgagtaggtgggattacaggcctgcaccaccacgcccggctaattttgtatttttagtagagacggggtttctccatgttgaggctggtcttgaactcctgacctcaggtgatctgcccccctcggcctcccaaagtgctgggattacaggcgtgagccaccgcgcctggccagcatggagtcttgatcagatatttattattcctggtgatgcagtggtttggctgctggttcttctggtctatgcgattcagccagggctgtgtgaaggcctcactcatatgacctggccgttagccatggcagctggggcctctcatcttccagcaggccaccctggccgttcacttggtggcagggggttcctagcagccagagagggcgagtcccagtgcacggtgctttccaggccttatctcgtgtccttgtgccctgatgtcctgttgcccaggtcatgtggccaagcccagcctctaggtagagacatggaccattggtggcaagagccaggaggtggcattgcagaggccagacgtacagtgcaggaggcatcatcgtggcccttatagcaaaggtggataccaatgggaagaagaatgcaaagtgaggtggatttcgtgttccttttatgcccttctgtgccttcttacatgcacttgagttctttgtatttaaaaaaacaatatagcagttatctgggtcatgggactatgagccattttttttttttttgagatggagtctcgctctgtcgcccaggctggagtgcagtggcgtgatctcagctcactgcaagctccacctcctgggttcacaccattctcctgcctcagtctcctgagtagctgggactacaggcgcccaccaccatgcccggctaatttttatttatttatttatttattttttattattattatttttttttagtagagacggggtttcaccgtgttggccaggatggtctcagtcacctgacctcgtgatccgcccccccttggcctcccaaagtgctgcgattacaggtgtgagccactgcgcccggccctggttttttcttttaaatattctgtttaaaaaaatcatttgagggccaggcacggtggctcacgcctgtaatcctagcactttgggaggccgaggcaggcagatcacttgaagtcaggagttcaaaaccagcctggccaacctggcaaaaccccatctctactaaaaatacaaaaaaattagccgggcgtggtggcaggtgcccataatctcagctactcgggaggctgaggcaggagaatctcttgaacctgggaggtagaggttgcagtgagccaagaccgtgccactgcactctagcctgggcgacagagtgagactctgtctcaaaartaaaayaaaaaaaataaacaaaaagataattggatatacagaatatgtaagataaagaagctaaacttttacaaagttaattaagccttgcaaagtatgtaaaatccttatgataaaggaggtggccatgcaggctggtaattttgccctcagggccttgttggctttgattctgtctcataggaagttccgtgtttaagaggaggggatggggatgctccccaggtgttccgtggctgcgtgaaaggtcacgcccttcgtgagcttccctggcttctccagccccagcaggtgttctgtcaaatccactagtggggcctctgctaaggcagtctgcacgtgctcccatcagttggtgaagtcggcggccactgcctttacttaccctgcatctcggactcaggatgttcctgcctccttgagcccaagtgatgggggcatagaagccgayagaggggtcttcaggtggctagcgagctctgccagaaaggtggtgcagggccctgcttgcaggcgctgtggcaggtgggggctgccccgatgctgctatgtgatgtgacagataagtcacttggtttccgttcccaaacacrggcctggtcaggtggtagaaagtcacctgctatggaaacgtggtgattctcggaggcaagcgccgccccaccctgggcctttgtgttacagaaccctgttatggaaagtcgccccagggctggagcagccctcagtttcacgcccggctgaggttgcttcctgtctggcatcatagccactgtcctccagcagcctctgtctcacccccatccttcccaccccacccaacccctcactgctggggctctgagatgcactgtgccacggctgcctccctcccctctctgggctcctggcctttcccgcctctacccccccagcacctcggcagggagggtggtggtggctgaagtgtactggctgatgtcctgtcttgtgccaggctcatgtgtgtcccccacgtgatcctcatgttagctcctggaggaggaggtgctgttgctgtttcacagatgaggaaactgaagcacagagtagatgatgggagggccgggtttaggcggagccatggacccagcatctctcacccacccgtgtatccgctgctctgggacgtgccatccgagggctgtcgcgttttcctgccgtgaccatccccggcccccaccttctccctgtcttatccaggcgcttccatgctctgtcccccaattcagccctctccccaccttcaccttatcacacagatactgagcatgtcaccccttagtgggatgcaggccaggagggagggaggctggtcagaaaggtcatcagggcaagaagaggcagggggactaaggaagggggtcccgcgggcccagatcgaggacagagaggggactattaggtctttacaggagcaggccatgactttgtatgagcatgtgttagtgtgcaagactgtgtgcaaggtgagtgtgtacaggtgagtatattgtgcaagcatgagcacgagtatgggtgagcatgtgtgcacacaagtgtgtgctagtatatctgtgtgtgcacatgcaagtatgaatgatgtgagtgggtgtgtccacgtgtgcacacgtgtgagtgcatacgtgagtgggtgagtgcacctgggtgagtatgcatgtgtgtgggtgtgtgcacgtgtgtgaagaagcacacgtgtaaatgtgtgggtgagtgcacatttgagtgggtgagcatgcacatgtgggtaaatgtgcacatgagtgcacgagtgggtgagtgcatacgtgagtgcacatgagtggctgagtgtgcatatatgagtgcacgtgtgtgggcgagtgcatttgagtgtgggtgagcatatgtgggtgtgaatgtgggtatgtacgagtgtgggtaggtgtgcacatgtgagtatgaatgagtgcacgtgtgggtgaggrcacatttgagtgggtgagtgtatatgtgagtgtgaatgtggatgagtatgcacgagtgtgggtaggtgtgcacatgtgagtatgagcgcacgtgtgggtgagtgcacatttgagtgtgagtgtsggtaagtgcacgtgggttttgagtatgcacatgattgtgggtgagtgtacataagggtgagtgcacgtgtgcgtgggtgagtgtgcatgagtttgggtaagtgtacgtgtgagcgtatgaataaatgcacatgaatgtgagaaggcacgtgtgggagtgcacatgtgggtgtgaatgcgggtatgcacgtgagcgtgggtaaatgtgcacgagtatgagtgcatgtgcatgggtgagggcgcatttgagtgtgagtggtgagtgtgcacgtgtgggtttgagtatgcacgagtgtgggtgagtgtacacacgtgagtgtgagtgggcgagtgtacacatttttggtaagcttttttgcttgctcagaaaagtcattttcgagggaactgtagcccacctgccatccttcctgaagttttctcctgtttttcccgggacactcaggctactgtgttgtgggggctgagctcagaggccccatcccaggcactctgtcccggtgcccgtgtggaggaggcaggccccgggaggctgcagctcggaagtgtgcgttcctccttgtcccgcttgtcaggatttctctagctgggagtagcattaggattgagatgcctcccacccatagaggaacatgagtgagcttcttgttgagtgcttgaggagggtccctcaggttgtaccaagcaactttttgcctataaaatccccaagagaaggaacgtgttgctttccaagaaggcgctgtatctcactgcattttggcccttcatttgtcattggcaagaagacccccctctgagcaaatccccatataattcccaggctcccaaaacacctgggggagtagcctggccgcagaggtgacctggtcccgatggctgagccccaaaggagcagggctgagatggccctggcttcctcccatggaactgggggctttggtccagggtctggctcagtgggggctggcacggtgccctgctggatcatttccagaacaaaattaactaccacggggatcatggagctctgtaggaggagcttatctccgtccagtgctgaacacgcatgcccaggggactcctgcctccggacccacggttcttgtgtttccaaatgtactgtatacgtccatcaggaaagcacagagctcctcacttttgtctttggccagaatcatcggggaaacgggttagacccccttgcctgagaaataaaaggctttgtgtgatttctttaagaatctctaggtgaccggttggttctgacctttgttgaaaacttttctaatgctcccacaataagcctaatagcaccgtgcattactttcttggatagttgaataaatggaggaaatggcgggccagtgcccgaactccaagctgcaggtggctttgcgtcttagctcctggagaagagcctgcgggttcagcggagaggctaattgcacgagttgcttacttgctgcttttttctttaaagatgtaaaaatcaactttatgattttatgttatattttattttaatttatttatttatttattctgaggcggaatcttgctctgtcgcccaggctggagtgtagttgtacaatctcggcccactgcaacctccgtctcccgggttcaagcgattttccacctcagccacccaagtagctgggattacaggcccccaccaccatgcctggctaattttttttgtattttttcagtagagatggggtttcaccttgttggccaggctggtcgcaaactcctgactgcaagtgatccgcccacctcggcctcccaaagtgctgggattacaggcgtgagccactgcgttcagcccctgtattatgttattttaatatagggaagtattaaaacagcaaaacttgagaaaaccacttgcatgttattttgcttttcttcacatcttttcaagaagtaacaatagcaggcatggctgcaagcacttcacacatgtcattcatgtcgtcccacgaggaagatgctatttttacccccagttgtacagccaagtcctggcatgcagggaagtcatgtgactttcccaagtaggggcaggatatggacccttggctttaaggaggtgatgtccattggatgctgtggacactgctgtcctgtgagccccccgccggccttgggcccgcccagctggactctgagttgagaatgaggatgatagtaatatcagccacgccagctcakacactgcacagtttcagatccgtcctttcatttcattcccaaacagccctagagatagcagctatgcacttaccccctttctagaagagtctgcctaggctcatagagtatgtcttctgccccaggtccctggcaggtgagggattcaggagcacctgtccccctcagccagagttgggcagaggaacttgagttccccttacaacctgggatagtgtggagctgccctccccacccggtggcccagtggctcagttgggcttccagacggtttgctgctgacagccctgggggaataccgcacccttcgagccaggtcatcaaaagcagccggcagcccctgtgtagagggtggctacctggcggaacagggtcctgttacctgcctaggggtattgggaccaccaggaagtagcagctcggtctgaggtttgcattctggcaaagtcctgtccgaggctcctgggaggccagtttgaattctggaaggctgcgtgcatctgcgtgaatttgctcctcgtgacccttcccaccactttcccaagcagcttcggagaactgcagtggctgcctccgagggagagcttgtcgtctccatgccagaactggcacggggtcttgcccacatttcctggggcatttgtcggccagacaggcctgaactttgtcatcttgagaaatgacagcatggaacgttcagcgctgcagtttgactctgtacagacattcctgaggtccagccatctgtgaattctttgatatgaacgttggttaatcatttctgacacagagcatgaattcattcatttcctaagacgtgcccctcccacccccccacaccgccttcccctgctaccttccccagcattgaaaccgtacccccaccggcctcccaatgcagaatcgtctgcagcaggttaaaaggctggagaaatgtgagcacttcgtaaggaccaaatgcttttgtgcgcacacagaaactcccagcactgcgtagagcggctgagtggaagccaaggaggagggcctgcacgcagggaagaaaatacctcgaaggaaaataagaagaggctggaccccggggatgactcctggagcaggattccggatctgcacagcttagcgcttctgggccactccttgcagtgctcagcggcactgtaggttttttctcaggtggctgcaggagtgagcatgtggcttttccttgctggctctgtttccgcctgccccagggagcctgtgctggccagggttgcccgccgaggggtgtagaggtaccgtgggcagcccctgctgtctccagtcactgtgtgcgctgcctgccttgctcggcctgagtgaccaggtccagctactgagctttatgtcctggaagcgaggcctgggaattgcctttcctgcaaggggtgttggtgcaggggttggggggggtcctctgggcctggccggctgctgcgcagtacccagctgagccctggaagggcaggtgccggggcgctggggcctccaccgtgctggccttggcccatcctgtgcccggcgctttccaacacaagaattgagaaaaaactcagacacaaccctgtggcccccttcattcccacgctgtctttttcttttgtataaatatgtggcaaactttaaaaattcctcttagaaatgtgaggaggcggttcgtctgtctcattccttatccgcccccctctgcaacctgtaccattcatcgtcagctgtgacccagccaagccaccaagtgcttttcctggctggaaaactcagaggcggacacgccaccccacagtcgggagctgttaccaccacgtagtcttttctctgccgccgcctcgtgctccacgccggcctttcagcggagacgcactttgtcttcctttgacaaaaatggatgatctgagcccagatcacacacatctgctgctgttttcacttatccctattcaagccgcctgtgtaattgtccatgcgcctctcgacccctcctggagaatgttcacctctctgactgcgttttatcactcatagccacctggcaggaaggccaaataatgcattttctctccatgtcagggaaaaattggaaggatcttcccgaaagttcttcaggtggagagtggcagggggctggtgaggggggatgcccacccaggaatctttttttttttttaattttttccttattgaggtgaagttcacatagcataaaattaagctttaaaggggcttctagtatattcagagtattgtaccacaccacttctattgagatctaaaatgttttcatgccatcagttaaccaatagtaactttttaaaaaataataaaatattttcatcacccaggctggatggtacggtggctcatgcctgtaatcccagcactttgggaggccgaggcaggtggatcacttgaggtcaggagttcgagaccagcctggccatcatggtgaaaccccatctctactaaaaatacaaaaattagccaggtgtggtgatgggcacctgtagtcccagctacttgggaggctgaggcaggagaatcgcttgaacctgggaggcggaggttgcagtgagccgagatcatgccacggcactccagcctgggtgacagagcgagattccatctcaaaagaagtattttcatcaccccataccattagcagtcaccccccatcctcctccctgagctcctggcaacatctgtctgctctgtgtctgtggatgtgcctgtcctggacattgtgtaggaatggagtcacgcggtgcatggcctttcgtgtctggctgctttcactgagcgcgatgtgttccgggacccccgcaccgttgtgtgtcagcgcttcgtgcctttcggtggctgcgattccggtgcagggatgggccacagtttgcccactcatctactgatggacatttaggtggtttccacttcttgtgagttgtaaatagcaacgccgtcaacactcatgaactggtttttgagttcctgttttcagttcttttgggtacacgcctggggctggtggtgctgggtcatgtagtagttctgcgtttaatgctttggggacccccgtctgtgcgtctcaggtcacccacagcaccgtgtccatgcactccctgcctccgtgacacttgctggcctcaactgcagagtggacggttagcctgcgcgttaaacccacactcgccgagaggcgggagagtggacggttagcctgcgygttwaacccacactcgccgagaggcgggagagtggacggttagcctgcgcgttaaacccacactcgccgagaggcgggcattttaaaccagagcctcactcagcacctattcaggggtgacaggagagggatgggccatcgggatgctgtgatttctcctccgagcagcagggacctcagaccccacagatccccccgctcctctgtgcagccctcctgctggttcttccagctctccacctgagaacattcggctctttcgccaaaagtgctgttacttttgacccagtggccgccggtgggtgtctctgggagtcagaatcgagcagcacatcctgggcgctgtctatcagagaccgtttcctaaacgccctgtgcctgctgctctgattcaygaaggccagactgaagtcaggtgtcctagcagtgggtgtctcacatgagtcagtgccactcgaaaaacaagcgtggattgcattggctttgtcttttgcctccagctttctttatcctgctgttttttgcttgaatccgtagctctgagccattgattaccagcagcagtttacagcaactgcagttttgtaaacagtagcttaatgtcatgaaagccttcccagtgtaaatgctacttacgcccttcctccagyagtctcacgcccagccccmaaaatgtaaattataagttgtaaagataaggtggggctcacaaagtgaggggaggttctcctttccctgggatcgcatctcacatttaagcgtcccataatgggcacttccacgcgttttccaaagtgggccgcgttacacagcgagaaaacagatgatttttaatgcactcgcctacctgttgcttaaccaaaagtggagtctttaaggagacagcttatcagaccttgtgatttcatcagctgatgtaaaagaaaaatgaaaaaggtgatccatgcattcgaataccaggggtcatggtagaagcctcccttggatttacagacaagggcgtgtgggaaactcacgtatctctgttgatatcatcctcaattccctgtaacacagagaggacgtgtgttctaatagtaaatcgttatcttgcacaaaaagaaattgaggtacagtcatgggtctcactcacgttagatgattggataagagggaggagaagcctcagctggggtggccacatacagttgtgcaggctgcccactgcacaactccaggcagggcgtgctgcctgggtgtccagggtccccagaagtcatgcaacttggccatctggctgagctcctgtttccagttgtgtgtcctgcttttcagcctcgtttccctgatcaaaatagatactttgttcctattaaaaactgaagatttatttttgaatgaactatgtggttgttattttcctattaaaaggcactgaggatgatttaattaaattctacgtttttacaacgatctatttccacgttttataaagaagcatgagattgtatcatgctataaactcaaactgaccccagaactatcaggaggaggcatcgaacccatcctttataggggtggtgggagggaccctgctgggactggaagaaaaggttctctctggggtggagggggaggctctgctgcgcattgtgtgccaattgtggggcatggtggcacttgcctggcgatctcctggctcatcgtcacggccacctgtgggatgtaggtcttgttatccaggttgtgcagatgaaagacattctgttgcctgtcccggttggagctggcaccaactgtgtttctggaactttgagacccacatgcttaagttccgtggccagcatggattgtgtagggcgggtgctgcttttcctcctggaagggcgtctgaggctggctgggtggatatgcttcgtgtcctgggagggactgaccaggagctgagacctgcgagggctgtctggggaaagtgggctcgtccccggatggcaaaccacagtctcttggagaagggaaaggtttcacccaaggtcactgattccagaagaactcttgtacccaatcctggcccagagagggagttccacgccttagaggggagatgtggggccgtctgcaggccgggcagtggcctcctggtgtctgtactccaggagcacgaacctggccaggtgccgtggtcaggaggacacccccagaagagcagaagcgggtgttcacaggaggggccccaggacttgggtgttggctgcaacttcatttcctggggccaccatcacaaagtaccacggacagggtggctcaaacaacagacatgattctctctcagtctggtgcctagaagtcaaggcgcgggtagggccgtgcctcctccgaaggctgaaggggaggacccttcctgccttttcctagctgtcggtggcccaggtggcccttggcttgtaaacagctgctccagcagctgcctccgcggtcacgcagcttctccctgtgtgcctttgcatctcagcatctgtcctcttaagaggacaccagtcatcttggatcagggcccgcctactccaggacgtccgcatcttagctaattccatcagcaccagctctttgtccagaccaggccacgttctgagattctgggaagcagaacttgagggggcattgagcagcccagcacagctagtttggggaactaaaggccgggggctcctcatcccttgtctacgtgccgcccaccctgtgccatgtcctcctcgctctatgagtgacaggtgcgcctgctgagggcactggyggagaaaacgctgacaccttctgtgctttctcttcttacagcccaatattggccacctgggcctgccccatgggccgtccggggaaaagatggccgtggtgacagtggatgattgtgacacaaccatggctgtgcgctttggaaaggacatcgggaactacagctgcgctgcccagggcactcagacyggctccaagaagtgagcatcccaggaggggaggccctgggggtccgtacccccaaacatgctcaccctgcrgccttcccagggcagggccccacgtaggcactctgggtgcagtgccctggcgacctcattccaggctagagtcagacatcctgtccatggttggggcaccttccctctgaccttctagaataagtctccctaagtatgtgtcaagagtggccaggccgaccccagggttgtgatggccrgyttgcagaccccgagacggtctccrgccccatctccacggatcactggctttgtccccgcaaattctggtacctgggactccaggactctgttaagtgaagcactgtgtcagccagctggtcccagaggcttatgtttttttgttgttgttttgtttttttctgagatggggtctcgctctgttgcccaggctggagtgcagtggcacgattctagctcactgaagccttgacctcctggactcaagccatcctcctgccacagcctcccgagtagctgggactacaggcatgcaccaccacgcccagctaatttttgtatttttagtagacaccatcctgttggccaggatggtctcgatctcttgacctcgtgatctgcccgcctcagcctcccaaagtgctgggttctcattttcttctggcctcctttcaaggcccttccttttcctagaaggtctcagaggcaagggtaaagtatagtccctgctggccttgacctgtgctccctgcgctcacatcctgtctcggtgtggaccagcctgggtgggcggggcttggtggtcactggtgagcgtgaaacacccagatcgtcaggactgaacacaagtgtgagcaaacggaggcagtggcggcaccagacacaggagccccctctgactttggcctctccccgcctgtctgcttggtttctgaagtagttatggtggtagaggctacacagaggcaactgcggagcccagcccgccgtggccgcctctccccgccctgacgtcacagaagatggctttacctacccaggtccctggatctgaccggccctctactcctggggggtgtycccaacctgccagaagacttcccagtgcacaaccggcagttcgtgggctgcatgcggaacctgtcagtcgacggcaaaaatgtggacatggccggattcatcgccaacaatggcacccgggaaggtacgggtggccgtcagggcgtcggagctgccgcagtggcatctggctggacgtcggcagccacacagaggtcactgcttgcagatccctggggagccgtgtttttcttagaaatgtatgtgtccagcggtgggcagctcctgggatggaacccggagtccaggctggagatgtgcatctccgcagttcctgcatctgcagtttggggttgccttggcactgctggcccagccagctaacccgaggcgcacatgatcctagggtcttgcatatgtgtcaccaggtgaccgggccggctgccgtgatggcctggcgtcccagcrtctccaaatgtggtcagtgcgttcagcaccttcttagttcccatgttcctgccgttgccaggggcgttcagacctggtctgacttctgtccagccccgggtccattccgtcctggtttcccacgccacgtctggcgccggggaccccgggcggttcctccgagtcaggctctgccgcacgctctgtgttgccaggctgcrctgctcggaggaacttctgcgatgggaggcggtgtcagaatggaggcacctgtgtcaacaggtggaatatgtatctgtgtgagtgtccactccgattcggcgggaagaactgtgagcaaggtgagtggcyggcgtcgtccatccccccggtcacggcggcctgggaggcattgctccttgatgtgcccgggaccaccgtgagggggcttcacatccaggtccggcagcctctggtggtatatgctgcatttactgtggactcacaccgccctctccaagagactgtcctccgcagagcccctgctcctgcttctggggtccccagtccctcaggtgtggggtgggacaggtaggctgggccggcagagcccagccccagcaccccagccacggagcccagggatcctgaacccgcccccgtctgcctcctgtcaagcctgagagccccttaccacgcccatctgtggctgggagcctgcagatcttcatgcttcccagcaaggaggctcacgtcccagggtgcgcttctctggagcccacgtggctgactgtgagggctggatgcgtcacagaggggaggctcagacccaccttcgtgttaaagtgaaaaaggcccaggcctagcctgcaggcccatcccccgcccctgcagccaagtccgcggccgtgtgatttcgggagacacctgaggtccctgggcctgtgtccgcagccatgcctcacccccagctcttcagyggtgagagcgtcgtgtcctggagtgayctgaacatcatcatctctgtgccctggtacctggggctcatgttccggacccggaaggaggacagcgttctgatggaggccaccagtggtgggcccaccagctttcgcctccaggtgactggggccccgtgccaccaaggcacckgctaggtgggtgcccgagggagggacccaggcgctgggcttcctggtgcacactcgggcacctgctactcgcccttcctccggcgcccgcccctggggttctccgaagagggggaaggggaatatcagccctttctttcctctgggaggcggagacagcgagggagcatggggctgggccaaccctggggcccagcagagctcagcggcagttctggtctccctctagcctgagggtttggctggagcgtgggcattgcagaactgagggaggtgccgagccttcaggcggaaacagtgagcctcaccagttaaagctgcagccaggtgcaggccggggtggtggctcatgcctgtaatcccaacactttgggtggcggaggccggcggatcacctgaggtcagaagttcgagaccagcctggccaacatggtgaaaccccatctctactaaaaatacaaaaaaaattagccaggcttggtagtgggggcctgtaaccccagctacctgggaggctgaggcaggggaatcacttgaatctggaaggcggaggttgcagtgacccgagaacgtgtcaccacactccagtctggacgacaagacagagactccatctcaaaaagccacagccaggtggtggttggcaccaatgcacgtccactttctctgggagcttgagatgcctcagcccagaaatgcctaaagcccygctctgtcgctgtctgcctgttttctctgtcttattgatctttactgtttcgtttatttgaaacaaaagtttatttgttggataaaaattccgaacagcttttagaaggtgattcgaatgcactctttcctccggttttctgcgccacacggtttctgctcgcatcttccatgctccgtagacactttgtttgagaaacagttatgagccctgtcttctgtcatcgggctgcccttctgccacaacctccgccgcatgaggcagccatggggaccctccccaggagggtgcccggccctcggcttgccctcttgcccctctgcctgtgcatctgaaggtcattctcgtctgtagtgatggcggggcacgggcgctctcctgtaaacccagctgctgtgaccctttctgatcagggtctagctctgaaaactcactgggcaattctccctcctaaaaagctccctttatgtctctccttaggcctaattctcatcccctggcacgggagtggcctgtgggagccgtgcctgagcagggcgctctgtcttgatttgacagattcataactgagttattccttccttcatcctaggttttttttgttttgttttgttttgtttttttgagataaagttttgctcttgttgcccaggctggagtgcgacggcgtaacctcagctcactkcaacttctgccccccaggttcaagcgattctcctgcctcagcctccattgtagttgggattacaggagctcaccaccacacctggctaaatttgytgtatttttagtagagacagggttttgctatgttgaccaggctggtctcgaactcctgacctcaggtgatccactcgcctccgcctcccaaagtgctgggattacagatgtgactcttatgcttttctccaagtttgtgtgtgtgtgtgcgcatatctccgtgcaagtgtgtgtgcatgtcagtctgtgtatgtgcatctctccatgcgtgcacatttgtgcatgtctgtgtgcatgtggctgtatatgtatgtgtgtgcacccatgtgatgagacctgggtgcacatggtctcagagcagcactgacttccttctggttgttcattatctccaaccagagtgagcctggggctccctcctgacctcccttcagcgcacagagatgctgcccttaggttagcctcctctcctgccttggggtcggccacacgggaacactcaccctgttctcccaggatgacccccccyccccgctcctgcggtcaggaagtccctcccaaagcggcgtctgggctgcgtgtcctccgccatcagctgtgtgccgtggcggagccatgccttattgcctttgctccgttgggctctgggccttcttttgctgccgagtgtgtcctggacaccatcccgcatcaggggaagctgggctaaggtcagatggtgagaggtgagatggattttacggagtgcctgctccaagctctcgttccacacacgggaaactgaggcgtagaggctcttcactagggaccctatggttcttttcctgcccaggttcctgggacagccacaggcccttctctgtcactcctaaggacagcccatctagaaacagttctgtatagccaagattggcatgagggttggcgggtggacagagggactgcccagcacatgccctccccatcatgagtgcctggttggagtgtggcgrgggcaggaccgagagtgctcccagcaggctggtggaggtcagtccctcagcagatcagcgagggctcaggagatgggtcggggctgtggggcaggggctcaggcctggacagggagcctcctgttcctcccyatcacagctcgggagcattttccagcacagacctctcggattgcctggaaggtgtggtgtgcgccagggatgattacagctggcctgtgggcccttgttaacctgtaatttcatgagtctcccaggcagccccagaagcttgctccaggccaaaacttggcaagtgcggtgctgcctggggatggtattttctgtgtggtggtttcactgtcagaacaaattaaattggctgttggatgcaggtgatgaactggagcttgcaagttgtcatttggcagtggggtctctgtaggaaaaaagtgcgctttcagtaggaatggtgctggaagccacagactccggtgctgtttgtgtaattacatcatggagggctcatccccagattaggaattttgccagggactacagccagccctccctgtggaagtctgggtggctggaggggtggccttgaggggatgctgcagaccccactgggcacccagaaggcccccagggcagctcgcagaggccggtcaaccacacgttacygaaggttctgggggatttctccttgccattatcagcttgcaggcctcccgtgggcctgtgagctccgtaaagcagcagtttggctgtccctcaaaggatgtctcctgtgcccctgccactgtggtgggacaaagaagactccattgtaatcccacagcccaagcaatttggataattgctctcgggcacccaaaatccacccaccttgtcaggtgggataaccttgagattgctgaatgcctctctgactgagagctggggacacactctcagttacctcccataaaacaggttcatcctgtggatatcacttttgtttgtagatataacatcacttttatcactgatctgctcactttggagttctttaagcaagaacaatgcaagagatggcaaaggaattttttttttttttttttttttgagacggagtctcgctctgtcacccaggctggagtgcagtggcatgatctcagcccattgcaagctctgtctcccaggttcacgccattctcctgcctcagcctcccgagtagttggggctacaggcccctgccacgacgcctggctaattttttgtatttttagtagagacagggtttcaccgggttagccaggatggtctcggtctcctgacctcgtgatccacccgcctcagcctcccaaagtgctgggattacaggcacgagccactgtgcacggccaagcaaaggaaattaataagctgacttctatagaacaaaagaaaacaaaatggaggctgggtgcagtggctcacgcctgtaatcccagcactttgggagactgaggcgggtggatcacctgaggtcaggagtttgagaccagcatggccaacatggggaaaccccatctctgctaaaaatacaaaaattagctgggtgtggtggtgcatacctgtaatcccagctactccggaggctaaggcaggagaatcactcgaactcaggaggcagaggttgcagtgagccaaggttataccactgtactccagcctgggtaacaagagcgaaactgtctcaaaaaaaagacaaaatagaaaaaggtgaaaagttatcttcttaaaataactatcaggccaggtacagtggctcatggatgtaatcctaccactttggaaggccaaggcaggtggatcacctgaggtcaggagttcaagaccagcctggccatcatggagaaaccttgtttctactaaaaatacaaaaattagccaggtgtgcatctgtttttttgtgtgtgtgtgcccccctcccccaccaaaaacccaaactatcaatagagaccaaaaagcaaaatacagttttagttacataatctttacagccagttaaaacctgtatcctgttttctctcatgaatttatcttagactgatgtgatatttagaagtagatttstaggttagcaagcatgtagcgttttcttttcttttttctttttcttttttttttgaaatggagtctcactctgtctcccaggttggagtgcagtggcgtgaactctgctcactgcaacctctgcctcccaggttcaagggattctcctacctcagcctcccgagtagctgagattacaggtgtgtgccaccacgcccagctaatttttgtatttttagtagagacaggttttcaccatgttggccaggctggtctccaactcctgacctcaggtgacccacccgcctcgatctcccaaagtgctggtatttcaggtgtgagccaccgcgcccagcctcatgtagcattttctagtaaatcattttggtattgtttttagcataattgcaggtcaaagaatgtataccatgtggtttcagagctttgaaatgtggtttacagcccagatctagtcagttttttttttctttttttctttttttttttttttttttgagacggagtttcactctgtcaccaggctggagtgcagtggtgcaatctcagctcactgcagcctccacctcccgggttcaagggattcccttgcctcagcctccttagtagctggaattataggtgcctgccaccacatccagataatgtttgtatttttagtagagacggggtttcaccatgtaggccatgctggtctcgatcccctgacctcaggtgatctgtctgcctccacctcccaaagtattgggattagagttgtgagccaccgtgcctggcctctagccagttttgtacacatgcccctgtgtgctctgcagttgttatctgtactgttctatatacatcaagtaggttaaatttgttaatcgtggtattcaaatattctatatcgttattgttttttttgtgtgtgtgacagagtcttgctctgtcgcccaggctggagtgcagtggcttgatctcgtctcactgcaagctccacctcctgggttcatgccattctcctgcctcagcctcccaaatagctgggactacaggcgcccactaccacgcctggctattttttttttttttttgtatttttagtagacacggggtttcaccgtgttagccaggatggcctcgatctcctgaccttgtgatccacccgcctcagcctcccaaagtgctgggattacaggtgtaagccaccgcgccagcctattggttttaattattgtttttttgtctttgtctcctcacttactgagagaagttagttacaaatctaccttgactgtagatttatctattacttctcttagtaatcttgatttttgctatatagattttgaggccaggttattaggtgcatacaaatttagagctgatttatcttcccagcaaattgacttggttatcattatgaaattcctctttttctgtagtgaggacttttgccttaagtctactttgtctcatattaacatagctataccatttgtcttttggttggtatttatatgatgtatttttttctatccttttactttcaacattttctgtatccttatatttcaggtataatataagcagtgtgctaatagttgtttttctaaaatctaggctattttttgaagttatctttaaatatgagcatcttaggttagttacaaccttgttttctgattcttcttacatgtacttaaacatggccgtttgacccttatctctgtaacacctacacccagaagtaagtctaattgtctcactgagtctgtttccttgaaagttttgtggttcccagtgttatttttgagtctgtgtctgatgaatctgtggtctgttgccactcttccttgcttctcttggttttcaagcatattaccttatatcctcgtatacttggctattttttattgagtgctagacattttattgaaaaactagagagcatttgaaactagaatgggggccaggtgcagtggctcatgcctgtaatcccagcactttgggaggccaagacaggcagatcacctgaggtcaggagttcgagaccagcctgaccaacatggagaagccccgtctctactaaaaatacagaaaattagctgggtgtggtggtgggtacctgtatctcagctactcgggaggctgaggcaggagaatcacttgaacctgggaggtggagtttacagtgagctgagattgtgccattgcactccagcctgggcaacaagagtgaaactctgtctcaaaaaaaaaaaaaagaaaaagagaaactagaatggggatgatggggatgtcattatcttccatgtttgcttctggcaaccactaggagcactttccctcccagagcacttgaatgcagtcacagacttttttgtttgtgtgtttttgagatggagtctcgctccatcgcccaggctggagtgcggtggcgtgatctcggttcactgctacctccgcctcccgagttcaagcaattctcctgtctcagcctcccaagcagctggaactacaggcacctgccaccacgcccagctaattttttgtatttttagtagagatggggtttcaccttgttggtcaggctggtctcaaactcctgacctcaggtgatccacccgccttggtctcccaaagtcacagagtttaatgcagtcacagactgaggtggttcaaagctgggcttccagtcctgcaaaggtggctctttttcgtttttatcgttagtgtaaacccctcagggttccaaccagaagccaaggaacaacmcttggcagtccatgaaccccagtttttaatcctccagccccatgaacctagaaagcttttaggcatcttgagactctaggtcacaggcgactgatggagcgtcgtaccacctgctgatagggctgaagagtgccaaggagggcaggggtttcaggtacctggcagccgtgacctgactgcacgctcagcctccactgtgtcttccagaaccagctgacggccttgcagggaagcacacgccacgctgttttgcagattctgtcttttccttggtygtgagcctgaaactctgttttgcctggagccacttcagtgtcttcaaacagacattctttaatattttgtctcatgttcgtaggtgatttcaagaggagaggtggtccaaattgccaagtcctttcttaggagatctaagattttcacgctgcccttggcctaccttattttaaaatatgagtgttttaggccagttgcaatgctgatttttgtttttttcatacatgtaattaaacacagaggattaaatcttgtcttataaagtataatgtttacatccaaaaataggagcccagtagttacctgaatcgagctgggtcccagtacttaaaagcctaatggggcttgttcttggcgcttcccttacttgacctccatgaagcgattgatcctttttcccgtagaataagacaagcaattctgatcagtgttaaaggcaacagcaacaaagaacaactttgcctatactttttttttttttgagacaggttctcactctgtcacccaagtcgaagtacagtagtgctacctaggctcactgcaacctctgcctcctgggcttgagtgatccttccacctcagcctcccaagtagctgggattacaggagcacaccaccatgcccagctaatttttgtatttttagtagacacgaggttttgccatgtttgccaggctggccttgacctcctggcctcaagcaatccacccgccttggcttcccaaagtgctgaaattacaggtgtgagccaccacgcccagccaactttgtctaatgatgattattattttgagacagagtctcgctcttgtctcccaggctggagtgcagtggcgcgatctcggctcactgcaacctctagtagactcccaggttcaagcgattctgctgccttagcctgcggagtagccgggcttacaggtgcctgccaccatgcctggctaatttcagtatttttagtagaggcaggtttcaccatgttggccaggctggtcttgaactcgtgacctcaggtgatccgcctgctgtggcctcccaacgtgctgggattaaaggcctgagccactgctcccagccaactttgcctaactttttttttttctcgagaccaagtctcgctctgtcacccagggtggagtgcaatgctgcgatctcagctcactgcaacctccacctcccaggttcaagcagttctcctgccccagcctctgagtagccaggattacaggcacctaccaccacacctagctaatttttgtatttttagtaaagatggggtttcaccatgttggccaggctggtcacgaacttttgacttcaggtgatccacccacctcagcctcccaaaatgctgagattacaggcctgagccaccgcacctggccaactttgcctaatttttaagcctatcttgtatctggtgccacataatcagtctcctttcacagcttccttgtttaagtgactgcaaaatgttttctctttcattgtcattgtaccaatcagtcggtgtggctctccctgctccagatcctgaacaactacctccagtttgaggtgtcccacggcccctccgatgtggagtccgtgatgctgtccgggttgcgggtgaccgacggggagtggcaccacctgctgatcgagctgaagaatgttaaggaggacagtgagatgaagcacctggtcaccatgaccttggactatgggatggaccaggtgagctggcacctgcacctcctctggggatagacccttcctccggcccagggaaaaacagaatgaccccttgacgtgccaggacccaccagagaccttgtggatttggggaggcactttctgggtccccgcaggtgggcttctsttctgccctgtactgaggtcactggcatcttcctcacctccttcatccggatgccccgcccccggcagtcagcagctgacttcctccagctgcatttctcatcatgatgctgttggtgccttcagcagtggtttcttttagcaaagccatcttgagcaacacctgcaggctcagcaccatgtctttagggtactgaagtagcaatgctggggcccgtgccctcagagcatggatggggagcaaaactgggagagcagtgagacccaggtcctggacaggcctgtgagacaccagggagccacacatgtcccaggcaggcaggtggtgktatcccagacaatgttcggaacacttaaccaaactaggtttccacagtttgcaggcaggtaacccaagatgttgtctgtgaaatgcccacacacttaaggggcgacctgggatctccaagagctcttggagccaaggctcatcttacaacacagacctgggagtaaataggtgtgttccaggcacctgcctttctgggactggatctcagccgagaccctcttgggttcccacagtgttaatgagtgagcggatttccgttcactgcagtcttcctgactcgccaagctctctgtcacagcgtggctggtttagtgttgtgcccttgacggaggcgggacagttgcccacgttgaccccactggccgcctcagctaggctggggcatggacacccatcctctggcctggtcccctcgccctggtcatcacagccagcctcgctgtccagctgggcccagctctctctttggaggcccagatgtcctcaggctctgcggagtttgttgaagtgactgtttagacttccagtgtatccttcccatctgagagacgtttctaggatggtggatgcagcccccagatccccggcccctctctccgcacagaacaaggcagatatcgggggcatgcttcccgggctgacggtaaggagcgtggtggtcggaggcgcctctgaagacaaggtctccgtgcgccgtggattccgaggctgcatgcaggtgcgtgggggttgtggggggcggggggaggcctgcccctcacaggcagctccgaggctggcagcaccataggtggttccgttggtcaacctgttagctttcaacgagtgaagaatttgtctgacaggcatccccactttaacagctcctgtttcctcttcagacccattctcccctgcggttccccttggcatccgggccgtccctggcccccacagctccccaccgccatgccagccacctgcccctctgcctttgtgaagtgtcctgaatcgagccccttgccgccacccccacccagtccaaccacagacgtcacccaagtgggccccgtgcctgtcccctggagccaggggttccagctacggccgagggagctgctctgagtcgttcagctctcagccccctcggcagggacatccactcctcacgcccccaccgcgcaccccaggagctcaggctggcgtgccctctgagctcctcacccagccctccactgcactccggccagcaggccgtggggcaagaggaacaaccctgcccgccccagctctgtagataaatgaggcatcacagatgaatgcctcgcaagggaccagagaggtctcagggttcccttaacccctacatacctttcygggctcctgtagccccagtgccgtttacttaatgcagggagtgaggatgggggggacscccaccaacgtcgccaccctgaacatgaacaacgcactcaaggtcagggtgaaggacggctgtgatgtggacgayccctgtacctcgagcccctgtccccccaatagccgctgccacgacgcctgggaggacyacagctgcgtctgtgacaaaggtgggaccgccctcccggggcccttcagtgacagggaggtctcttatggctgaaacacaggaggggggctcagtttagacattagcgtcccyagccaactccctgtggttccgtggagccctgagctttattttataacaagygggcccctcctagagagagactctgagcctcttccttactcaaggcacagagtgccccaggcgctctcctcagcacatggggtgatcagcaaagaaacagkgaaaagtaaggcygggtgcagtggctcatacctgtaatcccagcactttgggaggccgaggtgggtggatcacttgaagccaggagttcaagaccagccaggcaacatggtgaaaccccatctctacgaaaaaaaaaaaaaaaaaaaaaaaagcaaaaattagccaggcatggtggcacgcatctgtagtcctagctacgtgggaggctgaggtgggaggatcacttgagcttcttaggcaaaggttccagtgagctgagatcatgccactgcacctcagcctgggcaacagagcaagactcttctcaataaataaataaataaaagaattagtgaaaagtgcatattaagaaaatcctccattcagggtggcctcagagttttgaggtgcttaagtcatcttctgctggtggccattccccatgtgtcctggggcagcctgggccccgtgttccaaggctctcaccctccttggggcagcccgggaaggccttcctctctgcatcactaagtctaacccgcctaacgctgtgttttcggggactctgtggcactcttcctcttccctctgctgagtaccagggaaagtcagatcttctggaggggacaggttgctccagatattttaacgtggaagktctcgtggattgtgggtggaggtaatgctggctctgtccttgcagggtaccttggaataaactgtgtggatgcctgtcacctgaacccctgcgagaacatgggggcctgcgtgcgctcccccggctccccgcagggctacgtgtgcgagtgtgggcccagtcactacgggccgtactgtgagaacaagtaagagcagcccctggtgcctccctgcaccttcagagtccatgtggctgtgttccctcgactcagtgtcttctctttcttattttgacccaaagatatgtgtgattctgggtaacagggacatatttttttttaatttggcatgaattaagtgaaaatcaaattttttttaatttttattttatttttatttttttgagacagagtcttgctctgtcacccaggctggagtgcaatggcgcgatcttggctccttgcaacctctgcctcctgggctcaagtgattctcctgcctcggcctcccgagtagctggtcctacaggtgcccgccaccatgcccagctaatattttgtatttttagtagaaatggagtttcaccatattggtcaggctggtctcgaactcctgacctcaagtgatccacctgcctcagcctcccaaagtgctgggattacgggtgtgagccaccacgcttgggcaatgagaatcaatttggacgtctcaaactaaccccattggatcatgtgtccacacctgaaacatgcaaatgactcacctggagtcctcactgggcccagagcaaacaggccccatgagatgcagggagacgcatgtggtttacagagaatgctttctctgtcgagtcgctgggcttgaagtcatttctgatgtgtgcggagatcctagtgtggttaggacaggcagcagcgtgctctctgggctctgggctctgtaccctttgcacggggatcgctgggtacaggtgcgtagtcatcacaagcgtcactttgtccaaggtggagctgctgggttcttcataaaccaaggttccaggccgccgtggaggtgatgcccctgtggctcattgtcctcagctgctggtggccatcaggtgcagggacacctgctatgctccgttctttgtcctcccgagcctagagcaggtgctgtgatcccggctgtgaccccatgagtgggaagcagcctgtgccctggagctggtgacctcacgagaagatggcaccacatcattcttggatatcagcaagatgtgatgccagggagagcgccgcggaggtgccctgggagtggagagggaggtgggagccagtgtggctgaagcgggagggcattctgggagcgaaagcaacagagccaagctggagaggagtaaggggatgaggctgatctagagaggcctgggtggggacrgaggtgggcccgcaagccaggaacagaattcggctgtgtggaggccgtgggggcccagcactaaagtggcaggacctggtcttagggaacccccacctgccgcatggagcacagcttggagcagggggagttgccaagaggctgatccagcatctccatgccyggcgccacagtcaccactgctgcagggggatgaaggttctggggcccccacgctgcacacacacatccataaacgccagactctatctctggcctggttgtctttatgaccctgatttgtacacagtccttaatacttgctcgccaagtgagtgaatgctagaggctggcagctgggtggagggaacttggttagccaggggggattgcaggagcccgcaggacactcgggcggggccgttgcaggcaggtgggccttcaggtgactgcgcaggtgcagccctgtcaggaacaggtagggagactcatgcacagcagcggccagcacctcggaggcctggctttgtccctgcagtgttgctcatcttcagtgtctgttgctctctgccgggggaggctcagggaggcaggactggcttctgctggattccgagtgcacgggcgcatgccgccgtcctaaggggcatgctacaccagggcatggctgccctgagcatctgtgggtctgggggccaggggacctgggggacaacaaaagctacaaaactccctgtttaggagcttcctgcgggcatctcatgctggcattcaccccaagaccactttgagaagttgtgccaggcagctgagctcagtctgcctggggctgcatcgtgaaaggccagccttgcagtgggggttcattgtcattaagccccaatgagtcaggcatcatgtggacgtggggcacacggtggacagagatgtcatcccagtcgctttgggcatggtggatctgtgggtggggggtgaggttgggagccggtagaggggagactgaggccatgtaacgtggaaggggaagctcccagagctggacccagccaggcctcctgggcaaccatctccatgctgcctgcaggcctcttctcattccagaaagcacagttacataaaccttccagctgccctcttattttccccacagactcgaccttccgtgccccagaggctggtgggggaaccccgtctgtggaccctgccactgtgccgtcagcaaaggctttgatcccgactgtaataagaccaacggccagtgccaatgcaaggtgaggcccmgcccccatgatccctgcatgcygtgtttgctcacacacatgcacagctgcccctaaatacacacacgccttcacataccctgtcggtacacactcacacccctgcacacacacctgtgcccactcacatcacatttgtgtacagatgtggtttttggtttccttgctgctcccccgtgctctgtgaatactccatggctgctttccacgtgtaaactacgggttcagccctgccagcccccgcccgtggaacaggaatccctgcctcctcccggcctactgcccatggctgtgggaagcccacccgtttctgagggctggctcatctatggcaccaccccggccctcctggcctcctggttggccattttcctggtctttttttttttttttttgagacagagtctcgctgtgtcgcccaggctggagtgcagtggtgcgatctcggctcactgcagcctccgcctcccgggttccagcaattcttctgcctcagcctcctgagtagctgggattataggcgcccaccaccatgcccagctaatttttgtatttttagtagagacaggatttcaccatgttggccaggctggtcttgaactcctgacctcaggtgatccgcccgcctcagcctcccagagtgctgggattacaggcgtgagccaccgtgcctggccattttcctggtctttaccaagctggtgtcccatgatgacagcagttttaaaatagaaagtgtcactaagtgcgttatgccccacgcctgtccagggcggtcagtcctaacctgcatgcagcacggagctcacatctcgtgtctccagaaatgcacacgcgttctcagtgcagactctagggacccctccccagccctctcaggatacatcacctccttcaggatcttcgtgtacaccacggccatggcgctcacagtgacttgaaacccaaatgttaggtctgagggtaacaggagcctgggcgagggacgtgagcttcctgcagatgcggmtggccctaggagggaagctggtaccagggcacccttggatgccatctcgtgatgtcagtagtgtccccccccagtgcctgcggtggttccaacagcaaatgggacttgtgtcctgaaaggctcaaattaaacagctctcctgggtcagggtcggtccacacgtcaccagatggcggtggtggcatagtgggtggcagagcagagagaacatggggagtgcattggcgaaaacttgcctacgatttttttctcatccaaagttataggcagggcgtggtggctcatgcctgtaatcacagctactctggaggccgaggcaggagggattacttgagcccaggagttcaagaccagcctgggcaacatagtgagactcccatttctacaaaaaataaaaacattagctgagcgtgctgatgcttgcctgtgatcccagctactcaggaggctgaggtgggaggatcacttgagccctggaggttgaggctgcagtgagctgtgactgcaccactgcactccagactgggcaacacagtgagaccccatctcaaaaaaataaaaaaacaaagttatacaaaatgtaataaaaacccataaagatcgcagtcaccccatgcgcctcccagctgtgattgttagtgttttagcatctcttctgggcctgtcgttcactgtcattttacacacagtcggagtccccacctgacacacaggtctgaacgttgctcacgagtctgcccaagtcacagcctggtcacagcctgccccgttttccggggcggggttgagggggtgctacttgggcctggggagtcccggtgaccagcccaggcaatgtagctggtaaacggcaagggtcaggcatgaacccaggactttctgaacccgaagtacaagctcttgattgtcaccctgacccacccaayggtggacgttcaggtggcttctaatttttcaaaacaactttaaaaaaacgcccaagggctatccccatacgtaagcctccatttggatctctgattctttttaggacaaatacgaaggtgcccactgttgagacttgttaagacatgagggagggcgtgcttcccggaagaactgctctcctgggtccggccttgtggggccttgggaggcagcccccgttgggtgtgggatgtgggcagagggtagccatgaggggtgggayggctggcggccaacacacacacccgggtgggagtctggacgtcgctcgggaaacacgctgcaaggtagggcctctcccrggcatctgaagtcacaggccctgcctctggcttttgcaggagaattactacaagcyccyagcccaggacacctgtctgccctgcgactgcttcccccatggctcccacagccgcacttgcgacatggccaccgggcagtgtgcctgcaagccyggcgtcatcggccgccagtgcaaccgctgcgacaacccgtttgccgaggtcaccacgctcggctgtgaaggtccgcgttgcccctcgacaccctgcaggttacagcgcggggacaggctgctgcactggcgtgcacgtgtgtgcatgcacgctgggtgtttggggraccctgggctccctcgtgttctgagttctcttgaccttctagaaacctggttctgcgtgagggggtgtgggtcagagcctggtcacccctctccagctctgacatggatgggggcaggggagatgctagggttcggttcttggtgggagcagggcctcctgcagggaggcgcatgcagacagtggtgcctgtttgtggtcgtgggtgtggcgtgccccgctgagcagacttctctcttctctaccccagtgatctacaatggctgtcccaaagcatttgaggccggcatctggtggccacagaccaagttcgggcagccggctgcggtgccatgccctaagggatccgttggtgagtcgccgtggcctgtgtgtagggaactgaggcaggcgtccttgtgggaggagccagtcgagatgtggggactcatggaatgtttcgtgttgaaaaaatatccgcaggcaaagtgctggggagaaatccgatcgccttttccctaccaggaaatacacaaagcaggcagagggcgcaacagaaacatgaacagtgcagcgcgtgtggggacgcccgccagtcaggcccggccagtccctgctctgccgctcaggctggggcaccgggacaagtggcttcactgttcatagcatcgggttacctctgtgaaatggggacattgactgtgtccactctgtgaggggcgtctggaaaatccagtgaggcaaggaaaggcccagccgaaatggattcctggtgcatgggatcgtggctgccggcagatggtgttgctgatttctttcctcacggacttgctcggaagtgctggctcctgttggctgggckcccgaaacgcctggttgtcagtgtcagagcagcttcggccgtggccctgacatgaaagaggggcgctggtgtcgacctcctggcccccatggggttctaaccaccacgcagtgttctgggtttaagtatattcagattgtggattgaaatacacaagcattgatcaacagtttgagtttcaggctttgcacacctgctctccttccccaggaaatgcggtccgacactgcagcggggagaagggctggctgcccccagagctctttaactgtaccaccntctccttcgtggacctcagggccatggtaggggcgcctcggggatgtgtgttcagcaggggcacgtgtgtgttcgtgtatgcgtgagagagtttgtgtgggccgaggctcctgggctggggagtgttggggcggctgggatggcgcagggacagccccacgggcccgcagcctggagccagcaggttcctgtggacttcggggtgttggcacctgagccaggcacccccacgtggacttctctcccccagaggacccagctctgtgtctttggttctgaaaacacggggtccctgcatttgactccatttgccctctgatcctgccctatttcatggcttttgttcccacgtctcccactcgctatctttctctgagccctctttggcccaccagaccctcgtttccatggtctagctgtcagcagtgctcatttttgggctttttgttttttgtttctttttttggagatggagtctcactctatctcctaagctagaggacagtggcacggtctcagcttgctgcaacctctgcttcccggattcaagcgattctgcctcagcctccctggtagttgggacttacaggtgcccaccaccacaccctgctaatttttttatttttaaaatagagacatagagtagagtattttcaaaatagagagtagagacgggttttcaccatattggacaggctggtcttgaattcctgacctcaaatgatctacccgccttggcctcccaaagtgctgggattacaggcgtgagccaccatgcccagccaggcttttggattttttaaagttcctttctgacaaggaaacttgcaccagacagtagtgagttgctgagtaacagcagggactgaaagcggccgaagtgggtttgcacacatyacgactgcctccctgttccagaatgagaagctgagccgcaatgagackcaggtggacggcgccagggccctgcagctggtgagggcrctgcgcagtgctacacagcacacgggcacrctctttggcaatgacgtgcgcacggcctaccagctgctgggccacgtccttcagcacgagagctggcagcagggcttcgacctggcagccacgcaggacgccgactttcacgaggtaggcgggtggccgccaccctggctcggggacactcggggacactcggatgcccrtgggtgggtgctgtggggctgggcgtctacctcagttcgtggaagacggttgtgtccaggatccccatcctcatttctcaaatgtgagccctggcgggtgcagtgcctgactaaactgacgacgagcgttagggagtgttctggaaggaaacatgcaggtcacagccttgctggtgatcctggtagtgcctgtagtgtgatctaagtggcttctaagggattctaagtggcccacctgcatcagcccctctcccttccatgcagcctgtgatggagtatcgtccacccatttgacaggtaaggaaacagaggcacagagagctaaggcgtttgcccaaaggcacagcttgtaaggggcagggcccggcagtgggcccccatgtccactcccacccgcagctctgaggtcctgctttcagagggccacacctccgcctcaaccctctggctgtgtgtgtggaagttgtcatcccctgagcagtatcgttttagggtgaatgcagaggggactcacgcagcctgatatttggaaactgctttcgggggctccagaagtttcgttgtggctctgctgcaggcctcttcgtccagacaggacccccagaggagtgcctgtccacacagagcccatgggggacaccctgtccctcccacccatccccacggagccctcagggacctcctcatccacaaagggcctccagtccatgcagggcccccatggaaccttctagtctgcataaggccgccagagaccaggcagggtccccttgctgggatttgagtcccagcctgagagttgggccagtggcgtttgttctccatgcgtgactccacaaacaagtttcctttctggtttctttttctttatttctttttttttttaagatggggtcttgctctgttgtccaggctggagtgcagtggtgcgatcttggctcactgcaacctccacctcccgggttcaagcaattctcctgcctcagcctcccaagtagctgggattacaggcgcccgccaccacgcccggctaatttttgtatttttggtagagacagggtttcaccatgttggccaggctggtctcgaactcctgacctcaggtgatccacccgcttcagccacccaaagtgttgggattacaggcatgagcaaccgtgctcagccctggtttctgtcttgggtgtggtccccaagcccctgagcacagcctcatgcctccacccagtctttcacacagaccctggggtgcacagaggctgagggtcaccctcggaggagctgtccacatgtccacggcggcctcagtgtgggacctctgcgcagcccaggttgtggtggttccatcactgcttgacgtggttggtggagttcaggaggagttctgatgtaataaccaggggcatcgccacatgtcttccctgccttagcgtcttggggtatacgtggaaaaacccctggcagggctcactctgccagagtcccagcctctgacatttgaatcacccacagtctctctggcttatttgatggggttcaggatttatgaaaatcacacattaaaaaatgacttctggccgggcgcggtcgctcacgcctgtaatcccagcactttgggaggccgagatgggcagattgcctgagcccaggagttcgagaccagcctgggcaacatggtgaaaccctgtctcttctaaaatatgaaaaaaatcagctgggcggggtggtgggaggctgaggcacgagaattgcttgaacccgggaggcagaggctgcagtgagccaagactgtgccactgcactccaggctggacaacaaagtgaaactctgtctcaaaaaacaaaaacaaaacaaacaaacaaaaagacttccttatctatttgaattcaactttgattaatgtttgatcctatttataaacttagaccatgaaattcccctaagtattttaaatggaattaatatatgtcatgtagttgattttttgttttgtatttcaattgttcggctagcaaacagaccttccaagcatttaagcagtgcttgtacatctagtaaattaagctaagaatatgaagcatctttaattctctagattttaatatactttgtgagcttagtaacatttttytattcctcttaagataaactttttgaaaaaatatttgggarstaggccaggcgyggtggctcacgcctgtaatcccagcactttgggaggccgaggcaggtgaatcacctgaggtcaggagttcaaaaccagcctggccaacatggtgaagccccgtctctactaaaaatacaaaaattagccgggtgtggtggcacatgtgtgcctgtaatcccagctactcgggaggttgaagcaagagaattccttgaacccaggaggcggaggttgcagtgagccgagatgacaccactgcattccagcctgggcgacaagagcggaagtgtgtctcaaaaaaaaacacaaaaaacaacaaaaaacaaaaaacaactaatattaaagagcacagtctaaagtgtagggctggaatgaatgaatgagcccactaggcaagcaaaggctttcagggcaggtgtccctccgtcccacgagccaggcctccgcaggctgagtactgagtgctgtctgtctgaccaggacgtcatccactcgggcagcgccctcctggccccagccaccagggcggcgtgggagcagatccagcggagcgagggcrgcacggcacagctgctccggcrcctcgagggctacttcagcaacgtggcacgcaacgtgcggcggacgtacctgcggcccttcgtcatcgtcaccgccaacatgagtaaggcgctggctgcgttgggggtggaaccctgctaccatcaggggtgygccccagagctaggcccccatggggtgaagcaggtgggctccyggcccccccttggccatgctcttagaaaaatgattgtgaggccgggcacagtggctcatacctgtaatcccagcactttgggagatcgggacaggcagaccacatgaggtcaggagttggagaccagcctgggcaaaatggtgaaaccccatctctactaaaaatacaaaaagtagccaggtgtggtggtgcatgcctgtaatcccagctactcaggaggctgaggaaggagaatcacttgaacctgggaggcagaggttgcagtgagctgagattgcgccattgcactccagcatgggtgacagagcgagactccatctcaaaaaaaaaaaagccgggcgcggtggctcacgcctgtaatcccagcaatttgggaggccaaggtgggcggatcacagggtcaggagatcaagaccatcctggctaacatggtgaaaccccgtctctactaaaaatacaaaaaagtagccggtcgtggtggtgggcgtttgtagtcccagctactcgggaggctgaggcaggagaatggcgtgaacccgggaagcggagcttgcagtgagccgagatcatgccactgcactccagcctgggcgagagagccagactccgtctcaaaaaaaaaaaaaaaaaaaaatattcggcaggtaggcctctgtttcctcatctgtaaatggagcctttgggaagacagtctgtgatgacgtacccgtggctcccaggggacaggtcccgggctagggagatgttgggccatgatcttgggggtccggcagggcttccaaaccctcaggtgtgagactctagaagggtgggtgtcgaggaccccgcctcactccaggctcactgtagacaggtgtaagtacaggcgggatgcaggaagttggaagtcagttctgttctaaagatggtcagtcagctgggcgtggtagttcacacctgtaatcccagcactgggaggctgagatgggcagattgcttgagcccaggagttcgaaaccagccaggcgccatagtgagaccctgtctctattaaaaataaaaaataaaaattagccaggtgtggtagcatgctcctgtattcccagctacttgaggctgaggtgggaggatcgcttgagcgcaggaggacgaggctacagtgagctgagattgtgctactgcactccagcctgggtgatagagtgagatcctgtctcaaaaataaatataagtaaataggctgggcgtggtggctcatgcctgtaatcccagcactttggaaagccggggcatgcaaattacttgaggtcaggagtttgagaccagcctggccgacatgatgaaatcccatctctaccaaaaatacaaaaaattagccaggcgtggtggtgcctgcctgtaatcccagctacttgggaggctgaggcaggagatattgcttgaatctgggaggcggaggttgcagtgagctgagattgcgctactgcactccagcctgggagacactgcgagactccacctcaaaaataaataaataaatatggccagccagcgtcagtgtgacagttgtggtcattttgaaaacagcaggggttcaagaaagccstgggagttatgtctgattaaaggaactgtccccccagttcttgctgtcgacatctttgacaagttcaactttacgggagccagggtcccgcgattcgacrccatccatgaagagttccccagggagctggagtcctccgtctccttcccagccgacttcttcagaccacctgaagaaaaaggtaaaaccgcttagaaacctgctgctgccctcggagtccccagcgttcagggagrggagggcccygctgcsggcatcrcaggacctgcgcactgaagatctgggccagagtgttccgagtgctctctggtgccaggtcctgttggtgacagcaggttgttttgttcaagtgctcaggtacaggctgaacatcctaatcctgaaatctgaaatgccccagaacctgaaccttcttgagcaccaacctgacacttaaaggaaatgctcattggagcgtaagcatgaaacaataaaaaaatcaaaatccaggccaggcgcggcggctcacgcctgtaatcccagcactttgggaggccgaggcgggcagatcacctgaggtcaggagttcgagaccagcctggccaacgtggtaaaaccccgtctctactaaaaaatacaaaaaatagccagctgcggtggcgggcgcctgtaatcccagctactcaggaggctgaggcatgagaattgcttgagcccacgaggcagaggttgtagtgagccgagatatgccagcctggtaagactccgtctcaaaaaaaaaaaattccaaaatgttcccaagcatttcagctgagggatactcagccatgtaattgataatgtcagaaagaaaagagaactgaaatttgtatgtgagctggttgtctttggtgtgcagtgaaaagctgcttctagctgggcgcagtggctcatgcctgtaaccccaacactttgggaggccgacacagggaggattgcttgagcccagaaattcagaaccaacctgggcaacatagagaaactccatctctactaaagaagttttttttaattacctgggcatggtggcgcatgcctgtagtcccacctactcaggaggctgaggcgggaggattgcttgagtccgggagatggaggctgcagtgagctgtgatcgtgccactacagcccagcctgggcagcagagcaaaaacctgtctggttggggggaaagctgcttctaaatagaaataggcattttagaatcaccttccccttcccgcaaaaaaacaacaacaaaaaagccagaatgctgtctgtgtatgaacaaatcttcaatcctgggttgagattatgattcaaaacagtttgaacattttgaattttcttaaggtgcttttttacagatccatgacaattactaaaaccttccccaaataaaaaggacgtgaaaaggtaaactctgtaatggacagtttaaaattggaaatgttgttagtaaatggattttgtcaggtatatgatgttatctcatgtgtcttaaaaagaggggtgactctgatgtggggtcatgcttgaaactaagaggacgaggtccctgactctccattgcagccagctctctctggaactaatagagtgagaactcgctcattaccaagggcggggcaccaagccattcctgggggatccacacccatgacccagacacctccgaccaggccgattttcaaccctgatcacatttcaacatgagatttggaggggccacacatccaaactgcatcagatacattcatgtttaaacagtccatctccagaactctttccagcctgcagatctgaaactctagcccacgaaacactaactctcctccccagcccctggtgcctaccgttctttctgtctttgaatttgactcctctagggacctcctgtaagaggagtcacacgatatttgtccttttgtgattggcttatttcaccgagcctaatgtccgctaggttcacctgcgccgcagcaactgtcagacttcccctccttttgaaggctgagtaatattccattgtgcggatggagcgcgtgttgcttatccactcacctgttgacccatgcctgagttgtttccaccttttggcctgtgtgaatggtgctgctgtgaacatgggcatagaagtatctgggtccaggccgggcgcggtggctcacggctgtaatcccagcactttgggaggccgaggcgggcggatcatgaggtcaggagatcgagaccatcctggctaacaaggtgaaactctgtctctactaaaaatacaaaaattagccaggcgtggtggcgggcacctgtaatcccagctactcgggaggctgaggcaggagaatggcgtgaacccgggaggcggagcttgcagtgagccgagatggcgccactgcactccagcctgggcgacagagcaagactctgtctcaaaaaataaataaataaataaaaatagaagtatctgggtccccgccttcagttccttggggtgtatacccagaagtgggcttgcagggtcatgtgataagtcctgtttttgattttttggggacccacggtactgttttctgtgggacatctgttggtttttgagaagcacctgctggcactgacggcagtcttggggaacacaggtgctcctgccagagtcctcaccttctgctcacattgcagaaggycccctgctgaggccggctggccggaggaccaccccgcagaccacgcscccrgggcctggcacygagagggaggccccgatcagcaggcggaggcgacaccctgatgacgctggccagttcgccgtcgctctggtcatcatttaccgcaccctggggcagctcctgcccgagcgctacgaccccgaccgtcgcagcctccggtaaggcctgggcacggggcacayggggagggcccgttctggaggctcctgaggcttccacaggtcaaaatcctgatcctgatcaagcacaggtcttcacagtgacatttcaccgtgaccctggcccagagacagagaccattgccttgtggtggtccttggagggagattctgggtctgccacaggataccacaccctggaacattgcacaccctttgcctgggctcatcctggtgtttgtgccagaaatgccccctccccagcatacaccccatcttgtgcccagagggaccccattctgtccccacacacctggcccaaggctgtcatgggtagtgcctgctgctggccccggggttaggtctgctcagctagtcctggctggaaaggatgaatgtcccagaagcagctttgcaacctgctcggtgggagcagcccaaggctccgccctccttcttcctgccatttcccagatacttccctggctctgggatcctcgtgttcacgtggttctcagtgactgggtgattcatccccatgagctgccattattttggtgtcttttgctggacactgaaaccatcccctgtgattctgccattagctattatgggctgtgacatctttgcacctgtgccttctctttctktttaaatttctgaagtcccaatttgacccaaaggtgacacctctctctgtgtgccctgtcagtgataaaacctgctctagggatgaagatactgtggggtccktgggtccgagctctyggagtgtgattctgtctcccctagaaacacatcatggcgtgtcctcagggcatttgtgcgcgggatttaagcagatgtttcctcaccgtgtttgtccccatgctctggcttcttgacytcaggttgcctcaccggcccatcattaataccccgatggtgagcacgctggtgtacagcgagggggctccgctcccgagacccctggagaggcccgtcctggtggagttcgccctgctggaggtggaggagcgaaccaagcctgtctgcgtgttctggaaccactccctggcgtaagtgtgacgccaggagccccatgtgagggctttgccaaggcagagtgcccccgcagggtcgggggctcagtggcagagcgccccaagaggacggtctcttgtggtctgtgtttcccctttaagtcccccgtgggggcagtgagcctcctgctctgcttctgtgggaatatcagagtcctcccctagatgtccacacacagatgcacacagacctgcacgtggagatacagatgtgcaggcgcacagagagatccctcaaggctgacacccaggaaggggacccctcacctgcgggactcccgacatgcagcggccaacactagtgtagtgcccagttcaccgccggataagacaggcccattccggtcacacacgggagacagaacccagagactggcctaagagcccatctgctgacggtcttgcccgagaggctgacacagtctagctgtggggactggcttcacccccaagaggccacacctggccgcagcacagtttatctggcccgtttcagaagcagcgtcagagagtcacagagtggcgaacgcaggagaatctgtgcgcgagaatctgtgttctagcatccatgcaagygagggaaaggcgtttcgtcgttagaaaaatgcaaaatgagtgattctcacccacacgtgagactggattcagcaccacagtgtggctcccgtctgctgggagccagtagtgtttgtgctttggttttgctttttagctgcagagttcacgtgaggtgtggacatttgagttgctctatcgttacagggagcttgccttttctctgctggttggttttcacttttgctgtctctgtttagaagaaggcactggaacgggggtgtggtgggaagggccctgttgccgggatgggagcacagtcagggaggggaagacccactgcctccccacacaccgggagggagtgccgggaaggggagacgccatgcaggagtcaggcttgaatctgcggagcgttgtgcatctggggaygtctgtgcagcaggaacgctgcccccatcacagttgccctgggcacagtgaggagccgtgagtgggggctgtgctgggggtggcgctatggtgagcgagcccggttagcccagcctcattcttctcctgcttctgtgctttccaagttctagttaataagcaaccagcatggcacctggaatgtagtaggcgcttggcttataaaagagagaagaaaggaacccattccaccacgacggacgtcaggcccggctgtctgtcttgggcattcatctgcgtcctggcaattagctccagctctaatgacctgctctctgctttatgttgcacttattattcccagattgtaaagtttgtgccaaacatattaatgctaacatcccattttacagattagcaaagtaaggatctgagaggttatgtgatttttcccagagtctgcgagggcagggccctgtctgaagctgagacacaccttrtaacaccttgttatttggggcttcccatcagtaaaacgggagtcataatggggccctggcttctgggcagttcccataaaacattgtgcaatctgaagatgaaagtgtcagaggaaggtgagatgtcctttctgagagcgtctgccctcagaaggagacgggaccgcatcgcagctgtgtgaaccccgggcagtggttccagcagcggggcggacgcgagacagccccatttgagttttgctgctagatggcacgtagaacttgaacttcagagggtgctccttggaggccctgaccagacacagaagggaagggagactgttcccatggtcctgcctccgcggcagtgaggctgctcttcttacagccaggtggctcttgtcttcggtgtagggggctggtgaggaacacggtggggagcagcctgcgagggcgctgggctttcagcactcacggcacctgctgtttggtttggccaggatggcctgggagcccccagggctgggcaaaggctgccctttacagactcatgggcagagggaaccgtcttacccctgccccttctctgtcctctccgcagcgttggtgggacgggagggtggtctgcccggggctgcgagctcctgtccaggaaccggacacatgtcgcctgccagtgcagccacacagccagctttgcggtgctcatggatatctccaggcgtgaggtgggcatcctcccgtggccactgtgccctctgggcctaccgccaaacctgcccctcccccccaaacctgcacctccccgccaaacctgcccgtcctcaaacctgctgagcctgcccccaaatctgtcccctcctcaaactaaatcttccattctaagtgcttggaacaaaacaaatcaaccgattaaaacacatattcgaggattggccagagtctgaggatttccataacaaagccccattataagggttttcagagagccctggttatgtattaaaccccggaatggcagacccaaagctcaggctccgaggagctctcggaacctgcccctcacttcagtgcgggtctgttggacggtgccgctccccacctgctttgatcctaagggaggtgacagctgctgggcgctctccctcggggccacacgcagggcagcaggacaaaaggctgggcggctaatgtttaacctctggcattttaagcggcctgggaatgtgagccggccattgtgggcctgcagatgaattggggaatggcccgagcgctgtcctggcctcccgttatccagacaggagggaggtgggagccagcctggccatggcctgtgtgggaccctggggtctaggagtcagaaccaggggcctgggtagcctcccccggcccctccccggggttgcactgtggctcaagggcccaggccactgtcctttccgagggctttttgatgtgaagtggccctggtttctgtcacattcttggaagggtgagtcagccctcaggcggggctggaggagggcagcggcctcttgtgcaatatgcaggtgaagctgacccgcctctgcccctgtctcatgggcaaatgtcactccccagcaggacccagcctggagacggggtcagtgattagtggagtttgttcatatgtgggcggggttggggcttgtctcatggccaggatgccaggtgacatgtgggccaaggaagctgaaattgaggcagaagaaaggaggctggagtgagagtccgaggctcccatggcctgggcgccccaaagccagaggtctctgaacggcccccaagccagtggagggagyctggcgtgctgccgcaggccccagggatgcccagggcccagggcattgaaggagcctcaggaggggcagttccaggcccagagccatgagcactcggcctccccagcccagcctgatcctgccagccttgatcgtttcataagcaagtgtgtaatttatctctgttatgcaatgaccagatctgagcctcggcccttaccttctctcctgcctttaaccctcctgcccatagaacggggaggtcctgcctctgaagattgtcacctatgccgctgtgtccttgtcactggcagccctgctggtggccttcgtcctcctgagcctggtccgcatgctgcgctccaacctgcacagcattcacaagcacctcgccgtggcgctcttcctctctcagctggtgttcgtgattgggatcaaccagacggaaaacccggtatggccactctgctcccctccccactgtctgggccgcagcttggagcagctaccatagtcctgtcctggccactccaagcaccctggctagctcctcctcaccacccccacctctgcttcacagatgccctttcaggaacgtgcctggtcacaggctgtgggtggagatgtgggattcactggcaggcccaagcactttgactctattgggagatggggggccctttctttctttctttctttttttttttttttgagagtctcgctctgtcaatccaggctggagtgagatggcacaatctcagctcactgcaacttccacctcccaggttcaagtgattcttgtgtacatccccaggaaaatacaactcttgtcaaaagtgatttaagggcagtggctcatgcgtgtaatcccaccaggatccctttgggaggctgaggcaggcagatcacttgaggtcaggaagaccagccttgccaacatggtaaaacccaatctctactaaaaatacaaaaattagctgggcgtggtgccgggcacctgtaatcccagctactcaggaggctgaggcaggagaattgcttgagcctgggaggcagaggttgcagtgagcagagatggagccactgcactccagcctgggcaatagagcgagactgtctcaaaacaaaacaaaatgatttaagatgtagaaagactaaatagtcctctcaccgttagagaatttgcattgcagtataaaaaccacggccaggttgggtttatcttaggaatgcaaggatggtttaacattttaaaaatctatgaatgccatttacctcaccagtacatttaagggaaaaatattatttttctcagaaatgaatgtacaaaagaattttgataaatgttatgctcattaatgattagaaagaaagaaaaacctttgaacagactaggactaggggaaactttaatctaatgaagacatctacagaaaacctgcagttgcaataaataacaatgggaagatactggaggcatcccctgtaacatcaggaacccactcacgttcaccactgtggtgcagggtggccttgccagtgcaatgaataaggaaaacaaaagcatagagatcagaaaggaagaaacaaagctgtcattattaggtaacatgaaggatctcatagaaaaaatctaaaatagtctacaggcacgttatgagaaacaattaggctgggcacgttggttcatgcctgtaatcccagcactttaggaggccgaggcaggcagatcacttgaggtcaaggagttcgaggccaacctggccaacatggtgaaaccctgtctttactaaaaatacaaagattagctgggcatagtggtacgcacctgtaatcccagctacttgggaggctgaaacatgagaatcgcttgaacccgggaggcagaggttgcagtgagctgagatggtgccactgcactctggcctggacaatagagtgagaccctgtctcaaaaaaaaaaaaaaaaaaaaaagagcctggcagcaggtggacgacgggcagaagatcagagcagtctgataatgcgcaggcctgggaggtggggtggagacccagaactgaagccagggcactgggcacggggagaaaggagggacaggaccaaccggttatggagcaggcaggaaggaggagtcaggggagtttgacgtctccagaagggagaatgagtagttgaaggtaccacccattgagaggcagggtctgggtgagatgggacacctgcagaggccaaggaaggtgtggcgcatgagccagggaggccgcctccaactcgtgggtggagacggtgtctgtggggctggaccggccctgggaagggaaacggaataaaaagaccaggctggaaccttccggcgagctgctcagggccacgtgcagacctgagctgctcctccttttttacggcaagcggtgggaccagacccctcttacctcaagagggaaggcaggcacccccacctcgcaggtcacccttgagaagcctccatggcttcccagcagtggtaggtggagcaccaggcctggcccatgaaggacgagccccgaggcgtgtgtcagaccagccagggccaaccttccccgccgcctcccaggtgcttcccgaggccgaggccccgggctggcgggggctccgtgtgcggggcccatatggcagggtcgctgctcctgcggaggggtttcttcacatccgcagccgggcgcatccccgcaatgggcacgttctcatccgcgcattggtctgggaaggctctgagaagtgtgcggatttcatctcaaaacccctctagtgtgcttttgagtggcgtgaatgggggagaggggagtcggtgcaggccactccctgcaactcaacaccccagcgaaactgaggcggcccctgggttcccacactgactcgtcgcctgccggagtgagcgctgtcccggcagccacgcacggctgagcatggagaaggaaagggcgacccggcagcgttctaggggcttggcagagtgcctgggctttatggtttttttgtaaacccacaatcctatctctgggcgaggtttttcatctctcagagcgctggcaggctgaaatgatttattatgcatccgcttttgtctttgttctatttctggaaaaggtggtacattggttagggaagcaggtacgaccctgctgcagccaggatggcacagccctcgcactttgttttcaaaaggtggtttcgtgggtttacttttcgcattacttgaagcagccatccagccaaccaaccttctcacccccttccttttcctgagccagtgtgatttccactcaggaaaccagggtgtttggtgtagagttctccagccacacgctcgcgcctcctttcctgaccgaggccacagtctgaggcaaagggcctgtctctggcataacttgagcctgcgttccctgcttcggttcctgctctgttccgtatctgacagatgcgatgctgacttggggccctccccacctcgggggcgttgtttctggagggtggctggcccttcgaggctgatgtgtcagcaggggcacccttagggtgccgtgacccagtgcctgagcaaagtggccttaagcctggggttgaggcgggggccctcgttctcctcctacgcttctgtgtctgttaaagggtatctccctgggaccccctggtagggtggactgatgggatggctgctgaggattagacagtgtgtccagagcaggccggttgggggtggggtcagggtggtgggaccctcccattgctcctattgctcccattgctcccatctcccccatctcccccatctcccccttctcccccatctcccccatctcccccttctcccccatctccccattctcccatttggctggttcagcctcccgggacccagaggggagcctgccatcctctcccagctggcggcagctttgggagcactggctggggcagcctctcccagagcactgggcacgaagctgcccctcccagagcgctgggcgtgaagctgccccccccaccccagagcactgggtgtgaagctgcccccccaaccccgagcactgggtgtgaagctgcccccccgccccgcccagagcactgggtgtgaagctgccttggggccacatcttcaagtgcagttccggggcatgtgggactgggtttgtgttcatggcctcagagactagtctctctctgtcattctcacactgctttctgtgtccaggcaggcagggctggctcacctgctggctcagctgctccgtggatgttgattttcaattcctggctctcagccattggycagacatgtagccctgctcagctgaggacagacacatagggtggtccgaattgtgagctctcccatcccccacccctcactcatgcctgtctgrcctcagcctgggatgcaggggcccttgctgagcggcccctccctgcgcagtttctgtgcacagtggttgccatcctcctccactacatctacatgagcacctttgcctggaccctcgtggagagcctgcatgtctaccgcatgctgaccgaggtgcgcaacatcgacacggggcccatgcggttctactacgtygtgggctggggcatcccggccattgtcacaggtgaggatgcacagagtggccctgcataaaaccacagatttccaacagaccccagctgtgcaggaacgctgcyctcctttctcttccctgcccagccccaatgcttgtccagcccccagcagaggaggcctcggccctgcacactgcgagtgcatgcacaggggcactcgcagacacctggggcgacgtcttctgtgaggtgtgagctcattgagagctgggtccaggtctgttcagggttatttctgcagcacttaacagacaaaagttccacgtctacacatgggagggatggagggaagagcgagtgagtgcatgagtgtgcaggtggatggatggaggggtgagtgagaggatgaatgggtgggtggggggtgagtggatggatggatggggggtaagcgagtggctggatggatggggggtgagtggatggatggatgggggtgaatgagtggatggatgggtggaggggtgagtgagtggatggrtagatggggtgagtgagtggatggatggatgggtggggagcgagtggatggatagatggggtgagtgagtggatggatggatgggtggggagcgagtggatggatggatgggggttgagtgaggatggatggatgggtggaggggtgagtgagtggatgcatggatgggtgagtagatggatggttggaggggtgagtgagtagatggatgggtgaggggtgagtgagtgggtagatgatggatggatgggggtgaatgggtggatggaggaatgagtgagtgagcagatggatgggtaggtggatggagggatgggattagtggatgggtgggtagatggatatagggatggagagacgagtgagtagatgggtgaatagatggatgagtgggtagctggatggatggaggagtgagttgagtggatggatgggagggatgaagggctgagtgagtgagcagatgggtgggtgggtggatggagggatggagaggtgggtggatggatggatggatggatggattggataagtgagtggatgaataggtggatggatggagggatggagagatgagtgagtggatggatgggtgggtggatggatgggatatgtgagtggatgaataggtggatggacggatggagaggtgagtgagtggatggatgggtgggtagatggatggatgggataagtcagtggatatgaataggatggttggagggatggagagatgagtgggtggatggatggatgaaatgggtgggtggatggattggtagctaatggatgacaatgaaatgagtaaatggatgggtgggtgcagtgggtggatgggatgagtgagtggatgaatgaattagtgaatcagtgagtagaacaaacagtacttcctcagcacacattttgcttaaaatcagaaagttggtttgctccctactgagaaaaatctacctttattcacaaaaagaagaaccccttttcctgggtaatccctgggttctggggattagacgcagtctgaggccagaggcactggggtgggggggtgttgctcccagggcagcacccagcagccaccctggggccagtgccatggtcacttgctggaccgtcctggtctccacagcaacgtcactgaccagcctccaaccaggcaggctcctggctagggtgttctgatgtgactcatctcccttactctaagggaccctgaagaacctttttcacctccacccagggccactgaggtgggggcaggttgggcggggtggcagccgccacttcctgatgtgacagggaggcgataccttgcctagattaggtgcttactgtgagagacgctgagatgaagaacatggcctagaaaggggctcgtatggctttgtcgaaaagccacctcgatgtccaggcggagcaggtctctgcgatgcctctgccctttggactctaaatccagatagttcacgtttcctacttgctttaaaaacaggtttcggtttgttttgtttaacacttaggtctgtcttgtacaagatcttaaaataactcccggggagcctcagactgagctgcaggcactggtcactggctgctgcctcccccggccatccagggcttccctgactgtcctcagtggtcctggttaactggctcctccagagggcagtgggaagtgctggagggtgttaaasaggagggagctgggatctcttcaatatttaaataaggagagtggggaggagcatagcctaggccagggtggggcaaggggcacagaaagaccaggtctcacctgctggttgctcctgtcccaagtgtcaccttgatgctctgcatggacaggcggatctggtttgtcacactgtggctgggagtgacaactgtgcttcagagcatttcttcctctatctaaacaagcagctcgtatagcaggctcggtggtgaggcagtttcgggggtgtgtgtgtggtgtgcacgtgtgtatggtgtgtgcctctgtggtgtgtgtgtatatctgtgatgcgtgtctgcacacggtatgtgtgtctgcatgcatgtgtatagggtatgtacatgtgtatggcatgtgcacgtggttggatgtggtatgggggtatatgcgttcctcacccrctcacatatggccctgtaggtgacgccgtcctccatctgttttggagcctcatcccttgcaccttgggtccatcatggcctcctgacctctacatggcccagctggcagggtcctcccaagcaccgtctgccttcacgatccctcctgcaccatctcactgccaccctccagggtctctggtcttcctcagcagccyccggcccagatacgccccctgcctcatggggccaatccaggagcagctcctgccacctgggccagtgagcctgagaccytacacggagagactgtgcttggaggggccctgggctggctccctggactccttgstccttcctctgagaagggagatgctgaktcccccatttcaccccaccctggctggtccttggcatggggtggccactgggcacgtggccctcacccttcccttcctcccygctgtgttcaggactggcggtcggcctggacccccagggctacgggaaccccgacttctgctggctgtcgcttcaagacaccctgatttggagctttgcggggcccatcggagctgttataatcgtgagtgtgggrccttcacgggagtccgggtgccccaaacatgcatgagctggaagggctgttctgggttggctggggccaccaactcctctgagcagccgacggggggcaggaagggccaccttgtaacagtcagcaaagccgccagggccctcccggacctcaccctctgatcgtggattcaggtctcgcgtcgtgtccgcatgagaccatctgcgtccagcacccaggagggtcccgcacaggcaggctgggtgtggtgggcgctgtggggcagtgggtggacaggtgtgcttcrccccacaggccagggttcgggtcctcctcacccagccacccctccctgacagggcgaagggcctcaggcgcttttggcagttggaggtctgcagtgacgagagagaagagtcggcgacctgacattgatcggcttgttttgttttcagatcaacacagtcacttctgtcctatctgcaaaggtttcctgccaaagaaagcaccattattatgggaaaaaagggatcgtgtaagtggggctgaacctgaccggccagccatgtcggctgggccctgagaycccgacgtccagtctctgcggggtggggccccatgagagcgtgtaggcctcatggaggagggctgggggcagcctgggtgagccccagggctccagagaggtttgccacgttgcacctgcaggggctgggggaggttagctgaggggagggggctggaggaggttagctgaagggagggggctggcagccagtcctgggcctcagtccctcccgcctggcacagaagtattgggctgtctggaatccccagagtggagatgggtggggtgggggagatgaaactttctggtgggtggtgagggtgttgctgaggccactggaggggaggagacccccccaccccactgtcagagggtgcagtggaacaggggcccagcacagagggaacctccagtgttctagggaggagaggggaccttcgaggccccaaaggagcaggtggcaccgcgggaggactcagcacagcgtccaggagccacgacagggtcaggaggggttgacgggggcatctgtcagacaacaaggccagcccctggtgacctggtagctgagatgggactgagccagggatgggcgaagggataatgcttgcgcaggggctgggtgtcaggaggagtgtgaggctcccggcccgggaggagagagccgagtctgaaggggggtagggcagagagggagaggcagtgagtggcctggaaggccggatatgggggtgcacggggggtctggggccttgtcagttcctcgtcttcagtgccatccacgacctgtggaccttgcgggctctgtcacccggattcactccatcccctctgaaccctgggaggggatgcgcctttgtcttccccttgtacacatggggagactgaggcagagctcaggaagctgattgcagggtcacagctcaagggcaggtcctgggctcttcctcttgcctctccacagggtatctcacgggagctagtgcagccatgggcatggctcaggccccttggcctggtgtagtcctcacagctcctgttttctcattkgcttcctaatgtattccaccaccacccccactaacacgagctctgtctggttcccggatgagtccgtacctggctacgaggggaggaagggagcaaggtggatgatggctgggtggacaggtggacggacagatagatgggcggacrggcaggcaggtggacaggtggacgygcagagagggagggaggaagggagcaggtggtggcgatgggcacaggcctgatcctgccctccygcagctccctgctgaggaccgcattcctcctgctgctgctcatcagcgccacctggctgctgggkctgctggctgtgaaccgcgaygcactgagctttcactacctcttcgccatcttcagcggcttacaggtaggtgacggccgagttgcccgcgggacccctgcctggccgccgtgrcaccatcgctgtgatgcgaagcagtggaggcctctgcggtcccaaaccagccctgcctgggtcccgcgtgggggcctcctgtggctgygaggactcagtcccttgtgcagccggcacgggggctggtgcctcctccccactgtgtctggggacgatgaccctagtgccaggccagcacaagtccacttgtgtctccagggaacagaagtggccatttctagtcataccaagggccacacagcaagtggacttacgacacagtggggaccccagaggggccccaaggactgtggaaggagtgcccagaagactggcctgagccggggccctcactgcctccagcacaccgggggtctggcccaggcatctcagtttctgagctcccccacctggcctccagatagcagcagtccctgaggaggggaggcctggccgtgtcctgggccgtgtggccggacatgttgtgtgcactcaaggctgtatscgcatctgtgctggggcgcctaagggcaggtgcctagggaggcagcagcaggtgctgaccccaccttcctccctccagggccccttcgtcctccttttccactgcgtgctcaaccaggaggtccggaagcacctgaagggcgtgctcggcgggaggaagctgcacctggaggactccgccaccaccagggccaccctgctgacggtaggaggcgccggggacaccgcgggactgggggctgggcggcatctcgaggggcgggggagggtgatcgagcctcagccccagtcctgcggcccgtatgcccctcacggtggggatggcagagccgcccgcggtgcacggtgtggctgccgcgtcagaaccagaaagtgacagaatcggccagatggggcctgggtcgcatcctaaccctgctcttccaggccttagaaagagagggtcaggaccaccgaggatcctgaccagaagcagtggccgtagggagggcggcagcccctgaccacagcgcgggccaggatgtgcttccctcagctgccaggaggctctcgtttgcagkgagggttgactgcttggggccagctcctcctgtgtgccaggcaggggcccagccagggtgtgggtgtggggggcttgccgtggggacagagtcattccccgtggtggtcatgtggtggccaccacttggcagtgaccagcccctcccctcccttcagcgctccctcaactgcaayaccaccttcggtgacgggcctgacatgctgcgcacagacttgggcgagtccaccgcctcgctggacagcatcgtcaggtcaggccgcagctccgggttcggggaggtggctctcgaactccctcaggttttgcccctgccaccccaacctgtgtcctgccattcaaccaacatcaccttccacccccaactttccacccgcaccttcctccccccgcaactttcctccctgccccgcaccttcccttcccgcctcgcaccttcccttcccctgcaccttcccccaacaacctttcccccaccaacttcccccaaccaaccttttccggtgcaaccttcccccccgcaccttccccgcactgcaccttccccccgcagccttcccccctccaccttccccctccacctttcccctgacaacctttccccccaacctttcccccagcaccttccccccaacctttccccccaccaccttcccccccagcctttccccccaccacctttcccccacccagcctttccccccaccaccttcccccacccaacctttccccccaccaccttcccccacccaacctttccacccaccaccttccccccacccaacctttccccccaccacctttcccccacatactcgggaggctgttttgtctgtgctgttgttgggaacacagaaggggtaggggcagagaatcttccagagaactttccagcacctcctgttccctgacggatgatactgagcccaccctccctggcctctctagggatgaagggatccagaarctsggcgtgtcctctgggctggtgaggggcagccacggagagccagacgcgtccctcatgcccaggagctscaaggatccccctggtatggcttccctggagggggaggaccycgtgggttgtttttcccacgtcccttcggtcactggacagactgcccctgaagaagcactagcagcctcgccatgctcagcgtcagcatgccaggggcccagtggctctgcttggccctcggtgggactccctcacctcccagggcctgagcctccctgtcccccgcgcatccacaggccacgattccgactcagatagcgagctgtccctggatgagcagagcagctcttacgcctcctcacactcgtcagacagcgaggacgatggggtgggagctgaggaaaaatgggacccggccaggggcgccgtccacagcacmcccaaaggtgagtgtgtggggcacattgggccaggctgggctgkggacagcgggctcggggcaggccttggcyatggctrggtcccttcctcccaggatatgcccagcagcactgcagccacatgaaaggacagcctggggtggggggactctggttgggctcccccacagcctctggagggctcctccaggccaaccccctgagcggaggcaggaactctcaggggggtctctgtggactgtcaccgcaaggtccaggtgaggctgccagtgggggattagcctgtatagttactggtacagatgcggcgggggctcccaacaagggccctgctgccaggactcgccctcctgggcctcagtttccccacctttagggttcagccctaccaggcctgcaggttggggagaggtgggtcagagccaccagacccatggctctcaagggagcagctcgagtggcagtgccrytgcctgctgagcaccgctctcgtgcctcaggggacgctgtggccaaccacgttccggccggctggcccgaccagagcctggctgagagtgacagtgaggaccccagcggcaagccccgcctgaaggtggagaccaaggtcagcgtggagctgcaccgcgaggagcagggcagtcaccgtggasagtaccccccggaccaggagagcgggggcgcagccaggcttgctagcagccagcccccagagcagaggaaaggtgcctggggaggccggggctgcagtgaaaggctggaggacccagaagggccagtccctggtctggaggtgggagtggggctggggctggtggggcaagtcagggcctgggcagaacagacgtggcctcctggcctagccctgggacccggggaaccaggaggaaggacaggggctgaggctggctcagctgcacacggcccagcagctgcccccrgcagcatcacccggacttgaccttgccgtgtctcctcctcccaggcatcttgaaaaataaagtcacctacccgccgccgctgacgctgacrgagcagacgctgaagrgccggctccgggagaagctggccgactgtgagcagagccccacatcctygcgcacgtcttccctgggctctggcggccccgactgcgccatcacagtcaagagcsctgggagggagccrgggcgtgaccacctcaacggggtggccatgaaygtgcgcactgggagcgcccaggccgatggctccgactctgagtgagtagcctgggcctccagggcggggatcacccacttcccccttgtcctgagtcaggagagagagggggcagtggtcagggacctgacacccacctcacctggagccctgagtgcagaggaagcccaggcggggatgggggaggggggaggcgctgcagctgaggtcaggaggataccccggagatgggcagaccccctatcctggggacacgtctcaggcctctgggactctgaagccctggccagccccaaaatgctaggacctaaggtgctgggctctgcgtttgrtcagcattgtctccgcctgggaccactgccacccaccttgcagttgaggatactgagggtcccggaatgccaggggtgaagggggcggggtggagctggggtcctggccccagacctctccctgtcgcccctccctccctccaaactcacaagggagaagccaggtcttcagaatgccccttccaaaagtcactgtagagatggccggtttctaacgtggattccttgcgctcttctgaaagaccagcaacacagaggcccacaggctggtcctggtcccctctcctgcctcccaagggcagcctcatccaacatgagcttgccctccctggagcccccagacgccccctctaccctgatggggtgatcctgcccccccgtgtgacaaccttgggccccaccaagccgctaccctcactgacccttcacctgcttgctggcttcttcccacgcgcagaggcagtaatgaaacttcaatttgaaccatcagtaatgaaacttcaatttgaaccatcaggaaaccgtgaggcaagcccgtcaccccacacaggctgcggcatcaccctcagaccttggagcccaaggggccactgcccttgaagtggagtgggcccagagtgtggcggtccccatggtggcagccccccgactgatcatccagacacaaaggtcttggttctcccaggagctcagggcctgtcagacctggtgacaagtgccaaaggccacaggcatgagggaggcgtggaccactgggccagcaccgctgagtcctaagactgcagtcaaagccagaactgagaggggaccccagactgggcccagaggctggccagagttcaggaacgccgggcacagaccaaagaccgcggtccagccccgcccaggcgggcatctcatggcagtgcggacccgtggctggcagcccgggcagtcctttgcaaaggcaccccttgtcttaaaatcacttcgctatgtgggaaaggtggagatacttttatatatttgtatgggactctgaggaggtgcaacctgtatatatattgcattcgtgctgactttgttatcccgagagatccatgcaatgatctcttgctgtcttctctgtcaagattgcacagttgtacttgaatctggcatgtgttgacgaaactggtgccccagcagatcaaaggtgggaaatacgtcagcagtggggctaaaaccaagcggctagaagccctacagctgccttcggccaggaagtgaggatggtgtgggccctccccgccggccccctgggtccccagtgttcgctgtgtgtgcgtttgtcctctgctgccatctgccccggctgtgtgaattcaagacagggcagtgcagcactaggcaggtgtgaggagccctgctgaggtcactgtggggcacggttgccacacggctgtcatttttcacctggtcattctgtgaccaccaccccctcccctcaccgcctcccaggtggcccgggagctgcaggtggggatggctttgtcctttgctcctgctccccgtgggacctgggaccttaaagcgttgcaggttcctgatttggacagaggtgtggggccttccaggccgttacatacctcctgccaattctctaactctctgagactgcgaggatctccaggcagggttctcccctctggagtctgaccaattacttcattttgcttcaaatggccaattgtgcagagggacaaagccacagccacactcttcaacggttaccaaactgtttttggaaattcacaccaaggtcgggcccactgcaggcagctggcacagcgtggcccraggggctgtggaacgggtcccggaactgtcagacatgtttgattttagcgtttcctttgttcttcaaatcaggtgcccaaataagtgatcagcacagctgcttccaaataggagaaaccataaaataggatgaaaatcaagtaaaatgcaaagatgtccacactgttttaaacttgaccctgatgaaaatgtgagcactgttagcagatgcctatgggagaggaaaagcgtatctgaaaatggtccaggacaggaggatgaaatgagatcccagagtcctcacacctgaatgaattatacatgtgccttaccaggtgagtggtctttcgaagataaaaaactctagtccctttaaacgtttgcccctggcgtttcctaagtacgaaaaggtttttaagtcttcgaacagtctcctttcatgactttaacaggattctgccccctgaggtgtaatttttttgttctatttttttccacgtactccacagccaacatcacgaggtgtaatttttaatttgatcagaactgttaccaaaaaacaactgtcagttttattgagatgggaaaaatgtaaacctatttttattacttaagactttatgggagagattagacactggaggtttttaacagaacgtgtatttattaatgttcaaaacactggaattacaaatgagaagagtctacaataaattaagatttttgaatttgtacttctgcgrtgctggtttttctccacaaacacccccgcccctccccatgcccagggtggccgtggaagggacggtttacggaygtgcagctgagctgtccgtgtcccatgctccctcagccagtggaacgtgccggaactttttgtccattccctagtaggcctgccacagcctagatgggcagtttttgtctttcaccaaatttgaggactttttttttttgccattatttcttcagttttcttttcttgcactgatctttctcctctccttctgtgactccagtgactcagacgttagacctcttgatgttttcccactggtccctgaggctctgttcacctttcttcattcttttttctgtctgtccttcagatttggctatttctggtgctccgtcttcaagttcactgattttttttcctctgtcgtcttaattctgctactgaactcacccagtgaatttatttcaaatactgtaattaagttttaaaatttccattaggttcctttttatttctctgctgggtacttctggttttccactcattccaagagtgttcacctttacttcatgaagcatggttataactaggactgcagtgaattctgggataatttgaacgtttgagcatcttggggctgaaatcgtcttttctgtttgcattttcctggttgtgtgctgagtaactgcaagttgaatcctcactcgtcatgtggaatgttaggttagactctgggttgttaacaccctcgttgtaagtgtcatttcatgtgtttgtttcagcagcaggcaacctggtttaggttctgaccactggttctgtctctctttccacgagcagcaggtccaccaccaggtcagcccttggccttggctgtgctgttttgggtcgttgcctgcactcacaggtggggtgggcagggacgtgtgtcagcacatgtagagaatctgggggtctgcttctccagcactctccttgctggaatttgccttgcattttctcacttctggggtcccttttcttggtttctctgtccagaaagatgggtttctcccagagctctagccacctgcactgtctcacgcttccacccttaaggaaacagggctcacccttaaggaaaagtagtgacagcaaagagagaaaaatgggaaccccaaccctctctagtccacagtgcccccgtttcccaggcctctctggagttgttgccctggtgctggctgcacaggaccacagattagggccacccccgggtcaaatctgagagaggaaaaaccacccatgtgcctgaggtcatttttcaagttgttgctttctcctcagttcacctgctaacgtttacatcctagaatgctcagtggctaacatgatagaatatttctacctcaaccccaaagccatgattagcaggaaaatactagaagcatctgagagagagaaagcagtccaggtagcccggagcaggcctgtccatcagccaggccaggatgtccatgtgaggaccacgaagtgctccgcagagcatccgcagcagaccgtgacgggtgagggctgaacgagcccctctgtgatcctgcctgaacagatgacagcacaaacaccggccaagccacagggcgtcgactcccccggcccaggtgacaggggtgactacagctgcttcggcccaggtaacaggggtgaccgcagctgcttcagtcacagcttcagcctcgccttgggctcctcagcctggaggcaaggcttgttaagacccccaggagggtcaggcagtggtccatgtctgtaatcccaacagtggctggctgaggcgggagttccagaccagactgggcaacacagcaggactccatctctacagtttttaaaacttagcacagtggatcatgcctgtagtcccagtgctttgggaggctgaggcaagatcgcttgaggccaggagctcaagaccagcctagacaacatagcaagactgtttctaaaacaaaattaaagttagctgggtgtggtggtgtatgcctgttgtcccagctacttgggaggtcaaggctgcagtgagctgtgatcacaccactgcgctccagcctgggtaacagagcaagaccctgtctcttgaaaagaaaaaaaaagaaacctccccaagaaggaaggggcttgggcccaggcaaggctccggcacagggcaacatgggagccagagactggggagaaggcaggctcagggtgtttgaaaccagctcagggcctcgggaaggagcctcccaggtgtgaggtgagggggcatcatcctaggacccatgtatcactgagattatccgggaacaacgtagggggagaggagagcgagggctttgctttcatttgtatcacaagcagggagtaggtgtaggtgtacaggcacccagctcttggcctggaaaatgttcccccatcgtcttcatggataggtgtggcaaggggctaaggccaggccactgggggtacccttgcaggcagaaggggctacctagctacctgtgctcctggaggcccccaggtcttcaagaagtcatctgaggggcacagcctctggagtgtgccagccttgggtgctggggagggtaggaaagaggccagaagagcagcctggagacttggtcccctggccaacagtttctgctgaatctctgagacatcgcaccaaagccctccagagttggccagtggccttgtagggggcagggcaggccattgtgcctgctagagaggggagccctgccagtcaggaagctgtcaccatggagcctgggggctcaagggggcagaggcaggtttgtgtccccgcttcctccactggccgatgcacaggccctgaggctggcaggacggtggagcccgctggaggttggagcgggggcagccttagcgctgctggcctggtgcccacaccaccttctgcctggctgccccacctcccacctactcatgtttctgtgacctgggagggttcacctagggcagagcagtaggcaccacaagggctctcccaccctcagttcccaggctggaggcccgaccacagccataaatcagggaacccctgagcccagggaggctccgtgctgggctgagctggcagaacaaacgcggcgctttagctcggcctccatgcccagctgggccgaggatccccaggggcctgtctggtcccactggccagcgctctgcctgcctggtagagctggggcttgcccctggccagggcagcactgaccccacaccccccacctccccaccccagcccagcaagggccacggctccaccttaggccccgtttcctcacctggcctgcggggttctggcccactcctcaccctcaggacactccctgctgcgtgggggcctaggctagaaggaagggtgccccaggtcaggggacacccagtggggagatgggaggaggggtcaggatggacagtgggccccatggcagcccccaccctgacgcaccagcaagaactcagggcatctgggcaaggccctctgcgcaccacctggctgcctctggaaccttcccacccagagaaggggaatgcacctctggtccccgcaggaacctgtcttgaggcaccaacaacacgctacgaaggactcaagcccagcaagaggaagagagccaaggacacaggtcagcatcgcaggcacctactctggagtccaggagcagggatacgggggcagaggatggagcagctgggacctcagggagaggtacgcaggttgccatggctgcgtctgcagtccacctgcctttccacgccagggagtcagtgatgtggagccccctgggccccagtggaagcagcgatcagactatgtgtccttgaaataatgtttattccacgctgtcccgacagccccctctgcaggtcccctcggtgtactctgaggtgggaaaccctccctgggggcggtgaaggggaactcgggccaccccaccagccagcagatgctccagcagccagagccccagcctggagctgaggctcttcctggggctcgccgggcccctgcaggcttttcggaccctcagccagcccggcttcctctgctttgggcagcagcaagctggcccttgggcacctggactgctcaccagccgcccagccatgggtcctgctctccaggttccttctagcagatccatctctgtcagagcaagggactcaggcctggaccatcttctgggctgtcactggggctctcagtggccatcccagctctgcgctggcccttctggagcgtgtaggcagacggccccagccgcaggatcttcccgctgcccaggcactcgtcccccttgtagaacacagcaaactgtaggggagagaccctggcatcaggggtgccacagggagccagccgagggcaggcaggggcagagtgctcccctatggggcctggcctgtgctcggagcaccaggcactgagctcccaggggagcagggttttgctgctgctgctgctgctgaacaggagaggagaggcctggggcacccagtggcttcactagggagggtcttcagggtacctctccctgagtgggacagtcacaggggcctctcctgggactccaagggactggcaggtctctgcaccccttgggaatgtggagctgtgacaggaaggagcatggtggcagccagaggatgcttccgcttccctcaccccaggttccctcccaccacctgcccctggagattcctcaggcctacacccaccaggcgcccaccctgggagctcctgcacactcggcccacaggggccccgaccctctgcctctttgagcactgtcctcatgccccttccattttctgtcctcgcttctggggcccgggcagcagctgagcctctcagggcccgagcaggaactggctggttggtgacaccagagtggaaatcctctcacagttgtcactgtgggaggagcccccagggcagggctggtggcactctgccctcaccagctgtgtgacccgagcacaccctactcctgggcctcagccccttcctctgtaacccgggtgccctggcagggtgcagagcagtacagtcctccccgggctcacccccacaccccacgcacctgtcctgtggcaagggcacgcacagcctgcacagctgtcacccacacggtgccatcttgattgagggtcagcacacagggcactgggtagaagagaggggcccttggagggggcacaggcctttcctggtcgacctcaggcccccagggagaaaggagcaccagcccacggggtcaaaaacccctgcttagaggggaagggcagggcaccagcctgggccctggacgcagcaggacactgcggggcagtgtacacacttgcttcagcccaacacgccggggcctgcctgcatctgctcccagcacccccaggcctcgctcagggcaggcacaggacacgggagttctaaatactttaggtaatctccaaatgatctccacaacgggactttcctaccccagggtctcccatccctggcccaaatctggcctcaggaagctcagcttcaaggggcccgtcctcaggagccctcccgtcagtcacctagtgccatctggtggcggaatcggaagtggcactccatcatcttgtcccggaccagtgctgcgggaggctcctccgcaatccagtgcacgcggctggtcctcagcaggtccctgtacagggctgggtggtctgtccggggggcctgcagaatggaatgtgaaggtggggacgccgaggggcacctggccccaaggccggcctcagtgtggtccctgggaacaactgtcctaccagcacacacacacacaggtaacggtgctggcaccgctcgaagtgttctacccacagaaattcatctcatcacccgccgggcctttgaatccccattttacagatgaggagactaaggcccaggaaggaagtaccatgtcagagtgggcaagaggcaggggtgagatccgagcccatgacagtgaatgctgcaggttcaagtctgactcaggccctctacctgcaaccacctgtggggcagcagcacggcccccctcgaggactggtttttctattcgcagggacaggggccagccacaccacgggctcttctctcaaggccaccccaggaattcctccacacaccaaatggctgaggagaaaggagggactggtagctgctggcttcccacaggtgccccaggactggccctggtctggggggccccagataccctaggttggttctgaggcccctgctccctgtcacccacccatggcctcgggccattgagacctggcacctcctgggattgtgccaagccccgcccctgaagcaggacgaggagcatgaagttaagggctttgggttctaagcaggcaccaagacccgtccagggacaggaggccgttggttaacccttctggtcttctcacagcaaactgaaatctagatcatttaattcattcgcagccaggcttttctccccacaggtcttcctagtaaggagatgtcctggaatcggtgggtggggcctgctggcccccgcctccgtctaagagaaggcgccccagcattcgtgccagaacatgagccggcagccagggtgctgagagtgggccttctcagctccacgcgccaaggtggaggccgggtcactcagggaagaggctgtgctgaacacggcaagcagcatccccggcctgacccacagatgcagcagcacccgcgtccttgcttttccacccaagctgtgacaaccaaaaatgcctctagacactggcaaggtcccctgaaggtggggtgagcttgccgccactgagcggccctgctttgaggccagggtcacagtggtaaggtccccactgtggtggaaggcttggtttgatcctggcttggccatctgcacct

SEQ ID NO: 98236 - DNA, 22918 bp, Homo sapiens
tgttctcccctgtggctgttgttttcgtggtgcggcccggacacgtgagccggcccgcgtctcagagagttgcgcgcgaagccacgttcccgccttggacatcccggctcgcttggccgagcttgcggcctctgctggctgctccctggcgggctgggagatgtatttggcggagttttgacaatggataatttgcaaaaagtcttgtttttttgttttgaaacagagtctcgctctgtcgccaggctggcctgcagtggcacgatctcagcccactgcaacctctgcctcctgggttcaagcgattctcctgcctcagcctcccgagtagctgggactacaggcatgcgccaccacgtccaactaatttttgtaattttagtagagacgtggtttcaccacgttggtcaggctggtctcaaactcctgacctcaggtgatccgtcttgggattacaggcatgagccactgcgcccggcccaaagcccacttcttatatgctgatatctgcactgctggagtgcagtggcgcgatctctgctcactgcaagtctgtactcttcaggcattttaccgctagactgtgctgtgacagtatgtgtgttgagaactgtgaccacaatgtgctcacagaagaggagctctcccttacattcagtgatctggcaactctcactctgattctcctcatcctgtacagcttcatgcctttgactcttactgtgtcttctttgcttaactcacctgttacctcctccaagaagtcttcattaatccctttccctcattaaaggcctccttgtttccccatggtaccttgtgaatacttttatcttagcagttgtcatgtggggaaatgacctgtttatgcatttatcttctttaccagcatatgtcagggactggcacatagaagttgctcaataaatgcttctcaaatgctgcgtacagcacctgctacattatcttggcatccagtccttctgctgccctgactgtcccttcctctccctactctgcatccatgtgggagatggacacttagctgccggggtgctccagctgggacaggctctgatacagctccgccagtgctgccatcttggtaaacatttcccaccatgaccagactatccacattgcttctcatgaaattccaaccccctgaaggacatccatactgaggaatgttcctttgctggcctgctctagggcaagcactgggccaccttgctccaagggcctttctccaagctacttggtgggtgctactttcatgcagctgggcaaggagccaaaattcccagagtctgtgctgggaattgtcccattggctctggttgtattaaatactttattattaaatagtttgttaaatactttttagttccatttagtctctttgagtatctgtagatgttaacagggcctcaaggttataggaaagtccctcctctaaactgtaagcctgggaccatacaagggctcaataaaagttgttgaatgaagtccatgaaaagtgggcactgagcagaataagtatcaagggaggaagagaaacagacattccaagctgagggaacaaaggcaggggaatattgcctccacttcaaagtgttccaggaaacttcgattaatcagggcctatcaatcaacttctttttctctgagtgtctatgacacttgcatttcagttttttgtttttgtgttttccagacacaacatctcactctgtagccctagctggagtgcagtggcatgatcagagctcactgcagcctcaaactcctgggcttaagtgatcctcctgcctcagcctcccaagtagctgggaccacaggcacccaccatcacactctgcaaattttttcattttcttgtagagacagggtctcaccatgttgcctggtctggtcttgaacccctcaagcaatcctcccacctcagctcccaaagtgctggatgagtcacctgcccagcctcacttttcagttttaacagtttctttgcaagtaataacagaccagacacacagctaccaaaaatcggtggtaagtaatggttagtccctagactggattctagagccagatcagaaacaggtttgatgaatcctagcaccatcacagtgagggtgggcaagtgactggatctccatgctttgatttctcaaacagagatagagccaggcatagaggctggtgtctgtagtcccaggtactcgggagtttttagaggttggaggattgcttgagcccaggagtttgaggccccattagtcaagctatgatcatgccactgcactctagcctgggcaacagagtgagaccccaactctttaaaaaaaaaaaaagaggtaaaaatagtgtgtacctcatatatggtatctacctcctatgtgttgtgatgattaaatgagctaattcacgtagaaaatgctcagtaaatgttacctattctctgcctactgtgtaggaaatcttccttttatctctaccatgcctcagatatctctatttgctccctaacaccttaaggatattttatcataacacagttaactcattgtttatattatctgatatatctgatattaactgatattatattattgtttatcattccctcccactacactcaaacattgtctgttcatacatatttgttaagttacaacagggatcaagggagacacagtatataccccaaataactgaaaacaggtactcaaatacaaatatatattcatagcagcactacttggaatagccaagaagtagaagtagccctactgcgcatcaacagataaatggatagggccaggcatggtggttcatgcctataatcctagcactctgggaggccaaggcaggaggatcacttgagctaaggagtttgaaatcagcctgggcaacacagcgagatgctgtcataaacaaataaatacaaagacaaacagatgaacacattgtgttatatacatacaatggaatattattcagccataagaagaaaggaagtactgatacatgctacaaaatggatgaacctcaaaaacattatgctaagtgaaggaagccatgcccaacacccacctattatgattccatttatatgaagtatccagaatagataaatctagagacagaacccagattggtgggtgccagaagttgggaagaggaagaaatgaggagcaacttctaatgaggatggagttttcttttggggtcattattttggaccccaaaattttggacctaggtagaggaggtgttgcacaacattgtgaatgtaatatataccactgaattgtgcaatttcaaacagttaattttattacgtaaatctcacttcaatttaaaaaaatagccaggtgtggtgtatacctactcagctattcaggaactatcacttgagcccaggggtttgaggccagcctgggcaacctagcaaatcactgtcttaaaaaaatacaaattttaaaataaaaagataaattgagagagaaaaagatcctgccttcgtagagtttatattttagtgggtgagccacatcagacagtaaatcagcacacacttaagtaatgatgtactgtgataatcacttggtgggaagtagggtgtgagagaacagagaggctctgagatgggaaggggatgggtagtttgaaaaactgcaaggagaccatctgggccaatgcttggagagccaaaggcagtgatttaaaatgaacccaaggaggtaagcagggaccaggtcctgcagagccttaaatgtcacaggagggagtgtgacattcaatctaagagcaatggggagctggggagggttttaaacaagggattgacaggaactgagttatatttaaccgtttgatctgctttattattattgagacagtgtcttactctgtcacccaggctggagtgcagtggcacgatctctgctcactgcaaccactgcctcttgggttcaagcaattctcgtgcctcagcctcctgagtagctgggattacaggtgtgcaccaccacgcccagctaatttttatatttttagtagagacatggtttcaccatcttggccagactggtctcgaactcctgacttcaagtgatccactcaccttggcctcccaaagtgctgggattacaggtgtgagccactccacccagctgatctgcttttaaatgcacttattagcttgccccttttctagggtagaaaaaatcttgtgttttctgatgcgacccactgggtcgcatcagaattacctaggaagcttatttttcaaatacaatactgagagccattggattggaggggtggctggcggaggtattttggagtagcttcccagaggactctgattctccactgcccctatcactttgagaattactgttgttctagaagcttaaaaggattgaaatggatattagctgccttatcatgaactcttaacccactttacagggatgggaggggccatgattcagtgactttaacaattccagtggccagtccccagactgacaggttatcgactcttggggcaatagagtgggatctctaagttcaggaggtaagaaaacagcagcagcggtgtttatcactagaggcatgaggagaactaatttctaaaaagcactggagaactatactgtaaaaaagatctggggtgctatgatgcaaggaaggaagtattacttggttggggctggaaaaataaagcaattatagtaaaaaaactaaaaaaaaaaaaaagtctagatcccggcttcttgacagtgtggtctgagaagcaacagcatcgctggcagcttgttacaaatgcagagtcctgggccctgccacaatctgcatttttaataagagcctcgagtgttttttatgtgctcattaaagtttaagcagcactggtccatatcacggcgaggagatccagaccatcagagggtaggctccctggcacagctgacgcatttttgaatactttgatacagcacagtgtacctgaaaagatactgcatttttgaaaattaagtgctataaatactggagaaagacctctttttttaaactgcggggaggtttctcataagccaaatttcttttgactagaagcattttctggggagtaaagtaccaggcttccttaaagtgaggcggagccacgttaaaaatgtgcggtagaactcagccttggccaagtcgaccgttcaccagctgggtcaagtctggagcctcctaggtcccttggcagttccgagctaccagcatgagcttttacaggaagttgagttggctgctgttctgccccacagagcagctgagtcttttttttttttttttttttgatgagtttcactcttgccgcccaggctggagtgcagtggggcgatctcggctcattgcaacctctgcctccaaggttcaagcgattctcctgcctcagcctgccgagtagcttggattacaggcgcccgtcaccacactcggctaatttttgtatttttagtagagacggggttttcaccatgttggccaggctggtctcgaacttctgacctcaggggatccgcccgcctcagcctcccaaagcgctgggattacaggcgtgagccacagctaccgactctgagttgagtctttaacgccgaagatgcagaaaggagacttgacaaaactattttcggggagtgtggccgcggaattcggtgagggtgctataccgggagagagtagtagcaacggctcattcactgtgaagcccctaagtgaccttagacctctgaccccgcgcctcactcggcgcttccgcgcgcagcttccgctcccgcccctccgacgaaaggctgggccaaaggtgggggggtggggctctgaggtcggcagttaggggcggtgcccgctgggggcgggtctcgcgaggggcaggattcgaggaggcactcgagcattgggcaccaggtagaggcggggcctagtgctgggctgggttgggcggggcagggagttcgtagccgcctctgggtaactcgactcgggcggccaaacctccggaggccggggacggaaggcgggcccgcagcagatcctggatccggaatctcccgggcaggagcggaatctgtcccgaaccgggtctgtgaggaactcgcgaacttggattaggaaatcccggagcccggatcgacaaatcccggaacccggaattaagatcgccaagtcccggatcgcggagcacagagcacggagtggactcgacgcggagcccggagtccggatcgcggcaccgcgggacgggacggagcgatgtcgggccgaggcgcgggcgggttcccgctgcccccgctaagccctggcggcggcgccgtggctgcggccctgggagcgccgcctccccccgcgggacccggcatgctgcccggaccggcgctccggggaccgggtccggcaggaggcgtggggggccccggggccgccgccttccgccccatgggccccgcgggccccgcggcgcagtaccaggtgagcaaggaggacgcgagcggacgggggcgagaggcgctgcgagggcgcccgggccggcggctgaaggggcctcgagtgagggccctggggaaygcatgaggaactccgggagacggtggagggcgggccgggaccctcgggctgcggcgggtcgcggtggagaagtgggaaggggaagcaggttctgcagcggagggctggaagcagctgggaggcctgggggcttccgcggcacagggattccgagtgactgggagatggaggagtttggggagccagtgaattgtggcgggtgggttgagaagtctagggtaggagggctggaaagtgatgagaaagtttgggaaagggccctcgctgagaaaccggggttaccctgcatcggccttggtcccagtccaagtctgccctgttttttctgattgggaactggcggagctctagcgtgtctgagatggctcccggctgctaataaggaggaaggagcctggcttcccacgggcacgggacgctgaggctagggccaggggattccagcttgtgcacgggcggactttactcctgaggcagggccaggcgccttcgctgggaggactccagcttagaccagagacggtggtggcctggcctgaggggaggcccagcccagtcacaggccggctctcttctgggctttctgcctcctgtcatcgtgtccgggagttgattagtctggacgtgcagagtggagccctgctggtctggggccggaggagtctgcgagagttgcttcaaagagtgctgtcctgacccctttggggttttgagagctgctcagattgcagcttcaaaagcccttgcaaagcagcgacttctgctcagtgtgtgaggacctcagcctgaccctgccagtgctctagtctgctgttcaggttgccccagagggcttggaaactgtgcccatctgccttgtcaccctctctgcatttttatttggccttcaggttctaactccaccacgtccgaagccatgtgcccaagcatttgacactggcttcttgctcatctacgggtttgctgtgggcttcctctgttttcgactcatgtctccaggcagaggtccttagggatcctcgtggagtatacacagcctacctgccccactgggccctcacttctaaggagatggcttaactagggacagtgactggatttttttttccttcttactcctcattcttcctcctttctcaagagaaaagagagtctgggtatgggcagagacagacctggtcccagggattccagctggggctcatctctcccaccttgctgtccccgttggggattcatgggcccagggtgttgctgagggctccctgcatcattcattgtagcccttgggcctgcccactgagacctggcctgggcaccatctgtgggcctttggccttggaaggacctggaacagacaagccgctccagtttccttggcatgcaagccataggaaatgtgcccttgggacagcccctgagaggatggattccacatgttttggtggggggtggccttgggcctgtggcaaggccaagctggctggctggttaggcctgggctgctagctgtgcggaagtaggagatggccctgagtctgggtttcccatcccactagctttcctcctcctggcaggagaggtagatgggaaggagaacccagccagctaactttggctgagtttgaagaggatcctatytgccttctttccaagtccagttgtatgactgccaggagaagggacttgagatctgggaaacaaaggggttcctgtctgttagggctcatgagatgcacttgaaaagtgagaatttgaggcccaagctgagcaaatagttgaaagaagggaagtgatgacctcccttcctccagagggtggttctagctgtggatcacagttaacagaggaacctaaaaaaagaaaaagaaaagaaaaaaacctccagggcaggatatggtgggctcacacctgtaatcctagcactttgggaggcccagacagaaggattacttgagaccaggagttcaagaccagcctaagcaacatagtgagaccatcatctcttaaaaaaaaaaaaaaaaatttagccaagcrtggtggtgtgcgcttatggtcccagctactcaggatgctgtggcaggaggattgcttgagtccaggagttcaaggctgcattgagctatgatcctgccactgcactccagcctgggcaacaaaataacaaaaacctcagattgctgggttcactccagagagttcaaaaagttcaaaaaaaaawtttttttttttctgatacggagtctcactctgtcgcccaggctggagtgcagtgacatgatctcagctcactgcaacctccgcctcccaggttcaaacaatcctctgcctcaagcctcctgagtagctgggattacaggcgcccaccaccacgcccggctaatttttttgtatttttagtagagacgaggtttcaccatcttggccaggatggtctcgaactcctgaccttgtgatccacccgcctcggcctcccaaagtgctgggattataggcgtgagccactgcacccggcctcaaaatcctttttactcatgggagagtgggtggtatgttccccaactgaggccctcaggcccaggttccaggagcatcagggccacatttggggcagggcaaagcaygctcaccggagccctggattcctcatctggggttcaggggattgatccaggcctacctggtcctgctgcaggcagggagttagggaggctcagagtgctggactgcttttttttttttctttaactcctgagttgttttttttkgtttgttttgttttgttttgttttttgaagtgggaggagttgctagcgcctataagccctatggagcttggcaaggctcagctgggacttgaactataagcagccttcccctggggccctgagtgagccaggggctctgggcccaggaaacctggagcagatgtctgggtggagcctattccagaccctgcctatgaggccttgtcttgggacttcctgttaccggagcacctgcccaggagggatgggtggtgctgcaggttttgtgaacactgcagcagggagcttcctggggaccacagggccctcgctcacctctgcaggacccactgcttcagttcttccctgtctttgtctcaggcactaggaaaaactagtctgggatgtctgggcctgggcttacagctgtagccacacttagtttttttctataatctcaggccagagaaagaacaatctttaaggcagagaaagaggctgtcttttgcctttcaacagctctgattaatctcttcctgatgcagagagactttggcaggactcccaaagccccagagccccccactttgarctttttattctcccaaacacttccgtcccaccctgcycctcctctccccatcctcacgtctgtgggtcatgtttctttccatctccgcatctggtcaagaatctgaccctctgtgttgggaacatgggtttagtgcgggatgaagaggttggggaagaatctcatctccatgatgctggggtgggggagggtcctttgatttggtacaagtctccaccctgccgggcttggttggctggttgtgctcgttgcataatctgggccctggggccagccctgtgaagctgccagggacagtgtgtgcaaggcagagctgccaaacaggccttgcaggcagcagccatggggaggcgggtgggggtggaggtgactcccagatgggctccacagaaatgtcagggagcaaggcctcaggtgggaaatccttctgcaggcatctaaagaagctatttctgtctcccactttcctgctgctcagcctgggcctctatccttgcctcccaggataatcttagcccccttctccagcttgggattgccagggctacacggagccagagccagtcctggctgccaggtggtgcctggaccactggcagagtccaggtgctagctgctctctttcccacaggccacccaggagccatagcttcccttctggggtcttctgtcataggggtagtagttgggcagtagggaggtaagaggagggtccagttctgggctgtgggtgggggctatgtgataccagactacagggtacagggtccctgtaccctgcccgaggccacccccaccagctggtacacgttccaagccatcctgttgcagccctgctcacctggggtgctgctgcctaccagacccctttctccctcggccacagaggatggggattggggctctgcgccattggcctactcatactatagtacactcctctgcctggcagtgacactgcccctgtgcctctcagccatgcttcttcttcatgatgggagaaagagaaggagggcagggcttggcaggactgtctgagagaatagggaccagcttgyccagggaatagggcacagcatgctggggctggaaggtagcaatgggccctgaaaagctccccaaggcccttccctctgcaggcaggaccctcctcccagcccaggttctggcaggcctcattcgctggcatggctgccagggcggttgcagggggcagggcaggtgtggtttacactctgtgctcaggcgcccactcccctttgttcctggggctccagcagggctctggtgtgctgctcaggccctacctggctgacgagagggatgragggcatgggctatgggtcccggagggccttgcccctgacctatgcacccccgttggctcacttcccccagcgacctggcatgtcaccagggaaccggatgcccatggctggcttgcaggtgggaccccctgctggctccccatttggtgcagcagctccgcttcgacctggcatgccacccaccatgatggatccattccgaaaacgcctgcttgtgccccaggcgcagcctcccatgcctgcccagcgccgggggtaagagcatcctgcttctctcactctgcctaactcagctctggtggtagcagagggtttccttctatcttaagagctttggtgactgaggatgactccaggctctcctgggggagagggtcctggagactggaggggcgttatgggagtgagtgtccttttttggaccattgacctcttaagtgggtttctgtcctccccaggttaaagaggaggaagatggcagataaggttctacctcagcgagtaagtgttaagaggacacctgggaggcctgcccagtggccaccttggggtgggtgtccatctctctcaaagctgggctgcagcaggaagggaggaaagagccaggctttggctgaagcaagctgatgagcttctgctaccttccttcagatccgggagcttgttccagagtctcaggcgtacatggatctcttggcttttgagcggaagctggaccagaccattgctcgcaagcggatggagatccaggaggccatcaaaaagcctctgacagtatgtgtggccctgaccacctctagccttcccaggtttycttgccttccacccccttgttttccaggggccaagcaagttgggctagagccgggtttttcacatgcaggatgcagcccactagtagagtacgaactcagttgaatgtgttggggccagtatgttttaaatgaatatatgacagtagaaaatcttaaaatacttcacagtagtacttaccatagtagtaaatggattctttcatgacatttttgtttytgataaatagatatgcagaccttgggtcataattgaaaatgtaaatcttatgggtggtggtcaaaagtttgaaaaccactagactaggggataaaggtagttcctttctccttccccttccccatccatagagaaattttcttttttttttttttttttttttcygagatggagtctcgctctttcacctaagctggagtgcagtgttgcgatctcggctcactgcaaccttcgcatcccaggttcaagtaattcttcttgcctcagcctcccgagtaactaggattacagatgcctgtcaccacgcccggctaatttttgtatttttagtatcgccatgttacccaggctggtctcgaactcctgactgcctcggcctcccaaagtgctgagattacaggcgtgagccactgcacccagccgagaagcttttcttaataataatgtagaacagtcccgagtggtgaagcctttccaggggactaggatattttggagccgtgatgggtgtttgggtttcatgtaagatgtgagccagagactggctgcgtgttactccatcatgccgtagcaccagtcccactgtgctggcattgttggtgatgcatctctttccccataaaatggtgagttccggccaggtgcggtggctcacacctgtaatctcagcactttaggaggccgaagtgggcagatcacctgaggtcaggagtttgagaccagcatggccaacatgttgaaataccatctttacaaaaacacaaaaaattagctgggcatggtggtgcgcacctgtagtcccagctacwygggagactgaggcaagagaatygcttgaacctgggagtcagaggttgcaagtgagctgagatcgcgccactgcactccagcctgggtgacagagtgagaccatgtctaaaaaaaaaaaaggctgggactgggacttactacttctgattcccagtacctgacaaggtgcctggctggctcatggtgctcagtactgattgttgaatggttcatatgagaagatgcggtagcactgtgtcccagcatcttggtccacctccagttgtgattgcctttctctctttagcaaaagcgaaagcttcggatctacatttccaatacgttcagtcccagcaaggcggaaggcgatagtgcaggaactgcagggacccctgggggaaccccagcaggggacaaggtggcttcctgggaactccgagtggaaggaaaactgctggatgatgtgagttggggagggaggttctggagggaaggaggcctgtgtgggtttaagactgagaccaaggagtttgatactagcctgagcagcagagccagaccccatctctacaaaaaatttaaaaattagctgggtgcggtggcatgcacctgtagtcccagctactcataaggctgatgcaggaggatggcttgagcccaggaggtcgagcttcagtgagttatgatcacaccactgcacttcagcctgggtgacagagtgagattgtgtctcagaaaaaaaaagactgggccagacacttgggcgctcccagagaagtcctgccatagggaggggggygctgctccaagcccgttggaggttgatttgtgtggttattacartgttcctgcagatggcagtcgagtgtctcgaggaagtccctcgtgggctgcaagagggcaccatttccctgcctccagtctgcccagagtcctgcttccatccttcagggcccaggaatcttcagtatccrgagctccagggctgaaatggggcttctctttcttgggatttagcatagcttgagatttgagagctcagcagcaccatctcacacccctttccatccccagcctagcaaacagaagaggaagttttcttcattctttaagagcctcgtcattgagctggacaaggagctgtacgggcctgacaatcacctggtggaggtgagagtgggcctggggcaaaagcaggctgatgtgcaggtttggcagggaaatggcctcagggcccttgggaggccctgtgttcacrcccacccccttggtgataagccatgcttccctccctgccagtggcaccggatgcccaccacccaggagacagatggcttccaagtaaaacggcctggagacctcaacgtcaagtgcaccctcctgctcatgctggatcatcaggtgacagagaccctggggtcatttctgggcccacagggacccctcaggaggggagctggttcctagaaacccttcctgtccctgccctattttcccactgttctactataagaacccgttctgactcccctccatccaactccagcctccccagtacaaattggacccccgattggcaaggctgctgggagtgcacacgcagacgagggccgccatcatgcaggccctgtggctttacatcaagcacaaccagctgcaggatgggcacgagcgggagtacatcaactgcaaccgttacttccgccaggttagccagatgccagcccccgttttctcagcccttgctttrccttgcctgctgggctactccttggccacagcctgcagactgctgccctcactggtcctggaatrgtccactccactgtgcccacaagccaaygctgagcctttcgtatttcctccagatcttcagttgtggccgactccgtttctccgagattcccatgaagctggcagggttgctgcagcatccagaccccattgtcatcaaccatgtcattaggtaaatgcaaggagggggacaggaaggctcttctaagagcagattcacccttggcttgaactaaagccaaagaaagcatcaggtttctttttccctgagtgtgtgcagagaatgggccccagatttggcccaggtgggcaggatgaagtcagctatgtgccttccctccccatgtgctgcctgcagtgtcgaccctaacgaccagaagaagacagcctgttacgacatcgatgtggaggtggacgacccactgaaggcccaaatgagcaattttctggcctctaccaccaatcagcaggagatcgcctcccttgatgtcaaggtgggccctctggctccacagcttcctctggggcccaggattggggtgrgctggctctgtccagcatttccatacatgtagcacctggaggacgggatgggaactctggctcagttgcttgcatgtaagctttgggggcacagtctgacacaggtaccctctccagatccatgagaccattgagtccatcaaccagctgaagacccagagagatttcatgctcagttttagcaccgacccccaggacttcatccaggaatggctccgttcccagcgccgagacctcaaggtgtagtcctctttcccraggggactcctatgtaamgctctgggtgatttttacccacagcagttcccagggtggattagcccaggggtgggkattatgctatggctttcctcctggctctttgcagatcatcactgatgtgattggaaatcctgaggaggagagacgagctgctttctaccaccagccctgggcccaggaagcagtaggcaggcacatctttgccaaggtgaggctctgccctgttttccctcctttggccgtgagtagcaaaggcctgagccacttggtttctcccttctccaggtgcagcagcgaaggcaggaactggaacaggtgctgggaattcgcctgacctaactgctcagggrtctttcttcccagccctggagcctggagggagaccaccctctgggtccttgctggggccgcagacacgtaggctggggtgaggagtgtctgctgtcaccctctactctccagctttagtyttataaatgtagtgataggattccttgttgcttggtccccaaagccttatactttttgcattggctttaattgggttcagcagatgcctcctctgcccccctgcaggcaggcccaagtaggactgctggaggctgtgctttgacattgtaagacatttccgaaccaaaggctgctgggtttgcatgtttacagactccccctggggcgagggtcagagctggctctggggagctgggctaggaagaggaggtgcagcccagactcttcctagcctttctaaaccaaagttctttgccattcctacaagcccagccttgctgctggttttttcctttcctttgggtatttgcactattttgggagcaagttttctatgtgggagccactttttttgtacaggggtaagttgggggttttcagggagcctgttaggtgcctccttcttttctttcctcaatctatgcaagcggctctggccgccatcatctcctgggatgccagagggctgcctctccagcggcttgggccggggaggggacactccagttctctagcatggcctraggtatggggtatgtgcatgtggaggccagggtaaggtgaatggggaggctgggaggactggtgttgccctttggagcttggtgaggagggtgggcctagggcttggcgagtgccacwtctggcaggtttggaaatttccaaataaatccttttgtctattggtggtgcctggacctggtccttgaacagcacagccctcattaacagactggagtcctagaggacttggcccacagagctttattggagagatacacacaaaggctgtccactcacttccataatttcttgatggacatgtttttctcactgtccttctgcatgacctaggggtgggagagagaatgaacattaagttacgaacacacacatgccctagcccactgccccagagccaccactggcaaaggcacaaagatggaggcctataccttggctactgccatctcaaagtcctcctgagtgacatggactcgccgttctcgcagggcatacatgccagcttctgtgcacacgccctgaacaggaaaaggaaattgaggccccactgctgtgcccctcatctgtggcccttgagcccagagcttcctgcctctgccctgttttcagtgggtactccaattaccttcacttcagcccctgatgctcctggcatgagctcagcaatttttctcaggttgatcccccgggtcaggttcatcttccgagaatgaatcttcaaaatgtccagccgggcctggagatggcaaggaaaagcctgagccccacaccccacccccacagccagagccactttgcacagtgtccatcacaaacctcctcattggggggtgggaattcaatttttctgtcaatgcgccctgggcgaagcagtgccgagtccaggatatcaatcctattagtagccatgataacctgagcagagaaagcaagtggggatcagctaaacctcttcctcagcctgcgtggcacccaggccttccctgggcccatcccaaggatgctaccaccttaccttgatgttcttggtggcctcaaagccgtcgagctggttgagcaactccagcatcgtgcgctgcacttcactgtcccctccagaacccccctccagccgcgaggagccgatggagtcgatttcgtccatgaagatgatagatggagcatgttcccgtgccatgacaaacagctccctcaccattcttgcccctgtgtggaggccgagctggtgttagggagcttattagcttattagctctctaaccccctacccctacctcttgcttctcacattgctagccatggttaccttcccctatgaatttctgtaccagttcagagccagagacacgaataaaggtacagtccgtatgatgagccacagcccgggccaacagtgtcttcccagtgcctggaggtccatacagcagcactccctacaggggaacagcaggactcagggcagaaagctacacccctcatttcattcagtgaacatttaccgagtgctgggtcccttgctagatgttagggatacaaaaaaaaaaaaggaacatcaaggtcccttctatccaaaccacctcaccgccctaggaacacttccccagccactcttttcagggggagggccagcccaagcaagatgcagcctatcccggtgcctccccaacccctgcagtagggctggctggggcaggaggagtaagtacagcttggccctctcagagaagccctgctcctcaccttgggctgagcaatgcccagtgcttcgaagagctcaggatgcttaacaggcagctcgatcacttctttgatctccttgatctgtttgtccagtccaccaatcatctcataagttgaatctggtactttctccaccatcatcagtgacactaatgggtctaccttgttgggcaggatcttgtgcagagtgtagctgtcattccttagagccacccggcaattgggtgtcacctgggtgaagggggcgagtttcagaagtggtacagtaagagctgaccccaccaccaccaccacctcacctgctacactcacatcattgatgtcaatgtttttgtccacgtctacaacaaatttaccttcaggatgtacctaaagaaacaagggctcatgaccttccttgacagccaccaaatcactaatcctacccaggaagacctatgagaatcccacaataccttgacagaacacagaaccctgtctcccgaggctacacacaaaggggtgggaatgcagtggagaccgagctggtccctggggtcatgctgcttttaccttgaccaacactttcttcttatccatggcccggactacttcccccacataggagccctgctcctgcagcagctgtagctcctcccgcaataggcgaactagatggcaaacagacacagtggtcacctagctactcctttggagtctccaggacccaattctacgtgcatgagctaagcatcactcttattaaaggaaggccaaaggtcaaaattcatgtatttaaggaggctacaatagggctcaggaaaaagagatgcatgtgaaactactagatgatgacagggagaaaacagtaagcactgctgtgaagacacagtgcagggagataaggacagacctcagacaaactgcccacatgcggcttcccatctttctccactcacctttagcatttagttcgttcctctgtgcctgcagcctccggaggttttggctcttatcattcacaatcagctgtggcagacaagagacaaattccattattcaagggcaggagacaggaggaggtaggatcttggccaagacctcacaggtctgaatgagctgagggaagggcacagggcacctgcatgttgtttcagattctccagtatgatcctaatgaccctgccctgtccttcaagagtccctctggaccttacagcagccatcaaagaaggctgcttgtccaatactggtccaggagtaacagaatctaatggagaaaagttacagctggctcatgtaacaccaaatttcttgcaggaaggcaacaacacctggtggaaagattgttaggtgagaaacctgagttctagcccagccgctgtcaatcaaaagcaaagtaaaggtaagacaatctatttttaaaaatctagatctgttaccaaacggcacatgggtatagcatcagctaccctgcttcaagactactaaggtgaacgaataaaaacacatgaaaaagcattcaaaaatggtaaactaaacataatacctgcaaatgcacttggaattcagaattgtcttttgtggctttcccccatccaatttatattacagttgacacttgaacaacgcagggggttagggtgaaattgaaaatccatggacctgtccaaagttaaactactaacagcctaccgtaacagtataacgtaacactaacagactactgtttatgttgtctgtaaggcttactactggaagccataccttactgctggaagccttactggtaacacaaacatttgattaacaacataaacggtcctttttctatggtttagcgctttaggctagggctctgggttgcccaatttctttcattcagtctctatggaattagcattgtccagatccctcaatgatgcccttcctcacattctcacttcaccctcacccaacctcttggtgataaatttcaactcctgagcttatgtttcccttttataagaatccttttcattcgggcttcttccaaaagggttgacctttggctagaggtacctttactattaagatttgactcgaagatgtgtaacaaactgtgaacactaagaccctcaaagagatgggactggaggagaacaagagattgcttacttctgatacatacaccctactagctaagaaacaaacaagaaaggagaagcagcagcttcttccactgcactcccaaaggaattagatggatttgtggaagtccgtttccatcccccatcatcacccttcctagctccctctggagtccgtcctcacctggagttcttcaatcttggacagataatattggcggagtccgctgcctgccttcccctcctccagctccatctgaagacacagagtgagtcttaaacgacaggttaaacatccgagggggtaaagccacttgcagggcactttgaataaggcttgacaccaggtagctttgcgtagtagaaaaagtttggacttcggaggctcaggatctgggttctaatccctccctcccttggaaccctccattttcccaggactaaaataaaagaatgggaacgccgcctacctcatacgacttttaggaggaccgagaggcgatatgatatagacggggggcgctttgcactgcgtgaagtgctctacaagcccgaggtgtcagtactgacgaaggagccagcggaacggagccaaaggactggcgtcccgtctcctgcgacccgtgggccggccattcccgcgcccatcgcttccctcactcactccgcttctaccgcgtcttcctctcccagccttgccctgactcaccgagggcggcgctgacacagcagatccggtcgcaggcagcgtccagcatggactggtccaggcacctccgacccacccgacgctcctgccccggcccgctctccactcagatcacgctcgctccgcacccagccccgtaacctgccgggccgccactgcacccgccatacctgctctggtccgtcaagcgccatcttctctcttcagcagagaccgccggcatccgagccgtcttggcgcgcaagcgcggaagcggaggattgggacctgaagaccaggcagagaagaattccgggtcaatgggcggggtgtgcggcgagaccacactaagggaaccatgatgggaggggcggctactcgagttcaggggctttggaaggggatgaggaaggagtagaactcctcctcagtgttgcctcattgaaactctgtttatagttcttgtgatatgccttcctagtctcaactttcaacttacaaaacccaaggacagagtattgagaacaatctagggccacactcaaaatggcggaaaacctcgagccagggacgcaggggacgcaagcggaagcggaagtagttagctgcatacttgtgcggttccaagtgtggagaaagcggctctgggtctaggtagtgtgcggagaggggcgcggggtggaattgctgcgggaagtgggaaactggaagtgggaaactggaagtggaatctggtgctccggaaagagacgttcccaacttctactttctccccagattgagggatactccccctttccaccatgggcaagaagggcaaagttggcaagagccgacgagacaagttttatcacttggcgaaggagacgggtgagtccggattcgctcagtctgcgagcgagcgagcgatctctgcccggttcgcctgctctttgcgaccattatgtacctctcctgcagaaggggtggtcggttgcgaggccggagaaatcctactagtgaagcagtttgcgcacttggttgttttgtccaggttaccgttcccgatctgctttcaagctgatccagctcaatcgccgctttcagttcctgcagaaagcccgagccttgctggacctgtgtgctgcgccagggggatggttcgtaacactcgccacaggttgctcctggtggccgctttctgggttctgagctgggatggcttccagtttcactgcgggaggggaacccgaatcccggtcctcttgggggccgtttcctttcttgattgcagagaaagggcttggaatacgtgcctatgatatgctttggccagtacacgtaacaccagggatgagagatcagttgccaagagggggaaaaggatggctctaggtttttaaatttctgttccttttataggctgcaggtagctgccaagtttatgcctgtatccagccttattgtgggtgagtaacggacagctctccttggtgttttaaggggtgggtgtataaggtattttgtcctgtatttctctcctccctgcttgaagcaaccttttagaatactctgacctgatttcttccaggagtggacctggttccaatcaagcctctccccaatgtggtgactctccagcaggacat

SEQ ID NO: 98237 - DNA, 16856 bp, Homo sapiens
atcgtcagtacagtatttttaaccctccccatgtgcagccaagattaagaacccccaatttagagaaatggttcaagccaccgcttcctttccatcccttctctcagctgcaactactcacctctcttcttcctcactgctagtactgctatcactgtctgagatgccatccttttcttccccttcaaggccagtggcagcttctgtccccgaagaagcctctgttcccttaggggcttcatcttggtacaggggagacattatctcagtcttcaaacaggaagggggtgtctgtggcagctgctgcttctgctgctgctgccgtcccttccgccggttctcaaataacagctgggcctgactgatctccagggcctcatcggcatcgtcctcgatcccagcaaagctgccctgtgataggagaacatcagctgcccttctcccaaggaagactcatctccccgcagtcttgcccccggcctctccttacctttgagaaccacaggttggcttgttcttcctgcagtactgccttttcctccagtggtaccagcagtggattctcctcctcctcctcctctttatcatcttgcacttcagtaagtcgcatactgtagacccaaaggaaagtagggggctcagagacccagattgcctggagcccttgctgccctactcaggctctggtagtacccaccctaacacttcctcagagtggcagcattccctttggtgcacacgtgccccttaccgcttttggtcccttagaccctgatgtcccctgactcctgccagctcctctggatccaggtcactatccagagatgtgtcatcaccgtcgtcctcaacatctgacacatagatatcatcccttggcagatcggacagaaatgtgtctgctgcactcatatccccttgtgttacttcctctaataactgaagtgtaacagaaacaaaggtaaactatttaaaaggaaatatactgtttttttttctgtgtccctcacctcagtctatgctcagcaacactagaaagaacactggcaaatccattatcctttcacagatgggaaagctcagatccagggtagtgaatggcctgtttacaacatcccgttctaggctgggttactgatctatcccactcagctgtcttgtctcagtggtatcacaaataggtcttaaggaaggtacctacagcccacatagcaccaaatcttaacatattctacaacactggttttcctttaaaaattattctcagacagcatctcaatcatctcctgagaataccgtctacacagtttgtttccactgaataaaaggggcccagccaacatacatccaacaaaactgttccacttaaaccaattgtcagaaccttttattttcctcatggtaaagatactaggctgggtatggtggctcacacctgtaatctcagcattttgggaggctgaggcaggaggattgcttgatgccaggagtttgaggctgcagtgagtcatgatggcaccactgaactccagcctgggtgacaaaacaagatcttgtctcaaaggaaaaactccaactactatttcttgagtgtttatcacatatgagggattacacctatctttttttattcctcaccaaaaactctagtaggtaggttctattattgttttacagatgaggaaactgaggcagcaaggataagtggtagtcagctcagtcacttcacaaagctccaggtggtagagctgggaaggaaacctgagcctgtgtctgctctagggccaccatgctctactgccctcctgtacaacaaagatgacctgattatgacactcccacacataagccacaaaagttcattttgtttgtgaccctgattttgtcaggaaaaacatgttcttcagtattcagtggaagtaccctaatgcgagtgctcacttggtctcaatgaactaaagaatgctgctcccctctgagggagatcctctattcatctgtgcttgaaactcaagtaacctggcagcatctactataacctaagttcttttctgatgttctagttcttcaagaataaatctatcagccgggcgcggtggctcacgcctgtaatcccagcactttgggaggccgaggtgggcagatcacgaggtcaggaggtcgagaccatcctggctaacacggtgaaaccccgtctctactaaaaatacaaaaaattagccaggcgtggtggtaggcgcctgttgtcccagctactcgggaggctgaggcaggagaatggtgtgaacctggaaggtggagcttgcagtgggccgagatcgtgccactgcactccagcctgggcaacagagcaagactccgtctcaaaaaaaaaaaaaataaatctatcacactcatctatctacctaactcatcctttttggtttatgtttctttgtggccttatactcaccaaggcaccctgtggtgaagacagcaaccacagcctatcgttcggcaacctaaaaagacattcaacaccccccacctccaaacacccaaacagatccttctgtctcctaaacctgcacccccaatgccgcctcacctggtgaccccggatggtgctcaaggagaacatgccagtctccccctcgtctgcaatggaaaccccaggcagatccatcttcagctccacacgctcccgctgctttctctgctcacgcaacagcttctttttcttcctgagggggtggattgagggagtaaaaccggcccagctccaaagtttctatccatgccttgcattttcttctcccatcttcacacagtccctgcgttggggaactccaagctctaccccagctcctttcacctcttcaattccgccacctcctgggccttcatttctgccaaggtctggttcagttgttcctcctcctcctcttcctcctcctccttagagggctgctttgtggttccagctgttgagtcctcctcatcaccttcatcttcctctccagagctgaggctggcaaaacagtcccaagagttgggttattttcccagactcttcccctggacacccggtccacacctgcctcgctgcgttctctcctcacctgatgtccagtgcctttgcttgttctttcagcttcttggccacatatcgccgaagttttgttctccagtttagtagcgacctgccccagagatactattactgatcttgccatctccctctttgtccccgcccccttctgttttaggctcactacccacctttcgggcttcggctacataaatcaaaaggctcaggcccccatcccaaacctttagcacagcaatatcctcttcccagaggtccaacatcatggcctttccctgcctccagggctcctggcccccgtgcctaccccactccatacctgagctccttgcgccccaacactctgatgtcctgacagcacacccgtatgtcctcagtggtagctggatgctgtgccaactcttcatcatctaccatgatctgtttgggaggatggaaaggtgtcaggggagatcctcaggccatgtttctggggctacctcatgtccctcaaggctggagactcacttcgctggccttggagaggaagtcaacagggttggcagctcggaggaagtcagtgactgaggtacggtgatagagagtgaggtcaccctcagcatagccttcagccttaggaaggaaaagagagaagcttggtcaggcccttctaaggtacctgtaggacccaccaggcccaacctccctagagttccaggacccaagagtgaccccattccccaaaacacacctttggcttcttcttagtaaccaattcagtaacggtcttagcctgaacttcaacctccttaaaggcaaatttggggtcaaagaatttactgtcaaccttgtcaggggccaggaatcctaaaaatgacaggatatattaaaaagtgtgctttgggagttgggagcctggatcaagagaaaggaaatgatgcccaccttggcagactacaaagatctctgcagattcatggcgagaggcttggggcttggtggcctggacacggcggaacagctgctgaaagatccatagcagaggctgatagtcacgagaacggaaaacctttgtgatgaagctgccaccacgggccaaaaagtcacaagccaaacgtagagccatcagtgtcaaatgggctgtaggatagagacaattagttgacgcactctgcagcccaggagggcatgcgcccacctccaccatcacctgatctccaagcaccacactccctgtaccttgtgagtaagcatcatggacccagctagccccaacgttgggggccccatcattgagcacaacatcaaccttccaggtcttcagctccttcctcagggcctaaagagaagaaaaggaactatggaaacagaaacactggaatggccctggttcagccatttgtccatctagtcatttgctgagtgcccatcatgggccaaatgcagtaccaggcacaggagatacaatagtaaacaaaaacagtatgtctctaccttcatggagattacagtctgacactgaattcacaggagaagacttcactaaagatctctgcccttctcccaattccaaacacctttatccctgactctaaataaagcctggagtggacactacgaatgccataggtcttgtcgtacagatgtcaggcaagaacgtgctcaaagcacggtaaaaaggaaaaacttgcctttagaggatttcagggatgtagatgtttccgtataaagggggaaggaagagagagactcctattacctgcctacaacgttctgttgtgatgtcctgctggagagtcaccacattggggagaggcttgattggaaccaggtccactcctggaagaaatcaggtcagagtattctaaaaggttgcttcaagcagggaggagagaaatacaggacaaaataccttatacacccaccccttaaaacaccaaggagagctgtccgttactcacccacaataaggctggatacaggcataaacttggcagctacctgcagcctataaaaggaacagaaatttaaaaacctagagccatccttttccccctcttggcaactgatctctcatccctggtgttacgtgtactggccaaagcatatcataggcacgtattccaagccctttctctgcaatcaagaaaggaaacggcccccaagaggaccgggattcgggttcccctcccgcagtgaaactggaagccatcccagctcagaacccagaaagcggccaccaggagcaacctgtggcgagtgttacgaaccatccccctggcgcagcacacaggtccagcaaggctcgggctttctgcaggaactgaaagcggcgattgagctggatcagcttgaaagcagatcgggaacggtaacctggacaaaacaaccaagtgcgcaaactgcttcactagtaggatttctccggcctcgcaaccgaccaccccttctgcaggagaggtacataatggtcgcaaagagcaggcgaaccgggcagagatcgctcgctcgctcgcagactgagcgaatccggactcacccgtctccttcgccaagtgataaaacttgtctcgtcggctcttgccaactttgcccttcttgcccatggtggaaagggggagtatccctcaatctggggagaaagtagaagttgggaacgtctctttccggagcaccagattccacttccagtttcccacttccagtttcccacttcccgcagcaattccaccccgcgcccctctccgcacactacctagacccagagccgctttctccacacttggaaccgcacaagtatgcagctaactacttccgcttccgcttgcgtcccctgcgtccctggctcgaggttttccgccattttgagtgtggccctagattgttctcaatactctgtccttgggttttgtaagttgaaagttgagactaggaaggcatatcacaagaactataaacagagtttcaatgaggcaacactgaggaggagttctactccttcctcatccccttccaaagcccctgaactcgagtagccgcccctcccatcatggttcccttagtgtggyctcrccgcacaccccgcccattgacccggaattcttctctgcctggtcttcaggtcccaatcctccgcttccgcgcttgcgcgccaagacggctcggatgccggcggtctctgctgaagagagaagatggcgcttgacggaccagagcaggtatggcgggtgcagtggckgcccggcaggttacrgggctgggtgcggagcgagcgtgatctgagtggagagcgggccggggcaggagcgtcgggtgggtcggaggtgcctggaccagtccatgctggacgctgcctgcgaccggatctgctktgtcagcgccgccctcggtgagtcagggcaaggctgggagaggaagacgcggtagaagcggagtgagtgagggaagcgatgggcgcgggaatggccggcccacgggtcgcaggagacgggacgccagtcctttggctccgttccgctggctccttcgtcagtactgacacctcgggcttgtagagcacttcacgcagtgcaaagcgccccccgtctatatcatatcgcctctcggtcctcctaaaagtcgtatgaggtaggcggcgttcccattcttttattttagtcctgggaaaatggagggttccaagggagggagggattagaacccagatcctgagcctccgaagtccaaactttttctactacgcaaagctacctggtgtcaagccttattcaaagtgccctgcaagtggctttaccccctcggatgtttaacctgtcgtttaagactcactctgtgtcttcagatggagctggaggaggggaaggcaggcagcggactccgccaatattatctgtccaagattgaagaactccaggtgaggacggactccagagggagctaggaagggtgatgatgggggatggaaacggacttccacaaatccatctaattcctttgggagtgcagtggaagaagctgctgcttctcctttcttgtttgtttcttagctagtagggtgtatgtatcagaagtaagcaatctcttgttctcctccagtcccatctctttgagggtcttagtgttcacagtttgttacacatcttcgagtcaaatcttaatagtaaaggtacctctagccaaaggtcaacccttttggaagaagcccgaatgaaaaggattcttataaaagggaaacataagctcaggagttgaaatttatcaccaagaggttgggtgagggtgaagtgagaatgtgaggaagggcatcattgagggatctggacaatgctaattccatagagactgaatgaaagaaattgggcaacccagagccctagcctaaagcgctaaaccatagaaaaaggaccgtttatgttgttaatcaaatgtttgtgttaccagtaaggcttccagcagtaaggtatggcttccagtagtaagccttacagacaacataaacagtagtctgttagtgttacgttatactgttacggtaggctgttagtagtttaactttggacaggtccatggattttcaatttcaccctaaccccctgcgttgttcaagtgtcaactgtaatataaattggatgggggaaagccacaaaagacaattctgaattccaagtgcatttgcaggtattatgtttagtttaccatttttgaatgctttttcatgtgtttttattcgttcaccttagtagtcttgaagcagggtagctgatgctatacccatgtgccgtttggtaacagatctagatttttaaaaatagattgtcttacctttactttgcttttgattgacagcggctgggctagaactcaggtttctcacctaacaatctttccaccaggtgttgttgccttcctgcaagaaatttggtgttacatgagccagctgtaacttttctccattagattctgttactcctggaccagtattggacaagcagccttctttgatggctgctgtaaggtccagagrgactcttgaaggacagggcagggtcattaggatcatactggagaatckgaaacaacatgcaggtgccctgtgcccttccctcagctcattcagacctgtgaggtcttgrccaagatcctacctcctcctgtctyctgcccttgaataatggaatttgtctcttgtcygccacagctgattgtgaatgataagagccaaaacctccggaggctgcaggcacagaggaacgaactaaatgctaaaggtgagtggagaaagatgggaagccgcatgtgggcagtttgtctgaggtctgtccttatctccctgcaytgtgtcttcacagcagtgcttactgttttctccctgtcatcatctagtagtttcacatgcatctctttttcctgagccctattgtagcctccttaaatacatgaattttgacctttggccttcctttaataagagtgatgcttagctcatgcacgtagaattgggtcctggagactccaaaggagtagctaggtgaccactgtrtctgtttgccatctagttcgcctattgcgggaggagctacagctgctgcaggagcagggctcctatgtgggggaagtagtccgggccatggataagaagaaagtgttggtcaaggtaaaagcrgcatgaccccagggaccagctcggtctccactgcattcccacccctttgtgtgtagcctcgggagacagggttctgtgttctgtcaaggtattgtgggattctcakaggtcttcctgggtaggattagtgatttggtggctgtcaaggaaggtcatgagcccttgtttctttaggtacatcctgaaggtaaatttgttgtagacgtggacaaaaacattgacatcaatgatgtgagtgtagcaggtgaggtggtggtggtggtggggtcagctcttactgtaccacttctgaaactcgcccccttcacccaggtgacacccaattgccgggtggctctaaggaatgacagctacactctgcacaagatcctgcccaacaaggtagacccattagtgtcactgawgatggtggagaaagtaccagattcaacttatgagatgattggtggactggacaaacagatcaaggagatcaaagaagtgatcgagctgcctgttaagcatcctgagctcttcgaagcactgggcattgctcagcccaaggtgaggagcagggcttctctgagagggccaagctgtacttactcctcctgccccagccagccctactgcaggggttggggaggcaccgggataggctgcatcttgcttgggctggccctccccctgaaaagagtggctggggaagtgttcctagggcggtgaggtggtttggatagaagggaccttgatgttccttttttttttttgtatccctaacatctagcaagggacccagcactcggtaaatgttcactgaatgaaatgaggggtgtagctttctgccctgagtcctgctgttcccctgtagggagtgctgctgtatggacctccaggcactgggaagacactgttggcccgggctgtggctcatcatacggactgtacctttattcgtgtctctggctctgaaytggtacagaaattcataggggaaggtaaccatggctagcaatgtragaagcaagaggtaggggtagggggttagagagctaataagctaataagctccctaacaccagctcggcctccacacaggggcaagaatggtgagggagctgtttgtcatggcacgggaacatgctccatctatcatcttcatggwcgaaatcgactccatcggctcctcgcggctggaggggggttctggagggracagtgaagtgcagcgcacgatgctggagttgctcaaccagctygacggctttgaggccaccaagaacatcaaggtaaggtggtagcatccttgggatgggcccagggaaggcctgggtgccacgcaggctgaggaagaggtttagctgatccccacttgctttctctgctcaggttatcatggctactaataggattgatatcctggactcggcactgcttcgcccagggcgcattgacagaaaaattgaattcccaccccccaatgaggaggtttgtgatggacactgtgcaaagtggctctggctgtgggggtggggtgtggggctcaggcttttccttgccatctccaggcccggctggacattttgaagattcattctcggaagatgaacctgacccgggggatcaacctgagaaaaattgctgagctcatgccaggagcatcaggggctgaagtgaaggtaattggagtacccactgaaaacagggcagaggcaggaagctctgggctcaagggccacagatgaggggcacagcagtggggcctcaatttccttttcctgttcagggcgtgtgcacagaagctggcatgtatgccctgcgagaacggcgagtccatgtcactcaggaggactttgagatggcagtagccaaggtataggcctccatctttgtgcctttgccagtggtggctctggggcagtgggctagggcatgtgtgtrttcgtaacttaatgttcattctctctcccacccctaggtcatgcagaaggacagtgagaaaaacatgtccatcaagaaattatggaagtgagtggacagcctttgtgtgtatctctccaataaagctctgtgggccaagtcctctaggactccagtctgttaatgagggctgtgctgttcaaggaccaggtccaggcaccaccaatagacaaaaggatttatttggaaatttccaaacctgccagatgtggcactcgccaagccctaggcccaccctcctcaccaagctccaaagggcaacaccagtcctcccagcctccccattcaccttaccctggcctccacatgcacataccccatacctcaggccatgctagagaactggagtgtcccctccccggcccaagccgctggagaggcagccctctggcatcccaggagatgatggcggccagagccgcttgcatagattgaggaaagaaaagaaggaggcacctaacaggctccctgaaaacccccaacttacccctgtacaaaaaaagtggctcccacatagaaaacttgctcccaaaatagtgcaaatacccaaaggaaaggaaaaaaccagcagcaaggctgggcttgtaggaatggcaaagaactttggtttagaaaggctaggaagagtctgggctgcacctcctcttcctagcccagctccccagagccagctctgaccctcgccccagggggagtctgtaaacatgcaaacccagcagcctttggttcggaaatgtcttacaatgtcaaagcacagcctccagcagtcctacttgggcctgcctgcaggggggcagaggaggcatctgctgaacccaattaaagccaatgcaaaaagtataaggctttggggaccaagcaacaaggaatcctatcactacatttataaaactaaagctggagagtagagggtgacagcagacactcctcaccccagcctacgtgtctgcggccccagcaaggacccagagggtggtctccctccaggctccagggctgggaagaaagatccctgagcagttaggtcaggcgaattcccagcacctgttccagttcctgccttcgctgctgcacctggagaagggagaaaccaagtggctcaggcctttgctactcacggccaaaggagggaaaacagggcagagcctcaccttggcaaagatgtgcctgcctactgcttcctgggcccagggctggtggtagaaagcagctcgtctctcctcctcaggatttccaatcacatcagtgatgatctgcaaagagccaggaggaaagccatagcataatccccacccctgggctaatccaccctgggaactgctgtgggtaaaaatcacccagagctttacataggagtcccctcgggaaagaggactacaccttgaggtctcggcgctgggaacggagccattcctggatgaagtcctgggggtcggtgctaaaactgagcatgaaatctctctgggtcttcagctggttgatggactcaatggtctcatggatctggagagggtacctgtgtcagactgtgcccccaaagcttacatgcaagcaactgagccagagttcccatcccgtcctccaggtgctacatgtatggaaatgctggacagagccagcccaccccaatcctgggccccagaggaagctgtggagccagagggcccaccttgacatcaagggaggcgatctcctgctgattggtggtagaggccagaaaattgctcatttgggccttcagtgggtcgtccacctccacatcgatgtcgtaacaggctgtcttcttctggtcgttagggtcgacactgcaggcagcacatggggagggaaggcacatagctgacttcatcctgcccacctgggccaaatctggggcccattctctgcacacactcagggaaaaagaaacctgatgctttctttggctttagttcaagccaagggtgaatctgctcttagaagagccttcctgtccccctccttgcatttacctaatgacatggttgatgacaatggggtctggatgctgcagcaaccctgccagcttcatgggaatctcggagaaacggagtcggccacaactgaagatctggaggaaatacgaaaggctcagcgttggcttgtgggcacagtggagtggaccattccaggaccagtgagggcagcagtctgcaggctgtggccaaggagtagcccagcaggcaaggcaaagcaagggctgagaaaacgggggctggcatctggctaacctggcggaagtaacggttgcagttgatgtactcccgctcgtgcccatcctgcagctggttgtgcttgatgtaaagccacagggcctgcatgatggcggccctcgtctgcgtgtgcactcccagcagccttgccaatcgggggtccaatttgtactggggaggctggagttggatggaggggagtcagaacgggttcttatagtagaacagtgggaaaatagggcagggacaggaagggtttctaggaaccagctcccctcctgaggggtccctgtgggcccagaaatgaccccagggtctctgtcacctgatgatccagcatgagcaggagggtgcacttgacgttgaggtctccaggccgttttacttggaagccatctgtctcctgggtggtgggcatccggtgccactggcagggagggaagcatggcttatcaccaagggggtgggcgtgaacacagggcctcccaagggccctgaggccatttccctgccaaacctgcacatcagcctgcttttgccccaggcccactctcacctccaccaggtgattgtcaggcccgtacagctccttgtccagctcaatgacgaggctcttaaagaatgaagaaaacttcctcttctgtttgctaggctggggatggaaaggggtgtgagatggtgctgctgagctctcaaatctcaagctatgctaaatcccaagaaagagaagccccatttcagccctggagctccggatactgaagattcctgggccctgaaggatggaagcaggactctgggcagactggaggcagggaaatggtgccctcttgcagcccacgagggacttcctcgagacactcgactgccatctgcaggaacactgtaataaccacacaaatcaacctccaacgggcttggagcagcgcccccctccctatggcaggacttctctgggagcgcccaagtgtctggcccagtctttttttttctgagacacaatctcactctgtcacccaggctgaagtgcagtggtgtgatcataactcactgaagctcgacctcctgggctcaagccatcctcctgcatcagccttatgagtagctgggactacaggtgcatgccaccgcacccagctaatttttaaattttttgtagagatggggtctggctctgctgctcaggctagtatcaaactccttggtctcagtcttaaacccacacaggcctccttccctccagaacctccctccccaactcacatcatccagcagttttccttccactcggagttcccaggaagccaccttgtcccctgctggggttcccccaggggtccctgcagttcctgcactatcgccttccgccttgctgggactgaacgtattggaaatgtagatccgaagctttcgcttttgctaaagagagaaaggcaatcacaactggaggtggaccaagatgctgggacacagtgctaccgcatcttctcatatgaaccattcaacaatcagtactgagcaccatgagccagccaggcaccttgtcaggtactgggaatcagaagtagtaagtcccagtcccagccttttttttttttagacatggtctcactctgtcacccaggctggagtgcagtggcgcgatctcagctcacttgcaacctctgactcccaggttcaagcgattctcttgcctcagtctcccatgtagctgggactacaggtgcgcaccaccatgcccagctaattttttgtgtttttgtaaagatggtatttcaacatgttggccatgctggtctcaaactcctgacctcaggtgatctgcccacttcggcctcctaaagtgctgagattacaggtgtgagccaccgcacctggccggaactcaccattttatggggaaagagatgcatcaccaacaatgccagcacagtgggactggtgctacggcatgatggagtaacacgcagccagtctctggctcacatcttacatgaaacccaaacacccatcacggctccaaaatatcctagtcccctggaaaggcttcaccactcgggactgttctacattattattaagaaaagcttctcggctgggtgcagtggctcacgcctgtaatctcagcactttgggaggccgaggcagtcaggagttcgagaccagcctgggtaacatggcgatactaaaaatacaaaaattagccgggcgtggtgacaggcatctgtaatcctagttactcgggaggctgaggcaagaagaattacttgaacctgggatgcgaaggttgcagtgagccgagatcgcaacactgcactccagcttaggtgaaagagcgagactccatctcagaaaaaaaaaaaaaaaaaaaaaagaaaatttctctatggatggggaaggggaaggagaaaggaactacctttatcccctagtctagtggttttcaaacttttgaccaccacccataagatttacattttcaattatgacccaaggtctgcatatctatttatcagaaacaaaaatgtcatgaaagaatccatttactactatggtaagtactactgtgaagtattttaagattttctactgtcatatattcatttaaaacatactggccccaacacattcaactgagttcgtactctactagtgggctgcatcctgcatgtgaaaaacccggctctagcccaacttgcttggcccctggaaaacaagggggtggaaggcaaggaaacctgggaaggctagaggtggtcagggccacacatactgtcagaggctttttgatggcctcctggatctccatccgcttgcgagcaatggtctggtccagcttccgctcaaaagccaagagatccatgtacgcctgagactctggaacaagctcccggatctgaaggaaggtagcagaagctcatcagcttgcttcagccaaagcctggctctttcctcccttcctgctgcagcccagctttgagagagatggacacccaccccaaggtggccactgggcaggcctcccaggtgtcctcttaacacttactcgctgaggtagaaccttatctgccatcttcctcctctttaacctggggaggacagaaacccacttaagaggtcaatggtccaaaaaaggacactcactcccataacgcccctccagtctccaggaccctctcccccaggagagcctggagtcatcctcagtcaccaaagctcttaagatagaaggaaaccctctgctaccaccagagctgagttaggcagagtgagagaagcaggatgctcttacccccggcgctgggcaggcatgggaggctgcgcctggggcacaagcaggcgttttcggaatggatccatcatggtgggtggcatgccaggtcgaagcggagctgctgcaccaaatggggagccagcagggggtcccacctgcaagccagccatgggcatccggttccctggtgacatgccaggtcgctgggggaagtgagccaacgggggtgcataggtcaggggcaaggccctccgggacccatagcccatgccctccatccctctcgtcagccaggtagggcctgagcagcacaccagagccctgctggagccccaggaacaaaggggagtgggcgcctgagcacagagtgtaaaccacacctgccctgccccctgcaaccgccctggcagccatgccagcgaatgaggcctgccagaacctgggctgggaggagggtcctgcctgcagagggaagggccttggggagcttttcagggcccattgctaccttccagccccagcatgctgtgccctattccctgggcaagctggtccctattctctcagacagtcctgccaagccctgccctccttctctttctcccatcatgaagaagaagcatggctgagaggcacaggggcagtgtcactgccaggcagaggagt

SEQ ID NO: 98238 - DNA, 33304 bp, Homo sapiens
  misc_feature (1)...(33304): n = A,T,C or G
ggctgaggctggagaatcgcttcaacctgggaggcagaggttgcagtgagccaagatcacaccactacactccagcctgggtgacagaatgaaactctgtctcaaaaaataaataaataaaataaaaataataaaatagtacatttaacaccttatcttggacaatgtgacagtcatgagatctttgtgtaggagaagaaagagggaacaaaagagcaaagtctacaaaattcttagaacacagagggaagtttcatgacattggatttggcaatgattgcttggatatgacatcaaaagcacaggcaacaaaagaaaaaataagcaaattgaacctcatcaaaattttaaacttttgcatatcaaaaaacactgtaacagagcaaaaaggcaatccatggaatgggagaaaatatctgttactctcagatctgctaaggaattaatacccagaacgcataaagaactcctcaaactcaaacattcagagatgggcaaagggccaggcgtggtggctcacacctataatcccagcactttgggaggctgaggtgggtggatcacctgaggtcaggagttcaagaccagcctgaccaatacggtgaaaccccgtctctactaaaaaaatacaaaaattagtcgggcatggtggtgggcgcctgcagtcccagctactcaggaggctgagacaggagaattgcttgaacccaggaggcagaggttgcagtgagccgagattgcctcgccgcactccagcctgggtgacagagtgagactccacctcaaaacaaacaaacaaacacaaacaaacaacgacaacaaaaacaaagatgggcaaaggactcgggtagacatctctctaaagaaaatacatgagctgctcatcagcacaggaaaatatgctcaatatcactaattattagggaaaggcaaatcaaagccaccacttcacacccattaggatggctgttatcaaaaaaacagaaaacaagagtcggtcaacgtgtggagaaattggaaaccttgtgcattgctagggggaaaatggcagagccgctgcggaaaacagtctggtgggtcctcaaaaaaaatgaagcatagaattaccatatgatcgggcaatcctcctgggtatatacacaaaagaactgaaagctgggactcaaacagatatttgcacacagtgttctgtcaacctgaaataataaaaaagatcagaatccagtttaacaggtttattcgagcgtgaagctgaggacggccattctcacaggctccaaagaaatggggtcagtgctctgaagctgaaaagtttaaggtcttactttatagtcagaaaactaagaaattaggtagaatcacaacatttcccatataagtttggtttatgaggtacagcaatttgattagtaatagcttattttctttttttcagtttaaaagagtacatttaacacatcttggacaatgtgacagtcgtgaggtctttgcgtaggagaaggaagagggaagttaatcatctataatgaagttcaacagaaaagaggaaagggaacttctatggcacccttcagtcttttataacattttacaaaatgatgtagctaaggggaaaaggagtaatctatatcaaggaaacaaannnnnnnnnnnnnnnnnnnnnnnnnnnnnnnnnnnnnnnnnnnnnnnnnnnnnnnnnnnnnnnnnnnnnnnnnnnnnnnnnnnnnnnnnnnnnnnnnnnnnnnnnnnnnnnnnnnnnnnnnnnnnnnnnnnnnnnnnnnnnnnnnnnnnnnnnnnnnnnnnnnnnnnnnnnnnnnnnnnnnnnnnnnnnnnnnnnnnnnnnnnnnnnnnnnnnnnnnnnnnnnnnnnnnnnnnnnnnnnnnnnnnnnnnnnnnnnnnnnnnnnnnnnnnnnnnnnnnnnnnnnnnnnnnnnnntatgatttttctgtttaatgggtacagaggttgggtactgtggctcacacctgtaatcccagcactttgggaggccgaggcaggtggatcactttagcccagaagttcgagaccagcctggacaacataaggagatcccatctctaccaaaaaaaaattttttttttcttttttgagacagagtcttgctctgtcgcctaggctggagtacaatgggatgatcctggctcactgcaacctctgcctcccgggtgcaagtgcttctcctgcctcagcctcccaaatagctgggattacaggcgacccccaccacacctggctaatttttatatttttagcagagatgaggttttgccattgttggccaggctggtctcaaactcctgacctcaagtgatccgatcgccttggcctcccaagtactgggattacaggcgtgagccaccgtgcttggcctctactaaaaacttaaaaaaaattatctgagtgtgatggttcatgcctgtgctcccagctactgtggagcttgaggtgggaggattgcttgagcccagaaggttgaagctgcagtgagcctggacaacagagtaagcacactttttgggggcaccttgtcacacacagaaaaatgaaactgttctggagatggacagtggtgatggctgcacaacaattaacaatgtgaatgtacttagtgccactgaattgtacacttaaaaatggttaagatggtgagtttacattatgtatattttgccacaattaaaaaaaccaggtctttaaagtgattcagagaacagaatctgtgaggcaaaaacaggcgtttatgaaaacccaggaggtttgaaagaagcagggatgctaaaatgaaaaatatagggattaaattggaacgacaaaactctcgacagccagattaaacagtaggctaaaaatcagaagcaccgggcctggaggacacaggtggggaatcgccaggcacacaggacaggaaatggggtgagcactatgagcaagagttaggagacagagggcaagatagaaatccccaggcagggtcttatggggatcctcgaaggtgaggggagatgatgagggagaggagacatggggagagaggatgaggcagaagcgacatagggagggaggatgagggagagtatagagaggatgagggagaggatgagggagaggtgacatagggagagaggatgaggaagaggcgacatggggagggaggatgagagagaggagagatggggagagaggatgagagagaggataaggcagaggtgacatggggaggggagatgaggcggaagcgacacagggcagggaggatgagggagacgatgagggagaagtgacatggggagggaggatgagggagaggagagatggggagagaggaagagggagaggatgagggagaggatgaggaagaggcgacacgggcagggaggatgagagagaggatgagggagaggcaacatggggagggaggatgagggagaggtaacacggagaggctgagggagatgtgacatggggagggatgatgagggagaggcgacacagggagatggctgagtactcctggaactgaggcaagctgtgggcccccagtggacgagctctgtgtgctcccagtaagaagacagttgactggttgtgcaaggacgtgtggtggggaagttcctggaaggcagctgggagatgggagttttcagtccagctccggcacccagttgccccgggtcctcttcctgtctcaagtgagagggctgatctggacttggctgatctggggttgttatgaaactagctttctcaggagacgatgcattcattataaagagaagacactctactaggactttgtacatcatctcatttcatcttcatggcaacgctgagagggttgataagaaccgtaagaaagaaaacgcaggctgggcgcggtggctcacgcctgtaatcccagcactctgggaggccgaggcaggcaaatcacgaggtcaggagattgagaccatcctggctaacacggtgaaaccctgtctctactaaaaatacaaaaaattaaccgggcgtggtggctggcgcctgtagtcccagctactcgggaggctgaggcaggagaatggcgtgaacccaggaggccaagcttgcggtgagccgagatcacgccactgcactccagcctgggtgacagagcgagactccatctcaaaaaaaaaaaaaaaaaaagaaaagaaaagaaaatgcagactgcaaaaacaaactgcccaaggtcacacaggtgataagtgcagaggtggggttagccactttttcacttatgttaaaagccagggtgggtgggaagggggttaggcagacagaggaaggtagagggtggggagggctgtggggatcagagaaactgtctggcagccaccacctgtggctagcgtaggtgagagctggtctcccaagagcggcattggcaggcatggcacggggatgggctcagccttcagggccaccagtagaaaacactggggtggcccctcttcctgctgttaccgcctcctcttcctctgctaccttccaggtatcccctgcctctccccactcacccaaggaggcagaggcaggcatctaaagaatgatactattgggccgggcgcggtggctcacgcctgtaatcctagcactttgagaggctgaggcgggcggattgcctgagctcaggagttcaagaccagcctgggcaacatggtgaaactccatctctactaaaatacaaaagaaattagctgggcatggcggcgtgcgcctgaagtagtagcccagctactcgggaggctgaggcaggagaatcgcttgaacttgggaggtggaggttgcagtgagccgagatcaggccactgcactccagcactccagcctgggcgacagagcgagactctgtttgaaaacaaacagaaaaaagatactatttcaaaagcccagagggtaaggctggccaggccaatgcagtgtggagtttctcttcccccagctgcagtgcagtcctttgcgtgttgaaagctggtgacctcacgcggcccagaagctctgacaggcagcatgaaccgctgtggttcataaaaataggaaacgggggccaggcatggtggctcatgcctgtaattccagcactttgggaggccgaggtgggtggatcacctgaggtcaggaattcgagaccagcctggccaacatgattaaaccccatctctactaaaaatacaaaaatttagccaggcatggtggtgggcgcctgtaatcccagctactcggaaggctgaggcaggagaatcgcttgaaagccaggaggtggaggttacagtgagccgagatcacaccactgcactctagcctgggcaacaagagcgagactccatcttaaaaaaaaaaaaaaggcaaagggggtcatatgattgatgacctttgtctggtaaacaaagagctttcaaaacaggctgggaaaaggggggataattcaagaagtcttcattggtagatgactcggaaccatttagaggacatgtttataaattccattgtcctatgtaatcataaacttccaccctctttcaatcctaaaatacctcagccccacatcctgccttacagaatgggcctgtaacagccaagcctgtgtacaacacacacacagacacggacacacagagacacgcacggcacctggattggggggcaaaagctgtggactaagggggacagatattgggagatggacctagctagggtgaagacatcagcaaagcccagaagagactcagggctgagggtttgacagaggggcccgggtggctggggagcccctggccccagcaaatggaccaacttctattggccaagttcgaagtctggcatttaaatatcagaaaaacagatctagttgtatgaagtgataaaaggatgtatgactgtaaatatggtgtgatcccatttaaaatacacatgtgctgagaagaagtccggcaagttgtacaccaaaacgtcaacagggcttatctcttgacgttgatataaagggcttttattttctttacagttttctgtattttccaaatttctacataaacatacacataaaagtcataaaaatgtccctyaaaatgacactccctccaatgcagggagtgaggaggtgtgtgctgggacgccagcagggtggctgctggcagctaatccctgtgcaggtgcagccactgctacactccagcgtctgaggcccctctgcactggcagtgttagaatggctgtctgagagccaaggctgttcacccgagcagagtcatggagctggtacaggcaggagccaaggtaagcactaggctggtgtgtgccctccagggggcaccctccttgaagcaggccctccaaggtactcgccccctgaggcagccgataacagccggaagccttcccctggggggacctggccatttgtggagcagggaaaggctccactgccagtggaaatgtgaggccagcagcccaggatgtctgcttcccagagtccgcgtgggtcagtgcttgggccagacaggggctgcctgcggtggcaggacagtggcgggctgcctgggctggagggaagacaggcgccagcgccaggaggtgctggggcagagctctggggatcctccccggctcctgaaggaggatggaggaacaaacctagtaacgggacccacttgactgccaggaggcaggaaagcagcctgtccctgtccctggcttccctgtgagggacacagactcagatggggagggcaggacctttaattgtattcacagagagacttggagaggtggggctcagtgtcaggcagccgtgtgctgggagaaggggctggggcggctggtggtctggaggactgggaggggagggggacagggacagggcaggaggagcagggtgggctggggtgtggggtgtgtcctcagctgcccaccagtgttcccatcccagtctctggtgggaggcccttgggcagggccgacccagccgggtcacctcaggagtgtctcagytccacctcggagccgaackggggcccgtgggagtgccggtggaggctgckgtggcggatgctgaagagcygctggctgaggcccagggtggctaccagcagggcgatgcccaggaagagcagcagccactggcccacgcgggcctgctgcgcatccaggtccaggcccaggaagctgacgcggccgctgtctgggaggggcccttctgagcgagctgagygggaagcaaggagacagcatgggcagggcagggcagggcagggcaaggrtgcggggcagggccaggctccgaggtcagccgcatggctgcccagcctggggagggggttaagacccaaggctggaggtggggtgggtggcggtaccggagttcggcgtccagttgtactgcggccagcccagcttctccccatgcagctcgttctccgtgcggagccagtccagcagcggcttgaagtagctcaacatggccgaggcgctcatgttgggctggcccgtgatcagctgcatggcttccggccacggcctactgaagcccagcttcatggcggtcctggggaggcatgagacagggaggcagagtcagaaggacatggcccctcttgcccccacctgacatccactctccatacccactcccagctgaaacttgtcccagggccccagggctccaggtgcctaaggagatggcaatcaggcctggcccacgctgcaggtgggagttcccggctcaaaatggcaagtgttcccacaaaagctccagtggacagacccctcaaggcccaggggcgcaggccagagcatggaaacaaaggagggctggaggacactcacgccaggcgctgcccggcctccttggactggtagatgtcacacttgtgcagggggcccgtgtggccagctgcctggcacagtgcctcgtggaactggaactggatgatgaagctgacraagtacctggagcagagcgaggccgtggcccggggcggagttggttgagggccttgtgccactgggccccaggcccttctgcacatcacatgtgaygtgtgctaagtcacatgcgcacagcagagccaaggccccccaactctgcccacagctatcagggtgagctcccccaccccagctcttagcattgtctgagcctcttcctagccgtgcctgtgtagatgcctcccacccacagagctgcctccacaactcaggagggcctgctccatggggtcagggcagagccttcagagatctggcaggtggctttggaggcagtgaggtctccatccctggggtatatgcaagtagaggcaaggtgtggccaaatgggccgtgtggatctactagggtggtctgggcagggaagccagtccyacatgatcttatccaaagcatcacgaattccctggtagaaatctgccagtcaaggctggaggattctccccagcttaaagtctgaagaggttttaaatgtcctgagccagtggcacaggcctctcactttgaatgctgggtgcaagcatgtaccacctagttccctggtctttcctaaaagtgctttgtgaaggctgctggccagaatccggaatgtttttctagagcagccaagtctcctttgcccacccctgtttggagaattgtctgcattaagctgggaagctagccatcacaccagctggctcccgggtgagagccagcgccggctgggaaccccagggaccactccagcaggcaggcgggagccctgtcctaagtgtcatctctggagcaccgtctaggtcaggcctatctgaggtgctccagggatgccctcttcctggactctggggacagacttcatccatcccacaatcagttattagcacttgatgatgtgctggcatcatcccaggtgccaggaggcaaggtgggcatgggccctgcccttgctgggcttccaggaaccacgggaggccagggccagaggcagccacagccctctgggggtggcctgggctacctgtagcccgggggcacctggaactccagcctgaggtctctctagcccccagcctcccagggagcctcccggatcacaaacagccttgctagccctcagcaagtgctctcccggggcacacagaaggagaggggctgcattgggcacactcatctgtggccatgtgacctgcagacctagtgtgcagctacattccactagagagtgatgaatagtggggtcctggccacccctccctgaggaggctgtgtatgagacagaatgctaagaagttagccatcgtgcatcctgtgaaatggggttcacaggtcaggaaatggaagctcacagaaattgaggaattttctcaaggaaacaaagtaatggagacggrgtttgaacccagttctgtctgaccccagcctgtgactgtaacttgccccagcaaccctgcctcccaccttaaccgatctccaatcctacattttagtgtctagaagggcttccaggtacaattcaaattgtatcgcagacaatgttcaataatagtaaaagaatcacagtcttgttttaaaagcaaaacaaaacagtgcagagctcatgatccagccatgagtcgtggttaatgttaactacttaaccaaggtctggtaaccattagccaattattaggttgagtttctgtgttcaactgtttggatggtacagactctcatcaaaagaatgttcaagaaaaaacccatcagccttggcagtgtgagtgggcccaggcacctgcaccgtgcggccggctcccccgggtctgccctgactgacagagcttgtggacygggcagtggccgcagttgaaacacaaagctgtgggtactgcccctcacaatgtgccctcctgcctttcccrttacctgatgtaaggcacgctagaaggaatgtggaacttggcccctgggtcaaagtcaccttgagtcctgggcactggggggcagaggccctggtacttcagcctgtcgagtgggaatatatgttggaagatgagtttggggagaaccaggctgggggtggcatttttgacttgagggagggtccctgcacttggggctatactgrgcaccccattctcctgcgtgctgggcctctgtgcacaatcaccccgttttccccatcacttrcaccacacacatcatatgcacagacacaatagtgtacacacacacacacactcccctaccctggcccatccagacacccaggsacatgcagacactcgcagagatcccccagcccrcatcccgtgggagtgttccagaacctgaggctccaccactcctggttatagttctccttggtgatgcttccatcaaataccctccagcgccactgatcgacgaggtagctgaaggggataaaggcgatcttgtcaagggccatcttcatcagaaagttgatgtcatgctctgcaagggaagggagcccagctgtcagacccagggtcctagcggcttggccctggtgtgcctgtgatggtggaggggtgggggtgctgtaccttttgggccctgtgacctgcctcctgggatggwctgggtggctcccttccttccgattgctctgccccacacctctgcccatgggccactaagtgcccctttcccacctcccaagctcaccaccctttcttggtcctcagcccaccagggcctcccgcttctctctcaccgtcgctgccaccctcactgctcagcaggttgagactgtgcaggtgcttgggcgtagacactgagagggctagcacgtccccartggcctcatggaagccggggttggcaccctccctcaaggccacaggtaagtctttgtactgcatgaaatactggatgtggcccatttcgtggtgggccacyaccaggtcctccaagttcacggtggtgcactgcttgatcctaggaatagtggagtgggggagagggtgttgggagaggacagtgagaagccctgggcataagggaacagtgggccttgctatacccagggcagaccccagcactgcagcatgcaggggacacagcactgtggggagggaggggaagggcaaccactgagtgtgcgtaagagggaatctgggggcagaagcccctagcatcgggccgttcaggccattcctctgcctcccattttcctgaatgactccagcccccaccacctgttgctttctgactgtacaaagtgcttgctctagaggcactgggacattgtgtactttctagagaatgtgtggccagtgggttcccatgtacacatgctttatctcccaagayggaggctccctgaaggaaacaactgtttctgtcaggggtgagagtgggcgattctgcatctcatgcggcccaacagcgacaaacttattcaccccaagaattcttatggccaggatgaatggcagctgcagagctgcccaaaccagaaggttctaccgtctctcgtcagtccttccttgttctcatttacttatttattttttatgaaatggggtctcgctatgttgcccaggatggtctygaacccctgagctcaagcagacctcctgcctcggcttcccaaagtgctgagattacaggtgtgagccaccgcacccagcccttccttgttgtttagcaaaccaattcaaactgcgggaaattctctcttggatctaactggaagccttttggctcaggtgaatcctgtttttctgtcattctcatcggggagggggaaggaagagctgcccagcatcctggccacaaggctggggatctatccagcttctcctctgactccccataaaagggaagaccccacaagggctctcatcccccagatcctgtctcctctcagccctgtggctgagtcctcatgcctggaagggcctgcacagcccagggaatcccatcgggttttgtttcaggctccccgtgtctgttctccttgtaagagacacttcttcagctgtgacagatggtctttgycacttctcccaagtgggagggacttttttctcttctcttgaatctgggtgaacttgtgacttgttctagccaataaaacatggcagaagtgactctgggccagttttggacctagccttgagaactggctgcgtcagtagttgctgtgggggatgctggctgccaggtaaatctgcccacctcagattccaygctgggagggcgcccgagctagcctggagagatgcctgacccacctccagccgttccagccatctcaccccaagcacccaacatgtgagccaagaggccactgggaacatgtgccccagcatctgccacatgggaaaaaccgaggacctcaaccgacagccagaactggggctctggacgtatggcccccattgagccatcccggctgtgagagctgcccccaacagagggggccctgtagagaaaggccatttccactgtgtactgcctgaattcctggcacataaaatcataagcaaaatcaactggttgtttcgtaaggctaagctctggggtgcttggttgcacagcaataggtaactaaaacgccatcctccaaggaaggcagcttctgarcctgtcaggggtgagagtggatctgtacagagcacccaacatcctcgtgtgcctccctgtgtcacagcatgtgcccccagggagaggccagctccatgcaggggctgctcccaaggagggacgcggggcagcctaccatgctcaaacccaggactgggaccttgagcacttcccagcggccaggctgacagagctgttgcgtgcttcagaagtccccatcaggcggatggggttttcctgccagaagccaacacctctctagacactcagtcccaaactctggccctgtccccatcctgccctgctggctccagctgggggacagtagtggaccctttgcttggytcatttcccttgcccgtggggctcaggaacgagacctgagccctagctggatgtaccggaagtccttgccgttgtagaagtcccaggccgaggcgtggcagaccacctcccgcccgtcggttggcttctccagcatcgacttgttccagaactcaggaggcacgggcagcagccccagggargtgaagaaatcatcagcctccttaaacatcctcctgggcrtccagccctgcaagcagagggagttctgcccaaactgggggttccggggacagactgcrtgctgccgtggggatcccgsgggagggctaaactggagggaactcctgaatcagagggtccctcccatcccrgcggggcctccctgcccctgggctggtgcggacctgctttagcatagcctctgtggtgtccatcgagggggctgaagggaagggcaccaccaagtcatagatgttggaccaggtctgcgcccacatgttccctggaggcgagtgtgggggayggcagagagaggaaagacaaatgttacttaggctcaatgccctcctgcaggaagagcgctccagatcccagtcctgctaatcatagtggcatttcttgagcacctactgtttgcaagctttgaggcacacatcatctttggtgtgcatatccagcccagtaggtcattactgcctggctctaggtgggggccttgctggttatcagggaatccaggtggtcttcactgtccgtgagcagtggagaccaatgtgactagcaactgctgacatgtgaggacattacaggtccccagaacacctacaccccggtggccacctcttattggctctgcaccaagaacattgtgtgaattcactttcaatcctgtctgcacccaggtactgtcacgattcccattggctagtaaaggaaacaggctggagagttaagtgaccgcccccctcgccgggggcccacggctcctaagtggcagggctgggattgaaaggctggcaggctgctctcttcaccagccactctgccatgtcccctccgcaccacctgaggtcggtgtctgcagctcagcaactctgacaggaaccagccgtctccttcaggagaggctgatgcctctgagtttagtgtaagaaaagagcctagttctccacgacagaggaaaaggaagaaactcaggatgaatggaaggctcagaaacagatttggactcaaggctctttcctagccaagtgaggtgaagcttcggctgacatcagatgaagtctraagtgcaaaccagtgagagagggttagagcgatgagtgatggagagaacatgagagagaagagggagagagccagggagagagccagagagagagacagagagcgcatcagtgttaggttgctcccctttccccttttaccaattgtcaggggctgagttctaaggccagctctgccccagctcccaggccacgctgggcatgttgcttttcttcccggggcctgtgtctcccagttggtgaactgacgtccactgtgacatcaccagatgttctttggtctcaccagagaggggctgaagagggctggactcccagcctgtgtgggagctagacccacagccaggccgtcctctggggcctcccttatagtttctaaatggtctgagggcctgtctggtctctctgctccaggaaagtgttcctaacagcccatcagggacagagaaccagtagcctctgctttgccttactccctaccatcccttactgtcctcaccgcctacttcacacattcagggcatctgagattgcagcccttggcaaaggagggtccagggttgaagtagatttacattctcaggtycttctttgttccagttcccttggcctgaacactgcgtctgtcctctcatcccccacttcccatctgtcaaaccctgtcatcttccgaggccctgctcacaggccacctcttggcaaagcctccccagctcccactcacagcctcttcctcgccctctaagatcacacaatgttgtgatgggtgccgtggtctcctggacaagattattaacttcttccccyatccatggtgacttgcccgacatagatctgcagtgaatgtggcaccagatgcaagtggggggctccccactcccagcgcccacccccctccagcctgggcaaccatcccccacagggctggagtctctcagtccccagcctgctccctaccctctagtcagccctgtcccaaccctcactcacactgtggtccgtctttaccctcctcaaggcccgacatgtgcccttacccagcaggtgagcaggaatgggcccctccaggttgatgtgctgggccccgtagtgacggtgcagggcccggcgcacgtaggcatgcaggttsaggtagagtggctgcagctcctggaagagcckctccaggtcttgctccagggatggtgtctcrtacatagacctccacgagtcccctgcatctacatagcctacagaggggacacagccaggctctcccaacaccacattacctgcctcctccagggatctaccttttcctaggcttggggtttcacagcacctctttgaggaaaatgaagggacccaagtgccagtgatgttggcagcagggactcaccattgagccgggcagcctggttgatgagttccacgtatttcgggtaaaactggaggatggctctcccygccttgtctcgccagccctcccatgcccataacaggtcttcatatttccgggaygtggccatcacattcgtcagatctggtaggggkttgaatgccttgagctccagcccttagctcacctctgcttgtaaggggagctcagagaatttcagagctggaataaaattggcgaaaccacataaaagtgactgtataggcagcaggtctagagaaatgggagaaaggatgggagtggctctccagcagtggcttacagagtccccggcctggggccacatgctgcagacacctgcagggcctcagcagtcctgtgaggggcrtgcttgagtctctctcctctcctttttttttttttttttttttctgagacagggtctcactctgttgcccaggctggagtgcagtggcgccatctcggctcactgcagccttgacctcccaggctcaagcaatccttccatctcagcctccctagcagctaggactacaggcatgcaccaccacatccaactaattttttgtattttatttgtagagacggggtcttgctgtattgcccwggctgggctcaagcgattctcatgcctcagcctcccaagtagctgggactacaggcatctaccaccacgcccagctaacttttgtatttttagtacagatggggtttcaccatgttggccaggctggtctcaaactcccggcctcaagtgatctactcaccttggcctcccaaagtgctgggattagaggcatgagccaccacacccggccagcctcccctcamacttggcatgggtacccacatccacaacttgtaggccaaaccctgtcctgggaaaaccgtttctcctgtttatyttccatttccccttctatttgtcattgttctaatgtgggagctgggctgggggccagaaagacccatttctgggtggagattcctcatggaagmawgtttatgcctcaagttctccaaccctggaaagggtgggttgagagggagctgggaggtatctgtgtgcgggtccttgtgtcgggggtgagctctttcaaacgggcyggggtaagaaggaccagccagtggggagaaaagaggacagtcaagagctgtctacttctatccagtaggaagtggcagggtaggkgagggaagtgagaggaatcagaggctcaggttctagtctggcgctttcaggggctgtgtgactcaatttccttatcagtcacatgctgggagaggggctcaggaaagacagagaaggtgaggaagtcaagggcagggtcacgaaaggaggccggggggagctagtgtccccgagttccccccatttggagtccaagcccatgaaatataactttgagatcccgctgctctgaggggcggcatgcagagaggacaggagagagtggacacccttaagcagagggcggttctgagggaggggcagctgatcggggcatggtatgaagtaggtgccggctctcagtggggcagagaagcccccctcgtggaaaacaagaaagggcatttcctgggcacgctgaccccaagagcgaggggarcccaactctgtgctctcacccagcacccccgggccccatgccagtcccagccctcgcctctcactcagcctgcacatgagctctcacctggctcgagctgcaggcagctgccattcgggtggcacacagtggccacgctgtaggtggtttccatatccaacaggatcttgttgtactgcaggaggaaggagaggcaatgagctgtactcctttgcacttggtctctctggggcctgcactrcccccaggccccatgggctggcaggtggggagccagggagctggggagcrctgccctctcagcagttctgaggtgcacatcgcatggcagatgccatgacttgatacaacgaggaagaggaagcagcgtgaaggccaggccagaccctgtgttgggctcactgccccaggattcccctctccctgtaccttgcgagccacacacctcctccagctcctgggcaggcagygctgcmcgttctaggtcctgaaccttctttatgatccgcttgatagtggtgttctgcaactggttcacatcaaacttcctggcctgggtgccgtacttcagggtgtggttggctatttgcatgttcttctgcagctgagggcacagggggatggtgtcacagggcccaggagctccagagcagcctctgagcgggaggccccaagtgggagctgagggctggaggtggtggtgagggggcagtggaattaagttgcaacctttgcctataagactctctgcaagctggacgctgataacgtcctggatgcagtactcaccctccctggatgcctgcggtcaagcaacacatatccaggcaggggcagagaagagaagacccccaagtgtcktaaaggcccttaggaaggagccagcttggtattagctctgtggcctttctgaacctcagagttaatatcaaatcccatctgtaaaatgggaataagctcaccaattttgcaaggctgttgagaaaaagatgaggcaacagatcaaagtgccaaggaacagtaacagtgtgtggctcagtggcataatttgtgctcagccaaayaggcagggaatgagggtaaagaggaagtgtagccccttttgtagrggagacaaacagaggctttcaatcttttaaaaaacgacttgagcaccacttatttatgtacaaattattctgttactagagattgatttttgtttatttgtttgtttgaatagagatgggatcttgctatgttgcccagsctagtctccaactcctggcttcaagtgatcytcccacctaggcctcccagagactgatttttaaggaaagaakaattgctcaggcattgagtaaatgttcaycaaaatctgaaattgagttttttttttttttttttttgatggagtctcgctctgtcgcccaggctggagtgcagtggtgccatctcggctcactgcaagctctgcctcccgggttcatgccattctcctgcctcagcctcctgagtactgggactacaggtgctcgccaccacacccggctaatttttgtatttttactagagatggggtttcaccgtgttagccaggatggtcttgatctgacctcgtgatccgcccgcctccccctcccaaagtgctgggattacaggcgtgagccaccgcgcccggcccgaaattgagtattgttttaaatattcaatttaaaatgtggtggcagccccactgtgtggtgagcgggacagcatctctgtgtgtvtgcacatgctcaggtttgggggtggggaggtggctcccaccagaatcttgctggtctctgtggtgatgttggtgttgtagttccagttggcctcggcatactcgttccacaccacctgggatgtccggtcatattcctccacaaacttgctggcctcagcctcatcagtcaccaggtctgtgggacagagtgcagggaaacagacaaacctctgcctcccytctccaggtttgtggtctcaccagaagccattatccctctcgcactcccttgtaccctgccctgtccctacccggccccgcctctcccacccctggcaccctgcccctcccctgcatggtcccacttgggctctgggctgatgtctggtgggccgtcgcctggtgggtggttgtctggcygctggttgttgcctggctgcttgtcccatgggtgactgtcacctgttgggrtgcctcctggctrgggaccagcagagggtgcccgtagcagagcagcaggaagaggaggctgggaagtcctgcagtagcccaaccctggcccatggccgcaggagagcagagtcctgcagctaccgtcccctggccaataagagyggagcccgcagtgtgacctcacagagccttgtgtctggcttcctctggaaggggaggggccctcaggtctgagcacaccctctctaggatgctgggggaaagacatgcctgtccccactcgcaggccctgctgatgagcttggggggctgcctggccctccaggacagggtaccagggctcagctggtaggagctgaccaggaacctggggcctgggccaagcccagagttgaggacccaccttagccccacaccatcctcactcagggctttacctatgccctccgggtagttgtcaggcaacggcgggtgccactggtactcgggccagcccaggacctcgccgttctgctggttctgctcctgcagccactgggtgactggctggaagtacttgagcagcggctgggcatccagggcayctaagccgaccatgtccttcagcacctcctgccagggcctggaggagccagcctgcagcaccttcctggtgggcagagtgggtaccatgggcacaggggactcaggctggagtctgctcctggaccccggcccacatgcccctggccacttccgccccccaatggactgcagaaactgtggcaataagaccctggggcctgggatctctctgatggtggcagggggcatttgtgtcgccccatgccagccagaaggcccactcaataaatatttgatgacatagcgaggagacaggcatccacatcagtccagctctgtggttggtgccccccaccccatcagagcagccagacacctcctgccacaccctttgccagccgctcctctctgcctcccacttcccccggcttcccaccacacaccggagcttggcccctgccttggtggaccrgtagatgtcacactggtgcagtgggccctcatagcctgcctccttgcacagggcttcatggaactggaactgcaggacaaaactcacaaagtacctgcaggcacagggtgggagtcagggaagatcatggggggccaggaacaggggttccttacccaggcaccatccagcttcctgcagggcagaggctggaccagaagctatcttgggggagaagggagacccaagacaggctcaggagagtgggccactctaactccaggcctttgaggtctggaggagcatgrggacaagccctggggatgaggcagctaggawcacaggaggagaagtggattgagggtgtgacagtactgggggtgggtggggtgggggcgctaatacctgatgtatggtgtcacatttggaacatgaaacttagctccagcatcaaagtgggtttcgtttcgggtaacaggaggacagatcccctgatacttggttctggaaaaggatggttaaattgtcttagggcctagaggttgcaaacagatggatttarcttttgtagaaaaggcatttccacccggcaacscttccccatcctgaggaactggggaagacttcctggaagagggagtttcaggcaggaaaggagaaggcrgtgggtcacagcgggggacatcattagagaggagaggctagaactggctggggcaggaggcgcctggctgtccaggaggctggggagggctagctggggcgaaggcttttctatccctcctctcaccgaagataccaccagtcgaagttgtagcgggaagggggggtacgcccactaaagaccccccagcgccactggtccaccaagtagccaaagggcaggaaggcaattttttccagtgccatttttagcaagtaattgatgtcactttctgttgggagatgagatgaaaggagagggaagaggtcagagggagaagagggtcccctaagagtgtgggctggcggggcagcagaaagtgaggccagggagatgcagagaaggtatggctggccctcgagaccctgggccctgcttggaagaggacccccaggtgtgctgagctgggcgcagtgtgcaccgtgaggctctaggaggatcccgaaccctgcctgacctggggccgggaggcagaaagaagggcagagctgagtggggcaagtgaggtcctgctgtggggtggagyggggtttaggtgaggctgggtgggggcctctcagccctcccataccsgtgtcattggtgacayggtccagcaggccgattttgtgcagatgttcaggagtggagaccgagagcgccagcacgtccccaatggcctcatggaagccggggttggccccccgacgcagggagacrggcagatccttgtactgcaggtagtactgtatatggcccatctcatggtgcactgtggagagctggtccatcgtgacccgtgtgcactgcttgatcctggggcrtagagagggcgagggtgagagtgacggatggacagaacagggcagggccagggcacagggcagattggcacctgaaagacaggaatgaggagggagctgccctggggcatgaagccgcagtagaaacaagtaacttctttttttcttttttttttttgagacagcgtctcactcttttgcacaggctggcctgyagtggcacaatctcagctcactgcaacctccgcctcccgggttcaagagattctcctgcctcagcctcctgagtagctgggattacaggcgcccgccatcacccctggctaatttatttttgtatttttagtagagayggggtttcgccatgttggccaggctggtctcgaactcctggcctcaggtgatccacccgccttgacctcccaaagtgctgggattacaggtgtgaccaccgtgcctggcagaaacaagcaaattctttaccctgccctggctcaccaccacttgggccttcttcctccattccaaggtatagaagtgactatttgtcaaagctgccagagaaggtggactaataggcctcctataccccctarccctggaacagacccagcctccaaccagtgctggggtagggtagaggcaggcctgggaaccagcttccctgcgcctgggctgcctgcctttccccgggccccagaaccggggaaccccagaacgtgctcttcccatgtctgaacctgaagtctttcctgttgtagaagtcccaagccgaggcgtggcacaccacttcccgcccgtcggccrgcttctccagcatsgacccttcccagaactcrggaggcatgggggagagctccagggaggtgaagaactcctctgcmacccrgaacatgtgcgtggmgttccagccctggaggaggggtgtggagccaggtcagggggagcccactctggctggcctggggacagggctggggtccccatctcgggtcaactccctgtgcatgaaagcttctctgctctgtggccaccattcccagaggcagggccctcactcccacagcagatgagtgaaagtgcgttgttgctctcatcctgccactgtggagcctggagggaggagctggcacctcactgagggggccgaccccagctcactgctcctacagacacaccaggctgctgctcagtacccgaaaccttcccgcccctgtgcccatctgtgactccctttttttgcgccccacccccgacccccaccaccccaggcttgagcccagagcttacctgctgcagcatagtactggtgacatcgaggttgggcttgtctgggaaaggcaccaycatgtcgtagatgttttcccagctctgggcccacatgtctcctagataaggaaggaaggggacagcttggctccctgcctggctgtgcctgcttyttcatgcatcgctgagtggcaccctggggccggcacctgtaccctggggccctcaagggctgcaggcctggcttagggccagaaatctcacacatcagtcccacccacactcctccgagggccacatgtcctggggctgcaagatgctgccactgtcatttctggctgygccaggccccagccactcaatcctgaggcagggccacagtgcttgtttccttgggcatgagctaggctgatggctcccccactggacccagggccagagcctttggtttggcccctagctctctgaccactaagtccctcacgaccctaagcctcagggtccccacctgtaaagtgggaacacgaatggtctcctgcatgtgaagcaaacagtatgatgccccacacatgtgagatgtgagggtcacaacccaccttcccttaccctggacatcccccacccctacctcrggacccacacttccgtggractcatgtggaggcgaggccaggtccttacccagcagatgagcagggatgggtcccctgaggttgatgtatctgtctccgtatcggcgatgcagtgmrcggcggacgaaggcatggaggttcaggtagaggggctctagctgttggyagaggtgttccagatcgtcctcgaaggtgggggagttgtaccaggagcgccagtaggcccccgtgtctgtgaagcctgggggcrtgggggtgaggtatgtrgctcaggccaaaggctcggacctcagcctctcakctgtaagtcggctcttccactggctcgaggcccgtggatctgcagctagctggaaaattggcttgggggttgccactctacaatttctaattagctacagccagctaaacagatcctggaggttcccagaggcaaagaggagcatcagggccaggagtgacagcaggatggccacgtggggcaggccagcagcaaagtccaggcacactgggtgcaggccggtcccacctccactttctgggaaactcagggcctgctggaattgtcataccagctgctctgcctgactctgggctgggactctggggagacagctgagagaggacacctggcgtggttcctggacagggaraggcctgctcaccgtcctgcttgtaggcttcattgctgagggcagtgaaatcctcgtacagcggtttyagcgggatgcccgcagcrttgtgccagccctcccaggcaaacaggagcatggcgtagcttcgcgaggaagccaggatgttggtgagatctgagacacaggcaggcagggtcggtgaggaggcctccacgttgaagtcttcaacggccttcaccagagcctgcaccagtccttactgctcccaccagcttcctgaacatcacggtgcccccagagacaggggccacctacaggcctggtgggagggggctgggagctacagaaacacccaggcagggcccctgccccagagacatgaccacctaaggtggctgacaccaaggggacacccaaaggccaaaacccagacagacacttagcggcctattggatggagtgccttcctcgaagctgctcataaagggggctggagcggggtttaaggggaagccacgaggggtccctggcctgagggctcttggggaacatgagaggacccacgaaaggggaaaccaggcagccaggaggaaggcctaggggtgatgggagaggccgaggtacacacagaagtgggggctgcagctggagattccggaagtccacttgccaagagaagcagggcgtgggggtatctgcaccgtccagccccagttggagggcaacacctttgggtttacctgctgtctscacagaccctacacaactgcatggtcyggagtgcagcagggcaatgtgggaacactagggcaccgccgagaggggagctgcaagggccgtacctgggtccagggaccagcaggtggcagtcttgttggggaggcagaccttggcggtggagtagatcctgctcatgttgcttagcagggcgttgtactggggagtcagaggggaggaatgctccagtgaccagcccctgggacatctgccctcccctcgctgctasaaggaggagcccacagagtggatgtagcttggacaaggccactcagtggcaccggggcacttctgatcactaagtgtcacttagtgtgaccggatcacttctgagtcccctgccagtggaggcagcctgtggagtgggggacaggagtcctgaaagtcagggtcwgggtcaagtcccagcttggcaccaccctgcagtgagggcagatccctcccattctctggctttggtgacttcccagtctttctcaaccttttctctctctctttttttkggggggaggtctcactctgtcacgcaggctggggtgcagtagtgcaatcacagctcactgtagccttgacctcctgggctcaggtgatccttccccctcagtttcaagagtagctgggactgtaggtgcacgcaccaccaagcccagctattttttttttgtagagacgaggttttgccatgttggccaggctggtcttgaactcctgggctcaagcgatgcgcccacctcagcctcccaaagtgctgggattacaggcttgagccaccacgcccagcccttctcaactcttccaaagaagctcataaaccagcctagggagaagtgtatttgaatttggcttcctactccagaatgyttcctttaacagaaagtaactccccaccccatctccaagaaaaatcaatgctcagaaagccattctgtgcttacctgggctttcccttctgtcagggcccatgtggatcccagggttcctccctccctgatgggctgctctcccccgacccccacgatggggcactaggaggccgcccccgagctctgcctcagccctcagcccacctgctgmcgcttagccaggggcaggttggcagagcccagggtgcgcacagctccgatgatcctgcgcagctgcgggtccgtgaagttctgccagatcggttcatacagctccttggccttctggccccaggcctccgcaaactcctggctgagcagggctgcttcctcctattgggcaccaggagggcagggagggtgtaggaccctgcttagatgcaggccataaaggagaagccacggtgctgggggaggggaggaaggccaagggcttccagagcccgggccctggggagatccctgcgggagaccttagtttgcggaagccgcgcttcctccttctggagggaatctgcctcatgggaatggtggagcagaaattgggaccagaaaagaggccgggcgagtggagggtggatggacagtgcagtgcggtgacggtgacagcgacagcgtccggaggtgagaaggcagctgcccgagagcgcgggggccccagagccaagcccagcaccttcggcgaaggcgggcgcggcctgggagcagccaccctcatccatccaactcgtgcatgctgggagcgtaggccgtgcgcgcagcccggcgctcgggccccgcggctgactgtcggggcgagggtccggggtcggggtggggttcgggtcgggggcgccagcctgcccgccccacaagccggccgcgtgctgtgattggccgccgcggcccgccccgcccccgcccgggcccgggcgccacctggccttgcattctccgcggtgatgttggtgtcgtgcgcccagctggcggccacgctctggaacagcacctgttcggcgctggagttgtagctctgcgcgaagagctgcgccccggcctcgtcagcagaaaagttgccgggctgcagcccggggtccaacgccagggcgggctgcggcggcagcagcaacagcagcggcagsggcagcagcagccccggcccccggcggcccgaggcggcccccatgacscggtgcgcggtgctcggctctgccccttctcctgcgccgcggccgccctgcgggttataaaacccgacacacccccgcccccgccccgccgcgcttcctcctccgctccaaagtccccagcggcgcgggccgaggttcctggcccgccccgggcaggggcgcgggccggggaggggccgaggtgcagcccgggggtggcgggatggggctgggtcgggctcccgcagaggaagctggagaaagggcctcctctcttttgaagatggggacccggcagtttgccggaacacccgagcctgcccaccgtgcggccgcgcagcctcggccggggcctgggagcctagcggcctccggctcgatcttcccagcccgaccccccggagcctcccgcctccggagtgacaaggccggggccccaggagctgtccgcaggcgccgctcgtgcggcggggatggggctgatcgggcctggccggcttcttcaccaggccatggtcgaggggcggggacgtcgcctgccgggggtaggggtgtggcgggggggagaggagggaggcggggaccttaggtgtcttgcaggcgcctccgggaggtgctggaggggctcagggcggccggcacacctggggcttggggctgcgagggagggggagccacagagcgcaggagctttggagcgcctgccctctttccccccgaggacacaggctgccagtcgctcagcagaaaacatcacacacgatcccaacagagtcctagaacccgaggctagcaggctttgagagcgacacaaagcctcagagatgagaacaaccccctcattttacagatgaagaaattgccgctcaggttgagaggcttgctccaagtcacctcaggtctccacactcccctgtgttttcctgtctcatccacgtgtccctcaaagtgacaagtgtgggggagggaggacagtcttgtcctattggcgcacagggcggttgtggaggccacctcggcaccatggcgtctgctgccagaggggggaagccccttgaccctggcagaggcccggcggcgcagtgggaggtggggcaatggaggaaccgtggggtgaggctgggcggtgggatcagggaaggagccagggacagctgctcccaagaccccaacccattaggctgctgggggctgttgggaatcacttgggcttctgggtgagtgggggatggtgtctggggctctgagggacacgtgcaccttgctgtgcagcatggagtgtgtgcaggaggctgtgaccccgcgttcctgtgagatgcacctccagtgagatcgcactgacttgtcagatgacgtgttgcaggggagagggggcggtggggagaggaagaaggtggctgtccctagcactagagggagaaggcagggccttgttaaacactggccggcagtggggccgggagaggagagctggggtcaggcctggccctggcccgctttgccagcctccctcctgacctgcagttttccctcacaactcctccctgcccagtttggcttggagagccagtggataccagaggacatgggtgcacttctgggccggctacgttggtggacgtttgtgatcagagcagccccatcgaaggccaggggccagggagggcaaggtggtggcctgggctctcctcccaggagccaccctgctctcaggggtcctaacagcttggccttccaggctttgagggctgtgggtgtctgtgtgcaaatgagctgctgtctcctgggaggaagcagtctttctgtggaaagaggcttgggtggggaagagatgagagtggggctctgtcagcctctgaaggaggggccaagggaggagagatgagtagagaggagaagagcctgaggcctaacctgtatccagaggccctcagccagaggctggcctcgcctccaaagagttcctgagaaccctcttcaggagggtggagggcgggcattgcttctgctggttcattctcccgtctgactccaaggcatttccacaatgtctatagaccctgggttagggactgtgtcagcaataaacagcctccgcctccacttccgacagggttggaagataatggaagtcttcccctggacctggagcagctgacaccagggctgctggaggcatcaccctgcacctccctcactgtaacgctttattagaatggcttgttaaatcccccagcttcatcactaaattgtatgttactggagggcagggatggcgtctgccttgttctctgtggttttctcagagtttagcatggtgcctagcacagggcaaaacctcatcgaaggaagggtgcagaggaaagaggaaatgacccacactcgtattcacactccggggggtgagcacacagccttttgcaggaataatataagaagagccagacttcattaatttggaatttgcaataatacagacactgcaaccttgagcccagtgagtaaaaattaaaaatatcttctatttttagggtcttattcatgaaggagaaggataaatagaaataaatagcttacatttgtatagtgctttagtgctaaattcttgtgtataaacaatctaatttggtatttacaataaccttgaaaggtaggaaagagataaggctgtctgggcagtcagccacctcctcggctgccgtcacaacaaaggagaaggctcaaatcctgcaggaggatatcattatgaataggccagtgcagagagccacagagacctgacccacgtgaggtaactcagttggcttgggaatcttttcatctctcttccaggaagtacaggtcaccagttaccacaggagagaaaaacagcccttaaaaatatgctcaacaatggaatagaattgagagtccagaaatgaacccatacaattatgttcaattgtttttgacaagaacactaggacaattaaatgggaaagaaaatatttttaacaaatggtgctggggcaattggatttccacatgtaaaagaatgaagttggacccctttctaataccatatacaaaatttggggctgggtgcagtggctcatgcctataatcccagaactttgggaagctgaggtgggcggatcactggagcttaggagtttgagaccagtctgggcaatatggtgaaaccctatctctacaaaaaaattagctgggcatggttgcgcatgtctataataccagctacttgggaggctgaagtgggaggattgcttgaggccaagaggttgaggctgcagtgagccatgattgtgcctctgcactccagcctgggtgacagagtaagaccctgtctcaaaacaaaaaacaaaaaacaaaacaaaagacttaaaatagaccttgatgtaagaactaaaatcataaaacttttagaagaaaacataggcaataaatctttgtgaccttggattagtcaatggtttcttagatatgacaccaaaagcataagtgatgaaagaaaaaacagataaattggtcttcatcaaaatttaaaacttttgtgcttcaatgacaccatcaagaaaatgaaaagacggccaggcacagtggctcacacctgtaatcccagcactttgggaggccgaggtgggtagatcgcctgaggtcgggagttcgagaccaggctggccaatatggagaaaccccatctctactaaaaatacaaaaattagccaggcgtggtggttcatgcctgtaatcccagctactcgggaggctgaggcaggagaatcgcttgaacccgggaggcagagattgtggtgagccgagattgtgccactgcactccagcctgggcaacaagagcaaaactccgtctcaaaaaaaaaaagaaagaaaatgaaaagacaacccatgggatgagagaagatatttgcaaagtatgtacagcagcccccccttatcctcagtgggtacattccaagactctcaatggatgcctgaaattgaagaaagtaccaagccctatatacactatattttttcctatacatacataccaataacaaggtttaatttataaattaggtgcagtaagagattagcaataactaataataaaatagaacaattataacaatatactgtaataaaagttatgtaaatgtggtctctctctttctctgtcagaatatcttcctgtgctatcctccctgttcttgtgatggtgagcacagtgacacgatacgatggggtgagatgaagtgaggtggatgatgtagtgttaagctgtgatgtagcattaagctactattgaccttctgtattctgcatctgtgtaaccatcccttgcagtgaatggcttggagtcacttttcaggggatcttttgctgacgtcttctagtaggctcagtgctttgtggcaccacaatcaggacacatttctgtccatgtcttcacaaatatataatgccttttccgtctttttttttttttttttttgagatagagtcttgctctgttgcccaggctggagtgcagtggtgcgatctcggctcactgcaagctccacctcctgggttcacgccattcctctgcctcagccttccgagtagctgggaccgcaggtgcacgccacgacgcctggctaattttttttgtatttttagtagacatgggatttcaccgtgttagccagggtggtctcgatctcctgacctttggtaggcccacctcggcctcccaaagtgctgggattagaggagtgagccaccgctcccagcctcttctttctttttattttatttttttgcaattgttatttagtttttatctcataatcataaacttaactctgaaatccagctaggcatggaggagaataaggcaaacatggaacccaaagggaactgagagatagcacaaagattagaggctactgtgagcaaatgaggtggagggtgctctcctgagctacaaaaggaatgatctggtggttaagataaaacacaagtcaaacttagtagagttgtccacagtcggcaatggtgatcttcttgctggtcttgccattcctggacccaaagcgctccatagcctccgcaatattcatgccttctttcactttgccaaggaccacatgcatgccatccaaccacgcagtcttggcagtgcagttgcaaaactgggaaccatttgtgttgggtccagcatttgccatggaaaagatgccaggacctgtatgcttcagaatgaagttctcatcatcaaatttctccccatagatggacttgacaccagtgccattatggtgtgtgaagtcaccaccctgacacataaaccctggaataattctgtgaaagcaggaactcttataaccaaaccctttctctccagtgctcagagcaggaaagttttctgccgtctttggaaacttgtctgcaaacagcttgaaggagacgtggcccaagggcttgctgttgatggtgatgtcaaagaacacggtgggttgaccatggctgggcatagatatactataatatatgtgacatggcatggcagggctcccggcggcatcggaatctgtggtatggggtttcttttaggggtagtgaaatgttctgacattagtagtgatggttgtacaactctgaatattctaaaagccactcagttgtatactttaaaaggggggattttatggtatatgaactatatcttgataaaactgttgttttaaaaaaaaagtccaaatgtttaattccatcattctttgttaatcaagaattctgtttatggattggttttcacagaagctgtggttctgtccccaaaagtccgcatactcctctttgtttggccaaagcttgcccattcctcaaagttcagttcaagtcttgcctctaacacgaagcagccctagtttccccaaccatgctagtcttttctttctatattcagtttttttgtttttttttttgagacagagtctggctctgtcgcccaggctggagtgcagtggtgtgatctcggctcactgcaagctccg

SEQ ID NO: 98239 - DNA, 40355 bp, Homo sapiens
gattgtggtgatagtaccaaaagaagaaaacaaaatgaggtgggcacagtggctcacaactgcagtcccagcactttgggaagccaaggcaggaggatggctcgagctcaggagttagaggtcagcctggacaacaatgaaagacctgatttctacaaaaaatacaaaaattacccaggtgtggtggtgtgcacctgtagccccagctactcgggaggttgaggtgggaggatggcctgaacccaggagtcggaggttgcagtgggccgagatcatgccaatgcactccagcctgggtgacagagtgagactgcgtctcaaaaaaacaaaaccaaaacaaacaaaaaaaacacacttggggaaattcaactgcatttttgtattttttctcttaaaaaagatttcttcatttcctgctggggtgccaaaaaataaaaatttaaaaaagaacccttttgaaatacctaatttgaaaagaattagctgaatagagccataaacaaagtttaatgagtatttgtttaaaaaagaacaaccctaagtggttcttagtaataacatccattgttttatactgaccaataaccactgatgattttgttatgtgcccagtactatgagggacatccctcacgtatacccgcctttccatctccacctccactattgcaattatttcctaaaaaaaaatttctgattattgggaggccgaggtggacggatcacaaggtcaggagatcaagaccatcctggccaacatggtgaaaccccatctctactaaaaatacaaaaattagccaggcgtgatggcgcgcacccatagttccagctacttaggaggctgaggcaggagaatctcttgaacccaggacacggaggctgcagtgagccgagatcgtgccactgcactccagcctggataacagagcgagatgctgtcttaaaaaaaaaaaaaactttattatcaagctctcacagcactactagagtgatcactaagtcaaaatatactgagtgcctattttgtgccagtaactgctctaaggtgctaaggatacagtaatggaatcagatgcagccatactcagagttcacagtctggcccaggagaaagaaaaactaaatcatgtaattccaggtagcaaaagtgctatgaaaagcaagcaagagggtaagaggcaagctattgcagacttaagtcaggcaaggcctctctgagatgaatgacatttgacaggtaatcctcccctgactactgtcccaagaatgtctgttttattggaaaagtaatgtggatgtacatccagatgcttcatctaaaaccagcaaatcttccatagtctatgagaagtgattctgtttagtaaagcataaaatgatgaagtaatagtgagacacacagtgaaaagagaaaagcaagttttacctcctttggtagagtagcatagtgtgtgttaataccgtggaaccagaaaaagtctcacagaagggaggtcagtattcagatgcttatcgaaaaccctttccaggttcttccagaacacacatttctgattatgtcactctcctcaattccatagctctccacagttaatcatgctggaatgagaccctccattgtggcatcaaactactttaccattcatatttcccagggtctctccacacgtactcagttttccaggaaaacaagcactctagtgaatcctcttccctctaactggatccccttcacatcaaatctctttcctataaactgtgagtacctaccaaagtcctatccttcaaagcatatctcaaataccaactcctaaagacatgaatatgatatccccaaagaaatggcatctcctggctgggcacggtggctcacgcctgtaatctcagcactttgggaggccgagacgggtggatcacgaagtcaggagatcgagacaatcctggctaacatgctgaaaccccatctctattaaagatacaaaaaaattagccaggcgtggtggtgggcacctgtagtcccagctactccggaggctgaggcaggagaatcacttgaacccgggagacggagcttgcagtgagccaagatcgcgccactgcactccagcctgggcgacagagtgagactccgtctcaaaaaaaaaaaaaaagaaagaaaaagaaatggcatctccttcctcaaactccctttccagtccaactccgtattataggattcatggctgaagaaacaggcttattcacttttctcttatagcatgttttcaatattagatactcatttattcaatatgtaaaagactaaaggagatctacaactaggctgaagagaaacagtcaagatggcatcaagtcctatttggtatggttctaggcactaaatcctatggctggctgggcaaggtggctcacacctgtaatcctcgccctttgggaggccaaggtgggaggatcacttaaggccacgagtttgagaccagcctgggcaacacaataaaaccctgtctttacaaaaaaatttaaaaaattagccaggcatggtggcacacgcctgtagtcctagctgctcaggaggctgaggcaagaggattgcttgaacccaggagttccaggttacaatgagctgactggaccactgcactccaacctgggcaacacagcaagacagtctctaaaaaataaataaaacacggtggtttcctaggaaatcttaacagaatagtaaagtagcacaggctatgtgtaaactatctttgctactaacttgatatgaacctcagggaagttatttagcttctctgggttcagtttcctcatctataaaaaatggtaagaggctgtgtgtggtggctcacgcctgtaatcccagcactctgggaggctgaggcaggcggattacttgagctcaggagttcaagaccagcctgggcaacacagccagacaccatctcaaaaaaaaaaaaaaaagatgagactatcacctatctcaagagttggcgtgaaaaattaagttcatacacaaaaatgtacttgttcaatatgtcagctaccatcgtgtttttcattattacattatttctgaagaaccaatttcttcatcggtaaattgagactatcagacttctttcaactcaggtatttcatacataagcgccacaagaacactgaagatgtcagagatcaccatgagctaacaagcaagggcaagtgtcataacagagtcagaagccaggctaggcacagaaagatgaaagctgggtagagacgtgcagacgaagacattccagggagaaagactgaactagcaaaggctaggaagtgagaataaatgtggaacacacttataaaggaagacaatttagctagtttgtgttttcggcaatggcggaaaataagatatgatctaaatgactttaaatatagtggactaaaaacaactgattatataagccacattactttatcacttgtatttttggaggtggaaggaagagttctagtgacagtgattagcatctactctacatatactttgagagtacctcacacactatatacaggtcagttctttgatgagaatctaaataaaaactcaagaacgtaatcacattcttctaaaccaaatacaagtaaatgctaggttatggttattttagaagcatcccttctcctgtcagcttaaagcaactaagagctgattatatgactatcaatgtaacaaaacaaatttaaataactgcactcctctcttatattaaattgttacaatataaatcagatattatcattcctctgatcgaaaccctcagatccttcctaagtaacagcctaaaaggctttggttgttccgctcactcccttcccccaattcttccctgaccttatctcctaatactccctcagctcacagtgctccaaacgcgttggtcttcacactcttaacgggccagctttgtcctcctcaaggcttttatgtttgttattctctagcttggaacgttcctttccccagataaacgtaggctctcactccaccttctagtccgcttaaatatcagcttgtctgtatggacttccctgaccactttattgcaaattccaacaccaccacctccccaaccccctttccagctttcttttccctaagatactgatcatcttctaacattcagtataatatatgtatctgtttgcctctcctcccgctactagaaagttaagttccccaaaggcaggggtctaacacctatccctatcacctagaacggcgctagagaataggcaccaataaaaataccccttgaatgaacgaattgcacattaggctacacaatgcttcttccaggtacaggaagatatattttcttttcccagctgtcaaaatataaacattaatttttgtacgaaacactcattgctcacctcttatgtgccagaaatgagcttggctctgcaaagcgccttaagacatagtccctgcgcttgaggaagtcctgggtgtgtatacgagagaggacagacatagaaacatcattgacaaaaagaaaacacagggaagccacaagaaattggataactgcctataggagtgggggcaagagggaaattctcagtgatgagaatgtaattccccaaaactctcgacagcttctcctgtttttgatgcatatgtttgcaattccatgtaaattatttattcacatcagatacgctctcaagtaggccgcaaaaaagtttgtgtgactacagtgatgctaataatcgacctactcaacgctgcacaaagatcatcgcctatatcttttcactcctctcatttggcagcttttgcctctcaggaccccaaattcggaggcctgcatctcccaagcgctgcctccttgggtcagaattctccccgcgctattcctgccctggagccgggcaccctgcaaatccttttcctaggcgagggggcgccgcctccggaaagccgccaactgggcctcggtaagacttgtgagggaagcgggagctgtgggagggcgacgcggctaggaaggaaccctagaggcctcagcccccactcccaccccttcccggcaccccggccgccggtgccccgaggctctgccgactctttgttaagcgaggccgcggttcctccgccctcgctaggcccagcagttgcctccagtgcccccaaggactggcggccttgcgtccagaaaccccacgcacaaacctgctgctatggctgcagcggcagctgctacaaccgcgggcgcggagcgaatcccggagcccaaagtacgcgctgtcccggcccggtcccgccgcgctccttcctctccgcccccttcgccgccgccgccgccaccaccaccaccgccgccgccaccgccaccaccgccaccgcctcacggcccgttgctgaaggggggaggggaacaaaaacgcgacatgcgcagtgaggaacgcgcgggcagaagggcggggccggggctacggctcccggaaggcgcctgaccttaaagctccagaacgcctcacaggctcctcagatactctgacgggaaactgcagttgggtggacagtgttcatgacccatctagaaagtgggtctgcgaatgaagaaaaagtggcgtcaaggggctagccaaaaatcccaagagaaaacgggttggacagaaaccatatttacatgaacatgcctatagtttaaactgttgcatatactactagagcgacactcttgcctctggccacgtggtcccacacagcatggccacctttagcttccggagcaccggttccgtgtgacgtcaacttgacggaatcctaggtaggaggattgggataggcgagggcagttccggcccaggggcggggattatgtaattttcccaaaagccccacctcgcctcagccgggcgggagagagggaggtctcgcgctttccccggggttgcgtcccgccccgcaggctgcgcgcaggcgctgacgagccgctcgcattctacgtaacggacggcggaggctacgtgaagagaggcgcggcgtgactgagctacggttctggctgcgtcctagaggcatccggggcagtaaaaccgctgcgatcgcggaggcggcggccaggccgagaggcaggccgggcaggggtgtcggacgcagggcgctgggccgggtttcggcttcggccacaggtaaggagcgggccaggacgcgctcgtcggcgtggccgggccaggccgagcggtgactccgagttgcttggcctgtagcccggtccggttgagataattgtaatggtttgggggaactttcccacggagctgtgagcaaatgatagccaaaagggcagagttagaggaaatgtacagtgtgtgccggaggatgacattaggatgtattgattctcttgggtggggagaaactaggcaaaggggtttaatagaagcaaaaacctctgtggccagtctcttctggaggtttctaaaatgaaacgtgtttgtatccaacacatataaagagacagaggaaagtctgcatgatttccagaatactcgttttggccgttgtcaggaagacctaatctaaaatgacaacaaggaatgatggcctcactcagtcctctttcctcaagtctagactcagtcgctgaggaactattggaygagcttgcagaaaataatcaaaccagacttgttagcgcttgtgtgaattttccttggtcctgtgttgcttgcttcaggagtcatagaggctgggtggtctggcaaggacttgtgcatttgagaactgacaggtgcagcggagacttctaagagggaaaaccaaggtaaaaatggcttggatgattgtaacctaaataaccttgaaggatctccattatagtgctgagttatctcagaagtgtttctatggtgtgaatattctaattggaaattcaatttgaaatgatcggatcttttggcaggctgttaatcgagttgactgttccggtgttaacttttagttgcttctatatgaaaaaaaagttttaagagtaggatttgaaaaggaggctgggcgcggtggcccacgtctgtaatcccagcactttgggaggccgagacgggtggatcacgaggtcaggagatcgagaccatcctggctaacacagtgaaaccccgtctctactaaaaatacaaaaaattagccctgcgtggtggcgagcgcctgtagtcccagctacttgggaggctgaggcagaagaatggcgtgaacccgggaggcggagcttgcagtgagccgagatcgtgccactgcactccagcctgggtgacagagtcagactccgtcycaaaaaaaaaaaaaaaaaaaaacccttggtacatatctcccgtaatacccactgcagccctaagaggcaagtagcaaatggtatcccttttttgtatgtggagaacagggaattttaagtaattaggctaaggtcatattgctggtaaatggtagagctgacattttattttattatttatctatttttttgagacagagtctcaccctgttgcccaggctggagtgcagtggcgcaatcttggctcactacaacctccatctctcgggttcaagcgattctcctgcctcagcgtcccgagtagctgggattacaggtgcctgccaccacgcccggctaatttttgtatttttagtagaggtggggtttcactattttggccaagctggtctcgaactcctgacctcaaatgatccacccacctcggcctcccaaagtgctgagattacagacgtggaccaccacgcctggcctagagctgacattttaaaccaagtctaatttcaccaaagtatgtgctgttttctatatttcttccacttttgaccaaatatcacaacatgagaactagagggaaagcctagaaaaactagaagagaaactttaacaggtagtaatttagaggactgaagacccttaggcctagtggaagtggaaaatatacattccagagtttaaaaacactcattagtaactaaagatggttaaaggaagctagggatgtttagagacacatcccatacctctttgaggctggcattgacaaagtggcatgctttcccatagattgtcccttgatactaacctgaaggatcaactagtataaaaagaatgtttagtyctcccttgatatgtatgggggattggttccaggaccccttgagaataccaaaatccatggatactcaagtcccttatataaaatggtgtagtatttacgtataacctatgcacctcctaccatatacttatatatgtatatgtatatacactatataattatctctagattacttataatacctaatttaattgtatttttttttaactgttcttgcctccaaatctgttccatctgtggttggttgaatccacagatgtggaacccatgggtagggcctactgtaccgttggcctatcctttatggcatttctcaaaatcatttgtacctttcaaattttatgaactttaattctaagaacatttaatttctttctttctttcttcttycttccttccttccttccttccttycttyctttctttctttcttttttttttttttgacacagtctcgctctgtcacccaggctggagtgcagtggcatgatcttggctcactgcaatctccgcctcccaagtttaagcaattttcctgcctcagcctcccaagtagctgggattacaggtgtgtgccaccatgcctggctaattttttggtatttttagtcgagacgggatttcaccatgttgaccaggctgttctcgaactcctgacctccgctgatctgcccgtattggcctcccaaagtgctgggattacaggtgtgagccactgcgcccagcctttaagagcatttaatttcttgagcatccatggattgcaaggcattcgacaataaccttcgatattaaactgatttctttaagaagtttcagtgctataaatgagatttagaatattctccatctcagagcaccttgaaagagtagtacatatttccctttgccatactctcacttccgttaatactcaattgcttgcattatggcttccatccttatcacttccctgcagttgccagtaatgatttcatcatgacctggcccctgagggcctttccagcctcctttctcccacttgagtctacaaacccaatgtcctatcataccaggctcctaaaatatgctatttcaggcctccatgccaaacctgttccgcagtctgcaatgcctcttctctagtgacaaaagtacactacagaaaaaaaaaaattagtccgggcacggtggctcatgcctgtaaatgcctgtaatcccagcactttgggaggccgaggcaggtggatcacctgaggtcaggagttcgagaccaacctggccaacatggtgaaaccccatctgtacttaaactacaaaaaaaattagccaggcatgatggtgagtgcctataacccagctactcaggaggctgagacagaagaatcgcttgaacccaggaggcagaggttgcagtgacccgagatcacgccactacactccaacctgggctacagagtgagactctgcctcaaaaaaaaaaaaaaaaagaaagaaaaataaagacaaaatatccagaattctaccatacaagctaactaatatttgtatgtaaatgtatgtttttctaaaccaagcttgtccaacccatggcctgcaggccgcatgtgacccaggacagctttgaatgtggcctaacacaaattcgtaaactttcttaaaacattatgagatattttttagcttattggctatcattagtgttagtgtattttatgtgtggcccaagacaattattcttcttccgttgtgcctcagggaaaccaaaaaatttgacatccctgttaaacttttttgttttctttttcttttcttttcttttctttttttttttttttgagatggagtttcactcttgttgcccaggctggactgcaatggcgctgtctcggctcactgcaacctccacctcctgattcaagcgatcctcctgcctcagcctcccaagtagctgggattacaggcgcctgtcaccatgcccggctaatttttgtatttttagcagagacgaggtttcaccatgttggtcaggctggcctcaaactcctgacctcaggtgatctgcccacctcagcctcccaaagtgctgggattacaggtgtgagccatcgcacacagccaaacctttttctttatgtgcatttgcttctaaaatgatctgggtttcgacttcatttgtaacattttgttttttttttttcttttagacagccttgctctgttgcccaggctgtagtgcagtggcgcagtcatggctcactgaagcctcaacctcctgggctcaggtgattctcccacctcagccaccagaatagctggactacaggtgcacaccaccagacttggctaattttttttttttttttttgagacagagtctccctgtgtcacccgggctagagtgcagtggtacaatctcagctcacagcaacctctgcctcccaggttcaagtgattctcatacctcagcctcccaagtagctgggattacaagtcacgccacacgctggctaattttttaaatatttttagtagagacaggattttaccatgttggccaggctggtctcaaactcctgacctcaagtgatctgcctaccttggcctcccaaactgctgggattacaggaatgagcgtgagacttggctaatttttaaaagcttttttgtagaggggaagtctcactgtgttgcccaggctgtgtaacaatttttttttaattacttgggggtttttcttttgttatttgtgttttgttttgaggcacgtttcactgtcacccaggctggaatgcattagcatgatcacagttcactgcagcctcggccggcctcgtgagctcaagcaattttctcacctcagtgccctgagtagctgggactacaggcacatgccaccaaacccagctaatttttctattttgtttgtagaggtgggttttcgccatgttgccaaggctggtctccaactcttgggctcgagcagttcactcaccccagtctcccacagtgctgggattacaggggagagccaccaccctatgtaacaatttttaatggacaacagtagctttggtttttgatacatccatagtttaaccaaagagtttaaccaaatttcaccatcataaataatattgtagcacatgtccttgaagctgaattcctgtgcaaatttatgttcagttcaggaattgtgctttatcttggcatagtacctactgtggcgatatgcttagtgaaggtacatttaattacagtaggatcattgtgaaaagcagtgaatgccaaaggagtttttatattactttgcaataattggttagcctttgatgattattgaatccttatatgtaacaaaagttctgttttagacagatgctggtrgtttttagggaggaaaagtagggagtggggagagcattaagacgataccatttaaaataatatggtggctcttcagcaggtgggggtaacttgtagtggctataggaatcaaagaaggaaacaccaggatttgatggctgatagatttcaaaggaaaaagaaggcaaaacattagatatcttgttcttttcaacaagcaagactggaaaaatgtgattgatattaatatacgaatagagaaattcagatacctgatgattttgagatgactataggcagggattgggtcagcctgaggggaggcctgtgaagtaagaatggtctttatattgttttaaagttttttttaaaaaaagaacaatatgcagcagagaccagtatgtaccccatgaagcctagaatatttactatcttactagatacacgaaaagtttgtagggcgtcaaaacagatatgtcttcaaggttacagtgagttatgacatagggctggtgtttagatgagggacaggactggaaatacagcctaaatgggtttgatggttgaaatatacttttcaaatttcagctcaaatggtctccccacttttttttttgtaaagccttacctatttgggaaaatggttacattgttgtccatgttttcatataatttggcacatattttgtcacagatatgatatcattatatttgttaatgcagaagcttttttcacgtattagaaaacttaatgttcttcaaaaagctataaaatgatgatacattgaattccatcatacacactaagaacaattggttagcaaaaaattactgcttctaagcaagtaatatgaaagcacagccacctaccacatttgagatgcagcctgagaagtggttcatagcatggactctggaggcaaaactctgggattaaatcacagctctttgtcacttggtagttgtactacttagcatctctctgccccattttccttattagtgaaatggggatgttaatgttgcagctttccttagagggttgttatgaggattaaattagttgctttttgtaaagtctttggaacagtgtctagcacatagtgatttaagtgtttgctcttatgataattatgttcatgcatgaacacaaatcaatctaagggtgaatggcttttttattcatggattattcttgttaccactaacagataaatagctacatcttattccttcatttttacctccttctcattttctatagaaagctttttaataggccctcaaaaaatgcttattgaatactctatgtaaatggacagagttttagaaaacccaacctaaagaaattaaatgacttgggctgggcacagtggctcacacctgtaatcccagcactttgggaggccgagacagatggatcaccctgaggtcaggagttcacaactagcctggccaacatggtgaaaccccatctctactaaaaatacaaaaattagccaggcgtggtggcacatgcctgtaatcccagctactcgggaggctgaggcaggagaatcgcttgaacccaggaggcagaggttgcagtgagccaagatcacaccattgtgctccaacctgggcgacaagagcaaaactccgtctcaaaaaaaaagaaattaaataaatgacttgatgacttgttgaagattttacagatatgtagtgccaggatccagactagaacccaagcctcttgaccttacttcattgttctttatataatgtggtctgaatctaatagtaccaaataagagaaaagcaggagaggtttatagatttttactgtttataaaatctgatcagtatgtatagaatggcaatccattttggggttctctttttttttaagctttttttcwcaaggtgcaatgaaagccttccacactttctgtgttgtccttctggtgtttgggagtgtctctgaagccaagtttgatgattttgaggatgaggaggacatagtagagtatgatgataatgacttcrctgaatttgaggatgtcatggaagactctgttactgaatctcctcaacgggtcataatcactgaagatgatgaagatgagaccactgtggagttggaagggcaggatgaaaaccaagaaggagattttgaagatgcagatacccaggtgaggctctttttattaatttattggaaaaatttgtaactagcacctttcccaaacattaaaattaatcctcaggctcaagagacctttactgtctggagtcttcattttcattcactaggtagagctcttctaaatgttctgtggtaagtttccaccttttacattaacagaatgaattgtgttcttctattgaaaccctgactggaagaggggttagagaatagatactgtttgtgggtgagaattgtattatttagaactttgcaattggctgggcacggtggctcatgcctgtaatcccagcactttgggaggccaaggcaggcagatcacccaaggtcaggagtttgagaccagcctggccaacatggtgaaaccctgtctctactaaaaatacaaaattagctgggcgtggtggtgcgtgcctgtcatgtcagctacttgggaggctgagccaagagaatcgcttgaacctgggaggtggaggttgcagtgagctgagattgagccactgcacttcagcctgggtgatagagcaagaccttgtctccaaaaaaaaaaagaaaagaaaaaactttgtcatcaaaagcatggggactcatcattttggtgttttgggtgctccccagctttattgaggtgtaactgacaaaaattgtatatatttaaggtgcacaacatagtgttttggtatacctctacatacaatatgaagtgcttaccacaatcaagctaattaacatagttgcctccgtgtgtgtgtgtgtgtgtgtgtgtgtgtgtgtgtggtgagaatacttacaatatattctcttagcagatttcaagtctacaatacattattattaactgtagtcaccttgctgcacattaggtcttcagaactttctcattttaagctgaaatttgtacccaatcgttttgttaaaaacatgtaacatctgttttctgtgcttgctgcttacacgttcttgttttccccaacaaatgttgccaacaaaatgagacacagctgctggtgacatttgtagaggaaaacggatgatgcctcatttttgtaggagggagatactgagagtgaaccatatgatgatgaagaatttgaaggttatgaagacaaaccagatacttcttctagcaaaaataaagacccaataacgattgttgatgtaggtatccaggattctgaattcccaactaaacaacaaaatgtcttgtcatcaatcccagaaataaaattaatgatgtatagctggtgttaatgcaatagtgggagctgagaaggagcttgacatcaatttttctgataaaaatcaacacctctccgtctcaaaaaaaaaaaaatcaacacctacagaagcaacccctattcatcattgtagcacttctagttttactacttatcagggaataagtaaaatttattccttggtgatgtacagtacattgaatttatttgggggttaaggaccaagtgtaawacaaagggctttccagcttttcatcccatttgattgtccttatatttccttaaagaatcttttatcaagctagcctagaaaagtaaaatggacctatttttcaaagtataaccttattcaatgacagatatctgaagtatcccttctgtttatggattttctcattcttcctgccatgaggtagatttcattcttcagtctcagccaacatttaatggaatgattttgcttttttaggttcctgcacacctccagaacagctgggagagttattatctagaaattttgatggtgactggtctgcttgcttatatcatgaattacatcattgggaagaataaaaacagtcgccttgcacaggcctggtttaacactcatagggagcttttggagagcaactttactttagtgggtaagtgaggccaatgtcagcccagcttcttgcttgaaaacaatctggtaaggatgatgtattcccctcagtataagcatctaactgctttcatggaataccaaagagggtgcattgttttttctctcaaggattccccctgctctttttttttttaatttaatttaattttattattattattactatttttgagatggagtctcactctgtcaccaggctggagtgcagtggcgcgatctcggctcactgcaacctccacctcctgggttcaagcgattcttctgcctcagcctcccaagtagctgggactacaggcgtgcaccaccatgccctgctcatttttgtatttttagtagagtcggggtttcaccatgttggccaggatggtctcaatctcttgacctsatggtccacccacctcggcctcccagattgcagggattacaggcatgagccactgcacccggcctttttatttttatttttttgaggcaaggtctcacgctgttacccaggcttgtgtgcagtggtatgattacagttcactgcagcctcgacctcccaggttcaagagatccttccatcttagccttctgagtagacaggactacaggcacatgctaccacacccagctaatttttgtattttttttgtagagacagagtttcatcatattgtgcaggctggtctcgaactcctgggctcaagcaatctggctgccttggcctcccaaattgctgggattacagacgtgagctactgcatccagccttgaggatcctgttttttggcccggtgcggtggctcacacgtgtaattccagtgatttgggaggccaaggtgggaggattatttggggccaggagtttaagaccagtctgggcaacatagtgagaccttgtctctacaaataaaataaaataaaaattggccagtcacagtggtgtgcttctgtggtcccaactacttgggaggatgaggtgggagaattgagctcaggagtttgaggctgcagtggtacagaatcatgctcctgcactccagcctgggtgacagaatgagaccctgtttctaaaaataagaatatattgtatttaataattttctcatctttcatgagtcagcagtaaaattgctaaacagcttctgattagtataatgtaatcgatgttttcaaaacaagttgataaaattctgacggaaaccaagaaagtttgacattttaggtagcttgataaatgctctcaattcatcttttagaaattgaaagtccctcaaaattcccttagaatctgacacttgagttttggatccactgctgaaatatacattgaaggacttcaaggaacctctgtagttgtgcaatgtagggaatgaggtggactaacctcacattcacctatttggcatttagcaccttatttctctttaatagtaagcatgtatccacctgctctgcaacacagtagtgtttatatattatgctagatactttgcatacagtgtttcttatttactttttgtaacaacactgtcaattggctatagttgctgttttcctaaggaggaaactgaagggcagaaatgttaaaacttatctaagctgttaaattgcaaccaagatatcagaacttatctacctgtttgcaaagtccaccccgtctccactataccatagtatttcagagtatgttttgaccaggaaattcgaaaaaaaataaatgagcagctttggctccttctacttccccttgcttgttttcatttggtgtatcagtccgttttcccttgtgaggttgagcaatttcttttgtatacttaatgaattaaatgaagagagaaagtattggaatttgagcttttttctagagttaaaatacaactcttaataccattagtaagacccagttatcattttgcattggaaaagaaagcttggttaaagttaattcataggagacatagtgagaaattgttgagtagtttgtattaatggtattttttattcactccataggagtttttaacttttggcagagatatttcaactgatttttttcccattttgtatgtactctgagagacttatactctaagctgatcatcgttaaactgacaagcatgtgcttagaatccatatttcttctaatacagacaatagttttaaaagtaaaacgaacagtgctaatctatttcagtccctgtccaaacagttctataagacagcaaagtattgctactctgaagctgtgatcattttgtggtcagggtagaggaacgtgaggtattcggccttgtttcctttttttttttttgagacagagtcttgctctgtcatccaggctggagtacaatggtgcgatttcagctcactgcaacctccgcctgccgggttcaagctattctcctgcctcagcctcctgagtagctgggactacaggtacgcgccaccatgcccggctaattttttataattttttttttttttttttttagtagggacagggtttcaccatgctggccaggctggtctcgaactcctgacctcgtgatccacccacctcagcctcccaaagtgctgggattataggcgtgagccaccacccccggcccggccttgacattttctgttgagtcacattaagtggttttacccctaggggatgatggaactaacaaagaagccacaagcacaggaaagttgaaccaggagaatgagcacatctataacctgtggtgttctggtcgagtgtgctgtgagggcatgcttatccagctgagggtaagtaggaaacttcttgtacgatatatatcttcccttaattttgtccagttgtgattcccagccccccaattcagcatcttatcccttcatgtttgacttaaaatgaggtctaaaagtgatatttatactaactggcaaatgtgtcgtaaagtatatttgatgaagcatttgattctccttcaaggccttttttttatactaagtaggagttgcagttgratttacttacttctctcatttttttcagttcctcaagagacaagacttactgaatgtcctggcccggatgatgaggccagtgagtgatcaagtggtatgtattcttccygctggttttctgtgtacagactgaattatttgttttctttctttctttttttttttttttttgatggagtctcactctgttgctcaggctggagtgcaatggcatgatcttggctcactgcaacctctgcctcccgtattcaagcaattctcctgcctcagcctcccaagtagctgagattacagatgcccaccaccaygcctggccaatttttgtatttttagtagagtcagggtttcaccatgttggccaggccagtctcgaactcctgacctcaagtgatccatccactctggcctcccaaagtgctgggattatagacgtgagccatcacgctttccccagactgaattatttcctagagctttttccatttctgcctggattgtgtttggagtttctggcaatttatgtcccttgacaaaaaatggaccctttttctccttggacagagcatcatcttccactctgtgcaactgtcagggggccttcatgggccttttggtaggaaagaggtgatactctgtcaccacatagatcaatggagttagccttgacaatagagggcaaagcaattgtgaaaggtaatggccctcatgggtaacttggctccttgtatatgtttttatctttggcagatagctgggtttcttctcaaatatgttttgcttcaaataatacgtttctggccgaataagctccagtcatgatctgaggaccttatgtttggtgtatcttctttcctttattaaatcaatatgtttatctgcaaattgtgtcctttgtcacaaataccacattccttcttcattgtttctttttttttttttttttttgagacggagtcttgctctgttgccaggctggagtgcagtggtgcaatctcggctcactgcaatctctgcctcctggattcaagtaattctcctgcctcagcctcccgagtagctgggactacaggcgtccgccaccactcccagccaattttttgtattttagtagagatggggtttcaccatgttggccaggatggtctcgatctcctgacctcrtgatccgcccgtgttggcctcccagagtgctgggattacaggcatgagccactgcacccggcctcttcattctttcaataaataattatgctggctcccactgctacaagaaacaaaaatatagaagacagtttttttcttttctataatagaacaagagatagatatgtatatatgtgaaagtgtgaaatagtatttggttagtaagtgctttgttagtgatgtaaattgggtactttcaaatgttattggattgaaaatcattgttttatatatatatatatatatatatatatatatatatatatatatatatatataaatatatatatatatatatttttttttttttttttttgggagacagaatctcactctatcacccaggctggagtgcaatggcttgaccttggctcactgcaacctccgcctccagggttcaagcgattttcctgcctcagcctcccaagcagttgagattacaggcgcctgccaccatgcccagctaatttttgtatttttagtagagacggggtttcaccatgttggtcaggctggtctcgaacttctgacctcaggtgatccacccgcctcagcctcccaaagtgctgggattacaggcaagagtcactgcacccagccccactgttatattttaaagatctcatttttacttgtaaacctgtatttttatttcagtttttctaacatggccatgatgacttagtccactaaaatttagaaccctatcagttaatatttctgtcatcctttctcccacaaactgccatcttattaggaggaaagtttgctgtatcctcagccatctttttgtaaaaattattctttaaaagtgttttaatcattttcagttctcattccctctctctctctctcctcctgctaagagaaattgcttcaacaaatatgtggctctttatattttatttgcccctttttttggaattctgtttaaggtttgctttgtgtaatttcccatcaatgatggaagagcagaaaacgttttcttttacagctgccatcttaccagttcttttcctatattaacattttccttcttccatatactaaaaattatttcacccaagcatttaaagatgtaattaatataacaaatatatcatatcagactcttttaggcttataattttttatctttctggcccagagtactagtaactgtttacttgtctggactgttttccaatacaaacagccaattctcagattctctgtataccaactgggtatcccacaattgaattcaataataataataattctttttaattttgtaaatttaaattttttttttttctagagaccgagatttgctatgttgcccaggcagttcatgttgccctgtccttaagtgatcctctcacctgggcctcccaaagtgctgggattacaggcatgagccactgtgcccagcctcaattcagttctgacactatctacctggagttagcttcaaatcctacagattaaagggctcagccccacaagactgccccacttcagatgcagtcgaatgtcccaggttacccatactaccatctggacttctgaccaactaactatwaatcgggttcctatgacctccccrctcaaccaataatttgttagaatggctcatagaacttgaaaagacacttatatttactggtttattataagggataaaactcaggagtagccaaatgaaagaaagacacaggaagaaacagggttgggagtcgttcggagctttcatgccctccctgagcacaccaccctcccagcaggttgatgtgttcaccagcttggaagctctctaaatcttgttcaagagtttttgtagaactcaatttcgtcctccctctctttcacggaggtaagggcaaggctgaaggtctctaccctctaagcacttggtttttctggttatcggcaccatcctgaggctaactagggtctatgttaagtcaccccattagaataaactcaggtgtgattaaaaggggctcagtataagtaacaaaagatactcttgttattcaggaaattcaaagggctttaggagctctgtgcctgaaacctgggataaaaaccaaatatatttcagtttattccacattattccatttaggttttgtttattttttatttttggacttgagtgctcctgtgtgaagtattgagtgtattcgtgttctattactacrtagcaaattacccaagtgtagcagcttaaaacaaccctcatttattatgttaccgtttctgcaggtcagaagtgcagcatgtattgagtgggtcctctagggttttaacaggctgaaatcaagatgtcattcaggttagagttctctgaagcttagggtcctcttaatgtcatttgggttgttggcagaattcagttccttgtgggtgtaggttcctgttttcttttcctttttttttttttttaattttttttgagacagggtcttgctctgtcacctagcatggagtgcacgatcatcacttactacagcctccagcttctggggctcaatcgatcctcctgcctcagcmtcttgagtagctgggactacaggcatgcatcacaatgcctggctaatttttctttctttttttttttttttgtacagatggggtcccattatgttgcctaggctggtcttgaactcctgggctcaagcagtcttcctccttttgcctcctaaagtgctaggattacaggtgtgagccaccatgcctggccttttctttcttttttagagatcgggtctggtctcaaactcctgacatcaagcagtcatgcctcagcctcccaggtagctaggcttaaaggcacgaactactgtagtccctattttcttgctagctgtcaactgggaaccactcagttcctaaaggccacccttaggtctttaccatatgtgccctaccgccaaccttcccataagccctttcatattttgactttcttcttcaagtagggctatagtcccttttaaggacttgcttgattaagttggatacacccaagataatgtcccttttggttaattcacagtcagctgattagggaccttctgccataaaacagcctgattatgggggtaatattccatcatatttgcaaatcccaatcacttaaagggagagtatatgcaccagcggggagggaatcttaagggtcatttagaaatctgcctatcacagaacctaacaggtgaattttgttgttttttacatttttttaaaagcaaataaaagtaaccatgaatgatgaagacatggatacctacgtatttgctgttggcacacggaaagccttggtgcgactacagaaagagatgcaggatttggtatgtcaggttgctccaactcaaatatacgtagaactgtgtctccttagcacacacatattcagcttcattgcataataaaaggtcatatcttactttcaattacttcttcctctagagtgagttttgtagtgataaacctaagtctggagcaaagtatggactgccggactctttggccatcctgtcagagatgggagaagtcacagacggaatgatggatacaaaggtaaatgcgacagaagacatacatttgccaggccttggcatttacaggacactctccctaaaagtctcattgtacaagttcatcattttatggcaatgtattagttttacattcctttcccacacaaatattaaaataccttctttaagcaataaattagcttgtcaaaaggacaatttgattagtcaagaagttctctaaatcaagagcaaattgttcctgggattgctaatgactttcaggtttttttttgaaaaaggaatatagcttctaatctttttcgtcatgtcatttagtcttttttttttttttttttgagctccagtttgtgtgggagaagagggatgtgtagagagccctcctcctttgtttttaaaaagatggggtcttgagatgttgcccaggctggagtgcagtggctattcatgtgtgtgatagatctcactgcagcatcaaaaacttctgggctcaagtgttcctcctgcctcagcaagagcccaccattgtgcctggctgagagagccatttctttctattggttgtgtaatggtaacagatcttagtatcataagaatacaggataactcagagatggttataaatgtaagttcaaggtgacatgtttataaaggatcccstgaaattattttaggtgttatctttatgctttcattcttgtttcgaccattattttgagaaatatttttagctgctcgaaaagaatcttaatcattggtatgactaaaaaggagtactactttttttttttttttttttttcttagtagagatggggtttcgctgtgttggccaggctggtctggaattcctggcctcaagtgatccacccaccttggcctcccaaagcgcttggattacaggcatgagccactgcacccagcctggagtactactttaattctaaagagattccctatcttattgaaatttaatttttaaaaagctttagccttgtccgcgcgctgtggttcacacttgtaatctcaacactttgggtggcggaggcaggagaatcacttgagtccagggattcaggactagcctgggcaacatagtgagaccctgtctctacaataaaaaaattagccaggtgtggttgtgtgttcctttagtcccagctactcaggaggctgaggcaggaagatcacttgagcccaggagattaaggctatggtaagctatgattgtgccactgcactctagcctgggtaagagagcaacaccttgtcacaaaaaataaataaaaagcaatgaacacgctttggtcttaatgaaggacattgtataaaagtaaggattgaaaggtgaatttctttttttttttttttcttttttttgagacagagtgttgctctgtcgcccagaccggagtacagtggcgtggtctctgctcacggcaacctccacctcccgggttcaaacgcttctcrtgcctcagcctcttggatagctggggttacaggcacatgccaccatgcccrgctaatttttttgtatttttagtagagacggtgtttcactgtgttggccaggctgatctcaaattctcaaactccttgcctcaagtaatccacctgcctcccaaagtgcggggattactggtgtgagccgttgcaccatctcaaagagtgaatatctttaggaaaaaaagggaaatgcattaaaccttgcttttaaaaaatattattttctttttttcagatggttcactttcttacacactatgctgacaagattgaatctgttcatttttcagaccagttctctggtccaaaaattatgcaagagtacgtataagataaaattgttgaaattaattttcctcactagctttctgtgttgaaacacctgtaaggtgcttctgcaatatcccttaccaaatgtgtgaaggaagttggtgacaggcctccacattttcctttgctttgactgcatgcatcataagaggtcattgtaaacctatgggagagaaatgagcctcccctatcccagtttgtatgtgtccctgcatgtttgtgccactgactcagtgagatggttgggaatcttacagaatggctggtactaataaaatgcagtgggtttttttgttttgttttgttttttgtttgtttgagacgctgtctcactctgttgcctaggctggagtgcggtggcacaatcttggttcactgcaacctccgcctcccgggttcaagcaattctcctgtctcagcctcctgagtagctgggattacaggcgtgcaccaccacgctcggctaatttttgtatttttagtagagatggggtttcaccatgttggtcaggctggtctcgaactcctgacctcgtgatccacctgccttggcctcccaaagtgctggaattataagcgtgagccaccatgccccagtccataggttctttttttttatgataataatttgtgtgtgatgtttgacttatgtctgattacaaatctgtgtgttttgtaatttatggccttttctggcttccctctttgaatagttaagtgattgtatcctttcctagcatagaagcccacaatgtccatagggtttctagctttatagtaatactgttcaggagtacatattcaggacttggatttgttctttgaattcacagcctgtctcaggagagcatatttatttacctttatgctcggtttgaaactggttctgactaaatttttagttaaagactaccctctgataggctgtggagttgagcacaattcaagccaatctggattttagttgtatactaagattactcaggtccttatgcctctagatagtgctgcatcatccttgtcttgctcaactcagtggcactgaggacagtgtttcacattgtagcattcatcatgccttttaaatatgagatggagggcaattgatagtcaaaggattcatataggcagagattacaaaggaatcttcaatgacagaactaaattatatatgctgtagtagattatccctaaatttactctgagcctaactcaaaaataagataataagatgccttgttataggaagatagaataggagttggaaataaaacataaaaatgcatcaaaataagcaaaaatgtatctaaaatatgggcctcatacttaaatataggctcatttctggctccccaggtgagatggaatatacccttgcctggagggaacatcactggaggtgttcaaatataggataaagatcacttgagaatgcatccatcagatagacgagtggaccagatgacctgtaaagctccttcattatatttgacttgggtatgccaagccaaatactgtgctgattatgtgcaggtatctgttcatctaagtgtattgggtgacttgtgtacatggaaaacatctttcttgtattccttcttaattgccttttcttttatgacagggaaggtcagcctttaaagctacctgacactaagaggacactgttgtttacatttaatggtaagtattctgggtcctttctgggttcttagtcttctctgagatgaccttaaggagagtattgtttcctcctaaatgatagctttaaaactacgtcaaaactataagcctrtgcttgcttactgatttccagatttcttcaagaagaaattacctattatatattttaatttatattttctgctgcattttaactgcctaacaaacttagagaaatgagtctcttaagattaaaaaaaaaaaagagttgggtgacctggaaatattaatgctaccattaactcagtaggaaaaatggctttgttttccagtgcctggctcaggtaacacttacccaaaggatatggaggcactgctacccctgatgaacatggtgatttattctattgataaagccaaaaagttccgactcaacagagaagtaagacccaatgcctgtattatataaattggcacctttttttgtttcttctcaagggggagggcagctatcaatgatttcagtgactgaatttttgctagttgatttagaagtgccaaatgggagtagttttatgaaagaatgctaaacgggattttgttgctgttgactagaaatggatttcttatgaaatactttgtttcttggggaagggcaaacaaaaagcagataagaaccgtgcccgagtagaagagaacttcttgaaactgacacatgtgcaaagacaggaagcagcacagtctcggcgggaggagaaaaaaagagcagagaaggagcgaatcatgaatgaggaagatcctgagaaacarcgcaggctggaggttagacaaacttatcactggggtaaaactacgatttgtaaggatgactgcttgtgttctgttggttgttaaggtaatctttgtaggctaaaagtttagcattttctcaacatttgggacattgtatcaattgataacactataaagaagaataaataatccttcctgttcaagccgtgccacactgagtctgtgaacgtgaaaaattatcagtattatcctgttcccccagcacaatttcattttgaaaattccattatcagttttcgagccaaacactttggtagaaagaagttagaaattttaatagaaggcagcacatgcgccctattatctaaataaacttgctatgtaaaatttaaaatctgattatagaattagagatttccaatatttttgtttgtatttttgttttctgttttttaccyaactagaatctcaaactcaaaagctttttgggtatagtatgttatatttgaaagctcggtatgatctgatgtgtttctgaaataagatgccatagtccagctctaaatttttttttttttttttttttttttttttttttttttttgagatggagtctcactctgtcacccaggctggagtgcaatggcgcaatattggctcagtgcagtctccgcctcccgggttcaagccattctcctgcctcagcctcccaagtagctgggactacaggtgtgcgccactcagctctaaattttagaccttgtaaatgctggtcaagaaagagaacaaaggccaggtgcagtggctcacgcttgtaatcccagcactttgggaggctaaggcaagcagattgcttgagcccaggagttcaaaacaagcctgggcaacatcatgagaccttgtctctactagtaaaaaaaaaaaaaaattagctgtgcatagtggtgcatacctgtagtcccaactacttgggagactgargtggaaggattacttgaacctgggagattgaggctgcagtgagctatgatcacaccactgcactctagcctgggcagccaaaaaaaaaagagggagaggacaggccgggcgtggtggctcacgcctgtaatcccagcactttgggaggctgaggcgggaggatcacaaggtcaggagttcgagaccagcctgaccaacatgctgaaaccccgtctctactaaaaacaaacaaaaaaatcagctgggcgtggtggcgcgtgcctgtaatcccagctactcaggaggctgaggcaggagaattgcttgaacctgagaggcagaggttgcagtgagcagggatcgagccactgcactccagcctgggtgacagagggagaccctgtctcaaaaaaaaaaaagggagaggacaaagttctgaaagatgtgaattttagtaagaataatcttgagataattgaagaatattcttaggagcaaaggggtcacgtgtccaagaaaatgtgagctgctgtgcgggcctgcatttgacagcagtgtcattaatgctgttgagtgaactgcccaggatactgcaggcctgtcatcatcatcttaccccttttatcatttttttgttttatttgacttggtttagtgataggtatttttcccctgaaaatgtagctctgtgtttatgcagtcttctttataaataaatatggctttttatgtacatgtgaagaatctacagaggaatcattaataggtaatgcctttcatttttctataaaaggaagttctacatttctttctaaggtttgaaactataatgagttaaaggaagagggggcctgaaacttaacctgagtcagattgtaagcttcttgtcgatgtaaatcatttaatttttttgaactaccactttatagtatctggtctgggcaccttgtaaaaagatctggtgaactcaatagaacaacccacccaaccccctctaccagtatatgatatgaaagctcctttttttcttttaatttatttttatttttatttttgagacagggtctcactctgttgcccaggctagagtacagtggcaaaatcgtagctcgctgcagcttcgaactcctgggctcaagccatcctcccgcttcggcctcccaatatgctgggaatacaggtgtgagccactgtgcccagccagagagctcctcttcactcacatcttttcaaaaactagttattaatttttttttttttttgagacagagtctcgctctttcaccaggctggagtgcagtggcgcgatctcagctcgctgcagcctccacctcccgggttcaagcgattcttctgcctcagcctccctagtagctrggactacaggcayatgccaccatgctcagctaatttttgtatttttagtagagatggggtttcaccatgttcaggatagtttcaatctcttgacctcgtgatccgcctgcttcagcctcccaaagtgctgggattacaggcgtgagccaccgtgccaggtcttttttttttttttttttccttattctggtagtggggaaatggtatcccacktgttttgttttgttttgttttgtttgagacatagtcttgctgtgttgcccaggcagagtgcaatggcatgatctcagcttactgcaacctctgcctcctgggttcaagcgattctcctgcctcagctgggattacaggtgcctgcctccatgcccggctaatttttgtattttttagtagaaatggggtttcaccatgttggtcaggctggtctcgaactcctgatctcaggtgatccacccacctcggcctctcaaagtgctgggattacaggcrtgagccactacgcccagctattttttgaattattatttgaagttgaacatttttcatgtgtattgacttaacataaatatctcttaaatgtgctagcataaatatatttatcttttttttttttttttctttgagacaaactcactctgtcgcccaggctggaatgcagtggcacaatcttggctcactgcaacctccgcctcccaggttcaagtgattctcgtgcctcagcctcccaagtagctgggattacaggtgcccgccaccacacctggctaatttttgtatttttagtagagatgaggtttcaccacattggccaggctgatcttgaactcctgatctctcaagtaatccacccacctcagcctcccaaagtgtaggcgaggtttcaccacattagccaggctggtctcgaactcctgacctctcaagtggcccaccagcctcagccactgcgcccggccaatatttcttatacatgatattgtattctgtgtatcattagttttacacatgtgtgtaatatgtaatatgggagatagggatagatagtgctgggaaaagagtgaatgtggtgaaggtaggggttgggacaatgggaagaggacattgggatcgaacctgggaggcagaggttgcagtgagtcgggattgcgccattgcactccagcctggggaacaagagcgaaactccacctcaaaaaaaaattgaaaagaaacctaagataggccgggcgcggtggctcatgcctataatcctaacactttgggaggccgaggcaggtagatcacttgaggtcaggagttcaacaccagcctggccaatatggtgaaaccccatctctactaagaatacaaaaattagctgggcatgatggcacacacctgtaatcccacctactccgggggctgaggcaggagagtcatcccaggcaacagagcaagaattctgtctcaaaaacaaacacaaacaaaaaaaaaaacctggccaggcacattggctcacgcctgtaatcccagcacgttgggaggccatagtcggtgaattgcctgaggtcaggagtttgagaccagcctggccaacatggtgaaaccccgtctctgctaaaaatacaaaaatcagctgggtgtggtggcacatgcctgtaatcccagctactcggraggctaaggcaggagaatggcttgaacccggaaggcagaggctacaatgacccgagattgtgccactgcactccagcctgggtgacacagcaagaccctatctcaaaaaaaaataaagaaaaaacctaagacagtcaatagttcccaaaccaggaatttacaaatcaccctttgaaacctaatttgttgcactatgaagaactatatatgctttgcacttcttcttttcttccctattttctccatcctgtaccagttgagtatatttctgagcacatttttaccccagtaccctaaaaataagaagtttgagattgtagctgaaataaacttttaatcaggtgtgaccactagtggccaacagtgaagtcatactttgacttgacctctaaggcttctatcagtccacgtaataataacctgaaccttcttactcttctatgtaacttcctaattcctaaataaaaatatgataaatttgataatttttatcacatttgataaatatgatgtctcaaatagagcattatgaatttaagtattatgtgcaggtatggtgtctgtgctaataagaaatttgcaatgaataacctgatggaacaagattcttaaaatttattgaactgaagtagaatgtatcttctggcagttatacatttatgatataatsccatcatgaatggtatggtgaacatcaggctaagtgttccctgggtacagaaaaaaatcaaaccagaataacaaaggctggttaattatagtagtttctttcaaaactgagattttagtttacctttgcttcatttgaagttgatttaatttttattyactaatgtagatattggcaattatttttataactatcttctagaatgttatggtgcaagcctaagtttttgaataatactataggcagtattctaatttggatttttttttaacatatgtttcaagcttaatttgaattctctcgtccccactccctttctctatttattaccccttctttctctaggaggctgcattgaggcgtgagcaaaagaagttggaaaagaagcaaatgaaaatgaaacaaatcaaagtgaaagccatgtaaagccatcccagagatttgagttctgatgccacctgtaagctctgaattcacaggaaacatgaaaaacgccagtccatttctcaaccttaaatttcagacagtcttgggcaactgagaaatccttatttcatcatctactctgtttggggtttggggttttacagagattgaagatacctggaaagggctctgtttcaagaatttttttttccagataatcaaattattttgattattttataaaaggaatgatctatgaaatctgtgtaggttttaaatattttaaaaattataatacaaatcatcagtgcttttagtacttcwgtgtttaaagaaataccrtgaaatttataggtagataaccagattgttgctttttgtttaaaccaagcagttgaaatggctataaagactgactctaaaccaagattctgcaaataatgattggaattgcacaataaacattgcttgatgttttcttgtatgtctacattaaacttgagaaaaagtaaaaattagaacactgtatgtagtaatgaaatttcagggacccagaacataatgtagtrtatgtttttaggtgggagatgctgataacaaaattaataggaagtctgtaggcattaggatactgacatgtacatggaaaattctagggacaggagcatcattttttccttacctgataccacgaaccagtgacaacgtgaatgctgtattttaagtggttgtatgtttattttcttgagtaacaaatgcatgaaaaattaatgcttcacctaggtaagatcattggtctgtgtgaaatcacaaatgttttttccttcttggttgctgcagcctggtggatgttcatggagaagctctgttctctatattatggctgtgtgccgttgcttctccctctgcttttatcttttccacagttgaggctgggtatgttctttcaaagaaatggccatgaatatgtgtaagtatacttttgaaaatgagctttcctaaactattgagagttctttccacctcttgcggaaccaactcttggaggagaggcccatgtatctgcacgagcacttagcttgttcagatctctgcattttataaatgcttcttaccaagaaagcatttttaggtcattgcttgtaccaggtaatttttgccggggatgggtaagggttgggttttctggtgggagtggggtggtgggtattttttgttgatgctttagtgcaggcctgttctgaggcaataacaagttgctgtgaaaacagcatgtgctgctgcctttgtaactgcatggaaacttttcacatgggtttttctccaagttaatacagaaatatgtaaactgagagatgcaaatgtaatatttttaacagttcatgaagttgttattaaaataactaacataaaacttaattactttaatattatataattatagtagtggccttgttttacaaacctttaaattacattttagaaatcaaagttgatagtcttagttatcttttgagtaagaaaagctttcctaaagtcccatacatttggaccatggcagctaattttgtaacttaagcattcatatgaactacctatggacatctattaaagtgattgacaaaatctcagagtgccgccttgactttgtggagttatcctacaagagtataagctcagaggaaaattctttctgttcgataaaagtcagcactgaaatgcttttccttcaaaagagttcatctgaatattccttttgttattaccattcaatcattttaaaaacattttatatttttagagccccatatgttatttatgggctcctccctgcattccacctcttaagactccattaactctcctgtgaatgcgaggacaaagagaggaggatgttgtttagtgtcacaaactggaaaaccactaagtctccaatctcatttgcattgcctggatgtttagcaatgccaaaataagcactggactgtaagacaaagacctggcttttagtgccagcagaactaattactaatcctttgactttcggcaagttattaacctaatgtgaagtgaggatagtaattatttgccctgcctgcttcacaggtagttgaacactaagagaaaatatatatgtgagattgttttgtaaactgtttaagcactttgcaagtataaggcatcatctaggactggtctccaagtgatgcattcttgctttactctcttttgcttttctttctcccaatggaaaccaagcagatcctttcagagttctttatctgcaaaaattgatagggtattttttgaggaagaggggagtagcttatgattctgtttccttagtaatagcaaaccttttcctgtaaagaccagatgtgaaactcctcttttttttgtttttgagatggagtctcactgtgttgcccaggctggagtgcagtggtgcaatttcggctcactgcaacctccatctcccaagttcaagcaattctcctacctcagcctccagagtagctgggactacagatgtgtgctaccacgccctgctaattttttatatttttagtagagatgggatttcactgtgttagccaggatggtctcgatctcctgacctcgtgatccacccacctcggcctcccaaagtgttgggattacaggcgtgagccagtgcgcctggccctaactcctttctttagatggaatttagaccaaagaaaaacattgatttcttattccacccattcagtaggaattggcaattcagtaggaattgtttagaattgtgttgtacaagaatccagtggatttggcaggaagaggtgaaacactgtgctttatcatcccaggttctcattccttaccattcctgcctcctctcattttgaatgatgtgaaacgatgtaagagagacaagaggccgggcgcggtggctcatgcctgtaatcccagcactttgggaggccgaggcaggcagatcacatgaggtcaggagttcaagaccagcctggccaatatggcaaatccccgtctctactaaaaatacaaaaattaaccgggtgcggtggcacaaacctgtaatcctagctactcaggaggctgaggcaggagaatcgcttgaacccaggaggcagaggttgcagtgaaccaagattgcaccactgcactccagcctgggcaatagagcaagacttccgtctcaaaaaaaaaaaaaaaaaaagagttatacccataggagtgtcttctgttacagactgctaaaacagaacagttctgagacaatatgttttctctacccatttgtaatggctgcaagaagtttagcatcttttcagacagtctctctaatactcggttccaaaagaccacatgtgaaagacccttcagtagaacactgctagaaattttacttctctgtttatactctgttgctttgtgagtttaccaagtttgctcctgagagtggcatcttattttgagaatgagagcatgtgagggtagcccttagcaatgtcaaagcactcgataaaatcaaaatgatgtggcccagcacagatggctcacacctgtaatcccagcactttgggaggccgaggctggtggatcacctgaggtcaggattttaagaccagcctgaccaatatggtgaaacctcgtctctactaaaaatacaaaaatcagccaggcgttgtggcgtgcgcctgtagtcccagcgacttgggaggctgagtcaggagaattgcttgagcccaggaggcagaggttgcagtgagcccagatcacgtcactgcattccagcctgggcaacagagcaagactccatctcaaaaaaaaaaaaaaaaaaaatcaaagtgatgtatgtaagatcaaatgagaactcatgtgcatacaggtcccacagtttcaggggcatatttctttttttctttttttttttttttttttttgagacggagtctcgctctgtcgcccaggctggaagtgcagtgacgcgatctctgcacactgcaagctccgcctcccgggttcaggccattctgctgcctcagcctccatagtagctgggattacgggcgcctgtcaccacgcccggctaatttttttgtacttttagtagagacggggtttcgccgtattaaccaggatggtctcgatctcctgacctagtgaaccacccgcgtcggcctcccaaagtgctgggattacaggcgtgagccaccgcgcccggccttccaggggcatatttctataagtccctacttggatgtagctaaactcctcccccagtcttggaagttaggacggtctaaatctgtgtcaaagctcagagctggcaagagcgagtgttcattacctgatggtatatatccgcgttttggataccccctcctgcgcacgcgggggataagtcactgaaaaacctagtctcacaggagtgaggcttagttcatcgcttcctcatttctcaagctctgcataacctggcttggacaaacctgataggtttccacaaacggcttcagctgtggatgaggaaggcttcgggggaaaaaaaaagatactgaggggacaagatcgttttcattagttgagctattttccttgttttacaaatagtggggagcaaagaaaggatgggcttcccctttgcagcttgttgtctggtgcccgagaggccaaagtgaggggcatttgagatgtcgtccaagaaaagtgcgaggcgggttttccattagaagtcctaccacatgaaatgagaaaaacacaattctcaggaacagccaagtttgcctttctctggtccttcattgttgaagccacctgcttccccctcctgctgcgggggcggaggctgtaggcggaagcgctgcgcggcgggaaagacaacgggaactgagaaccgctctcggcgcggcggcggctgctagggcctgccgcagccgcggccactcggaaagggcgggacttccccgcagggcggggtggggcggagcgctctatcagtcctcccggtcgccccactgcgcatggcacgttgcgtactcccctcccagcaaccggtctggcggcggcgcggcagtaaaactgaggaggcggagccaagacggtcggggctgcttgctaactccaggaacaggtacctgcctggcggggtgcctggtacgctgccggggccagtccctcctggctctgccaccgattccatctccccaggcccgggccttcgtcggagcggccatcctgggctcacctcaccctccacgggccccctttttaacccgcgtcctcgactcccgcaatgaggcgccgcagcccgagagcagaataggcttgggcctggcggggagacgctgaagcggagttgccgggcgagagaggcgggctcctgctttccccttcctccccaccccctaggacttccaggtggggaacctagggctgggtgccggtttgtcctgttcaggcagagtggcggccgaccccggtcctgggctccccgctgtccccagccgccgcgcactttgggctgacaggcagcgggtcaagtcctcgtaaggacacaagatccagatgactcccagaatcggcctaaacgaagagctcattgtctttttgttttccagaaatgttttttgggtgcctgcaggggatttgggcgccggagatgggggttggggataaggaagagagctcgagggaggggcagtgggtaggtaaaattgttcatagttctcaggaaatagggaactaacctctctgcccagccttctcctgtatcctaacatactttaacttgactttcccggagaaagagccgttggaatttgcccttttcttattgtaatatctgttcaagtagaagcatgttccaatacgtatatgcgacgttaagacaattcttcattgacactcataccttcctgaagacacccaggactgtttcttgtccctgagagttaaggaagaaaccaaatttgatcacctgccaaaagcctgtgaattcagcctttagttacagtgctgaactggtcaaatctgtcccctactttttaatcagatttcttagaggtgttttggctggaatgcagtgtttatagttgtggccccagaaatggaggaagtttactctggtttttagagcgcaggctttggaacagatttaattagtcccctaccacttatctgtgtgactttgggcatttaacctccctgcacacctgaatttcctgatccgtaaaacagagatgataatacttgtgagctgctcatgaagcatttagcacagtgcctgacacgtaggaagtttgccataaatgtttgctgggtttattattttctctctttatttttattttaatttttttgagatggagtttcgccctcgtcccccaggctggaatgcaatggcgcgatctccgctcactgcaacctcggcctccttggtacaagcagttatcctgcctcagccttccgagtagctggcattacaggcaccccccaccacacctggttaatttttgtattttcagtagagacggggtttcaccatgttggtcaggccgatctctgaggtcctgacctcaggtgatccaccagcctcgacctcccaaagtgctgggattacaggcgtgagccaccgcgcccggccaataaagctatttctatgtctgtccactagtaatattgctttgttgtgtgtgtgtgtgtgtgtgtgtgtgtgtgtgtgtgtatatatatatatgtatgtgtatatatatatgtatgtatgtatatatatatatatatatatagtgttaaatgtttctgataggctgggtaccgtggcccacctctgtaatcccagcactttgagagactgaggcagtaggattgcttgagctccggagtttgaaaccaggaacaggtacctgcctggcggggtgcctggtgcactgccggagccagtcactcctcgctctgccaccgattccatctccccaggcccgggccttcgtcggagcagccgtcccgggccatataattatgtacattatatgtatatacatataattatgtacattatatgtatatacatataattatgtacattatatgtatatatgtacatatatacataaatatataatgtatcaatatgtatacataatatatacacataaaattatatatgtatacatattaatacactatgtacatatataatatatacatatatgcataatatataatatacacatacatatgtatttcttaatttttgataagtgtggatatatctttcgaatgatatccatctgccctccccttccattagaatttacattttaaggacatttacatttgcattttaaggaaatttgaagggagcagagtgatgatgttaatgtcatacagataaccgggcatggtgtaatcctagcactttgggaggctgatgcaggaggattgcttgagttcaggagtttgagaccagcctgggcaagttcatctgtacatgattcaatctgaaaatagaaaagtccttcataatttgtataccatttactgctaatcactaggtagagctactctaaaccagctcagatgaaatttattagtaagattttatcaaagaaaatacctgtgtgcag

SEQ ID NO: 98240 - DNA, 27272 bp, Homo sapiens
acagcagtaaaccgggtgagagcagtaagatgggtgggctgagctcccttcctgcccagccctggtctggggcaatggcctggatcacagaggaaaatgacaaggaatctggaatgagaagacttggtcccattgtcgttgtcagttcctaagctgggcaaccttgacaagccccttcccctaagctgccagctgcctgccagtggtgaaaggacaaaggtctcatgagccatgtgcagcccaccctgctcagaccatatttacagacagctcttttccactccagggacaacaccaatggacccatctcataaaggtcccctctgccccctctcttccttccctccaccttccccactctcttaatcctcatgcatgtctgcaccatgttgcctagtgtctagacatgtatgaatgaacaagctccctaaagacaaggggcacactcacccctctttatttaccccacagacagcaggagcttgcctagggtaggtccccaggaaccctgggaacaaaatgtcacagcagacatgtccagttccatgactaaacagtcatgtgagctcagtcacttgcttccccttctgctttggttccatggatggccatcggccctggctctgcagcctctgtggtgactgggagcagacggggaacatctgatgacagcattttgacaggataagaagcaataactaatataaaaattagccggggggcgggcacggtggctcacacctgtaatcccagcactttgggaggccgaggcgggcgaatcacctgaggtctggagtttgagaccagcctgggcaacatggtgaaaccccatccgtctctactgaaagtataaaaattagcaaagcatggcgatgtgcacttgtaatcccagctagtcgggaggctgaggcaggagaattgcttgaacctgggagccaaatgttgcagtgagccaagaccacaccactgcactcaagcctaggcaacagagtgaaagagtgagactctgtctagaaaaaaaaaaaaagaagaagcaatgactactctaaacccaaggtcaaccaacagccaccttggcggcagatccccaagctgctggtaacaatagctaccatttactgggttccgtcatgtgccagaccctgtcttaagtgtttacataccttatctgctttaatcctcaccacaacctggaaggaagctgagactcagagaccttaattcatttgccaaggacacacagctaataaatggaggtgtcaggattcaaacctggagctagagccaggcatggtggcacacacctatagtcccagctactcaggagggtgaggtggaaggatcacttgagcccaagagtttgagacaccatctctaacaatgtttttttaaacctggactgtcttaactcaggagcgcatgctcattccttccccacatgctgcctgcacacattctcttccatgcaagcccttcatctgctgacgtcactcctatgtaacaggcaccaaggaggaggtgggaaggacccagccctcaagtccacaccccagcagggacaatgcaggaggacaatgagaactctgaaggcatgggaacacagggaactgggggtcagtgccatattctattcagctgcttccctggcctgacactgagtagtcacctggtacacgtcaaacaggtctgaacggagttggaaaccaaggcagggtgaccccaaagtaaggaacatgcacatctcactcaggggccatggtgcctccacatccacctcaggcaactatgtcctctccagaacagggtgaaactggtttccatcaaaaactctacaagatgttaataggtggtaaaaataatagaataataaattaaagattcatattaaatattttaaagagcagtttttaactgcagaatttagaacttttagcatgcttagaggcaatgcatctcttttacttaaacagtttaaaaaaaatttgttttaaataatggtggccaggcgcagtggctcacacctgtaatcccagcactttgggaggctgaggcaggcaaatcacctgaggtcaggagttcaagaccagcctggccaacatggtgaaaccccgtctctactaaaaatacaaaaaactagccgggcatggtggcatgcgccggtagtgtcccacctactcaggaggctgagggaggagaattgcttgggcacaggaggtggaagtggcagtgagcccagatcacgccactgcactccagcctgggcaacagagccagtctcaaataataatagtaataataataacaatggaaacgggggtctcactatgttgtccaggctggtctccagctcctggactcaagcaatcctcccaccttggcctcccaaagtactgggattacaggcgtgaaccaccacgtcccacccttacatctctaaaaagaggaagcagaaagcagtgtttcccaaatgtctttcaagagatgcctatcagtgtcctgaggaacaccaagggtctgaggcatcacgaggcatcaccttgcaaacactggatcaggcacgggcctcttgttttgaaatacaattcatgggttatcaaatatggaaacactctcagagatcagctagcctgctgattttacattttacagatggggaaactgaggcccagagagggaagaaggttgccaaggcaacacagggcctccacagccattgggtcttgaccccagctcttggggtccagaggcccagctccagctgcctgtttggccgtgccaggttccaggtttctacatcggtctctcccatcaaaccctcagctcctcaaagccaaggtctggtctctctcacctcccagtcccagctcctggcccagtgccctgcacagaggacacattcacagaagttcccagcagctggagaggctcagggcagacgccaggaagggcattccagcagctggggacagatggcaggaatgggcagtcaacttctctgaaggcttctcagaagagagcagaggccaggctgccagaggcagtgctggacactggccccagcttcctggtttccagaaaggatggagttgggagcgaaggaagattccaaccccgggagctgccttgctggcctgggtccgagaccctctgcttgcaccagaaacagggaggggcaagagcccctgttgggacaggccatggaatgccatcctcctcccccagagctcagaccctctgcctccaggaagccactcctgcccgctccagcctccctggtcttttcctccttggaactctgacagcaactcggctcagggaaggtgagccgaggctgagcatggcctcaggggctcccaataggaactggagactggcctgtcctccaggctgttcagtaaggaggcagagcacatctgaaggtgtctcctcctctgagggaaagtcatagggaaaagaattccaaccaaggtgcccaaggtgtgtcctggaagaggacctctcagtggggctgcagcagtgcctagaccgccagcaggcagagggaggacagcgctccaggggaaggtggagcaggcccaaaggcccaggcaaggagaggaggcaggagcaggccaacctgcagctgcacttgcagcctaggggcaatagagcagagtggtcagaggctgggctgggaccaaccacaggtcccagtccacaccctgtcatcattcgctgggcgagctcaggcctgtcactgaatcgctttgtgcctcagtttcctccctaaaatgagaataatagcatctactcagagggttgttgggaggatgaagtccgatgacaggagccctcacagctgagccggcacctggggaggccctagagtgtcgccttcgctgttaaggggcatggcagaggaggcccacccatgacagaggagcttgtcatcccaagcaggaatgccacctggtctgacattaggattcaaaaggcaaatgataaactcctgactgtgaggccgtggtggctgctcggttaatacttgtgcacttgacctgaggtgagcatcctccacacctcccagtgctggcctaatagctaaatgatttcctctgactcacatttattgagcagtcactatgctaggtaggggagatgtgtgtgtgtattcttatttaattctctcatcacttggggatatcaagggtgcataagattatcaacatcgtacatatgcaaaagccgagtcctgagaggttaatagcgtgatctgcctaaggccccttgggtactagtggcaggatttcttgacttcaagtcactttccactacatccgagactgaggatgacacagccttatccaaaggtggaggtggcctagaaaatgctcaggggagctcccacagccaccccagcgcactcagactcggctgaagacccacagggtagcttctgtctgtcactatgctgccctcgaccactaacctgtgcccgtcggccctccaccttcccagtgcataggccctcccctgccacaccccaaagctctccggataccccagtataacctgcctggctggtgggtccagtacccaagacccctcctccatccctggtgattttggctctggaagggggtcattcacagcctcagggatccagagactctgtgaagacctcccagggaactttatgcttgtacctcagccccagaaattcagaatcaaccagtctggggtgggatctaggctccagtatgtttttttgttgttgttgttgtttgtttttatgagacagagtcttactctgtcacccaggctgcagtgcagtggtgcgatctcggctcactgcaacctctgcctcttgagttcaagtgattctcctgcctcaggctcccacgtagctgggattacaggtgcgtgccaccatgcccagttaatttttgtatttttagtagacatggggtttcaccatgttggccaggctggtctcgaactcctgccctcaggtgatctgcccgcctcggcctcccaaagtgctgggcttacaggaatgagtcaccacgcctggctcagtatgtttttctttttttctttttttttttttttttgagacagagtttcgctctttttgcccaggctggagtgcaatggtgcaatctcagctcactgcaacctccacctcccgggttcaagtgattctcctgcctcagcctcccaagtagctgggattacaggcgcctgccaccatgcccagctaatttttttttttttttttttttagtagagacaaggtttcaccatgttggccaggatggtctcaatctctcgacctcatgatctgcccaccttggcctcccaaagtgctgggattacaggtgtgagccaccacacccaaccaaggcccagtatgtttttcttaactccacaagtgattgtaaattcaacaagaattagagccagtcctaggcaactgattagaaatgcagaacctcaggccccaccccaacctgaagaatcccagtgcgccttcccatttgagaagcactgccctacgccaaaccccgtatccgcaagccaggccctgtgaaaggcccccgcagggaaactggaggtaggagggcacacagtccagatagaattaaagagtggaggccaggaccccccaggtcgcatccacacagcactcagaggtgctaaacgctttccctgtgttccctcatcccatctcagccctgtcctctgaaagtcaggaagacagtctcatgcctgtgtggggaaactgaggctggggcagagcctcaacttgaccagaccatccctcactcctgcatggcccctggttctgcagccagcagatttcctgaccttcatctcagtgtatccttcagggcaggcagggagggagggtgaccatcgccccacgtgacaggtgagggaccagggacccaggtgggggaacacaggcggagccttccataaagccggaccagctccctcaggaagaggacttgggagctggggggtgaagggtcactgctgaccggaggcagctctgccaggcagtgtcatcagtgggcttcacgtttgactgrcaggtattcctttcctctcctcctctctggggcccatcttctgagtaaatccgggacctgccttaacaaaagccaggctgagtcccaggaaaaccctgttgctccrgaaaggcctccttgggccatggaaggaagcctggatttccaccattacactcagaccgcagacccctctctgctgcagaataaacaccctgagagaaggcaggtcatagagcctaccagacaccacaccttgccatggacggtgacaaaccctcacttcaggacagagaggtgatggggggtggggtaaggaggtcacaagcatccctggagaagggtcaagaatgagggggtaaagggacccctgccacccccagcagggaaaggaggagaaggtgacactggccctcctgttgtcctgctggggcagaggcccaggtgtcttcagccaggatccctcccctctccaagctccctgctcttcaggaatgactatgggtccttcacccttgcctgctggagagcactgggttcccagggcctgggatgggatggaggggatcccagttgccagcatggtgggcagggatgtgttcgcagcaggggccccaaccacacacacacagcactggtcatctgacagcccttcccacccgccctgcaggcccacctgcctcayccaacactgctcagcaaaaagcccagcacagccctgagaggaaggcagtgtctgtgcggggacaagggagagagagagggagtggccccttctgtctagcgtggcttcctgcagacagagcgtgcccactgctacccccacccccatcctggcacagctggaccaaggagggcaaaggaggaagcagggagttagagagggggcagctgtgggaccccacattccacctcctaactctgggctctttccttccacaaccacccctcctgccccaggcgggtctcaggccagtcacagacacagcagagagcggggaggtcctttcctcaaagaggaggaactgaggggtggaaggatgagtggggacccaccgggagagagagatgccaggcaggcaggcagcgggcgggcagcagcgggtgttggaggcgactgcagggcagccgggacacgacggcagatgctcgtccctcgtccctctgtccatccagggcggctcctctccgggcggttctgaggccgagcgggcgctgttaaaaagctttttatgtgtgtgtgtgttaatcacatgattgccgttcacctgtatttcgaacaaagacagctcactgtttcaaggccccgaacaagagtctgggcacagggaagagaagggaggcggggggaggagggttggcagcgccgggggtggcgtcgaggaaaactggggggagattgtccaaggccagcaagcgagagaaagagaaaacccttatcaaactcctaattcactgggctccgaggccccagacacactggcccgattgtctggctggttgtgtgtgtgagcatrtgtgtgtgtgtgtgtgtgtgtgtgtgkgtgtgttccagtgtctgctccccccacccccaacatgcctctgcctcgtgtgactacctcattgtgtcccatttcccaccccctacacccctttggactttcccaagcatgaggccttgcctccccagaccctttgcagcccactccagacaggaccccttggggtggtcttggggctttgccctgctgttgaggagctcagaacgtcacatggttgccaatgcgaccccagctccattacataacccacatacaccccacctcggcctcaacaccccggcggggctgccctcagttaagagaacagcactgcgacctttggaggagaggccaaggaaagagagagaaaaaggtgtcaacggaggatgggcaggaaagaaaaggggagggagggagaggtgggcagaggagggaagaggcagggcaagtccccaccccttgttggggtgggggagtagaggacttcgtgacaatcaggactaggactcccctaccctctcccaagacagggtgagcccagtgtggaaggagctgggtcccagtaggtagcaacccaaaatgcctctaagacctactgagagagggcccccaacctgtcccaccttggcctcctggcagctttagtcttgtgtttccaccttgaaccagaccagaacgcgcgtgtgctgggtgtctgcagagaagggaccaggggtcaagctggggctctgcacttctcagagggatccctgagaagtctctcttactgtgcaggatggggcagaaagggctgcctgggaaaaggtaggaggcagggtgaggagctgggcatcagtgcctggcacacactaggcactcaacaggatttcgcagacgaagcagctagggccagccaccctcacgggcccccaggaccctcaccgccttcacgtctctccctagtcccctgccaagtgcccatcctgccacctgaggcagacgttaggagtcctggttgggcccaattttcttccatccaacaggttctgaccctccagcctacatctcttccttcctcggcctaacctcccctccacctcccagactaagcccaagataagcctcagcaagatgggcctgggcagtagggcagggagctgggtgggggggcctgggctccgggtggaggagccctgagtgttggggatgaaggaaagcctggaggctccaccttctgcccttccctccctcctctcccctcccccctctccccctccttccttccccagccctccgcagcggctcaggctcagtcgctcagtcagtctcgggctgtccggccagggtggttggtggtaaggattcaggctccgtcctaacgaggccgtggcctgaggctcagggccccccgcccctccctcccagcccaccagcgtcacctcccagccccgagctggaccgcacaccttgggacacggttttccacttcctaaggacgagccccagactggaggagaggtccgaggaggtgagtgcgcagcctgctcctccctggcccgcccaggcctgggaccctgctgtgaggtggagagaggcgacaccccgcccttgccccccacctggctctcctctaaaccccgttggggcaggctgagggaagaaggaaaggtgagagaaaaggtgggaaattccaggggccgggattagagcaaaataaaggctccgtttttttcttccttatcatcaacaaacctccacccaaaaaaggaggctaaaaaaaaagccacccacaccaagagacggttgggaccaggtggtgggaagacacagaggcgggacgcacccacctagagtctggcatgtgcgtgggccccaggggccagatgggtttagctggagcaggaagggccgccacctcggggctgtgcccacgtcctgtctcgggccgccctcggggctgcgcgcgcggccgctccatcgcgccctccttccatccaggtgggcgttggactctttgcgaggaccccggcggctggcccgggggaggcggccgaggcggcggcggcggcggccgggggcgacatggcggaggagcaggacctatcggaggtggagctgagccccgtgggctcggaggagccccgctgcctgtccccggggagcgcgccctcgctagggcccgacggcggcggcggcggatcgggcctgcgagccagcccggggccaggcgagctgggcaaggtcaagaaggagcagcaggacggcgaggcggacgatgacaagttccccgtgtgcatccgcgaggccgtcagccaggtgctcagcggctamgactggacgctggtgcccatgcccgtgcgcgtcaacggcgccagcaaaagcaagccgcacgtcaagcggcccatgaacgccttcatggtgtgggctcaggcagcgcgcaggaagctcgcggaccagtacccgcacctgcacaacgctgagctcagcaagacgctgggcaagctctggaggtgagcacccgaccgccccccgggctcgggccctctagcttcgggtggattcagggtagccgaggcggcccggcctcctgcacctcagagcgggactgtctggcagtcctccttggatagggctggaagaccaggtgtgggggccgcgcccgcccttccatcacaaggaccctggaactcggaactccagcggcctaggccgggtctccctacggggcggcgggcaggaaggcgccccctcgtggttggaattttgcgggtggcagaccgtggggcctggggctttggagggagggaaggaggccttcactaactcctgcccacagatacgcacactatgccaccagctgctgtggtcaggaggatacgagggaaacgcttggaaagaaccaaagggttggctggagattcagggaaactgaggcagtcagatggagaactcaggggaggtttaaagaaaacggaattcagatgagagtctttggaagagtgagggatgaagaactgcgggacaaatctgctgctgcgggacctcatcctatcctagggctcttccctgggactttctgacgccaccctcctttgagttgggggcttcttcatcctcctagggagaggacacacagtaaggggctccccctcctgccctgccccagagtcaccaagctgatctctttcctccctctcccagttcggcgccatcttccctgccagggccccaccccaacgttgagcaacctcttccccactgccccagagctggagctgagcactctggccagaaggaaaccttggcctccttcctgcccaggggccctcagagtcccaggttccctgggaccagcccacacctctaggaaaaacatcccccgcagggagcaattatcccaccctcgactcaggtctggggttcagccaggcctcctggggatgtgtggaacaagacagtcccccactcccacccgggagtgccagagcagctctgaaagagaccagggactccaggagatgtgagccggtagcagtcacctgattctcgctagactgaccaagagacaggcccagaaaggcaaaggaatcacaaaggtcacatagaagttggtagcagagccagggccagaacccaggactcccatactctctgtccagaggacttcccctgaccctggtgacagtggtggatcacctacactttgaggagtggtcaggaggttggggggaagcaagaagatgagaacaagagtgaggagcatctgggttccagaaaattagggcttygtcagaggagcccggctctcttccgctgccctcccccttgccagccacagttgggtagagattgggtctagaggcttagagtggtagaaggtgcaggaggatctccaagagaccaaaagattcacatcccgccccctggcctgttcttgccatgtgtttgctgaagacctggtgccccttcccctgccccttctcagccctcagtgccctgctcacccagggcaggcccagggctcagygaccagcccgctgtgtggacccagacagcccagttctgcccaagagcagaggtcacagctagctcctccacccaaggtccatccagatctgggtggggcttggcccaggccagtatctttagtgccaggggacaaagagcaagtgagaaacagacaaccaggagagacatacagatagggcagactctggggaccatgagaagaccacagtacgagcccaacgagagtcaaagcaaggacggacctcattttccctccatctcccattgccaagggtttaagattggctcctccattgtccctgtccccaggttcccccagcccagaaccctgggcttggactcccttcaggaggacttattcttggccatcactcaagctgtgtgcacaggggccagcctgaggtgtggcagtcaggaaaactggcactacttgctgaggacccaatcccaatgggaggatggggccagaaccatggcaaggatcaaaggcaatgccaacagagggtggctccctggaccctggaggggggtcctgagagacatttggatttgggctgggctggccaattgctccaggggcttctcctgaaacctccccragctgtgactcctgggatgtcaagaagtggggtggttaggtaggcagagctggaaaacaggtgtcttaaaaccaaaaagagaaagatacacacagactgtgtggagtgccccaagggagtgtgggatcagacacactggagcccaggtcctaaggggccgtgtcagccccaacagtcattctaacctttgatgcccatctggggaggggctagttgaggctgatcacagggtggtgcctgtgggttggctgatctgcctggaaagaaccagagccaagaaactggaaaggcggacacaggcaagagtccctcctgtgtggtgggggtcacccagcctctgttcccagtgccacaggccccttccccaagtagtcttcttatgcccctggcctagcaggacacaggtagcagcaatcagtgccccactgtgggaggtccccggttggggtttccagtttgggtgagsaatcagcctacctcttcttgcccccattccaaacctgggagaccagggagaaagagggctgacaggaaggtgcagatgaggactgggtttggagttagagctggaggcgaagttgggggtttggggctggtaatgttgagtggggactggtgctggagattgggtttacatggtgggcaggctgggcttggggttggggtggaggtggaatcagctgtccggcacagctggtggaggagggagctggggtcggggatggcagtggccccaggcttagatttctgtcagggttaggctaatgctgggaactagcttaggaggtagcagcggaatccgatgttggaatcctctctctcttctggcccctgtcactttcttgctgatgctggctgccagctgggcagggggcaagggaaggataggtgaaagagtgagctctgtgtcccatgtccccagccatcccagaagcccctctgttggggtccactgctggcggagcagctctctcctctgtgggttctccccagtcacaccctcaaggcctgctccaccccctcccctggtcccagccgtcagagagggtgcccacatcccactccctgactctcaaggccctgctccggcatctttgtcctaagtgtgtacactgactctgacagagtctcggctggagggaccctctgagaaagctggggctagggctgggctcagggccggggtggggggagtagacagggaggctaagccgcagaggaatgctgctgccggctaggaggtgcctggcatgaccacccccgcccagcctggggagggagggctcggccttctgctgactgggggaagagggcactcactggggtgtgaggggtggggcagctgaagagacaagccctctggactgacagacaaggctgctcccacaaagactcatggattctcastaccaaggtctgggattctagaatctggactttcccctcgaccccctctgtaaggtaccccatcctgccctcctcaccctggggcagccaaaccctaaatgccctccaccctccaaccctggcctaaggctggagtcggtggcaagggcgctggcttcagggcttcttctctccatgtgttggtttcagggactgttccagggtctgaggagaggctagcttcctctactctctgctattttctggacaaggatataggatcccccacaggaggcagtaccccccacccagacccatggtaaagaggagccacatctgccccctcagtcccaccacactggaattcacacaatcaggacccagagttaagagtccaaccctagatcctcctgtccaaccacccccgcaagcagcattagaaaagcacctcttggggccgggcacggtggctcatgcctataatctcagcactttgggaggccaaggcgggtggatcacctgaggtcaggagttggagaccagcctggccaatatggtgaaacctcgtctctactaaaaatacaaaaattagccaggcatggtggtgcgtgcctgtagtcccagctacccgggaggctgargcaggagaatcgcttgaactcaggaagccgagattgcagtgagctgagaccgcatcacggcactccagcctgggcgacagagtgagactctgtctctaaataaataaaaaattaaaaatagaaaagtacctcttgggctgggcacaatggctcatgcctgtaatcccagcactttggaaggccaaggcaggcggatcaactaaggtcaggagttggagaccagcctggtcaacatggtgaaaccccatctctactaaaaatacaaaaattaaccgggcgtggtggcgcatgcttgtaatcccagctacttgggaggctgaggcacaagaatcacttgaacctgggaggcagaggttgcagtgagctgagatcataccactgagctctagcatgggtgacagagtgagattccctcacagaaaaaaaaaagaaagaaagaaaagcacctcttcctcaaggtgctcagcccgcttcccaggccctggtgcaaggcatctcacatccattattctggccaatcccacacccaagttaagccaatgttatcatccttttataggtgaagaaactcaggctcagagaagtaatttgctcaaggtcacacacacagctagtaagtagcagagactgagttctcccccagccatgctgcttctattgcccaccctcagtcccagggagctcacccccactgaagtagccaattccacttgcagacagctttgatgatgagaaagtttttcctttccttgaactggcatctgccccttgaaacctctactcctacttctaactcctcctcaggggctgccaggagcagcgggctgacccctctctcaccctccagcccatgaaagatttgggggcagccctctgaggctgttattccttgggcctcacatctctcagtccacaaatcatagggcacagcccccaccccgggtcctgtcctctgggtgccccatcccagggcctcacatcttccaagatggacactcagagggaggccaacctggagtgctctggcattcacgccagcccctctgctgtcctctccgcctcccaccacaccccaggctgctgaacgaaagtgacaagcgccccttcatcgaggaggctgagcggctccgtatgcagcacaagaaagaccacccggactacaagtaccagcccaggcggcggaagaacgggaaggccgcccagggcgaggcgkagtgccccggtggggaggccgagcaaggtgggaccgccgccatccaggcccactasaagagcgcccacttggaccaccggcacccaggagagggctcccccatgtcagatgggaaccccgagcacccctcaggtgagtgctgatgacagagctgagggtggggcaaggccagtcagtggagacaggagatggctggatggcaatgagaccctggactctagggagagcgtgccaggctgtgcagttgccccagcagagctgcaggggcccagagggagctccatgggggttccggtgccaggggaagtggctgggtgagatggctctggccagggctgatcctactgggcaaagagggccagttaaagactgtggaggccgccgggtgtggtggctcacacctgtaatcccagcactttgggaggccgaggagggcagatcacgaggtcaggagatcgagaccatcctggctaacatggtgaaatcccatctctactaaaaataaaaaaaattagctgggcgtggtggcgagcacctgtagtcccagctactcaggaggctgaggcaggaggatggcgtgaacccaggaggcggagcttgcagtgagccgggatcgcgccactgcactccagcctgggcgacagagcgagactctgtctcaaagagaaagaaaaaaaaaaagactctgtggaggtcatggagtgagaggtggctggggcagttacaagtaaagggggagaagacaggatggttttgagaaatggaagagcaaatggaggagaggaaatcactgcctctttcccaccagccattcttttttttttttttctggagacagagtctcactctgtcgcccaggctagactgcagtggcatgatctcggtgcactgcaaccttttcctcccgggttcaagcaattctcctgtctcagcctcccaagtagctgggactacaggtgcacaccgccacgtctggctcattttgtgtattttagcagagacagggtttcactatattgcccaggcccagtctcaaactcctgagctcaggcaatctgcccgcctcggcctcccaaatcccaccagccattctgacagaggagacatggcatgtgataccgtgtctggccatggatgggccagacataagctatcttgtttaattttcattaatgataataacagctaaccttaattgagcagctactctgttccaggcactgtgctaggtgctagttgccttatgtatactaactcaatccttgcaaacaatgtgatgaggtacccaaactgcctgggctcagatctcagctgtggcaagttactctcattttactgatgagaaacaaacaggaacttccccagtttggctcccgggcatctgcttggcaccacagctgccttgcctgtgttcctaatgtacagaaagtgacacacacaggtctgccacatgggaagtgctcagtgagcagagctctgccttcagaggacacgctctgagtcctactttgtgtcaaacactggagtggacaccaggggtactaaccagagaagcctacagtccctggcctcaggggcccatagtctagagagaggagcagggatgaaaacgagtgaattaagtacaggaagaaacaaagctaggcatggtggaatgcgcccgcagtcccagctacacaggaggctgaggtgggaggatcacctgagcccatgagtttgagaccagcatgggcaatgtagtaagactctgtcttttttttgtttttgtttttgtttgagatggagtcttgctctgttgcccaggctgcagtgcagcggtgccatcttggttcactgcaacgtctgcctcctgggtttaagcgattcttgtgcctcagcctcctaagtagctgggattacagatgcacgccaccacacccagctaattattgtatttttagtagagatggtttttcaccgtgttggccaggctggtctcgaattcctgacctcagcctcccaaagtgctgggattacaggcatgacccagcacgcccagcctcctatctcttactatatatatagtatatatakagagagagaaacaagtgcacaagaagtctgtgtgagatccagaggtggcatggccgtctatcccatccagtcaggtctccaagaacaccccactgcccaccagactcttgtcaaggaaggcttccagaaagaggcaatgcctgggctgcttggtacaatctctattttactgataaggaaactagttaagagaagactggggatttgtccagacacagaaccaggattcaaaagcctaggcaggtctcttgaagtacagagcccttggccaatgcaggacttggcgctgcctctggtctgatgaaggaggcacaggcctgtccttggggagctcctagtctcttaagaccatggacatgttctgtctccattgggatgccaggcagtcatccctcccacacacgtgtacatactcttcaccttcaaagattcagggacacacacacacacatcaggagaccctggaccacatacagagcaaccacctcagaatgaaactggacacagactttttctcacccttcaaggccccacccsactcagacatccttccctgatcaaaccttccccaaatccctgaggcagcgggtggactcctcctctgrtctcccaagtccttgcatattgtcaccacagcacttccaactctgggtgcatgtggatctatggatctatgactagactatgagcttttgggaacagggatccattttatttacattagtatccccagcacctggcacagtacctggcattttgtaatgctccctaagagtttgctaaattaatatgtgaataggaaagtgaacagacaaaggaacaaggaccagttttctaagtgccctcccatggaggaaggcagctcaaagaacaacagggcaacacaggccagcrtatgacggggctaagggcttgccagtgggctgggaagcagggtgggctcaggaggagggaagggttggaaaggacacaacatgaggccaggacagggagcaggcccaggcaaccagcaaaggtgaaacagagcactcaggagcctgggcgagcgaggctcagcaaggaagacagtaggcatgggtgtggaagcggggctggcagagcgcaaaggctgggccagaccacctggacagcagagaagctgatgagaggaagaactttccacaggaaaggttttttcagaatgaggcaggcctccccaggacccatccctaagatttgagaatttcataaacaactagagatcaatctaagacaccagtatttaaacaaatgctgtggggcgcagtggctcatgatggtaatcccagcactttgggaggccgaggcaggtggatcacctgaggtcaggagttcaagacaaccctggccaacatggtgaaaccccgtctctactaaaaatacacaaattagctgggcattgtggtgggcgcttgtaattccagctactcaggaggctgaggcaggagaatcatttgaacccaggaggcagaggttgcagtgagccgagatggcgccactgcactccagtctgggcaacaagagcgaaactccatctcaaaaaaaaaaaacaaaaaaaaacccgactcatgctgccaaaatgtgaaacttacaaggttttcccagaggcacccgctgcctgaaggtgaaccatggaagttcacgtgcgcccacctgcctctaacctgcttcccccttgcgctctctctctctgtctcccttctacccaggcyagagccatggcccacccacccctccaaccaccccgaagacagagctgyagtmgggcaaggcagacccgaagcgggacgggcgctccatgggggagggcgggaagcctcacatcgacttcggcaacgtggacattggtgagatcagccacgaggtaatgtccaacatggagacctttgatgtggctgagttggaccagtacctgccgcccaatgggcacccaggccaygtgagcagctamtcagcagccggctatgggctgggcagtgccctggccgtggccagtggacactccgcctggatctccaagccaccaggcgtggctctgcccacggtctcaccacctggtgtggatgccaaagcccaggtgaagacagagaccgcggggccccaggggcccccacactacaccgacyagccatccacctcayagatcgcctacacctccctcagcctgccccactatggctcagccttcccctccatctcccgcccccagtttgactactctgaccatcagccctcaggaccctattatggccactcgggccaggcctctggcctctactcggccttctcctatatggggccctcgcagcggcccctctacacggccatctctgaccccagcccctcagggccccagtcccacagccccacacactgggagcagccagtatatacgacactgtcccggccctaaagggggccctgtcgccaccaccccccgcccagcccctgcccccagcctgtgtgccctgttccttgcccacctcaggcctggtggtggcagtggaggaggctgaggaggctgaagaggctgacaggtcggggggctttctgtctggctcactgccctgatgacccacccgccccatccaggctccagcagcaaagccccaggagaacaggctggacagaggagaaggaggttgactgttgcacccacactgaaagatgaggggctgcaccttcccccaggaatgaccctctatcccaggacctgagaagggcctgctcaccctcctcggggaggggaagcaccagggttggtggcatcggaggccttaccactcctatgactcctgttttctctctcacagatagtgagggtctgacatgcccatgccacctatgccacagtgcctaagggctaggccacccagagactgtgcccrgagctggccgtgtctcccactcaggggctgagagtagctttgaggagcctcattggggagtggggggttcgagggacttagtggagttctcatcccttcaatgccccctccctttctgaaggcaggaaggagttggcacagaggccccctgatccaattctgtgccaataacctcattctttgtctgagaaacagcccccagtcctcctccactacaacctccatgaccttgagacgcatcccaggaggtgacgaggcaggggctccaggaaaggaatcagagacaattcacagagcctccctccctgggctccttgccagctccctcttcccttactaggctctatggcccctgctcagtcagccccactccctgggcttcccagagagtgacagctgctcaggccctaacccttggctccaggagacacagggcccagcacccaggttgctgtcggcaggctgaagacactagaatcctgacctgtacattctgcccttgcctcttaccccttgcctcccagtggtatttgaataaagtatgtagctatatctgcccctattttcctgttctgcagccccccaaatccacatgtaactcattactgtctcctgttatttatctcagtagtcccctctcctagccactctagcccctattaactctgcattaagcattccacataataaaattaaaggttccggttacctgcttggtgagcctgacctggcctgtctcttcatctcttatccctgtactggtgcttcctcaaatgctttctggaagtagctaggagtagaatgcaaaggatagatcatcaaaggtctctctctcccacctccctccctctttccccacccccttcccctcccccctcctctctctctcccccctcccttctctcctctctttctctctctctctcccccctccccctctcctttctctctctctcccccctcccactctcctctctctctttctgtctctctccctgctaagaaagtgggaacaatggagagtgttaggacagctggcatcccagtggggtccatctgagctcagggactgaagcctcagatgggaacttctccccagcccggcggctatgccccacactgcaggggggccactcactcttaactggctcagctagaactcactgccttgcaagcagcccctctgctcacccagcactcagcagacgggagtttgcaaagaattcaagagacaggtatctgaagaggaggaggtgggctgagggtgacaccgtgctgcctgcagtcagaggcctgtccttcaggatgtgtggataggccctgtgttgctgcatccccccacttgccacctcccccagcacacacacagcagcccacgccaggatctagccaagccttcacagcaggtgcccatgtccaagtccagaccaaggatgtcagacagtctactccttaagcgcctactccctaagagctctttcctcagcagaagtccaaactgcacccagaggccaggaccactccacctcacaagcacacaactccaaagactctttgccatcttgctccactgatgaacaactccgatggttggaagttcttcctcatacccagctcataacagcttatatccagctgccatttactaagtgctccaccaagggttttatgtcattcaggccagtgaaggggtaggtccgatcgttatctcaattttccagatggggaaactgaagtttgcgaggctgatgctaagaagtgctggtgccagaatctgaacccagctctgactccaaggcttgcatttttaaccatcatcccctccacctgcctgtggtttgcagcccctgcttctgctttgtatctggagcaatgcatcttccactgctccagactgggcatcctcagctcccttccttccatctgcggtctccagcccctagtcaggaccaggggagaggcagggcaccaagaagtagcccagtccccagggtggccaaaatccctccatctaggacctgcatcatggaagctcttcaagcaacctccccaaaactgctggttcccgtgaagctggatggtaaccgaaaccccgatcttttagacaatatccattgcaaagtcatatccaaattgtatgtatgctgtttttgttttgttttagataaaagcaggactttacactgatctttaacagatctcaccttgttgggtttgacccatttccccacctgtattaaactttttagaacttagctctcctttagagctttatgtatctgcaaacttgaatagcctcattcaagtcactaataaaggtcgaaatgaagagggacacctgtgtacagcattaaacgcctctctccactgtcagtcctattatctccactctttttttttttttttttttttttttagatggagtcttgctctgttgccaggctggagtgcaatgttgcaatcttggctccctgcaacttctgtctcctgggttcaagtgcttcccctgcctcagcctcccgagtagctgggactacaggtgtgcaccaccacgcccagctaattttttttttttttttttaagtagagacagggtttcaccatgttgtctaggatggtctcaatctcctgacctcatgatccgcttgcctcggcctcctaaagtgctgggattacaggcgtaagccaccgcacctggcctattatctccactctttttttttttttgagacggagtctctctctgtcgcccaggctggagtgcagtagcgggatctcggctcactgcaagctccgcctcccgggttcacgccattctcccgcctcagcctcccgagtagctgggattacaggcgcccgccaccacacctggctaattttttgtattttttagtacagacggggtttcactgtgttagccaggatggtcttgatctcctgacctcgtgatctgccaacctcagcctcccaaagtgctgggattacaggtgtgagccaccacgcccagctattatctccactcttgaggctgtctaatcagttctaaaactgtctaattacatcaccatgaagcacacacttctctgtcacagtggcatggagactactgatgccttgtcaaaatcaagattcactgatctctggcattctctcaacctactggaccagtaaccatcgaaaaaaaaacttatttggcaatattggttcttagacaccctatgctagtgcccgatctcctctttattatataagcacttttaaacatggagggacctattctagaattttgtcatggatcaatcagtactaaccttatgtgtttataatctttacaacccaccctttccccttcattgaaaggcaggacttttgtccatttgtggtctgttcactactcctgctcgccgtgggatgagggatatggagctggcacagtggggagcagggggcacatccggaagatgacactatcacctccaagaccccacatctcatgagagtgagtgggaaatcactgaggatgtggaaggaggggaaatgaccccaaggaagtcagaagacctgggttgtgtgcatcccttagaccaaaggttccaagtgtgcacaggcctcaggaaggcaggagctccacttgttaaaaaagggtcaggtgtttctggaaatgactcaagagactatgcccaaaccctaagaaaacagaaccaatagtggtgaccgggacattttattcaagagaagtcaaaagccaggcccagacagctgaatagcaggggactccccaaaagaggagaatgggaagaggaagacaggaggaaaaacaccccttctgtcccatttcccttgcactctatcccctaagggttaacccccaattcccctcctccccagcccaaaccccatctccctttaatcacatctgatactgagcagcccagcagggaacaaagagaccatttagagaaatggggccgagaaagtgacccccgcactctggggcggctgcctggatgccagcacaaaggcggcatttcagagctgaaatttcagcacccaacttgattaaaggattccacaggcttggaggagggtggatgggggtgtgaagtccactgctccctgaattaacccttctccagggcagcggacacccctcccaccaatgcagatcctcaccattcactccccacatcccatcccagggccaggctgcacctaggcctggaggccctgcctcctgcagaggttagggaagcccagctcctcctctttgaaggggagctggcagtggaatggaggttaaggctggcatattcagggagccagtttaccctctatccctgttcatgtcaatatacaccctccccctgaccccctctaggagggaggagccagtgtgactggtcttacctcaggttgggtaagcagggtggagaaaggaagaggacccattagaacctcaggcagaggaagggggaactccagctctgacttaatgtaacacctggaacccaggagcaccaccaccccagcaccatgtccccaaggcctcaggggatcaccagccccaaataggagggaaaggatatcttatagaggctaggaagaaggcatgggtgtggcacaccaaagaggtgggccacagaggacagcgtgtgggcagagtcctgaggaggagtggggacagagccatgggggcaggggtaggcaggtgctcggtccttgctccagctgctgacttgcccagcagggctctgcctggggagggtgggagatcagcacacccccacgcttcctgctggggcactgctcctgaaaggggatccgagcccacgataagaggctcgaagcaggtccttaggaaacaatgggtggcttgatgagacctgctctgtgatactcctgagaagggagaagcccctgcagccagtccccactggaaaggaaattgggggtttccgtggcaaccagctccctgggcacaaagacttgtctgtctgcttggaaggcagctgaggtgtctcccctgcagcagcctttgctctggggaacagggagatggagggaaggatgtgggggatccaaaggggctaagggcccctggtgcttcttaaggagctgacagtcacagggccactggaataggtgcatgctccacgcagcatggcggtaacggggaagcaacaggtggtgacattgcagataagcagaggggaagggggttggaaagttgaatattttattatttacacatataaagtgagaatgaaaattgggcatggggcaagggcaggaagatgactccagctcagtcggtgatgatgagctcgtccaccccccagtcttcatagctcccatctggcaggtaacggcgaatgatgatggggatctttcgggccctgtggcaggggagaagtcacaagtacatgagggctggtgaccccagctctgccgcagaaggaacagattgtgtgcaaaacacaagcaaagagaagtcttaggagcagcctcttggggctgatgagtgtactttgtaagaaagcaattacaagaaaaagaaagtttttatatcagacaagagggggaagaatgacagaatattggtaaggcctcctgcagcaggaacagggaaattccaacagccagaagacgtccatgtctcatcagtgccctcccactttccctgcctcctcttctctcttcctcctacttcctggtgagctgttcctaaggatctgtaggaataagcatcaacttctccagccaggcaagtgggagcaaagggtgcaacagagagcccaacagatgcctcccagagatttggagaagtgaaccatgatttgagtgacttacttgagttccttcatggcaatgagcagaggatctgtctccccctccagctccaccatcacaggggcacacatcctgtagggatagggacaggtgttagggagactacaaacccagggagaagggcccaacaggcagtgagggtggaacggcatcctggtccccacctagaaacgtcatcttctaggtaggcaggcacagtagggagtggtgtgtaggggcactgccagagatcttccctggcagaggcctatcacagactccggagtccagcggccacagcagaatgtcctggtggaaagggagacatgtgcaaaggcacaccattctaactgctccaaccccagagccttgcctcagtgcccagtgcacctcatttcaatttctattttctctctctactttttggagacaaggtttcactcccattgcccagactggagtgcaatggggagatcgtggctcactgcaacctccacctcccaggctcaagcaattctcctgcttgggactacaggcatacaccaccagctatgctaatttttttattttttgtatagatgggtgaaattaacatttcgccatgttgcccaggctggtctcgaactcctgggctcaagcaatccgcctgcctcagccttccagattgctgggatgaaaggcatgagccaccatgcccggcatcatttccattctctatagacacaacacctcagtagaggccctgcccttcctgcccagccctccccacccttcacctgaggccagcagtcagggggctcacctgcttacaacactgtcatgactccccttggctatcaggccagagtgcagtctggtccctgtttgccttcctagcacagtcccgtgctactttcctgtatttactccacattccagccataccaaactatttctggttccctagatgcgccatgttgtttcccttttgtgtgctcttacaagctcttcctctccctaaaaacctgcgagaggttcagatgtctccaccctggaaat

SEQ ID NO: 98241 - DNA, 20202 bp, Homo sapiens
tactcgggaggctgaggcaggagaatggcttgaaccggggaggcagaggttgcagtgagccaagatcgtgccattgcactccagcctgagcaacaagagtgaaactccatctcaaaaaaaaaaaaaaaaagaaaaagaaatggccgggtgtggtggctcacacctgtaatcccagcactttgggaggctgaagcaggtggatcacttgaagtcaggagtttgagaccagcctggccaacatggtgaaaccccatctctactaaaaatgcaaaaaattagcagggcatggtggcgcacgcctgtaatctcagctactcaggagaccaagacaggagaatcccatgaacccaggaggcggaggtcacagtgagccaagatcatgccatcgcactccagcctgagcgacagagcgagacttctcaacaacaataacaaaaaaaaacaaggctaggtggcgcacacttgtaatcccagcactttgggaggccgaggtgggcagaagatcgcttgagaccaggagttcaagaacaacatgacaaaaccccgtctctactacaaaaaaacaacaacaaaaaaatctgggcatggtggtgtgtgcctataatcccagctactccagaggctgaggcaggataattgcttgaactttggaggtggaggctgcagtgagccaagatcgcaccactgcactccagcctgggcgacagagtgagactccatctcaagaaaaaaaaccacatggaggccctgagctgaggcagaggtcaggccctatgtcccacctcccatcctggccctacctaccaggcaggtggggctccctcctggtccctagaggaacatggactctgtcacagggtcacaaagcagccaggggctcagtggatgcagaccccaaccaatgccagaagcatcttctgggaggggtgcgtggcatggggacagagtgatagagagcgagtgctgggaggatccggactccacctggcagctggagactcctcaggattccatgagacttctgggaggtggctaagtctgccccatcctctccttccctctgcaggacagagtctgaggtgcctcccagaccagcctcccccaaggtcaccaggagtcccccggagacagctgccccagtggaggacatggctcggaggagtgagttggctgtgggaggggaggaggggacagagggtgggcggggagaggggacaggcagtcccaggtcctcctatctttttaggcagccaggggaggccaggagtcaaggtgataaagagcccaggtcttgccacctggcactctgggtttagatttgaccttgggcaggtgagttcacctgtctgagcctcaccttcctcctctgtgtaatgggacagtgtctgcacttaccttatggggctgcatggagcctgcagtggtgctgcaggaagagtgcctggccctggcacacagcacgtgcccactaagggggagccggcgtgagtactggggtactggagtcccgtccctccagaagcccagaggtcacagactacagtggaaggagggagtcttcaaagggcagtgaaggggctgggcacagtggctcacacatgtaaacccagcactttgggaggctgaggcgggtggatcacttgaggccaggagttcaagaccagcctggccaacatggtgaaacctcacctctactaaaaatacaaaaattagctgggcatggttgcgggtgcctatcatcccagatacttaggaggctgaggcaggagaatcacttgaacccgggaggcagaagctgcagtgagcaaagatcacgccactgcactccagcctgggtgacaagaatgagactctgtctcaaaaaaaaaaaaagaaaaaaggcagtggcagtgaaggagaggaggtggcaggggtgggaagaaaccaggggcctccttctgagcccctctggcacactcacctgtcagtttggcccagagctgaccaggtgagagagtgactgacactcagtggaggcaatgagcagtggacagccaggaataggcggaacagctctgggagcctcgtgaccagggctggtaggtagtctacagtaaaataaaaatgaacaagataggccggggacagtggcttacacctgtcatcccagcactttgagagaccgaggcaggaggctagcttgagccctggagttcaagaccagcctggacaacacagcgagaccctgtctcaaaatttaagaacttttaaaaattcaaaataaatgggcaagataatttcagagaacaaaaagtcctgcgaagaaaatacatctggaaaatgtgacggagcagctggggtggggcatggggtgggactctaactagggtgctcggggagggcctccaagggggcaaagggcacaaggagaggcctagacgatgaggagccagccgcagaaacggtgttcccggcagagggaacagcagatgcaaaggttgtgagggggcacggagcttggtggattcaccacaggccacgtggacactcagcctccctcaccctttccttcctcaacagccaagcgcccggcgccagcccggcccaccatgccgcccccccaggtctccggctcccgctcctcccctccagccccrcccttgccccctggctctggcagccctgggaccccccaagccctgccccgacgtctggttggcagcagcctccgagcccccacagtgccacccccgttaccccccacaccccctcagcctgcccggcgccaaagccggcgttcaccagcctcccccagcccggcctccccaggtccagcctcccccagcccagtctctttgagtaaccctgcacaggtggacctgggggctgccacagcagagggaggagcccctgaggctatcagtggggtccccactcccccagctatcccccctcagccccgccccaggagccttgcctcagagaccaactgagtggctggtttctccctaagcagccctcagcaccccctccctccccacctggccctcccaggacagctctcgccccccacaaaggggcatgggcctccagcctttgcccacaagtgcctcagtgcccactgggtcggcccccatggccaggagggctcaggacaatcctctatttcctgaccttttcctcgtccaccctgggcttggggacccccccaccggactctccactctccggcaggtcctaggggagccaccggaaggaaggagaggtttgcctgctcctacgggactgattcttctcttgccgacatgttttttgtaaggctggtaaataaattattttggacaaaactggagcagctgcccaaatgatagttttattttctgtccttgaaataaagaagccaattttataaaggggaaaacaatacatattctttgcctcctttcttcctgtctgaagtgagatcacagcagacatttttagagctttctctgcactacatgctgtgctgttctgtggatgatttccacttaatcttctcctactgcaggaaataccattacctcttagcagtgaggagactgaggcccagacagaagtgacctgccaaggtcacacggcagtcaggcaggggcctgggattagagcctaggtctgactccaaagcctggcttgtccctcacattctgggcaatttacttaacttcttggtatcccttttcctcatttgtgaaactttataacaattccctccacagaggtattgctctccattgaaaaccaaagcaccacccttggcccacagaagcccctaccgctcccactgtttcctggacccctcactctccttccgggaggaggctgggaagcctccccaaggagcagggatggatctgtcctcaaaccttccctaaatctgctctgtgccaggccctgagctagctccaagacttaaccctacacccaaagagttcccaaacagacaggcagaagcaaccattagaatcaagtgtctggccaggcacggtgtctcatgcctataatcccagcactgggagcctgaggcaggaggatcacttgagcccaggagttctagaccagcctggacaacatagtgagaccctgtctctacaaaaaaaaaaattttaattaactgggtgtagtggcgtgtgcctgtagtctcagcaactaggaaggctgaggcaggaggatcgcttgagcccaggagttggaggcttcagtgagcagtgatcatgccactgcactccagcctgggtgacggtgtaagaccctgtctcaaaaacaaaaaaaatcaagtgtcattgcactgggagcccatattagccaagttaggggtggccatataacctagactcatggtatggggtgggtggttaagaacggcttcctggagaaggtgatatttaagggaagtctttcaggagctgacctgaaggtgaattttgtttatttttatttattttatttattttttattttttgtttatttttttttgagatggagtctcgctctgttgcccaggctggagtgcattggcacgatctcaggtcgctgcaagctccgcctcctgggttcaagcaattctcctgcctcagcctcccgagtagctgggactacaggcacccgccaccacgcctagctaatttttttctttttttttttttttttttttgtatttttagtagagacggggtttcaccgtagccaggatggtctcgatctcctgacctcgtgatccgcccacctcagcctcccaaagtgctgggattacaggcgtgagccaccgagcccggccctgaaggtgaaatttttaaaggaaaaaggaacattcaggccaaggagactatctatgcaaaggccaggagcaaaaggcttagggcacttggggaataggagctagttgagcttccaaggttgggtacaaggtacagtttttcccaagtcgttggagctccagttgctcctgggggtcacagccttatctgaagttggcagacaacttcaaaactgtgacaccacagctcacaattcattcatccccacactgcagaccagtggctcctcaaaggtcccaagacctgtggttgcttccagatcacaaggcctcctccctaagacagggacccagccaacctgggtcaccccattactattctgggcaattggccacgaccattctggatcctgccctcccggggcgtgctgcagtgacagcctaccagcctctagcccagtgcttccctaccctatcctagctcacggtagaatccctggaattaaaccaactaaccaacaaaccaaaaaatgcccagtcttcacccaaaacacttacatgaggatctgtcctgctacacatcggtgatttcaaaagcatttgtcaagacattgaactgtacatttaagatctatgcattttactatatgtaaatgatatctgaaaataagttcccaggggactctaacgcagtgtgaagaactactggtctagaccgagggctccagcacccaagaagacaccatgtgcctcgtaccccatcgtacacacacgtttcttgggacttcgctctgaactggagcgtccacgattcagggggcaatgagattcgacccaaaggcagttcatttaacatctgtttttctcccagcaaccagctcgcctaagcttctgattggctggagggcacggggcctttcgcttcgcgttttgtttgtagattcttattggttaagaagagcgtcagtctcccaccgcgtaagagtgtagtcggcgttgaaactcggcggcgactggtccagcagaaccagggacggggagaaggatcaagctagctcttcattggtcccttcccctcggtgttggccacgaatccgcccctctctccaagttccgttagctcgcggcttcgctcctctcccagactctcgcccccattggctgcaggccacgccgtcgccccgccccccggtccttccagcgcgccaattggcggctgcgtggaacgtgccagggagagcgcgccgtgcccgcggagagagcgcggcgcgggaggccggcggccggccggctgcatggcgcgctgcgagaggctgcgcggagcggccctgcgcgacgtgctgggccgggcgcagggggtcctgttcgactgtgacggggtgctgtggaacggcgagcgcgccgtgccgggcgccccggagctgctggagcggctggcgcgggccggcaaggcggctctgtttgtgagcaacaacagccggcgcgcgcggcccgagctggccctgcgcttcgcgcgcctcggcttcggggggctgcgcgccgagcagctcttcagctccgcgctgtgcgccgcgcgcctgctgcgccagcgcctgcccgggcctccggacgcgccgggcgccgtgttcgtgctgggcggcgaggggctgcgcgccgagctgcgcgccgcggggctgcgcctggccggggacccgagcgcgggggacggcgcggccccgcgcgtgcgcgccgtgcttgtgggctacgacgagcacttctccttcgccaagctgagggaggcgtgcgcgcacctgcgcgaccccgagtgcctactcgtggccaccgaccgtgacccatggcacccgctgagcgacggcagccggacccctggtgagcgcgggaatggcggggaaactgagatgggggcgacctgcgcattcgcctccacgcctaagggtgaggggcggggaagaggcgtctccaggtggcaggtggggaacaggagagtgcgagggaggcccagggtgctttggtgtggggggcggttgatccctgtagccgtcatcctgtgaggcgcagcagtgtggtccctgttggacagatgaggaaactgaggccctttgtaacttagggagttgggcggaattctgccctacccaccatcggggtggggttggagaggaagcctgggaggattgtccccctgtgtgagggttgaaacaccattcccagaggcagggtgtaggcaggtgtgtggggagcaaaggcggtggagtttgacctcagttccaggtccagctccagcttcacagctgtgtaatcgtgttcagttacataacctccaagcatctctgcctgggtgagaaatggcagtgctcagcatgcccggtgacggtgatcagggtgagtgcctggcacatagtaggtgttcagatgatgtaagttgtagccagagtcccccatgttacagagaacttaatgaaacagctttgtgtgtgttcttctttggtttccaaattactctggagatggaagttattgtcccatttctcaagtaaagagactgaggcagccggatgcagtggcaacagcctgtagtcccagctactcgagaggctgaggcgggaggattgcttgagcctaggaggtcaaggctgtakcktgctatcattgcatctgtgaaaagccactgtacttcagcatgggcaacatagtgagaccttatctctaaaagaagaggaaagaaactgagactaagagaagggaagtgagctgcccaagaacagatatagtgagcccctccacctcctgtgtccccacacacctgcctccatcctgcctctgggaattggtgtttcagccctcacaagtagggacagtcctcgcaggcttcccctccaaccctccaaccgcaccccaatgatgggtggggcagaattctgccagcaactctctggcagagtgatagagcgcgggaacctgaatttggcctttgtgacaccgacctccagggcagtcttcactgctgtcatcttgcgagttcagccctgcaggggaggcagaagcaaaaggaggctcctccattgtggagggtttgcgttagacaagagcaggtggcagcagaggctaattggcagtggtcagtgtgtgtggacaggttaatagcccagtcagtatactggggccgtggacagatctctgtcactccgtctctgttggccactgacccggacagtcattgatattaaatcctgggggtacaggatggtattgagtggagagaagtagacacaggattatggtggggtggtgagcagggcctagtgccaggggcacctaggaagacttcctggaggaggcatgaygcagggcagtgataatacaccaggagatgtaaacccagtgttatggcatggcagagagggattctgtagtccttggcctctcctggctgtgctgcacacctgcttggtatgtgggcgggctcacctcagcctcagtttccctataagtctgtgttgagggctctctggtcagggctgtcagcggcagcagctcctgcctgccttaggctatgctatgaaaagtttttcccaggaggcctcaaggctcaggttaaggctgtgggttaagaggttccccagggctcaggaaggctggttgtcaaggagctagggagaaaccaggccctgcccacacctgccttgcaggcgtctgtggaatccagacccctttggtctcagtagccacctggctgtgcccacccatcctgctgtcactcccatagcctagagggggaggcagaggcttaacaaatacagcactgcgatcatgtttgtgcacagcttgatgcagctttcaaacrgtgtggtgtggtgtggtgtgtgtgtgtggtgtggtgtggtgtgacaatattaataaaagcccccatgatgtgtatgtctgaaataatgcaaatatctcacccccaactcctcctcccctgccccagggacctccgaaattgtgtgtttatcttgtcaccacatggcagccacttgagctgacaaatagaaaggcctgctgtcttaggaatacgtcatcagcataacatgcagagcggtggattacagagtggaggggagtggaatgatggtggcctgggagacggcgatgttcccagatgcccctgctaggaggctcgctcccctgaggtcaggatctttgtagtgttgactgctctatcccgtgtctggcatgtagttgggccttagtaaatattagctgaatgaaggatgtgggacacagggcccaaaggtgaacagctccatcctggtggggaaggacagagttggggccattcttgagctcagaagaacattttgggatgactcagtggaagccctttctgtcccagaaggaatcgctcaccaacggagcacgtggcttttattctctctctttttctttaatttttttttttttttttttttttgagacagagtcttgctctgtcacccaggctggagtgcagtggcctgatgttggctcactgcaacctctgcctcctaggttcaagcgattctcctgcctcagcctccccagtagctgggattacaggtacccaccaccacacgcagctaatttttattctctaccaagttcttaaaataggcaggtcacaagatgtcagatgaggggagaactcccaggggtgttgccctgggccagcctgaaagcatgagttctggcccacctcggccttgatcttgtgagcctgggaagtttctcttcctcatctggggacagcagggctgaggattcttgctctccccgcctgttttcccctttgttccccttccccatctttgcctttggcttaactgagtggagtgttgtcagccttgggaagggagacaggaggcccagagcatttggggtcagaccagtggtgcgctgagaaacatggaatagcagggaaagccatgattataccatgtgctggcttctgtggtgtaaatactcccagtacagccgatcttgagctaccaacgtgcagtcagtccctgaacgtggggtcaggaagagatgtgcagtagcacacaccttcatacaggatttccaccatcacaggtacggtggaacctcaagagcaaaaagagcagaggctagtgtggttcagtaactaagaagtgatgagttttgagaacttactacctttgttttaaacattatcatttaggtcgggcacagtggcgcacgcctgtaatcccagcactttgggaggccgaggcaggtggatcacttgaggtcaggagttcgagaccaccctggccaacatgaggaaaccctgtctccactaaaaatacaaaaataagctgggtgtggtgacacgcgcctgtaatcccagctacttgggaggctgaggcaggagaatggcttgaacccaggaggcagaggttgctgtgagctgagatcgctccattgcactccagcctgggtgacagagcgagactccatctctaaataaataaataaataaaagattaccatgggccggttacagtggctcacacctgtaatcccagcactttgggaggcagaggcaggtggatcacgaggtcaggagatcaagaccatcctggctaacacagtgaaaacccatccctactaaaaaaatacaaaaaaaattagccgggcatggtggcgggcgcctgtagtcccagctactcgggtggctgaggcaggagaacggcatgaacccgggaggtggagcttgcagtgagccgagatgacgccactgcacttaagcctgggcaacagagcgagactccgtctcaaaaaaaaaaaaaaaaatcatatagttgtaagtttgtaagctgacttttttttgagacagggtctcgctctgtcacccaggctgaagtgcagcggcaagatcacagctcactttaatctcaaactcctgggctcaggcactcctcctgcctcagcctcctgagtagctgggactgcaggtatatgccactgtaccccactataatcctgtgtccacttctcttcactcaatatcatcctgtacccccaggatttaatatcaatgactgtccgggtcagtggccagcagagagggagtgacagagatctgtccacacccccagtctactcactgggctattaacctgtccacacacactgaccactgccagtcagcctctgctgccacctgcttttgtctgactcaaaccctccaccgtggaggggcctccttttgctccygcctcccctgcagggccaaattcgcaagatgacagcagtgaagagtgccctggaccggatgtcggtgttacagaggccaataatttttttatttttcgtagagacggggtttcatggtgcaggctgggccttttatttatttattttaaatgcagctgtgcctggaatacgttgacttttttttttttttttttttttttttgagccagagcctagctctggcgcccagactggaatgctgcagtggcgtcatctcagctcaccgcagcctccgcctcccgggcttaagtgattctcctgccccagcctcccaaatagctgggattacaggcatgcgccgccatgcctggctaatttttgtgtttttagtagagacggatttttaccatgttggtcaggctggtcttgaactcctgacctcagatgatccgcctgcttcagactcccaaagtcctgggattacaggcatgagccacggtgcccagccagcttttctttttttttttaattttttaaatatatatgtawatttaagtagagatgggatctccctgttgcccaggctggtcttgaactcctgggctcaagcaatcctcccacctgtgcttcccaaagtgctgggattacaggcatgggccactgtacccagccataaagtgactcttaatagtaccttcctttaacaaccagctcataaaattcctgcataggaaacaatctgtactcccaggtcagagctgggttggacccacccgaatgcaaatccttttgctgccacttatgaagctgtacaaccctgggcaaattacttaatgtccctgagccttggcattctcatctgtaaaatgggcttccagaaacacccagcacaggccaggcagtttagaatgtgcttagtaaatggtgattatcatcatttgttcagggacattagcatgaasgccgaatgttctggcacaaagacacgtctgtgggacaggcacagtggacttattgtgtgaggcaggatggtactgggctggaagacaggactgtcctttagttctaaacagtcctcctattgttggacactcgggagtgttccacagtttggcttatcrgttactgtagccacagacgtcttccagcctgcagctttttgtctccagctggaattctcttcttgtgatcactttcccgggggacgcggactgggtcagaggtgcgaacatttctgtgccccgctgtgttccaaaggggctgtgccagtttctaacgccagccgcgtgaattcctgcagcagtaaccacaactgctatttgttaagtgctgttccatttacaaagcacttgcccctgtgttgcccagcgcccgtttggaggtaggcattacttggattccgctttctcaggagtccggagaaacttggggtggttgagtggtttgtccaaaggtccacggctgtcagggtgaaatcgcgaacctcaggcaggactgaccgagccaggccctgtttacctgcagtagctccacgcatcctcacagtacccacatgagataagtgccgtagacatccccatattagagatggggaaaccaaggcacagagaggttagctagcctgccaagaacggtggagatggagtccagatgccggcatctggttgccgtctctacccttaaccactacagtgagactcggaagtgggctttctggctcstgtcagcagccgatttgaccctggcacaatccacctccctggacttccagtttcagggcctgacgctgtscctgccgccctcctgctgactgcgtctccatctccctacaggcaccgggagcctggccgctgcagtggagacagcctcgggacgccaggccctggtggtgggcaagcccagcccctacatgttcgagtgcatcacggagaacttcagcatcgaccccgcacgcacgcttatggtgggtgaccgcctggagaccgacatcctctttggccaccgctgcggcatgaccactgtgctcacgctcacaggagtctcccgcctagaagaggcccaggcctacctagcggccggccagcacgacctcgtgccccattactatgtggagagcatcgcagacttgacagaggggttggaggactgagcccactgcacctgcagccacaggcccacccctccccactccctgatcccgtaggtggaggcgatgggtcacgagccatgttaagcacaaccggctccttggtccagttctgcaccggggtggggctgggacccggggaaggtttgagggcccttgcaaccccctcccagcagtggctgggcactctttgctgccccagaagctggtcccctatggattcatcttggcctgacccagccaggtggccttatttcttccctgtcacctcccctccttgaaatctgggccctggtgcctgctgaagattccctctatccctgagtacttagtcttctcccccttccctggggcttctagagctctctctgcccctcaggtcctggcccttgggtccttgtcaaccagaggtctagggaaccacaacccttattgtcctgggtggaccaatccaaaggctaagtgatagtgactcatcaatgttgggtcctgtggggtaccagtttaggttcctaagtaatagtgaccctttcacgtcctggagcccgagtggaccaatcggaagcctaagtgacgatgaccctcgcatgtcctaggtccctgggtggacccatcaggaccccaagtgatagtgacccagtggtcttttagatcctcagtagaacagtccagaagcctgagagacagtggccccttgataatctgggtctcacgggaccagctaggggtccaggtttcagtcagtaaataagagtggtccacgtcctaaagacacctctcctttacaaagacttgtgatgctctggggcttctgtggccaagccccaccctttcctggtcatggtacccgtacagcgttgatggccacagctcgaaggggggctttcgtgtccccctgtgcggtcagtgttttcagtaccacctctctcccgtgcccacttggctatttacttatttatttattgtgtgccagtgatggtgggtgggggctgggccttccccgccacctccacccctgttgtgacctgtccttccgtacttaataaagtgcgcgtgggagtgttcacctgtgtttgagtctatgtttggggagggaggaggaccccctgctggagtgtgctctccctggacctggcccaccacattgttctctgcatgaaatgacccattcctgttcctgagtgtcttctgtgtgtagcgatactttgagtcaagagtgctttatagccaggcgcggtgactcacgcttgtaataccagcactttgggaggccaaggtgggtggatcacaaggtcaggagatcgagaccatcctagctaacacggtgaaaccctgtctctactaaaaatacaaaaaattagccgagcgtggtggcaggcgcctataatcccagctactcaggaggctgaggcaggaaaacggcgtgtacccaggaggcagagcttgcagtgagccgagatcacgccactgcactccagcctgggtgacagagtaagacaatgtctcgggaagaaaaaaaaaattagccaggtgtggtgcggtgtgcctatagtcccagctacttgggaggcaggagaatcgcttgaagttgcagtgagctgagatcacgccactgtactccaggctgagcagcaaagcaagactccgtctcaaaaaaaaaaagctcaacatggctaaggcttagggggtttcggtctgctccctgaggtggtctagcaccctccaggtatatccttctcagttctgaatccccaaccaacatcctagggcagattctcattggcctggcttgggtcatagcccatctggatgggacacagctattggtccatgtgaccctacccccctttcccttccccttccaccagtaaggaaatggttgcctccacacagtcttgcctcagcctcccaaagtgctgggattacaggcgtgagccaccacacccagcctaagcacagaatttttttttttttttaagatagtttctccctccgtcacccaggctagagtgcagtggtgcggtcttggctcactgcaaccttcgcctcccaagttcaagtgattctcctgcctcaggctcccaagtagctgggatgacagacgcctgccaccacacccagctaatgccaccacgcgtggctaatttttgtattttgagtagaggtggggtttcaccatgttggtcaggctggtctcaaattcctgacctcaagtgttccccaacttggcctcccaaagtgctgggattacaggcgtgagccatcttgccccgtctctaagcactgagtcttaatgagtttaaagcttgagtgtaaaccaatcgcagtaatttgattcctctgggtcagtgattggctaatcttctgaccaatgaaacatgaagagaggtctggaatgtttgcctcattcttttttttttcctcttctttttttttttttttttttgagacagagtcactctctgtcacccaggctggagtgcagtggtgcgatcttggctcactgcaacctccacctcccaggttcaagcgattctcctgtctcggcctcctgagtagctggggctacaggcgcaccctgccatgcccggctaatttttgttgcattttagtagagatgtggtttcaccgtgttgcccaggctggtctcgaactcctgagctcaggcaatccactggcctcggcctcccaaagtgctgggattataggcgtgagccaccgcgcctggctgtttgcctcacttttaaaggacatagaggagggagtcacttttcctggctttgggtgtggtcctgggagccgttgcagccattctgtgatcaggaggtatggctgagcatttaactcaggtgaccctgttgcaggtagcagagcagaaagacggcaagaacttactgggtttgtttttccccaacttgtaatttagaaaagttccaaattaatataaaaggtgcaaggataacaatgaataccgctacatccttcacctagatttaccagttgttaatatttgcccagtttgcttaactgctctttatatatgtttactttttgttactgttttagagatggtctcactctattgctgagtctagactgtagtggtgcagtcacggctcattgcagcctctaactgctgggttcacgtgatcctcctgcctcagcctcctgagtagctaggagcacaggcatatgccaccacacccagctaattttttaaaaaattttggccgggcgcggtggctcacgcctgtaatcccagcactttggggggctgaggcgggtggattacgaggtcaggagatcgagaccatcctggctaacacggtgaaaccccgtctctactataaatacaaaaaaaaaaaaaaattagccgggcgtggtggtgggcgcctgtaatcccagctactcgggcgcctgtaattccagctgaggcaggagaatggcatgaacccgggaggtggaggttgcagtgagctgagatcacgccactgcactccagcctgggcaacagagtgagactccatctcaaaaaaaaaatttgcagaaatggggtttcccttttgttttgttttgttttgttttgttttagagacagggtctcactatgttgcccaggctggagtgcagtggctattcacaggcaggatcccactgctgatcatcgtgggagttttgacctgctctgtttccgaccagggccagtacagtcctccttaggcaaacttgtggttgcctctcccaggaggtcaccatattgatgccaatcttagcacactacagcccacgattcctgggctcaggcgatcttcctgcatcagccttccaaaacgctgagattacaggcatgaaccactgtgcccagcttgtttacattttttaactgaaccatctgagagtatgttacagatgctaacacagttcaccgaaaattcttcagcttgtatgacctaagagcaaggacagcctacacagccaccatccaggattacacgagaacctagacatttgatgattttattgagtcactgaattaatgtgctatggaaactcccaactgcagacttttttttttttttttttttttttttgaggcagagtcttgctctgtcggccaggctggagtgcagtggcgcgatctcggctcaccgcaagctccgcctcccgggttcaagcaattctcccacctcagcctcctgagtagttgggattacaggcatgcccaccatgcccagctaattttttttgtatttttagtaaagatgggggtttcaccatgatgaccaggctggtctcgaactcctggcctcaagtgatccacctcggcctcccaaagtgctgggattacaggcgtgagccgccatgcctggccagatattttctaaactctttttttttttttttttttgagacagagtctcactctgtcgccaggctggagtgcagtggcgcgatcttggctcactgcaacctccacctccctggttcaagcaattctcctgcctcagcctcccaagtagttgggactacaggcacacgccaccatgcccagctaatttttgtatttttagtagagacagggtttcaccatgttggcaaggatggtctcaatctcttcacctcatgatccacccgcttcagcctcccaaaatgctggggttacaggtgtgagccactgcgcccagactctaaactcttaaaaagcttttagatttcctttgtgtctataattattttcaaaataaaatgctcactggacacagtggttcacacctgtaatcccagcactttaggaagcgaagatgggaggatcgctcgaggctaggagttagagagcagcctgggcaacataacgagatcctgtgtctccaaaaataaaaataaattacccaagcccagtggtgtgcacctgtagtcagtccaagctcctcaggaggctgagtcaggaggattggttgatcccagaagtttgaggttatagtgagctataatccactccagtctgggtgacagagtgagaccctgtctcaaaagtaaaataataaaatataaaataaaataatataaaataaaatgctaaaagcattgtaaaggttcaggcctgagtctgggagggctgtgaatgaaaggacctggcccccacccagaccttacctgagaggagcggcggggccctaaccgagggctgaggcctgcagtcagaagagatacagacaagaagtgggaaggccaatggcaggtgtggagggggctgtctggacaaaggctgggaggtgagaatggatgagcagggttgaaggggcgggctgaggtgccacctggctggaaaagggcccaggttgccaggggcatcccccaccttcatagagtaggagggaaaagatagcttttcaagcccaggtatctttagttcagcagatgaaagcgggtcggccctagctacctgtgtgactttggtcaagtggccaccctctctgggtggtttccccgaccttaaactgcatcattaaatgggggagcaggtcaggcacggtgtctcagggttcctccctgctctgacttctaggactcagaagctggctctgacctcccctaccttccctggctggagcacccaggttggctgcgggtgtggatggcgcctctgtgggccgccctccttcagcaccgccagctgaaggaggtacagcttccctttccccgcctctgccccctgtccctggcagggcgggaatgaccgagctggcctggatgacttgtctagaccaagctgagcccatttctcatggcagcagccaagatccagcccaggacaaaggaattccagagagctcactgcctctatttcaggacagttataacgtggggaggagaatccctggggtggtggccttagcctgggggatgcaggagggagcactaacatcgagcccctccttagacatcactcctatcatcctccaagcagtggccttattcccatcttccaggcctggaaacgggttcagagaagccaaggacctcagctacagctgcagccactcagcccccaaaccagaactcaccactcgtctcatctcctgattctttttttttttttttgtgatggagtcttgctctgtcacccaggctggagtacagtggcactatctcggctcactgcaacctccatctcctgtattcaagcaattctccctgcctcagcctcctgagtagctggggttgcaggcacccgccaccacactcagctaatttttgtatttttagtagagatggggttttgccatgttagccaggctggtctcgaactcctgtcctcaggtgatccacccacctcagcctcccaaagtgctgggattacaggcatgagccaccgtgcccggcctcttctgattctaactgcagcttcatttccctgtgcagaaattcaaccaagttggcagacacaaagtaggggcgaggggaagatgagaggggagataatgaaagcaaggcgccgggcacagggcctggcaagataagtgggcgctgccactaggaggccctgaggactagggggaggaggcccacgatgcacctgtgtccctgccttccctccccgccaggaaaaccgcagctcctgtcacaggggacactggaatctggagagacttcttgccccaacctcggcaagaggagactgttggggacctgttgggcatgacatgtagacctcccagaggtgctgcaaagacctagggaaggtaacagcctgggaagagacaagaaggaagtgaaaaccttctgagcctccatgaaaacacgaatcatctgtttagtacaacagacctcagttccaccctgtattcacctcgtgcaaggaaagcaggatttcatctccccaatttacagatagggagactgaggcaagtgggagaagcagcttgccaggaggctctgaggggacatagcaagcagggccagcacccgcgtgtctagactcccaaataggcctttctagggacctcttcaccatgccaccctgcctccctgccagccccactcatgccagacgctgcagaggag

SEQ ID NO: 98242 - DNA, 22838 bp, Homo sapiens
tgtagtcccagctactcgggaggctgaggcaggagaatggcgtgaacccgggaggcggagcctgcagtgagccaagatcacgccactgcactccagcctgggcgacagagtgagactccgtctcaaaaaaaaaaacaaaaaaaaaagaacttgtaagccccacctatcggggcccttcctttctgcgcttagtttcttgcatggtatttagcatggggctggcctgccgcacttaggcagtggctcctggtggcctggggaggaagagggctttcctaccactcatgccccctaacttttctccctgggcagaaaaggactggacggaggaggaccgggcccgggagaaggtgctgatgcaggagcttgtgaccctcattgagcagcgcaacgctatcatcaactgcctggatgaggaccggcagaggtgacatggccaggggtggggggtcctgggggcagggccagagcaggtcaggctctgggcctcatgggtggggcagctccctggagagccaaagacacagtccacgcctcaggccaggccagccctgccctcctaccagcgatcccagtgcaccgttgctcagccctgtgtggacagagagggcatctgctccttcctcccgtaggactctcagctgccgctgcttttttttttttttttttttttgagacagcgtttcactcttgttgcccaggctggagtgcaatggcataacctcggctcactacaacctctgtctcccaggttcaagcgattctcctacctctgcctcccgagtagctgggattacaggcatgagccaccacacccagctactttttgtatttttagtagagatggggtttcaccatgttggctaggctgatctcgaactcctgacttcaggtgatccacccaccttggcctcccaaagtgctgggattacaggtgtgagccaccacgcccagcttaactgctgctgcttatttcagggaggaagaggaagacaagatgttggaagccatgatcaagaagaaaggtgaggcccttgctggggatgaggctggtgagcacttgaacttcggcattggggttggaagggagggactggttgaagggagggttggagtgggcactaccaggatggctgtgcacaaactccgcagcctctgttgtgcagagagggctgtgtgtagcaagagaggccagcatacagccaggaaggctgtggcttaggcttggagggtagccgtgggatgccctgatgcctacagagacgactgtggtatatgggaggcatcttcccagggtggatttgccctcagctgtgcattcccccttgagatctgcagctggttttgttggagtccgtgggcccaaatagcagtgcttcctggggaccaagtggtgcttgaaacagttaaaagagtactggacaggagatcaagaccatcagggctaacacggtgaaaccccgtctctactaaaaatacaagaaattagtcaggcgtggtggcgagagcttgtagtcccagctactcgggaggctggggcaggagaatggtgtgaacccgggaggtggagcttgcagtgagccgagatcacgccagtgcactccagcctgggtgacagagcgagactcagtctcaaaaaaaaaaaaaaaaaaaagtactggactgtaagtcaaaggattttttttcttttcttttttttttttttgagacagagtcccactctgttgtttaggctggagtgcagtggtgtgattttggcttactgcaatctctgcctcctaggttcaagcaattctcctgtctcagcctcctgagttgctgggactacaggcgcatgccatcacacccagctaatttttttttttttttttttgagacagagtcttgcttttgtcacccaggctggagtgcagtggtacgatctcagctcactcaacctccgcctcccaagttcaagcaattctgcttcagcttcctcagtagctgggattagctgccaccacacccggctaatttttgtacttttagtagagatggggtttcgccatgttggccaggctagtcttgaactcctgacctcaagtgatccgctcgcctcggcctcccaaagtgctgggattataggtgtgagccactgcgcccggccctggctaatttttttgtatttttagtagaaacggggtttcatcatgttgaccaggctggtctcgaactcctggcctcaagcgatctgcccacctcggcctcccaaaatgctgggattacaggcgtgagccagtgttcctggccaggatttgggttttggtcttggttttaccagtacctcactttgtggccttgtggttaggtcttgactcaggccaagtcagactacttgagttctagtcccagctctggcacttatgagctgggtgactttgagctggccactctaccactctggtctcattcttcatatctgcagaatgcgggtgaaaatggcaccccctcacaggtgtgtgctgggattactgagataatgtgtaaaacttagctgagggccctggccctacaaagggctcagttggtattagtcaatttcaaaggcctacattttccttgtctataaaattaggggctcagacagatgattttgaaggtttctcttgctctgacagcgtttgtgttgtaagtaacagagctgtgggcaccagcctgggtgaatccagccttttaaagataaatgggggccaggcgcggtggctcacgcctgtaatgccagcactttgggaggccgaggccggcagatcacgaggtcaggtgttcgagaccagcctggccagcatggtgaaaccctgtctctactaaaaatacaaaaattagccgcgcatggcagcgcttgcgtgtaatcccagctactcgggaggctgaggcagaagaatcgcctgaacccaggtggcagaggttgcagtgagccgagatcgtgccactgcattccagcctgggcgacagcacaagtctccgtctcaaaaaaaaaaaaaaaaaaaaaaaagataagtggggccaggcacggtggctcacgcctgtaatcccagcactttaggaggctgaggcgggctcatcgcctgaggtcagaagtttgagatcagcctggcccaacatggtgtaaccccgtctctactaaaaatacaaaaattagctgggtgtggtggcacacttctgtaatctcagctacttgggaggctaaggcaggagaatttcttgaaccaggaggcagagtttgcagtgagctgagaccgcaccattgcactccagcctgggcgacagagactctgtctcaaaaaaaagaaaaagaaaaagataaatggatgccatgcttcagaattcctggattctaggccgagtgtggtggctcatgcctgtaatcctagcagtttgggaggctgaggcgggggggatcacgaggtcaggagatcgagagcattctggctaacagtgaaaccccatctctactaaaaatacaaaaattagccggggcgtggtggcacctgcctgtagtcccagctactcgggaggctgaggcaggagaatcgcctgaacccgggaggcggaggttgcagtgggccaagatcgcgtcattgcactccagcctgggcgacaaagcgactcagtctcaaaaaaaaaaagaattcccggattcagcagagctcttacatgtgctgaccatcttgatctttccccaaacactggaggtggggagggggaggatgggccccatcctctaggtgaagagacagaggctgggaaaggtgagtgtcttgtccctcccaggctccacacaggaagtggtggggctgggctgagccctgctgcccatgcccaggcctgtgtcactgggtctagcctgccctggatgtacccctcttctccactttattaagtgctcccctctctgtgctgcagagttccagagggaggctgaacctgagggcaagaagaaggggaagttcaagaccatgaagatgttgaaactgctaggaaacaaacgtgatgccaagagcaagtcccccagagacaagagctaacagcacgagaagccagttggggactgccccctcctggagcagctcctgggctgtgctctgtttgaagggggcgccctgctcccctcagatcagtcaggaggaagatgactaaggggagggatcctctgggtgatggcctcttcctcctcagggacctctgactgctctgggccaaagaatctcttgtttcttctccgagccccaggcagcggtgattcagccctgcccaacctgattctgatgactgcggatgctgtgacggacccaaggggcaaatagggtcccagggtccagggaggggcgcctgctgagcacttccgcccctcaccctgcccagcccctgccatgagctctgggctgggtctccgcctccagggttctgctcttccaggcaggccagcaagtggcgctgggccacactggcttcttcctgccccatccctggctctgagtctctgtcttcctgtcctgtgcaggcgcccttggatctcagtttccctcactcaggaactctgtttctgaagtcttcagttaagtttgagtttatgactgagtggcctgtactgtcagacgtgaatgggcctgacgggcaaatccatccctctctccctcacagttccaggagcggcttccctcgtctccccttactccacagggagcctcccttgccaggaccagggctgcgacggccatgctggggcaggtgagtgctctgttagctgctcccagtgctgtccccaggctgcagttctggtccctggttgtcaggtaggaagggtgcacttgaagcaggtgctcatctcggttccttaacgtttatagtctgacccctcacttaggctttcctctgccaccccggtccagggaagaggctcgctcccgcccatggtcatcactggtctgtctgctctgttgtctgttctttccctgactccctcccaccgaaggcctgatggctactcacccctctgggatggctatgggagaggaggagtgatggggaccgccaccttttctgcaggaaatgtgcccagcagctcttggtcaaagcactgttgctataagctatctctgggatgcctctaggcccccttccctctacacacctctgggaaaagattacactgtattaactctcgaggagtttcctcaccaataaacagacaacctcaactgccagtgccctgcagcctcgggccacagcggcagccttgtttgccttcccacctgcctctgccacacctggtggctgaacatctctggtcgcccagaggccatgttggggccatcctccaagagggatctctgccctcaccgcctgccactgggcaggatccctttcctctgcagggagaggtggctcctcggccatgcagcccctggcaggctccttctaaacatgcctgttgacctggagctggcgccaccaactccagggcctttccagggccagacaggtaacacgcatgaacccgagtgacagctctgacgggctgtttcggtgtcaggagacaaagctggcaggggcaggggtgaactggaggcaagtcaagtcacctgtggcctgtggggctgaatgtgggcccggtgttgccagatcctttgtcataagaagctagaaatccagattttatgtgtgtgtaatttgtaaatgctgaaagctagcctgaattttttttttttttttttgagacagagtctcgctctgtcgcccaggctggagtgcagtggcgcgatctcagctcactgcaagctccgcctcctgggttcacgccatcctcctgcctcggcctcctgagcagctgggactacaggcgcatgctacgacgcctggctaattttttgtatttttagtagagacggggtttcaccgtgttaaccaggatggtctcgatctcctgaccttgtgatccacccaccttggcctcccaaagtgctgggattacaggcgtgagccaccacgcccggccactagcctgaatttcaatcaagggttggctgatactgtgtgtccagggtggactggatttgtcctggggggttctctggtttgctgcctcctgaccacatgatggggccttcgaggtcgaggacaactgttcccattagattgcaccctctgccctcaggttcttgagggtgtgtggacacagaggctttccatgggatgtccctgagccggcccttgattggggcctcaccatttacagggccgttttattctgcaaaccgaaacttgggtcatgtgacctgatgggattatgggactccctccaggtgcccgagacaaggttgatatttccaaaatattttggtgatttagtgggacaagcaaatgacagaataccggagaaggcagggatcgtgggtgtcaggagccagaggggagggggacagatgtgctgtgtacaggacaaggtgtcaggtgactccttcccagcagggcctcgcagatgcacaagcacggagctggtgggttttgcccaagaaaggtcacgcggcacatgcagggattggaactcccaggccagggctctaggtcgctcccaccttttcatgtttctttctgtggccatgggtatagtggaaagacataaagctaaagccaacttttaatcctgaatgcactgcttgccaggtaaatgcccttggttgtggtatcttgttgagacttagttttcacagagggataatgaaccgttgcagaggtttattgagatcattaacagagtggaattcagcacccgccacagcagccagccatggggtgcccaagaggttggttcccgttgccacttgaaatatgcaaacaggtagctagaaaccatctgggcttgacaaagtctaatgccttgaacaaataagcttatccctctgaaaacaaaatggtgcttgtaatgacccacgttaaatatgttttattggccagttaatcattgtggttgaatacttgcctaaggcggtaagaaatcaaataagtaaatcctaaaacaggaagaaaggaatcatattcattcctgaattcaraaaactaaatgaacagsccacaggtcaraagtggtgggaagcaggcccagtggatacctttagacacatgtcctagtagggatgctcgggctttgcttctctgcggacggggctgtgagtctcagaggctccatctgcattccggggcaggggctaggctgctgagtatgccttggggtactgcagggcagtgctatgccaccacctgacgtggcagaaggctggtaggatgggctggcctgaggatggccctgcctggcagaggagtggactccagtggtcgagcttgggctaccctgcccrtctctggagacagattaagtggtggcaagacccttcctaagttcctcactccttctgtggtcaatgtcttccatttcccggagtttctgcaaagggcatcagggaaagcaggtgtatcagggctaggaacctgaggagctgtcacagcagtgagctagagcctgacccctgaaccctgccacagcagaccctgtatttccattcgcacttggcgctgggcccttcccctccccactttcctggttgtttctcctacctgggagatttcagcaaggatgattcctcggtactgtttgccctgtcccagggcctccatgtcagccaggaattctttcctctcctggatttccttcaccactggacagaggagaggrctgtcaggttcccatgagggatgcaggcagcgggttgcctctcttgaggagaggaagtggttctattgtcaaatagtgtttctaggccgggcgcggtggctcacgcctataatcccagcactttgggaggccaaggcaggtggatcacgaggtcaggagttcgagaccagcctgaccaacatggtgaaaccccgtgtctactaaaaatacaaaaattagccaggcatggtggcgggcgctggtaatcccagctactcaggtggctgaggcaggagggattgcttgaacctgggaagtggaggctgcagtgagcccagatcacgccactgcactctagcctgggcaataagagcaagactgtctcaaaataaataaataaataaataaatagtgtttctcacttgttggcccttggccctcagggatcccctgactgctccatccaattctgggccccctcctcacattacccccacccccagcatgactggtccgtcggagtcttacgctcttcaaatcggtctagctcaggggctggagccttctgtcgtgcaggaggggcctttcttttccgttcctccakgtccttcccygtggcaaagatattttggagtctttgtttctccttctccaaatcccctgtagggccaaaaagaaatggcctagttaggctgtaaagggtgcccttattcatggtctgtgttcccaagtgcacgtgcttgctgcagggtgcctggtcatgcagacagggcttccgtacacctgctgctaccctgggttctcctgagcaatactgtactgtcaagagaggcaggaagaggtggaaagaaccaagaaaagagtttgggtatggtctgtaattccaacactttgggaggctgaggtgggaggattgcttaggaccaggagttcaagaccagcctaatggatgtagtgagacccccatctctttttttcttcttttttttttttttttttgagacaaggtctgactctgtcgcccagactggagtgcagtgatacaatttcggctcactgcaacctctcgggctcaagtcatcctcccacctcagcctcccgagtagctgggactacaggtggacgtcatcgtgcccagctaatttttgtatttttttttttttagtagagatggagttttgccatgttgcccaggctggtctcaaacacatgagctcaaacgatctgccagcctcggcctcccaaagtgctggaattacaggcatgagccatcacgcctgaccgatatcctatctctaaaaaaaaaaaaaaaaaaaaagtccaggcacggtggctcacacctgtaatcctagcactttgggaggctgaggcaggcaaatcatgaggtcaggagttcgagaccagcccagccaacatggtgaaaccccatctctactaaaaatacaaaaaattagctgggcatgggccgggcgcggtagctcatgcctgtaatcccagcactttgggaggccgaggtgggcggatcacgaggtcaggagatcaagaccatcctggctaacacggtgagaccccacctctactaaaaatacaaaaaaattagcccggcgtgatggcaggtgcctgtagtcccagctactcgggaggctgaggcaggagaatggcgtgaacctgggaggtggagcttgcagtgagccgagatggtgccactgcactccagcctgggcgacagagcaagactcagtctcaaaaaaaaaaaaaattagctgggcagggcatggtgatggtgcctgtaatcctagctacttgggaggctgaggcatgagaattgcctgaacccaggaggtggaggttgcagtgagccgagatcgtgccactgtactccagcctgggtgacagcgcgagactccgtctcaaaaaaagctgggtgtggggaacacctgtggtcccagctattytggagactgaggcaggaggattgcttgagctcaggagttctggctgcagtgagctatgatcatgccactgtattacagaatgggtgacagaatgagagcgacactgtctcaaaaaaaaaaaaaaaaaaaggccgggagcggtcgtttgtgcctgtaatcccaacactttgggaggccagggtgggcggatcacttgaggccaggagttcaagaccagcctggccaacatggtgaatccccatctctactaaaaaaattaactggacatggtggtggacacttgtaatcccagctactcaggaggctgacacatgagaattgcttgaacccgggaggcggaggttacagtgagccgagatagcaccactgcactccaacctgggcacagagtaaggctctgtctttaaaaaaaaaaaaaaaaaaaaagttttgtcaaaacttagcagagcaaggctaagaaagctcaggaacctggggcctcggcgatgcctgtagtggcaacttatgtataggggctgcagggagaggttaggctgtggcattgagccctgatagcccctatcatcaggaagtggtagatttcagttaatcctgagttctggaaaaataaaaaaaaaaggaccatctgactggtttcctctgcgccctgaatacccctaagccaacaygtgctgaggctcaagagcattggtacaaagtgcatggggatttgattagctaccttcccacctgccctgtgggctgcttgcgtccctctcccttgtcctcccccagggagatggagaaaggccctagctgagaccctcacttactggtggcttgaggcttgaactgctcccggctgtaggccccattggcttgacacatgttggcaggccggaggtggggacgggctgcgaggatgggaggcaggtagatgggcgaggctatttgcttggaaggtaagactctctggctggatgttgggctgcactgtaggggcaaagcatctcctcctggggaacgaagagttggggtgggaggacccacatggctttttttttttttttttttttttttgagtctgagtcttgctctgtcactcaggctggagtgcagcggcgcgatctcggcttactgcaacctctgcctcttaggttcaagcgattctcctgcctcagtctcccaagtaactgggattacaggcatgcgccaccatgcttggctaatttttgtatttttagtagagacaggccatgttggccaggctggtcttggactcctgacctcaagtgatccacccacctcggcctcccaaagtgctaggattataggcatgagctattgcacctggccactttttaaaaataaaagttggccgggcatggtggctcatgcctgtaatcccagcactttgggaggccgagatgggtaatcacttgaggtcaggaattcgagaccaccctggctaacacggtgtaaccctgtctgtactaaaaatacaaaaaattagctgggcgtggtggcgggtgcctatagtccctactgctcgggaggctgaggccggagaatggcatgaacctgggaggtgggacttgcagtgagctgagattgcaccactgcactccagcctgggcgacagagcgagacttcgtctcaaaaaaaaattaatagaataaaaataaaggtaatacctacctgttaaaagaagtcaaaaggccaggtgcagtggctcacgcctgtaatcccaacactttgggaggctgaggtgggcagatcactggaggtcaggagtttgagaccagcctggccaacatggtgaaaccccatgtctaaagaaaaacaaaaaaaattagccaggcattatgacgggtgcctgtaatcctagctacttgggaggctgaggcgggagaatcacttgaacccaggaggtggaggttgcagtaagccaagattgcaccactgcattccagcctgggtgactgagcaagactgtctcaaaaaaacccccaaaaaacaaaaattagctgggcgtggtgatgcaggcctgtaatcctagctactgggaaggctgaggcaggagaatctcttgaacccaggaggtggaggttgcagtgagctgagattgagccactgcactccagcctgggcaacagagtgagactctgtctcaaaaaacaaaacaaaatgaaacaaaacaaaacaagtcaaacagtacaaggagtcttctcttcttccttccagtcccacccctctataatgaatgagtgataatggtaacagtttggtggtctccttcctttttgatgcttatacaaacatgttcaaagatatatgtgcatataagattctttcaaacactggatcgtactgtaatatattaaaataacagactcttttcacttaacattttttcatggacatctgtccagatcaatccatttatatataacttattttttatagctatatactagtatccttagaatggatacattatttattcagctcacctccttgtttcagaaatttaggttatttctaggtttgttttttactacttcaaacaatgctgcaataaacattcttgtacatcaaatctttgtaccgatgctttaatttctatggatgggttcctaaaactttctgtgtggtgcatggacaagcagggacagtttggatgacagcaggtacctatccctcctgctgtccatccccccgcttggccatccctggggcttctcccccaggcgatccaagtgtgtcacctgtctggtcagttgaccccacctctcaactgccataaagcccagcttagagcaggtcccatccattgtttttttttttttttttgagacagagtctccctctgttgcccaggctggagtgcagtggcatgatcttggctctctgcaacctacacctcctgggtacaagcgattcttgtgcctcagtctcctgagtagctgggattatggtgtgtgccaccacgcctggctaattttttttttttttttttttttttgagacagagttttgttcttgtcacccaggctagagtgcaatggtgtgatctcagctcactgcaacctccgcctcctgggttcaagctattctcccgcttcagcttcccaagtagctgggactacaggcccgggtcaccacacctggctaatttttgtatttttagtaggggtggagtttcaccatgttggccagggtggtcttgaactcctgactttgggtgatctgcctgtctcggcctctgaatgtgctgggattacaggcgtgagccaccgcacctggctcatccactgttttgatctgggtgcctgtctaccttttctgcccatccagcctctacaaggtcaattccccaggagcgagcggtcagaagtattaatttttttggtcacacacccaaaaattttgctgtagagagaggtttcactgtgttgcccaggctggccttgaactcctgggctcatgtgattctcctgcctcagcttcctgagtagctgggactacaggtacaccccagtatgtatgtgttttgccaggctggtcttgaactcttgggctcaagcaatcctcctgccttagcctcccaaagtgataggattataggtataagccaccacagctgacctgtttttttttattttttattttttgtttttgagacgatgtcttgctctgtcacccacactggagtgcagtggtatggtctcggctcgctgcaccctctgcctgctgggttcaagtgattttcctgcctcagcctcctgagtagctggtattacaggcatccgccatcatgcccagctaatttttgtattggcatagagacagggttttaccatgttggccaggctggtcttgaactcttgacctcaggtgatctgcccgcctcagcctcccaaagtgctgggattacaggtgtgagctcccacacccggcctgacctgtttttattttaatttaattttattttattttaattattttgagattaggctccactcggtcgcccaggctggagtgcagtggtgcaatcacagctcattgcagccttgacctcccagggtcaagtgatcctcccacctcaacctcctgagtagctgggactacaggttggcaccaccacacctggctaattttaaaaaattttgggggctgggtgcagtggctcacgcctggaatcccagcactttgggaggccgaggcgggcagatcacgaggtcaggagttcgagaccagcctggccaacatggtgaaacccagtctctactaaaaatacaaaaattaagccgggcatggtggcgcacgcctgtaatcctagctagtcaggatgctgaggcaggagaattgcctgaacccaggaggcggaggttgtagtgagccgagatcatgccactgcactccagcctgggcgacagagagagagactcatctcaaaacaaaacaaaacaaaaaagttggccaggcgtggtggctcactcctgtagtcccagcactttgggaggccgaggtgggcggatcatgaggtcaggagatcgagaccatcctggctaacacgatgaaacgccgtctctactaaaaatacaaaaaattagccaggcgtggtggtgggcacctatagtctcagctacttgggaggctgaggcaggagaatggcatgaacccgggaggcagaagttgcagtgagccgagattgcgccactgcactccagcctgggcgacagagtgagactctgtctcaaaaaaaaaaaaggttttgtggagatgaggtcttgtggcttgtggcgttgcccgggctggtcttgaactcctgggcttaagccatcctcccacctcagcctcccagtgttggaattacaggcatgagccacgtgcccggctgtctttgttttttttatatgaggtcctctctcccttaacatggagaagcattaaaagtgtggccccagatccctctgtccaggaagcctctgtggactgccccttacttttcatgatgtccatgatgtggcgctgctggatgttcgtcagtttggattccttcatcatcactgcacgacaaagcattctatgaggcctcttgggctgcaggcggatgccttcacctgacaccctactgaaatttaaaaccctacatcctagccccattytgcactgagcatgccttctctatctttcctgcttcgttttttctatagcacttacgaccacctaaaattctatatattttattttattgttatccttctatattagctgtatgataagaatttttgctggtttaataaaatttctgccctctgttaaatattttttcctctttctctttttttttttttttttttttttttttttttttttttttgagatggagcttccatcttgttgcccaggctggagtgcagtggcgcgacctcagctcactgcaatctccacctcctgggttcaaggaattctcctgcctcagcctcccaagtagctgggattacagacatgcsccaccacgcccggctaattttgtacttttagtagagactgggtttctccatgttggtcaggctggtcgtgaactcctaacctcaggtgatctgcccaccttggcctcccaaagtgctgggattaccggtttgagccacctcattttctttcactgctgtatccccagcacctaaaacagagtctaaggcacatggtagacttaaaaatgttgttgttggaaaaaaacaaaaaagttgttgagtaaaagaacacatgaatacttgttcatcatgtttcaggggctggagctacaattgtgggccgaaacaggcacggttcctgcctgatgaaattcatgatctggagggatagatgggacaccaaataactgactacagcttgtgctaagcccagtgaaggaaaatgtgtgagggcacataacagttgatcctactgtggtggtgaggagcagaagtcttcctcgggaaagttgaaagtgtgatctaaaggatgcataggagttaactactctaaaaattttagttctttgacttttggcaaggtgtagcaccttgaaccttcccctcccccccgccccgccccgcccccgamtaaggcatatgcagtagaattttgaagctttctgaaccccaggctccttatctgtaaaggaaaatagtgctaagccacaggtcaggtacgggggaactgagttacagagggtaactaccaccattcttctctcatcctttaactcaggggtccccaaccctccgtccgtggactggtaccagtccctggcctgttaggaaccgggccgcacagcaggaggtgagcggcaggctagcgagcctcaccgcctcctttcaggtcagtgacggccttagattctcataggagcgcgaaccctattgtgaactgcgcacgcgagggatctaggttgcacgctccttatgagaatctaactaatacctgatgatctgaggtggaacagtttcatcccgaaaccattccccacacctycgtcagtggaaaaattgtcttccacgaaaccggtccctggtgccaaaaaggctgrgatcgctgctttaacggactgacctctgagcagctcgcaggtccccggggtgtaagtgatggtcttggggcggcgccggaacccagttcctttggtcactacctccatctgcttctgtgaagccatgggaggactctgaggagggaaagacgcaatgacacaccccctgtctcctgtccctaatctctgttccccgacgcccaacacccccagaagtctggaagcggggatcgagccagagaatgatgccgccagttaatattgcgacagtgcccaaacctcccatccagacacacagatacacacacacagtcctcattctgacccagcgcctgtggcagggaagtctcctcgggagggagtgttaacacagccatggtcacaacagtacccactgagtgatatgccaaaattgaaatttcaccctaagaccctctctgggtgctcccctctccacatagaagtgggctcccggaggcggtgaccactgctttacagccgcatccgcaccggtgccaygsagaaatactgcgcgatctgggctgctggagctggcagcyagcgcctctcgctactatagaaacgcgcacacaccagtcagcgcatgcgcactttccccgctctgtcctgcctcccggaagtgatttcctctgggttacggcgcaggcgcaagataagctaggagccgcgcgagtcgtagtgtcgctgtttgcgggtctccgcgcgggaccggggcgcagcggggtcgctgaggcgagggtgtcatgtcagacaacgaggacaagtgagtgcgggagcggagtggcctttgcggcaaccttggaaggggcggatgaggcaaggcttgggtcggctgaggagcctggcgtctaggggcaatgtctgaggggactggggtcctgagggggccggcggagccgaggaagggaagggcgggcgacccaggagcacagccccggctggaggcacaggagggcccaggctcgagggtccagaggggatccgtagaaaaggtgtccttcagcaaatgttccagcgagccgggctctgtatcatgcagtgggaatattgaggtgaatgaacaatcgtccctgcctctccacgtgctcactttctagaaaaggggtcacaggcccataagtaagcaagcaagcaggtaacggtggtcgcgtgagcttccccagttctagacgtatgtagtataggagtactccagaggagggtctggggcagctccaccgggtggcattaaataaaagtctgggacggtcctttgcagtaatttttttttttttttgaaacagagtcttgctctgtcgcccaggctggagtgcagtggcgcgatctcggctcactgcagcctccacctccggggttcaagggattctcctgcctcagcctcccgactagctgggattatgggcgtgcaccaccacgccttgctaattgcttgtagttttagtagagacgggtttcaccatgttggccagactggcctcgaactcctgagcttgtgatccacccgcctcggcctcccaaagtgctgggatcacaggcgtgagccaccgtgcccggcctgcttgtagtaatctagatgagagaagtcagtagcttatagtagggtggtaggagtagaggtggtgagaactggttttgaattctggatatattactattttaaagatagagcccaaaaattacctgtgggatatgtgggtgcaaagagagctagtctgaagataaaaataagaaacgtgtgggattgctaccccattcccagtgagtgtcagtagagaagaggagatgacccgtggctgagcattagggcatttggacattgagtgcttgggggaaaagagaagccggggaggtgggggaacaccaagagggtgaggtgtccttggagtcaagtgaggagagcaagtggcctaatgtgccagctgatagatcaggctaaatgagaaggagagttggccattggatttagcaacgtggagatcattaatgagcttggaaagtggttttgatggagctgttggggtgaaaggctttttggagtgagattatgacaaaatgggaagagaggaagatagtgagggtggacagctctttcacacatttttgcttcaaaggacaccatggaattagggctatagggggagagagaagagaaataagggtttttttttttttttttttagatgaggaaaagcacatgttgaaatgctgatggggccgggtgctgtggcttacacctctaatcccagcactttgggaggccgaggagggtggatcacctgaggccaggagttcgagaccagcctggtcaacatggtgaaaccccatctttactaaaaatacaaaaattagctgggcatggtggcgtgtgcctataatcccagctactcgggaggctgagacaggagaattgcttgaacccaggaggcagaggttgcagtgagccaagatcacgccattgcactccatcctggacaacagagcgagactttgtctcaaaaaaaaaaaaaaatgctgatgggaatgatccagtagagagggaaacagtgatgatgaatgagtactagcaatatttgggggcagatggggaaaaattgaaggggtaaaatggaacaaaagtcggatttacttcttcttcttattattattttttattttttgagaaggagtctcgctgtgtcacccaggctggagtgcagtggggtgaccgtggctcagtgcaccctccgcctctcgggttcaagcaattcttgtgcctcagcctcctgagtagctgggattacaggcgcccaccaccacacccggctaatttttttgtatttttagcagagacgagatttctccatgttggccaggctggtcttggactcctgacctcaagtgatgcacccacctcggcctctcaaagtgctgggattacagacgtgagccactgcacccagctgatttacttattaagtaaatatttattgagtgcttcctacatactgggcgagacacagatctctgccctctttgattttttttttgtttgttttttgttttgcggtggtgggggggggttttgagacggagtttcactcttgttgcccaggctggagtgcaatggcgtgatctcagctcaccacaacctccgcctcctgggttcaagtgattctcctgcctcagcctcccaagtagttgggattacaggcatgtgccaccaccactcccggctaattttgtatttttagtagagacggggtttcatcatgttggtcaggctggccttgaactccacccgccttggcctcccaaagtgctgggattacaggcttaatcccagagccacaatacaaagccaccatgcccggcctctgaattttttttttttttaatttttcttatttattttgagacaggttcttgttctgtcacccatgctggagtacagcggtgcaatcttggctcactgcaacctccacctcctgggttcaagcaattcttgtgactcagccccccaagtagctggtattacagacatgtgccaccatgcccggctaatttttgtatttttagtagagatggggttttgccttgttggccaggctggtcttgaattcctggcctcaagtgatccgcccacttcaatctccgaaagtaccaggattacaagtgtgatccaccgtgcctggcccctctttgattcttttaagtgatgctctaagtaactgatctcttcttcctgtacagttttgatggcgacgactttgatgatgtggaggaggatgaagggctagatgacttggagaatgccgaagaggtcagtattcagcctcaggctcccacctctgcagcccaagctgccaaatcgtctgacaggtgatgattagctgaatgtgtctgccttctatttgtggtcaaggcccctgccataagcattcccagttagagtgagctgtgttccagtcttgcatagcagaacagccctgcagggtgggcctgaaagcttttgtccatgtggtccacagcctgtggcttctggggcagttagttcactgacaagttaaacggtgccttccttcatttggcaaacatgtgttgaatgtttattatatgccaggtgctttctgctgggtgggactgcttaaggagcaaagggaagaggtaagcagggctcagatgaggcagtattttgtagcctaaaggcaatgggaagctactgacaaactttgagccagggcacagtccaggttacattttagaaagtacattcctgcctcgagtaaggagtgaactggggaagggcaagagtgaaaggtgagaggcctgtggcttggacataggtgctggtagtgcaggtgatgagaaggcagataaaagagttatttcggtgggttggttatggggctgagaaagtgagtggtgacgaggacgactctcaggtttctggcttgagcaactaggtggataggttgccagcctcaagaggaaagtagggctttctgtcttgtgtgactgatgagggaaaaaatgcagttatgttctggagagacatggagccttctctctctctgcatggcactttcagataccttttcacttgagtcagatgcgtccttctccatccttctggtccccttcccatccctgtcatgtagattgtgcctcctagatgtacttcagccctgtctgcatttttctactcctggtgccttaacctggcttagatcttattgcttttcagccacattcctgcaggaattgtgtggctggttttcctgcttcagtctcactccagactctgctctgtgtgctcttctcctttcagcaccctttcttacttgcccacatgctcagttactactggctttcctaaatggcctctctgcttctgccactgccgcctgcagaatattcgcaacagagtatccagagtgatcctttctttctgttttttgttgttgttgttgttgtttgtttgcttgttttaaattaagaagtggtgtcttgctacgttgtctaggctagagtacaatggctattttcaggtgtggtcatagcgcactacagccttgaactcctgggctcaagtgatccttccagttcagcctcctgagtagctgggactgcaggttctgcaccaccatgcccagctcagagtcaactttttttttttttttttttgagacggggtcttgctctgtcgcccaggctggagcgcagtggggcgatgttgactcactgcaagctctgcttcccgggttcatgccattctcctgcctcagccttctgagtagctgtgactacaggcgcccaccaccacgcccggctaattttttttttttttgtagttttagtagtgacggggttcaccgtgttagccaggatggtctcgatctcctgccttgtgatccgcccgcctcggcctcccaaagtgctgggattacaggtgtgagccactgcgcctggcctgtttacttaattctttatataccacagaatttattctcttgcctacaatcctctacgcaccttttgttctaattattgtccacaactagttgtccaaacctctttctcctctatgcctttgcatgttgcctccttcctcattggtttgacagctcctgctcatccttctaggtgagctcaagtctcatccctggagttttcctaacccccagtgtgagtgaggtgtccccacctcctcgggaactctgttgcacccttcatagcacctgctctgtttactcttgtctcccctttagaccattaattgagagcagaaattcctagctttctttctcagcatctgttaacaatatctggctcaggacaaatgcttagtaagtaattgttaaatattcctgccttcaccttgacttttctagccacttggcccattggctcagctcccctatctgaaagatgggaagactattcctagcttcctgcttagggtaatttttttgtgccaggacctcttttacaggaccaacattctgataccaccccatctccaggccctctgctctcttctggatgaggcagttagctctggaatctcagacctccattaccaggtctgaggcttggtcaggttagctgactttccaagcctctgaaatgagaactgtaatccctgcctcataaggttattgtaaggattacatgagttgttaggaagcagttatgtggtcccctggcatgcagtaagcattaacggtggctgtagcgagaattgtgattgttgtcattatcactctccctgtaacccaaaagtgccacctgagtctttccctcttttttgtcttggtgtccaggaaggccaggagaatgtcgagatcctcccctctggggagcgaccgcaggccaaccagaagcgaatcaccacaccatacatgaccaagtacgagcgagcccgcgtgctgggcacccgagcgctccagattgcgtgagtgattgccccttcactgtcttctccatctgtcaggccacagtaagctcttgtaccgctgatctttcccagcctggcacctgaaaacagactctctgctctcacattccaaaagtggtgccg

SEQ ID NO: 98243 - DNA, 28631 bp, Homo sapiens
tcagaagtggggtcagtgtgtgagtgagagcaggagtatttatgaaaataaaacgtcgtttttcctggaccagctgctctcgtggccctttggaggttgagggagatgggaggggttgagtccatgttccctagggctgccctgtagacctctccacttccgtctttggaggtcaggccgtgggccccctccccaccaccccccgggccctgcaccggaaaaggccctgcaaaggggcctgtggccagtgctgagtcaccagagagggcgctgggctgtggcggaccaggaccgtcccagctggaagtgggcgaccgccagggcctggcaggagccccagctgctacagacaccgagggggaggcccctggctgctcacgacttcctcctgctgtgctcagccctccacacaacctcgatgctgcagcaccccagagggaagtccaagcccagcttctccctccccccagacatcactcccttgcccagcaccaatcgcagtttgtttgggagcagacccagggaccctgagctgggcccctgccactcgcagcggcagctctcccccacacagtgctatcagttttctccaaccaggaggctggggtccaagcttgggcgtggcttcgaggccacacagctgggagcgagggggcgctggtccaggcagatgggccctgttgtgtgggaggccagccctgcgtgtggctctgcaggaaagtgttccctgctcagatgagtccagggaggctgcgcacggtttctcctgagtagatgagcccatacagaccctgggaagtccctcatttaagaagccattttcactttgtctaatctagtgtttcccaatctgaacttggccgctgaacccttctccttagatatagttgtgacatgctggagaattgcccagcacacccgcatcccagcgtgtgtgctctttaacactcatcagcaagcaaggggcccctctctgctgggcccacactgaaagcgcaggctgagagctcctccatgtccgccttactgctgaggggacaagaggcattagctgcaccctgcgggagcctcctatcagatccctacagtgggactcccaccctggcacagccctccagacagaggctggcccctggaggcttccagacaccctgtcccagccacgtggcctcgttcctgttccccttccctaccctgcaggactcgcctccacacttgtgatgtctcctgaagataactccggttggaagtttcttctacctgaaatgaaaccataacccctgcagcatccacttggggtgccagagtcccacctccagcacagtcttcattactggccatggcagggaggagtacaggttggcatggggaacaggtgggactgtgagctgggagtctgggggctggttctggctgggtcactggcttgctgtgtgattttgaggaagatgctttcctttctggaaaaggggagagggactcaatgagctataaggtccctctgaggagtccttggacaaaggagccaggctgtcagctttggagtgacccaggatattccggggacgggaaggtggggtcccttcagcctttggaccttgtcccttgccttgtccttaacccacccatcctgtcagtcatgccagtgtttcctgagcagcccctgggccagcccctgtcctaagagttcacaagctggcaaggacttgggagccagtgtggcaccctgagagcaaagacataaggtaccacagaagccctgcatctgtctgagagtctggggtgggttctaaccagaggaaaggaccctgggcctccactccctggaggagtccttccccaaataccgtgttgctgcacagaggtccgggccactgcgctctgcagtctcaggggctgggatgcagtgcactggggaggcgtgtgctctgtctcttgaagggtgacccccagtgccatgccaagaccagtgggacttcccagatctcgaagccccacttccatttctgttgatttggccgaggcaccagttaattttggttttcagcaaccgcatcacactgttcgtctgtttatggcagccaggagaagtggcaagggcctgggagcctgctcctgcctagtcggtttttttttgttgttgtttttacggagtttcgctcttgttgcccaggctggagtgcaatggcacgatctcggctcaccgcaacctctgcctcccgagttcaagcgattctcctgcctcggcctcccgagtagctgggattacaggcctgcgccaccacatcctgctaagtttgtatttttagtagagacggggtttctccatgttggtcaggctaactcccacctaaggtgatccacctgccttggcctcccaaagtgctgagattacaggcgtgagccaccacacccggcccccagtcagttttttggtttttttgtttgtttgtttgtttgaggtaaggtctctcacccaggctggagggcagtgttgtaaacacagctccctgcagccctgacctcctcggcgcaggcaatcctaccctcttagcctcctgagcagctgggaccacaggcgcgtgccaccacgcccggctaatatttttattttttgtatagagtttcgccaggttgcccaggctggtctggaactcctgagctcaagcgatccacctgcctcagcctcccaaagtgttgtggtgagctactgtgcctggtctgcctggtctctcgacataccccctcccccagtctctctgggccttgcaaccagggcaccagcccagcaaggcaggcaagaggagcccccggacctgatgcctatagcctcccatcttaagcctctgaaatgccctgtgaaatgggaagtgaggctcagagaagtcacacattatgggctgagtctgggccagcagtcttgaggtgtctaccaggatggcacattgccccatacctcccaagtcctccccccagcctctgtcgggctgtcctctggggctgggctcagggtacacactcctccagggctatcaggattaaaatggagttctcagccttagggccaccccaggatttcctggaaagtcctttgggcttggggagggaggtgagggagtttttagagccccagagatctcactatgcccctagctgctctgggtggaagtccacacagagggcagcaccgagggatactacaaacaggcagtttgtcaaagtgtctaaaatgggatgtttctgctcctgcagcccctgcttccgacccccgttaccaccaccactcagctgctgacctccctgcccacatcctgctcaagccttactagcacatgctacccagactgtcccaggctttcacagacaaatctgcacagaggctgccaggccctcaaagcaaccacaggggttaaggcggagccaagggccagcatttctggagctcccaggcaaggctgtctgggtctggcacagcaggagagcccacgtgggcttaggagactgtcagatctgtttcctaacttggcctctaccacttttccagctggggaccttaggccaggggccttgggctattcacctgtaaaatggggacagtgataccaccctcactggaggatatgctatagcacaacaaaaagtcccattgtcctaaggcagctagacacacacaggggtcgttggggcaggaatgggggtaaggggtctttccattcctgacttggcaagctgaataatgatggtaacaagaaacaacgcaaggcactttataagcatcttgcatctattaattcacctaacgcttctgtgaggtaggtactattatttccaatttactgaggaggatgctgaggttcagagacgtgaagtgtcccacttaaggttacccagctaatgacagccacagcctggccagctagcctcctccacacccttaagctctctctgttcctgctgcctgagccactgtgacaggcacactgccgggtcccagaggctttagcaggagccagctaagaccagcctggtagagaatgacccaagccaacaggcccctggattggggaagggccccacgaggggttggctggggagctctgaggtaccccttctgtgtctgcagtttagaaaggccatgatcccaacacccactgatcaaaacttctgagtccgtaagtctctgattacaattccttctaaggaacagcctataaccctaacccaacctttggggagtccatccttctatgattcaacatccaggtgtgacaagggagggcctaaaatctacccatcacccagctaggaggcacagcagccccacccgaatccgactcaaaggcccagggtgtctctcctgcccaggacccttaggtctggctggaggggagtctggagaccagggcaggagtgcggggcaagagctcagttagactgataatatggctcaggtagtttccaccacagctgcggctacaacccacgtgtactgacccctcaccaggccggagctggggctcaggactgggcaaatctaggagagacagaggtgtaagccaaaccttgccttcaaggactttcagaccagctacagaaccagacaagcccaggcccggtgtggtctgggctggaggcttggctggaacagagcaggggcaccacatagtccagagacttcccgagggacaggaaggatggcacctgaggttcccttgccatgccacccatagtcactggccagcagccttcctgttgggaaaagggagatgggggagggaaccttgcctgacatctcatcctggcctgagctttgatcttggagcctcccaacttcccaccaggattccacactcaggtgggctcccatctgggaggctctggccatagcaggcagctgttgggttcccttctcagctcctcccacccccaatgagtcctgcctcattagggaggagagaagcagccagtgagtgtgccaggccctgggctaggtgctgggagtatggagatgtgtggggccaaggtcctgcctctgagaggcgcccagtctgcaccggcacacagtctgcaccggcacacagtagtggctcaaatagtctcaaactaaactgaaactaacaaagcaaagtgcagagggtgtggcaggactctggggcacaccctcccctcttccccacgtggcctgcggctcctgatgccacaggggtgcagggtaaggagagcctactgtttcctaaaggcgctcacatcttgtaaaaccagcagttatggagcacttactgtatgcctaactctgtgttgagtggagggccaaagaggagaactactgagtttgggggcagtcagagcagcacctacatcattgccctacaagaaggaagggggactgaggctgtttgccaggaggaatgagaggagacgggcttcacagatggagcaaactgccaggagatgtggagaacagggtgtcgcgaaccgctctgggagggttcctggtggctgaggggtggcacgcacctcccttaaagggagctggcaggggtgtcttgtccactctgcagaatgggcaggcccaggacagctggcccatcagaccattagaaacagcgagtccggagttccaggggcttgtccacggccacacagcagcccgtggccccaggaagccaaagctcccagccagtcatccagtggtggggggtttagttccagggggccagaggtcctctgcggaagagagtgcaaggcagtatccgcggcaggcccagagaggccaggacaggtcagaaaggcctacccctctttcgcttggtaccctttcctctttgcgagggatgcaaaggttatttatacttcgggtctgcaggctgcgggtggggcaggcaccccgcctggggcgggttgcgggcgcaggggcaggaatgggcttacctgcttcccgccaccggggctgggcggggcgctgcggggaggaggagccgggcacaacctgtggacggccgcggccggcggacacacagcagcgggggcccggccgggggtcgcccgggggcccggaagccggggragagcgaggaaaccaacttggagagaggagtgacctgggggccgggggcggagtcgtgagcgggggaggagagagccggccgccagcaagagccgcgcggcggcccaggaagcgagagcgccgcccacccatccggggcaagagccgcgccgcaggagaggcaggctggaccgggggctccccgggcccgcgacccccgccgtgaccccgcagcccccagctcgcccccaagatgatgaagaggcagctgcaccgcatgcggcagctggcccagacgggcagcttgggacggtgagtgtcacccgcttccagccccactcttaccccggcaggacttgaggggtcgtaaaagggtcgggggagacgggggtgggggaggctggggacagctgggcagccaccctctgagcggccagactcctgctctctcttcctcctctctgaacgccgcccccgtctctcgggcagagctggaggagcaagggtggcctttgggggaagggatgcccccccttaccggattggagggggcttcaggcgggagaatgctctctgccctaggacgctgggacttctctgcctccacgagtctctaagtggatggtcctcctgacctcacttgtcccctctggacaatgggacagttcaccacctctgcttgctgggccggggagggaggagggtcgattagggccacagacctggggcgaggggaggagatgggtcctggcctggtgggaggaggggcctgcccctggcctgcagcgtccctccccctccccctccccccagcccaggggcctcctgcttctgtctcgtttctgcttttcctggactcaggtggaaatatccccaggtctcccagctcccacccccagcctctgagccggtggcacggaggccggaagtttggggagcctctcagagcctgtcttctctgctcctcttcccccagcctcaggagttccccattctctgggtccagggaggggactgggtgtccagagacctggttctagtctcacactggcacagatgcctacatagcctggacagtcagaccaccttgcagtgggccttggcatcccccatgtgtccccaggtgggggccaagggcctgtgcacccctgcccacagctgtagtccagagtgctgtgtgactgtgcctaggagtctgagctcctgcacttcccgttcttggggccagctaatactcctcatcccggggtgggctgaggatttgggagtgggcagaaaagaggcttctgtgtcccaaagctgggccccgggtgggtctctcagcctcccctttagtttcatctgtccgccctctctcaggacacagccctgggtggaggaggaaaaacccatgtatcctattcccacccccatggaatgtgctccgactgggatgaagcaactgggccacccagggcaggcctcagctgggagggacagtggaagcactggggtccaggtgccctgctgcggggaagggaagtagggggcgttctaacccaggcaggctcagcagaagcactctcccccccccccccaccactccccgcagcaccccggagaccgctgagttcctgggtgaggacctgctgcaggtacgtgcctgggccgggcaggtgggaaggcaggcctgtgcaggctgtctcggagcagagggccrgggcggggacgccaggtaggggcctgggttgagtcattcctcaagctgttggccatggggtccccaggggacaggagaaagtttcctgctcagggggagacagcctctcttgatccttaacctccatacctccttcccaggtagaacagcggctggagccggccaagcgggcagcccacaacatccacaagcggctgcaggcctgtctgcagggccagagcggggcagacatggacaagcgggtggtgagtggggggtcccgggaaggaggggcctgagcaggagacttccatccaatggggaagcaaggtcggggctggggtttccttgccagtctgagtgtctggcaccaagggcatggagactgctctgttccaaggcccctctggcactgcactcaagaggccctataccttccccatcacctttaccccacttccctgtgcaccagttcccataagccaaggccaggcttctgacagcacctgaacttctctgtccaatcagtgcgcaagagcaggctgtcaatggggcggcctcagagggtttcctgaaggaggtagcaattgagctggcttttgagggatacacgtttattaatcaagaggcagcgtttattggctgataaccgccagcttgttactaacatatgagtgcactgtctcatggaacactggcacaaccctaggggcaggcaytgctttacacatgaggaactggaggctcagagataaagtcacttgtccaaggtcacatagctagtaagtggcagaactgaggtttgaaccctggtctctgatcccagagcaggcattccccrtaactccagatggggtgggagtgtggggccatgttttggaatcagttgacaattcagtgtggccaaggcaaggaaattgggagccatagagcgtttgaactcagcggtggctaggtcagccatatataccctgggacaggggaaagagctcccgctcccattctccctccacctgtgtgacctggggcaagctccctgccctccctgcatcttagtttcccagtctgcagtaggacttggtcattccttcctgcccagtcaagtggcttctgggaagaggaaagggcacgccagatggagaggggctccatccatgctctcagggaaatgtcacccccaccacgccttgtcatcttgtttccactctcatctgggactgtggccctcctgggttccctcctcccctgccccaaggggctggcctggtgctcaggcagggtggagggaggcacggacactcatcgccggccccaccctccctgcagaagaagcttcccctcatggctctgtccaccacgatggctgagagcttcaaggagctggaccctgattccagcatggggtgagcacagacggggcccagccctcacctggggataccaagacgtgatctcagctgggagggggtccaggtggtgagggcatccacatcagaagaatgaccaggctggggacagttcccaggtcagtgagggtggccaggcctgggagggtgttcagcttagcagagatgaaggatatctaggaggggccggaagtgagggaggagaggccccaccaagtgtttccagtggaggtgagggcagcgggcgcctggacccatggggtgccgtgtccacaggaaggccttggagatgagctgtgccatccagaatcagctggcccgcatcctggccgagtttgagatgaccctggagagggacgtcctgcagccactcagcaggctgagtgaggtgagcctgtgccctgctttcagcccccagcttccccagcttctggctccctcctcccccagcacactgacccccccatgcccatccccaggaggagctgccagccatcctcaaacacaagaaaagcctccagaagctcgtgtccgactggaacacactcaagagcaggtgggagccccagccgctcagggggctcatatctgggtcagcccacagagatggtcatagagctttgaggccctggccacaccaggaggatgctgtggggtctgctgagtacagtgtgtgtacttgtgcacgcctggtccctaggagcacaggtggttagcgtatctgtgagggtgtgcccgcgtgtgtcacagctggtgctggggcaaccctaaagcctgggatcctgtaaacagtcctgcggcagccctrttctcccctctgtggagtggctgtgatcaccaaatctgccaccagggggcaacccagagcactcatggcccagcctgggcagaggccccggccagtggagctctcagatctgcagctctaaatcctagaatcccatgtggtctgctgtatggaggggacacttggctctggacatgcaacagggyaggtgaycagctcacsttgggatcatctccaggctcagtcaggcaaccaagaattcaggcagcagtcaaggcctaggaggcagcccgggyagtcacagccatacgaccatggccaacaaggtggagacgctgaaggaggaggaggaggagctgaagaggaaagtggagcaatgcagggtgagggccatgggggtcccctggatatgtaggggtggcaggggtgggtcctggcccatctcacaggcaaggaagctgaagttcagagaggtgacatgacttgcctaaggccacgtggctaggagccagcagagctccgccattccctcgtagcctcttctgtctgtaccccatgcataacttgggaaggcagagacttggtctgttccctgagtctccatgtgtttgtttgctgagcgagcgagtgaatgaataaatgaagagtgaatgaaagaatgactgaatggtgaataacaggtcactgtgcaaggccaggcgcggtggcttacgcctgtaatcccagcacttggggaggccgaggcaggcgaatcatgaggtcaggagttcaagaccagcctggccaacatggtgaaaccctgtctctactaaaaatacaaaaacttagctgggcgtagtggcgggcgcctgtaatcccagctactcaggaggctgaggcaggagaatcgcttgagcccaggaggcggaggttgcagtgagccaagattgcaccactgcactccagcccgggcaacagtgtgagactccgtctcaaacgaaacaaaacaaaaaacaaggcactgtgctaagtctatggagacacagagatggggacgagaagccagaaaagtttgagggagttcccaggggctggccccaagcaccaaccttggcagagagaggagcctggctgggaccttccacctgcagttgtgtggcctgggggaggtcaccaacccttccaagcctcctcttcccctctagaccccacagcctcacccaacgtaagctctcccctctctgtccccaaggacgagtacttggctgacctgtaccactttgttaccaaggaggactcctatgccaactacttcattcgtgtgagtccaagaccgggccccagccatccagagttcaggggctgaatgccagagccaggggccactggggctctaagatggtggagggggcgtctgctctcaaggaccctatagaaggctcagcttcccycacttccgctcagggtgtcccttcatccccacagctcctggagattcaggccgattaccatcgcaggtcactgagctcgctggacacagccctggctgagctgagggagaaccacggccaagcaggtggggacataggcccggcgataccacacccctgaccctgccctgctyggggcttattgagaagctcgcacttcatcctgaaaggtagcaggaagctgtggatgggttctgagagctaggctcaatctgtgatggagaggcagctctggctactgtgtggagggtggagtgaagcgggcaggactagagccaggcctgtgaggcagaaggaggcaacggtggcctagacctaggacagaggcagtggaggcgggctgattcgagagatgtgacggatgatttcagatgtgtgcctggacagtcagtggcaggtggtaccaccttgaggacatgaagggggggtgcccctgcctgactgctcrgggtgggaaggccctgggccgctgatctgtttcatccctgcagaccactccccttcgatgacagccacccacttccccagggtgtatggggtgtcgctggcaacccacctgcaagagctgggccgggagattgccctgcccatcgaggcctgcgtcatgatgctgctttctgagggcatgaaggaagaggtggggtcccctggggcaggtggggaaggagcactggggccctcattctgtcccaaaccgcccacttgctgccctttccgggtgcctgtaattccctcattcgagcccagctccctgggagaagacatgrcygcctcctgcggcatccacactacctcccccgtgtcaatgctcgcgtgggccaagcgctgtactagaagcctttgcattccaggctccatttcacaatttcacaagagggagacagaggtagagaggtaaccatgcccagagtcatttgagaaggtgacttctcaaaccaggggctccactgccacacactggctggatctgctgtgaatacattgcccccctgtcctgaagatagaccctagtggtggcagataccccaaaacagttctgcgctgctcagcaatcctgctgtgctggggcctcctttctcccttacacttttttttttttttttttttttgagatatggagtgttgctctgttacccaggctggagtgcagtggcgtgatctcggctcactgcagcctctgtctcctgggttcaagcgattctcctgcctcaacttcacaagtagctgggactacaggcatgcaccaccacgcccagctaatttttgtattttttagtagagatgagattatgttggccaggctagtcctgaactcctaacctcaggtgatccacctgcctcagcctcccaaagtgctggggttgcaggcatgagccactgcgcccgaccctttttttttttttgagacaggatctcgctctgtcacccaggctgtagtgcagtggtgcgatcctggctcactgcaaccttcacctccctggttcaagcgattgtgtctcagcctcccaagtagctgggattacagatgcccaccaccatgcccagctaattttttttattttagtagaaatgggatttcaccatgttggccaggctggtctcaaacccctggcttcaagtgatccacctgcacaggcctcccaaagtgctgggattacaggcgtgagccactgcacccggcccctcccttccacttctgactgggcttccatttccccatgatttttcccgcctcctcccagacttcccagccctgccctttgctcagaattctagaccttgaaggttgaagcccgtggacaccgtggtgcccacactgccagccagaccagcggggacacaggcctagcaaaggccagtggcacaccccaggctacaagtgcgccagggtgtcctgccctgcccacccctctgtgacccttgcctgcctcctctcgaacccagggtctcttccgtctggctgctggggcctcggtgctgaagcgtctcaagcagacaatggcctcggacccccacagcctggaggagttctgctccgacccgcacgctgtggcaggtgcctgatccggggagccctgggcaggaggttgggggggaggggrtgcagtggcttgaaacgatcccaagatagcctggctttaagacttgatattctgttgagactgaggacrctcgggttctwaatgtggggtccatcatgagccccccgaaaatgtttggcatttttctggggacaagatggctagccttcattttctcaaaagggcctacagcccaaagaaactgtcagacctagacacgttagtgtgaacaagggccggaggttccttctacagggagagtgggagagcgggtgggggctgcctctgaccctccccacacccctccttcaggtgccctcaagtcctatctgcgggagctgccagagcctctgatgaccttcgacctctatgatgactggatgagggcagccaggtgaggatgttggaggagggaggggatggggaggaggaggatgcaaaggtgtagccctgcgmtggctgacaggtctctccactcccccmcagcctgaaggagccaggggcccggctgcaggccctccaagaggtgtgcagccgcctaccccccgagaacctcagcaacctcaggtgagcccgagcccgcctccccagcctgccgcagagccagagcccagctgrggtcacggaccctgggaccctgggcttgagcctggccttgccactgtatcctaagaaatattactgaaaatgcagctttgatggattagtcatttatatatataattttttttttttttctgagacagggtctcactctgtcgcccaagctggagtgcagtggtgcagtcttggctcactgcaacctccgcctcctgggttcaagcagttctcctgcctcagcctcccgagtagctaggactacaggcgcctgccatcacactcggctaatttttgtatttttagtaaaggtggggttttaccatgttggtcaggctggtcttgaactcctgacctcaggtgatccacccgcctcagcctcccaaagtgctgggattacaggcgtgaggcactgcgcccagccggattagtcacacatttttatgcgaagcattgaaataaatgagaccttgaacttttgaagccataccgcctggcttcacatgccacctctgggcaggccactcagcgtcatcatctggaaaatgcagactgtaacaatctctaccctgtagggtggctgctgaggactcagcttggctcagtgcccactgcagggytggcactcagtggataagctgatttaactgtgacaatgttaagaccattctgggcggtgtctttcacactctttggaaaccctgggctggagaattctcagggctgggtgcgttctgccmctggcctaagcctgcctccgcccttaggtacctgatgaagttcctggcacggctggccgaggagcaggaggtgaacaagatgacacccagcaacatcgccatagtcctgggacccaacttgctgtggccacctgagaaagaagggtgaggggccgcgggctgggggaggtggcaggaggaaggcagatcccatcccaactatctgttgtctatttttccccggggccttggtgtccccatttttggagtgggttgagcagctcctgtttttgaggctgccgtgaggaacaggccaaaggggctgtgcaggccacagggctttggagagaggcaattctggcattttggccagtggtggtgatgaggtgtttagtggcatgggggagctgggagcccagagatcgggttcttttttttttttttttttttgagatggagtcttgctcttgttgcccaggctggagtacagtggcgcaatctcggctcactgcaacctccgcctcccgggttcaagcgattcttctgcctcagcctgccaggtagctgggactacaggtgcgcaccaccactcccggctaattttttgtatttttagtagagacagggtttcaccgtgttagccagggtggtctcgatctcctcagctcgtgatccaccagcctcggcctcccaaagtgctgggattacaggtgtgagccatcgcgccccaggtgtgagctgccgcgcctggctcgatcaggttctactaatagctccacccctccaccttccagagatgggcctgaggaagacaccctcagaacctcgatttcctcatctgtaaattggggagaaatcatacaaactttgagggcttttgctttggggagtgagtgatatgatgaattggaaaatgttttagaaactgtgaagtgcaagccaggtccagtgtcatgcctgtaatcctagcactttgggaggccaaggtgggaagatcacttgaactcaggagtttgaaaccagcctgggcaacttaatgagaccctgtctctacaaaaaattaaaaagattagccaggcatggtgcacacctgaagtctcagctactcagaaggctgagrtgggaggactgcttgggcccagggagtcaaggctgcagtgagccatgatggagccactgcattccagcctgtgtgacacaatgagaccctgtctctaaaaatgaagaaataggccgggggcagcggctcacagctgtaatcccagcactttgggaggccgaggtgggtggatcacctgaggtcgggagttcgagaccagcctggccaacatggtgaaactccgtctctactaaaaatacaaaaattatctgggcgtggtggtacgcgcctgtaatcccagctactcgggaggctgaggcaggagaatctyttgaacctgggaggtggaggatgcggtgagccaagatcgggccactgcaccccagcctgggtgagagagcaagactctgtctcaaaaaaaaagaagaaataataaaattaaagtgtaaagtgcagtgctatgtgaggagtcatcattatttacctggccacagatggcaagatttcctcccacgtgctgattgcatttgcttggtagaggctgtccagatcacaactatgaggaaaagggtccttgattaattagtgatgtctgtcagggtgaaggaagggggacatttggcatgtgagtgacacatttaccatcaactggtggtttgtgggctttttgagaacaaggactcaatatgatggatccttgtgtctccattgcccagcacagagccagccagagagttggggtcacaaaccctttgctgagcagatgcatctctttgtcccagggaccaggcccagctggatgcagcctccgtgtcttccatccaggtggtgggcgtcgtcgaggcgctgatccagagcgcagacaccctcttccctggaggtgaarctcctgcctgcatggacgccctgctgggtgccctccttctgccctgctccctccsctgtagccccacaaactcaccataagtccaggaggaagtctgagcctcagtttctcatttttacaayggggatggtctgcctgctttgtggggtggtggtgaggctcacacrggagtggggaagctgaacatggtccagatgggttcaggggaaggggaaacggtcccggccagtggagtgaggagcctggcgcggtctctgagagccgtctccgctccttctgtctccagacatcaacttcaacgtgtcaggcctcttctcagctgttaccctccaggacacagtcagtgacaggctggcctctgaggaacttccgtccactgccgtgcccaccccagccaccacccyggctccggctccggctccagctccagctmcggccccagccttggcttcagcrgctaccaaggaaaggtgaggactgaggggcttgaatggctcctgtggtactcccacaatcagcctgcctgaggcgccatgtctcagagctggaagctgaatttttggaaatgtaattattagtgttttcatcccaaagaccggatctcctagtttggagagggtggggcrgagactcagaggcggaatttgtctcagccactgatgtgtgccctattcatcatgtagcaatttcctgagcacctactatatgccaggctttgtttccagtcctagggaactcaagagatgatcattttggaatctataaataccttccagttttgttttgttttttttttaagacagagtctcactctgtcgcccaggccagagtgcagtggcacaatcttggctcactgcaacctgtgcctcccaggttcaactgagtctcatgcctcagcctcccgagtaactgggattacaggtgagtgccaccacacctgtctaatttttgtattttaagtagagatggggtttcgccatgttggccaggctggtcttgaactcctggcctcaaatgatccacccaccttggcccctgaaagtgctgggattacaagtgtaagccactgcacccagcctcttttttttttttttttctgagatggagttcactctgttgcttaggctggagtgcaatggcgagatcttggctcacttgcagcctcccgggttcaagcaattctcctgccttagcctcccraatagctgtgacttcaggcgtgcaccaccatagccggctaatttttgtattttcagtagagacagggttaccccatgttggccaggctggttttgaactcctggcctcaagcgatccgcctgcctcagtcccccaaagtgctgggattacaggcatgagccacagtgcttggccaccgtcttctctttgatcgtttaaatctggaagggcttcgtggtaccgtggtgcctccataccaagcagctactattcaggataccacagagcactgcggctcacaccttgaatttcctgatgagcaagacaaatgctcacatttcagggcacagggagagagasagacagcatcaagcacagccaccagtgcgttctctctatagtgtcaggtggagaggcgctgctaagggagggggagcaggttaagggggagcgtgggggctactttagctgtggggccaggaaagacctcgctaaggaagaaacgaccaagcagagacccgaaggcagtgaggaatgagcctaggaccccctctgcttctcacccactctctggcttccagtggccaaagcakctcataaagatcacgtggcccggcacggtggctcacgcctgtaatcccagcactttgggaggccgaggcaggcgagatcgagaccatcctggctaacacggtgaaaccccgtctctactaaaaatacaaaaaattagctgggcatgttggtgggcgcctgtagtcccagctactcgggaggctgaggcaggagaatggtgtgaacccaggaggcagagcttgcagtgagccaagattgcgccactgcactccaacctgggcaacagagcgagactccgtctcaaaaaaaaaaaaaaaaagatcacttggaggcagattgggcaacatagcaaggctgtgtctctacaaaaaataaatgaggtcggtgtggtggtgcacacctgtggtcccagctacccagaaggctgtggtgggaggatttcttgaccctaggaggtcgaggctgcagtgagcaatgattgtgccattgcactcagcctgggcaacagagtgagatcctttctcaaaaagaaatggccaggtgtggtggctcacgcctgtaatcccagcactttgggaagccaaggcaggtagatcacgtcaggtctggagtttgagaccagcctggcaaacatggtgaaatcccatctctactaaaaatgcaaaaaattagccaggcatggtagtgcgcacctgtaatcccagctactcgggaggctgaggcaggagaatggcttgaaccggggaggcagaggttgcagtgagccaagatcgtgccattgcactccagcctgagcaacaagagtgaaactccatctcaaaaaaaaaaaraaaaagaaaaagaaatggccgggtgtggtggctcacacctgtaatcccagcactttgggaggctgaagcaggtggatcacttgaagtcaggagtttgagaccagcctggccaacatggtgaaaccccatctctactaaaaatgcaaaaaattagcagggcatggtggcgcacgcctgtaatctcagctactcaggagaccaagacaggagaatcccatgaacccaggaggcggaggtcacagtgagccaagatcatgccatcgcactccagcctgagcgacagagcgagacttctcaacaacaataacaaaaaaaaacaagsctaggtggcgcacacttgtaatcccagcactttgggaggccgaggtgggcagaagatcgcttgagaccaggagttcaagaacaacatgacaaaaccccgtctctactacaaaaaaacaacaamaaaaaaatctgggcatggtggtgtgtgcctataatcccagctactccagaggctgaggcaggataattgcttgaactttggaggtggaggctgcagtgagccaagatcgcaccactgcactccagcctgggcgacagagtgagactccatctcaagaaaaaaaaccacatggaggccctgagctgaggcagaggtcaggccctatgtcccacctcccatcctggccctacctaccaggcaggtggggctccctcctggtccctagaggaacatggactctgtcacagggtcacaaagcagccaggggctcagtggatgcagaccccaaccaatgccagaagcatcttctgggaggggtgcgtggcatggggacagagtgatagagagcgagtgctgggaggatccggactccacctggcagctggagactcctcaggattccatgagacttctgggaggtggctaagtctgccccatcctctccttccctctgcaggacagagtctgaggtgcctcccagaccagcctcccccaaggtcaccaggagtcccccggagacagctgccccagtggaggacatggctcggaggagtgagttggctgtgggaggggaggaggggacagagggtgggcggggagaggggacaggcagtcccaggtcctcctatctttttaggcagccaggggaggccaggagtcaaggtgataaagagcccaggtcttgccacctggcactctgggtttagatttgaccttgggcaggtgagttcacctgtctgagcctcaccttcctcctctgtgtaatgggacagtgtctgcacttaccttatggggctgcatggagcctgcagtggtgctgcaggaagagtgcctggccctggcacacagcacgtgcccactaagggggagccggcgtgagtactggggtactggagtcccgtccctccagaagcccagaggtcacagactacagtggaaggagggagtcttcaaagggcagtgaaggggctgggcacagtggctcacacatgtaaacccagcactttgggaggctgaggcgggtggatcacttgaggccaggagttcaagaccagcctggccaacatggtgaaacctcacctctactaaaaatacaaaaattagctgggcatggttgcgggtgcctatcatcccagatacttaggaggctgaggcaggagaatcacttgaacccgggaggcagaagctgcagtgagcaaagatcacgccactgcactccagcctgggtgacaagaatgagactctgtctcaaaaaaaaaaaaagaaaaaaggcagtggcagtgaaggagaggaggtggcaggggtgggaagaaaccaggggcctccttctgagcccctctggcacactcacctgtcagtttggcccagagctgaccaggtgagagagtgactgacactcagtggaggcaatgagcagtggacagccaggaataggcggaacagctctgggagcctcgtgaccagggctggtaggtagtctacagtaaaataaaaatgaacaagataggccggggacagtggcttacacctgtcatcccagcactttgagagrccgaggcaggaggctagcttgagccctggagttcaagaccagcctggacaacacagcgagaccctgtctcaaaatttaagaacttttaaaaattcaaaataaatgggcaagataatttcagagaacaaaaagtcctgcraagaaaatacatctggaaaatgtgacggagcagctggggtggggcatggggtgggactctaactagggtgctcggggagggcctccaagggggcaaagggcacaaggagaggcctagacgatgaggagccagccgcagaaacggtgttcccggcagagggaacagcagatgcaaaggttgtgagggggcacggagcttggtggattcaccacaggccacgtggacactcagcctccctcaccctttccttcctcaacagccaagcgcccggcgccagcccggcccaccatgccgcccccccaggtctccggctcccgctcctcccctccagccccrcccttgccccctggctctggcagccctgggaccccccaagccctgccccgacgtctggttggcagcagcctccgagcccccacagtgccacccccgttaccccccacaccccctcagcctgcccggcgccaaagccggcgttcaccagcctcccccagcccggcctccccaggtccagcctcccccagcccagtctytttgagtaaccctgcacaggtggacctgggggctgccacagcagagggaggagcccctgaggctatcagtggggtccccactcccccagctatcccccctcagccccgccccaggagccttgcctcagagaccaactgagtggctggtttctccctaagcagccctcagcaccccctccctccccacctggccctcccaggacagctctcgccccccacaaaggggcatgggcctccagcctttgcccacaagtgcctcagtgcccactgggtcggcccccatggccaggagggctcaggacaatcctctatttcctgaccttttcctcgtccaccctgggcttggggacccccccaccggactctccactctccggcaggtcctaggggagccaccggaaggaaggagaggtttgcctgctcctacgggactgattcttctcttgycgacatgttttttgtaaggctggtaaataaattattttggacaaaactggagcagctgcccaaatgatagttttattttctgtccttgaaataaagaagccaattttataaaggggaaaacaatacatattctttgcctcctttcttcctgtctgaagtgagatcacagcagacatttttagagctttctctgcactacatgctgtgctgttctgtggatgatttccacttaatcttctcctactgcaggaaataccattacctcttagcagtgaggagactgaggcccagacagaagtgacctgccaaggtcacacggcagtcaggcaggggcctgggattagagcctaggtctgactccaaagcctggcttgtccctcacattctgggcaatttacttaacttcttggtatcccttttcctcatttgtgaaactttataacaattccctccacagaggtattgctctccattgaaaaccaaagcaccacccttggcccacagaagcccctaccgctcccactgtttcctggacccctcactctccttccgggaggaggctgggaagcctccccaaggagcagggatggatctgtcctcaaaccttccctaaatctgctctgtgccaggccctgagctagctccaagacttaaccctacacccaaagagttcccaaacagacaggcagaagcaaccattagaatcaagtgtctggccaggcacggtgtctcatgcctataatcccagcactgggagcctgaggcaggaggatcacttgagcccaggagttctagaccagcctggacaacatagtgagaccctgtctctacaaaaaaaaaaattttaattaactgggtgtagtggcgtgtgcctgtagtctcagcaactaggaaggctgaggcaggaggatcgcttgagcccaggagttggaggcttcagtgagcagtgatcatgccactgcactccagcctgggtgacggtgtaagaccctgtctcaaaaacaaaaaaaatcaagtgtcattgcactgggagcccatattagccaagttaggggtggccatataacctagactcatggtatggggtgggtggttaagaacggcttcctggagaaggtgatatttaagggaagtctttcaggagctgacctgaaggtgaattttgtttatttttatttattttatttattttttattttttgtttatttttttttgagatggagtctcgctctgttgcccaggctggagtgcattggcacgatctcaggtcgctgcaagctccgcctcctgggttcaagcaattctcctgcctcagcctcccgagtagctgggactacaggcacccgccaccacgcctagctaatttttttctttttttttttttttttttttgtatttttagtagagacggggtttcaccgtagccaggatggtctcgatctcctgacctcgtgatccgcccacctcagcctcccaaagtgctgggattacaggcgtgagccaccgagcccggccctgaaggtgaaatttttaaaggaaaaaggaacattcaggccaaggagactatctatgcaaaggccaggagcaaaaggcttagggcacttggggaataggagctagttgagcttccaaggttgggtacaaggtacagtttttcccaagtcgttggagctccagttgctcctgggggtcacagccttatctgaagttggcagacaacttcaaaactgtgacaccacagctcacaattcattcatccccacactgcagaccagtggctcctcaaaggtcccaagacctgtggttgcttccagatcacaaggcctcctccctaagacagggacccagccaacctgggtcaccccattactattctgggcaattggccacgaccattctggatcctgccctcccggggcgtgctgcagtgacagcctaccagcctctagcccagtgcttccctaccctatcctagctcacggtagaatccctggaattaaaccaactaaccaacaaaccaaaaaatgcccagtcttcacccaaaacacttacatgaggatctgtcctgctacacatcggtgatttcaaaagcatttgtcaagacattgaactgtacatttaagatctatgcattttactatatgtaaatgatatctgaaaataagttcccaggggactctaacgcagtgtgaagaactactggtctagaccgagggctccagcacccaagaagacaccatgtgcctcgtaccccatcgtacacacacgtttcttgggacttcgctctgaactggagcgtccacgattcagggggcaatgagattcgacccaaaggcagttcatttaacatctgtttttctcccagcaaccagctcgcctaagcttctgattggctggagggcacggggcctttcgcttcgcgttttgtttgtagattcttattggttaagaagagcgtcagtctcccaccgcgtaagagtgtagtcggcgttgaaactcggcggcgactggtccagcagaaccagggacggggagaaggatcaagctagctcttcattggtcccttcccctcggtgttggccacgaatccgcccctctctccaagttccgttagctcgcggcttcgctcctctcccagactctcgcccccattggctgcaggccacgccgtcgccccgccccccggtccttccagcgcgccaattggcggctgcgtggaacgtgccagggagagcgcgccgtgcccgcggagagagcgcggcgcgggaggccggcggccggccggctgcatggcgcgctgcgagaggctgcgcggagcggccctgcgcgacgtgctgggccgggcgcagggggtcctgttcgactgtgacggggtgctgtggaacggcgagcgcgccgtgccgggcgccccggagctgctggagcggctggcgcgggccggcaaggcggctctgtttgtgagcaacaacagccggcgcgcgcggcccgagctggccctgcgcttcgcgcgcctcggcttcggggggctgcgcgccgagcagctcttcagctccgcgctgtgcgccgcgcgcctgctgcgccagcgcctgcccgggcctccggacgcgccgggcgccgtgttcgtgctgggcggcgaggggctgcgcgccgagctgcgcgccgcggggctgcgcctggccggggacccgagcgcgggggacggcgcggccccgcgcgtgcgcgccgtgcttgtgggctacgacgagcacttctccttcgccaagctgagggaggcgtgcgcgcacctgcgcgaccccgagtgcctactcgtggccaccgaccgtgacccatggcacccgctgagcgacggcagccggacccctggtgagcgcgggaatggcggggaaactgagatgggggcgacctgcgcattcgcctccacgcctaagggtgaggggcggggaagaggcgtctccaggtggcaggtggggaacaggagagtgcgagggaggcccagggtgctttggtgtggggggcggttgatccctgtagccgtcatcctgtgaggcgcagcagtgtggtccctgttggacagatgaggaaactgaggccctttgtaacttagggagttgggcggaattctgccctacccaccatcggggtggggttggagaggaagcctgggaggattgtccccctgtgtgagggttgaaacaccattcccagaggcagggtgtaggcaggtgtgtggggagcaaaggcggtggagtttgacctcagttccaggtccagctccagcttcacagctgtgtaatcgtgttcagttacataacctccaagcatctctgcctgggtgagaaatggcagtgctcagcatgcccggtgacggtgatcagggtgagtgcctggcacatagtaggtgttcagatgatgtaagttgtagccagagtcccccatgttacagagaacttaatgaaacagctttgtgtgtgttcttctttggtttccaaattactctggagatggaagttattgtcccatttctcaagtaaagagactgaggcagccggatgcagtggcaacagcctgtagtcccagctactcgagaggctgaggcgggaggattgcttgagcctaggaggtcaaggctgtagcgtgctatcattgcatctgtgaaaagccactgtacttcagcatgggcaacatagtgagaccttatctctaaaagaagaggaaagaaactgagactaagagaagggaagtgagctgcccaagaacagatatagtgagcccctccacctcctgtgtccccacacacctgcctccatcctgcctctgggaattggtgtttcagccctcacaagtagggacagtcctcgcaggcttcccctccaaccctccaaccgcaccccaatgatgggtggggcagaattctgccagcaactctctggcagagtgatagagcgcgggaacctgaatttggcctttgtgacaccgacctccagggcagtcttcactgctgtcatcttgcgagttcagccctgcaggggaggcagaagcaaaaggaggctcctccattgtggagggtttgcgttagacaagagcaggtggcagcagaggctaattggcagtggtcagtgtgtgtggacaggttaatagcccagtcagtatactggggccgtggacagatctctgtcactccgtctctgttggccactgacccggacagtcattgatattaaatcctgggggtacaggatggtattgagtggagagaagtagacacaggattatggtggggtggtgagcagggcctagtgccaggggcacctaggaagacttcctggaggaggcatgatgcagggcagtgataatacaccaggagatgtaaacccagtgttatggcatggcagagagggattctgtagtccttggcctctcctggctgtgctgcacacctgcttggtatgtgggcgggctcacctcagcctcagtttccctataagtctgtgttgagggctctctggtcagggctgtcagcggcagcagctcctgcctgccttaggctatgctatgaaaagtttttcccaggaggcctcaaggctcaggttaaggctgtgggttaagaggttccccagggctcaggaaggctggttgtcaaggagctagggagaaaccaggccctgcccacacctgccttgcaggcgtctgtggaatccagacccctttggtctcagtagccacctggctgtgcccacccatcctgctgtcactcccatagcctagagggggaggcagaggcttaacaaatacagcactgcgatcatgtttgtgcacagcttgatgcagctttcaaacagtgtggtgtggtgtggtgtgtgtgtgtggtgtggtgtggtgtgacaatattaataaaagcccccatgatgtgtatgtctgaaataatgcaaatatctcacccccaactcctcctcccctgccccagggacctccgaaattgtgtgtttatcttgtcaccacatggcagccacttgagctgacaaatagaaaggcctgctgtcttaggaatacgtcatcagcataacatgcagagcggtggattacagagtggaggggagtggaatgatggtggcctgggagacggcgatgttcccagatgcccctgctaggaggctcgctcccctgaggtcaggatctttgtagtgttgactgctctatcccgtgtctggcatgtagttgggccttagtaaatattagctgaatgaaggatgtgggacacagggcccaaaggtgaacagctccatcctggtggggaaggacagagttggggccattcttgagctcagaagaacattttgggatgactcagtggaagccctttctgtcccagaaggaatcgctcaccaacggagcacgtggcttttattctctctctttttctttaatttttttttttttttttttttttgagacagagtcttgctctgtcacccaggctggagtgcagtggcctgatgttggctcactgcaacctctgcctcctaggttcaagcgattctcctgcctcagcctccccagtagctgggattacaggtacccaccaccacacgcagctaatttttattctctaccaagttcttaaaata

SEQ ID NO: 98244 - DNA, 21456 bp, Homo sapiens
ctcctcctccttcaagctcaaacaccacctcccttattcaggaccggcacttcttaatgtttgtggctttctctccagcctctcttaggaggggtaatggtggagttggcatcttgtaactctcctttctcctttcttcccctttctctgcccgcctttcccatcctgctgtagacttcttgattgtcagtctgtgtcacatccagtgattgttttggtttctgttccctttctgactgcccaaggggctcagaaccccagcaatcccttcctttcactaccttcttttttgggggtagttggaagggactgaaattgtggggggaaggtaggaggcacatcaataaagaggaaaccaccaagctgaactgaattttgccttgtgttgctcccctcgtcccgctgattttaagtctttccaaggtgtcagtgggtttcagtggtggggaaagaagagtactgggtacaagctggagggatagaagtatattttggtttattctgttcatgttgggcttttccctgtctgcaaaaagagggtgcttttgttgtgatggaatggaatactgaggattatttcttgaaactttagttttataacacgcatgtgaaactaaatgttaaaaatgctcatgtaaaaaaaaatttttttttactgtgggttcctgtggagaaagttccgaagtacctgctttaggtgaacatccacatttgctagaacattctaactaagatattttcatgtgtgcaagctagtaaaacggctgttctcagttgcatgtcacttggctagacttttgccggtgtgtgggatccggcagagtggaatcagggagggagaagactgggagcgggagccattatcgccaggaatacttcaactcccagcaatcatttctccggcaggccggaagtggggcggtcctcctggggagaaagaagctgcagaacgaggcagtatggtggccgagagttctaatcccttcttcctcttctttcttggtcccgcccagcctacatctcccaggggcctgcgcgcgcacttccgctctcccctccggctcctggtctccccgccgctccccgggggaggggagcggcttggtgcgcctgcgccagcctgtggctttctgggaatcaaagttccggaggttcatgcggtcccttttccgctgttcccggacggactacaaaacccttggtgcactgcgcctcggcgccggcggggggaggagggagagaagaggagggagggaggagagaggaggaggaggaggaggaggagggagcaggcggccggcggcgcggggggagggggcccggtccgggagtgcgggaggcagtggtagagggaggtggcggcagcggctagcggactcgagtctcaaccgggctgaggcggacacttctgtggagcgaagcagtgggagcatcgagcactagaggcggcaccgggatccccggctccggggaggggggcgccggaccgggaggaggggagggggcgatgctggaagccatggcggagcccagtcccgaaggtgagctctcgaccggtgcagagcgctgagccggcggggggcgggcgaggaatcaattggcaaacttggaggtcgagccccggagcccagcgggggagttcggggagggggtcgggaggctggccctggaggtgggagagcgacgagttgagagaccttggagaaagaggagtgggaaactgggctggggtagttggagatcagacggtgtgggggtgcgggggataggagcttgaaacccggagcctcgggggttagggcccgaaagggccaccggcagattggggccctggaactggaaggttaggggaatccagtggccggagagttgctcaggagggaggacgtagaagaggctgagtgaggggcccggtagttcgccgaggtggggtagtttgtggcggtggtaccggagctccgagtagttgccgccggagaatgcccggtgattgtcggagaggtgggcaggtagttgtggggagaagagggggtctgggtattgtctacggcagacggacctgtaccggggggtagttgtggagagagcgagccaggaagcgaggcgagctgggtagttgtagggggtggtggggcggggtggggggggttaagaccggcgacttgtcgggcgggggggtagggttggtccgcgagggttaagagcctgggagttgctgagggtgaggggggcatcggcggcagcagcggtggctgctgtggagagagagagagagtggctggttggggggaaggggccagagttgaggggtccatagcctagtaactgggtggtgagtacgggggcggaggggggggcggcggccggagagggctaggaacagggccggggggcccggtggggagcccgaaaagctggagacggggaggggccaaagccccggatgggggcggagggacggcgaaattgtggggagcgcggtatgggcgggtgggggggcaggtgggggccgcgtccgggttagagctcccgggtctgtcccggccgtgaagtagcgttggatgcgtgtgcctgtgtgtgtctggggtgggggtgaggggcgcgccgggccgcgtgctcgagtagaaggggccggagggcggggagcggttcggcgtggtcatcctggaccctgggggctggcgggcggcgtgtgcggtctcggagggcccgaggcggtggagcgcggccgggtaggaactcggggctccgggcgcgtgtgaaggacgggggcggctggcggcggcccggacgcggccccgggagcggtacggtggggtggggcgctgagggatccgagtagactggagtcgagagagaccgtgagttgggggggcggggcgccgggcctccggttgggggaaggggagcgctatagcgaggcctcagagggcgccgcgcccaggctccgcccctcgcggggcggaagggggagccggggcggatccaacacagctgggggcctgctggcctggcagagggacctgggagagcagggggttcacttaggaacaacggggtttagagggggagttttacacagattgttcctagtgtcttgactcagcttttattgcttttccagatccacctccgacccttaagccagagactcaggtgaggtttgccttacctttgcagcctagtagccctgcctgacaacgccccccgccccccttttctagacctcacttagggactgtgtttctgggaatgccattcttaaactgtgtggctttgcatgtgatccatatctccttcctttcagccaccagagaaacggcggagaacaattgaggatttcaacaaattctgcagttttgttttggcatatgctggttacattccccctagcaaagaggtaggggcaagagaattactgacttgaggctggtgtggtgggactatagagtgactgttgttcaaacagaactgtattgctttatagaaggaggcccttagaaattatatgtaagaccagggaagttggagactcttagggctgtggtaggaaagctggtatgcggggagtggatggccgggatagctagcttgaacagcagtgaaaaggaagggggatttggagtcgctggttgagattttggcatagtcttgaggtgctgtgaatggaaggtgtttatggataaattttagggagatgaaaatggtaacaaatgaggctatacagaaaaagagctaaggacataacggctccggtctgggtgatacagtgttccacaggccctgggcaggggcagcggtgaggtgtcagacttgagggtagaggtaacacggactggtcaagaggacatgctgatgggaattggggtggggagaagtttttggagtacagtgggatttagtggttgaggtaggacattttggggtaaatccagtcactccttttcaagctgggtttgtggaggggctgagatgacactggggttctgctgaccctggtctcttcccccttttaaggaaagtgactggccagcctctggctccagctctccattgcgaggagagagtgcggccgacagtgatggctgggactcggccccctcagatcttcgaaccatccagacttttgttaagaaagcaaagtcatccaagagaagggcagctcaagcaggtcccacccagccaggacccccaaggtccactttctctcgtctgcaggcccccgacagtgctaccttgcttgagaagatgaagctcaaggactctctctttgatctggatgggcccaaagtggcatctcctttgtcccccacatccctgacacatacctcccggccccctgctgctcttacccccgtgcccctttcccagggggacctctcccatcctcctcgaaagaaggaccgaaagaaccgaaagttggggccaggagctggggctggctttggggtgcttcggaggcctcggccaactcctggggatggggaaaagagatctcgaatcaagaagagcaagaagcggaagttaaaaaaggcagaacggggggatagactcccacctcctgggcctccccaggcaccccccagtgatacagactctgaagaggaggaggaagaggaggaagaggaagaagaagaagagatggcaacagtggtagggggtgaagccccagtccctgtgctgccaacaccccctgaggctcctaggccccctgccacagtgcaccctgaaggagtccctcctgctgacagtgaaagcaaggaggtgggcagcactgaaacaagccaagatggagatgccagctccagtgaaggcgagatgcgggtcatggacgaggacatcatggtagaatcaggtgagaggtttgggctggggcgaggggtttgagggtgttgtggatccaacagctcaggcagaataccaaacaaacctttttttccccaggtgatgactcatgggatctgatcacatgttactgtcgaaagccctttgcagggcggcccatgattgagtgcagcctgtgtgggacgtggatccacctctcctgtgctaagattaagaagaccaacgtccccgacttcttttattgccagaaatgcaaggaactgaggccagaggcccggcggttaggggggcctcccaaatctggagagccctgatggcaccaactttagcctggaacttccaaatgacaacatgatttgggaactgagcctcagggtcctcagcctatcccctggagcttggatactgtctgcacttcaaggcaggaattctcaagggagacttgtttgaaaatgagtgtctcactttcccaccctatccttcctccccactctgtggacttgaaattgaatccattacggttggggatgggaggctgtctgtgtcccgacacataatctctgtctcttggacctgccaccatcactttctgggtcaggattggaattgggatggaatgggacagttgtctataaaactctagtgtaaatattagcactcccctccctcatcttttcttctatttcactccccatttattttcttctacaccggttgtatttttaattttggacttcccctattgggcatggcagctcaaaggtggagtactagagcctggccaagtgaggaaggaaagcagaaaggtgacgattctcactcacctcttttgtttttaataatatcggccgctgtttgtacagacagcctgcgtgttgtaaataaagcagagtgggctcttttgtgtttatagccctcactgtcctgctcgggagggaggctttggtggctgaagactagctggaggtggggctgaaacccacgtctcaaagtccaatctgaagatatcacagcactgggcctttcccaccccaagacaagtaagccaccttagagctttcattgtatttggccctccccactcgagtctaggaacccccacagtccccaccttcactccctgcacgcacactcctgcgggtcagagttgcttcgtgctccatcgtgggtggggtaaagcggggtgggagccgatggtccgtttcctgaaggcacaggccagcttagcctgggtgctcagaggacctcggctggggtacacgtttgggggctgggagaccgttgctgaaggcagcgatcatgtggcggsggcactaggcggagtcagacggtcacgtgattgggaggggatcacgtgacggagggcggctgaggagcgcggggtggctgcctttaagtcacgtgacatgaggagaggtgggcgggtacctggaggaagctcgcggcgtcggtggcggtggcgcgcggcggccgctgagaccggggctttgagtcgcaccccgcggcccgccccccgccgccaccctcgcagatccgtgctttttcccctttgcttctctcccgtactgggtcagtcctgtccgcgctcgcgcgtcggtttgcgggtgtgcgcaggcgcggcaggggccattagccctttgggtgggcggtggagcccgggagcgcgcgggcgagaccatggcgggtagcagcactgggggcggtggggttggggagacgaaggtgatttaccacctggatgaggaagagactccctacctggtgaagatccctgtccccgccgagcgcatcaccctcggcgatttcaagagcgtcctgcagcggcccgcgggcgccaagtactttttcaagtctatggatcaggatttcgggtgagcgcaaggcctagataggaccggcgggggctttgctagagtggattgggcgacatggaggggcacacgtctactttgggccacactgggattttctggcctatggtggagcagattgtactatgctgaggtaggttgactatcccaggatggacaaggttatgcttggatagattgaggcacacggacagactaggatatcctaaaccagattagacaagattaggctttactggaataggtgggggcatactggtttatgttggagtattctagtctgtactgagtaaattgatccattgtctggttgtttagtacgttctcaggagtcctgtaacgcctgtaatcccagcactttgggaggctgaggcgggcggatcacgaggtcaggagatcgaggccatcctggctaacacggtgaaaccccatctctactaactaaaaatacaaaaaattagccgggcgtgggggcacgcgcctgtagtcccagctacttgggtggctgaagcagggagaatctcttgaacctgggaggcggaggttgcagtgagccgagatcgcgccactgcactccagcctgggcgacagtgcgagactccgtctcagaaaaaaaacaaaaaacacttgggccattatggactctactgggttgtattggttaatcctggtttctcttggggcaagacttggttttattggagcactcggtataggggcagacaaggctgttggggcctgtgctagcacaggcagccgtattgggatgttccaatctagactggtgcagacagctgcgtgtgggggcattgtaggctgtgctagaatagattgggctatcctagggtaatttgggacattcagggctatcttggactagattggcgtgtaaataatgcagagaaagcccttttgtgtttatggtctttggggctgagccttctgggtcctcaacctctgcttttttttttttttttttttttttttttttttttttttgagacagtctcgctctgtcgcccaggctggagtgcagtggcgcattctcagctcactgcaagctctgcctcccgggtccacgccattctcctgcctcagcctcccaagtagctgggactacaggcgtccgccaccacacccggctaattttttgtattttttagtagagacggggtttcaccgttttagccagactggtctctgacttctgacctcgtgattcgcccgcctcagcctcccaaagtgctgggattacaggcgtgagccaccgcgcccggcccaacctctgcttttttgaaggcaggctggattaagttgggatagcatgggttttagaagaactgaacaaactggactctagctagaaagattgtttgacatggggatgctgatactatcttgggagttatcttggctttaaggcaaggtttttctagttgtcagcaatgtaatcttggacaatttatttaaattttgtgtcttgatctcatctgtgacatggagaaaatcacagaatgaaatggttagttcacgtgtgtggcacacgggaaattcttggtgaatggtaattgtaattagcattgaggctgaccactctgtaaagtaggttatggtgatacagaataatttgcctcagagtggaccaagctgtgctgagattgtgttatgttgggaagaatcctacattatgctgagacgggttagtagtgactgggctgtgttgtcacgttgacagcaaatggattatgttgatatatatcctggctcccatgaccatattaggctaacgggttaattagacaaggtgtcctaatttggggctaaggttgtgtgtggaaagagagagaggaacaactagggtagagagtctgatgctttatacgtttattcatttagtcgacagtatttgttaatgcttaagtgtcagtgtgtggtgtgtggctaggacatggtgttgaccagagtaagtgttcatggtttgatgtcatggtcaagaagaaggggcaagtccggtccaccacagggaacccattggagagatgaccccaaggctgggctttgggatctgtcaggttgagcagattgctttgtgcagaattttgtgcccagtgaggcacaggggaatgggaaccccagcttgccctctccttgggagctttcagtctaatgaggaacttccattgtttgtttgatccaatgggtggtttttttttttttttttttttctgaggtggagtctcactctgcccaggctggagtgcagcggcgcaatctcagctcactgcaaccttcgcctactgggttcaagcgattctcctgctttggcctccggagtagctgggattataggtgtgcaccaccatgcctggctaatttttatatttttagtagagaaagggtttcaccatgttggccaggctggtcttgaactcctgacctcaggtaatctgcccactttggcctctcaaagtgctgggattacaggtgtgagtcactacgcctggcctctaatgggtgtttttactcaagaaaggacagtcttctagaaatgaattagagaaaactaaaggaaagtataagagtagaggctttgatgaggaccaaagccttttttggaaggtttttttttttttttttgagccgcccaggctggaatgcagtggcgcgatctcgacttactgcaaccactgtctcccgggttcaagcgactctcccatctcagcctcctgagtagctgggattatagacacccaccatcatgcccggctaatttttgtattttagtagagatggggtttcaccatgctggccaggctggtcttgaactcctgacctcaggtgatccgcccgcctcagcctcccaaagtgctgggattacaggtgtgagccaccgtgcctgacctttttggaaggtttgtaaggaacaggggtggggttgagaggaggccaccagccagtctcattagataggtatctcaggcagccgcatcagcgtgcgggattgcttttgaaactggactaagaggtttgagtcagactcaaggaagtctttggagcagcactgtgcccctgagggtgcrttagggagaggagaaataaggaaaggggattgagtttggagatttcttaggtgtcggagtgagttctttcaatgtaagagaagacctgaacagggcaggagaaagtcaacatcctggagccaggtgaagattgggagaaagtttgatgggggtcggggtggggatggttggtccagctcactgacctctacctygtcgcttggcagggtggtgaaggaagaaatttcagatgacaacgcccgcctcccctgcttcaacggaagggtggtatcctgggtaagaggttctgacaccgaggaccaggccccctcagcattgccaagctccctcaagcctcagtctgtttctgtatcctccccaggccgcgcgttagcagccctggctctttacctcctgtctgtttggagagccggcgagaggccctcagccttctccttctggagtctctaatacttgctaggtttttttgctcttctccagctctctgagaccctttctcattctttcacttactgccacctgtcacaccctgactcccaagtgagccactgtttatcatttgcacccttctagctggtgtcctcagataatccccaacccgagatggcccctccagtccatgagcctcgggcagaactggcgcctccagccccacctttacctcctttgccacccgagaggaccagcggcattggggactcaaggcctccatcyttccagtgagtccttcagattcttgactgcaggggagggaggtgaggagggaacccaggcctttggtaggggacgcctaggatccggagccctgttctcctgatgtgggttggaaaccatctctgcctgtccagccctaatgtgtccagcagccatgagaatctggagcctgagacagaaaccgagtcagtagtgtcactgaggcgggagcggcctcgcaggagagacagcagtgagcatggcggtgaggggcaggcctgggggccgggaagggctgggccagaccccagccttggtggggtgagcagggggaagcttggttcttgagcttcctgtccatatgtagctgggggccacaggactggtggcccctcaaggctggagcgccacctggccggatacgagagctcctctaccctcatgaccagcgagctggagagtaccagyctgggggactcggacgaggaggacaccatgagcaggtgtggctccgcacagctctccccagcgcacccagccccgtctcgtcttccagtcaatcctcttgttctttctcttggccccatgaccactttggcctacgtttgctctccttcccaacctcctggtaggttcagcagctccacggagcagagcagtgcctcccgcctccttaagcgccaccggcggcgaaggaagcagaggccaccccgcctggagagggtgaggggttcctacaggaaggctggtgctgggagaaggtggggcatgggctttggtttgggcggtgccaggacacyrgcagcaccccagggttgaccctgggttattgaagggcactctggctccttttcccaccacagacgtcatccttcagcagcgtcacagattccacaatgtctctcaatatcatcacagtcacgctaaacatgggtatggggagagcctgtggctagggcgtggggagggcctggtctctagggttccgggcrtcctgtggcaggggctcctcttttcacatggcctctctccacagagaagtacaacttcytgggtatctccattgttggccaragcaatgagcggggagacggaggcatctacattggctccatcatgaagggtggggctgtggcggccgacgggcgcattgagccaggggacatgcttttgcaggtgtgctggggtagggccactgagctgccctgcacgggggccctcagcctctcccaccgtgtctctgacccacttgccgtcgcttccaggtgaatgacatgaactttgagaacatgagcaacgatgacgctgtgcgggtgctgagggacattgtgcacaagcctgggtgagttgccaagcaggttgccggtcctcagtcctctttttttttctctttcatgttttgttttggaattttaataagtactaagacagccgggcgtggtggctcgagcctgtaaacccagcactttgggaggcccagatgggtggatcacctgaggtgaggagttcgagaccagcctgaccaatgtggtgaaaccgtgtctctactaaaaatagaaaaattaagtgggcatggtggcacatgcctgtagtcccagctagtgaggtggctgagacaggagaatcacttgaaccctggggggtggaggttgcagtgaaacgagatcacgccactgcactccagcctgggcgacagagcaagactccgtctcaaaaaaaaaaaaaagtgctaagacataacgttcaaagtacatgaaacaaatgcatgacatagcaaataatactagagtaaatatccatgtcactgccatctagatcatcaaataggagattgctgataccctagaacttcctcctcagatgtcccttcctgctcccaaatgcctcactgccccaggggtagtcactctcctgacttctttggccatcaccataacaaagaaaagctttgcctcactggatagttaccacccttgcacgtatccttgaacactgcagtttcgttttacctgtttttggactttctgtgaatggaactgtacagcgtgtactctcttgtctcacttggcagtatgtttttaagagttttccatgttgatgagtcatccacattgtggtgccttccaccctcaccttctctagcccagccgcgatgtgcttgcttctccccctctttgtgtctcttaatccatccttgcttcagacccccgccctcctgaggcctcctcttcccctgcgcccttgactggacttctcttccccatagccccattgtgctgactgtggccaagtgctgggatccctctcctcaggcctatttcactctcccccgaagtgagtgacactcagggaggggcctgaagttgggggtgggggctgcccaggaggctggggccgggcctgtggtcatggggaatgggtgggaggagggtccaggcagaggtggaacaggaggctgagtcagggagggactgggctggcttttggggactgagaatgggtcattttggtgccatctttgtcccagatgagcccatccagccaattgaccctgctgcctgggtgtcccattccgcggctctgactggcaccttcccagcctatccaggttcctcctccatgagcaccattacatctggatcgtctttgcctgatggtgagccgccagcccacctcatcccaccctcccagcagaaggctgtcccgcagtggtctgatccattgcccttgtgggagcgatccctgactctggttacccgttgtctcctctgccaggctgtgaaggccggggtctctccgtccatacggacatggcatcggtgaccaaggccatggcagctccagagtctggactggaagtccgggaccgcatgtggctcaagatcaccatccctaatgcctttctgggtatggctgggtcctgggcaggtggctggagaaggggaggaggtggtgaccaaagccaggaatggcacaggcagaggcgagagcaggagttggaagaagaacctgaggcctttttccactgtgggtgctcccaggctcggatgtggttgactggctctaccatcacgtggagggcttycctgagcggcgggaggcccgcaagtatgccagcgggctgctcaaagcaggcctgatccgacacaccgtcaacaagatcaccttctctgagcagtgctattacgtcttcggagacctcagtggtggctgtgagagctgtaagtccccctgccccaactctgggagtgtggctttgcctaccttgttctgcctctccaaccctagacctagcccagaaaccgcagccagggccaccatggatggtcgagcagtgtgtgtcccgcactaggtcctgcactggccgaggatgggggctgacgtccacccatgtgctgctggacaagccatgtgccaggtgcaggactgtgtccaccgggggaaggtgcacctcttacytgagtcccgcaaagacgtgggctagtggctgtgcccctgccctcatggcagaagtagatgggagtttcttgtcagagacccttgtgaacccctgttttgagccccatcgtgggtgggtctgggagaactgttcccagttcctctccattcggtgtcttggggccctagcctcttgaagcagtgatttcttcctctcytcccttgctttccagacctagtcaacctgtctctcaatgacaacgatggctccagtggggcttcagaccaggataccctggctcctctgcctggggccaccccctggcccctgctgcccactttctcctaccartaccctgccccacacccctacagcccgcagcctccaccctaccatgagctttcatcttacacctatggtgggggcagtgccagcagccagcatagtgagggtaagtcatccccacatacctgtacggccaggatctgagggtggatgagaggggagccagggaggagcctgggtgaggactcagttgcccctcccctccctccacaggcagccggagcagtgggtcgacacggagtgatgggggggcagggcgcacggggaggcccgaggagcgggcccccgagtccaagtccggcagtggcagtgagtctgagccctccagccgagggggcagccttcggcggggtggggaagcaagtgrgactagcgatgggggccctcctccatccagaggctcaactgggggtgcccctaatctccgagcccacccagggctccatccctatggaccgccccctggcatggccctcccctacaaccccatgatggtggtcatgatgcccccacctccacctccagtccctccagcagtgcagcctccgggggcccctccagtcagagacctgggctctgtgcccccagaactgacagccagccgccaaagcttccacatggccatgggcaatcccagcgagttctttgtggatgttatgtagcccactgtggggccaggctgggccgggcgctcctggtgtgtgactgggtgtcctggccgtcatgtgcttgctcttacagtgcctgggctcagcctaccagctgctgccatacaggagattgtggccactgtgactctcaccagcagtgcctggttcctcccccttccctcaggggtagacaagggacctttgattatttttagctttgtttttttataagcctttttgggggttaaaatagagtttcttacatttttgggacttttttaataggcatttcctcttttatatgaagaattcccatccattgggccccttctaaccccagaatgtgacctcctcctccagttacccacagmcctgccctttgcagggttgggggtggtcagcggtaccccggggttaggcatcctagacagcagcctgaggaagctgggagatttgggccatgtagctrcctttgttactctatttattttagtcacttgtataaaacmccaaataaagcaatagaggcaaactccccacgcctctggctcctttctttgggagggaggcaggcagcagggggaaagaaccgtcacacaggagcaaagcatgactggctagaaatttttattatttgcgaggcagtaagtgctcttgagagcaggcacagtgctgggaacactaggccccttcgggacaaaccagggccttaaggaaaggggcttcggctttggcttgagggaaggcacataactgggacaggccctggccgggagtattcagaagccaagtgggttgctggtgaccacaccaccccgctccaccaaggccttggagatgcttttgaagttgcggtagagctcttgctgccaggggtcagactgcagggcggccatgccctctcggatccgagctgcagcctggggagagggaaggaggggttgggcctgcacctccagccctcacctgagcttggcagccccgagtctcacctcgatacaccaggtgtcacagagcattttctcatgctgggccgtggggtggccctcactcagggatcttgaggccctggcaggaagcaggagatgaaaataaatctgggccggctgggatccaggcccaggccccctgcggctcaggcattccctgcctgcctcctcacctcgagagaaccaccaccatggcatagaggtcgatggccccgtctgccagccgctgcagcagaaactgttcatctgtccggtaggtggggtgggggtgggggtgggggcattagtctcaaggagaggaaagggaggggcggaatggtgtagagctcacttactgacaatccccttcttgtgttttatcagcttggcctccaccacagtggcaaactgctccagagcccgtactgccttaagagatggggacagtgcggggctcagaggggccatcggctgcagtccctgatgcaggctctcctggacccctggccgcttaccagctcgccactccgactcaactccgggtggacaagtccgctgagactcaggccgctgcccagccctgcccgcctgagaggaagagggagaatgactggttagttgccatacaccaccctgccctcccctggctctggccctaagcctaccgcctcagctgtttgcctgcctctcctagcaggaggccagcattcccaaagggattctttagagcactgccaagcccagagagctcctttcctttgtcctatgggggaagagggtccagcagtcaggactcactgtcctccccacctctacccccacccaattctctgtcttaccatacagccctgcagagccacaaacagccgaagaatgtcatttgtcccctcaaagatccggaagatgcgaagatctcggagcacacgctctactccaggttcctagcacagggccacacaaattatatgcccgtgctgagatgtgcctacccacccctggcccagccgaggctctgcagaagaccgtcctgtaccttcatgaagcccataccccccatgatttggatgcattcatctgtcaccttccaggctgcctcctagggacaaagaacagatgagactggttttgggagctgagcacccaaactggactccctcccagcatgcctgggacctcaccgagccaaagattttgctgatggcggcctctatctggaagtccgtggctccctggtccatgttagcactcaccatgtaagccatggactgaggttgcatagttgggacatgggaaggaaaattgcaaagggctttgtcagacttggcctcatcacccagatctccaagataagggctgacctagcttgtcaggtcaggcagatacttgttctgggtcagttcatcaggtgcttccaggtatttgttttcttaaaaggggtggatgtaagggatgaggtagaattaacttctggtactgctggcaggcacctgagcagaacatcattgctgtctctcttcgcagaagctgagctgactatgcctccccgcatcccctagggcattggtgtaaagctggagacccactgccccaggtgctgctgggggttgtagtctgacccgactgggaagaaagccccagggctccagggagaggggcttgggaggccctcacctcagttacatactgcagcataaccatccgtgccagcttctcctggatcagcccaaagttgtgaattttctccccaaactgggtacgattagtggcatgatctacctggaagagggtccacacatcccgctgtggttcagtgtggttctgcagtctccctaggagaggggctgggcttgcgccagagggatgggttttgcatacaaccagagttcagtctacgctggatggagacctaagctagcaagtcgggctgctggtaggggaggagtttctagtgtagggagtgcctgcaagtgatcagggacacatggcaagggggacagtgagacttctgtttgggttacctagggactcgggcagggtactcaccgccttagcaatgatgcctctcatggtacctgccagggccgcagccatgccaaaccttccattgttgaggatgtgcatggcaaccttgaagccactcccaacctcacccagcacgttctccgatggcacccgtactccatcaaagaacacctctgctgtgtttgaagccttgatgcccatcttcttctcagggggcccactgtgtcagggcagtgtgggaaagcagaggtgtgttcaacaggttgtcactgggggaaaaactgctccttcgctccttatgcaccagggaggaatgacgaccactagactattagaggctacagccaccacttcccctcaggccctgagggctaaggaggcctggctatgtcctattttgtgttggacttggttgctggagccaaaactttagctcagttgcatacatattagtcccaaaggccacattcagtccacctgctttggcttttgcacacgtccccagggtgacttgcaacagccatctgcccaggagcccagtcctgcccctcagtcctaagctcccccaacccaaattcactcactgggtaatgcccccgaagcccctctccaccacaaaagctgtgatcttctccttcacggctcctgtggctggatctgtaactggtgtcttggcaaagaccgtgaagatgtctgctaggcccccattactgtggaagaatgggatattcagggcgtggaggacggggagcagtggggcctggaattgggcggaggagaaggggagaaatgggaggcaggttgcctgatccaaagcttgcttccattgagggtatagtattttccacaggggctgggcacagcagaggttcggatggaggctgcatctgacccgcttgagggctcggttagacagaaagcggccacagtctcccctgttggggagagagctactttaccccaagttctgatgagcttcaaagtcccctcggcccacttccccatccctccagcaggcagttcccccttaacacctgggagtatccagttcttttgcatgtcccaaccagcacactgtgatgcctccccaaaaccttcccccaactgaaatgctcagccatctgataatctaagtgccaactggcctaatctgtgccaagcccagtgtgccccccaatccctggctctcctagggttgcctcaccagatgccagcttggggaggtatttttctttctgggcctttgtgccaaagagcaggatgcctttgaaaccgatgctctgatgggcccccagggtaatgcccacgccaaggtcatgcatgcccacgatctccaccaaacgggcgtactggaggggaagcaggaatctggggttgtcactggctgcagggggacctgaccttaacaggagagtgtgggcaacagggcagttcctgacctagggcagttcctgacctagggcagtgcctgacctgggccatccccagtgtgtagaaaagaagtggggtgtgcaaagggcacagcagagaatgctggtctgtcttaggtctaggtaggagggtgacttgctactagtcagtctattgttaggcaatccccaacttagagatttgtaaggacttgggaaccagggtgaggcccatggctcaggcctaggggactgcatgtaaattgtgttatgtttggacagttaacatccatcccacaggcacccagggcaggtgcttagaagagaccttagccctagtctctaggtctatggcaaaagagctgagtctgccaagctggggtatggcatactgggatgtggcgatagggcgccctcacctgggtgttgcaaaggcccacaccacccagctcactgggcacttgcagaccaaaggcccccagctccttgaggccctgccaagtggtctcctccaccatctccagagcgtcattcttggcgggatcgttcacttcctggggaaggcacaggatcccacatccaggctccttttgagcttaacatctccaaacacctcaccagggaccaagccccgagtcattccttacctcgaagaaacgggacacaggctccaccagctctttaagaaactgtgtctgctcttcgttgagcactgcagagggtgggggacaggctggtcaggccaggctggcaggggaaaccaccctggccccacccagctctgattatcccttcccttaccggacgggtatgggaacacctgatctgtggtgagctggcctttgaacattcccacagcaaaggacttagattcctgggcagagagaggcaaatttcagggctctggttgggtctggctaaggtccacctggcctcggggctacctaccgccttggccggttttttcctggtcagagcgtcagaggggtgggaatctgacttgtccagagccagctgggaaaagagacggttagcaagttcagggaagggacttccgctgtgtcaaggggagaacaggcgagagccgcgcggggaggcggcgcgaagcggtgacctttcccctagtttcgccctagggcaccctggcttgccctttcccctactttcggcgactgagcagtaggcaggtacctggcaccaagagggagatccctgccgatggcgggcgccgaagcggaccgccgctcccacacccccttgccaaggctgcggtgacttacctgagcggcacccccggcatagggccgccgggcagggccgggccggggctgccccaggagcgccgtgagccgcgagctgtggggagtgggggttcagtgccggcccggtgcccagggccgctgcccaccgtccctcttgtcacacacagaccttccgcccccgagcctcagcagctgccgccccaagctcgcggccatccgagccgcctgcatctccgaatctctccgggcgccgctggctcgagctctgacccagctctggcgtcctgcacgcccacgtcctggcgcccctaaccctgactcatcgtccacagtgcaccgggcggcggacggttgcgggccccggggcatgctgggagctgtagttccctggagcccggccctgcgttccgctgacttagagggatctccaagcgtccctcgtctcccccaaactccttaatcccgcccgtccgacctagagtctagtcctccgacggggtgatgggataggatgggacagaagaggaaggggcttaagtcactgcagccagagggatggaggtggactgaagggagggcttctccggtggggttagaagggaaaagtagggaaagagaagtgtaaggtagatggcagaggcagagacatggaaagacagactctagggttcctgatgaaatctatctcggccaacacaaaagggagggtacagtggtggggggcacccaagctagggtgtgagtaccctaagtgtattcttctgagatgtaggccattcactaactcttggaacagctacagtttcacagtaggaagacccccccagattcactgcccctcccttagtaaagcctctgagaccttcctgaac

SEQ ID NO: 98245 - DNA, 17138 bp, Homo sapiens
ccccattcggattcttgtcaagaaggaagagttgaccctggagggtatccgccagttctacatcaacgtggaacgagaggtggggcccagtgcaggaggcgggcctggtagtgagttgttgggtatagcccctgactgatttttgtcccccaacctccaggagtggaagctggacacactatgtgacttgtatgaaaccctgaccatcacccaggcagtcatcttcatcaacacccggaggaaggtggactggctcaccgagaagatgcatgctcgagatttcactgtatccgccatggtgtgtttgcccgctgccagcctgttgtgggtctgcccgtcagaagtgtcctacttgaagccagggttcctggaacccaggtgcctacctggtctgctgcatatttgttttctcttccagcatggagatatggaccaaaaggaacgagacgtgattatgagggagtttcgttctggctctagcagagttttgattaccactgacctgctggtgagtagagggaactgatagcaaaggcagaagggaggatccaaggtgattccctctccaaggggacatcagtgcctctcaggaaagtagcagcttggaatagaatctggcatgcctaaggcctttggggaactgggatgcttatttcctctgccttccttggctgcccacatggatgcctaagtgtcttccctccgggatagagtgtcctccgtgcacatgctgaagagttgtctttcttgacgtaggccagaggcattgatgtgcagcaggtttctttagtcatcaactatgaccttcccaccaacagggaaaactatatccacaggtaagcgtagatctggaacactcccctaccccttcacacctggccctccctgggcttaaagctcctgatattcctcatccccttccttgttttccagaatcggtcgaggtggacggtttggccgtaaaggtgtggctattaacatggtgacagaagaagacaagaggactcttcgagacattgagaccttctacaacacctccattgaggaaatgcccctcaatgttgctgacctcatctgaggggctgtcctgccacccagccccagccagggctcaatctctgggggctgaggagcagcaggaggggggagggaagggagccaagggatggacatcttgtcattttttttctttgaataaatgtcactttttgaggcaaaagaaggaaccgtgaacattttagacacccttttctttggggtaggctcttgccccaggcgccggctcttctcccaaaaaaaaaaaaaaaacactaatccatttccctaacctagtaacctccagatcccagaggctctcctcacctcagctgagctcctttgaaagtgattcaagggactatgtcactcagcctcatttgctggaccaaatctggagggagaacccctaaaacccctaagtgaggttgcccagggggttgtccccaggtggggggaagcaggggagagaaaatggtagccatttttacattgttttgtatagtatttattgattcaggaaacaaacacaaaattctgaataaaatgacttggaaactgcctgtttgggcttctcatttcttacctccccttccctctcccacctgctactgggtgcatctctgctccccccttccccagcagatggttacctttgggctgttgctttcttgtcaccatctgagttctcagacgctggaaagccatgttctcggctctgtgaatgacaatgctgactggagtgctgcccctctgtaaagggctgggtgtggatggtcacaagcccctcacatgcctcagccaagaggaagtagtacaggggtcagcccagaggtccaggggaaaggagtggaaaccgatttccccaccaagggaggggcctgtacctcagctgttcccatagctacttgccacaactgccaagcaagtttcgctgagtttgacacatggatccctgtggatcaactgccctaggactccgtttgcacccatgtgacactgttgactttgccctgacgaagcagggccaacagtcccctaacttaattacaaaaactaatgactaagagagaggtggctagagctgaggcccctgagtcaggctgtgggtgggatcatctccagtacaggaagtgagactttcatttcctcctttccaagagagggctgagggagcagggttgagcaactggtgcagacagcctagctggactttgggtgaggcggttcagccatgaggctggctgtgcttttctcgggggccctgctggggctactggcaggtaaggaggaaggaggctgaggggagggggcccctgggagggagcctgccctgggttgctaaccatctcctctctgccaaaagcccaggggacagggaatgactgtcctcacaaaaaatcagctactttgctgccatccttcacggtgacacccacggttacagagagcactggaacaaccagccacaggactaccaagagccacaaaaccaccactcacaggacaaccaccacaggcaccaccagccacggacccacgactgccactcacaaccccaccaccaccagccatggaaacgtcacagttcatccaacaagcaatagcactgccaccagccagggaccctcaactgccactcacagtcctgccaccactagtcatggaaatgccacggttcatccaacaagcaacagcactgccaccagcccaggattcaccagttctgcccacccagaaccacctccaccctctccgagtcctagcccaacctccaaggagaccattggagactacacgtggaccaatggttcccagccctgtgtccacctccaagcccagattcagattcgagtcatgtacacaacccagggtggaggagaggtaaagctaaaactgggggatgagaggggagggaggcaggactggatataggctcagagggaagaaggaagaggggacagggaaccttggccggcatcgcatgcagtcttgtgaccttccagtctttaacttccgcaggcctggggcatctctgtactgaaccccaacaaaaccaaggtccagggaagctgtgagggtgcccatccccacctgcttctctcattcccctatggacacctcagctttggattcatgcaggtatagccatgacctcagtctcacccctcactcagcctcccggcgcccctcccctcccaatcccacacgctactccttcctctgtggagagggataccacctgcgccttcctcttcgccccacaggacctccagcagaaggttgtctacctgagctacatggcggtggagtacaatgtgtccttcccccacgcagcacgtaagtaacctccttccctttctcattgctaccactagacgccagggttcctgaaaggactaagctggggccagggaggtggataggatctgacccttcctcactcctccagagtggacattctcggctcagaatgcatcccttcgagatctccaagcacccctggggcagagcttcagttgcagcaactcgagcatcattctttcaccagctgtccacctcgacctgctctccctgaggctccaggctgctcagctgccccacacaggggtctttgggcaaagtaagacctacctactccttccctcctagaatcctcccactgcactgaaaaccccttccccaggcccataagccactcatctctcttcttaaccccccaaatctcgctctcccagcttgtcatggctacagggcagctttctttccatcctctacaagactctgccagtttcccccttttatcactgctgagtcactgcggtgagctcctcaccaatctcctactccccagcatccccccattccctcctcccacctttatcccaaccagcacgtcactgcaaatacctacctgccctatccttccgccaggtttctcctgccccagtgaccggtccatcttgctgcctctcatcatcggcctgatccttcttggcctcctcgccctggtgcttattgctttctgcatcatccggagacgcccatccgcctaccaggccctctgagcatttgcttcaaaccccagggcactgagggggttggggtgtggtgggggggtacccttatttcctcgacacgcaactggctcaaagacaatgttattttccttccctttcttgaagaacaaaaagaaagccgggcatgacggctcatgcctgtaatcccagcactttgggaggctgaggcaggtggatcactggaggtcaggagtttgagaccagcctggccaacatggtgaaaccctgtctctactaaaaatacaattagccaggtgtggcggcgtaatcccagctggcctgtaatcccagctacttgggaggctgaggcagaactgcttgaacccaggaggtggaggttgcagtgagccgtcatcgcgccactgagccaagatcgcgccactgcactccagcctgggcgacagagccagactgtctcaaataaataaatatgagataatgcagtcgggagaagggagggagagaattttattaaatgtgacgaactgccccccccccccccccagcaggagagcagcaaaatttatgcaaatctttgacggggttttccttgtcctgccaggattaaaagccatgagtttcttgtcacatgcctttctatgccttccatggctgggtctcagggagccggaagcagctgctgaggagggatgaaaatgtcagtgtgtgacgatgcctcatgggttcaccccccaaagcctggcacagctggtgttgggtctgccgtgcctcccttccttcctcctcttggggccactggctgctccagttccccatccgtggcaagccggtagagccattcatccccgcagccttcttcctgaccctcgtacagtttcaaatgcagcagacagccaaagcaatgagtggggggctgtggaacttcattcccaaaggcagcgccagtggctcctgagcaatgagaatgtcctgtcctgtccaccatattcaaggccagcagaagagcccgattaaaccctcgcagcacctggcatgctcctatcccacctgcaaggggttgaatcaagaaggagcagtgggtactctgacctccactgggggctcctgggaacagcatgccccccacacggggccacctgccaagcctaacttcatgcccccagtacttgagatgaggagtgtcactctcaggacagccaaggtccagattctagaaaggacctcccagatggccacagcctgcaccagcagtgagcgccagtcccacccattacagctggctacggcgcaatccctgggagccaggatgagcagcaccccccagccgtaggagccccaggaggcttccggcctccaaggcccagagactgccccacaagggcagccctcacctggcagggccccagcagccccacctctgcctgcagacatccgtgtgaccttgtagactttggaggggggccgccaaagggctgatccacagcggaatgacgcacgggtgggcaccgtgggttggcgtcccggcggtcggtaacgaagcacaacgcccccaccaggtagtccaaggtgccctttcccaagcagcgctgcagggtccactcggcctcgccgaagtctctgcccagcacgtggtgcgccctcgggccagcggggagggggcgaatcccgggactgcctcgccaggcctcggctccccggagactcttgggggtctgggccccaagggtgattcaggtgctgcccttccccgacctgggctcgcctcccccacctcctcctctgcttcactgtcccgggcccagcagttgccggcgcactcatgctccgaggcctgagccaaccggaggcgagacaagcacagggccctgcgcgcaacccggcacctaaggaggcctgcccggtgcagactctcctgctcccaccggcgcccttccctctagagacgctgagagaacgggagctagtagcgcccccacccaacgccacctcggagactccggctccttctctctcaacttcgaacaatacaaagtgtgcyaggagaagacaagatggcgcccagcaggaggagcggagaaaggcaggggtgtaaatctggcttccaaactggaagcgtcaacaaaggcgtgggaggtctaaccgcgcaggcgtgcagcttcggcaagctttacaattccaacagcgcgtccaaaacgtggtccctgactgagacttattttacgccactagagtgagggtgggtagcgtcagaaagagcggggcacggggcgggccagcttcgccgcgggaaaagaacgggaggcggrgtgtccgcagcgcgcacgcgcaacgaaagtcaatggcggtctggagagactggcggaagctagctttgcaatayggcggccgaggcggacggaccgcttaaacggctgctcgtgccgattcttttacctgagaaatgctacgaccaacttttcgttcagtgggacttgcttcacggtgagttttattcagcatccgatccaagtcctactcgagtgaccgtgggcccttagtccaagccttgatcggcgactaagtgacggcagtgactgccgccatgccgagctggacggaagtcacttctgagaagggcggaagtgtctcgggctccttagagggaggacaccatattagtgccagtggggaagtcaccgggtggaattacttctttgtggagtttgtgctgtagcgacaatgaaaaacgaagagtcaacttttataaaacaaaataaaaattaagtcaaatcatgccaacctttattagatcgctagcagggttaaacttaattcaaagcccctgatgaatcgggccttcattgcacccccaaaggctccgccaccctgattgctttctttccagcctccaggtttgctcatagtctgatttcggaataatttgcctcccttcctttttctgattgcgagacagctccacaagggtcaccgtcagaccgtttggggagcgtcagtctgcccctgtcagttcatggtacctctcttgagctcgtggggcactttgttttagccgcattcatgacccgtgagagtcagactcccactagaccaagttccttgaggggaaggcttcaaggctagagaagttgtggatggccagggcataaaagcaagccttgaaagggtaaggtttagtccctgagtaggggccagggacagtcagagtgttcaagaaagagtggtatggggcgggcacggtggctcacgcctgtaatcccagcactttgggaggccgaagcgggtggatcacctgaggtcaggcgttcgagaccagcctggccaatagggcgaaaccccgcctctactaaaaatacaaaaaattagccgggcgttgtggcaggcgcctgtaatcccagctactcgggaggctgaggcaggagaatcgcttaaacccgggagacagaggttacagtgagccgagatcgtgccattgcactccagcctgggcaacaagagtgaaactccgtctcaaaattaaaataagaaaaaaaaaatggtatgaagacttgtctttggagagagaagacatgtgaaatggggcacccattggcccagagaagggaaataaaggatcagagagctcttgggcatttctcagctttatatggggaagcaatggagagccgtggaggtcaagccaagtttgggtgttaatttatagggaatggaagattggatgtggggggtggtaggcatcggagaaaagctgttttggaaagtaacagtctggggcccggtgcggtagctcgagcttataatcccagcactttaaggaggctgaggcaggtggatcatctgaggtcaggagttcgagaccagcctggccaacatggtgaaaccctgtctctactaaaaacacaaaaattaaccgggcatggtggtgtgtgcctgtaattctagctacttgggaggctgagacaagagaattgcttgaacccaagaggcagaggctgcagtgggctgagattgggccactgcactccagcctgggtgacagagcaagactctgtctccaaaaaaaaaaaaaagtgtggtggtttggagcaggaaggaccaggactttctcactgccctccgcctctcctccccccaagacaatgcaagaccctggtgtgggtaagggggctcggggagagcccacaggagcttcaagccctggcctgggtttcagacatctcctgtctgcttacccttttttctctcctcagtcccctgcctcaagattctcctcagcaaaggcctggggctgggcattgtggctggctcacttctaggtatgtctcttatctttctttccagctgttgggttggggtggaggtgctgagaggccatcaactgtgtgggtgttcgttctatagctgttgtgttgcatcccaaagaatggagagtcctcagtcctacttttctcatctttcccctagtaaagctgccccaggtgtttaaaatcctgggagccaagagtgctgaagrgtygagtctccagtctgtaatgctggagctagtggcattgactgggaccatggtctacagcatcactaacaacttcccattcaggtgaggggcccacccttccaccccaagggtaatacccacaactctaatggggattaaggtgaaggaggttacaaggcagcaaagtggccgggcccagtggcttgcacctgtaaccccagcactttgggaggccgaggcgggtggatcacctgaggtcaggagttcgaactggccaacatggtgaaaccccgtctctactaaaaatacaaaattagctgggtgtggtgatgggcacctgtaatcccagctacttgggaggctgaggcaggagaatcacttgaacctgggaggcagaggttgcagtgagccaagattgcgccactgcactccagcctgggcaacaagagcgaaactcagtcttaaaaaaaaaaaaaagggacaaggggctaggaaagttttaagcccttttagaaacctaatcatcaccagtggaggtgatcttgagaaggggtgagcatcccgagaatggccacgattcagaatgagccagtcccgtgtgggggctgtagagaagcgtgatcagagcatagtgtccctggatggatgggctatggaggctttccctgcctctttctaggcccgcctttcttcctcccaactcttgactctgcagctcttggggtgaagccttattcctgatgctccagacgatcaccatctgcttcctggtcatgcactacagaggacagactgtgaaaggtgctggggacttacccaagagcaggctgtgtggttcctgggaaccctgctgggaactcaggtctgggaaagccaaatgatgtggagagattgacaaggactcctgtctccccacccctaggtgtcgctttcctcgcttgctacggcctggtcctgctggtgcttctctcacctctgacgcccttgactgtagtcaccctgctccaggcctccaatgtgcctgctgtggtggtggggagggtgggtaccaggagcaagggacaagatgttgtgggggcagggtsggggggaagagtagaagatcaaagtgtgggggtgttgtacttgggggagcatgggaagagctcaggtgacagagccaaaggtctcaactcctcccctagcttctccaggcagccaccaactaccacaacgggcacacaggccagctctcagccatcacagtcttcctgctgtttgggggctccctggcccgaatcttcacttccattcaggtgagtgcaacatcttccttctagaaggcactaaaacctcgtcttacttctcccagctaagggccaaagctgccccgtgaggaacctttgtccataagggaacctttcttgagctatgctgaagggtaaccctggctctgtctcttgcaaccaggaaaccggagatcccctgatggctgggacctttgtggtctcctctctctgcaacggcctcatcgccgcccagctgctcttctactggaatgcaaagcctccccacaagcagaaaaaggcgcagtagagccagctactggagtcattccgtttccactcattcacccaacctcagggttctccccatctgagccagcctgctggtgtgacttactcatcctccattcctctgcacttgcagactttctgagccagggttttcttttagtggaaacaaatggttgatggatccagatccttagaaaaggagaggatgggggtagagtctcccaagccaaaattttgacatttgagtgctttcgtaagccctgtacatgtactattaattcagtcattcagccaagcctcctcctctagcagcaatttccagctgtktaacactatcctgggcaaatgttttaccctgtcctccagcctccctgcttcccttctggccctggaagactgagtctggacggcagagtggagggactgggaggctgtggctgcctccctccctcagcccggctgggactgtctcccggaccccagtgctggggtgggggaagggggacggagaatgactcaggcagggccccagggtggggtgaggaggttcctgctctggcaggtctaggcggaagggagtggagatggggctggttcctgctgcagtgaggggaacagatgggacaataaagactggagactcagttgaataatacaaaactgtttaatactaccaaaaatataattgtatgttgygcggctctccctggctatcatgggaggactgcaggctgcctctgaactgtagtccaacaggagaaagggttgacagcctggggtaggggatgctgctggattaaaaaaggaggatgaggcccgtcccgtgaggtctgcgtccatgagggttagaggtgggttaggggcatgggggcaccagcaaggggagggttgtatggagtgggagagccagggggcaggtagtgggtataggtgggcagcagttccccctggagcctagggtcactctgagggagggagcacggtgagggggcttccagtttgcagtgggaagagctgcagagagaaacaagaggttagagggcacttccctgggttggaggtgagtctggccagttctgggcagacagggtagagcgtgccacccacccagccctggctacccagcccgctgggcgcagcaggcatggaagccgaccccgggatggagagcccgcggccctgttggggcacgctcgggagcgggcttgcgtgctgcacggctgttttcctcttggggagtcaggccaggaaagggcagaatgagctcggcctctccttgccctgggggctgggagaggaagctgggtcacacacaggccagaagcaggggggaaacggggcatctaactaggacacagtcgcatccaggggtcagtcacctgaccctacagggcccaccaccttcagactgagatggaaacgccctctgggagaaccctgatccgccccaccctacacaggccccggaggtactgggcctgcgcccgccacaccttggccgcgagtggcctctgcttgggtgggctcccgtcctccggcatccgcccccaccaaggctccagaagaggggcgcatgggcctccgtcttcggcccgcttcccaggcactcacccatagctgccaggcaggtaggctgtcgagtagctggggggtctgtacccaaagcctctgctcggttgggtggtcgcgtaccccggcccccagagcgggccgccgctggccaggttgcctcttccctgtccgcagcgggaaggtccggcgcccgagctcttggccttgcgccgaggccggtacttgtagtcggggtagtcgcgcaggtgtcgggcgcggagccgcttggcctcctccacgaagggccgcttctcgtcctcgtccagcagcttccactgcgcgcccaggcgcttggagatctcggagttgtgcatcttggggttctgctgcgccatctggcggcgctgagcggagctccacaccatgaacgcgttcatcggccgcttcaccttctccaggggcagcgtcccgggggccgcggggctcccagcgccctcccgctcctggggtcccgaagatgaggaggcagcagccgtggcagccggaggctccaggctccaggcctggtcctgtgaggagcctggtagcgccatgggttgggagaagccttaagagggcgtcctgaatgccctcccctcaacgtgaagcgtcgatcctgaaaatggaaaggtcttcccagtctggagtcgttgccgaggaacttgggtccttaaaaagtgtattttatccccaagcccagagcttaaaccggagcctttgcttccaacctgttcggcacactttggggagagtcgaatgcaaaatccgctgtctggtgccccggcactgaagaggtgttctgaggcctactgactgggggacccccggtccctctccccgacccgcagctgcgatcagaccgaccttccgtggagggggtaaaccataaacccctttgtggtctccggagttccgacagctgccaggcgcggataggccagacctctcccacctgggctcagcgtttgtggcaggcgggccagacctgggaacagcttttaaagactgactccgcccctgtccctcccataagactgcacctccttaagggcgccaacatcctcagcccgtaggtaaacccaggtgtcctgtttgtcccagcccccaacaccctcagggtgccacgccccccgccccccccacccaagacctgatgtcaggccttccagcccgttgctgattgcctcccctccctgaagcacaggcaatttaaagccaattctttccacaatgggatcaaacacagggggatgaagtgccctcagggcccgagttgtgctgagaggagcttgggagcatcccggaccaccaccccaacccctttcctggtgcctgttgctcctcaaatcccagaactgcccctggggcaagaaaggccgaggagggagaccatttttgtttcctgagtcattccagcaggtgcttgggccgtgattcaacccctttcccaagtgagaaaacttaagccctcccaactccagtccctaaacctatatttctccactgctattgaattatggcaagttttagcttcagtcgtccaagtcatgaggggggagccaggaaacccaggacaactccccaagttaagaggtctgtgatgcgcatgccggagaaaaagcctggagccagaacagaacaccaccaagaaggccggaccccgggctccagaggctgctgtgagggaaccctgctccccactctgcccaacggcccagcccaagccccaggcctcaggtaatcggattaagcagcctgccttggctctcagcttctacaggaacagctccagctctgagcagccctgcctagcctgtgctgtgactcagggtataggagtggcccaactccctctaccagcaaacttgggggaggggagaagcaacaaggcacaagcccccctcctctgaaccaggagggagaacctgggcctggggagtttaggaatgtcaggaattcccagaagtaagaccatctttgggacaagagacaatgaagagaagtcagatgtggaggaacagaaaacaagagccaggggccagggcaggtcagtcctagagaaacaaatggaccaaactggggacaaagaaggcacaggagccagacagccatttggatttttttattctctttttaaatactgtacagtgaaaaataaatacgccttctcatccaccagacaaggttggtcccctccccagggggaccttgtcaccccccttcatacacacccctggttctactccaaaaccttccccgtgcctcccacccacttatctcttactatccccgtcttccacagtgatgaggccccagaaatggggggtacaggatgggaggagggatagcaggggaggccccctgaacggtcaaatctgggtgggtcgaggagcaccccccaccaacaggtggagaatgggggtgttcagagagagattggggcattagaggataaaggcacatccagtctgatggggaaggagagaggctccccttaccctgggggtagggtggacaagagggagggggtatgaccctgttacacacccctccactagctcctggaggttggggggtacccaagctgctgtgccacccccctcccccctagataagagcagctccagcgcaggtcagttgggcctgtgagggccatggtgttgggcagcaagcgagatggagaagggaggggtgcaggttggaggttttatgaaaccccattcaccatactacccaactccaagggggcggagagctccccattctccgaggggcccttaggaagcttgctgacagagtcaccctgaggggaaagtgggaaagaaaacagaaaagcaagaagcggtgagtagaaattcaggtgggagacattccctaccatccaagccctcctggcatttggtgatccagaggttggttccctgatctcatgatccagtctctcttacttgggatccagaaaatgtgaaccacactttcttctctatcctattcaaagtttacactggtctaaactccatcagacacagctgcctctgcaattcagtaggagatttgtgaaattttttgtgccccctgccccagagtaacaacaaaaaagggatggggtaaagcacatcttgcctgcctaccttctgtcctgaaagagagtcttctgagggtttagtgcgttccaggggtggcctctggcggctctgagactctgctcgtgagatatagtcagccacagtcactggggaaggcaggagattaagactttcagatggaattctggtagccagcctaagacacccactgaacccgaacccctgattttcacaggggtgagcatcccattctctcagctctgaggaaggattctggtgtccagagttggctgacctggctggcggtctccactgatagagccatcagtccgattaccacggttacggcggcggcggctgcgattacgacgttgaggtcttgattcatcttctgtagggtaggaaaaaaccagagtcacacatccaacctcccaccctcgattcctacccatctctaactttccagaccccaggcacaccctcacccaggccattctctgtcatgttgggcccatctgattccaggcctccatccatgacggtcctgtcttcatcagtgcggcggcggcgggagcggcggcgcctggcacttgctggggggggttccccaggttctgaatcaaccgggggctctggttcagacgtgtccaataggctgtagggattactgtctggatccttcagcactggtcagaggaagaagaggaggagttggcagtcaggtgcccatcatctttccttttggcccatattcatgaacccagctgtctggtacctgagctaatagatgaagaattgtatctcgaagtgggccggggggcaggtgggggtcccctaccccggcccccagtcggccgcctccggctttcttcccctcgggttgggggatccctgtcgccaggcccagctcggttgggctcctctctcttctctgactcagtctctgaagctgtagacacatctgagctggggcctgaagaacacaatgggatttattcacggccattcatcccacctcaggatccatcacatcccccaaactggaagaattctccttctcactcacaagcctcccagccaatcaatcactttttcatcatctccattccagatttccccaaacttccatccagacctctgcctctacccacaagccctgccactccttgcctcctgttcccataactgtctcaccataggcaggaccgcctgtcctccggccacggccacggcccccatagctgcccccataggttcgagtcgcatggagggaggaggaggagctctcatcagtgctatatccagccttgtcgctgccaccgctgccccgcccactcccaggagggcgaaagcccagcccaatctgccgaagctgctcatcaatttgtagcctctccaagcgaagctgctctacctcctggttgggtaaaagatggaagaaggggaaggagaaataagatcagtgccttgcttcatgcttctgcaccctgactgtccctctatatctaacctctcaggaatgcagggagaaggaagacactggctaaacaaggaaaattctgggacccaaccctatagccccaaatttccacagatgttttctgttctacacggagagacaaacagagaaccaaaatccctgagctgacccccacagcagtcttagttcccttttcacacccagcatttttctctcccggcctgggtacctgcaggtaggagaggtgatactccagcaaagcctgggcattgctgatgttctctcgggtgccaacaaaaatgaagggaaccattccctagagaacagagagcagaaacgatggatcagaaaggaaaatgaaatggaaggattaacgccgcccagtctcctaggggagcctgcccagtgggatcattctgggctctaaatctactagtgttaaacaactttccgtactccaccctctcaaagaacaatcccagccctcagaggacaatcccatttacttctggaaaccaatctctatgcccacttgccccgtacccatacctcctccctggggttcttcttgtcattatcaccttccactcgaaccctcaccacaccagatttatccacaatctcctggatcactttcccgttctttccaatcactttgcctggaataggtaaatgaggaattcagccttttattttttttaaggaaataagaataaagctgatacaccgtcttccagcctcattttctttatatggattccatttacttcattctcctgcttctaggtttctgatgtgtttttacaggacaaaatgttacaatccctagaaatttattctttcatttttatcactccc

SEQ ID NO: 98246 - DNA, 17320 bp, Homo sapiens
accgcatctctacaaaaaatttaaaaataagctgggtgcaatggcctgctcctgtggtcccagccatgattgcaccactgtactacagttggtaacacagcaagactgtctctaaaaaagaaaaaaatagaagaaaaggaagaaagaaagccagatgtggtggctcacgcttgtaatcccagcactttgggaggccaaggcgtgtggatcacttgaggccagaagtttgagaccagcctggccaaatggtaaaaccctgtctctactaaaaatacaaaaaattagtcaggtgtggtggtgcatgtctgtaatcccagctactcaggaagctgaggcaggagaatcgcttgaacccaggagctggaggttgcagtgaactgaaatcgcgccactacacttcagcctgggcaacagaaccagatgctgtctcaaaaaaaaaaaaaaaaaggcctgacatggtggctcacgcctgtaatcccagcactttgggagaccgaggtgggcagatcacaaggtcagaagattgagaccatcctggctaacacagtgaaaccccgtctctactaaaaatacaaaaaattagctgggcgtggtggtgggcatctgtaatcccagctacttgggaggctgagccaggagaatctcttaaacccgggagacagaggttgcagtgagcccagatcacgccactgcattccagcctgggcgacacagtgagactctctctcaaaaaaaaaaaaaagaagaagaagaaaaagaagaatagataagaaaataaagtttattcactgacgagatcaagctccaactcctcagcaggacacacaaggccacatagcccaaggagcccccacctgccctcactccatctcagcctctccatggttcatccatgtcacacgccctcccagatctttgatacccagcaggctcagactagtatgtcaggaactatgtgagaactaatatgtcaggaactgtgtgagattaataagaacaacatttcttatatatattgagaaatatatatatatctcatatattgagcactttctgtatgccaaacactatgctagacattaaaatgtctacatgatttcatcaaatcttcacagtaaccttctaagatagagaaacttcccattttgtagatggggaaacagtaatagaggtttagtcatttgttcaacttcgcacatctaacaactcgtttcttttgtttttttatttttttgttttcttgttccgaagtcttgctctgttgcccaggctggagtgcaatggtgcagtctcagctcactgcaccctccgcctcccgggttcaagcgattctcctgcctcagcctccccagtagctgggattatgggagcccgccaccacgcccagctaattttttgtatttttagtagagatggggtttcaccatgctggccacgccggtcttaaactcctgatttcaggtgatccattcaccttagcctcccaaagtgctgggattacaggcatgagccaccgcgtccagccataactcatttctttgatggtccttagtagaactagcaactaggtttcttggcatctcagatacctctgctaaagcattttacatgtctatctctctctcaagaccctggttctggctgggcccggtggctcacgcccttaaactcagcactttgggaggctgaggtgggcagatcacctgaggtcaggagtttgagaccagcctggccaacatggtgaaactttgtctctactaaaaatataaaaattagccaggtgtggtggtgcatgcctgtaatcccagttacttgagaggctgaggcaggagaatcacttgaacccgggaagtggaagttgcagtgagccaaggtcacgccattgcactccagcctgggcaatagagggagactctgtctcaaaagaaaaaaaaaaaaaaggctgggcgcggtggctcacgcctataatcccagcactctgggaggccgagacaggcagattacctgaggtcaggagttcgagactagcctggccaacatggtgaatccccatctctactaaaagtacaaaaattagccaggtgtggtggcacatgcctgtagtcccagctacttgggaagctgagacaggagaattgcttgagcctgggagacagaggtttcagtgagctgagatcatgtcactgcactccagcctggctgaaagagcgagactctgtctcaaaagaaaaaaaaaggccaggcacagtggctcacgcctgtaatcccagcactttgggaggccgaagcgggtggatcacgaggtcaggagatggagaccatcctggctaacacggtgaaaccccgtctctactaaaaaaacaaaaaattatctgggcgtggtggcgtacgcctgtagtcccagctactcagaaggctgaggcaggagaatggcgtgaacccaggaggtagagcttgcagtgagccaagatcacgccactgcattccagcctgggagaaaaagcgagactccgtctcaaaaaaaaaaaaagaccctggttctccagcccagtaccaagttttatattcatctttagagtccctgtggtgggctacacagtatttgaccaatgtatcagcagccaatacatgttaattgaatgaaagttggggggggcgcagcaagaagggagggagagagagagagagaggcagtgggtaggatggggtgagtgggtagatcaggcccagaggctttagtgtgtgctgccaagctctgaaaagtttttgggggtgtggggaaggcaggggacactgggcaggcatcgtaggtgcccttggttgggggcctggcaaagtcgatgtcaaagcgaagtcagtcttaatgaaagagtgtagacagctctggatggtaatcaggaatcctggaatctagggcaggctggggaaagagaggttggtggcacagtgtcctggagaaggtggggtggagggaggagagaaaagccagctccgaggagattccagggacaaaaggtcaggatattggcactcggaacaacccccttggtgggtgcccaggtacatccgggctctttaacccccctccctgctggctcacactccacaggcctccacaggatgacttcttttcattattcaggtctctgctcaaatgacttccctgaccacccagctaatgttgaccctcccctccccctcctattatattacagggttttgttccctttattgctctaaccgctatctgaaataatcctgcttatttatttgtgttcttgtttgtgtctgcttcccctctactatgctataagttccatcagagcggggatagtgtttgtccttttcttttttctttctttcttttttttttgagacggagtctcgctctgtcgcccaggctggagtgcagtggtgcgatctccgctcactgcaagctccacctcccgggttcacgccattctcctgcctcagcctcccaagtagctgagactacaggcgccgccaccacgcccggctaggatggtcttgatctcctgacctcatgatccgcccgtctcagcctcccaaagtgctgagattacaggcgtgagccactgcgcccagcctgtttttgtccttttcaccaacgaatcctcagtatctacaacagtgcctagtacatagcgggtgctcaggtggcctaggttagccctgaacgtcaacaaggggccagagttaaatgtggatgccctctccattgctgaagactccactaccaacactgctggctgggtggaggcagttgtagatcctgagagggtctatagggtcaagattaggagaggtagaaggtggggcttgggatttgtgtcttctaccctacagactccccagggcctccttaccctggagtcatttaggtcccggctgatctctgcagaaggggacagcagctccagtgagtgactcagcctgctgcctgggttactggtgaaaagattcttgtaagaaattaggagtcttggacactgggattctcatggggtctggagatggaggatgctttaacctaatggttctttttaagtttttttttgttttgttttgtttttttgagacagagtctcactctgtcacccaggttggagtgcagtggcgcaatctcggctcactgcaacctccacctcccaggttcaagcaattctcctgcctcagcctcccgagtagctgggattacaggcgcccaccatcatgcccagctaatttttgtatttttagtagagacgggattgcactatgttggccagattggtctcaaactcctgacttcaggtgatccgcccaccccggcctcccaaagtgctgggattaaaggtgtgagctaccacacctggctgacctaatagttcttgagaggaaagaggatggggggctttagccccagggctccttagtaggctgggagctttgggctaggacacaagggttcctaagagggcagaagactgggagctgaggggtaggggctatgggcttggatacgagggttccccagggagggatgctgggcaccagcattctctagaggtctgtggttgagagctgggtcaccgtattctttgaggggagagatattcccaaatctgtctgtttttcccagctgggaccagcacaagccagttcttgcttaatggagtagagacaaatttgtctgggaaggcagcaagtggaccaagactaggagagagagagagagacgcgactttctccctctgctctcctccctttttctttctccctgcctccacccctttttccagaacccctacccacatctctctgtgaccctctcacgccccctgctgcttcttccctgggcagcaatggccagtccaaggaccagatgactgagatgtcaaaatcccatctcttcccttcctcctgatctctctggaccagccacagaggcaggaaactggtctcaaagggagtagcttctgcggaaccaggtgggtcctggcttccagaaagtgacctgtatccagagtatgtctgtctgtcggggtttttgctgggatctcagcctaagaagtcctcatttccagccggacgcaatggctcacgcctgtaatcccagcactttgggaggccgaggcaggaggatcacccgaggtcaggagttctagaccagcctggccaacatggtgaaaccccacctctactaaaaatacaaaaaattagctgggggtggtggtgcacgcctgtaatcccagctactcgggaggctgaggcaaaagaatcgcttgaacccgcgaggcggaggttgcagtgagccgagatcacgccattgcactccagcctgggcaacaagagcgggaaactccatctcaaaaaaaaaaaaaaaaagaagtcctcatttccttagagaaactctccttgacgctcagactaagttaaggcctcctagtctccatgttttctattttttcttttttctttttttttgagatggactcttgctctgttgcccaggctggagtgtagtggcgcgatctcggctcactgcaagctccgcctcccgggttcacaccattctcctgcctcagcctctcgagcagccgggactacaggcgcccgccaccatgcccagctaatttttttgtattttcagtagagacggggtttcaccgtgttagccaggatggtctcgatctcctgaccttgtggtccgcccgcctctgcctcccaaagtgctgggattacaggcgtgagccaccacgcccggccagtctccatgttttcacaactctccaattcttctttatcagtgcttccaactatccacttattagttagcctttgatggatgtctgcttccctatgggactgtgggcaccaagagggtaggaaccagagtgtttttgctcattaagacaactcaatacttggcacagtgcctggtacattgctagtgcacagtgaatatttgttgaataaatgaataatcagtaactttcaaagggggttcttaggtggagctttaatgggaagcgtcagtgccattgcctgggctctgggggcagctgtgagtccagatctcatggcttctgttcagggcctggtccacatccagcctctgaccttgtgcccaaaggccattcaggcaaaaagaggtggaagagtyttctcctagagggaggtagtgcaaaggtggcattagagcattaaggtggctcggatccagaatcttmtccccacttttccactcctccaacctgagtttgcaaaagcactaccttccactgcccccatatmttcttcttgtggcctattcttcttccctcccagaggtttccttcccctcaaaatgtgccgcctcccttgagctgtttccaatgttgtgctcatgaacttgaacatcattctctcttacctggtaaagcccccaggaagagacgcccttgaggcttggcccagaggttaaggaggggagccaggcctaagggaggcagggcaagggccttcatcttcgacccttggctcaagaccacyctggacatactcagcttcagctgaagagggagtcccaagaccaggggcagatccagccctggccccgacccagargacaacaccaccttctgcagagtgtgtgggaaagggacggtagagagagagggaagaatgagccgggcctactgcctgtggcctcacccctagctgccttaattctgcctcttcgctatgcctccacctactggccattctcaccacttaaatcctgccccaattttttttggcttgaccctttttgaaaccacacctgccccaagtaaatatgcagtctaagtcaaaactgtttgcttgctgtggggagcttcaagatatgtccctcgcccctaccacccacctgagtgccatccataagccttatttttatttttatttttttgagacagggtctcactgtggcccaggtcagagtgcagtggcacatcatagctcactgcagcttcaaactcctgggctcaagtgaacctcctgcctcaggctcctaaatagctagggcagcagacatgtgctaccatgcctggctaatttttttttttttttagacagaggtctctgctatgttgcccaggctggtgtcaaactcctggcctcaagtgatcctctggtcttggcctccagcacctgggattacaggcaagcaccaccatgcctggctaattattaatgaaaaacaattctgtggagccagtcttgttatgttccctgggctggaaaccttcctaatattgacatgttggactcccctcttccctcattgctccaggctccactgaatacaggcaatgccccactgtccccctttacttgatcttggaggtggagactgagccaagatgggttctctggtgtcccaagagcaaggaggtggcctgagcctgctgcctgcttgagtcccaggtccaaagagaaggcccagggctctgcatgaggctggggaatgtctgtggggagaaatgattatcctgaggcctcaaagctggggtctcaaggaggaaaggggccagtggtagagggggacagaggcaggctgagctggccagggtgggaaaaatagactccgaggaaatctacctcggagattgaattctgcctgagtccctggagggagaaatatcccgggatttgattctacatcacagcttctgaggctagtgggggcagatgctgagatctcggcctgtttgtccagccaggaatcccggcgcaggcagccatccagggcaggaaccagctggagtgtgacagagataagatayggggatgtagaaatcagggcatcggagccgcagtcccgacctccctgccctcagttgactcccctctgagcatttggcctcccccttgcagctctcaacccttcccttctccctaaaagtgtggacttagattcccacggccagccacccagcagtgctttaccaagtcttggctagggttccacccctggggtgtagttaccrgcaaccgaaggttggaagcggggaagagcagccccccaagcgcaatcctcatgatgggatggcgtttgctggtcaggggcccagagacctgtctcaggcgcagcacctcctccccatccacctccagcagcacagagtccccctccatcttgacttccacctgcaggaaggtgggaagcaaaatcagaggcccctgggatctgtttctgccaccttcctgtgaggcagcctagtactatagtggaaagaacatgccttaaagaagcagctagcatccttggccttgggtcactcagctcttgtcacttatatactgactgagccttagaattcccatcagaaaagatggggccaagaatagctactttgtgggggttcgtgtggattaaacgagatgacagtggtaragggatgcccaataacttggttttgttccctttcctcagaccagctccagacatccctcccctgaggaccagagctagcttacctggtgccatctcccatcatccagccgtggtccagcacccaccgtaagctgggcccagtgattgtgcagttggatctcaggcctgccgtctcgaagtcccagcataaaccagtcatccttagggttggtatccccataaaaaatcactccctctgggtcccaggttcgaacctcaaaggaggaggaggttctggaaggacacagaaggaaagattgtgtatgtcatgtgtcctttgagaaccagtgtgggtttgggggagatggtgttcacagataaggaaaggaaracagggaaaagagaagagctgatggagagagggcagaaccaggggactgggtcaagggctaggccaaccccatactttgtgatcttggtgaggtcaaaggtcatgacagcgataggctcttgtcctgggccattgctgaggtggacagccggagggtcgtgggcactctatcagaaagagaaarcaaacaaagctgagtagggacatgtcagagacagacagagggagaggccctgctacagggccagaggagagaagggaagactgcatgagctgagtgccctgtcccgctcctgcacctgggtggggagaacaggtctcagggcccatccctggygggtgtgacgcagtagtagcaacagcagcaacagcagcaggcgcgaggtagccagtgggcctctgctctccataatcagccactgtccactcggcggctcagacaactcttgggagaatgtgtagaggcaggcagccttgygtgtgggcggtggagggttaaaggttgcccggggaggagggggtaaaggaaacaggggcactgacccttgacccctgcccaggggcccagtcacaagactcagctatcacccctctggggatcaatggggtgaaggacagagtcccctccactatcatcctccactgccgagaaagtttctgaactgggagaggatattccatctcccytctcctcctctagggcctgatctaggtcctccaagatttctgtccactcggggagcctgcattcacaggcctgaggtctagaaacagtcctcccctgcgtcccaagtagcatcctgtatcaggactagaaatgagataatggaatcctaaatttctagctgagtgaccttgggcaagtcacttcacctytgtgcttcartgtccttgtctgtaaaatgaggaaaataatactttacggggtgactgtgaaagagggttcattgagaaaatgcaggcacagtgcctggcatctggtctgaactcctcccccagtcttttcccaggcctctgaggcctgtctcccaagaaggtattgtctgtgtgtatgattcagtgaatattaagaagggacctgccccccgcctctcagttatcttcccttatccatttattacagggcctaaacagtctagcagtagaaatcacccactccctgacccwttttattttattttattttattttattttattttattttagacagagtcttgctctatcacccaggctggagtgcagtggcgtgatctcggctcactgctgcctctgcctctcgagttcaagcgatcctcctgtctcagcctccttagtagttgggactacaggtgcacgcaccaccacgcccagcaaatttttttgtgtttttagtagagacggggatttcaccacgttgcccaggctgatctcgaacctctgacctgaaatgatccgcccacctcagcctcccaaagtacctggattacaggcattagccacaaggcccgaccctccctgacgcattttattttatttatttattttgagatggagtttcgcttttgttgcccaggctggagtgcaatggcacgatctcggctcactgtaacctccacctcccaggttcaagcgattctcctgtctcagcctcccgagtagctgggagtaaaggcatgcgccaccacacctgtctaatttttgtatttttagtagagacggggtttcaccatgttggtcaggctggtctcaaattcctgatctcaggtgatccgcctgcctctgcctcccaaaatgctgggattacaggtgtgagccactgtgcccaccccatgacccattttaaaatgcaaatgacagaccgggcttggtgggtcacatctgtaatcccagcactttagaaggctgaggcgggcagatcacttgaggtcaggagttccagaccagcctggccaacrtagtgaaaccccgtctctactaaaaatacaaaaattagccaggtatggttgcccatgcctgtaatcccagctactccgagggtgaggcaggagaatcgcttgaacccaggagggagaggttgcagtgagccgagatcgcgccactgcactccagcctgagtgacagagtgagaatccgttaaaacaaaaaaaaagagaagaaaaaagaaaaaaaaattagccgggcgtgccggtgcgcgactgtagttccagctactccggaggctgagacaggaggatcgcttgaactcgggaggtggaggctgcagtgagcagagatcgcgccactacaccccagcctgggcgacaaagcaatacaccatctccaaaaataaataaataaataaatataaaaataaaacatttaaaaaatgcaaatgcccccaagaggtaacacttcatgctactcaagagctgcaggaaacagctttcagagctgagggtcttaaggcttacccagggtctgggcgggtgagtgagcctgaggctaaagcaggttatcactgcatatgtcaatttaaaaagcactgcgggggagcctttgaaccgcggggtatctcgacccaggttgggacacccacacaaccgcaaggaagccgcttcactccaaccttgaactctacccaggagcccagtcacaagatccagctgtcgggggtggggcttggggggggacgcggccgtgcctgttctccaagctgattggctgacagttgtgccccctgctgcgacagaattcgagggggtggggctatgcccggacagaggatcgcctcgctggcctactctctcctcccgtacggcgccggaatcccagctccacttaccaggccgcggctaccccgccgtcccccccgactcccgccaccccgctctctcaggctcttcaggatccaagtccgtaggccctttaaggggtctagttgccgtttgcgaggccctgggactttggtcccagacagcggggatccggatggcttccgtgcggatccgagaggccaaggagggagactgtggagatatcctgaggctgattcgggtgaagactgcaggccggtaacccgggggtcagagtggcgcggccagagcggggtcgtaggaggcgggggcagggggaggggctcgccttgggaacctgctcggggagcagcggggcccttctgctctaatctagcttccgtacccacgccttaggagctagccgaattcgaaaaactctcggatcaggtgaagatcagtgaagaaggtgggggctcagcgcccaggttctggcggaggctggggaggaaatgagggatgggttccccaggcgacagctccaggctgggcatacacccacgtcctctttctctatctctttgtcacaactccaatctcggcagccctgagagcagatggctttggagacaatcctttctatcactgtttggtagcagagattcttccagcgcccgggaagctactgggtaagagcacctggcccttagaagtccacctctccagccggcctcagaggtctccccacaggcttccagaagccttactccccttttctctctctcagggccctgcgtggtgggctatgggatatactatttcatctacagtacatggaagggacgcaccatttatctggaggatatctatgtgatgccggaatatcggggtactgggcagaagctgaggctggggtgggagcaaagcaccccacagaccccactgttatcccctgtccccagagcccagccggtgtcattttctgatccccttcagctcaaacaatagctattttttgcctctttctctccacaacaggtcaagggattggttccaaaataatcaaaaaggtggctgaggtgaggagatgggtggggcgacaagtgaggacctgaagaagcaagggtatatggaggggggacccgggttgaaagagggagtgagaaaacctttttcttttttgaccccagaaaagttagtgttgtcttctcccacaggtggccttggataagggctgctcccaattccgcctggccgtcctggactggaaccagagggccatggacttgtacaaggccctaggagcccaagatctgacggaagctgagggctggcacttcttctgctttcaaggagaggcaacgagaaagttggcaggaaagtgacgccatccctaggaggatctctgtcttgagtttctccttccccatcagctgaagcactcttcagagactacgtccacagacactgatgctgaggcctccctggaggaaggagggttaggggtgcctatcctcaagtattggaagagcagaattgagggagagacctttcttccttgttgagggtgaaaaataaataagaattacatgtcctgatgtggtgttgggtctttcttttatttctttttttttttttttttgagacagagtctctgtcgcgcacgctggagtgcagtggtgcgaactccgctcactgcaacctctgcctcacgggttcaagcaattatcctgcctcagcctcccgagtagctgggactacgggtgcgcaccaccatgcccggctaatttttagtagagacggtgtttcaccatactggccaggctggtctccaactcctgatctcgtgatccgtccgcctcggcctcgaaaagtgctgggattactggtgtgagccactgcacccagtccaaagtctttttttttttttttgagatcaagtcttgctgttgtcctcaggccagagtgcaaggagtgcaaaggtttgatcttggctcactgcaacatccgcctcccgggttcaagtgattctcctgcctcagactcccgagtagctgggattacaggcgcctgctaccacatgcggctaattttcgtatttttagtagagacggggtttcaccttgttggccaggctggtctcaaattcctgacctcaggtagtccgactgcctcggccccccaaagtgctgggattacaggtgtgagccaccgcgcccagcccacagtcttttctttttctttttattttttttgagacagagtctcgctctgtcacccaggctggagggcagtggtgagatcttggctcactgcaagctttgcctcttgggttctcaccattctcctgcctcagcctcctgaacagctgggactacaggcccccgccaccacgcccggctaagtttttgtatttttagtagagacggggtttcaccgtgttagccaggatggtctcgatctcctgacctcgtgatccacccaccttgcctcccaaagtgctgagattacaggcgtgagccaccgcgcctggcctgacagtcttcattttcaatctggtatgccctacaaaagctcatgcctggccgggctcagtggcttatgcctgtgatcccagcagtttgggaggccgaggcgggtcgatcatctgaggtcaggagttcaagagcagcctgaccaacacagcaaaaccccatctctactaaaaatacaaaattagccaggcgtggtggcaggcgcctgtaatcccagctactcaggaggctgaggcaggagaatcgcttgaacctgggagatggaggttgcagtgagtcaagatcatgccactgcactccagcctgggcaacaagagcaaaactccatctccaaaaaaaaaaaaaaaaaaaaaagctcacgcctgtaatcccagcattttggattttgggaggccggcaaattgcttgagcccaggagttcaagagcagcctggccaacataggaaagcaaagtctcgtctctacaaacaatacaaaaaaagccagcacgcaatggcatgctcctctaggcccagctactggggaggctgaggcatgagaatcgcttgatcccaggaagtggaggttgcagtgagccgagatcatgccactggactccagcctgagtgacagagccatacccagtctcaaaaacaaaaacaaaacagcaacaacaaaaatctcaacactttgagaggttgagggtggaggatcacttgagcccaggagttcaagaccagcctaggcaacatgggcaagaccacatctctacaaaattaggccgggtgcagtggttcatccttataatcccagcactttgggaggcaggcagatcacttgaggtcaggagttcgagaccagcctggccaacatggtgaaatcccatctcaactaaaaatacaaaaattagctgggtgtggtggcacccatgtaattccagctacctgggaggttgaggcatgagaatcgcttgaacccaggtggcagaggttgcagtgagctgagattgtgccaccgcactccagcctgggtgacagatggagactctgtctcaaaaaaaaagaaaatggccaggcgtggtggctcacgtctgtatcctaacactttgggaggccaaggcgggtggatcactggaggtcaggagtttgagaccagcctggcgaacagggtgaaaccctgtttctactaaaaatacaaaaattagctggtcttggtggtgcaagcctgtaatcccagctacttaggaggctgaggcaggagaatcacttgaacctaggaggtggagtttgcagtgagccgagattgcactactgcactctgggcgacagagcaagactctgtctaaaacaaacaaacaaacccaaagaaaacaaaaactaaataaataaaatttgcccaggtcagtaacaaatgcctgtagtcccaactactcaggaggctgaggtgggaggatcacctgaaccctagaggtcgaggctgaagtgagtcacgtttgtgccaccacactccagcctgagtgacagagtgagaccttgtctcaaaacaaaaaaaaaataataggttgggtacagtggctcacgcctataatcccagcattttggaaaaccaaggtgggtagatcaatagagtccaagagttcaagactaacctgggcaacagggcaaaacccggtcactgcaaaaaatacaaaaacattagccgagcttggtggcaaatgcctgtagtcccagctactggggggctgagatgtgaggacggcttgagcctgggaggttgaggctacagtgaactgagaacctgtcaatgcactctagcctgggtgacagagcaaagccctgtctcaaaaaacaaactttaatcactaatgcagaagataaaagagtataaactaggaaacttaatacttccaaaattttgtttgtttgtttgagatggagtttcactcttgttgcccaggttggagtgaaatggcacgatctcactcactgcaacctccacctcctgggtccaagcagttctcctgcctcagcctcctgagtagctgggattacaggcatgcgccactacgcctggctaattttgtgtttctagtagagatgaggtttctccatgttggtcaggctggtctccaattctgacctcaggtgatctgcccacctcggcctccaaaagtgctgggattgcaggcgtgagccactgtgcccggccaatacttccaaaatttatcttgcccccatcttgttttgtctttggttttcagagtttactttttttttttttttgagacggagtctcgctctttcgcctaggctggagtgcagtggcgcgatctcggctcactgcaagctctgcctctcaggttcgtgccattctcctccctcagcctcccaagtagctgggaccacaggcgcctgccaccacgcccagctaattttttttttttttgtatttttagttgagacggggtttcactgtgttagtcaggatggtctcgatctcctgacctaatgatctgaccacctcggcctcccaaagtactgggattacaggcgtgagccaccgtgcccagcccagggtttacatttttaatgttattaccctcaccttggtcccagatcttactaatattcatagaatatctttgcactccagtatcactccattttcacaaccacccccatgtctacatccttgggctccagcccattcatcacttcattagccatctataaaatgatcctggccaggccaggcgcagtggctcacgcctgtaatcccagcactttgggaggccaaggtgggcagatcacctgatgtcaggagttccagaccagcctggtcaacatggtgaaaccctgtctctactaaaaatacaaaaattagctgggcgtggtggtgggcacctgtaatcccagctacttgggaggctgaggcagcagaattgcttgaacccgggaggtggaggttgcagtgagacaagattgagccactgcactccagcctgggtgacagagtgagactccctcttacaaaagaaaaaaaaaagtgatcctattaggtgttggggctgattggagtggggtgaaaagggcctgggttctgtccattctaagggaaacagagtggagggtatttaggctaatggctttttaaagggagaataaagaaaacttgggctgggcgtagtggctcacacctgtaatcccagcactttgggaggccgaggcgggtagatcatttgaggtcaggagtttgagaccagc

SEQ ID NO: 98247 - DNA, 13200 bp, Homo sapiens
cccctagcgcccagggctccccacagccctctgcttcctcgtcatctcagttctctacctcaggcgggccctgggcccgggagcgcagggcgggcgaagagccagtcccgggccccatgacccccacccaaccgcccccacccctatctctgccccctgctcgctctgagtctgaggtgctagaagagatcagccgggcttgcgagacccttgtggagcgggtgggccggagtgccactgacccagccgacccagtggacacagcagagccagcggacagtgggactgagcgactgctgccccccgcacaggccaaggaggaggctggcggggtggcggcagtgtcaggcagctgtaagcggcgacagaaggagcatcagaaggagcatcggcggcacaggcgggcctgtaaggacagtgtgggtcgtcggccccgtgagggcagggcaaaggccaaggccaaggtccccaaagaaaagagccgccgggtgctggggaacctggacctgcagagcgaggagatccagggtcgtgagaagtcccggcccgatcttggcggggcctccaaggccaagccacccacagctccagcccctccatcagctcctgcaccttctgcccagcccacacccccgtcagcctctgtccctggaaagaaggctcgggaggaagccccagggccaccgggtgtcagccgggccgacatgctgaagctgcgctcacttagtgaggggccccccaaggagctgaagatccggctcatcaaggtagagagtggtgacaaggagacctttatcgcctctgaggtggaagagcggcggctgcgcatggcagacctcaccatcagccactgtgctgctgacgtcgtgcgcgccagcaggtgagtcggctgcctgcttgcttgtcccggagacaggctcccttcccccatcaccctgatgtttctgtcttcattccactgtcctcccgcaggaatgccaaggtgaaagggaagtttcgagagtcctacctttcccctgcccagtctgtgaaaccgaagatcaacactgaggagaagctgccccgggaaaaactcaacccccctacacccagcatctatgtatgtgtgccacttggcctcagaaccacccctgccagagggttctaagacagtgttggggactgctggggtgctctgagcctgggccagggctctgaccccagctctcctggtcatgtctcagctggagagcaaacgggatgccttctcacctgtcctgctgcagttctgtacagaccctcgaaatcccatcacagtgatccggggcctggcgggctccctgcggctcagtgagtatggggggcagaaagtgttagggagggctacaagggtctggggcatgtaggaccctctgagaaatcccacacttgaagactcatgacagtggccgtgaggagtccactgagtgatgggtctgctggccttgggctcttctcccatctgtctgtctccagcatttggcaagggagaaggggccatagtcagggcctgattagtcatttctgaattttttggtgattaaggaagagaataatacagattttagaaaacccctgaaaatctgtgatgttggggctctctctcagtcttttattgcgcagaatttcaaacacatacaaaattagagaaagctgtatagaaatacaaaggtcaatcttgtctcctttatacctgtatgttctcccttccccacactgagttatttgaagcacatttcaggctttcacttgactgaatctttaatctttaattggatccaatggtaactcaaagaagctgctgttttgactagactccaaatggggaaaaaaagaagctgccattcattgagcacctactatgtgtctgtcaggtgcggtgcacatggccacgcacacatctgggaacactggtctaggggctgagtccttgagcagctgcaggagaaagagggctggtgaggatgcagatagaggccagcactcccagcttcctgtggggctagggctcctgcctatttcttctgggctgagctctgctaaacctatgaccaccctgtcagagccagaggagtaggaagggaaagggtcgattgggtcctcggtccctatcctctgcctctgccccgacaccctgctcggccctcccttccagacttgggcctcttctccaccaagaccctggtggaagcgagtggcgaacacaccgtggaagttcgcacccaggtgcagcagccctcagatgagaactgggatctgacaggcactcggcagatctggccttgtgagagctcccgttcccacaccaccattgccaagtacgcacagtaccaggcctcatccttccaggagtctctgcaggtgagatgagaacgtggccagaggcaggtcctgggacggggctgcggtgggagggctctcgaaaggtctctgacccaggcctgcctaccctctggctgaacaggaggagaaggagagtgaggatgaggagtcagaggagccagacagcaccactggaacccctcctaggtactgtgcaggtgtgccccttctgttcctgcttccttcccctccctctgctctccaccaacctgtgctcttcgccccagcagcagcgcaccagacccgaagaaccatcacatcatcaagtttggcaccaacatcgacttgtctgatgctaagcggtcagtggggctgaggccagggaagttggggcaggagtgctgctaggacctcgtggcgggggcggggtgtagcctctcgtcgcacttccgcaccgcaggtggaagccccagctgcaggagctgctgaagctgcccgccttcatgcgggtaacatccacgggcaacatgctgagccacgtgggccacaccatcctgggcatgaacacggtgcagctgtacatgaaggtgcccggcagccgaacgccaggtgcgctccacgcctgtgcgcgctgatgctggaagcgcgagaggaggggctggcggcggcgctcagccgtcagccaatgagggcagagggcggggctatcggggatcgcagttccgacctggccagccatgccgttctctgtcgacccctgcaggccaccaggagaataacaacttctgctccgtcaacatcaacattggcccaggcgactgcgagtggttcgcggtgcacgagcactactgggagaccatcagcgctttctgtgatcggtgcgtgccgtcctgcgcaagtcagactgccgcgtccccgccctcggtccccagttcccacctgacctgtggccaccccgcaggcacggcgtggactacttgacgggttcctggtggccaatcctggatgatctctatgcatccaatattcctgtgtaccgcttcgtgcagcgacccggagacctcgtgtggattaatgcggggactgtgcactgggtgcaggccaccggctggtgcaacaacattgcctggaacgtggggcccctcaccggtgagagggtggggcaggtgttggcgtggtgtggcgcctcagcggcaagggcctgggaggctgggggctgtttgagagtcctgttgtgatcgcctttggcccgcagcctatcagtaccagctggccctggaacgatacgagtggaatgaggtgaagaacgtcaaatccatcgtgcccatgattcacgtgtcatggaacgtggctcgcacggtcaaaatcagcgaccccgacttgttcaagatgatcaagtgaggaccctatttgggtgggagcccacctccactgactggtcccttttcttgttcttcctgtctgactccaccctttttacctctctccatccttgtctgcctgtgccccgagtgttactgtgttggggaggctaactaggtccttgctgtcatgaccttttctagtggtccaaatagacaaaagccacaggaaacttcgcctataacagatgcccaggacagaggatgtgacctagacatgaagcggggaggcccctaggggagggccctggggctgcccacccctctgcccttgctccagccctgcctcaggcctcctccttgccggtggtctcaacacaaccccactgctccccaggttctgcctgctgcagtccatgaagcactgccaggtgcaacgcgagagcctggtgcgggcagggaagaaaatcgcttaccagggccgtgtcaaggacgagccagcctactactgcaacgagtgcgatgtgagtgggccggctctgctgctctccctgagtgtccacagtggccctccctccccctgactgcactgtcctccctgccccaggtggaggtgtttaacatcctgttcgtgacaagtgagaatggcagccgcaacacgtacctggtacactgcgagggctgtgcccggcgccgcagcgcaggcctgcagggcgtggtggtgctggagcagtaccgcactgaggagctggctcaggcctacgacgccttcacgctggtgagggcccggcgggcgcgcgggcagcggaggagggcactggggcaggctgcagggacgggcttcgggagcccggccgcgcctttccctgagcccccgccggctttctccccccaggccccagccagcacgtcgcgatgaggccggacgccccgcccgcctgcctgcccgcgcaaggcgccgcggggccaccagcacatgcctgggctggacctaggtcccgcctgtggccgagaagggggtcgggcccagcccttccaccccattggcagctcccctcacttaatttattaagaaaaactttttttttttttttagcaaatatgaggaaaaaaggaaaaaaaatgggagacgggggagggggctggcagcccctcgcccaccagcgcctcccctcaccgactttggcctttttagcaacagacacaaggaccaggctccggcggcggcgggggtcacatacgggttccctcaccctgccagccgcccgcccgcccggcgcagatgcacgcggctcgtgtatgtacatagacgttacggcagccgaggtttttaatgagattctttctatgggctttacccctcccccggaacctccttttttacttccaatgctagctgtgacccctgtacatgtctctttattcacttggttatgatttgtattttttgttcttttcttgtttttttgtttttaatttataacagtcccactcacctctatttattcatttttgggaaaacccgacctcccacacccccaagccatcctgcccgcccctccagggaccgcccgtcgccgggctctccccgcgccccagtgtgtgtccgggcccggcccgaccgtctccacccgtccgcccgcggctccagccgggttctcatggtgctcaaacccgctcccctcccctacgtcctgcactttctcggaccagtccccccactcccgacccgaccccagccccacctgagggtgagcaactcctgtactgtaggggaagaagtgggaactgaaatggtattttgtaaaaaaaaataaataaaataaaaaaattaaaggttttaaagaaagaactatgaggaaaaggaaccccgtccttcccagccccggccaactttaaaaaacacagaccttcacccccacccccttttctttttaagtgtgaaacaacccagggccagggcctcactggggcagggacaccccggggtgagtttctctggggctttattttcgttttgttggttgttttttctccacgctggggctgcggaggggtggggggtttacagtcccgcaccctcgcactgcactgtctctctgccccaggggcagaggggtcttcccaaccctacccctattttcggtgatttttgtgtgagaatattaatattaaaaataaacggagaaaaaaaatcctgtttcgctaacggctggtggtagcaggttgagtaccgggagggctgcaagaccgtgattgatggggaggactgcgcagaccctggcgagggtgagcccctccccggaggcgcctgtggaatgtccagggctctggtccgctcctcgggatggggggtgcctaatcctagagccgcattccaggataaggggggtggggagaggctgggccgggggaggggcaggaaagagggctataagggcagcggcccaggcgggcgggatccaggcgggccatggcggatgtccccggggcacagcgagcggttcctggtgacggcccagagccccgggaccccctgkactgttgggcctgcgctgttcttgtaacagcccagaatctgctggtggctgccttcaatcttytcctgctggtgctggtgctagggaccatcttgctacccgctgtcaccatgctgggcttcggcttcctctgccactctcaggtgagcgtgcgccccggggtgtgcgtgtgagtgtgagtgttggtgtgtggtgatgctggcggtggggtctatgggccacamcttcaacccgcctgggctgtttccaccccgtgcacagtatcgcctggtcggcttgggcctgaygcctcttctcccacagttcctgcgctcccaggcacccccttgcaccgcgcacctgcgggaccccggtttcacggccctactggtcaccggattcctgctcctcgkgccgctgctcgtgcttgctctggccagctaccgccgcctctgcctgcgcctccgcctagccgattgcctcgtgccctacagccgagccctttatcggcgtcggcgcgccccgcagccgcggcaaatccgggcctcaccagggtcccaggccgttcccacatcaggaaaggtctgggtctaatgaycctcgagtcaagaacaaccctgacggctgccctccctcttattcggcccaaggacttgaagcccggcatcttccgacctgccctgcccccacccctgcctgagcggagtcctagcatccccttgggagcagcagcgtcagtggacccagtgctgagaaaagcccccacatcccggaaaacccactttcctttcacgacccacatctcaatcctgaacatctaggctggaacctgcacacctccccctcagctccgtcgtgaatgggacaacaatctcgtgccctcgttttatggtgcagcttctctagtatttctggggctggggggcggggctggaggggaaggagtgtccacgcatcaataaagatttaacgaactgaacgcgctctgcgaacagaggcgtggcacaagtactatcacccctgccctgtgccgaggaacaggaaacatgtgccagggctacaaatgagcagagaggagcatccttgagccccctggccttatcgcttttgtccgttcttcctggccagacctcagagatctgttcctgaccccaggcacctccccctcaatagagtggaggggcccagcctcggccgcctgccgctgctccccttggggacctgagcccgttctctgaccccagcttagaggaactcggtgttgccaggccggggtgggaaacaatgggccttccggagcaggatgacaccccctcccgccacaattctggagcagcagccgtgggagggaagatgcaggggcccaccctggggcctgttggtccgtcattcagccctgccccccatctctacccctgaacttgagagaacctttggcacccctggacatcttggttgggagaggagggttgagggtgctcccgacttcagatgagccctttcctctagggatggggtgtgctatcctgcaccggcatcccagctacacacagacacaggcccattcggtcataagtttaatgaagtctgaaaggtaagcgccatcgtggtcagagatacggaggcccggtcagactctccctctgcacctcaatggaaacgatgtggtgtccgggtaccatggccaggcccagcacacggggctccccggcagagaaggaatctggaaagaaggatcagagcatcaggaaagtaggccagaatcagtcccgcccctctgagccacgaaaacgagccccagaaaacaagggttgcagccaggcccttaaggggaaatgccttgcgtaaggttccgccacattaccaggcgggtgtgcattccccgggcactgacccgacggcttgaggaactcctgcgccgagcccaggatgacattgcagtcacggtcagtgcagaggaagcagccgaccagtgtccgtccatctgtcatgcgaatgcgcatagtcttgttgagcagcgcctctagctgctgtcgggcgcgctcagccgccgagtcctcgcgctctccgtccgaatcctgcgcggggtgtaacaagcgctcagaccgcgcagcccaggctgcccgcccgcggaaccacagctcccggcagcccgcggggcactcacacaaagcccagaggctgccgggagctgcagttccccaccccctccatcttgctgcttgactgcccctcagtcccagaaccagagcccgtgctaaccccagcactggagctgctctgacgccgactgcaacagccattctcttctcgtagcagcatggtcggtccagctccggccatttgcccggaggcctcctctgggcctttcaacttcctaagcacctttcaggttgggtggtccgagatctcgcgagcgctcccgacctctttcctttcgcgagatcccctctcctccccctcctagtctcctcggcaacggcacagatctcgcgagcttctcctacttctctagcgctgtggctcactgaagcgtactacgccggatgtcttaagatatcgcgagacctttacctctggtttcttacacatcctttagaaactggaatttagcgagaatacattctttcatactgcctcctcccttgtttttctgtctcagagagatagtctgtcctaaatatcccatgtagcccaggccactgaattaaaacggagcgtattcgttctctgccccaccccgcaactcctgaaagcggcgcaactcaattacttgatccttatatgccccacgcgggactcatactacgtttcccgtgaacacgtgcagtccaaaccccgcccctgatatttatctcagtggacggtggccggaaaaggacaatggtttccatgtcagcggataaacgctctcccctcggctcccggacgcgacggaggtcgtagtagtagtgagtacgtgctgaggagcaaaggagtaaccaagagatccagtgaccgacagagcaagagccatgccgcgccggggcctggtggctgggccagacttggagtattttcagcgtcgctatttcacgccggcggaggtggcccaacataacaggcccgaagacctctgggtatcttacctgggacgcgtgtacgacctaacgtcattggcacaggaatacaagggtaagggccacacgttgggccggggccggagtgtgtgtgtgtgcacgcgcgcgtttgcctggttctcgaagggctggcattgacagtggctgtgctgctcttttcaagggaacctgctgctgaaacccatcgtggaagttgcaggccaggatatcagccactggtttgatccaaagaccagagacgtgagttatgctggaacctgggattgtgggtagaggaaatggagagcggggatgggaaggaaaggcggaggctagccagagcctaatggctgctctgacaccctcgccccaaaccctcctttaaagattcgcaagcacatagatccgctgaccggctgcctgaggtactgcaccccgcggggccgctttgtgcacgttccgcctcagctgccctgttcggactgggccaacgattttgggaagccctggtggcaggggtcgtattatgaggtggggcggctgtctgccaagacccggagcatccgcatcattaacacgctcacgtcgcaggagcacacactggaggtgagaactggtgacaaggagcaggttagaaggaatggggaatcccagcaaatctccaggccgatcttcagggcaacattttttccataaccggtgggagtgtattttctgtcctttacattgaggcaactgaggaaagcacagcacctaggtccccagggttgggaattctaggagtgtctgggtcacagggggacaagagactcctttataagcctgggaacagcagttcatgtatcttagtgatggtggtccttcgaagctcttacacgccgttttggacagcaattggactttctttttaatctactctgttgcatggatatagtgaggggacagttgaccctttatggccatccggtagttagaagtggctgccattaagatctgtaggactttagggtctgctcattgcatgctggagtttcagcttttttttcccggggccgtagagtacctgaagctgctatctgccaagggaggcactttgatcccagcgtgtgtatatgtatactccatccagaattctgggggtggggtgcttctgtgttctccaggtgggggttctggagtccatatgggaaatcctacaccgctatctcccctataactcacatgctgccagctacacgtggaaatatgaagggaagaacctgaacatggattttaccctggaagagaatgggatccgggatgaggaggaagaatttgactatctcagtatggacggtacacttcacacacctgcaatacttctgtacttcaatgatgatctcacggagttgtaggcaaggagatgtacactcgtgtagactcaagacgtatttcgagtttggctttttctgtgccttgaggaaaagtggtggggccgaggggtgcctggacccagatctccactcctctccaggagctagcctgtgcccttctgaagtgtaaaggccctattccctgccttcattacagtttgctctgagaaaattagtgaattaatctttgggaatgatacaagaagatcaagtaccttggtttagggagatgtagaagaggatagtcagagttcaggcagaactgtttgatagttaagagagagtagttctacaggggtgagggatggaaggacttttttggcaatgatggaaatgagatgtctgcaggaagatgggatttacaaagaaataggaaatgtttatcattgaccatacaaagctggcttatcttacttgtagaagagtgtttggcagctgaaacccaagggaaagaaaggaagtgcgtcattataggcaattcaggctagatattatactaggtacttcatataccctcttttttttttttgcccccaacaaagagaaggggtcttgctctgtcacccagtctggagtgcagtggcaaaatcatggctcactgcagcctggagctcctgggcacaagtgatcctcccatctctgccttgagtagctgggacttcaggtgcacgccacaatgcctaattttttaattttttgtagacacagggtctcgctgtgttgcccaggctggtttcaacctcctggcctcaagtgatcctcttgcctcagcctcccaaatagcctcttcaagacaactaccccataaggtggattaccattactatgttacagataagtccttcgaaactttggaaagtttaatagctcaaagccacactaggtagtaaccactagagccagaatgcaaattcaagtctgcccaactccaaagtccatgttctctcaatataaagggaccatctcaatgtctaatctcatgttaacatttgtagccactgctctcagcaagtatttgggatgtggctttgtcctaggatccctgcacaataggaaattgtggtcctattgtatagtttgcagttattgtctctggaagggagtttgcagagttctcctgtggcgaagaggaggcaaggaaggctaagtgtcagttaagcaatagctattggggctacttctttgttaatcccataccccagatttctctcctgaccttttggggcaaagaggtgggtatttactaacttgaaggaaaactagagtggggaaaaggccggcaaattagtgacactttggcgagggagaaaaaggaggcagtttgccacttggagaagatgaggaagacagggttgcaagacggtgactccaaaagagggagctcgacaggggtaatgtaaacagagatgctaactaagtcagaaaactctcctggtgaccaaaagagaaccactattgggggtaatggctagatttggtctcctttaacttaaggaggggagatttgagaatgacagacagttgaacttcctggcagcagcaagcaaaaaacaaatcaggaagagtttagtgtgtcttctggcaggggacaccagggcccagcacaggagaaggtggcccctgtgagatactggtgggctatataggcgttttctgaggggctttgggaggcatgaacaaaggtggaaacattgctgttggcttcggcagtatctgaatttactgtgagatggagggtttaaatctaaccccatggaatgcaggagtccatgaattatctaaatcgatcattttgatctttaatcaactctgcaattatgtgtaccttgtttgctcaattaaaccctgaactatttgagaatgaaagctatgctgttcctctagtgcaagcctcagggcctgtcctgtgcctacaggatgtccccattctgccaaaacctgtccctcttccagagactcctacttcaatgtctcttgctagaaacacatccctttcctcacacatccagtcactcatcaagtgtaatctgtctcctaaatatctctggaacctatcttcttttctccaagttaccatcacctcttgtctaaactgctacggaaacttcctaacctgttctcccatttccacttctgacttccatgctgcaatgagagtcagctatgaaaaacaaacctaaacatcgaactttccttagcttcttcagtggcttccaactgcttttggaataaagtcctaaattcaaagatcttgtataaatcaggctcatctcgcaacacccctctttgttctctatggcctagacacactggctttcagttcattacatgtcttgcctcagaccctcacacactgtcctctctgcctgcaacactcttcctttcactttccacctagctgatcctaaatgttccttcctcagggaggtcttttctgatttcttggtgggtcaagactttctgataaatc

SEQ ID NO: 98248 - DNA, 16545 bp, Homo sapiens
ctaaccctgcatgttcccatggactcttgaaagcctgatcccacctagacgaagcactctgatgggcatcatatattctaacatccattgctctggtaggttccccaagactctcatactggtcttagccctggaagctagtagggcttcccctcctgatgtaacctgccttggccaacagtacaaagccctagggaaatttccagacctcctcagacccacagactcagaatctgagggagtggaagcatcctggtgattctggtgtgtagccagagttgggaacctctgaactagtgcccaggccaggctctgcagagactctctcagggggatagcctcctgtgcagcctgtttgacccttccagggtcccttaactccctagcaggtagttaccattccttcactcaatccaccaagtgttcactaaatacctacttaccacaaggcatcacctgagggatgctgcgatgcttataacactgtgccctagaggatgcccaaccaacacacagaaaatgaatcaactatcagagactgaaataatagggcaagagggcaaaccacatcacaaggaagtatatggctactgctggagaggaaggggctctcaatttcagcctgagagcctggataactcatgccaaaatggtgagactgtgtttaggcagggtttgtctttctgtctagggcagaaagaggaggtagggctagcacttcaaggagacagaatgaccatatcagggaagacagtaggcccacagccggctgaacgaagaaaagtcaaggtgagtaagcagctaggagatgaggctggaaggtaagtctggagccagattgtagggggccttgaactacaggctgggcagtctaaacctctcccagttcctagagggttgttttcctgttccttcactagctaatgttcctatttatttatttatgcatctagaagtacaaagccaagcagttcttaaatctacacatgaaaataatttaagcactctttaccctgcaggcgcttaaaggaaagttgaccaggtctcctcctgagggtcctccttccccatggttctgccctatcccaaagtctctgctagtgggatatgactggagttctcagctcaactagtaaaaaggctgaaagtcacttttcagcattcttacttgattactcacctgacaaatgaggacagagtccacactcacaaaaggcaaatgacaacctggctttggctaaaaatcaagctacagagaacttctgctccagtcccaaaggttttgtgtatcgtggctcagcacttcaaagtaggggagaggttgagtccacaagagcagggagccaaggactctcgttgcctcattctggtgtccaaccttatcctccccaacctgcacactgagtttcctggggcctgggcccagtaaagtgtcaaaatggccaacccatggctagaactagaaaagtttacctcagaaactgggcgattcgggccatgattgccccggccccaggctgcagcacatttcctgtggacaacaaactttcattcagtgccaggcggtggtgttctgggcactaaagtatagctgtgaaaaccagagatgaggcattccagatctttcttcgggacactagcccttggcaggctcacttgcaactctggaacatcagggtttggggcagggagagccagccatacaacagcttgtcctggtcatccaccagctcctgtccctgagggtcccacgctcacttgcccatgcacccagcttttccaaatcagcacagatgggcaggttgtctgcccttaaaagtgaaatgggagtttctgaaaatgcacatctccccaggtatcctcctgtgagccctgctgtcaccccagagaggtggaacagtgattgccgacctaggggtggcatccgctggataagactcttgccatatcatattgctgtatttcaaggtgaggggtggaatagagggctggactgaagattgtggggaaaagaaagatcagattgttaccgtgtgtatgtagaaaaggaagacataagaaactccatgttgatctgtacaaagaaaaattgtttctgctttgagatgctgttaatctgtaactttagccccaactctgtgctcacaaaaacatgtgctatattgaatcaaggtttaagggatttagggctgtgcaggatgtgccttgtcaacatatgtttgcagacagtatgcttggtaaaagtcatcgtcattctccattctctattaaccagggacatgatgcactgtggaaagccgcagggacctctgcccaagaaagcctgggtatttgtccaaggtttccccccactgagacagcctgagatatggcctcgtgggaagggaaagaccttactgtcccccagcccgacacctgtaaagggtctgtgctgaggaggattagtaaaagaggaaggcctctatttcccgcacatccctgggaacggaatgtctcggtgtaaagccgactattggttctatttactgagataggagaaaaccgccctgtggctggaagcgaaatatgctggcagcaatactgctctgttactctttgctacactgagatgtctgggtaaagagaaacaaaaatctagcctacatgcacatctcagcacagtaccttcccttgaacttatttatgatgcagattcctttactcacatgttttcctgctgaccttctccccaccatcaccctgttcaccccgttttgcctgaagagggcctgcccctccacacctgtgggtatttctcgcaaggtggagacgagaaactgagaaaagaaatgacacagagacaaagtatagaggaagaaaagtgggcccaggggactggtgctcagcaattgaggacctacaccagcactggtctctgagttccctcagtatttattgatcactatctctactatcttggcaagagggatgtggcattatataccattactataaggtaatggtggggagggggtcaacaggaaaaaatgtgagcaaaggactcagtgtcataagtaagtttaaggaaaggtgctgtgcctggatgtgcacataggccagatttatgtttgactttacacaaacatctcagtgcagtaaagagcagtattgccgccagcatgtctcacctgcagccataaggcggttttctcctatctcagtaaatagaatgtatggttgggttttacacccaagacattccattcccagggacaagcaggagacagatgctttcctcttatctcaactgcaaagaggccttcctcttttactaatactcctcagcaccgaccctttacgggtgtctgcaaagaggccttcctcttttactaatactcctcagcacagaccctttacgggtgtcgggctgggggactgtaaggtctttcccttcccactaggccatatctcagacaatctcagtggggggaaacctggacaatacccaggctttcttgggcagaggtccctgcggcctttcgcagtgcactgtgtacctggttaatcgagaatggagaatggcgatgacttttaccaagcatactgcctgcaaacaaatggttaacaagccacatcctgcacagccctaaatccctcaaaccttgattcaatacagcacatgtttctgtgagcacagggttggggctaaggctacagattaacagcatctcaaggcagaaaaatttttcttagtacagatcaaaatggagtttcttctgtcttccttttctacacagacacagtaacagtctgatctctcttcctttcccccacactgccgcactccccttgccgagatagtgaaaatagtaatcaataaatactgagggaactcggagaccgatgccggtcacctgggcccactctacactttgtctctgcgtcttatttcttttctcagtctctcctcccatctgacgagaaatacccacaggtgtgaaggggcaggaccccttcaaaggtcaaggccatggaggttcccccagtgaaaattcggggcggggaggtgaggagagctctggacgaacggaagaacggggaaggcccagcgcagggcctgagtggttcgctcaccgacacagatgtcccccagctgttccggcctcagattcacgtccttgagaaccgcggtcatgactgccgagagaagctcgtcgggggtggtgtcctgcagcagaaagagcagccgcagtgacccccactcccccatgcccaccccagggagacaaagcgaccacagctgggtgcggagctgcctccggcgtccaggataaccaaacatacgaaccggaccccagcccgcgccggcgtcttcccacactcggcgcccagaccctcgggcctcaccttgaagccgccgcggcccgcccggcagatggccgtgcgccgcccgtgcaccaccaccacgtccgcggccgaggcctgcggggcaccgctcaggcaaggcgcggcctgcggcatccagccggaatcggccggacccctcaggtggcccagcactacctgcagcctctgcattgcgcaggtcaaccctgcagaccagccaccagtccgggaactgaccgcggagttaacagacagccgtccgcacacgcgcagaaccacatctcagcctccaaggcctcaactccgcccacagctctgcgaacagacgcgagcgaccctccaaaagtcccgtccacctccagcctcagccaaccacaaggagagtcggcctgggaacccgcccctccccgccaccgcctaccaagccctctataggagggcccacaggcaccgcccagccgagctttccactcaatgccccgcctaccttggcctaccgcagccaaccagaaggtgtatctttacgaatccccgcccagaaatgcagaccggaagtctttccaccttttgtagccaaacccgagacctgacccccaaatccctgtctcctgcccgcagccaaacggaaggctgggcagccaggaccgcttactgcttgggggctggagatggaagccgaggctctaattcctctacccacttcctaggaggctctgctatccctccggtcccagtacccgagctgggggacctaaatacttccgagacgcccgagtcctgctccgacgtggttgggctttcccattctttcgagaagacagggaatttgggcttccgggctggccgggagaacagattttacagacatgcggggtgtgacaagctctctaactggagaatgaacatttcacacttttaccagttttacacccaattggaatgattttattagtgcccatttcccgtgctaggctggggtctccaccaaggcagagaggtaccatgtatccggggagcctgcgacacccttgacacttagtagatgatcaataagtacttgtcgaatgagtaaatgaatgaaccagggctccccaggtcaggactgtgtccctaaacctaaagggcaaggccacgtgcccccttgactcccaatagcagggccatgtcttcacctgagaccctggagagtagtgctgggctttccacagacaccaaaggacagggtgccttgtgctccccaacctagtgtcatgacgtccccaaccatttcgagggcagggccacggcatgcctcaggctccagaaggcagctgtccgtttcccactcccacctcggggagcacagcaggggtcttcccatacccctactggcaggattgcgtgttccccagagacagtggagggcagagctggtgccttcccacttgtcccctcctcgccatcctcgagggcaggaccgtatgaacccctcagattcctccgtggaagaactgtggctccaccagatcccaaaaagcaaggcccgtttcctacaacccccgaaggagggtcgtcctcactccgccgccaacctactagcaccatcaccagaccctcgagggcggtgccgtggacctctccagatctcaaaaggcagattcctacttcttacgccccccacatcacccgcctcgagacctcaagggtagaggtgggcacccccgcctccgcacttttgctcggggctccagattgtagggcagggcggcgcttctcggaaagcgaaagccggcggggcgsggcgggtgccgcaggagaaagaggaagcgctggcagacaatgcgacccgaccgcgctgaggctccaggaccgcccgccatggctgcaggaggtcccggcgcggggtctgcggccccggtctcctccacatcctcccttcccctggctgctctcaacatgcgagtgcggcgccgcctgtmtstgttcttgaacgtgcggacacaggtggcggccgactggaccgcgctkgcggaggagatggactttgagtacttggagatccggcaactggagacacaagcggaccccactggcaggmtgctggacgcctggcagggacgccctggcgcctctgtaggccgactgctcgagctgcttaccaagctgggcygcgacgacgtgctgctggagctgggacccagcattggtgaggacgtccccttcctggcctcgtacctggggggtgaggaggctgactttccgcggcctcagcatcctgtctcccatggagagaccccatttcctgcctcgggggcccgaagaagcctgcagagggagaaccatgcgggtcccgttccttcttaataaccggtcgcggttattaagaaggactggagaaaggtccggataggcggagatgggaaggaagcagcttaggcagaggctttcaggtagggccaggagtcagaatcaggcttctgtgggggcatctgggctgtttcaagtagagcaacaggacaggtggggcgattgacagtggactgtcttagaaacctcaagtcctggggaaatgcagcccttctttctactcactggcacttacataatatacatgcataggcgttggatacagccgcccacagacaggcacaccttgctgagttggaatcactgcaccataaccagtgggtctcctgagcctttctggcatgcccagccccttgctcacatctgccctggatcccagaagaagcagacctaccttggtaccattcttaggatccctaggaagggacagagatacaaacctgactttgatggccttccagaaagccagaacaccactgacatccctttgggtcagttagagccagtgggagctcaacttctcagagccgttgagcttcgcgtggcaccagtgaactggggaagccctctagaacaacccagccagaggaggtgggacagcggctggatcctgactgtgggtaaagaggtaggcactcccagggaggctgctttactctgtctcttccccacagaggaggattgccaaaagtatatcttgaagcagcagcaggaggaggctgagaagcctttacaggtggccgctgtagacagcagtgtcccacggacagcagagctggcgggcatcaccacacttgatgaccccctgggtaagggtccaatactgttcccatgggacaggtggaataggacattgtggtgttaagagcatgggtgtttgaagcagatgggctgtgagaccttgggcaagtcacttaatctttctgagcctcagtttcctcacctaagaaatggagataatagtcctacctctggattgctgtgagatgctcatgaaataatgtctgtctcgtggttaatccagagcttagcccctgaggtactcatctttcctctcctggaaagggcactttctctgaggagtatcatcttgggaagggtgcagggcccagggttgcctaggcaggggactcttggctggatccctcccaagccttcccatggagctctgaccaccacccttgtgctctgcacccagggcatatgcctgagcgtttcgatgccttcatctgctattgccccagcgacatccagtttgtgcaggagatgatccggcaactggaacagacaaactatcgactgaagttgtgtgtgtctgaccgcgatgtcctgcctggcacctgtgtctggtctattgctagtgagctcatcgaaaagaggttggctagaaggccacggggtgggtgcgtggatgcatgaagccctgccctggggtccagatactgggcatctcctsctagctgtgcactgtccagcctgggcacagtgggcccttcctgaagctattcccaggggatatgctgaactaagttgccacaggacctgcagcctgcccactctcccctaggtgccgccggatggtggtggttgtctctgatgattacctgcagagcaaggaatgtgacttccagaccaaatttgcactcagcctctctccaggtaagctcaaccctgctctggcaagagaatgagggaatgtgtaggtggggcctctggattgtcagcyttccctccccaaggactgtggatgcagtaccaaagaactgctgaagatctctgcacacctgagcatgtgtgcatgtgtgtgcctttttgtgtgagtgaatgtgtgccaggggtacttagatgggggatggctgttgttaaccctggggttgaagactgggcttgtcccaccatggggcaagggcctgatgccagcatggcaccccttggcttgcaggtgcccatcagaagcgactgatccccatcaagtacaaggcaatgaagaaagagttccccagcatcctgaggttcatcactgtctgcgactacaccaacccctgcaccaaatcttggttctggactcgccttgccaaggccttgtccctgccctgaagactgttctgaggccctgggtgtgtgtgtatctgtctgcctgtccatgtacttctgccctgcctcctcctttcgttgtaggaggaatctgtgctctacttacctctcaattcctggagatgccaacttcacagacacgtctgcagcagctggacatcacatttcatgtcctgcatggaaccagtggctgtgagtggcatgtccacttgctggattatcagccaggacactatagaacaggaccagctgagactaagaaggaccagcagagccagctcagctctgagccattcacacatcttcaccctcagtttcctcacttgaggagtgggatggggagaacagagagtagctgtgtttgaatccctgtaggaaatggtgaagcatagctctgggtctcctgggggagaccaggcttggctgcgggagagctggctgttgctggactacatgctggccactgctgtgaccacgacactgctggggcagcttcttccacagtgatgcctactgatgcttcagtgcctctgcacaccgcccattccacttcctccttccccacagggcaggtggggaagcagtttggcccagcccaaggagaccccaccttgagccttatttcctaatgggtccacctctcatctgcatctttcacacctcccagcttctgcccaaccttcagcagtgacaagtccccaagagactcgcctgagcagcttgggctgcttttcatttccacctgtcaggatgcctgtggtcatgctctcagctccacctggcatgagaagggatcctggcctctggcatattcatcaagtatgagttctggggatgagtcactgtaatgatgtgagcagggagccttcctccctgggccacctgcagagagctttcccaccaactttgtaccttgattgccttacaaagttatttgtttacaaacagcgaccatataaaagcctcctgccccaaagcttgtgggcacatgggcacatacagactcacatacagacacacacatatatgtacagacatgtrctctcacacacacaggcaccagcatacacacgtttttctaggtacagctcccaggaacagctaggtgggaaagtcccatcactgagggagcctaaccatgtccctgaacaaaaattgggcactcatctattccttttctcttgtgtccctactcattgaaaccaaactctggaaaggacccaatgtaccagtatttatacctctartgaagcacagagagaggaagagagctgcttaaactcacacaacaatgaactgcagacacagctrttctctccctctctccttcccagagcaatttatactttaccctcaggctgtmctctggggagaaggtgccatggtcttaggtgtctgtgccccaggacagaccctaggaccctaaatccaatagaaaatgcatatctttgctccactttcagccaggctggagcaaggtaccttttcttaggatcttgggagggaatggatgcccctctctgcatgatcttgttgaggcatttagctgccatgcacctgtccccctttaatactgggcattttaaagccatctcragaggcatcttctacatgttttgtacgcattaaaataatttcaaagatatctgagaaaagccgatatttgccattcttcctatatcctggaatatatcttgcatcctgagtttataataataaataatattctaccttggaaacttgtgtgtgtgttgagtggaagaggtttggaagcagtaatgtgggtaagagaagctggtccactgggtgggttccagcctggatttggcacgggcttcctgaaagctgggccccctcctcacaggttcagtcctaagcagggctgcaggcagaaccaggaatactgacctcagctacagacactcaggagactgcccttctctggccatgtccaatcttttcttggttgtgccatgctcctgggtcctggtccagtcttggagtaggggctgatctatgctccaaagagagtctggaggaccccccaactccagcccctgagcactgcattgttactcctaataatcttctttgggcacatctatgttaatcctaaaggtactgatctatttttaaagaaaatattgctttttcactgttgaagaaaatttggaaaagataaagaaaaaaactcacacatcataattccagagagaactctagtgacattttagagtgctcagacattgtcagtgacagtagcttttttctcaatggtctatctgctgccacgtcctggctcctgagccacctggatgctgtagcctccccagccttgcccctgtgccctcagggactcctgggaaggccctgtgtactcagagaacccctgaggccgagtctttctctccagcatcccctggggagcagagccacagtgtggccctggcggtgcccccaggatctgccatgtgctgcccatggctgggaagacagtcctgggctggtcccctcttgggaaaagcctctcttctcttaggccaggctgttgacccaaatgtgctctccccacccctatctgaccctcacactcctcacacctgcctgtctccagtgccttccttcccattagctgtgttcccaaatgtagataaagcttcctcttctcattttcagttttagtcctctacgagcatttaaaagagaaactttcctttttcaataaggaaaatttacgctgaaattatcaaaggcaaagcaggaaactttggagggcagcagcatagttgaaattcaaaactacgattctgtgtgacgatggagatggattccgccacaagtcaatgaccagggagagaattggggagagggatttcctttagattagataagacttgggtcataacgatcaaatatactgatatagtataactttgttggattctggctcaaacagagcaattgtaaaaagacaatattgagtcatatatctgataaggggttaatatctggaatgtataaaaaaaaaaactcttagaaatcaacaacaaaagaaacaagcaacctaactcaaaaatgggcaaaagacttgggcagaagtttctccaaagaagatatacaaatgagggacaggtgtggtggctcacatttgtaatctcagcactttgggaggctgaggcgggtggattgcttgagcccaggagttggagaccagcctggactacatggcaaaaccctgtctctaaaaaaaaatacaaaaattagccaggcgtagtggcatgcacctgtagtcccagccactcgggaggctgaggtgggaagatcgcctaggagacgaaggttgccgcaagccaagattgcaccactgcactctagcttgggcaacagagcgagaccccatctaagaaaaaaaagaaacaaacaaaaagaaaaaaaatacaaatggccaataagcacataaaaatatgctcaatatcactaattagggaaagcaaatcagaaccaccatgagacagataccacttcatacccattaggatggctactatcaaaaaaaaaaaaaaaaaaaaaaaatatatatatatatatatatatatatatatatataacaaacattgaagatgtggacaaatcggaacctttgatcacttttgatgggaatataaaatggcatagctgctatagtaaacagtatggcaattcctcaaaaaattacaaacagaattaccatatgacccagcaattccacttgggagtatataccccaaagaattgaaagcagggtcttgaagacatgtttgtatatccatgtttgtagcagcattattcacaatagacaaaaggtataaccaagccaacatctatcaacagatgaatgggtaaatgaaatgtggtatatatgtacaaaagattattacttagctttaaaaatgaaagacattctgacatatgctgcaacatcaaataactttgatgatattatgctaagtgaaataagacaggctgggcacagcggctcatgcctgtaatcccagcactttgggaggctgaggcgggtggatcatttgaggtcaggagttcaagaccagcctggcacacatggtgaaaccctgtctctacaaaaaatacaaaaattagccaggcatggtggtgcattcctgtaatcccagctacttgggtagctgaggcaggagaatcgcttgaacccggaaggttgaggtttcagtgagctgagatcatgccattgcgctaacagagcaagactctgtctcaaaaaaaaaaaaaaattcacacagcagaacactgggctggtaagggtggaagatgaggggccgcaccatcaatttaggggaacattgtccccactggctgctatttgccagatgatacagaataaatgttttaaatgcccttggggatgtctggttctgagacaatatagagtaaaaacacttctccttattccctctgctaaatacaggcaaaacaccctggacattatataaaacacaaatataaggagactctgaaaggtggagagaagaagatagaatggttagggacctcaggacctatggaatgacatggcactagcctagggttttctttttgcctatgcctaatggatctcagactgagtatggagaaggcagaaacctataaactaatgagtacaggtaaaggaaaaaaaagaaaaaaaaaaaaggaaaacctgcttttactagccaaacgaccagaaagggacagtcttgcaagaaagaaagtttgtagacaataaccactccagctaaaccatagaaaaaattgtagtattacctacaccctgccagcaaaggcaaaatggggaatctaaatttccactcccaccttcttgggtgtcagagtgggtctagtagagagtcaagactttcaccactgcccagcagtaatgtcctctatcatgtcagtggaggccagatggggagtagtaacaaggcatccttctccctcccagccaaggtggtatcaggggagacttagtgggcagcctgaactctcatcctgacccagcagtaactaggcactctctcccttgttctccctcacctctaccctgggatgtcaatagagtaacctgcacttctacctccaccagacagcattgttttgatgtcaaagaaggctaactaaaacagaagatccaaatgagatccagcctcattacatagcatccaaaatgtccaaggttgaaaatcagtcatcataccaagaactagggaaatctcaacttgagcaagaaaagacaaccaacagatgctaacaccaaaatgacacagatgtcaaaattttctgacaagaactttaaagcagccagtataaaaatgcttcaataagtaattgtaaacatgcttgaaacaaatttttttaagtttcagaaaagaaatagaagatataaacaattaaattgaaacgttagcactgaaaaaaaaaaaagaaaaaacttactggatgggttctgttgtaagatgtcgatagcaaagaatcagtgaacttgaagacaaaccaataggaaccacccaatctgaacaaaagacagaaaatagactggaaaaaaattaagtctcaggaatttgtgggacaacaaaaaaagtctaacatgtatgtcatcagagtcccaaaaggagaggaaaaataagttggagctaaaagggtatacaaataaatatggttgaaaatttgcccaatatggaaaaaaaaacaacccataaacctatagagctgataaggtgagcaaaccccaaccattataaaccccaagaaatccacaccaaggtacatcatagtctaacctctgagaattaaagacaaagaaacaaatattgcaagcagccagagagaaatgatgccttaccaataatgaacaaatttttgaatggcagcagatttctttcattggaagccacagaggtcagaagacattggcccaacatttttcaaagactgaaaaaaaaaactgtcaactcaaaattctatatccagttaaaatattattcaggaatgaggaggaaatcaagacattctcagttgaagaaaaactatgagaatttgtcaacagcaggcctaccctaaaagaatagccgaaggaagtttttgaaacagaaagaaatacaagaaaaaaatcttggaatactaagaaagaaaaacaagagaaacagtaaaaatatgagtaaattgagtacgctttaattttcttaaattgtcaaaattatatctgatggtttaagcaaaagattagtttagtggtcatgcgcaagatagattacggaagttgataagcacagtggtaatttctgcttcaggcaatttcacaaacaaaaaagagaaatgaaatgactactggctgggagaagaaactctgggatccccacaatttcctctttcctcaaaatatgtaatccatcaggttacctcctctcctaaacactctatgcattgtctgatgtagttttcaacttatgtacaggaaatatttgggacagctataaatgagggagagtcaaggcacttaaagcaaggaaaggtgtctatacctcactgaaactgataaaatgtcaacacaagtagaactgtgataagttaacatatgtataatgttacacctagagcacctactaaaaaatctgttcaaacagatactctcaaacactataaataaatcaaaatgaaattctaatttcatttggaagtgcccaaattatagagctggagaatagatcagtggctgccagtgttttgggatggtgagggagcggagtgggtgtgactacaaagaggcagagctttacgatgttgcagtacaggccgggtgaggtggctcatgcctgtaatcccagcactttgggaggctgaggtgggcagatcacaaggtcaggaaatcaagaccatcctgcccaacacggtgaaactccgtctctactaaaaatacaaaaaattagctgggcatggtggcacgcacttgtaatcccagctacttgggaggctgaggcacgagaatcacttgaacccaggaggtggaggttgcagtgagtcgagattgtgtcactgcactctggcctgggcgacagagcgagactccatctcaagaaaaaaaaaaaaaagatgttgcagtacggtagctctgtaacttgattttggtggtggttacacaaatctatacatgtggtaaaatggcataggactctacacacgtgttataccaaggtcaagttcctggttttgatattgtactatagttatgtaagatgtattcattgcaggaaattgtgctgaggatataggaacttccctgtactatttttgtaacttcctgtaaatctacaattatttcaaaataaaaaattcaagcaatttttaatttaatataattaatatagtttaatattgtattaatattaaattttatttaatttattaattaataagttaacatataagtaaaatttgttttgagatggggtcttgctctgttgcctgggctggagcacagaggcatgatcatggctcattgcaactgcaacctctgcctcctgggctcaagcagtcctcccagttcagcaacctgagtagctgggattacaggtgcagaccaccacaccaggctacttttttttttttttggtagagacagggtttcaccatgtcacccaggctggtctcaaacttctgggctcaggtgatccacccacctcagcctcccaaagt

SEQ ID NO: 98249 - DNA, 31204 bp, Homo sapiens
aggtgtcccatcccattgcagcctccaccacctgtaaccccttcctggcattggccactgaagggtacaaaggcaaaaggaccacagcaccacttaggtgtagcatggattttaaactgcagtcagtatcagatcctgtttgataaataagctgactgttctctcttgagaacctgtggcctcaaccagccaccaagctgatgtggcccaagtccatctcttggtcttctcctttgaagcacagcctatttctgagccaagggttggggaagcctgtctagatgtgggactcattgccccaaaccagggagaggaagagctcccacagggagagcccaggctctctttgcagcctttcccagtttggtgtttaagcagtgccatgttccttgtttgacaacaagacagtctgtaaagtattgctcttaaaaacaattaaaaagaaccctttcatattggcaccattgccttagtcctctgtgggttggtcttcagccagcattctggtgggagtgactggcattaacaagactggaaatcgggggtcaaagtaaaatatctttgttttgctttcattcacaaagtaatgaagccagctgccaattacatcctcccaacagcactttggtctgtggactgctgtgtgaatattcagaagggaagtaagtattcagggggtaaacaggtctcccagcattctgagtgttccaaaccagtaatccacatgccaattcaaatagaacagccccttgctagatattaccacagataatgacagttacatggtagaactgcccatgccacaaatatttatttggaaaagtagtcattaaatgaacccactgccttaaatgtcttgaatgttgcagtcaagtgtctgtcatgtgttgatatccacacagaattaggccctaatgagagccttagaccctcaaccatgcccccttcgttggcatcacagggccttatttggaagagcgggcaaagaggatggaaatcataaaatatttcatgggaatcgaacctagggatagtgctccacttctgacgatggagtgaagacacttggcagacttgagccagacacttcacctagtagttcctgaaactgtgagcaccactgcactaagccagtgcggagctgttagggacgggcccagctcctgcaccacggacacagaatgtctggagagggccagcaggccctctgagggttctggaatctgtgcaccttatttgaccacactccaaaattctgtttttattttaacccttgaatctgctttatgtacataatcaaaatatctatatctatatctatatctatatctatatatttttaatcatctacatgtaaatgaagcaatagaattctaacataaggccaagaaatgagacgaatgtttggggtttatgttttttaaggtaaatacgggtattgtttttaattattaccatgtattaaattgtgggctttgaaacctaatgaaacctgttagccacttctctgtgccatatacttcccatgttaccaaaatacccccaactctttagccaaaagagaaccctgacctcctgagtttccatgctcctttctgtaccaggtttaaatgtagtcttctggagaagtatttttgacattgagctctgggacaggacaccttgggtttgtggactgcagcccactatgatgttattacttctctggccaggcctccagtggaagtgcacaggcactcccaatgttgttaatgctctgtcttccatttgttctggaatcctacgtgttggtctgtggttccatgcattagctgtttgtaaataatgcatttgcatactgaaaaaggaatgccacctgccacagttgatggtgaggaagctcctttgacgtggtgcaattttgatgagatgtctctggggacacgaggatgccctaatgatgctgacttgtcatggttgcagcatttgaacttttggtgttaaaaaaaaaaacctgtaagtctgtaacctggcaacattttacaaccctgtatttttaaagatggctttctaataaaaaatccagaaccacacagccctatggtcaaacaatcctacgtttgtgcctctgcttttaaaggtgctgtgctggacagttggcatgccagggttcgagaagagtgaatggcttgacgtacttgcagttaactgtgcaaaattggctggctgcctctgttcctactgtactgtaactttgatcatgtctgttcctgttccattctcccaggagcttctctgcagactgacacaccctcccccaccccgggtagtggagatgctggtgtctgggtagtcatggatttctgctggacatttgaatgtgataaacaatccagcattacttaggaaatgctacatgcggaatgtgcacgtttccaggggcgagtattgtcaatcaaaaggtttgcaatgatttccttcctgccaaaaataaacatgtgaaactgcactcttttgtggattgactacttttctaccagaagcgcctctcctccctcccttccccgcctcctgcgcagcctcatgccatcaccttgggtctcctggtatccccacttccggggaacaggggtggatgggagtggggctgcagcactccaggagccacagactgattttctagctcgtccatcccacccaaattgcctgtcactccaagggtgactgctgttcagccccctggcttcctccctccggaagcagtatggctcactcttctcccacaaagattccagccctcccagcaggctggaaaatgcagcctgagagaactggggcctcccattccataagaaccacaggcattatatgtggtgcctaaacccatacccatacccatgggcacagtggccaagatgattgcccgatgaagcacggcaaggagtcggaagaggagtcaggatgtcccaggcagtttctcgcagtgagacattctgtcgccagtgccctgaacccagtccctctgtacatgcaggtgagagaggcagcgactcctctgctagagactcctggcagggacttggacatggcttcgccactctcaggactctttctcttcatgatatctgattcggatagcaccagtgtcaatttcataaggtaagtcttatccccattttgtggatgagaaaacaggccagcgagacaaagctctgcagtctgctctatcacaagatacaggattctaccaggcatgtatattcatcccaaataactcaggacacagtatgtgtatcagcccaggagacctaatatttacccagagacaaaaccccaaataccccacagctaagcctgtgccgtgcccctaggttctttgtcatcacagtggagcagctggccagccagagagaagtcactgcagcttcctcccctggttccagactcctaggctgtgtcctttattctgctccccagccctctctgtccctctctcaccttctctggcatcaaccctgtaccccactgcttcacacctttgcatacaggcaaacagataaaaggctgagagttgtggcagtgcctgaggctgaggtatcctcatgagtgtccactggtccccgaaataggtgggaaggacacacggggcatcaagagggcacttatttgggacttggacatgctgagatatgcccttccgtgttttctagtttgagcacatatcatctgtgtgtattacaggaccaaggaatgggcaggaagcccaggagggtgggaaggagtggctgggaaaagccagcctgggaacagtggcacatcagctgacgaacattctgttgagcttatggataaggagtgcattgagggcttgtggccgagttgtggagtaacctggatgcttgcacgataaatctcctgtgtcagggctggctgtgggtcagcagactgttcaaggcccagagccatcaactggcatggccaccagcctgacctctgagaacagaggccatcgggaggaggacatggccccagagctttccacctcaaacctccattacagctccctctcctggtgcagtgattctcagctctggctgaagctgtaccctagaattacctgaggggtctcaaacatacatccctcaagtccaccacagaccatttccaatctctgcatatggggacctgcgtcatgtttttaagtgccaagatgactggaaagggcagccagggctgagaccccctgctctgactggctacagaggaaaggcaagtcctccgaaactgttccaggcctgatgcccaggtgtggcaaaggagctgtggccagagctttggggaaaatgacgtgttgctttacctgaaagatcagccatatacatgttcattgctaaaaagttggaaaatccagaaaagtacagagaaaagcccacctgggcactgggagcctttcccaaggcaggggtgaggagggaggcctggtgagacccctgcctggctgacagcacctgctttcacacaggtggggagcagagtggagccccccactacacattggaaggatcacactgcccactaggcacggaccccagccttgcaccaccacccttccaacaggccagggctttcctgacccaagctgggtcctaatgggtgggcgtgctgctgggcaggaccacagtgggcaaggcagtgacacctctttgcaggggcccagggttggtgtttggtctgtcctctcacccagctgttcccgtggtgtcctcgggaggagtcacttccagcctatgcaagctccagtgaccattgccacagctccttccacatcctgcagcccagggcgggaccaccagatgtggggacacatgcgggcccatggctgctcccctccagcgcaaggagccagggcatctccaggagtgggctccaggacctgagtcaacagttctcactccccatccctgtctgccctcagagagggacgctcctcacagagcccggactccaccacgagaggcaacattctgcacctgcctgggaaagactggagaaggcctgggggatgaagcctgggataggatgcctgagcccagagaaactggggcggagcctggacttatcttggggccactccttcacctgggtcaatattgacatggagcgggctgggccttggagataagccaggcaggaacaaagtaggccccaagccctggaaacttgatgagtgagggggtggtagatgaagggaggctggggcaggaagagggcagggctttgctagcaaggcaaactctgcccagggcccttttgactcctggcaggcccccttgaagaggggtggaggtggggatggggatggggtggtgggacccctttcctgctagggggaggagggaggggaaggctaggcatcccaccctcccattcttgcagcacccagctgcctgtgagcctgccctgggcctcagtttcccctctgtgtgcctggggtgtgacagccatgagccggaggctgtccaggccagactcaaggcagtgctgctcatcttggccccaggccaggctctaaggccagactgccatctatcctgggcctgggatcacaggttacagagtaggtggttctggacagggcagttctctccaggtgacatcttctggtttgcagagacccagacaattccgagggttggggccttggagaagttctcatgccccccactaagctgctgacactggattgtgccagctggggtatctggcccacaaccaaagtggaaaggggtcaccccctcagcttctcagagaaggaggactgagcccagtaaagggtccagatacacacacacacacacacactgggtcaggcgcaggccacagaaacatgtcagcaaacgttttattaagcaactgcagtgcgccaggcaccgttctagacacaggtggacaacagcaaggccctgcccacagtgactcacagtccagctgggacacagacactaaccaaagatcccacttagcaaagagaccagcttcttggagcaccacgatgaggaaagtggtgatgtctgaggagggagactgctgtggctaaggagggcgggaagggccctctgtggggctgccattttggctgggacctaaatgcagtaaaggagcagctacgggaatatagagagtggggcttccaggcagagaagcctgcagtgcaaaggtctgcagacaacgacctgggcgtcttcaagggacacaaggaatcatattgccagaacacagtaagccatggggagagtgatgggagaggcmgccgggaacggccattgagagtttcatcccagttttagtggaagccactggaaggtttggggaggggggtgatgtgagcgggtttatggttaaattctgaggttgaattttccctctagttagtcaaaatcatagaaaatagaatggtggttgcaaggggctgggggcaatggggagtctatgtttaatgggtgcagagttgcagagtttccgttttgtaagatgaaagagttctggaaatggtggcagtggttgcacaacaatatgagtgtccttaacaccacagaaccgtatacttaaaagtggatacaggccgggcgtggtggcttacgcctgtaatcccaacactttgggaggctgaggccggtggatcgctggaggtcaggagttcgcaaccagcctgaccaacatagtgaaaccccgtctctaccaaaaatacaaaattagccgggtgtggtggtgcatgcctgtaatcccagctactcaggggactgaggcaggagaatcacttgaacccgggaggcggaggctgcagtgagccaagatcatgccattgcactccagcctcggcaacaagagcaaaactctgtctcaaataaatacataaataaaaaggggatacaatggtaaattttaagtatattttactacaattttttaaatcttgtgaaaaaaagattttttatattttaccacaatttttttaaatcttaggaaaaaagatccctctggctactgtggtaggatggtcgtagcggccaggcagacccagagacacagagggaggctggctccggagcaggcaggaggcgtgagagggagggccaggcccaggatccaccatgaaccagctgccgacgggccagtggcttgcgggagagagaaatcagggcaactccaggtttggggcctaagcaccctctggatgttcacactgaacgtgttcctggggctcagagagggtagatctgggaggggcctgaggcgatgttaaatgtgagaccaaacgtgctgggagagatgtgacagacggaagatggagacttaggccggggcaaggttcgggggagttgggtcagggagacactggcgtttccatgctatttgcagccttcagactggaactgggaaggaaactggaaaacaaacaggagtgaaggcccaagctctgctcctgctgccatttagaggcctgaaggagacaggtggagtgagaggggaaggaacaatggtgactgaactgactgccgcttggttgacagcgggcattggtgacttaggaaagagccattgccagggaattcaagaacaaacagagcgggtgggctgaggggagatgggggaagagtcggtgggaagaagtgaggacacagagtcttcctgggcacagagacaaaaagggacagggaaacgggtatgcacaggtacagtggacacactgccactgtcacagacagggtccctgtcccaagtggggatcagacagacatgccaggatacaggcacacacatgaggtcggacaggcaatggcacacatggggacgagccaaatgcctgtgacacaggcatcccttcacacacagggaccctgcattgtgtctgttaaacacagtcacacactagctgtaggtcttgctggacacagactgcccccgagtccccaagtccccagacccctgtaacagagacctttgtggggtgaagactgaacacagggagagggtcttgggcagtgggcaggctttagcagcgtggctttgatgggatggcccacgctggctgggccttggctgggactgaggccctaagccgccaagaggaggttgtgcccctggagtttctggaaggctctgtttgcagcccctccaccccacagtgagagagagagagtggcagtggagtggcagctgaggtgagggagaggtgtcttcgctgcaagagctggactggcctctcccatgatgggtatcagggttccctgaggagggctgtgccaggcagtgagctcacatttgggtagggacagcagaaatatctagagggagccctgaccaccttcccctcctgaagtgagctgggtctcacagagcctgaccccacagcccccagccttggtcctacttcctcctaaagtttgctggagtggcctggccctcttggtccaggcggagcccaccactccgggtgagggatcaggggcccatctagtactccagagaaggaaatcccagtatcttccacaccccacctcttagcccagtccaggcctccatcccctgctctctctggccactggtacccaggcagtgagacctgggagacttaaccatagccctggggagggcgctggtcccgacggcttgctcgatatttgttgactggctgactaagtgaatgcctagcccgctgagcactgtgtggtggggtgtgtcctgcagggcaggagctaggattgagttacagtggtggggaccaggagtagggaggcagagactggccccgtgccaggcctagcactgcccacaggcagggcraaggcgcgggagcagtttccagcaggtaggcctgggcagagagttggggggcgggggtttccagggaaccagtggggcagagtgggctattcaagtcaagggcatagagcatagggtcccagggctcagggccacagagcctccgcggcagaattgggaggcggcagcagcccagcaggtgaaaacactgatggggcagggcagctgtggccggcagcccaaggggaagaaagtggcagattttgtagatgggcagggaagtccgtggcccacaaattcagtgtgcctgcccccaaccctggccccatcctcctttcccctcactctagagggcggcaccactccctgctccatggaaamtgagcaaggtaatctcgggctcccttcaaaggtacccacaaaagaaggaagggctcctgtagggagagaaagaggcactggaggagggagaaagcgaggagagaggaggcacccagggacacgaggggcagggggagagaagagggggtgtgtgaagcgggtagggagtgccccgggaaagagaggggagcctggggaagagaaggaaagacctggggaggagggtggggagggagagagggaggggtgtaggggaagacagggaaccaggaaaggaggaggtgcctggggaggaaaaatgggagaaaaagggaaggatcccaggggagaggggaaatcagaggggagaaagaagaaccagggggaggcaggggcacccagtggggacagagggaaaccctggaaaagcggaggcgtggggcatggggagagaaagggaaaccagggaaggaattgggcatccggaagagaaaggggccctgagtggaggaagtgcacccccagggaagagaaggagggcttctaggagaagggagaggaccagggataggagggttcccacttgggaaggtggtgaaagggagttccccagaggaaagagggcaggagggtttgggaggctggagggggcactgtggggggttcccctgaggaaagagggcaggagggcttgggaggctggaggtggcactgtggggagggaggaggcccccaatctttgagcacccattcctccctggagtccaggtgaaagagaatgaacacaggtgccatgcgagtgcgacctcagccctggcagctgagggcttggctctacgggctggggctggatatcagacgggctcccggacccctgggggcgatgctgcctctcccagtgacaccagccgagtcccaactttttggctgccagtttgactttccagtcccccatgtgccctggttgacactgttctgaggccatccagtagtctttctggcactctgtcaccatgttgtactcttccatgagctacagctcacagtttctgtctgcacctctggtcactgcctgcctgggcctctggtaactgtcactggtcactatttctgcctattactcagtgtccttctacggggccaccactggtggacatcctgcttgtcacccaatgtcctcacgttttctgttgcttgagatcaccttttcatggccactatgtctgcctgtcactcatgtcattgtcacaccaacaggccatcaactgtggcaacagttcttggggcaattagggtgcacggacggctcccttctctattcattttcactcagtccagtcgcagggcagcacacttcactcattcaacaactacttactgagtacctgctgggggccgggcagctgggatcccacagtaaacaacaagacaaacccctgccttcaggaatctgctgctctggtgagggagaccatagccaacaaccatcctatggtttccatagggtgtcgggaggagctgtgagctgtgacggacccagctctaaccccctagaaggacagcccactctgcccctgctcccctgccccacagcctcctccgctcccacatttctttggctacatgttgggtgttgccacagtgtactgtgaactcaccagggccaaaccaggggccctgacaaaggtgtaaggaatgtgagccactctatgacacctattgtgccacacctgattctgtaactctgtcccctcaccttgttctgcctggagccaagggtgttcctgctattgataagacacagtgggagtggagggggaggagggaaggactaacacaccagggtcaccctgagtgagagattcagaaagaagtgacttttggaccaaacctcacacacaggtttctgaaggagtggtgcagggaagcctcaggtaattgaatatgaagtgccaagacataacaaaatcgacagaagtgagggtcccttccttcccccaggtacttctcattccatgtcactgtcattcactgccctctcattctctccctctctgcacgcgcagaaccacagagcacagactcgagcaagctaaatcgctatttgcagagcctgtggctgtttgcagagcctgtgtttatacagagttcagctctgtttcaagaatttgtcagctgaagcgggargatcacttgaacccagaaggtggaggttgcagtgaagtgtgttcgaatcatgcactgcaggctagggtggcagagcaagaccctgtctcgaaaaaactggaaaaaaraattgtcaagtgtttatgcctaatctgcccaacccactcatatcagctgagcctgtcacttgctgcagaatctgagtcttcatagtctgtgtgctgacatttgtgtgtttacagagccctcctaataaaagtcatgttctatratgaagttgtacaggtagccaggtgtcggtctccagcctgagaactctggctgttgttccttgtgtcgtcccatattcctgcctggcctgcgatggacatcagcaagggcctcccaggcatgcagggaggcytccacatatggatctctgaggtgagaggcacgaccaaataggagagttggtgacatggaagagcgtggggttttccacactaggcttctcccgcccccaactcagagcgtcctcttycaccccaccccagcgggtgtcatgggtagaggcctcctgagttgttacagggaactctcctctcccagaaccggaagatggtgccggtacccgagggggcttacgggaacttttttgaggaacactgctatgtcatcctccacgtgagtcgcttggggaagtctgcctgagaggggtggcatggcccrgcactggggagactgaggcacaggcataaactctgccctgggaagcggcaagttgagagccggagaatcacatcccacaagggggcggttaccgttgaggcttcttagtccttccctcccacttcctgatctccgcggaagcccctgcctagcgtctccccatgrcccttggtacatcctccccttctccacccgcacctccgtcttccccgcaacacatatacacaaacacccggaccctaggtcccccagagcccgaaggccacgcagggggcgtccagcgacctgcactactgggtcgggaagcargcgggtgcggaagcgcagggcgctgcggaggccttccagcagcgcctacaggacgagctggggggccagaccgtgctgcaccgcgaggcgcagggccacgagtccgactgcttctgcagctacttccgcccgggaatcatgtgagtgcgggggcgaccggggcaggagggagccgtggaggcggtgccttggctggggcagtcttgggatggccatcgtccacatccctgaatggggcaagccgggaggggttgggtaacacctttattgagatacaactcatacgccatacgattcacccatttaaagtacatatacatgtcagtgatttttaacagttgtgtgcaaccatcaccacaattttagaacattttcatcaccctaaaaagaagccccatacccctttgccaccactccccatttccctccaacacccccatcccctgccctaggcaaccactcatctgctttgtctatacatttgcctcttccgggcatgtcatagaaatagaatcattcaacaaatggtcttccctgacgggatctttttgttttaacacactgttttcatggtttatccatgttgtagcatgtgttattacttctttttattaccaagtaatattgcattttatgaatatactacattttatttatccattcatcacttaatagacatttgagttgtttccactttttggctgctatgaatctgtttttatgaacatttgtatacaagtttttgtgtggacaaatgttttcatttcccttggtatatacctaggagcagacaccaatgttgttttgagtttgcttttatgttactgtgctggtaggaatatatctttcgctgtaaattgcttcacaggtgttttaaattaacactagcaatatatttggaaatataggaaattgctatttgatcatttccatttcatacagttgaacctatatatgcatatagcatatacatgaacacatgcacacaaacatatgcgcagatgcagaaacacacaccaccctcatgtatgtccacctatagatggacatgtgtgaatatccatgttcacctacacacatatatgctgttgcccactttcatgcactcaccatctagacttacagggataaacaaatacacagtgtgcccccaaatgtatgtacatgtacacatatatgcatgtgtccacatgactacgcatggaagtgcactacacatggaaatgaatgcacactcatgccctatgtgtgcacccatgtacttatacatacatgtgttcacacagactccagtgcatgtatgaagcaggcacatacgtgcacgtgctcacatctgcagtcattcatgcacatggcagtctgtgttcttatatacacagaatgtatataccctcctgctattcccacctcagctacaggaagggaggcctagcatctgacctcaagcatgtggagaccaacttgttcaacatccagcgactgctgcacatcaaagggaggaagcacgtgtctgccactgaggtgaggctgccaggggagcctcttgacctctgaactcggctcagactgggtgtactgaggtataaggaggttggaaattggctggggttgtggggaacaaggagctgtcagcattcccagatggtcttgaatgaggagaacagagaggacaccaggcttctagccccacttctgccactgctccccggaccttttgtttatgcgtctatctcagggacatattgagaacatgggcacagctacttgggaggctgaggcaggaggatcgcctgagcccaggagtgattcatgatgacaccactgtactccagcagcttgggtgacagagaaagaccctgtctctgaaacaaaaaaagaacttgggcagatggggcagatgatatggcgcctgtgaatggtccttgttagcagcacagtgagaggtggtgcataacctcgcactctctcacacacattgtcattgtcacctatatgcacacacactgtctcccactgttatccccgggtgctcctctggtccatagagtgcccttgtgcaaatcagaacagtgcccctttcttccatctgtcaggaaattacaggaaaatactggttttgttagaacaaaacattttgctgccatctggccagaatttggtgtaatgaacattcaggtgtacaacgtctacagtgtgaatggtaacccttgaggtatgcaagtgagtctgcataggcagcctgtgacacagagacaatcccacataggctctgcatgtcacccacagacccagtgaccatacatctctggtcattcagggacaccatgaagccccatgtttctcctattatcctggcataattatctaaagtactcccttttactctcaaaagtgtgtccgtttggagactatcttcatccataggtattcactgtcaccataagcacacttcttcacatgtgatgtccccatatacatacatgtgtatatgcacacacacaaaagataaacagatacaccccacctgtatacatgtgtacatgtatacatgtacagcaacagacatgcactgagtgagaagtgtcataagtcatgtacaccctgtggaatgcagcattatctacagtcacacatgcctacgtacacccagtttgcatacagcttcatgcacacgtgacacatcccagctatgctcccctctagcggatgctggtggtatgacactctgtctctctccctggctctggcaggtggagctctcctggaacagctttaataagggtgacatcttcctgctggacctaggcaagatgatgattcagtggaatgggcccaagaccagcatttctgagaaggctcgggtcagtgtctgcccaaggaactggggagtacggggcttgggcggggaatgatcctccagttgaccatcctccggccacccaaagagttgggcttggctctgctacaacccaagaaacgcctatgagttacaagctgagttcagaccctgcattgttggtgtccccctggatgccaggatgaggggacatcagcccttctccccatcagcctctgggagctgagcagtgacaggagaagtctctgctgtgagagsgcacactggtgacaccctgactcccaggtcctctcccgcaggggctggcyttgacctacagcctccgggacagggaacgtggtggtggtcgtgcacagattggtgtggtggatgatgaggccaaagccccggacctcatgcagatcatggaggctgtgctgggccgcagggtgggcagcctgcgtgccgccacgcccagcaaggatatcaaccagctgcagaaggccaatgttcgcctgtaccagtgagtacccctggggtgggcaggggtgggtgggacagtccaggactctgtgtccatcactactgcaataacacggcatctctagaaggccctccagcaaaggctgctgggtttctgggacaggtcatgtggaccgtgggtccagcctgtactcttccatggcatgtggctgccttgctgagaaacctattgtacatacagggggactgtggcgccctgccagggccagggagctgcctaaagctccacagcaaggctgcagtaaaagtgaagactacaactcggggccccagcccccatgccttctgtctctgagggactggggtggggtcctaaatggggctggagtggagacagatcagggaggggctgggctggccactcctgggttcctgtccccccagtgtctatgagaagggcaaagacctggtggtcctggagttggcgacccccccactgacccaggacctgctgcaggaggaggtgaggaaggcctggccccarctacttgcatccttccccatccacaaccccagcccagtctggaccacctactgaccagccccacccttgctcccaggacttctacatcctggaccagggtggcttcaagatctatgtgtggcagggacgcatgtctagcctccaggagagaaaggctgccttcagccgggctgtggtgagccctggggctctgtctgagaggaacagagcactgccctggggtctgagtggggaggcagctccgccccagggtctaagggaggaatcagccctcccctagagtttgagttgggaaatcctatgctggagtcttaaaggggaggtagccctgccctgggagccctgagagtaaagaccaggtggcctctgagaaaccatgtgtaaaaggggcacgtggccctgccttcaggtctggggccctactgactgggcggtcccgctttctgagggtggggctggggaggagacagggctctctctgtctggggtccgtgagggttgacatggcctgtcctgcacgaggcctagactaagggggccctgcctgccctcagggacctcagagaagtcggtggtgacagagtcaattcgctaagtgggtcatgagctcggttaattaacgcttcttggagctcggctgtcccagagcggtaggtccccaggagcggcagtggggcagtggactctcagggtcgcaggactgacgatgccttccgccccagggcttcatccaggccaagggctacccgacctacaccaacgtggaggtggtgaacgacggcgccgagtcggccgcgttcaagcagctcttccggacttggtctgagaagcggcgcaggaaccagaagctcggcgggaggggtgagcgggcggggcggggctgacgggggcggggcgggactggcgggggcggggcctggcaggaatcggcaactcgttgggatgggtgagcgggcggggyggggccggagggggcggggcctggtctgcacggggcggaacagagcctcaggatgaggaaaggggcgtgggctgcggaggacgcggcgggacctggaatcttggagggatggttgaggagtgggcggggcggagatggtgttgggggggggcagagggcgccactgacgcctactgtccccccttcagataaatcgattcatgtaaagctggacgtgggcaagctgcacacccagcctaagttagcggcccagctcaggatggtggacgacggctctgggaaggtggaggtgaggggtactgggttagctgggggaagatgggcacacggaggtaagctttgcctacaggtaaacggtatgactgctatctaaagtgacccaggtgcacatccacacacaatcagggacacaaagggacacgtgtacatttacatactctcctagcaggcagttcatacatagtcacgcctaatcatacacagccacgggcactcacacaacacagacacacagtacagtaacacttggacacttaaattctccctgtagtcacatgtaggacaaaatcaaacatatgcttatacagacacacatactaacaccttgtaattgcacataatcacagccaagtacacaaccacaaatatgaagctgcaaaaactctacatcagacatgaccacggtcacacacaaccatcaatccgcagagacacaccaacacagacacacgatcacacatcatcaattacagccccacacacccaaccccaattaacagccatacactgtcaaccactcatctggtctcagcccagtgttcgcgagacgcaggggttgagggctacttccaggctctgtagagggtgtggttgtatcttgacttgttggctgacccccctagcagagccctgaattttttaggccctagtttttaaataaagtggggtcagaaactgtggtcccatctggccccaaggctgatgtggggatcctgtggtcttgtgggaacagaactgctgggcctatgcgaggggtcctagttctcgaggtaggtggaggtcagagaaaaggcaagatttccttcttcctttgccctaatatggatggacagaagtgatgagtgggaagagactgagagaggaggagatggggcaagggggaagaagggggagacagggaaagaggaagacagggaaggagcacaaagagagacagagaagaaaagactgggaaggacaggggatgaggaggaggcagagggaagggaggaggaggtggggtggaggaagagcagggagagagggggtacagggagaagagagggagggtcagtgatagatgggatacacagagagagacagagagccagacagtgggagagggagacaggaaagcagaaggaaaggcgagggacggagggaaagagagccctgggactcaggtgccaagcacaaagtcagggacaggatccctcctggtaggcagtggacaggcaggcagagacagggcctgagccaggggtcctggctgcccggtaaktgccactgttaggtggcctgtagtcaagtcagccacttttgtgaaagacagggctctggctgctctggtctggaggtcggctccccagggacaactgtcagggtcagtgtgggaaaggacacccaggcattgtctcctgccatgcagaggtgaggtaagggaggcgtcatcatccccaatatacaggtgggaaaggcccgaagcttagaacaatgtcactgccaacacagggcctacctgggatttgaccagagtccgcctggctccaggctctgcmmcccacaggaagaagaaactacactgacagatgtgagacagtgtttccccttcagtctttgaacaggctttgtgttttctaaatgacactggataaaagggaattcattcaagagctccaaggcttccctttccgcccggcttctgttgccctggcctgagcagcgagcagctgggaggggactgaactgcccctaaccagggttgtggctggtggggttgggactagggctgggcatgtggctgggattgggcccatctcccaagtgtggtgggtttcaggggtccgtggggaaagggtcacctgcagatccttgtacaaagcccagcacaaggcccagaatgggcctggagctgagggtgggcccctggcctgcgtggatgaggaaggcctcagaggctggggagagctttccggttgggtacaggatgggtgggctggttcaggaagagcagccacctgtgcccattggtcccttattccccaggtgtggtgcatccaggacttacacaggcagcccgtggaccccaagcrtcatggacagctgtgtgcaggcaactgctaccttgtgctctacacataccagaggctgggccgtgtccagtacatcctgtacctatggcaggtgtgccagcctgagggaggcagcactcaccttaaagcccaagggctgggctctgggagtgaaatgtgagagctgggccaggccctcactcactgcccccacctgcagggccaccaggccactgcggatgagattgaggccctgaacagcaacgctgaggaactagatgtcatgtatggtggcgtcctagtacaggagcatgtgaccatgggcagcgagcccccccacttcctcgccatcttccagggccagctggtgatcttccaggtaggtctcaccttgccactctggccacagcctgcccagttctgcatgggccatggcccccgcacacacttctaagcaccttctctttgggcctggggcctgcttatcatcccctagtttcccagagcttgtccaaggcccaggagctccaaggttggccccctgcctgagtttccctccccagtcccagagccagatgaggaatttgagttgaaagggagccaggggcttgcctggggctgcacactagcaaacctggtccccactttccacctccaaggcctgagcacccatgccccaaccactcagagatggggggaaaggtccatttaaaaagggtctgtccctgtcccagactgatgggattcctgcactccacacttagagggtcctgtactcctcatgtgaaatcaccagtgagggccttgatggcttcaagcaagggtccctgagctctgaggcaatatgtcccacactgggacaggaaggcgcccctgggagcccttgcccagcctgaggccttgctctcctataggagagagctgggcaccayggaaaggggcagtcagcatccaccacaaggcttttccaagtgcaaggcactgacagccacaacaccaggaccatggaggtgccagcccgtgcctcatccctcaactccagtgacatcttcttgctggtcacagccagcgtctgctacctctggtttgggaaggtacccacagcactgaccacttgattcatgcccagatgtagtggtgccaggctgggggtgggtcctctccacagggsatgcagactttgagtccagcctcagataggccgatggggggaatggggaggggaagaagccacagggtcccctctagaacttggggaaagttacaaagtgacaggtggacctgagagtccgcaggtcagagccaggcccaggccgcctcccctccttactgcctggagcacagggcatgtcccttcccaggtctcttgggaaaaggggaggcctatgccagtttgctggagttttctctaatattcagcataaactatgactgaccctctaagcctgggggcctcctatcccatgctctggaccctgcgagrgtcccagaccctgcgatccagatcaactggggacacaggcctgtagggtgaggaagatgccttgttcactggtgtcctgctgtcagcttaggcctcctgtgacttgggcccagccccaccccatacaccctgtgaaygggacgtggggccggaggtgaaggcccctcctcatgcagggcctgagccatctctttgcctgctagggctgtaatggtgatcagcgtgagatggcacgggtggtggtcactgtcatttccaggaagaatgaggaaacggtgctggagggtcaggagcctccccacttctgggaggccctgggaggccgggccccctaccccagcaacaagaggtaacagggttgggaggagagtgttcttacccagaggaggaattgaggcccagagaggagggtgggtgactgggattcacacagagagctggcaagacgagactagaaccaaggactctcagtttcccactcacagaggctcccacaagtacagcccacgcttcgctcccaggcctgggtaacttgcgtctctcagatgctggggagagtgggggcagtggcgacctctgctggcagcatcccctccctgcattgtcctggtcctgggccaggggacaaagcacccttccccaccctacagtcctcagggatcacggtgcccagtgtgtgtgtatacagtgtcatatgatgtgtgggtatacagtgtgtgtggatgtgcaagaacaggtgtattcagggtgttgtgtgtggtgtgtaagtggacagggtgtgtgtaggaggtaggagtgaggcctcaaggggaggagggagctgagtcctggtcgctcttggtctgcctgtggggcttggtttatgtgctgcactccccacaattctcctgagctcagtactcccgtctccttctcccagcctggcttgcctccttccactttgggccggagacctactctctgccaggggtgggctgaggagctcctcccatcccagggagggcgagactccagctcaggccctcccctacccctgcagccctctcctagggaaattcatggggcaccttgcgtcacagctgggtggggcgagagctttctccatgagcagagagggaccctgtacccagagcagagcggagtgctcggggagaaaccacggggctcagaggagggcccagggctcccactcctragaagtggcttcccaggccctggggtggggcacttgtgccatgggctggggtgcccctctgggtggctcacagccttgctgtccgtgctggccaggctccctgaggaggtccccagcttscagccacgactgtttgagtgctccagccacatgggctgcctggtcctcgcagaagtggggttcttcagccaggaggacctggacaagtatgacatcatgttactggacacctggcaggaggtaaggtggccatccctgcctggtggggctgtgaacgggggtgtgtttctgtttgtgtaactgggtgtgtgtgtatctagccatctgcctctgtacacagggctgtgggtgagtctgaccctgtcactgagcaattgcattgcggtgcatatgagaccatggatgagtgtgcatcaccaggtggcagcagtgagactccgggagattaggagtgtgttggaactcaggggtaactgagaccatgtttgcagttgtgtgtggccctgtgtgccttatgatactatgtgtggctccagcgacagtgcctgcggccgagcatgtgtcggtgctgcatgagtgactgtgattggaatgcccaatcgcatcattcatgtgtgtggcttggtgtgagtgtttgccttcgtgcacctgtgtgtgacactttgtcagtgactgtgaggtcacgtgatgctagaactggccagaccagtggcaactggtgaaaatgtgtctgtgagcaagactatgactggctgtgggcgaatgatggatgggtgtgtttgtgggtctgtgtttctgcgcacagtggtataactggccgggtgtgcgtggctgtgtaaacaagtgctgttgtgtttgcatgcagctctgtgtctgacaacagtggatgacagtgtgtggctatggtttgctgtctggctgtgtggcgatggatgactgtgtgtctgtgtaagctgcaataatgtgtgttctctgcatctctgtggggccgtgtctacagcactgtttgaattggtgatgaagctgtgtgctcccatctactcagaacaaacccagagctcttaccacagccctacgtgacctggccagccccaactctttgacccaatttccccctgctcccccctcactgcttctgctgcagccacaatggcctctttgtgttccctgaacatgccgggcacacggccacctcggggcttttacaccggttgtttcttctggttaggacacttttcctccagacatacatgtgacttgctctctcatgaaagctctataagggcagggatttttgtccattttctttcattgttgactccccaaagcctagaccaatgcccggcacacagtaggtgctcaataagtatttgtggattgatctccaggtaaatcatgcaagaaaaaaaaaatgtgtggattgaacgtgtgtgtgcatgtatgcatgcattcctgtgaccttctcgtgtgttcacgggtgtgtgggtacagccgcttgctgggtgtgtctgcttggccagggatgtgtatgtggggttctgtctgggacaactggacagggagtggacaggaaggggtcagctctgggcagcccctccacctgcccaaggccaggtcccctctgtggctcagatcttcctgtggcttggggaagctgcaagtgagtggaaggaggcggtggcctggggccaggagtacctgaagactcacccagcagggaggagcccggccacacccatcgtgctggtcaagcagggccatgagcctcccaccttcattggatggttcttcacttgggacccctacaagtggactgtgagtgaggcctgaaacccccagccctaccctaatttgtggggagaggaacctgacctgggccaatggaatgaggaggcactgccctggctggggattgccagtgtgtgcgagagacctggtcttgtcctcaggcccctcmtgtgtcccattggtgcccccttctcctgccctggccctgatacttgccccgattcttgctccagagccacccrtcycacaaggaagtggtggatggcagcccggcagcagcatcaaccatctctgagataacagcagtgagtcctggggcccctagccttccccacagtggcctgggctccgacagcatggtcctgatgggcaggggaagtgccaggcccttgtaagtgggaggggctgcagttggaggtaagaggcctgtgggttcagtgcagcctccctgtgggctactgattccccatcttccccagcctgaggctcctctctggacaggaagtcaacaacttscggctatccagatggccgggcaatggcagggcaggtgccgtggccctgcaggccctcaagggctcccaggacagctcakakaatgatctggtgcgaagccccaagtcggctggcagcagaaccagcagctccgtcagcagcaccagcgccacgatcaacgggggcctgcgccgggaacaactgatgcaccaggctgttgaggacctgccagagggcgtggaccctgcccgcagggaggtgggcaccccctcactgccccagcactagtgcatctgacactgagctggaggagcccaaggcaggatccactggtggcgggcagtgkgcaactgccccgggagatgtgtcttctagctggggtggtgggcaaacagatgcgggagtcccaagccctggatgactgacactactgagtggggcaggattctgggctcagatgacaccctaccctgtacctccccctctctcccctgcccagttctatctctcagactctgacttccaagatatctttgggaaatccaagraggaattctacagcatggccacgtggaggcagcggcaggagaaaaagcagctgggcttyttytgaacccaagccctctcgactgcccctatcccctggaccccaacatacctacaatgctggggaggccctgcttccactcccctcagaggcttttggtcatcctctgcgtgtcagtaaaagcaggcagcccatacgagctgtggtatgcgtgctttcaagcccgggccactcagcaggtccacctctcaggggaaggggcctccagggctggcgggtgtgagctctcagtgccaccccacagaggggtttatttctcgttggtctctccagatacccctgccctactcaactatgtgcaaggaaggtggagagtgaggtgctagggctccagcactctaggacatggggacacacacacacacacacacacacacacacacacacacacacacacacacacacacacacgcttcacaggggatttttctggcatccaggtaaagagaccacaaggcttaatcttatcgtgatttttataaaaatccttgaccactcgctggccggagggtggagagggctgcagtgttattcctaacggaatgaaggacagctccagggactgggctagctcctggtccccagggaggcagcagcagacactatgttagggctgaaggcaatttgggggcctagctctgagcaagaggctgggagcagccacaccagccctgtccccacatgtggacagagggcccagcccactcaggggggaccccactggcttcctccagcctagtcctggagggagatcttcacaaagagggtggctgatggatgctggtccccgttcttagacatgaggtggacatggcggtatcctggtgggtggacaggcaggagggaacacagagagagttctggtcattcggcggcggagggggggtggatgcgtcaagggacagccagccccagcccaagagacgccaggccctgcttcccaccaccttggccatccccttctcttgacactcaccttgcttgaggctgttcaaggggatggtactctggccaatgaagtcattcttggaggaggcatcataatcttccaccaagaagcggatgagggcaaggtcaggcacaactacctcaaacgcaaactccgtgtcccaccatgggttgaaacctagggggacaggcaccatatcagcagcatggacaccagccctagtagcccagcccaggcccagcacctaccattgttggtgatgacagcagtctggcggctggccacgtcccggctcacgccatggatctccactgtcactttggggtccacaattgaattcttattcttgttgacttttggcagctgctgccccgaaatgacctgaggaaaggcagaggacaatggacagttcaggagtggtagcggggaagggaggtccgtgggcacctgtccctcctaggtccagcgtaccctgatgttgagccgcttccgtgcccaccagggcccctgagccagggcgcgggggttaaaggtgccgttggggtctcgcaggaaggcgggcttcagcacgtacccacaggccccgttgtcctggaagcggccctggtacacgtccatctctggcccaggtgtctggaaattcagggccactacaggcaggacagagcagtcacaggctgtgggctggccctggggccctagagcacagcctgctcagggtacactaaggcctagggtcacatggtgagttagcagggcccagcatcactccaatgcctgctgccctcctgccaccctcagtgacccaccatgctaaccacaccttccattcctggtgtgagaattcaaaggactagtgtgctaatgaggtttcagacactgtgacatgctggtgggcagatatttccagactgatattaccagctccacaagcccctgcatttgaccctgcttgggtcctcagagctccactgcatggccttcgaggctccaggcccccggcttgggactgaaaccctcctccaggcctcctccagccccagccagcccataccgatctggcagcccccattccacatctccacggggctgtagttggaggagtctgttctccatccagccgggtagattctgctcaggtgccccacgttgtggcggacaaagccgtttcctgaggggaggtgtggttcggtcagcagtggaggcctcctggtgaggcccaagccctgccctgccaattctctctgtaacagagcaggggagtggtggggagccaggcctcacctgattcttggagcagtcgaagggcacggttctcagagaaggacgccatctcgtagaaggcctgtccaggggtgccaggactggagaagcccccaaagtggacactcttgcagtaaatgaccatgtcagagagctcctgtgctagcctgagcttgtcctcctggggaacacggggaggcccgggttagattcagtggttggggtagggtaggcactgagaaagccagaaacccaggcgcagagagacagagggagacagacagagagagcggggcagagggtctgagtggcagccacagagaactgagacaaggcagacctcccacgggtgaggggatggggaaggcccgggctgccccaccccacagctccccctcaaaccttgggcttgtgctgcacacggctcctcactgcctcatcctccatctcagcagcctcgtcttcgtctgacaccacagtggcctcagggccaccctcccctccagggggcaggagccccccgagcttcttccccttcagcaggatcttccccttcagttgctaggtggggaggggcaactggtcaagacacacctagcgccccggctaggctccccaccctcccccagggatcccccatccccaccacacacctcaggggagggcaggctgttggtgaccccatccagtggtcggttcaacagcatggggcccaggatggcatgcaggtgccgcgccatcacgcgctgctgctccagtgtgcagtggttctccagggataggatgacagggtagggggacgcctggaggcccaagggcacattaggagtggtgggccacccctagcatcccactcctcacctgccaggggcactcccaccttgaaggcatagtcccggatggccctgagcacatcgcagaagaggatcttggaagtgaaagtatagccgtggtagatgattggttcctggttgggcccgtcccagcagtcaagctccaggcatcggcagcctttgcacagtgccctgcggggagggtggtggctaggaccctccaggtcctgtcccgggtcccacccagactcccgacccaaggctccctgagcagcaccggatgtaggcttcagtgctgctgggcccggctagctggtcctccagcaggtaggtgttgtgtgaagaggacaccaggtagtggctaagtggctggcccatgtcctggtagacacggcggtgtgccaggctgaaggcgctgccgtcagccgacagtaagtacatgaggaagccgtccttggtcatctgccgctgcgccttggctgggagggaggaggccactgcccgtcagagccagcctccagcaggcgctcctggctgcccacccatctggacagaggagccctctgaacccgcttgcctgcctgtcctgagccagtcttccagagctcttggaattaggataagtctgaggctctcgaccagactgtggctactccagagtggggccctgtctcctcctcctcccctgtctgcacactctaagacccctgaggacagggtgtcatctccccgttctctgtacctccagactggagccccctccagggcagggacccatcttctctgctctatcacatctcaaagctgggccaagaatgagtaaaaaaaaaagaagcaggagtagcatctgcttttcagccatctctcttgtttcttgaagaaggggtcctcaaagccccctgaaggaggtgccaagagggaaacaggaccagagaagggtagggatgccagagccctgtctctcatctgccggctttcataggaccagaaagtgtggagcagggccccggggctggctgaggcagccccttccctccggttcccttctttctggctgcagtctccccaggggtctcccagcccagtgcggccctgcgactgcaggtagcaggccctggtcaggctctcaccagtctcgctgggctcgtagcgctcaatgagggagagggccagcgcaggccctgccgcctcctcccgctgctggtgctgcaggaacgtcactaactgatccaccgacagagtctcccctgagcccgcggcctcggcgaaggtgcggtcgatctccacccgctgggtcagcatcttgtagaaggcctcaatctcctcgtcctccagggagtctgtctgggagtggtcacactcctgcagagccaggacagccgagtgggctcagagcaggccttgggccggggtcaagggccccatggacaggcagccccagcccccacttcctgcctcaccctgaagatcttccgggcatagctgtcgtccacctggatgttgagctccttcaggaagttctgcagctccttgaagctcatcttgttgtccttgtttttgtcagcttttcgcaagcaggagtgaatccagctgggcaagaagtaaggaaagaacccaggaaccctggaacctaccaaggtcccagccagagccatggatggctccagctgaagccacctatagccacagctccctgcaggcctgacttactacacatccatgtttcagtggcctcttcagaggaaaatgttaaggggtctttttctatttgctggttttcaaacctttcaaaatttttaaaacatttcttttcttactacaaaagggcccactgtagacaatttagaaaatgcagaaaagtaaacaatcaaacaaatctcccgtagtctatcacctagggataaatactatcaacattccaaagtatatccttctggttttccttttcttttttttttttttttgacaagatctcactctgtcgcccagattagagtgcagtggcacaatcacagctcattgcagcctagacctctcaggctcaagtgatcctcccactacaggtgtgcaccgcaccaccacgcctggcttttttttttttttttgggtagagacagggtctccctatgttgcccaggctagtctcaaactcctaggcccaagcaatcctcctgctttgacctcccaaagtgctgggattacagatatgagccatctggactggttttcaacatataatatataataataaatatccaacactaaagaaatggatattccacctgctgaatagccttcagcacacgaatctcgtgcttggctggaccattctaaacttgacttttttcacctggctttctgtcataattattcttttccacatctatacccatatatatacaatttggaaaacatatatatgttagaatgaagtttttttttttttttttggagacggagtcttgctctgttgcccaggctagagtacactggcgcgatctcggctcactgcaacctctgccctctggattcaagcaattctcctgccctagcctcctgaggagctgggattacaggcgtatgctaccatgcccagctaatttttgtatttttagttgagacggggtttcagcatgttggctatgctggtcttgaactcctcacctcaagtgatccacccgccttggcctcccaaagtgcggggattacacgtgtgagccacggcacccggcctataatgaagttttaaagatctacctacctcctccagaagcttctgatatttgcattttcctcctaatatttttttctgcaatttatttatttatttggttttttgagacagggtctcgctctgttgcccaggcttgagtgcagtggcatgattatggcccactgcagcctcaaacaatcttcccacctcagtctgctaagtagctggaactacaggtgcatgtcactatgcctggctaatttttgtattttttggagagatggggttttgccacgttgcccagactagtctcgaactcctaagctcaagcgatccacctgcctcagcctcccaaagtgctaggactagaggtgtgagc

SEQ ID NO: 98250 - DNA, 96924 bp, Homo sapiens
  misc_feature (1)...(96924): n = A,T,C or G
cagataataagtaaaatgaaaaaagtgggttaaagcagttcaggaatgggatagggttaattttttttttttttttttttttgagatggagtctcgctctgttgcccaggctggagtgcagtggtgtgatctcagctcactgcagtctctgccccccaggttcgagtgattctcctgcctcagcctcctgagtagctgggattgcaggtgtgtggcaccacgcccagctaatttttgtattttgaatagagacgggttttaccatgttggctggggtgctcttgaactcttgaccctaagcgatccacctcacctgacagaattaaattttaaaagggttgatcaggctggattttatgggaaaggtgacagtcaagcaaagccttgacagaagtgagggactgagacatttagagatatctgggcagaagattccaggcacaggaaatacaccctgaagcaggagggtgttggtatgttggaggatgagcaaggaggacaaggccaatgtggctggagctaagagagcaagagaacggggaagtggggcgggctgatcatgggaggagaaagagaggtaaccgggaccaagtcctgttgggccttgtaataattcaccttttatgactgggcacggtggctcacgcctgtaatcccaacactttgggaggctgaggccggtggatcacctgaggtcaggagttcaagaccaggctggccaacatggcgaaaccctgtctctactaaaaatacacacacacacacacacacacacacacacacacacacacacaaaattagctgggagtggtggtgggtgcctgtaatcccagctacttgggaggctgaggcaggagaattacttgaacccaggaggaggaggttgcagtgagctgagattgctccattgcactccagcctgggcgatggagcaagactctgtctcaaacaacaacaacaacaacaaaaaagaatacaacttggctgggtgcagtggctcacacctgtaattccagcactttgggaggttgaggtgggtggattgcctgaggttggaagttcaagaccagcctgactaacatggtgaaaccccgtctctactaaaaatacaaaattagccggccgtggtggcacatgcctgtaatcccagctacgtgggaggctgaggcaggggaatcgcttgaacccaggagacggaggttgcggtgagccgagattgcgccattgtactccagcctgggcaacaaaagcaaaactctgtctcaaaaaaaaaaaaaaattcaacttttactctgggcgaaattgggagcacttgcaaggcttcaagccagggaggggcatgatctgactaatgtaaaagaatcctctgagtgctggaagtcaccacggagggacaagggctgaagcaagagcccagtgaggagactcttgtaatacccaattccggtgggagtggatggtggttcagaccttggaggtaggagttgagtgtggaaattgataggattccagatatattttgaaggcagagtcaacaggaattacaggtgggggctgtgagagaaagagaggagtcaaggatgactccaaattttgggcctggacaactaaagaatggagctcccattaactgaaatggggaaggctgaggaggagcaggcactctatttcggacatattaagtttgaggtgccatccagatgtcaagaacatgatggatgtacaagtctggagtttgggagggagatgtgagctagggataaaaactgggatatggttcaaaacatgtttaaaatgtccatgaactctcacattttgcaaatgggattatattctggtataatctttttggagggcattttggcagtatctcagctattaaaatgtgcacacctttggccaagcacttctatgatattatcccacagaaacattgtacggctatgcaaagtatgcacaaacatgaacaaggttgctcattacagcattatttataggagcaaaaaagaaaaaagtagttctccatgagttgccataggacataataagtgaaaaatacaaatggcaggacaatatccatgtataacattatttcacttgtgttattaatttttttttttttttgagacagagtcaaactctgtcacctaggctgtagtgcagtggcgctatctcagctcactacaacctctgcctcccgggttcaagcaattcttgtgtctcagcttcccaagtagctgggattataggcatgtgacaccatgcgtggctaatttttgtatttttagtagtgacagtgttcatcatgttggccaggctggtcttggactcctggcctcaagcaatccacctgctcatccttctaaagtgctgggattacaggcataagccaccatgcacggcctgtttttaaataattttttaaatgtcttgacagataacagtgttcgtgcaggcagaaaaaacagctgaaagtaagcagaaatattctaataatttgggggaaaggactgagaagaagacacttcctttttattatttatgtactatttgaatttgtttttatacacaggtgtccaaacttttggcttccctggaccacactagaagaagaattgtcttgggccacacatcaaatacgctaacactaacagcgataagcttaaaaaaaaaaaggtccatgcataatgttcattatatacatcaccacagataagcaaaaatttctttgcaatcaaaaagttggacatctgactgggcgcagtggctcacgcctgtaatcccaacactttgggaggctgaggcgggcagatcatgaggtcaggagttcaagaccagcctggccaacatggtgaaaccctgtctctactaaaaatacaaaaattagccgggcgtggtggcacatggctgtaatcccagctactcaggaggctgaggcaggagaatcgcttgaacctgagagggggaggttgcggtgagccaagattgcaatactgcactccagcctgggggacagggcaagactccaactcaaaaaaaaaaaaaaaaagttggacatccatgaaactatgaaatgtatttaaaagttaaaaaaaaaaaaaaaaggccaaacgccaggtgcagtggctcatgcctgtaatcccaacattttaggaggtgaaggcaggaggattgcttgaatccaggtgtttgagaccagcctcggcaacttaggaagaccttgtctctacaaataattttaaatattagctgggcatggtggtgcacgactgtggtcgcagctactcgggaggctgaggcagggggattgcctgagcccaggaggttgaggctgcaatgagctgtgatcatactcctgcaccccagcctgggtgatagagtgagagcctgtttcaaaaagaaaaaagcagtgaaaaaaaaaatttaaaggccaaaaatttgtgtgggaacccagagatatacaaacaaacaagaatgtagtcaatagaacgggttataaaatgaagacagcaactcacaaggaattccctttgtgccgatgaagtccccaggggaggggagctgaagagtggttccaaaagtgacctgagccctgttaccagtgcagggtcgcagccattcatttctccagttagccagggagcaaacagaaattgaatgctgggcatggtagaatcagggatgaatccagtttatcaagcagagagatactggtagaacagggacccgagggtggagataggtgatgcacagaagaaatagggaggcagggaagagagtgtgtcagtcggagggaatgggcagcagcaccagaggctgctgagatgaggactgaggggggactgttgccactggagagacaggagggttgctggtaaccttagcctggagccagaggggggaggggtcatgcaaagggagacctctcccaggctagtcagactctgtgactgtctctgaggctgtctagaggcagggtggagaagccaaaagtaatggcaagagtccattgtcctgtccttccctataacagggaagggggccagagagcctccacaagcggaactgctcctaaatgacaagaccacccaactggggctccatttgccacattagagcaatggaggcccccagactgttgcacccctcttcctacccacagctccttcctgcaccactgggggccttgcatgcttgtggaaaattggagaaatgcctgtttgccaaagctccctccacttccctcctcctccccccaccatagctacccttttaagtcagccctgggaggataaacttaaagaagaggcctgcataggccctggaatgaactcaggacatgtgggcacatacttttggggtcccatgtgcctggaggcgaggcacggggcacatcatcttggccctgtgatctcttactctgtgggaaagagtgcgggggacagccagagatgggcctctcaagcacacagtccagggcaggcggccctggcttctcagctctcaggacagaaaaggtcctggaaaggacaaaagagagagccaggcccaaccaagagaagtagaagtggaagtagcccaggtgtgtgggcaagcatgctagcactcatctctggaagtgggtttcaggatgtaaggcaagcaaactcagtgtggagtagaaagtggttggttgtatcacctgtgagcaaaagccatggtgtgcaaatgacaacagtcaatgtgatgttatgctgctgccctggacaaatgcagtcctcttttccatctcagtgatgctgtcatcacccccctgattgcacacacaggatacctgggagtcattcttggtgcctgtttcttacctcccattatccaccagcaagtcttatcaattctactttttggatctatctccaatccagttccctctctctcatccaatctcccttcatctctttcctaacttctgtgctagtttcctaactgaacttcctgatgcctcttgcctctcctgtctattctcatagcaatcagaatgatcttagtaaaacagagctgaccatgacatgccccagcttaagacccttgatgaacctcctactgccctcaaaataaagtccaaattccctattgtggcctaccaacccacttatgatctggccctaacctatcagtgtcattcctccaccctcacactctttaagttccactcctcctgaatttcattccgtccttcccacatttttaaatattttgtaaagatggggtctccctatgttgcccaggctggtctcaaactcctggcttcaagtgatcctcgtgcctcagcctcccaaagtgttgggattacaggtgtgagccaccacacacacgctcttatttaggtacttttttgttttttgtcattctactaactgtagtattgcattgtggttttaatttccacttctttgatgactaatgatgttcagtctactccttctttgaaatctctgcttggttttcatttgttccaagaagtaatcgctccttctacagactaagttcctgtcctcctttgtagttccatgacaaccaatatttatctccaccttggccttaacccactaaagtacagttgttttacttttacctccacacccaccgccatcatcacaaacacacacatacacgactgtgcacttcctgaaggcagaagcagcatcatacttctttggtatcttcagcaatcagcacagacctgaaacacaatctttacacaataaatatgatgagtgaatgaacagttgcttaacaaattaaagaatggatgaaggtaggtagttaggtacaaggttttgcagataggcctggctgtgtcaattaaacctttcttcatgggtcctcacacttagtaagctcacttttaaaaggacaatgctgaagacacaaatgtttacaatgaccacagcgatgacgggatccgagagaaaggcaaggcggaaggggtgaggccggaagccgaagtgccgcagggagttagcggcgtctcggttgccatggagaccaggagctccaaaacgcggaggtctttagcgtcccggaccaacgagtgccaggggacaatgtgggcgccaacttcgccaccagccgggtccagcagccccagccagcccacctggaagtcctccttgtattcctccctcgcctactctgaggccttccactacagcttcgcagcccggccccgccgcytcacgcagcttgcgctggcgcakcgtcccgagcctcagckgcttcgtctgcgcccctcctcgctgcgcacccaagatatctcgcacttgctcaccggcgtcttccgcaacttgtactcwgccgaggtcatcggcgacgaagtgagcgcaagcttgatcaaggcccgcggcagcgagaatgagcgccacgaggagttcgtggaccagctgcagcaggtaacgtggcggtggcgtcgcgtctgcggacggtgccggggtctcagcgctcggcacgcgtcagcacctgccaggtgccaggcgctgttccaggatctggggctgcagttgagaaacagcccatcatgccgaagtgggcccgacattctagtggaaggacgctctatccatacacacacatgcgcaaataccacacataccacacaacgtgcggcatatatctgtagcacctgtctatatttctctagacacatacgttatatattgcatatatcaatgaacgactgcggcagaccgctgaatagttgtttcatggagaggataaagccaaaagtcacccggctttggggtgcctttgtatcacaaaccacaatcttgactgggccattcatgcgcagattttaggaagcgtgtctagcctctagaacagcaactctgcttcctcatctgtacaaggagaaaaccagctgactcggggcctctgtgctgagtcggcctctgctggccacactactgaagactcccttaaacttgtgggcactcctcccatacccgatcctttaccccggtgtgcttcctgcctctcagatcttcttcttctcctttctgttctgtcctctacctgccccttaagtgacatgcatcccacgtcgttagcttcagtcattccttcacttaacacatttgttgaatgtctgctgggtgtcatactctgttctaggcagtggggattcagcagtgaataaaaacgccagtgttcgggcacacccacactcacacacgcaacctgtcctctgtagctttcaacctaactgaggtagatagacattaacaaaatgaatacctatacagtatgtgagatacttacaggaccagtctcgccgcctccacgggttataggcttcttaaagtgcagccagagcccctggctgggaccctgtactctgtgattcgtgggtcaccacattcactctgctaagacttcagcctacccagccagaccttgcccttgaacttcagactcacatccctgtcattcacatgagccagaatatatggagcattataaacctataaaccccatgaccagtcacccagttcactggattctatcttctcagtatctgtcccataagtagccactataccagagtctgaattggcaaatagtgatccctttttttgaagaaaaaaagtaatacatattacaaatttttttttttgacagagtctggctctgttgcccaggctggagtgcagtgatgtgatcacagctcactgcagccttaacatcaggggctcaactgatcctccctcctcagcatctggagtagctaggaccacaggtgtgcaccagtatgcccagcttatttatttatttatttatttatttgagatggagtctcactctgtcacccaggctggagtgcatggcgcaatctcrgctcactgcaagctccacctcccacattcatgccattctcctgcctcagccttctgagtagctggcgcctgccaccacacctggctaatttttttgtatttttagtagagacagggtttcactgtgttagccaggatggtctcgatctcctgacctcgtgatctgcccaccttggcctcccaaagtgttgggattacaggcatgagccaccacatctggcctaaatttttattttttaaaaattgtgagatggggtcccactatgttgcccaggctggtctcaaatttctggcctcaattgatccttccacctcagcctctccagatgccggtattacaggtgtgagcactgtgcctggcccacattataaaaatcttaatttagaagctgaaatttaatttaaacatttgaagttttaaaattgcagaaatttcagaatgcagaaaagtttaaagagtgatcccctatagaaatacaactatgcggccgggcgtggtggctcacctaataatcccagcactttgggaggccgaggcgggcagatcacgaggtcagaagtttgagtccagtctgaccaacatagtgaaaccctgtctgtactaaaaataccaaaaattagccgggcgtggtggtgtgtgactgtaatcccaggtactcgggaggctgagacaggagaattgcatgaacccaggaggcggaggttgcaatgagccaagactgcaccactgcactccagcctgggcgacagaacgagatccgtttcaaaaaaaaaaaaaaaaaaagaaatacaactatgcaaagataagttgactttataaattatggtatattcacactatggaatactacaaagttgttaaaaagaatgaattatacctgcattgtagacaaacacagctgccattaattaatttatttatttttttgaggcagagtctcgctctgttgcccagtctggagtgcagtgccacgatcttggctcactacaacttccgtctcctgggttcaagcgattctcctgcctcagcctcctgagtagctgggattacagacatgcaccaccatgcctggctaatttttgtatttttagtagagatggggtttcaccatgttggccaggctggtctccaactcctgacctcaagtgatctgcccgcctcagcatcccaaagtgctaggattacaagcgtgtgccactgcgcctggcccgccatttattaatttagcaaaaaagccatagaacaatgttaggataatttaattttttataatatatatgcatgggaaaaaagctgaaaactttcacaacaaaatgttaacaatattcttatgggacatttaactttttctttgcacatttctatattgtctgaattttgcaatgtacacgaattaattttgtaattacaaaaaaagaaactttgaaaagagcaggcatctgttattccacttctgtaatgttgctggcttttttttttttttttttttttgagacagagtcttgcactgttgcctgggctagagtgcagtggcacgatctcagctcactgcaacccctgcctcccgggttcatgtgattctcctgcctcagcctcccaagtagctgggattacaggcacacaccaccacaccaggctaattttttgtatttttagtaaagacaggktttcactatgttggccagactggtcttgaactcctgacctcgtgatccacccgcctyggcctcccaaagtgctgggattacagacgtgagacactgcgcccagcaatgttgctgttcttatacctatattcctctccctctttcctttttcgtcatctgttctttgcttttcctcactcgtctctagatgtcactgccatgtgaccatctgtacaggactcagattcattctccctgggaggagcaataatcactattccgtatgagtgtctgcattgcctgagtttttccctcagataaccccgttggcagctgatcttccccaagcccacctatagaaatatctcatggtctaatgattgagagcaaatgctctggaaccatacaccctgggttcaagtcctggctcctacacataccatctataggaccttgggtgatatttacttctataagcctcagtttccttatctgtaaaatgcagataataataatattcaccccataggttggttgttttgaggattaaatgagtcaatacagtaaagcatttacaatattgagcatttacaacatggtaagccctcagtaagtgatagttggtcttgttatttggactagatgctaattcctacatccagaaattagggtcagagattgtcagcagacccaaatagtaagacacataacacagaacatagtactttatatttgaggaactgtcccaggccactgtctcctgaaaaacatttcctgactccaagaagatttagttacttcttcttagccttccatatatcctcattcatatgctattatagcgcttttaagagttgatttcacctatttgtatccttgccaggcccctcctgctaaactgtaaactctttaagagcagaaaccatatctgattcatttccccaaatgtaaatggtaattacacaataaatcttttttttttaagatggggttttgctcctgttgcccaggctgcagtgcaatggcacaatctcaactcactgtaatctctgcctcctgggttcaagtgattctcccgcctcagcctaccgaatagctgggattacaagtgcctgccaccacgcctgggtacacaataaatctttattaaaagaatgactmaataaatctttgcgatcccaccaactttaggaatacaataaggaacactgtcttcctacataaactrtttttttttttctttaaaagaaatggggttagctgggcatggtggcttgtgcctgtaatcccagcactttaggaggctgagatgagaggattacttgagtccaggagtttgagaccccatctctacaaaaaaatttaaaaattagctggatatggtggtgtatgcctgtaatcccagctacttggaggctgaggcaggaggatcccttgaccccaggaatagcaggcaggagtgagctntgattgcgccactgtactccaggctaagccacaaagcaagactccagttctaaaaaataaataaataagaaaggaaaataagactgggcgcagtggctcataactgcaatcccagcgctttggraggctgaggtgagtagatcatctgaggtcaggagttcaagaccagcctggccaacatggtgaaaccccatctctactaaaaaatatacaaaaaattagctgggcatcatggcgggcacctgtaatcccagctgcttcagaggctgaggcaggagaatcacttgaacccaggaggcagaggtttcagtgagccaaggccatgccattgcactccagcctgggcaacaagagcaaaactctgtctcaaaaaagaaaaaaaaagaaagaaaggaaaagaaagaaacagggtctcactgtgttgcccaggctgatcttgcactcctaggctcaagcgattctcttgcctgccaagtagctgggactacaggtgcacaccaccatgcctggctaatgcaaactatctttcatattacctgtaccagtgagctctctgcttcttgcctcgagaagtctgaaccagaaaatatggatcagaagtttggctggttgaatagtcaatcagtaattagtcttgaggagtatgttgggcatccaagtggactctctgggcgcaagtactgtgacagagtttgggctacaggtgtttgttagctatcaacacctgtgaggggaggggaatgaaagaaggagtgagccacggaagaagctgaactrtgatgggggcccaacaagccttgacaaatgcagcatgttgctctgaagagagtattgcctgtcaaagtttctctctttgggtcaaaatggccaggtctttatacccctgcctctctcagtcacaggatgtgggtgctgcagaaaggacatggtctcaggtgactccttttcagcagcttaggtagactgtgaaggggctgtctgctgacgacgttccctgtagctagggagcaagtccttccttgaacgtggatctgggtggcaccacaggaagtgtgctaacttgtatttggtatttcactgtttggatggcagctctctttattgtgaagccaggagacaggtaaccaagctcaagtctgttactggccttactatggaaacctttaaaccattcccctctatgggtctcagttttcagatctagtagttcagaccagatggttggaatagttytctgactattctatgcttcactggaagccctgatcytggggtagggctgagtaaagctaagtaatggtaagtaatctcaccatatttctgtgcatttgatcatcyccctgccagattcgggagctctataagcagcggctggatgagtttgaaatgttggagagacatatcactcaggcccaagcacgggctattgcggaaaaygagcgggtcatgagccaggctggagtacaggacctcgagagccttgtcaggttgcctccaggtgtgtataaagaactcccacatgcctgcccaattcccgggctgttgatatttcactgtgtttgctccattgcccactctctaggctttttctggatatttggagagcaagtcgcagacatgataatatgaatattaccacaaaagaatatttcattaccacaaaacacttctgtatgtgtatcttcaaaacaaggacgctctcctacataaccagcatataacccccacaacctggaaatcagtttctgtgcaacactaacctctgacccacagatacttgtcaacctaaatagcagagagagactctctaaaagaaaatgatggacactgcaatgggaatacaygtgccattgtaaactgtgtgcatattcagggaggtaaaggaagacaaaggtttttaaaggaaaagtgaggaggattacacaatggttttgaagtaattatccttggctgaaaaatcattaacaagagtagtaccagtctgagattaaacaggcggttgctgggcagatttgtgtgtgtgtgtagggttgcaatgacctttgtgtgaggttgtgattttgtggcgtgatatggtttgtctgcatccccacccaaatctcaccttgaattgtagctcccgtaatccccacgtgtcatgggagggacctggtggaaggtattgaatcatgggggcaggtttttcccttgctattctcatgatagtgagtaagtctgatgagatctgatggttttataaagggcaattctcctgcacacactctcttgccttcgctcatgtaagacatgcctttgctcctccttcaccttstaccatgattgtgaggcctccccagccatgtggaactgtgagtccattaaacctctttttctttataaattacacagtctcgggtatttattcatagcagtatgaaaatggactaatacaaggcatcttttgtgataattcttgttatcaggcacttatgcatggccttccccagcaccatttgtcagggttttttaacacaagtgactccattttgattcagacaacttttacatcccattcaaattttactgactgtcctactgtggctttttcccccyctcaggcccaggatcctgtccaggaagtcatgtcacatgcaattgtcatgtctctttttgagatgccttcatttggaacaattccttgatcttttcttgtctttcatcttcctgacagttcttgaccagacttatattctgtaggatggggatggttctgtctgatgcttccccatgaccagacttaggcaarcattctgggcaacaggaccacataaagttattccttgttcatctcactgcagcacagcaggagggtcacgtgrtgttaacctccatcccctgagtaggttggtgtctgccaggattttctgcattaaattctccaaatcaaattataattgattagcattttatagagaggtattctcagattacaccaatatcttgttcctcatcaamgctccatcgccataccaccagcattcactgaaaattcttttcttaatgcagaagtttaaagagtgatcctttagaaatacaactatgcaaagataagttgactttattaattatggtatatccacactatggaatactgcaaagttgtttaaaagaatgaattatacctgtgttgtagatatagatggctgtctgctatttattaatttagcaaaaaagtcacagaacaatgttaggataatcccatttttatagtatagatgcatgaaaaaaagctgaaaatttgtatatcagaatgttaataatgttcttagggggcaattaactacctataatcaaaattgggttgtttttcctatggacttgtccatagtctggattttactgawmtcagcatcatggtgtcatttaacctgttcttccttgtatttcctataaatctgtaattagttctagagactttatgaggtttaggttcaatgatggtcaggtggtggggaaagagcacttcataggtgatgctgtgtgtttccctcaggaggtacatgatatgtggttgctatctctcctttcatgatgctggcagcctttttwttttwttwwtttattaggggttacaaattataatgaaatgctaatggtaataataattctatctttatttatttgtcagctgaactacttctataaagacaaacttttcagaaactactttgattaccccaaagtatgggcagcattaattctttccctttatttgccagtgtttaaaatagtgagttggttcccctaacatctgccaaaggtgactaatgaggtttgtttggttgttttagtatcattgtgcacgcttggatttcatgactgcaaattatttattatccttttggtgctcaaattgttccatctttggcagagagccttttccagttgactgctgattcatttgacaatcagctgtctttgataacttccttgctttctgagctggtgagatgttccaggccatcttgggtatttctggccccagatctggaatcagccatttcttcaagaaacgctgattccttttattccctccaccactccccacaaagaccttgacctgttctcctgaattcttgaaaatcttgaaaattcttgaaaattatcattttccagtgcagtagacagaaaagacagtatatttaggagacctgttatatctatggcctagagggaaagatctaagggaggaagaagtggaagatacagtgccttaaaaggcatttaaacttatgaggacctactagggcccagatgctaatatgctttgcataggttatcccactaaatcctcccgacaaccctgtaaggtaggttttctttctatcttacaggtgtaggaactaaacttagatgatcaaacgacttccctgaagccccacagcttggaagggggtgggacttagatttgaacttgggtgtgtctgctgtcaaaacccatggctttcttctatcgggaggaggaaggattgttgatgagccatggtgtctcaggagtgttgatgacttctcttagagtgtggctctgagcagcagaagccctatccttcatcaggcctgccagacctctgagactcaagtcccattaaacagtaacactcaggcacaggttctgtatctcttcctgtttccccctccaccacagcacagtgtagctgcaaggacccctccctcaatggtggcccagataatgtggattttgcagaaattattggtagcaaatgtccagagtctttactggttgcctgatgttccctgaatcctgggagtcagctactgtcccttttttgttgttgttggctagagattaggggagattaaataattaactatttgggtttttttttttaatgaaagtgaaataaaacattgagaaccaggagacaaatgtcagtttggagaatttttcaatgactttcattttatttttacccaagaatgatattaagttctaatcagccattatctgtcctggtttctcaggtctctgctggtgatgtgtctttcttttaagaagtgaagaagtagacacactratccagttccatggatacccctctggtgtgtctgcttctcagagaagggtgaggtaacttttttttataactcagataactggcaatgaggacattcccctaaaagtttcttatttgaggcatagaggcaacctttctgtgtttgctaataaaaatgtgacaaagtggcaagcacatgtaaattctccaaagtgagggagaaagatcagaatgctgcagaacatcttgtgctttcattcttgtcccttgctggaaacttgtccacattatccaagacctcgcagagccatgcccaggagccacagtgttagtataggaagcccacccttcccaggggagaagagatggtcacaaggccagagcaggcttttccaaggctcggggtacatgcccaggcctgacagctcctgcagacacagcacctagccacccataacctggggcaggactgtggaaagaattgtatcagaagagagaggatacatctcttgtcacatggcctttatcctttgtatagaagtcttatcttttgatattttaaataggccatcaccaaagtccttgggaactgggctagtttgtgtcaacttggcattgctgttaccgcctgctaaagtctctgttgccaaggagagaccagggagtacatttcccagaaggcacctcccacttgtgcttccaggataggtcagctgatgagaagcccttggtgagttttggaaaggaaggccatttatttcaaaaagcagtagtaggcagatgattgagtggctgtgagtttgaaaacaacttccagataacttttttttttttcaagacagggtctcgcttcatcacccaggctggagtgcagtggtgcaatcttagstcactgcaacccctgactcctgggctcaagtratcctcccacctcagcctccctagtagctgggaccacaggcacataccaccacacccggctagttttttgtatttttagtagagacagggtcttgccatgttgcccaggctgagtttccagataacgtcttaagaaagccctgcttcagtgctactggctgaagttgttaatgatgatgtcttagttcatttgtgttgctgtaaaggaatacctgaggctgggtaatttataaagaaaagagattgatttggctcatgattctgcaggctggaatactgggcatctggtgaaagcctcagtctgcttccactcatgggggaaggcaaaggggagccacgcagatatcacatggcgagaaagcaagtgagagtgggggttttgggggggccaggtgagctaatatagtgaggactcactccctgcctggccccacctagggcattcatctacacatgaggggtccactcccatgacccaacacttcccattgggccccacctccaactttaggaaaaaatttcagtataagatttgagggaacaaactcctaaactatagcagatggcttccctgacattatttccctcagtcttcaatcctttgtattaaaacctttaatatttgatatacatagattagtttctgttttcctgatggaactctcaatgaacatatgtgatgggggaatgcatgtcttcactgataggttggttataggagacctccaaaaggaaagaccattcaaaggcaccatgtctctctctctcttttttttttttgctggagggcattggccccatactggctcactgcaacctccacctcccaagggatcctcccacctcagcctccagagtagctggaaccacagacgggcaccaccacacccactaatttttgtattttttgtagagatggggtttcactgtgttgcccaggctggtcttgaactcctgggctcaagcaatccgcccacctcagcctcccacagtgctgggattacaggcgtgagctacctcacctggctggcamcatgtcttaagataatgttggctaatggagcaaacaacaaagtttgaaaacttccaacaagtcttctgttcgggcgctggtgacagcrgggactgatcgctcagcggcagtggcgcagaggcctcctccctggtccaccgcggtccccacccaaccccacctgtccctgctgcctgctgccgtagcaggagctggaggctgctgctgccagagggcaatgagttccagtggtgcttctcccaagtcaatggggccatcgaggaggacatggctgaagatctgccacaggggagaggccagaagaggctttgacgaccatcagtgagtgaccagggggctacacagcctcactctgcagcagatatcatttccactgttgagtttaattactctggagatcctgtggcaggagacaaggacggtggagtcgtttttcagcagagctagagaataaaagccgccctcattctaggggagaatataatgtttacagtacctttaaaggtcatgaaccagggtttggctattagaaaagtctagaaattgagcaaaaaataaaattaggtggttacaacagaacactgctcattttctactctctacaaatgataaaactataaaattatggaaaagaagcggatgagataaaagagcagaaagttataacttgaatgatgaagatggatgacttcaagattcatttagaattacagcactatcaatgacctgaggattaatttatgacacttagaaatcacacatagacattttgacgtggtagacatcaaacctgctaacctggagcagctgacagaagtcattgtggcagccaagttccactcataccagtgcaatgtgcttgtctacagtagtagcaaaggaaccattgactaagcagcatgggctcctcgaccctgtgcaacagacactccaagttttttgaagagcctcaagatcccagcagtaggtccttcttctcagaaataatttcatccatacccaatgtaaaatgtagccatagtgggcagtacctgatgaccagagactmcctgtyggtgaaggtgtgggacctcaacatagagagcaggctgggaccacaccgggaccacgagtacctgcacagcaagctctgctttctctatgagaatgactgcatctttgatagctttgaatgttgctggaatggttcggataggtgcatagttgaaccacaaataagcaagggaaatctcccaacagccagaaacgaagagggagctgaaaccagaaccgtagcctctaaagacgtttattgcgagagaagccccacacccctggctggccttgggtgcatcagccaatagcaggaaccgctgcctcctgtgaacagcaagttgtggcgcagagctgaagccttggaccatgaggtgtggagttggaactgcgccctcaaagatgatgaggtctccgtccactggagtccagagggaagtttatctgagatcttgcattggggtggccaaagctcccctgagatgtgtaagcatagcttcccattacaagggtttgaagtccctctccctccccctccgcctcctcctccccctctccctctcactggtctccctctgatgccaccaaagttgtgaaagccgaggctggactgtactgccgccatctcggctcactgcaacctccctgcctgattctcctgcctcagcctgccgagtgcctgagmttgcaggggcgcgccgccacgcctgactggttttcgtatttttttggtggagacggggtttcgctgtgttggccgggctggtctccagctcctaaccgcgagtgatctgccagcctcggcctctcgaggtgccgggattgtagacggagtctcgttcactcagtgctcaatgttgcccaggctggagtgcagtggcgtgatctcggctcgctacaacctccacctcccagccgcctgccttggcctcccaaagtgccgagattgcagcctctgcccagcggccaccccatctgggaagtgaggagcgtctctgcctggccgcccatcgtctgggatgtgaggagcccctctgcccggccgcccagtctgggaagtgaggagcgcctcttcccggccgccatcccatctaggaagtgaggagcgtctctgcccggccgcccattgtctgagatgtggggagtgcctctgccccgccgctccgtctgggatgtgaggagcgcctctgcccggccgcgaccccgtctgggaggtgaggagcatctctgcccagccgccctgtctgagaagtgaggagcccctccgcccgcagccgcccgtctgggaagtgaggagcgtctccacccgcagctgcccgtccgggaggtggggcagcccccgcccgccagccgcccatccgggaggtggggggcgcctctgctacgcccttctgggaagtgaggagcccctctgcccagcggccacccgtctgggaggtgtacccaacagctcattgagaacgggccatgatgacgatggcggttttgttgaatggaaaagggggaaatgtggggaaaagatagagaaatcagattgttgctgtgtctgtgtagaaagaagtagacataggagactccattttgttctgtactaagaaaaattcttctgccttgggatggtgttaatctataaccttacccccaaccccgtgctctctgaaacatgtgctgtttccactcagggttaaatggattaagggcggtgcaagatgtgctttgttaaacagatgcttgaaggcagcatgctccttaagagtcatcaccactccctaatctcaagtacccagggacacaaacactgcggaaggccgcagggtcctctgcctaggaaaaccagagacccttgttcacttgtttatctgctgaccttccctccactattgtcctatgaccctgccaaatccccctctccgagaaacacccaagaatgatcaataaatactaaaacaaacaaacaaacaaacaaacaaaaacagaaacaagggtttgaagtttgtgttggtggcagctgcgtgatctggaaaagctcacactgaggagctctcctgcctccatgagggcagcgtgcaggcgcctggaggcactgacgtttttctgggtctgacttctactctgtttacagactaatctgctagcctacagtgtttcacagatgttgactgaagacatgaggttcctgggtccttggagcacagcaagcagcatgagcctcttgctggcacaggtttcccagggggtgacacaaggggcccaggcagatgctatgcaagcagtggggctgatgtcatggccgatgcatgctgaggttggagaactcactgctttttcagtggacagtcaacaaacctgcactttgactagaagaaacatgacctcattcctctagaccacttgctgtaagcacagccctgagaagtggcccaggttaaaagaatggtgttctttgcaaacttagtgagaacatgcatggtgggtggctgctcccagcacacccaggtctctctggatttccccagattaaaaccagctaaacatgagctcacaggtaaaattaccaagcacatatgggaaaagccaccacgagtaagtcagcagaaccacagtggaactgaacctcagagaacccagcctttgacatcctaaattaaactaagaatgcttgagatatttacagactaaaggaaggaaacagcctgaaccaggagccacaagaccactaaaatgacctggcagactggagaggaatcaaagagaacgtctggaaatgacaagtacaatagatgaaactgtgggtttaacaacaggcccattttggctagagattttgaattagtagatggaaaggaaaatcagaagaaatgcagactagagagccaaagagatagaaaacatgaaacataagaagtgtggaggtcaggatgaggcacagcacacatttaaacagagaagtgtggggacatgaggcttaaagtgacagtggccaggaattttctgtaagttatgaaagcctgaatacacagaagcaggaagcacagaaatccacatccatatcatcatgaaactgcaggacaccaagtgcaaagagaagatcttaaatgcagccaaggaaaaagcacaaattacagagagcagatgctgagactgagagtagactttatagcagccacagtgggagccggaagccatgtgatacagtgagtgtgacttgggactcttcaccatcagcttagaatcaggcattgaaatagatggttgttcaagaatctgcttatggtaaaggcatttccagatgggaaacagaatttatcacaacaggaaactcaggagagtgagactcaaggaactcactgaagaacgtacttccagcagaaggagagtggtcctggagaaagggtgtgattctgagataggcagatgaacagagcagtcagtgaaggtatgagcaacggaaagcaacgtggactctaaagctctgttaactgggtgaccctggttatctgggttgcggggagaaaaattagagccctcaccaacaccacacagcaaataagctctgaatgttttaaagcctagaagacgctatgggagagcatcttcatggctctggagatgaaaggccttctttaacaaggtcctaaatgcccagtgaaggaaaacattaagaaattcaggctgatcgtgctggctcaagcctgtaatcccagcacttcgggagaccgagttgggtggatcacttgagcccaggagtttgagaccagcctgggcaaaatggtgaaatctgatctctacaaaaaatacacacacacacacacacacacacacacacacacacacacacaaatagctgagtgtggtggcatgcgcctcccagctacttgggaggctgagatgggaggatcacctgagctagggaggtggaggttgcaataagctgagatcgtgccatcacactccagcctgggtgatagaatgagaccctgtctcaaaaaaaacaatactgtagttaaatttagtggtttttggttttttggttttgtttttgttttttgagacagagtcttgctgtgttgcccaggctggagtgtagtggctcaatctagatccactgcaacctctctctcctgggttcaagtgattctcctgcctcagcctcctgagtagctgggattacaggcatgtgccacgaggcctggctgatttttgtatttttaatagagatggggttttaccatgttggccaggctggtcttgaactcttgacctcaagtgatctgcccacctcggcctcccaaagtgctgggattacaggcgtgagccaccatgcccggccaactacattaaattttaaacttctttattttgaaataaaaagtaaaaacaggctgctctgcctatggagtagccattcttttattcctttactttgttaataaactagctttcatcttaaaaaaaaagtgaaaacaaaatccacaaaagcaaatataacgaacagattcagtatccaaaatatgtaaagaattaggagtyaacaagaaggtggcaaacagctcacttaggaaagagcaaaaaccatgactgggaatttgcagaaatggaaaaataaataaaaatgctcattcttagtgatcagcaaattagagccagagggatgtcctttcacacccatcagaatgatgatgatgatgtcagggaaaggaatgaaggccagtgggcgagaccactgcctttttgtgggcctccttggtggcagcaagtccagttgggagcttcttgtatgtacagacaagaaaatgtattcagaagcttgaaatagcaaacacctggagacagctcaggggtgcatcattaggggaatggataggtaggttgttgtctatcatatgctaaaaagcagtaagaatcaattatttgaactacatggatcacagctgggcacagtggctcacgcctgtaatcccagtactttgggaggccaaggcgggcagatcacctgaggtcaggagtttgagaccagcctggccaacatggtgaaaccccgtctctactaaaaatacaaaacattagctgggcgtggtggcacgagcctgtagtcccagctactcaggcggctgaggtaggagaagcgcttgaacccaggaagcagaagttgcagtgagctgagatcatgccactgcactccagcctggatgacagagcgagactgtgtctcaaaaaaaaaaaagaactacatggatcacataggtggatctcacaaagataaagataatccgcaaagaaagaaaattcaggcggaacacatacagtgtgatgacatttgacatgttatatttaaggcatgcagaagttttatttgtttttaagaatctgtaactattcaaaaatataaacgtgcatggggatgatacatacgtactctagtgagtgatttcccagctggggacaggattggagatgatctttctagagtgggacatggtggaggttaactgtcttagcaatgacttatgggtacttggatactcactgtattattccttttttttttttttttgagacagagtctcgctctgttgcccaggctggagtgcagtggcgcaatctcggctcactgcaaactccacctcctgggttcacgccattctcctgcctcagcctcctgagtagctgggactataggcgcccgccaccacacctggctaatttttgtattttcagtagagacggggtttcaccgtggtctcgatctcctgacctcgtgatccgcctgcctcagcctcccaaagtggtgggattacagcatgagccaccgtgcccggcccactgtattattctttgttcctcttgatatatctgaaatattgtgaagtatacttaaattacacatccctaagaatatccaaaagctctcctggtaatatttgcttactccattcactcttacaaacactcccatatcttcttgcctggaaacatctgttgagggatgggatgaaggggaatgagatttttcagtgctctctctgcccagtcctgatcccctgtgtgacaccactttctggtgctctaggttgccccgcaaaaccagacatagccgcttgctcttgagtgtgtctgcactgtccctacctcaggccagcaccgatgcaggcggctaggcggctgtcttgtttacagtgtggaaatgcccactcccaggccagcattgcctatcaataattgacaagtgataataaaactgtataaaagctgaaaaagtcttatattcttcctgttttttctttaatttttatcaaagtaataaatatatatggtttttaaaaatcaaatagtttagaagaacttctaatgaagaataaaaagcctccacctgtacattataaatttgtacaaatgcacagaatgtacaccaccaagagtgacctgtaatgtaaacatggactttgggtgataataatgtgtctatgtaggttcttcagtagtaacaaatgtatctctctagtggggacgttgataatggtggaggctgtgcatgcaggggctgtatggggaatctttgtaccttcctctcaattttgctgcaaacctataactggtctaaaaataaagtctatttttaaaaaagccttttccacctcacctctcccaacctcagtccacttgccaaaggtatccattgctagttttaattctttggaatacctataaataatgttatttatatgttatataaataataatgtgtttgctactatttctggctcatcacccatagacgttaattatcacctttcctctcttgagattttctctctcctgtatctgcaggtcagtggggaattggccgagctggctgggcttggctggctggactggctccaagctgtgggtccagctaggcatgtctccttcgtaggtcaggctcaggtctgctctggattcccctggggtctaagatgaagggacagggaagctcttgtcacaataatggcaaagccacaagagggaaggctcagctgcacaagtgcatttcaaacctttgctaacatctcattggccaaagcacgtcacatggccacagtcaggagtgaagaagtgcactgtctctagtagcaggcactgcaaagtcacatagtcaagggcctggatatagacagaagtgaagaactgggaccttttattcaatctaccatatttctcataattctgttttcttatagacttctctgtaacagtattttagctcaaataatacaacacagctttgcccaatggttggcctcttttaagtggctgatagatacttgatgagtttcttaaatctcaacattcccacaggkttctgagaaggaattttgttagatagtttaggcttggcggatgaagaaagtttgggtgtgggttcttcaaagtcagtctggctggaaacaccttgttctccccttcccttctatgaagtgaagagtgtctycagatggtgtatagacagcgagttgctacggaaacatcatttgatctccccagaagattactacaccgatacagtgscgtttcactctgcacctaaaggtaatgcttctgtgctctcaakgcctctgataccatttgggggaagttcagtagggccacgttggccacctctgctgcyatttccttgctcagaggtttttttcaccttttctttaatttcgatggtgactgttgggaaagtcaaatctgagcatctgagcatgccaatttcttgctagtgctcccccgcctgtatgactgaagtccaggcttctccatgtggactatgatgcccacatctgctgcccaataccaagaattatgtaagtgcttggagttgcagttgaaccaagagaaggaaaaactgaagacatagaaaagcaagggagcgtgtwcctgatgagttggagcagggacttatgggttttcccatgcaggaaaagagcagcttctcatcctttcagaatggagggaagcctgggtagagaggcagagagggtgtgtacatgtatgtgacattgggccagtttcctgtgatatgggaggcaagatattctgagaatgagtggggtgggaggctgtgatgtgggcttaagcagcgagttagacttatggaaggaccacacgtggacagggagaagtccctgtgtggattctgtggccagttatcgggattgcctagcatgctgggctcagaagacaagctctcccatagctccagttgagggactgtttgattctctggggcttgggagctgagaaggtgtttggggtgggaggattgggatctagaaaattgagggtgctcctggggagagttccactgatggtctgagctacgtagggaagtaaggcaagaaagaggtagcagaatcaagtgtcatggagtactaagccacttagtattttttttttttttgaggcagagtttcacttttgttgtccaggctagagtgcaatggcacgatcttggctcaccacaacctccatctcccaggttcaagcaattctccttcctcagcctcccaagtagctgggattacaggcgtgtgccaccacacctggctaattttgtatttttagtagagagggggtttctccatgttggtctcaaactcctgacctcaggtgatccacccacctcagcctcccaaagtgctgggattacaggcatgagccaccgcacccggccaccacttagtattttaaagttagttggaaactcagtatcttatgcaggtcaataagaatggggctaacatgtattgagagttaaccaggcattgtgctaagagatttgtgatggtatccatttgattgcattcttgctagcaatgaatgttctcatttaacctttggagggatggttttcttgtttgtttgtttgtttgttttttcttgagacagagtctcgctttgtcacccaggccagagtacagtggtgtgttctactgcaacctctggctcctgggttccagcgtttctcctgcttccgcctcagcctcctgagtagctgggattaaaggcgcctgccatcatgcctggataatttttttgtatttttagtagagacagggtttcaccatgttggccagctggtttccaactcctgacctcaagtgatccgccggcctcagcctcccaaattgccaggattacaggcatgagccactgcgcttggccagggggtgggggatgatcttaacagtgtaaaaagctcatacaaactttcattccttctgtgagctcttcagaaagcatgctcatgtatggggtatgtgtacaggcatgtgtgtgtgacagtggtctactcatgttctttgaccatgttggaaaatattttaacactctagtcctaaattttgttgttgtttgtttgtttgtttttgagaccgggtcttgctttgttgcccaggctggagtgcagaagcacaaccataactcactacaaccttgacctcctgtgctgaagtaattctccccactcagcctcctgagcatctgggaccacaggcatgcactaccacacccagcaaatttttaaatttattttttgtagagatagggtctcactctcactatgttgccaaggctggtgtcaactcctgggcttaagtgatgctcccaccttggcctcccaaagtgctgggatgataggtgtgagccaccacacatggccattttgaatacatagaataagttccaggagtaattcatatgttgaagagcaattatagctggtgtggtaaatatgaaagtttaggagaaagatcaagctaactgtggctttggtggttttatttggtcatcttaggaatgcccacctcctcaccttgttgcagtgattcagtttgtttccttgatgctgtaggcatctccctacctggatgttcaaaactgacatttagctgtgagaagcgttccgtccagaagaaagagctgaacaagaagcttgaagattcatgcaggaagaagcttgctgagttcgaagatgagttagmmcacactgtggacagcctgacatggaatttaactcctaaggccaaagaaaggaccagagaacctctcaaggtcagtttggaaggctgtgcagagcagtgtttggggggacagagaggcagtgaaggggaaggcattcagatgacatgagaagctgtgatgaatccatcgcaaaatagagtagagcttgtgttggccatctatgggtcatgcagttggtcaagatgtcaamaagcacaatccctttgcctgtcattgactctatgcttttgtatgtttcaaagaaagcaagtcawccaaggaataaawactggatgaaccacttacgtgtgccacagagagagctagacagacttctgcttgccagaatggagagtcggaaccacttcctaaaaaatccccgtttttttcctcctaacactcgatatggaggcaagtctcttgtttttcctccaaagaagccagcaccgataggagaattccagagtacagagccagaacmgaggtatgtctttctctggcttgaactctcagaaaacctggcccatgagagttaacctagatgrtcctccgtttggtctggctgtagaggtccctagacttgtggggcagggtagcagtatcagaacagagcagggctgcagggtcacccactggtgtggcctttgaaccttccccagagtcctgggtttatgcttttctgacctgccaggggtcttgagaaataggggttggtgttggccctttatttacattggagcaatctgggtcaaatggaagcaatcccgttagagacataggtcttgagtaataacagcatttgaaatttgattgattataaataattagtgtaaactgtgatttttctttaagagtgcctttgcctatatatcagtaactgtccttatgaaagtaatgagttgcttcatgggttcataattttagtaagcctaaaactattaacatttctttattagacaactaatattttttattaagaaaaattagatacaaaaactagctgggtatggtggcatgcacctgtgatcccagccacttgggaggcggaagtggaaggatcacctgagcacaggggtgtcgaggctgcagtgagccaagattgtgccactgcactccagcctaggtgacagagtgagaccctgtcaaaaagaaaatagaagagaagagaagagaggaggagaaaagagaaagaaaagaaagaaagattagaaaagactaatatttgagatacctatattaaaaacccacttacttattggtgtttaaacatgtagagtttttcctatgcatattgaaaatgaaatatgtagctacttatgtcttcacaaagattggatcatactgtaaaattattttataacctgcattaacaataagatccaaaaaccccccaacaaatggtatattgtgaatatctttgatggtctttatgtatttatttttacattaatcagtcactgcctactatttcattgtatggatgaaactaacagcctttctccccctcttttttcatcccacagttgtgctgatactccagtgtttctagctaagccaccaattgggtttttcacagattatgaaattggtccagtttatgaggtagacatcttgtttctttacagctcccaccccatctgctttcttatttttaaaaagtctttattatggaaattttcttctttttttcttttttttttttttttagtatttattgatcattcttgggtgtttctcggaaagggggatttggcagggtctaggacaatagtgaagggaaggtcagcagataaacatgtgaacaaaggtctctggttttcctaggcagagggccctgccgccttccgcagtgtttgtgtccctgggtacttgagattagggagtggtgatgactcttaacgagcatgctgccttcaagcatctgtttaacaaagcacatcttgcaccgcccttaattcatttaaccctgagtggacagagcacatgtttcagagagcacggggttgggggtaaggttatagattaacaccatcccaaggcagaagaatttttcttagtacagaacaaaatggagtctcctatgtctacttctttctatacagacacagtaaaaatctgatctctctttcttttccccacatttcccccttttctatttgacaaaaccgccatcggcatcatggcccgttctccatgagctattgggtacacctcccagacggggtggcggccgggcagaggggctcctcacttcccggacggggcggccrggcagaggctcccccaccacctcccgggaagggcggctagccgggcgggggctgccccccacctcccggacggggtggctgcggggcagagacactcctcagttcccagacggggtcgcggccgggcagaggcgctcctcacatctcagacggggcggcggggcagaggcgctccccacatcccagacgatgggcggccgggcagagacgctcctcacttcctagatgggatgacggccaggaagaggcgctcctcacttcccagactgggcggccgggcagaggggctcctcacatcccagacgatgggcggccaggcagagacgctcctcacttcctagatggggtggcggccgggcagaggctgcaaactcagcactttgggaggccaaggcaggcggctgggaggtggaggttgtagcgagccgagatcatgccactgcactccagcctgggcaacattgagcactgagtgagcgagactccgtctgcaatcccggcacctcgggaggccgaggctggcagatcactcgtggtcaggagctggagaccagcccggccagcacagcgaaaccccgtctccaccaaaaaatacgaaaaccagtcatgcgtggcggcgcacgcctgcaatcgcaggcactcggcaggctgaggcaggagaatcaggcagggaggttgtannnnnnnnnnnnnnnnnnnncggcatcatggcccgttctcaatgagctattgggtacacctcccagacggggtggccgctgggcagaggggctcctcacttcccagaaggggcggccgggcagatgcgccccccacctcccggatggggcggctgccgggcgggggctgccccccacctcccggagagggggtctgccgggtggagaactcctcacttcccagacggggcggctgccgggcggaggggctcctcacttctcagagagggcggctgggcagagatgctcctcacctcccagacggggtcgcggccgggcagaggcgctcctcacatcccagacggagcggcggggcagaggcactccccacatctcagacaatgggcggccgggcagagacgctcctcacttcctagatgggatgtcggccaggaagaggcgctcctcacttcccagactgggcggccgggcagaggggctcctcacatcccagacgatgggcggccaggcagagacgctcctcacttcctagatggggtggccggccgggcagaggctgcaaactragcactttgggaggccaaggcaggcggctgggaggtggaggttgtagcgagccgagatcatgccactgcactccagcctgggcaacattgagcactgagtgagcggactccgtctgcaatcccggcacctcgggaggctgaggctggcagatcactcgtggtcaggagctggagaccagcccggccagcacagcgaaaccccgtctccaccaaaaaacacgaaaaccagtcatgcgtggcggcgcacgcctgcaatcgcaggcactcggcaggctgaggcaggagaatcaggcagggaggttgtagtgagtcgagatggcggcagtacagtccagcctccgctcggcatcagagggagaccgtgcagagggagagggagagggaggagaggaagaccgtgcagagggaaagggagagggagagggcggaaatttttaactgtacacaaaactagggaaaagactataactactcctcatgtgcccaatatgcagcttcaacagttatctacattttgccaatctggttttgtctattactcctacaacctcttcatgtacacatctatatgcacatgtatgtgctggagtcatagaaggaaaatatgatatcatgtcattcttcagttaatacatcaattagtatctctaacagataagggttttaaaaagtaaccatagtaccactgtcacacccagccatattaataatgattccttaatatcaactaatacccatctatgtctgatcttcatttgttttaaaaaaaagtccatttatatttggtttctttgcatcagaatctaaacattgcatttgattaaagtatctcttaattctcctttagttgataataattcctctcccacctcctgctttttaaaaatgccatttatttgttgaagaaactgcaatttcgtacaccctggatttggctaattgcgttattgtggtgacattaaacgtgttcttttatcttccatattttccacaaactggtcattagatatagagatttgatgagattcaagttccatttttcctcttttttgacaagaatacttccttggtggtactgtgtatttcttattgcaatccatcaggaggaagcatgggatctgggtttcccatgatcagttatgaatggcatcaggtgttgaaattctgattcattctctataaagttcttatcaaactttcacttaatagttaacagcctagatgrctgccagatgactattgtccagatccattttttcttcaatcagggcttacaaaatggtaatttctaattctattattccatctacatttattagcttgattttccatttaaaaaacagaataaaactttccctctaactttgattcctgcctcctcctctttcttgtactctcctgatatctataggtaactatttctattagtttgcattcttccattgtttctttttgaaccataagcaaatatgtatatatagttgaaccccctttccttcttactgtcctctacatcttaacagtatatccagtaattcctgcaagagcagaggctttcctcattcctttttcccagcttctttcttttagaagcttcccaccttcttggggaatcaggtcaagaccaagcttagcagtcaccaactctgctcaccaggtacaaagacaactaggcctaatgatagcaatcccttcacatgcacatggattgcattttatagtttaaagagcacttgcctatccataattcttgaggaatgtctcaaccactcatggcaaaaagcagaccaatatggtagctctatatgctgaacattagaggaagcattttgcttactccctggacttaacagtaatgtgttgtcttttgtacttctgtgtctgggacttctgtgtctggccatcacgttttaaggacagttgtagaagctggcaaacacccagaggaaaggagctaaaatcatgtcagttagggaatagaatagggaaaagggagagctgctgatggacttatggaagatattcttcttcagggctttcagatgcctgctgtggaagcctgtgctcagagcctggagatcctgaggctgtagatgaggtagacatagactgctatggaacagtctttcctctgatctttgcctacttgtctaattctcatccctttgatgttcataacagttgtttacccggctaaactataaagtgtaaggataaaaacagttcaaattttcagtctttaaaaatttatgtcccatgtaccctttctctgaaacctcccagggaacatgcttctttaatagaaatgaggaaaccaatgaagaggaaggcatggaatgtggtaccaagagatccaacataggggagaggtgaaggaaatctccaggttaataactcttaagagattttgcagttaatattgctgcaaagcaaaatttcccaaagctcagcaacttaaaacaatcattttatcatgcttacaaattctttgggtgaaaaattcagagagagcacaatgggaatgacttgttccacaatgtctgaggccattgctggaaagagtcagtgcttaggggtgacataaaagttggggttgatgctgttgatgctgttgtagatagagagctgaggctgtctaccagaatgtctacaccacatagcttctctatgtgggctgkgcttccttacagtatggcaatctcaggttaatcagacttttacatgacaatgcaagtgagtatctgcacttttttttttttttttttgagatggaatcttgctctattacccaagctggagtgcagttgcaggatcttggctcactgcaacctctgcctcttgggttcaagcaattctcccacttcagcctcctgtgtaactgggattacaggtacgcaccaccacgcctggctaattttttatatttttggtagagagagggttttgccatgttggccatgctggtctcgaactcctgacctcagatgattcactcgccttggcctcccaaagtcctgggattacaggcgtgagccattgtacctggccaagtatctgcacttctaagtgagtatyctagcaagcaagaaggagattgcatcacattttatgacctaatcttgtaagttgcacagcactacatcctctgcatgccgtagattacaaacaagtcactaaggttcatccagattcaagggaagatatgtagacttcatttctttttttttaaaacctttttttttgaaataaggtctggctctgtcgcccaggctggagtgcagtggcatgatcttggctcactgcaacctctgcctcctgggctcaagcaactcctcccaactcagcttcccaagaagctggggctacaggtgcaggccaccacacctggctaatttttgtattttttgtatagacrggtttttgctatgttgcccaggctggtttcaaactcctgagctcaagcaacccacccgcctcggcttcctaaagtgctaggattacaggcgtgagccagtgtccagcctagacttcatctctaatgagaacagtgtcaaagaacttatggatgtgtcttaaaactgctctaggagttatcctatatgatagcagtaggtgtagtgggcaactagcccagattagaagaggccagaaagctctaggagaggttgatttatggagatgacattgagaagagtccctgatacacctggacatatgggggagagatttgtagggtggtggagaaggattgaattattgataagcacaaagcaaacaaaataattagttgattattcactccaggaaaaccaaaaattgtacaaggcagggaaaggaatcacctcatgctcagctgtgaatagcaattacttagtaacttgaatataacatgaattactaatctaaccagtagtatgatataactatattggaaasatgggggataggaagggcgtgtcatatggtgagtcagatatgggagagggaagagggaatatccatatcctccatctataattaatacctaaaactgaacaaaagtagtatactatttggagacatggaaataaataccaaaataatcagctaaaggatgaaaaagtgtttatctttggggagtgggaaatggcaggatggggccaggggaagagggcagtattctattttcaaaaccttgtcgaactctgactctttaaaccatgtggctgtccaacttagaagaaaacaatttaaaaaaacccaaaactttccacaaaaagaaacaccaggcccagatcattttgcaggcacagattatgaaacattcgagctattccctattttatgaaactatttcagagactagaaaaagagggaatgtaccatcattattaggtaataagcctaattaccttgacaccaaataaaaatatataccagtcttaagaacataggtgcagaaatactaggtaaaaaacagcaaaccaaaccaaacagtaaggaacaacacacacacacacacacgcagccaattctttgaaacccaggaacgcagggaatgtcttcacagcaggccttgagttggcagttggctctgctgagcctattatttttttcctccaaagcttccagtgctgttaaggaaagccagtccatgccacagtccttataatgatcactatcccaaaccttgcagccaccacagctaccatgtttcactccctggccttccacctgcacctcatttcagttgaccactagtgaaagccttggtaattgtgacaataccatcccatggtgctcacaccctagttcccaccagctgtttcacagatggattggtgtaatatgtagtgttggccaaaaattgatgtaaatgctgatttaggaatacaaatctataaataaaaataggaagacatacttcatatttatgtcaatttttatctggtggggggctggtagaggatttcaactttatctgtaatgttttatttcttaagctgggtgatggaaacatggcttctgtcatgttataatttatacattgttttctagtgtaacatttcacaaaatattaacaaaagatgtgtacctgtattgatgtgctacacactgtgctgggtgcagttggaggattaggtctagaccttgcccttgggggtctcccaatctggggtggcagaaaagaaagtggggcttaaagggggtgagtgggttgcgtaagaggcccaattacatcctgacatagaggtgccataacactctttgtgtccatgggaagaatggttcagagatacgtgttgaggaagacagtaagtaagaggtgaggtgagcaaaactttgaaaccagatatcctaggctcaaacctaactggtgcctctttgaactccagtttcttcagctgtgagatagaaacagttcccacctttcctggttgttgcgaggttgaggaggtacagagcagatgctcataaatagtaattgttattttaaacaataggtcagtttcatgcacgtccgtgtgaagagactgctaaacaagctttgtgtgagcaataaaagcttttaatcacctgggtgcaggcgagctgcgtccacaaagagagtcagtgaaaagagatggggtgggtccattttataagatttgggtgggtaaaggaaaattgcagtcaaagggggtttgttctctggcgggcaggagtgggagtcgcaaggtgctcagtgggggagctttttgagccaggaaaaggactttcacaaggtaatgtcatcacttaaggcaaggaccggccatttnnnnnnnnnnnnnnnnnnnnnnnnnnnnnnnnnnnnnnnnnnnnnnnnnnnnnnnnnnnnnnnnnnnnnnnnnnnnnnnnnnnnnnnnnnnnnnnnnnnnnnnnnnnnnnnnnnnnnnnnnnnnnnnnnnnnnnnnnnnnnnnnnnnnnnnnnnnnnnnnnnnnnnnnnnnnnnnnnnnnnnnnnnnnnnnnnnnnnnnnnnnnnnnnnnnnnnnnnnnnnnnnnnnnnnnnnnnnnnnnnnnnnnnnnnnnnnnnnnnnnnnnnnnnnnnnnnnnnnnnnnnnnnnnnnnnnnnnnnnnnnnnnnnnnnnnnnnnnnnnnnnnnnnnnnnnnnnnnnnnnnnnnnnnnnnnnnnnnnnnnnnnnnnnnnnnnnnnnnnnnnnnnnnnnnnnnnnnnnnnnnnnnnnnnnnnnnnnnnnnnnnnnnnnnnnnnnnnnnnnnnnnnnnnnnnnnnnnnnnnnnnnnnnnnnnnnnnnnnnnnnnnnnnnnnnnnnnnnnnnnnnnnnnnnnnnnnnnnnnnnnnnnnnnnnnnnnnnnnnnnnnnnnnnnnnnnnnnnnnnnnnnnnnnnnnnnnnnnnnnnnnnnnnnnnnnnnnnnnnnnnnnnnnnnnnnnnnnnnnnnnnnnnnnnnnnnnnnnnnnnnnnnnnnnnnnnnnnnnnnnnnnnnnnnnnnnnnnnnnnnnntggtgatatcgtggggttgttagaagaaacatttgttgtatagaatgattggtgatggcctggatatggttttggatgaattgagaaactaaacggaagatacaaggtctgaataaaagaaggagaaaaatgggtattaaaggactaagaattgggaggacctaggatatttaattagagagtgcctaaggggkttcascgcaattacttgcttggtttagaagtgatctccttgaggatagatttccatgatggaaaggaaatgagaggttctaagagacgggctagcggcttgtaacctacatggaagaggttatgaaatgacgacagaatagaatgggcctgtgaggctggaaggaggtattttccttggtctaagaactatttgccttgtgtgggaagagattgataggtggaaatttcagcggggaagtagstgggagtgaccgatgtgaaggagaaaaactggccctgagggacagaagttggagagctagctgcttgtctagccaccttatcagcataagcgttgcttagagcaatgggatctgacrccttttgatgcctcttgcagtgaatgaccttagcytcctttggaagtaaaggggccttgagtagagtttttattaaagaggcattaatgatggaggacccttgtgtagtgagggagcctctttcagcctatatgaccacatggtggtgcagaatatgaaaggcatatttagaatcagtgtagatattgacgcatagtccttttccaagagtgagggcttgagttaaggcaactagtctggcttgctgagaggtagtggaggggggcagagtggtagcctcaatgatagatgtggaagatactatagcatagcctgcctttgctggtgagtggcaattaggcctggtggaactgccatcaataaaccaagtgtgattagggtgagaaacaaggaagaaggaaatgtggggaaatggggtgaacatcaggtggatcagagagatgcagtcatgagggtcaggtgtggtatctggaataatgtgggaggccagattgaagtccaggccaggaacaatggtaactgtgggagattcaacgaagagtgagtgtagctgaaggagccggggagcagaaagtatatgcgtcaggtgtgaggaagaaaatagattttggaaattatgagagctgtagagagtgagttgagcatagtttgtgattttgagggcctctaaaagtattagggcggcagcagccactgcacggagacatgatggccagcctaaaacagtaaggtcaagttgtttggacaaaaaggctacaggacgcgatcctggtccttgtgtaagaattctgactgcacagccctgcacttcggctgtgtgtaatgaaaagagttgggatgagtcagggagagctagagtgggggcagtctctaaagctgtcttcaaggaacggaaagaggagtggggaaaggatttaggatctatggggtcaactaggtttccttttgtgagtttatataatggttttgttaggatggcaaaaccaggtatctaaaggcgaaaatatctaaccatgcctaggaaggaaaggagttgttgttttgtagaaggggttggggtttgagagattagtcgggcacgatcggcagggagagcacgtgtgtttttatgaagaattatgccgaggtaggtaatggatggagaagamatttgagttttggagggagatacctgatatcctttggagaataaatgttgaaggagcagaagtgtgtcttgttgagaagattcaaaggaggggctacaaagaagaaggtcatcaatatattgaataaggtgagaagcggaggggtggaaagaaagtaaatcaygagaaagagcttggctgaagtaatgagggctgtccctgaaaccttgcggcagcacagcccaggtaagctgctgggactgatgggtgacagggtcagtccaggtgaaagcaaagagaggctgggatgaggagtgcaggggaatagtgaaaaaagcatctttaagatcgagaacagaacactgagttgtggaggaaggtattgaggacaaaagagtgtatgggttgggcaccacaggatggatggcaaaacaatttggttgataaggtgcagatcctgaactaatctgtaagacttgtctggtttttggacaggtaaagtgggggaattgtaaggagagtttttaggttttagaagcccatgctgtagcaggcgagtgataacaggctttaatccttttaaagtgtgctgtgggatgggatattggcattgagtggggtaagggtgattaggttttaatgggatggtaatrggcatgtgatcagttgccagggaaggagtagagatgtcttatacttgtgggttaaggtggggggatacgagaggaagacacaaaggaggctttgggttggggagaagagcggcaatgagatgcggctatagtagtcagggaagcagataatttggttaaaatatctcggcctaataagggaactgggcaggtggggataactgaaaaagagtgcataaaagagtgttgcccaagttggcaccagagtgggggagttttcaggggttttgaagcttggccgtcagtacctacaacagttattggggctagggaaacaggcctttgaaaagaaggcaacatggagtgggtagcccctgtgtcgattaaacaggggatggacttactctccactgtgagagttacctgaagctcagcatctgtgatggtctagggggattctgaggtgatcgggcagcatcaatcttcagtcgctaagctgagcagatactgggaaggagtcggtcagagagccttgggctagagcttaggggtataggagtggctgctgggcgagctgggcannnnnnnnnnnnnnnnnnnnnnnnnnnnnnnnnnnnnnnnnnnnnnnnnnnnnnnnnnnnnnnnnnnnnnnnnnnnnnnnnnnnnnnnnnnnnnnnnnnnnnnnnnnnnnnnnnnnnnnnnnnnnnnnnnnnnnnnnnnnnnnnnnnnnnnnnnnnnnnnnnnnnnnnnnnnnnnnnnnnnnnnnnnnnnnnnnnnnnnnnnnnnnnnnnnnnnnnnnnnnnnnnnnnnnnnnnnnnnnnnnnnnnnnnnnnnnnnnnnnnnnnnnnnnnnnnnnnnnnnnnnnnnnnnnnnnnnnnnnnnnnnnnnnnnnnnnnnnnnnnnnnnnnnnnnnnnnnnnnnnnnnnnnnnnnnnnnnnnnnnnnnnnnnnnnnnnnnnnnnnnnnnnnnnnnnnnnnnnnnnnnnnnnnnnnnnnnnnnnnnnnnnnnnnnnnnnnnnnnnnnnnnnnnnnnnnnnnnnnnnnnnnnnnnnnnnnnnnnnnnnnnnnnnnnnnnnnnnnnnnnnnnnnnnnnnnnnnnnnnnnnnnnnnnnnnnnnnnnnnnnnnnnnnnnnnnnnnnnnnnnnnnnnnnnnnnnnnnnnnnnnnnnnnnnnnnnnnnnnnnnnnnnnnnnnnnnnnnnnnnnnnnnnnnnnnnnnnnnnnnnnnnnnnnnnnnnnnnnnnnnnnnnnnnnnnnnnnnnnnnnnnnnnnnnnnnnnnnnnnnnnnnnnnnnnnnnnnnnnnnnnnnnnnnnnnnnnnnnnnnnnnnnnnnnnnnnnnnnnnnnnnnnnnnnnnnnnnnnnnnnnnnnnnnnnnnnnnnnnnnnnnnnnnnnnnnnnnnnnnnnnnnnnnnnnnnnnnnnnnnnnnnnnnnnnnnnnnnnnnnnnnnnnnnnnnnnnnnnnnnnnnnnnnnnnnnnnnnnnnnnnnnnnnnnnnnnnnnnnnnnnnnnnnnnnnnnnnnnnnnnnnnnnnnnnnnnnnnnnnnnnnnnnnnnnnnnnnnnnnnnnnnnnnnnnnnnnnnnnnnnnnnnnnnnnnnnnnnnnnnnnnnnnnnnnnnnnnnnnnnnnnnnnnnnnnnnnnnnnnnnnnnnnnnnnnnnnnnnnnnnnnnnnnnnnnnnnnnnnnnnnnnnnnnnnnnnnnnnnnnnnnnnnnnnnnnnnnnnnnnnnnnnnnnnnnnnnnnnnnnnnnnnnnnnnnnnnnnnnnnnnnnnnnnnnnnnnnnnnnnnnnnnnnnnnnnnnnnnnnnnnnnnnnnnnnnnnnnnnnnnnnnnnnnnnnnnnnnnnnnnnnnnnnnnnnnnnnnnnnnnnnnnnnnnnnnnnnnnnnnnnnnnnnnnnnnnnnnnnnnnnnnnnnnnnnnnnnnnnnnnnnnnnnnnnnnnnnnnnnnnnnnnnnnnnnnnnnnnnnnnnnnnnnnnnnnnnnnnnnnnnnnnnnnnnnnnnnnnnnnnnnnnnnnnnnnnnnnnnnnnnnnnnnnnnnnnnnnnnnnnnnnnnnnnnnnnnnnnnnnnnnnnnnnnnnnnnnnnnnnnnnnnnnnnnnnnnnnnnnnnnnnnnnnnnnnnnnnnnnnnnnnnnnnnnnnnnnnnnnnnnnnnnnnnnnnnnnnnnnnnnnnnnnnnnnnnnnnnnnnnnnnnnnnnnnnnnnnnnnnnnnnnnnnnnnnnnnnnnnnnnnnnnnnnnnnnnnnnnnnnnnnnnnnnnnnnnnnnnnnnnnnnnnnnnnnnnnnnnnnnnnnnnnnnnnnnnnnnnnnnnnnnnnnnnnnnnnnnnnnnnnnnnnnnnnnnnnnnnnnnnnnnnnnnnnnnnnnnnnnnnnnnnnnnnnnnnnnnnnnnnnnnnnnnnnnnnnnnnnnnnnnnnnnnnnnnnnnnnnnnnnnnnnnnnnnnnnnnnnnnnnnnnnnnnnnnnnnnnnnnnnnnnnnnnnnnnnnnnnnnnnnnnnnnnnnnnnnnnnnnnnnnnnnnnnnnnnnnnnnnnnnnnnnnnnnnnnnnnnnnnnnnnnnnnnnnnnnnnnnnnnnnnnnnnnnnnnnnnnnnnnnnnnnnnnnnnnnnnnnnnnnnnnnnnnnnnnnnnnnnnnnnnnnnnnnnnnnnnnnnnnnnnnnnnnnnnnnnnnnnnnnnnnnnnnnnnnnnnnnnnnnnnnnnnnnnnnnnnnnnnnnnnnnnnnnnnnnnnnnnnnnnnnnnnnnnnnnnnnnnnnnnnnnnnnnnnnnnnnnnnnnnnnnnnnnnnnnnnnnnnnnnnnnnnnnnnnnnnnnnnnnnnnnnnnnnnnnnnnnnnnnnnnnnnnnnnnnnnnnnnnnnnnnnnnnnnnnnnnnnnnnnnnnnnnnnnnnnnnnnnnnnnnnnnnnnnnnnnnnnnnnnnnnnnnnnnnnnnnnnnnnnnnnnnnnnnnnnnnnnnnnnnnnnnnnnnnnnnnnnnnnnnnnnnnnnnnnnnnnnnnnnnnnnnnnnnnnnnnnnnnnnnnnnnnnnnnnnnnnnnnnnnnnnnnnnnnnnnnnnnnnnnnnnnnnnnnnnnnnnnnnnnnnnnnnnnnnnnnnnnnnnnnnnnnnnnnnnnnnnnnnnnnnnnnnnnnnnnnnnnnnnnnnnnnnnnnnnnnnnnnnnnnnnnnnnnnnnnnnnnnnnnnnnnnnnnnnnnnnnnnnnnnnnnnnnnnnnnnnnnnnnnnnnnnnnnnnnnnnnnnnnnnnnnnnnnnnnnnnnnnnnnnnnnnnnnnnnnnnnnnnnnnnnnnnnnnnnnnnnnnnnnnnnnnnnnnnnnnnnnnnnnnnnnnnnnnnnnnnnnnnnnnnnnnnnnnnnnnnnnnnnnnnnnnnnnnnnnnnnnnnnnnnnnnnnnnnnnnnnnnnnnnnnnnnnnnnnnnnnnnnnnnnnnnnnnnnnnnnnnnnnnnnnnnnnnnnnnnnnnnnnnnnnnnnnnnnnnnnnnnnnnnnnnnnnnnnnnnnnnnnnnnnnnnnnnnnnnnnnnnnnnnnnnnnnnnnnnnnnnnnnnnnnnnnnnnnnnnnnnnnnnnnnnnnnnnnnnnnnnnnnnnnnnnnnnnnnnnnnnnnnnnnnnnnnnnnnnnnnnnnnnnnnnnnnnnnnnnnnnnnnnnnnnnnnnnnnnnnnnnnnnnnnnnnnnnnnnnnnnnnnnnnnnnnnnnnnnnnnnnnnnnnnnnnnnnnnnnnnnnnnnnnnnnnnnnnnnnnnnnnnnnnnnnnnnnnnnnnnnnnnnnnnnnnnnnnnnnnnnnnnnnnnnnnnnnnnnnnnnnnnnnnnnnnnnnnnnnnnnnnnnnnnnnnnnnnnnnnnnnnnnnnnnnnnnnnnnnnnnnnnnnnnnnnnnnnnnnnnnnnnnnnnnnnnnnnnnnnnnnnnnnnnnnnnnnnnnnnnnnnnnnnnnnnnnnnnnnnnnnnnnnnnnnnnnnnnnnnnnnnnnnnnnnnnnnnnnnnnnnnnnnnnnnnnnnnnnnnnnnnnnnnnnnnnnnnnnnnnnnnnnnnnnnnnnnnnnnnnnnnnnnnnnnnnnnnnnnnnnnnnnnnnnnnnnnnnnnnnnnnnnnnnnnnnnnnnnnnnnnnnnnnnnnnnnnnnnnnnnnnnnnnnnnnnnnnnnnnnnnnnnnnnnnnnnnnnnnnnnnnnnnnnnnnnnnnnnnnnnnnnnnnnnnnnnnnnnnnnnnnnnnnnnnnnnnnnnnnnnnnnnnnnnnnnnnnnnnnnnnnnnnnnnnnnnnnnnnnnnnnnnnnnnnnnnnnnnnnnnnnnnnnnnnnnnnnnnnnnnnnnnnnnnnnnnnnnnnnnnnnnnnnnnnnnnnnnnnnnnnnnnnnnnnnnnnnnnnnnnnnnnnnnnnnnnnnnnnnnnnnnnnnnnnnnnnnnnnnnnnnnnnnnnnnnnnnnnnnnnnnnnnnnnnnnnnnnnnnnnnnnnnnnnnnnnnnnnnnnnnnnnnnnnnnnnnnnnnnnnnnnnnnnnnnnnnnnnnnnnnnnnnnnnnnnnnnnnnnnnnnnnnnnnnnnnnnnnnnnnnnnnnnnnnnnnnnnnnnnnnnnnnnnnnnnnnnnnnnnnnnnnnnnnnnnnnnnnnnnnnnnnnnnnnnnnnnnnnnnnnnnnnnnnnnnnnnnnnnnnnnnnnnnnnnnnnnnnnnnnnnnnnnnnnnnnnnnnnnnnnnnnnnnnnnnnnnnnnnnnnnnnnnnnnnnnnnnnnnnnnnnnnnnnnnnnnnnnnnnnnnnnnnnnnnnnnnnnnnnnnnnnnnnnnnnnnnnnnnnnnnnnnnnnnnnnnnnnnnnnnnnnnnnnnnnnnnnnnnnnnnnnnnnnnnnnnnnnnnnnnnnnnnnnnnnnnnnnnnnnnnnnnnnnnnnnnnnnnnnnnnnnnnnnnnnnnnnnnnnnnnnnnnnnnnnnnnnnnnnnnnnnnnnnnnnnnnnnnnnnnnnnnnnnnnnnnnnnnnnnnnnnnnnnnnnnnnnnnnnnnnnnnnnnnnnnnnnnnnnnnnnnnnnnnnnnnnnnnnnnnnnnnnnnnnnnnnnnnnnnnnnnnnnnnnnnnnnnnnnnnnnnnnnnnnnnnnnnnnnnnnnnnnnnnnnnnnnnnnnnnnnnnnnnnnnnnnnnnnnnnnnnnnnnnnnnnnnnnnnnnnnnnnnnnnnnnnnnnnnnnnnnnnnnnnnnnnnnnnnnnnnnnnnnnnnnnnnnnnnnnnnnnnnnnnnnnnnnnnnnnnnnnnnnnnnnnnnnnnnnnnnnnnnnnnnnnnnnnnnnnnnnnnnnnnnnnnnnnnnnnnnnnnnnnnnnnnnnnnnnnnnnnnnnnnnnnnnnnnnnnnnnnnnnnnnnnnnnnnnnnnnnnnnnnnnnnnnnnnnnnnnnnnnnnnnnnnnnnnnnnnnnnnnnnnnnnnnnnnnnnnnnnnnnnnnnnnnnnnnnnnnnnnnnnnnnnnnnnnnnnnnnnnnnnnnnnnnnnnnnnnnnnnnnnnnnnnnnnnnnnnnnnnnnnnnnnnnnnnnnnnnnnnnnnnnnnnnnnnnnnnnnnnnnnnnnnnnnnnnnnnnnnnnnnnnnnnnnnnnnnnnnnnnnnnnnnnnnnnnnnnnnnnnnnnnnnnnnnnnnnnnnnnnnnnnnnnnnnnnnnnnnnnnnnnnnnnnnnnnnnnnnnnnnnnnnnnnnnnnnnnnnnnnnnnnnnnnnnnnnnnnnnnnnnnnnnnnnnnnnnnnnnnnnnnnnnnnnnnnnnnnnnnnnnnnnnnnnnnnnnnnnnnnnnnnnnnnnnnnnnnnnnnnnnnnnnnnnnnnnnnnnnnnnnnnnnnnnnnnnnnnnnnnnnnnnnnnnnnnnnnnnnnnnnnnnnnnnnnnnnnnnnnnnnnnnnnnnnnnnnnnnnnnnnnnnnnnnnnnnnnnnnnnnnnnnnnnnnnnnnnnnnnnnnnnnnnnnnnnnnnnnnnnnnnnnnnnnnnnnnnnnnnnnnnnnnnnnnnnnnnnnnnnnnnnnnnnnnnnnnnnnnnnnnnnnnnnnnnnnnnnnnnnnnnnnnnnnnnnnnnnnnnnnnnnnnnnnnnnnnnnnnnnnnnnnnnnnnnnnnnnnnnnnnnnnnnnnnnnnnnnnnnnnnnnnnnnnnnnnnnnnnnnnnnnnnnnnnnnnnnnnnnnnnnnnnnnnnnnnnnnnnnnnnnnnnnnnnnnnnnnnnnnnnnnnnnnnnnnnnnnnnnnnnnnnnnnnnnnnnnnnnnnnnnnnnnnnnnnnnnnnnnnnnnnnnnnnnnnnnnnnnnnnnnnnnnnnnnnnnnnnnnnnnnnnnnnnnnnnnnnnnnnnnnnnnnnnnnnnnnnnnnnnnnnnnnnnnnnnnnnnnnnnnnnnnnnnnnnnnnnnnnnnnnnnnnnnnnnnnnnnnnnnnnnnnnnnnnnnnnnnnnnnnnnnnnnnnnnnnnnnnnnnnnnnnnnnnnnnnnnnnnnnnnnnnnnnnnnnnnnnnnnnnnnnnnnnnnnnnnnnnnnnnnnnnnnnnnnnnnnnnnnnnnnnnnnnnnnnnnnnnnnnnnnnnnnnnnnnnnnnnnnnnnnnnnnnnnnnnnnnnnnnnnnnnnnnnnnnnnnnnnnnnnnnnnnnnnnnnnnnnnnnnnnnnnnnnnnnnnnnnnnnnnnnnnnnnnnnnnnnnnnnnnnnnnnnnnnnnnnnnnnnnnnnnnnnnnnnnnnnnnnnnnnnnnnnnnnnnnnnnnnnnnnnnnnnnnnnnnnnnnnnnnnnnnnnnnnnnnnnnnnnnnnnnnnnnnnnnnnnnnnnnnnnnnnnnnnnnnnnnnnnnnnnnnnnnnnnnnnnnnnnnnnnnnnnnnnnnnnnnnnnnnnnnnnnnnnnnnnnnnnnnnnnnnnnnnnnnnnnnnnnnnnnnnnnnnnnnnnnnnnnnnnnnnnnnnnnnnnnnnnnnnnnnnnnnnnnnnnnnnnnnnnnnnnnnnnnnnnnnnnnnnnnnnnnnnnnnnnnnnnnnnnnnnnnnnnnnnnnnnnnnnnnnnnnnnnnnnnnnnnnnnnnnnnnnnnnnnnnnnnnnnnnnnnnnnnnnnnnnnnnnnnnnnnnnnnnnnnnnnnnnnnnnnnnnnnnnnnnnnnnnnnnnnnnnnnnnnnnnnnnnnnnnnnnnnnnnnnnnnnnnnnnnnnnnnnnnnnnnnnnnnnnnnnnnnnnnnnnnnnnnnnnnnnnnnnnnnnnnnnnnnnnnnnnnnnnnnnnnnnnnnnnnnnnnnnnnnnnnnnnnnnnnnnnnnnnnnnnnnnnnnnnnnnnnnnnnnnnnnnnnnnnnnnnnnnnnnnnnnnnnnnnnnnnnnnnnnnnnnnnnnnnnnnnnnnnnnnnnnnnnnnnnnnnnnnnnnnnnnnnnnnnnnnnnnnnnnnnnnnnnnnnnnnnnnnnnnnnnnnnnnnnnnnnnnnnnnnnnnnnnnnnnnnnnnnnnnnnnnnnnnnnnnnnnnnnnnnnnnnnnnnnnnnnnnnnnnnnnnnnnnnnnnnnnnnnnnnnnnnnnnnnnnnnnnnnnnnnnnnnnnnnnnnnnnnnnnnnnnnnnnnnnnnnnnnnnnnnnnnnnnnnnnnnnnnnnnnnnnnnnnnnnnnnnnnnnnnnnnnnnnnnnnnnnnnnnnnnnnnnnnnnnnnnnnnnnnnnnnnnnnnnnnnnnnnnnnnnnnnnnnnnnnnnnnnnnnnnnnnnnnnnnnnnnnnnnnnnnnnnnnnnnnnnnnnnnnnnnnnnnnnnnnnnnnnnnnnnnnnnnnnnnnnnnnnnnnnnnnnnnnnnnnnnnnnnnnnnnnnnnnnnnnnnnnnnnnnnnnnnnnnnnnnnnnnnnnnnnnnnnnnnnnnnnnnnnnnnnnnnnnnnnnnnnnnnnnnnnnnnnnnnnnnnnnnnnnnnnnnnnnnnnnnnnnnnnnnnnnnnnnnnnnnnnnnnnnnnnnnnnnnnnnnnnnnnnnnnnnnnnnnnnnnnnnnnnnnnnnnnnnnnnnnnnnnnnnnnnnnnnnnnnnnnnnnnnnnnnnnnnnnnnnnnnnnnnnnnnnnnnnnnnnnnnnnnnnnnnnnnnnnnnnnnnnnnnnnnnnnnnnnnnnnnnnnnnnnnnnnnnnnnnnnnnnnnnnnnnnnnnnnnnnnnnnnnnnnnnnnnnnnnnnnnnnnnnnnnnnnnnnnnnnnnnnnnnnnnnnnnnnnnnnnnnnnnnnnnnnnnnnnnnnnnnnnnnnnnnnnnnnnnnnnnnnnnnnnnnnnnnnnnnnnnnnnnnnnnnnnnnnnnnnnnnnnnnnnnnnnnnnnnnnnnnnnnnnnnnnnnnnnnnnnnnnnnnnnnnnnnnnnnnnnnnnnnnnnnnnnnnnnnnnnnnnnnnnnnnnnnnnnnnnnnnnnnnnnnnnnnnnnnnnnnnnnnnnnnnnnnnnnnnnnnnnnnnnnnnnnnnnnnnnnnnnnnnnnnnnnnnnnnnnnnnnnnnnnnnnnnnnnnnnnnnnnnnnnnnnnnnnnnnnnnnnnnnnnnnnnnnnnnnnnnnnnnnnnnnnnnnnnnnnnnnnnnnnnnnnnnnnnnnnnnnnnnnnnnnnnnnnnnnnnnnnnnnnnnnnnnnnnnnnnnnnnnnnnnnnnnnnnnnnnnnnnnnnnnnnnnnnnnnnnnnnnnnnnnnnnnnnnnnnnnnnnnnnnnnnnnnnnnnnnnnnnnnnnnnnnnnnnnnnnnnnnnnnnnnnnnnnnnnnnnnnnnnnnnnnnnnnnnnnnnnnnnnnnnnnnnnnnnnnnnnnnnnnnnnnnnnnnnnnnnnnnnnnnnnnnnnnnnnnnnnnnnnnnnnnnnnnnnnnnnnnnnnnnnnnnnnnnnnnnnnnnnnnnnnnnnnnnnnnnnnnnnnnnnnnnnnnnnnnnnnnnnnnnnnnnnnnnnnnnnnnnnnnnnnnnnnnnnnnnnnnnnnnnnnnnnnnnnnnnnnnnnnnnnnnnnnnnnnnnnnnnnnnnnnnnnnnnnnnnnnnnnnnnnnnnnnnnnnnnnnnnnnnnnnnnnnnnnnnnnnnnnnnnnnnnnnnnnnnnnnnnnnnnnnnnnnnnnnnnnnnnnnnnnnnnnnnnnnnnnnnnnnnnnnnnnnnnnnnnnnnnnnnnnnnnnnnnnnnnnnnnnnnnnnnnnnnnnnnnnnnnnnnnnnnnnnnnnnnnnnnnnnnnnnnnnnnnnnnnnnnnnnnnnnnnnnnnnnnnnnnnnnnnnnnnnnnnnnnnnnnnnnnnnnnnnnnnnnnnnnnnnnnnnnnnnnnnnnnnnnnnnnnnnnnnnnnnnnnnnnnnnnnnnnnnnnnnnnnnnnnnnnnnnnnnnnnnnnnnnnnnnnnnnnnnnnnnnnnnnnnnnnnnnnnnnnnnnnnnnnnnnnnnnnnnnnnnnnnnnnnnnnnnnnnnnnnnnnnnnnnnnnnnnnnnnnnnnnnnnnnnnnnnnnnnnnnnnnnnnnnnnnnnnnnnnnnnnnnnnnnnnnnnnnnnnnnnnnnnnnnnnnnnnnnnnnnnnnnnnnnnnnnnnnnnnnnnnnnnnnnnnnnnnnnnnnnnnnnnnnnnnnnnnnnnnnnnnnnnnnnnnnnnnnnnnnnnnnnnnnnnnnnnnnnnnnnnnnnnnnnnnnnnnnnnnnnnnnnnnnnnnnnnnnnnnnnnnnnnnnnnnnnnnnnnnnnnnnnnnnnnnnnnnnnnnnnnnnnnnnnnnnnnnnnnnnnnnnnnnnnnnnnnnnnnnnnnnnnnnnnnnnnnnnnnnnnnnnnnnnnnnnnnnnnnnnnnnnnnnnnnnnnnnnnnnnnnnnnnnnnnnnnnnnnnnnnnnnnnnnnnnnnnnnnnnnnnnnnnnnnnnnnnnnnnnnnnnnnnnnnnnnnnnnnnnnnnnnnnnnnnnnnnnnnnnnnnnnnnnnnnnnnnnnnnnnnnnnnnnnnnnnnnnnnnnnnnnnnnnnnnnnnnnnnnnnnnnnnnnnnnnnnnnnnnnnnnnnnnnnnnnnnnnnnnnnnnnnnnnnnnnnnnnnnnnnnnnnnnnnnnnnnnnnnnnnnnnnnnnnnnnnnnnnnnnnnnnnnnnnnnnnnnnnnnnnnnnnnnnnnnnnnnnnnnnnnnnnnnnnnnnnnnnnnnnnnnnnnnnnnnnnnnnnnnnnnnnnnnnnnnnnnnnnnnnnnnnnnnnnnnnnnnnnnnnnnnnnnnnnnnnnnnnnnnnnnnnnnnnnnnnnnnnnnnnnnnnnnnnnnnnnnnnnnnnnnnnnnnnnnnnnnnnnnnnnnnnnnnnnnnnnnnnnnnnnnnnnnnnnnnnnnnnnnnnnnnnnnnnnnnnnnnnnnnnnnnnnnnnnnnnnnnnnnnnnnnnnnnnnnnnnnnnnnnnnnnnnnnnnnnnnnnnnnnnnnnnnnnnnnnnnnnnnnnnnnnnnnnnnnnnnnnnnnnnnnnnnnnnnnnnnnnnnnnnnnnnnnnnnnnnnnnnnnnnnnnnnnnnnnnnnnnnnnnnnnnnnnnnnnnnnnnnnnnnnnnnnnnnnnnnnnnnnnnnnnnnnnnnnnnnnnnnnnnnnnnnnnnnnnnnnnnnnnnnnnnnnnnnnnnnnnnnnnnnnnnnnnnnnnnnnnnnnnnnnnnnnnnnnnnnnnnnnnnnnnnnnnnnnnnnnnnnnnnnnnnnnnnnnnnnnnnnnnnnnnnnnnnnnnnnnnnnnnnnnnnnnnnnnnnnnnnnnnnnnnnnnnnnnnnnnnnnnnnnnnnnnnnnnnnnnnnnnnnnnnnnnnnnnnnnnnnnnnnnnnnnnnnnnnnnnnnnnnnnnnnnnnnnnnnnnnnnnnnnnnnnnnnnnnnnnnnnnnnnnnnnnnnnnnnnnnnnnnnnnnnnnnnnnnnnnnnnnnnnnnnnnnnnnnnnnnnnnnnnnnnnnnnnnnnnnnnnnnnnnnnnnnnnnnnnnnnnnnnnnnnnnnnnnnnnnnnnnnnnnnnnnnnnnnnnnnnnnnnnnnnnnnnnnnnnnnnnnnnnnnnnnnnnnnnnnnnnnnnnnnnnnnnnnnnnnnnnnnnnnnnnnnnnnnnnnnnnnnnnnnnnnnnnnnnnnnnnnnnnnnnnnnnnnnnnnnnnnnnnnnnnnnnnnnnnnnnnnnnnnnnnnnnnnnnnnnnnnnnnnnnnnnnnnnnnnnnnnnnnnnnnnnnnnnnnnnnnnnnnnnnnnnnnnnnnnnnnnnnnnnnnnnnnnnnnnnnnnnnnnnnnnnnnnnnnnnnnnnnnnnnnnnnnnnnnnnnnnnnnnnnnnnnnnnnnnnnnnnnnnnnnnnnnnnnnnnnnnnnnnnnnnnnnnnnnnnnnnnnnnnnnnnnnnnnnnnnnnnnnnnnnnnnnnnnnnnnnnnnnnnnnnnnnnnnnnnnnnnnnnnnnnnnnnnnnnnnnnnnnnnnnnnnnnnnnnnnnnnnnnnnnnnnnnnnnnnnnnnnnnnnnnnnnnnnnnnnnnnnnnnnnnnnnnnnnnnnnnnnnnnnnnnnnnnnnnnnnnnnnnnnnnnnnnnnnnnnnnnnnnnnnnnnnnnnnnnnnnnnnnnnnnnnnnnnnnnnnnnnnnnnnnnnnnnnnnnnnnnnnnnnnnnnnnnnnnnnnnnnnnnnnnnnnnnnnnnnnnnnnnnnnnnnnnnnnnnnnnnnnnnnnnnnnnnnnnnnnnnnnnnnnnnnnnnnnnnnnnnnnnnnnnnnnnnnnnnnnnnnnnnnnnnnnnnnnnnnnnnnnnnnnnnnnnnnnnnnnnnnnnnnnnnnnnnnnnnnnnnnncctccacccaggcactggtcctgctatctccccactcctcgtgctgccattctcctcaatgcaggccctctctattcctcacttaagcctcagcagcagccccccagccagccttcctactttagtgtcacagtatttgtctcaagaacaactctgatcatgtcaccccgttcagaaatctcaaaagtttctctgctatccaccaaagaaattctaagccatagggccaggcatggccccacctgacctttctggatggatggtgtcatttccccccaggctctggcatgcttacctggagtcgccacccttgcagcctgctcccctcgcatgcccttttcctgccatcagcgcggctttggcccagaaggcacttacagagccagccctggcagggctggggtctgtaccagctgagctcaagccctggtggctggctgctcccaggatcctcacttgtcacttttgtcatgcacagggatgttcccasgaaaaggtggaatggtggctcctggaatgacctgccagtacattgtccagttttttcccgactgccttggggattttgatgattttattttagtggagacccagtcagcccacacacttctgatccccctgcaggcccggaggccgccccccgtgctgacatgtgagtgtgcaccgtagcttcccacagattcagttaaggttggagagtccccataaggactgcctgcctctcaggttccctttgtatcagcacacagcttggctctcttgggcaggggccgtgggtcctgcagaggaaactgctagcagcttctgtagccatccacagtgtcaagccatgattgttctgcttgcttttgggttttctcagtggaggttgactcacagcaggggatgaggccaacagtccagctaaccccaccrtaggttttgctggcttatgaacatccctgaggggacctgtgccacagtgggcaaggaagaagtgcctgtgcaccctgaggagtcctaacaggtcgtcgttgtcctcgtggctgtgggggtaggagtccttagcaaagctggcttcagctgggctccctcagcgacaagcttctacagctgggcataggctggaatttgggaccgtgatcccccttacttctgccatagcccccaaggaccatgctgggtggccctggctgagcatgaatccacaatgggcactgacttctgctgctctagccaggagtgaatagagtcccatggcactattgccatgtggccagcagcagcctgggcagagcccaagtgggtgtagggtcaggacatgtccccactcatcctctctgcatagggtgctgggctgggaccagctgtcctgatctctggctgtacctcaggagaagcatgacagtagggcctattaagagtgacctgttgtttctcttgcacatgttctcctgtggctacagtgtcaccggtgttggactgtggttactgcctcattgggggagtcaagatgaccagattcatctgcaaaaatgtgggtttcagtgttggcaggttctgcattatgcccaaaacaagctggccaccactaagtttcaaggtgagtgatcacaggttgctaactggaaaaattacaagtccatcaraggaaataacccccagaggaacttactagagtatacctatgattggaaacacacagaacgcagagtgttgtaaactctctatgcaactgccacaacccgaatgagaatggatgtataagggtccagtgttgtagttctggttatgtcactaatacctgtaccatgctgggcaagcggtatcacctctcttatccttcaagccctggctcaaatgtgactgcattcactcattcagtccttctttattgtagcaaatgactgaatagttcagaggttacaaattggctgccctttggccaaattctgctggtatttgtttggcacagcacttaacattttctgagccaacatttaaaaataaggagatttggccaggcgcagtggctcacacatgtaatcccagcactttgggaggctgaggcaggcagattacctgaggtcaggggtttgagaccagcctggccaatatgatgaaacaccgtctctactaaaaataaaaaattagccgggtgtggtggcatgtgcctgtagtcccagctactcaggaggctgaggaaggagaatcacttgaacccgggaggtggaggttgcagtgagccgagatcgcaccactacactccagcctgggcgacagagtgagactccatctcaaaaaaaaaaaaaaaatggagattttatataaagttctacatttccagtcctttgaaaaactggaagatatgaagcccaggcccaggattcactgtgagcctgttggccagggctgggggcaggccctgtgtaccttgtcctgagtgcccagctccaccagtcccaagagcatcccagcactgacaccatccatcagcatgctcacaccatccatcagcactgacaccatccatcagcactgacaccatccatcagcatgctcacaccatccatcagcactgacaccatccatcagcactgacaccatccatcagcatgctcacaccatccatcagcactgacaccatccattagcactgacaccatccatcagcatgctcacaccatccatcagcactgacaccatccatcagcatgctcacaccatccatcagcactgacaccatccatcagcactgacaccatccatcagcatgctcacaccatccatcagcactgacaccatccatcagcatgctcacaccatccatcagcactgacaccatccattagcaygctcacaccattatttttctcatagcaaagatatttatttgtacccagaaaacaagggatacatctagaggatgacatttcaagatgttccaagaaagacatttcactcatttctgttactgaccagggtcttgtaggcatgggtttgtgtccctggcatgctaagtgacttcttgtgtaggcactggggctgcagctctcgtgcctcaggagcttgtagccaggggtgggtcagggttggaggcagacacatatgctagcacctgtgacactgggtgttactgtaggaaaaggacaatgtgctttgggagcccaggggagggcccactcagctcacctcctgagtgagaccttctcacacgcttgtcactttgtgtcccaatcacttggtgatggtgttccttgtacctcctgtcagtagtcagctcttcacagatgttctaagacttactctccttaaccttcagaacctcacctggtacctggtgatggctgagtaaatgcctgctgaatgaataagcctcagttttttcattaccatgtgactggatgatccttaagttccttcacattgcaaaatggatgtttgaaggagagaagtttgcaatctgaatactggcttttacaatgtcttccacactgttgggtaatctgcttttctttaaggccattgcaaccgtcggctttgttgaacaacctccttttggaatcctgccttcggtgtttgagctggccccgggacatgctatattagtggaggtaggtaatcagacattggcatgtatttcctcaactgcttgcatgcttgcatttgtctctgttttcatgactcaagtgtccagtcccatcccatatcacagccttagtgacttctgggtagacgcatattcttgcattctgtagggtgatgtcagatgtcatttgactgtcttatgagcattttcacaaagcaaatgcagatagccctagcatcacatcacaaacctgagcctygctagtccacacctttagtctgggagctacctccaccaatgtccaagctgcctccaagatcttcgcttggttcttcagtctctcttgggtcttccctcccccaggcccctctatcatctggtacctgattattgcggttattgtggctttgttctcactttcctgcttcatcctcagtttgtatagtcagcaaggcccaactccgttacgcctcatcctgaacctctgcagaagctctcagtggtctgcccctggctgtgggcgtctcctttcctaactggccccttttgctgcccccttcagctgatcacacctgcttgctggtccccagaggtgcccatgagaaatggtgatacttcctgtccctgttgcagcacactgccactctccccgactcctggtctaggagtctgactccacttcatgtgactgggtgtgggctgctacagacatgcttggcctttcacactagcctgccgagggaggcccctgacattcaggagcaaaaaccgtctggcttctgggggtggatttggcctgtgccatatcaccaggtagtgagatccagcagcccttattcttaaactcagctgcacattgcaatcacctgagagacctggaaacaacaccaaggccctatccctgaggttctgagttcactagactgggctgtggcctgggtgccggacttctaaagtcccccagggaatgctggtgtgcagccaagttggagttcaactgccacagcgactctgccatgctgtcaggaagggcttcctcttatcagctgctttctagtttcaagtgcccagtaggttctgcagccctaggatgtggctctcttattcatgtccctgctcatctgatccctgatgagaaactagttcttgggattgagactgagccagttcaggggctttgtcaggcctcatctactgctgaggggcaggttgggtctacaaggcccatacacaggccaggttctctgttctcttggtgtagtccaggacttgtcacaggctcatcgaagctttaaggaattggagctgctctgccctggacatccccctcatcccatcctcctgggatctccaagtaaaggaagagggtagcagcaggactcttaggggagcagtgagggagctggggaaggctttccccttggcatttcttgcgtattttgtttactgattgtttgggggtttgtctgttccaaaatgtattcatagttccaaataagaaatacatttgcatgattaaaaattcaaaagagagactgggtgcagtggctcaggtctgtactcctagcactttgggaggctaaagcaagagaactgctgagtctgggagttaaagaccagcctgggcaacatagtgatatactgtctgtatagacaatttttaaagtaaaaaataaattcaaaagagccaggtgtagtggctcacacctataatctcaacactttgggaggtcaagataggaggatcacttgaggccaggagtttgagtttacagtgaactgtgattgagccactgtactccagcctgggcaacagagtgaaaccctgtcctaaaaataaataaataaaaataaaacattcaaaagatgtaaacaggtaaacagtgaaatgctccctttcaccccagttcctcagccatccagaggccatacctggccagttttctgaatgcccttccagagatagtctatgcccaaataagcaactgcacatgtttttacccccatttttttcttcacacacaaagttgcccactctatactctgttctttgccttgtgttttctacttaactctatatcttagagatcattctcatatgttttagtaactgcatagtatcctactgtgtgaatggaccataatttagttcagcagtctcctgctgattgacctgaagatttttttctgatctctggctacaaattatgtataaattatacatacatcactctgtccaaggatgagtctacccacaggatacagtccttgaagtagatttgctgatccagcgctttgtgccctcataattgtaaggcatgttgccaaaatccttaccatgcggattgtaccaatttatactttcaacagcagtatgtaagggtgtctgtttctttacacctttgccaatacagtatattataaaacttagaaactgttcatggacgttgtatataaaaacatatacaaaaatagagagaataatgatcatccatgtattcattactcatcttcaacaattatcaacccttggccaatcttattacatctatacccctccatttccctcagacattccccaccctgctcttctagattattttgaacaaaatcaagacaaaatatcattgcatttaacagaatgaaactagacctgtgtctctcaccatatacaaaaattaacttattaataaaatggattaaagatttaaatataagacttgaaaatgtaaaactactagaagaaaatggtggaaatctgtatgacattggtctgggcaatgattttttgcatatgatctcaaaagcactggcaacaaaagtgaaaataggggccaggtgcggtggctcagcactttgggaggctgaggtgggaggatttcttgagcccaggagtttgagaccagcctgggcaacataaggagaccccatctctataaaaaatttaaaaaactagccgggtgtggtggcatgcacctgtggtctcagctacttgggagctgaagtgggaggatcgcttgagctcaggtgttagaggctgcagtgagaaatgatcacaccactgcactccagcctgggtgacagagcaagatcctgtctcaaaaagcaaaacaaacaaatgaacaaacaaaaaaacaaacatgaatagacaaatgggattacctcaaacgaaaaagcttctacacagcaaaggaaacaagcaacagagtgaagagacaatctgtgaaatgggagaaaatactatcacatctgaggaggggttaactccaaaaatatataaggaacttaatgcaatagcaagaaaacaacctgctttttttaatgggccaaagaccaattagacattcctcaaaagaagacatataaatggtcaatgagtatatgaaaacattctcaacatcattaatcatcagggaaatgcaaattaaaaccacagtgagctcccacctgacacccgttagaatggctattatcagaaagatgaaaggtaagtgttggcgaggatgtagagaaaagggaatccttgccygctgttgatgggaatgtaaattactacagccgttatggaaaataatatggagttccttcaaaaaattaaaaatggaactaccawatgattcagcagtcctactactaggtatatatacaaatgaaatctggctggagtgcagtgatgtgatcattgctcactgcatcctctaactcctgggctcaaaagataccatttaaaagatatccgcactcttatgttcattgtgtcattcacaataggcaagctatggaatcaccctaagtgtctattgatagaggataaagaaaatgaggtatatgtacacaatggaataacagccctgcaaaagaaggaaatcctgtcgtttgcgacaacatggataagtctggaggacattatgtgaagccaagcacagaaagacaaatactgcatgattgcacctatatgttggaccttaaataattgaactcataaaagcagagaatagaatggtgattaccagggttgggggttgggggaattggggaaaaaatagaaaacaaatcattgcatttatgacagctcaccttctgctctttgccagtatgagtggtaaaaagccgttcttctggatggttttcattgacatttctcttattatgaatgagggtatgtgttgtcattcatttaagggccatttgtattttggtctctgtgaactttatcttcatatccttttagcttgctccctgcttttctctggggtggagctagggtaaaacacttggccttaggagtaaggtgggaggtggcagggaggggaacagagagtgaagagcaaagaaaggggtgtgtgtccgagaggaggagggtgggaggcggggagggtggaagccctttaatgggaggtaacggaacaacccttctctcccccaggtcttgttttccccaaagagcctaggaaaggcagagcagaccttcatcatcatgtgcgacaactgccagataaaggagctggtgaccataggtgggcttgagtgtactcccaggggcaaggctggagaggctgccccagctccaggggccactgaccrcagtagcattagcggcagcccacctgtttcctgtgtgtgtcaggagcgcacattaagaatgctgcagcctccaggtgccagagtctcgtttcaggcccattgctctggtctgactttggagaccaagccagtgtggcctccaagacagtccaaggagccttctagcaagagacagctggaaacctggggtgaaatctttcattgtttcattttgaaactcactttgatctcctttggggaattgccagtggctcacacataaacagccagagccacctctagatttctgcagggttagaagaggcatcctaggaatcgtgacaagatgcccctggccgcccctccctctcttcctccctccctccttccttccctcttttcctccttccctccctccttttctcccttcttctctcccttcctcattaattgagtgtctgctatatgctaggttctcaaaatcacctccttttggtcttcaaagatgtgagaacattaacctgtgggcggatatcccccttttccctccagtgtgagcttgcaggaatcatggtcaaggccagctgcatgtggatggcggcatgggtcctgcagcagccttggcctgatttcagccctagtgagccttcactgacttcacttactctactttggcaggaattgggcagctgattgctttggatctgatctatatttctggtgaaaaaagccagccagaccctggagagctcacagacttaacagcccagcacttcatacgatttgagcctgaaaaccttcggtccacggctaggaagcagctgattattagaaatgctacgtgggtaacccctgtgtgtgccccaatacccaacccttcttcttgcttacctggscctcagtcccagtgagacaggaggtccttccaagggcctggggaagactgggcacagaatggatatccaaattcaattgagggatccagattgacccagtctatcatggaaaccagtagccactcttggctacttaaatttaaatcaattaacattaaattaagagctcacttcctcagtggcaccagccacatgtagctagtggctgtcatattggacagtgcagatctgtaagatctccatcccttcaggaagttatgttagatagtgctgccccaaatcatcctggaccatccctagccagccccagctttccagagaggacataccwtgcctgtgtaggggaagccatccaagtcccaggggcagacagactatagtctgtgggtttcattctccttgccatttatttcctgacccgcctctgagcactaccatgaaaccaggacaaatctcagggagcctcccaaccagggctgccctggggaccccagacattacacaggactctgtcatctctcccccgggatagctgcaagtcctgcccctcctatgctatggagttgccactgttcctgttggcagccagtaggcacatatctttctggacacagctctcctgggagcccataacaggaaaggcagagggcaggaatggggttgatgtggcaaaccttggaaactcatgtggtgagagacactgcagaagatcttcccaatattagggggtgatgtatagcytcttccactttaatgattggaacatgagttcctgacttaccatgtcccctgagtcatggtaggtccaacctccagctgccatggctgggaagcgaggagctctctwacatagtctctgtcttagactccctcgcccacttgctgcccctcctccattggagggtcctccattggaagggtgtgaaggctgacctggtttcttcctgttcctaggtcctttcctgctccctcttggagcagggcagggaggcatggggtggagggacctggtcccagcagaactgggacatggccttggatgcgttgcccccacaggcacgtggagctggccttctactggcagatcrtgaagcccaacctgcagcccctcatgcctggagaaaccttcagcatggacagcatcaagtgctaccccgacaagragactgccttctccatcatgcccagaaagggrgttctaagcccccacacagaccacgagttcatcctgagcttttctcctcatgaggttcagatggtgtcatctcagtagccacacatggttggatcatgtatttagaccccccacctgtgttcctcaatcacactgaagccacagctgggcccaccgaggtgctatcctgcccaggccagcacttggctgagttgggttggagtacacacctggtgtgcagggtgaagcagctcattttgtctggtcctgatcccagactcaccccatctgcagcaagacccttggctggcttcctccgctctgggtgtctcccacatgtctactatggcaaaaaacattaccatccccacccataccacagcatcccctagagagagtgaggtgcagggacccgagggccaggttagcacagcgctggccccagcatggagggaagccctgtgggccacggtaggctagaagggaattcgagctgggcatgaaaaggatgctccggggccattgttagtgggtttggggctgaratgagtgatcctgcctctggtcccagcatccagctgcctcgttgtctatcctgggagggtgtggtgcttcggacacgttgaggggctttgtcagcatcaggaaggcctttgcttcttgcacccaggcccagctgagacaggcccctgagtcctggctcatgttctggcagcaacttcacttttcctaaggaggggaggaggcagcagggaagcaaccctgggttttcagaaggtccttctgatggctaggctaaggggaggaagaattcctgccatgccccagccttctccaggacaacctgctggaacgcagtggtgttttcagggcactgwgtttgccttgcagmtgagggattttcacagtgtgctccagatggtgmtagaggaagtcccagarcctgtaaggtgagagaaactgggccctggatgagaagtgggcagctgggccttcccccaccttggrggttctcctggggaaggtatcaggtgagggggagtgggcagcctggtccccgcaggctttggggagtgagagcattttttttgccttgccctggcaacccagccctgcartgggctgagcacactaagytcgctaaactcactatgaggccaccccaggaactttggagytgtgccccaggcccattgttgctcttggggagccaaactggggggccctcggtggtggtgagtgtggaggaaaagctttgcccccatggtgtaaaccttcaggctggggctccaggcagcccagtgcagagatcccaggctggagggctgcagatggtccctggaggcagcagggcaatgccccgtcccagtccttaygctaaaccactgtcacagccatcggtgcttatcacctttcaggcactggctaatgcctttgatttagggggctcaggagctgtgggttaggcagtgttttttttttcacaaggccaaacgtgggacagaggcagggacactctaggatgtgcttccaggtgtgccrgctcctagctaacggtgggtttgtgtttagttcagaagcggagagcctggggcactcctcctactctgtggatgatgtgattgtcctggaaatcgaggtgaaaggctcagtagaacctttccaggttctcttagagccatatgccctcatcatcccaggggagaactacattgggataaatgtgaagaaggcttttaaggtaggtcattgtctctcccctgcctaggctggccgaggcagtgttgacatgagtgcaagtgtagggaggatatagcaggaggggcagatggtagcagccactgcatggaggctgaggccattcccagggctttgaacccaacttgacttgcacagatgcataggccaggcatggctgtcttcttttatcagcctcccagaatcctctgaaagttagggctatggaacctattcccgtccttggcagagtatgtcagccacaggcactgcagtgtggagggagggtgcttttgkgttgggaggcccatggctttgggtggccaggaattagccgggaagtgtcatatggactctttacgagcccacaatcctacagtccttcagcaggtacagaattgacatgaaggggcagtaaatgggcagcctggtctcgggtgtctttcagatgtggaacaacagcaagtcacccatcagatacctgtgggggaagatcagcgactgccacatcattgaagtggagcccggcacaggggtcataggtaccttggggactgcaggaggggttgtgacctgcctggggctggctcaggaagaaatcttcagagttaaaggggcttatgcagggctcttggtgtcctgtgactgctctggctgaggcctgggatgtgagggagatgagaagtctgtgcaagccagatgtctgggcccaatcataggaggaaactgcctctgcttctcctctccacctctccctttccctctcttctcagagcccagtgaggtcggggattttgagttgaactttactgggggtgtccctggccccacaagccaggacctgctgtgtgaaatcgaagactcgccctcgccagtggtgttacacattgaggctgtctttaaggtgctgcaggtggagctgggcagtggggtgggcccagagaggtggcagggctgggacactgagccatccccaggtggcccagtgacaggccctctgggtgtctcaggggcctgccctcatcatcaacgtctcagcccttcagtttggtctgctccgcctggggcagaaagccacaaactccatccagatccggaacgtcagccagctcccagccacatggcgcatgaaggagagcccagtctccctccaggaaaggcctgaggatgtaagtcaggcactgctggttcctctggtgcccccacaatgagccsgtttagcttgccctggtgaaacttgccctggtgtgtttagatcagagcttcgaggctggtggaggaaaagcctgcctggtgacttcggcctggcggtgcctcctgttctccccatcgctgaggcagctcagctcctctctacagccaaatgtaatcccccatcagcatttcctgtgcctttcactaccatcggatttagaaatagggcgtgggtttctccctcagagccgtctgaggcaggaagagatgggcagctaggttgggcaggaagcctccaaggctgctgctgctccagccgcattcccacctcctccccactctctggaaggttcagatcctcccagggatctgctaccagatggcatctggtcacaggctggcagcccaaacccaaggctccaaaaagaaaattcaagatttatttcgactcaaatggcacttttcactataaaagtaggaaaaaaagcagctaagtattatcataatcatatttaaatgcagtgggcgatctggaacaagacaaagtcacacaaatcaccagctactcgcaaaatgcccgcagtgagtcgtacatcaccgccccttcaccacggcatggctgcagctccctggtggactgcacatgtgagaccctggccatgtctggtgaccacactctccttctggctgcttcccaccgaggtccccatcctgcttgcccacttgccctccgagtcagaacaccgcacacttttccttctgtattaaggagcccagggaagacaatccaagccatgcatataccttattttgctagtgtgcattccctttctgcaggaaagtgggctttcctttctattccagggaggcctcgctcctttacctgatggcctatagctgggcactctgaaacctagaagttatgacagtgtgcatcaaattgccaacgccattgccaagtacctgttacacaggcttggagttcaatacttyccctcccagggctcatccatctcccaccatggatcctgaaaccacaaaagactaaggctggcgcttgggctgggatggggctgggggcagggtggcatcagtatctttagtgtccacattatgtttagccaagaaccctttcttcaaatgaaactttatgcaaaagcccagaacatagaataaactgtgactgctccagccacccagagacccccttgttaggcacctctgccccatcctgcttctccccacattccagtcccctgcacttctagggatttcctgggattttccagagcacagttagaakcttacagacctcagccagcctcctcatttgatagaggagagactggaaggggcagggcttccccaaggtcatacggctgatgggtagcggcatcacatctgatccctcttgtctarttttcagtctgtggtgttctcccactgtgaagaataactatgttttataatggaaataattgccaatgttatagtattgtaagataattccctctctacagttctctgcactctattcttttgagctctcaaaaataatgttgggatwtggggtttgttagatggtctcagattaggggacgcagagctgctgaaacccaaccmtagactacagccacccccagagctccaagggagatgcacatgagcaacaaagacaaaataaagcaaagtggctccttacagggacaagtgtcctctstcagtcagggcaggaagaatggaatgtaaagagccctccccagatggggacactwttcttcctgctckttcccttcccctctccctttgtgtgtgtgcctggcatgggaggaggagcagaccgggggcggggtgggggtgggggcgggtaaatgaggctgagcctgcagtaggggacagaaggaaggggtgggggaaagaccacgtgggtgcaaaggagaaatctggccacaatagactctcccctcccctaatctagtgacctggtggctttcctcagttgaagctgctcagagggctacccccctagtttggctcaccagctctcctctggctccccagctctccccattttccctggagcacctccctccgccttctrtctctcagatctgggccagggcatggggccctctgacttatgtattcctttacttggagactcagtttctatgctcttaatcctgagactcttgtggctgtggtcccccacctgcttgcctgtttctggatcccagatggctcttggaagagctggggcagcttaggagtgactttggttaggcatggccagcccccagttcctctgcaattccaagtgtcctcagtgctcatcctcctgagtgttctccggggcaggtgtctcccttcgacattgagccttcgagtggccagcttcactctctgggggagtgcagggtggacatcaccttggaggccctgcactgccagcatctggagaccgtcctggagctggaggtggaaaatggtgcctggaggtaagggtgccgtgggaagagccaytacaacaaactatgcatattcgtgatgtatttatctatattatatatttatctagagatgttctggatttaaaactattgaatccagaaaattagtattctataaaatttgtaaattacagaaaagaaactcaaaatgacgcataatccattccctagggatgatccactgataatattatgtatatatctttctagggtgtgtgtattaaagagatgtaaattagtataactactttcgaaactacgttagcatcagctagtgtttgcccttctgagtatactcccagggaaatccttatacatgcacagtgggagatgtgtgctcatgttggaatgctcagactggactgttcctacaggaaaaactagaaaaaaccactgtctgtcaacaggagaatggacatttaaaaagtgtgacatatttaaataagcacataccattgtattctgggaggaacatgctagaggtttcaaaggtattggtagtattcctttttttcttcttcattctccctccgctcccccacttccctccttttctttctttctagtggaaaacttctcayatatataaaaacagaaagaatagtataataaacctccacatactctttcctcccttcaataattgtcaactcactgcaagtactgtttcatccatatcccctatctccttctccccactccttcccaaattattttcaaataaaatattcattttcctgctgggcatggtggctcacgcctgtaatcccagcactttgggaggccgaggcaggcaaatcacgaggtcaggagttcgagatcagcctggcaacatggtgaaaccccgtctttactaaaaatacaaaaattagccaggtatggtggtgctcgcctgtagtcccagctacttaggaggctgaggcagaagaatcacttgaatcctggaggcagaggttgcagtgaatgaatatatatatatattcattttcttaagctggctggtgataatattttgtttctaaagttgtgtggaggtagtacatagatgttgttttattattcgttaaactatatatatgtttaaactgtatatatgttttatactcatttttgcatatatttggtgtttcattgtaaaaacatttaaatgctcatttaaatctctgtggatgctcttgaattatcctccaaaaagactgtgtcattttatacttctgcctacagtgtgtgagactagccattaccccacactytcaccatgacaaatgttgttggactttgtatacttgaccatctgacagttgttcaaatgtcccctcctgtgataacaaatacaggtctaggtatgagtctttgcattggtccttcagggcaatttgcgggcattagatgtgaaggctaagtctgcctgcagctcaggggaagggctttctattaagtctgtgcttatttcctttccttttctgtctctgttctttctcctgaaaggaccttgtattatcagaatgtttacagtagcaggtgatggaaacacagacattaccaacttaggcaaaaaagaggaagcattggctcacgtaactgggcattcccaccttgctgaatccaagggcccaacacttttccctttgtctggtcttctgcttcctctctttctctaccctctttcccccttctctacctccatcccagccccaacccatctactgctctttttttgtgggcccttctctcccctattgacaagggcccttcgcactctgccttggggagaggccacttagagctccaggctcacacactcccaccttaacaatctctgagagccaatctggctctttgcagagataggccctgattgctcttgctcttgtgtgggtcatgtacccgccccttcccctgctgggtgacagggaggatctgtctccagaagaggcaatcatgtttcgaaatttcaagctttgttgttcttgcgtctttccttttctatagtaatctgttatagtcttatcaatgcaacagcctctcagattcccccaagaaaatgaatttctgttttcccagatgttggagttcttctttactttttgagttttcttctgcttctagtaatctttgcctgtccagtcctgtttttgaatggaggaggaagttgatttgcataaggagctggtgttgtaagtttcttctgagtaaaagggggtagatgtggagagcacccctattctaagggatgaagtacatgtgagtcaccaccctcagagcacacagctagcctgaatccatcagagaaagggacctttggggaaaacagccctaaacaaacagtggagaaaacccatactgggcagctacacaaatcaattcgtgccttcattcataaataagaatgaaggaatagcatctttctggttgtttcctcctcatgacagttgagaggtccagtgttactgcaggctctgccctggyctctctccagcgtgatacccacagtcttcagtgggggcaaatactgtggcagcccagtctttttcttaattttcaattttaatttttattatttgtacaaatttatggggtacatgtgcaattgtgttaygtgcgtagattatatagtggtcaagtcagggctttagggtatccatcacccaaatagcatacattgtactcatgaactaatttctcatcacccatttccctcctatgccctcacccttccgagtctccgttgtctatcattccaatctctatgtccatatgtacacgtttttagcacccacttgagtgagatcatgtgatatttgacttctgtgcctggggcagcccactcttccatgtgttgctctgagctctggggctggagccctgacctggctaagccaatggatcttcagcagtgctttgctcagctcccccgccctttgatgccctcattccatcattaaggattgcattgcacgtaacctgtgcagggatttcaagcagcagttttgttctcctctgttttatcagttaacctgatcacattatttctttctcctattttcttttccttgtttgcataacattttatttgctttattatcttttacttcaaaattttcacaaatagggcatttgctagatattacatttctttgcattcacaatttgtctgtttggcacaaagctagctttctgcctgtgtcagctttgaatgtgccttcctcactaagcttaatcattttttagcttaatcattttgatttaaagtgagatacgtacgactcttcttttcacttgaagacttagaggctattgtagggttatcagttggtctaatttcaatattgytgtgtctcaaggaatagggaggcctgaggagagggagagagacggaaatgaccagtaagtagagcagtcaaaatgcacacagcatttaccagttgagcccattatcgtatatgattgctgtttatggcaccccaaaacaattacagtagtaacatcaaagatcactaatcacaggttaccataacagctatagcaaaaaagtttgcaagacatgacacagagacatgaaatgaggacatgcaattggaaaaatgacattgataggcttgctcaatgcagcgttgtcacaaaccttcgatttgtaaaaatcacagtatctgtgaagtacaataaagcagagcataataacatgaggtatgtttgtaactgaatttcttatataggtcaatttagacttttttcttggccaggcacagtggctcatgactgtaatcccagcactttgggaggctgaggtggacggatcacctaaggtcaggagtacgagaccaggctagccaacatggtgaaaccccatttctactaaaaatacaaaaattagccgggtgtggtggtgcacacctgtaatcccagctactcgggaggctgaggcatgagaatagcttgaacgtgggaggcagaggctgcagtgagccgagattgtgccactgcactccagcctgggcaacagagcaagactctgtatgccccaccccatccccccaaaaaaagatttttttttttttctcagttttggtagtttgcatcactctaggaatttaggaatttgtccattttatctgtgatgtaatttgttggtacatagttgttagtggtattctctgataattatttttatttctgtatgatcagtagtgatgtccccactttcattcctgatttctctaatttgaatcttcagcaaatttttcttggtcagtctagtctagctaaaggtttatcaatgttggtgatattttcaaagaaccagcttttgcttttgttgattttctgtaatgtttttctattttctatttcatttatctctgctttctagtctttattatttctgtccttccacttgctttgggtttagtttgctcttctctttctagtttcttaaggtaaaagctgaggtttttgatttgcaatctttcttttttgtttgtttaaagaaaattgtatttacaaatataaattttcctctaaccactcccttagttgcatcctataacttttcatatatcatgttttcattttcattgatataaaagtattttctaatttttcttgtggtttcttatttgacttgtttatgaatgtgttatttaatttgcacatattttgtttcacaaatttctttctgttgttgakttctaayttgattctattgttgttggagaacccactttatataattatagtcgtttaaaacttattgagacttgttttatgggctattctggagaatattccttgtgcactcgagaaaaataatgtattctgctgttattgtgtagagtgttgcckgttctgtttggtttatagtgctgtttaaatcttctatttcaatgtttatcttctggttagttgtttttccattattaaaaatgggctgttgaagtctccaaccattattgttgaattgctgatctctccttcaattctgtcagtttttgcttcatgtattttgtggtgctgttgttagatacatacatgttkataatkgttatatctttctaatttatctttttataattataaaatatccttcattgtctctaataaccattttkgtcttaaagcctattttatctaacattcatatatctcctggagctctcttttgggtactgtttgcatgatatatatttttccatcctttttctttgaaackatttgtgtctttgaatctaaagtgtctcttgtaaacagcatatacttggatcatttttttaaaatccattttgctaatctctgccttttgattggattgtttaatccctttatatttaatgtaaatactgataaagtagaacttcatctcccgttttgctatttgttttctgtatgtattttgtgtttcctgcattccttgtgtttcctgcattcctccattattgccttcttctttgttagataggtagtttctagtatgccattttaatttccatgtttcttttactttttaaaaagttattttcttactggttgtccagggctttatagtatatcttaatttcaaaacagtctggtttagattaacaccaacttaatttcagtagtctgaaatgttactgtaatatagctcagctctattctctccccttcctttgtactattattgtcatacaaattacatatttatacattataggtttatcaagacagttttacagttattggtttgtatagttgccctttaaatcagatagaaaagtaagcaaaaatacatttattctgtctttgtatttacatatgaatttatcttgatatggttatatcagtcaaggcttaatatttatttcttaataacctattaagacatttattacaaagaatcaggttacacaactatagggactagctaggcaagcctaaaatctgtagggcaggttttcaggaagggcatgctggcatttttggggacaagatgaagatgttataaacacatggaatttctttgtctgggtaagcccatttctgcttttaagaccttttagtggccaggcatggtagctcacctttgtaatcccagcactttgggaggccaaggtgggaggatcacctgaggtcaggagtttgagaccaacctggccaacacactgaaacctcatctctactaaaaatacaaaaacttgcctggcatggtggcacatgcctgtagtcccagctactcgggaggctgaggcagtagaatttcttgaacccaggaggcagaggttgcagtgagccaagatcgcaccactgcaccccagcctgggtgacagagtgagactctatctcaaaaaaaaaaaaaaaaaaaaaaaagacctttcaactaattgaattaggcccatctagattatctaggataatctcctttacttaaacttaactgattatgaacattaatcatacctacaaaataccttcagccgttcagacatgtaaagagcttgcccatcaagctcctgctctcacaacaaggaaagactgaacaaactgaaacaatgatttttcttagatctatcagagagttgaggttgcaggacaagtggccaccccaaaagctggagatataggcaaatactgagaatacagatcagtttacctgaagcagaagaacacttaaatggtagtttcaacaaattcctggtggctaagtgtaggctagcttaagagtttaaaaatcctgggggctcagtaggttctcatggtgaaaactggaaaaaaaattctctcttgtttagccagggtgggatggggaggggaagtaaccattctgaaatacgcccagaggaaaagtgaaataagccactttgaaataagcccagagtgttcttgcaacaatttctcttacacccgagatttctactttttgagcaattataaatggtactatattttaaatttcgatttccacatgtttgttgttagtatataaaaatgtgattcatttttgtatattgatcttatatcctgaaactttgccgaacccactcattaattctagagtttctaaaaatatagataccttgggattttctacatagactgcatgtcatctagaaatagggacagctttacttcttcttttctaatcagtatgccttttgtttcctcgtgttccagctaccttcctgtgtatgctgaggtacagaagccccatgtgtacctacagagcagccaggtggaggttagaaatctctacctgggtgtgcccacgaagacaaccatcacacttatcaatggcacgctcctgcctacccagttccactggggcaaggtgagtgagcccacagcatcaggcagcagtctgcagccctcagccacagaggcccacatagaggggggcattgtcccccaaatatcctcacagaacagagatactcagcctccctcccacagcctgtcccttgctcgtagtgtgcataaaagctcctcaaaggagcagcatatctggtccagctttttcttgccctgcctctagggaattccagttccctgaccaagaaggagtttctggtgaacatagctagagcctcccagccaacatagcccatgactggcccaggtagctgttggagcccagttgtggtgctgctcctgcccgtggctgactggggagctctgagtgtcatgggayataaggmcacatccatgtgcaccagaagcatctgccctctgctccccatccctcggggccttcaagggcagtttcttttgtccagataacctcccaacaagtggtaaagtccatccagggttggggaggagaggagaagggacccgtggtttatccccagaagtgagcacccagccctgtcrgttttgctgtgggccccagtctgccagtctccagcattgcatgcagcagtgctgagcactctctggatactggtccattctgggagcccagtaagtgacaacaggctcactcatgtgtctgccagctcctcggacaccaagcagaattctgcatggtgacagtctcccccaawcatggcctgctgggcccaagtgaggagtgccagctcaagttggagttgactgctcatacccaggtgagtaaggcaatgtagggcctgagtgaccgggaaggcaccctgccaaccatacgcacctgtgccaccagggaggccctagcttaggccacattgctggttcttgtgggtggggaagagatttcttgcatttgggtctggggtccccattcctgctgggtctgctccctagggacacatggtcagagagcctggagtaggcctggggatgtsccctgagacccactggccatgcctggcctttggcatgagtttttgccctccccaggccattctctgtggccgcaggtgggcccagctttctgatttgcccagagatccagagcagagctgttgctcacagcaggcactgtgccaggtactacccagggaggctaactggtacctaggtttcccgctggaggccaccagggtggaatatgctcagtcatagggccgttcctagctgtccctttgtggttcttgtgggaaaagaaacttcctccttacagagacttgcaaactcaggtctcagctccccctggcaaatatggggatggccggcctgagctctgggacgacagacaggcaggcccaggtgtggaacagatcttgctcagggagggtttgatttctagggtagcagcttcatcagaggaagtgcgcagcttctccagaggccctctctgaggggtctcccttcacgtgggcatgcccagatatttggggcagactcagacagccataaggcctgaggaaagggccaggcttcctggggctgagggcgggtcgactggctgggctcactggagggactggagatgagcctggccagaggtcaaggctccacagcaatcccctgtgctgcggaagaccatctgggctcatcttcagaggccccaggcctggtctgacccctggatgggctttcttataggaagagctgacccatctggccctcccttgtcacgtgtcaggcatgaagaagccactggttctaggcatttctgggaagccccagggactgcaagtggccattaccatctctaaggagagctctgattgcaggtgagcccagggttggtggtctgggggtggcagtggactgaggaatgaggcagccgcgcccaggaccagcacggcactgtggtatcagtctgcgcccatctgattcctgcaggcaggaaaacgccacagtgttattgcggccactcaccactcctgtggggacagctccctttaccccatccctgccctctgtgtggtctccccacacacacttggaggygtggtgccctggcaggcaggagatggcaggggacagggctgtaggtaccctgggcttgcccacatgaggcccagcaactgggagccatgccagcatgccgctggccagggacggtttgtgcagagtttgaggcctctctcagcatcatgggtgggcaggaaaggtgggtctgtggttggcagctcaatgaaacaggagtctgaggatgaagcctggtgtctgggcagcttctgcatgcccacccaagatggctccctgggcagggccaagggtggtgtgttacatagtaccaatgggcacaggacagtgttttcagcacagagcagtggccaggccacccaaaggagctccgcctggactttggctcagcggtgccactgaggacccgtgtgactcgccagctcattctcaccaatcgctccccaatacggacccgtttctccctcaagtttgagtayttcgggagcccccaaaacagcctgagcaaaaagaccagcctgtaagtcttgcttctttcacttcccagggcagatgaagctggatggggtgtaccctgttgagcctctgtgtggcttaggtggccagtggctggtcggtgtgagagatgggagtgtgtgtttttacaggtagacatggggacaggcagagaggaaatggctcctgctgtccacctcccgggccctgagtgggcgtgtgggagaggctgggattgcggccccttttcctcagcctggcctgctggagtggaggcttctgatggaccaggcagatgggcctgtagtgagggagaggttactgtagacagaaggaactgtgcaggccaaagggtgggaggaatagttcaggagtagggagtcttcagggaccactgatagcgtgcctgggctgacatgtggagagtgagatggggtgccccatagatcagacagtgatcagcaaagctactatgtgtaaggacagaggcaagatctagagtgctgcttacacagacacacacacacacacacacgtacatatacacacacatgcatacacacatacatatacacatgcatacacacatacacacatgcatatacacatatacatacacatgcatagacacaaatatacacacatacacatatgtatacacatatacacatgcacacacacatatacataaacatacatacatatgcacatacatacatgctcatatacacacacacccacatacacacatacacataggtgtgccagaaccagctagcactggttcaggagaactgattgttaaatattcaggaattttgcaaatctctaacttgaaatcaaacattataatttaggactttttttttctggaatctccactgtgtggacacctcaccacctaatctagtgaagcaagagggcccaacttagaaaccacggctatgggtggaaggcgacccatgaacagtttataaggcattaactttctattgtggaaagctagtgtgtacccaatgctggacagatgtcagcaggaaaaactggaaatgggcctgttgcagaattctgggctagagatggggagtctgggctgggtttgtgtccaggagtaaccatggcacagagcctgtgggcagggagtcctgcttcagagcccgcctgggtttctggggaggtaatccctgcagctggcgggtggyccgcagctggggatgtttgaatggtaggggtacagtgggagcaaagaccagagaaggaggtaaaggaaagaactgaccagctctcccctgggaagagcaggcagggccaccttcctctgctgggcacctggtagaatgctggttgctctagaacctggctcaggtcttgggacaggcttgtctgacttgatactatttctgtgtctccacttgtaaagtcccaacatgcctcctgccctgctaaagacagtgcggatgcaagagcacctggccaagcgagagcagctgggtaagcgccaccagggtggggcttcggggcccaggccacggmcagagccacagccttctgtggatgtgggctggcagctgccagggagcgggaccaggaccagagactgctctcagatggscaaggcgctccacctgacaatgcctcttcctgttgaggscacttcccttctagggcacaggctcatgcacagggcctggactccatttgggatgggagtggctcatgagggagggctcccawggggacccagcctctcagggagtagagaggctgaccacgcaggaccctgagtagcttgcctctggattccaggctcccaggaggagggcacatgtagcctgaccaaggagaggctggagggtggcttatcggggacagtgctttgctcacacacgagggtttggacctcactcccaaccccaggcccgtgaatcccccacagtcgcggttctttcccagattttatggagagcatgctatcccacgggaaaggagctgctttcttccctcacttttcccagggcatgctggggccctaccagcagctgtgcattgacatcacaggctgtgccaacatgtggggcgagtactgggacaacctcatctgcacggtaagggtacacaagagggcagtggcctggggggtggagagtctgcccagccytcgccttcagcytctctcccctccaacacctggccytcagactctcaaacctcaccaggttgaaacgcgatgcccaccgagcttgggatgggcattcgtgtctgaggcagcctctggggttctggctgaggcatttcaggcaggaggggtcctcataagcagtagaactttccacaccttttcccaggagatgcagggctggggccatatcgaggagggaagaggagacagtaggctgctgcctgggccaggacccaagacytggagtagggagtgtggagtggagggacagtagcagcctcccagagccaggtccttgccccgcccttggtggggctcacccaggggtccatttaattgctccagcactcagcataaatggagtatctactgtgtgtgggttcctgtgtgggccgctgtagtgtsgaggatacagggatgaataaggtaaccagcaaggcacccctagtttagtctggagggatgaaacctgcatacgttatcctaccgttaagttgttaaatagaagattttcatgaactatttagtaaattgaacagattaattatagtagatatttgctttaaattgtgtgtgttctgtatgacaaagaattgatcatgttaatataaaaagggatcttaagtaacaggaagctggggaagagtatcccaagtgggcaaggtttgaataaacaactccaagaaagacaaatacagacagacggccaataaacatattaaaatctgtcaccaccactgataattaaagaaatgcaaaataaaagagccacaaaatactggttttgacacattagcgaggtttaaaagttgttggtgaagatacaggggaaagggtgctttgagcccccttctccacgtctgtcagtagaggagtggatacagacattgggccacatccctaagggaattctgcacagcctgttatatgatgctgtaaactctttattagtaaaaattaatcctatattgttcgctgggtgcagtggttcatgcctgtaatcccagcacttagggaggctgaggtgggtggatgtcttgagctcaggagtttgagagcagcctgggcaacatggcaaaaccccttctctacaaaaaatacaaaaattagctgggcgtgatggcrtatgtctctggtcccagctattcaggaggctgaggtgggaggatcacttgtgcccaggagttagaggttgcagtcagccgagatcatgccactgcactccagcctgagcgatggagcaagactctgtctcaataataataataataataataatcctatattgttaaaagaaaagattattaaaggcatgtgcagcatgctccccatttatatctgggtcttcacaaaagaagtgtagacacttgtacactgaaatgctaacagtaagtcatgctgcagaggtaggattggaggtgattatcacactcttatattttctaaaaataagatttattacttttgattagcagagaaaagtaataaagttcttttcatttaaaagacagaaatttgatcaaagggactaccagaggccgaagagcctcaggcttgccaggtgcagtggctcacacttgtagatccaacactttaggaggctgaggcaggaagattgcttgaggccagtagtttgagaccagcctgagcaacatagtaagaccctgtgtctactaaaaaaaaaaaaaaaaaaaaaagtcctcaggctgggagctttgtgcaggctgcctggctgggagggagagtggagatggcgggaagtgggagagaagacagagtggtacacagtgaggctgggaccaaactgtggggcccctgggctggctggacaagtggaggccttgcccagaggggatgtggtcgcaaccggtgacaggagtgacaaagggctggggtgtgtttgcaggtgggagacctgctgccggaagtcatcccagtgcacatggcagcggtgggctgccccatcagctccctgaggaccacctcctacactattgaccaggcccagaaggaaccagccatgaggtgctccatgctcagcctgagcctctgctccctggtagcccctgaaaccctccggcctccgggctgggctgcccacgttggcttgttattctccagctggcctagggccattggtgccacctacaagaaggttccaggccagggtttccctgggggaaggtggcctcaggggacgtggccaccacctggacatctctgagggattttgtggggcagaagtggcgagtagtcagtgtggtccgaggtcagcaccagccctggggcccctggcacagttgaactggaatcagcatagtctgctcagggcaggtgggtgggttgccagggcacagggcagccccagagcccagctcacctggtgccgcctggggaargcaccagccccaggtctcattaattctcgagtgaggccagaccactgtggtatttccccctgcctgagcccccagtcccagccctcctccctacctgcaaggtgtacgctggctgtggctgtactgagtccagtctgtccccctccaggttcggcacccaggtctccggaggagacacagttacccgaacccttygcctgaataactccagcccctgtggtaagacatgcatgagagaagtcagtgttcttgccacaggctgtgccttgtggtgagccaggctgggagggaaggtgggagggaagccgatggcccatgaacaggacccaggtgtccagggggcctgtggttacggaagtgtggatgggcccacagatgccctgctctcatcagggttgctgtttggaggaacagacaataagaggggatccctttctcattcctccagccggcaggacctgacctgcctgagagctgctggggatacagcggggacaggacagcagggtttctgccgaggggcttccctcctgatgggtgggacagatgtgactgtggactgcagtgtgtggagtgtgtggcatacaactgaagggaaggccggagtgctgggggaacgtgttgaagggccaggctcccctgtggaggggaggcagagtgtaggctgagtctaagaggaagggtaagccgatgtgggccaggggagcatgtgggggcaaagagtgctctgggcctgagaaagggttaggagaggaagctggtgacactgaagagggggccctggccatgcctgcccctgaggagagctgcgagcaggactgaaggcaggaggggaggggaagatgggttcgatgcaggcagatgtctaggtttgggacaggactttggggacttctcagcttgggggcttctgggagatgaggtggggctaccggctgggtgtgggaaggcagatggaggtgtcagaggagggcagggacagcttgacattgtcatggtgcaggctggagagagagcaatggggagccccagcttaggttggggacagattgatgggggtggcaatctgttcagctgggggacttcccccagtggtactcagagggacggcacagttcagttctttcagggttaggtgttgccaggtgggtgcaaagggagatacgaggatgctggcaagacagaggtggacatggcggcccccaaagactagtctgcctggggaaggacgtgaaagckgacataggctgatggatagatggggagaaggaagggcatgtgggggttagagagcccagcctgcccacaaacaggccggaaggagaagcagctgtgggagagagcagagcacctgcattcaggcatctggacatggagacctggtcttgtgaccatgaggacttcaggtgatagagccaaacggcataagcctgtaaagcctttttaaaattttaaatgagaattgcctggaagtggcattagagaggcagagaggcaccccctccacctgggtatgggagaataggtcatctctgtctgggggtatgaggaggagggggccccggggggttgtctgctcctcccttattcctcaccctgctccacacatctgccccagacatccgcctggattgggagacctatgttccagaagacaaggaagaccggctggtggagctgctggtgttttatgggccacctttcccgctgcgggaccaagccgggaatgagcttgtgtgccctgatacccctgagggtggctgcctcctctggtccccaggcccctccagttcatcggaattcagccatgaaactgactcatcagtgagcaggggtggaggggcggggcaggctggccactgagggccactgaggtgtggccagtaggctagttgaacctcagtgactgcgtgaacctcagtgattccttggtgacaggttgagggcagctccagtgccagcaatagggtggcacagaagctcatctcagtcatcctgcaggcacatgagggggtgccctccggccacctgtactgtatcagccccaagcaggtggtgagttggggtatgggctgggagctgtctgcattggccggccagtgggcatgggacagtgctaaggctgctgtgtctatgccaggtggtccctgctggggkcagcagtaccatctacatctccttcacccctatggtgctcagccctgagatcctgcacaaggtggagtgtactggctacgccctgggtttcatgagcttggacagcaaggtgagctcttccggcctggggtgggggccgcagccactgctccctcctgggtagcatgctgcctactcagcccagggatcagctgtgatcagacttgggctcagtaggtggaaagggagattccasggaagaggcatcgcctgcaggactttgcggtgggacccctgaaactggacctgcatagctacgtgaggcctgcacagtgagtcagctggggtgccccatctcctttcatccccatggggtgcaccctcaccaggcactggtggagccaggcagggttctcagagcaaaaggacgggcatgggtggagaagtcagcagaggagcccagggaaaggctggcccgaggctggatgagcagagtgggggcagccagaaggccccaggcgcccggcttgccccaacaatgcctattgctgggcaggctaagtgtggagctggactacggcggcagtatggaattccagtgccaggccagtgacctcattcccgagcagccctgctctggggtgagtgtgctgccaccctctggccctgccagcttacctggacctcagatgtctctgtgtgcccttgtgggactcaggccttatagtctgagcccaaatcccctcccccagccctcccagccctaccctagagccatggggttgaagagagagacaagatgcattccctgcctcctacctctgtggctgcccaggtgctgagtgagctggtgaccacccaccacctgaagctgaccaacactacagagatcccacactacttccggcttatggtctccaggcccttctccgtttctcaagatggggcgagccaggaccacagagctcctggccctggccagaagcaggagtgtgaggaggagacagcctcagcggacaagcagctggtgctccaagcacaggagaacatgctggtcagtgggggagtctgcagcccttgcctcratggcacaccctcacatgtgtacagacagcacccctgcacgccaccctcaggtgcttgtacccagacgcaaactgcatgcctgaccctgccataccctgcatgaacactcgggggtgcactcccaccagagacaccacattcagcacctctgcacaagtggctcacatgggcatggccacaccagacgttgtgttcacatacatgcatgcacgtgctccataaatgtccccagacttccctttccctcttagtccccactgctgagatgctggtggaggctgatgcattcctgtgagcacctccccttcccacacacacagactccgtcctcctgtgcaagctcagggtttgtgtcccagctcaggtgagcccatggggttgccataattgtaagacactccaggttctaacgtaaaatttcctcttctgacttattctcagtgacaattggatcctggattttcagagttggttaggtaggggaaggtcttgggaatgtcaggacctcactggaaaccatcaacttcctctggtctctgaggcaactggaatgaggctgagtgtgcgcacacccatatctgcacagtgggcttccagggtgtgcagaggcaggctgagggtagacagcgccgccctgtctcctacttcccctcctgcttcagaggccctctttcttcttctcggagggcttccctttatgctgtgctcccttgagctctgccaggtcctagcctcactctgcacatttctgggttgtctcatccatttccagagcctcagtgaacagccatattatttctatccaatgtatactccactgtgtagcgagggcctgctgtgtactagatgctgtgctaggtgatggtactccccgaggacctcatcatggaggtcagggacacacacggatctgcagaagacagaatggcacccttgacccactttgcgtttgctcccttcaacgagctaaatggatgggaaggcccagagcacagccagaggttccattccaccagagcttccaaggagacacggcggttagccaccaggcatttaaaagtccttggcagctctggggaagcccaaaagttccagaaaaaggacatcacataattaatggtgctgcatctcaccctccatgcgctaacaatgctcaggcttctggctcctggccagaattatctcccaggctctagagccaaactcaatctgtccaaagtgaactccccatcccctccccaccttgtcctgccccacatctgtgcctcctttttgtggtggcattttgtctcagcaaataccaaccccagcccccttgctcatgcccagagctctggcaccccttgtcctagacccatctctgaccaagccaccaagccctgcggatgccccctcctaaagttctcccaacactattctcttttcttcatccctacacccatatcttggtttaggacagcagtttctaagcctggcaatagatcagtggcctttttttttttagattgggtcttgctgtgtcacctaggccggagtgcagtggcgtgatcatggttcactgaagcctcgactgcctggggggttcaagcaattctcccacctcggcctcccaagtagctgggaccacaggtgcatgccaccatgcccagctattatttgcagagataaggtctcattatattgcccaggctggtcttgaactcctgggctcaagcgatcctcccaactcagcctcccaaagtgctgggattacagatgtaagccactgctcccagcaaattagtacccttgacaaagcttgttaaggcagcagctcccagaccccacctccagacatgtgaaggtctgggtgaggcgcaagaatttatatttttaacaagtgcctcaccgttgattctgagaagcttgtaccaaggacctgtgctgggagccaggagtccaagcttcatcctgtccagcctcagttacagcctcagcccctggtctggcatcatcacactcatgtgtggtctgcagcccacctccccaccaggtcagtgacctgtcagaggctcctcactatcctcagcacacagaccaagtccttcctctgcctctgagcccaaccacagccctgggcatttgaagctgtaaagggcaacttgctcatgtcccttcccttctagcctctgacctctgagggcagacatgacttgtccctgacactagcagggtgctgggcagagtaggtgctgggcagcgcttgtggaatgaaagcaccaggttggggagctgctgggctgttggctgggcaaggctgggcctgggaggaaaggaggatggagctccaggtggggaagtggccacctgccctctgcagccggagttgacaccatgtccacatctgctcaggtgaacgtgtccttctcactctccctggagctgctctcctatcagaagctcccagctgaccagacactgcctggggtggacattcagcagagtgcgagtggagagagagagatggtgtttactcagaacctgctcctggagtacaccaaccagaccactcaggcacgccccaggcccacctacatgtggaggagggtggaagtgggctgggctgtgttctgctggggccagaggaggaaagacctagcagggccctcagaaataaggagcccctgcccctgtcctggggctcagtctcccctagaagaggccctgtgtgcagagagatgagggccatccaacctcacctgcctcatgagctcaaaaccaggtgaggggccagastgtgggaaatcagggaaggctccctgcgggaggaaggacatgaagcctgaacaccatttaatcaaggaagggaaacacgttgacagccaggccaaaagaaaggcctgatgggtgggacagagcacctgaagcagctgcgaaggacagccctggggcttgccaggcttcaagcaccagggcgagcaccatggaccaggtcaccaggccgtagtgtggaggctaagcaggggctgctagtaaggagtgtgaaggagtggcctggggaagactctagagaggccgggggcaggaggctgagcagtggagccgaggcgctctagcctggcacctgggcagctgctggggctgaggctgtgggatggtgcatggcagtgcctgagtgtgatgcaggggctgccaggagatagaggagggcacaggtggggcctgcggccaaggaacacagacaaatggtccacggctgagaggagctgagggctgggccttgggggccaccacaggaggagcagtgaaggagggcagagcccaaccagccagggtgcagggactgaagctttatgagttagggaggcagggacagcgggggaatggatggcatcaccctggccctttccctgtgcagactcccagtagcagcctgtggccttttaaggtggcgctggtcccctgccaacttctgggagcttcccgttttcttcaggagcatcagcacttggggtcagcagggttctgtgtgtcccagaggccctggctcagagcccacccagaatggacaaggttgcctggtctcccacaggtggtgcccctgcgggctgtggtggccgtgcctgagctgcagctctccaccagctgggtggactttgggacctgctttgtgagccagcagcgagtccgggaggtctacctgatgaacctgagcgggtgccgaagctactggactatgytgatgggtatgtcctaccctgccacctacccaccgttcccctacagggctgtgccaagagaagaccccccaggaaggggcccctgtgcgccgtccctgcatgctggctcccagggcaggcaccacttggaatttctgcagagcagccagtcccccaatcccacatgatctcagggttgccctgccctgcagtgctgagcaagaccagaggtacaggcccgggggtgggtaaagtcttcctgtgggagtacatggggctgcctgcactcatgtgtcttcccttccctttggtgcaggccagcaggagccagccaaggccgctgtggccttcagggtctccccaaacagtgggctgctagaagcacgatccgccaatgcacccccaacctccatcgcsttgcaggttttcttcactgccaggtgcagccccttccaaccttccccaaactgcccacagagcctggaccccctgcccaggtgcctcctaacctcagcccccacatgctccccacaggagtagtgagctgtacgagtccacgatggtggtggaaggtgtgctcggtgagaagtcctgcaccctgcggctccggggccaaggctcctatgatgagagatacatgttgcctcaccagccctgaggctccgccccagccctcagccccaggccccagctggagaaaaaacattgcccagggattaggagcagctcttcagcacaaagacacagacttggggacctggggacctctgggcagctcctggaatggaagaacccccttccacaatggtctcagcctaggccctcatgatwtgtcctcagagctaacataaaggacaggccacaccacagcagagaccaccacattgagatcactactcagtgcatagcgaagaccagtatggcaaaattagtcttggaaaaaaaccacagccactaagataaattcatgcacttttactatgcccattgcacttctcatccatggatttgccttgccttaagaattaaccatggccttgtggcctgggtgacccaggctgcttttatcttgcacagctaaagagggtctgatgggtggctcaacaccccacccactcctataccatgtcatcagtgttcacattttccaaatgagttgaagtgccttgatctgtccactgccaccaccaccagtgctgagttttcccatgtggttttgcttttgtggtgttactgccttgctgctagagcagcaggactgtctgcgtagcgcctccagcctgggacctcactcagttcccagggtattcaaagacggcagcggctcccattccagtcccgatgcacatggacaccactccgtatgccctgtgaaaacaaaacttaattggctgggcaaaggcacccaccaaattacctccagaccaggctgacccagaaggacgtcatggacaagtaggatgcaaaaccatcagaccagatctgtgggcaagcggtaccctggcctcccacttgggcacacacacggtgacagatgcccactgcaggctagtatccctttcaaggctggcccttaaggaaaacagggatcatgcccctacatcctaagttcagggtgtttctgtgtgcatgttcccctccccagggatcgatcataatcccaaaagacacaatcccaaacacaatcatcccaaatgttgaaatcctggaagaacaaaatccctaaagtctaaaatcctgaaaatcacaatcctaaaagatcaaaatcctgaaaatataattctggaaaaaataatttggaagcctggcctggtggcatctacttgtagtcccagctattcagcaggctgaggcaagaggatcacttgtgcctaggagttcaagaccagcctaggcaatatagcaagaccccatcttagaaaaaaacttttttaaaagattgatttaaaagatatttacatttttaggccaggtgtggtggctcaaacctgtaatcccaacactttgggaggccgaggcgggaggatcacgaggtcaggagttcaagaccagcctcgccaacatggtgaaaccctgtctccaccaaaaatacaaaaattagctgggtgtggtggcagacacctataatcccagatactcgggaggctgaggctgaggcaggaaaattgcttgaacccaaaaggcagaggttgcagtgagccgagatcacaccactgcactccagccagcctggacaacggagtgagattccatgtcaaaaaaaaaaaaaaatgtacatttttaaaaggggatttatttgagaaacaaaaacaacagaacacttcacaggctactttacacaataaaatagaaaataattacaaatttctgcaagcataaacactcaggtatgctaacaatagtcacaggattataacaattataaacagacaaactgtattcataaataggttaaaagcaaactgtataaattgctggtaatcatgtgcacccagctttataactgcagtcatatgaataccatgatggacaacctacgtcttttgatgagattgatcaaaaactgatagagccaggcactgtggctcacacctgtaatcccagcactttggaagctaaggtgggaagatcacttgaacccaggagttccagaccagcctgggcaacatagcaaaaccctgtctctacaaaaaatacgaaaaattagctgggtgtggtggcacccacgtgtagtctcagctactcaggaggctgaggtgggaggattgcttgagtcagggaagcagaggttgcagtgagccaagatggagccactccactccagcctgggcgcctgagtaagaccctgtctcaacaaaccaacctgtgatgggtcaccactgcacaagtagtcaaccaaagaaccaagatcttgagaaattttatctttcacaaacgcaggtgcacaaatagcacacctcttttactgaggaagtttcaacatttttatgtacatgcacaaggcttacaaagtcaatgtgataatgcactttcatggaatcaaatttctgatgtccaaggcagaaaaaaagtgtgtcccggctctgagagagacagttcaccttctgtatttgttctctccagggccccaggcaattagctgatgcctgccaacactgagggcggatcttccccacctggtccactcagatgcacacactaacctcctctgcaaacaccgtcacagacacacccaaagcaatgctttgtcaggtttctaggtattcccaaaattaagtccattccttgtcaacttagcacccattcacatctccttaaaccatacttaattcaaataaagacaataacaaggtaatggttgcatcatattagttacatggtataactaatatgatgcactatcctgcatacagcggaaaatgcactaatcccttccctagaattcataacatgaattcaacattaggatttcaacattcaggattttaatcttttgagattgtgatttttgggattttagacagtaaggatttttctccttgactagtcaagtgtagaagtaagaagggggtaaagagtagaacatggagtttgatctgtaactgaacaatcaagataactcactacctctggaccagccaagaccttagggactttgatcttttgggatttcaacatttgggattatggtgctcaggactgtgtctgtcgagattatgatccaaagcccacctacctctatcccctgcccttcaggtgccctaacttggatatccccctatgaccccaccgccaggagcaaagccttacctcttcccacggcgcttcagctcattgagcagcgtgatgacctgtcgtgccccagtgcagcccagtgggtgccctaaggccactgcaccccccagggggttcaccttctcaggggggagtcgtagcttctccacacagtaggcagcctggaaggaggcagatcatcacctatagccctcttacccctcccctgcaccacctgcccgctcactccacctcggctgtccagggcaaaggcaacattgagaaacaagggctcacctggcttgcaaaggcctcattgatctcgaagatgtccacgtcactcactgtcagccctgcagacaaggtaaagacctgagctgacacactggccctctgcctcccctggggcccaccccatccatgggcctacaggctgcctggtgtgtgtctcttccagaagggtgagccaatcccagctgtggggtcaggaagggcttgaagtatgggacactagcctgccccacctccactctgcagcacccacaggaccaccctcatgcccctggcaacagcatgcagggcagctgcaggatccaggtgggacccagatactatatgaaggagccaccttacctgctttttgcaaagctactgggatggcataggcaggtccaatgcccatgatgtcaggtgggaccccaaccactgcataagacctcaggaccccaaggatgggaaggcccaactcttctgccttggacctccgggccagcaggatggcagctgccccatcactcacctggctagagtttcctaggggcaaactgttggggtaagaaggcatcggggtggggatgaggagatcccagccctcccacttctactttgcagaggggcctggtctattccaggttcccagagtacagcacccagcatggccatggcctgctttctcatacccctaccccggaccagtctcaccagctgtggtagaaccatctttcttgaaggcaggcttcagtttggccaggccctccatggtggtgctggggcggataccctcatcctgggtcacagtgatgctcctcttggtgcccttgtcatcatggaccgtggtggtcacaggcacaatctcagcttggaaacagcccttgctctgggctcttgctgccctgccagcaccatggacagccagcttcagactcccttggggttcccttcctccctgcccccaacccctatccatttgggtagacacaagctcaggctgctaaattcagggacatgctcgactttgggggagctctgagggcatggctaaggccttacagggccttcttcaccatcagccccagacctccagatcgtggccaatcccaacctcaaaggggggaaagggtgtttggaagtggtgcctccacttagagccctttgtccaagagggattaagcctgcttgattctctctgctaaactgaggatggaaccccagaaatatctgtgctgggttctgctaacttttctgctcaaactcaacagttcgatgtcatctattccccagtttccgcctatttaaagtgacatatactaaactactcatgtatttttgtatttaagcaattttaaagcacaaggtatttaagggtgacccttgcaaatatgtgcagcatgtaagtgcccagggacattcaagtggaaggaatctaaggcttctaacacattttcaaatggttatgtgacccaaagtggctaagaatcactgcctcagggaagcccacctggcccagataccactccctgcttttgctttcctctctggacagccgggacttgccaatcttagcctgcctgagcccctggggtttctctgatatcgtcctcagttcttgcctcaggatgctgccacagacccagcatggtccagaagctaggatgccagagtccctaacattgctggccccacactccaggctacaatgtccagtccccaaaccgcagccagaaaataacagagggggaaactgaggcctagctagggcaaagtcagggtgaacagacagtaatagaacctggaagtactaccaactcacagtggccctgacacttcctacttcccacccccaacctgggtggcacaaggcctggaaagcactcactgcccagcagtaaccacgaaatggtgccacttcagaccacttagatagactcaaaacctcactctccagccctttaaacattcctccccaatcagcactcacttctgctgggaagccagggcaaaggtatcctgcttctcccgtgaaatgccaaaccgctcagccacattctcagaggttatcctagaacacaaacagcagatagtgtgggcattggtctgacagcctagaggaagggaccaggctgtagagctgtgcttggaactttgggttcccaaggctgtaggcaggacaggatgtaagggccagtccatgccacagacagtagtgatgactcaggatatggtacagcctgccctgaaagtggatataaaggcacagatagggaagtcagcaatgctggccagatcctgagaagctcatacaccaaagagactttcttcaagagagggcagcctgcatgggggcagttgcagaaaggagtttgttccctgggtgagctgcctcagcgcagggtagaaaaggagcaggggagggcctgggtgggggcactagttggctactcctggccagcttctcctatgcctcaaggaagactgctgcaatgtagggagatgaggactcccaaatctcctctggaaaggccaaacctaagcttcctggtcaccttggctggggtctatgcttatcctgagaacctagagccacagctaggccttccagcctgggcttctggctttataggcttcccttggagatacagtatgtgaaagaagccatggcactgcccctctccaagcctcagtctcctcatatgtctagtggatccaggactcctggcccaaagaccctggggatggcccagaggctcagagaagctaaagtgttccatacaaatgccacatacttttctttttttcttttttgagacagagtctccctctgtcacccaggctggagtgcagtggcacgatctcagctcactgcaacctctgcctcctgggttcatgccattttcctgcctcagcctcccaagtagctgggactacaggcgct

SEQ ID NO: 98251 - DNA, 22423 bp, Homo sapiens
acatggccttgaatgtctgacccctgcgtcctccatgcctcatctcacatcacctgttctcgtatctatcctctttgctgtagctacattggctgtttagttccccaaatacatctttcctgattgccagcctttgttcttgcattttgtcatgcttgaaatcttctaccacccaatcttagcatggcttgctcttcctaatccttcagatctctgagtctcatcttcaagtgccacttttgaaaggtcttgcctgactaccctatctcagttgctgtcctgttgcttgctcagtttattgtttcttgcaaagcaattatttgtctgcaattatttttttgtctgtaccctcactagactgtgtgctttgtgaagggaggccatgtgtatcatgctcaccaccgtatcccagggccagcacagttcctggcatagagacagtgaaaaataaatgtctgtggttggatagttgaatggatgaatgaatgactggtgagagctgggggcttagtatggatattctgattgatatataaaccctcacctttccccttaagagcggccactgcatcccaaggaaaaggtcttagagcaggctttacaatggtgccagctcccagagccctgctcagcttccctgctcttgaaaaaagtccccctggcccaagctggctgcctcttcacaggtgagcctccttcctctgcccagcatcccccaggtctctcccctagcatcctccacccaggattgcccatctatgcccaggtatccgacgtgagagcccacgggtggggctgttgcggtgtcgtgaggagccacctcgcttgctgggaagccgcttccaggagaggttctttctgctgcgtggccgctgcctgctgctgctcaaggagaagaaagtgaggccctggggccagaggtgtgggatgctgggtggccatggagaggagccatgactgcacccaccctctgactccacagcccatactctcatcaatctcattgcttccctgcccccgacttctgtgaccctgtgaccacagaccccattgcttccatgacgtcttgacctcattaaccatgatctctcatctctccatctcgctgactctgtttctgttctcagagctctaaaccagaacgggagtggcctttggaaggtgccaaggtctacctgggaatccgcaagaagttaaagcccccaacaccgtgagttttcttccccagcccgcacttccagggccttcctgccttcacccccctgccctttctgactgccccatcactgttctttgtctcccaggtggggcttcacattgatactagagaagatgcacctgtgagtacctcctgccctggcttctcctctggcccacctctgcaccctgtcttttctcttccctctttgtatgctccattcctatagctgtgaccctctctctccctctgattccattctgatcaccccagctacttgtcctgcactgacgaggatgaaatgtgggattggaccaccagcatccttaaagcccaggtgaggggaaagaaaaggctgagggctgggtctgtggtccccctggggcccagctgtcctcctcagtgcctttcatgcccactgatgccaacccctcacgctcccaccagcacgatgaccagcagccagtggtcttacgacgccattcctcctctgaccttgcccgtcagaagtttggcactatgcctttgctgcctatccgtggggatgacagtggagccaccctcctctctgccaatcagaccctggtaaggcaccccaccctgccccaacccgattcctgtcgtgtagcccttgtcacattgcagtaggcagtggtgtgcctgctagcctggtgccaccctatgctcactgtccccctcccttctgccttcttcacccccattccccacccctgtctcctgttgctagtcctcactgtgtctttatgtctttccttccccttgtccccaccccacctgtgtccagcggcgactacacaaccggaggaccctgtccatgttctttgtgagtattgtgcctgctccagcggtgtgcctgtcaaccctgtattcctctgtgctgcctgagccccgggtgtgctgttttcctcatgtaggccatcagggggtgtgtgtgtgtgtgtgtgtgtgtgtgtgtgtgtaggccatcagggtgtgtgtgtgtgtgtgtgtgtgtgtgtgtaggccatcagggtgtgtgtgtgtgtgagagagagagagggagagcgaggaaaagggagagggagagggacaggacagagagagagaggaggccagaaagaatgaggaaaatgagggatgtaagatgcagtaataaaaggagaaaggtcgggcacagtggctcatgcctgtaatcccagcactttgggaggctgaggtgggtggatcccctgaggtcaggagttcaagaccagtctaatcgacatggtgaaatcccgtctctactaaaaatacaaaattagctaggtgtggtggtgcatgcctgtgatcccagctacttgggaggctgaggcaggagaatcacttgaacctgggaggcggaggttgcagtgagccaagatcgcaccactgcactccagcctaggcaacaagagtaaaactctgtctcaaaaaaaaaaaaaaaggaaaaagttgtcacagaatctgtgaaatagaaggaaagtgatgaagtgaatgcattttggagttagacagacctgggttcaaaccccagctctaccattcactcattatgtgatgctgggcaacttacttaacccctttgcattcagttgactcagtgtaacccactgcacagggttgttccagaatcatacatgccaagtattttacagcatctggcccagaggaagagctcagtaaatgttagtgattcataatctggtaactttaactatgtgcccactcctgccattccattcccatccagccaatgaagtcatcccaggggtctgtggaggagcaagaggagctggaggagcctgtgtacgaggagccagtgtatgaggaagtaggggccttccctgagttgatccaggacacttctacctccttctccaccacacgggagtggacagtgaagccagagaaccccctcaccagccagaagtcattggatcaaccctttctctccaagtcaagcacccttggccaggaggagaggccacctgagccccctccaggccccccttcaaagagcagtccccaggcacgggggtccctagaggaacagctgctccaggagctcagcagcctcatcctgaggaaaggagagaccactgcaggcctgggaagtccttcccagccatccagcccccaatcccccagccccactggccttccaacacagacacctggcttccccacccaacccccatgcacttccagtccaccctccagccagcccctcacatgaccctaggaccagcagtctgagagggtaggtaccagaagacccagaaactcttatcgtggcactgttgcagcttcctctgccctggctggaaagactccagaatccagtgtggtgctgtggaaggagcactggactaaaggcttcagtggctgcgtgtcccaggacaggtcatggcccctctctgggcccagcccatttatctataccatgaggtaactgaagtaaggagagcagtgaatgtcaaactgtgtttcttagagccataagccccacatattatccctgaacaagggcagctcctgctttatatatttgatacgtaggggttccatgagagattttgggttttaaaggaatggttttactgcattaaagaaaaaaaatgctttggaaaccagaggcctgggtgatgttaaagtctatcctgtcccacttcctacattctgggactaccgtgaagcctggagtagggagagcgagtttgggagctgggactcggggagtcaaaaatagatgagtaattgtcaataaacctgggaaccaaaagactaccattctcattcattcattcaacaaatatgtattgtgcacctaattggtgccaggtctggggatatagcatgaacaaaacaaacagggcccctgctcttatgaatcctccgttgtggaggggaacagaaaatagcaaataaacacataaaccagtacttgaacaagtgagtttagtgctgtgaagaaactgaaccaaagtgatgagcttgaagagtgattgtggaggccaggcgcagtggctcacacctgtaatcccagcactttgggaggctgagggggatggattacctgaggtcaggagttcgagaccatcctggcaaagatggtgaaaccctgtctctactaaaaatacaaaattagccggttgtggtggcacgtgcttgtaatcccagctactcgggaggctgaagcagaagaatcacttgaacctggtaggtggaggttgcagtgagccgagattgcaccattgcactccagcctggcaacagagcaagactccatctcaaaaaaaaaagagtgattgtggagatggtctttggatgggtggatggggaaggcatctgtgaagagttgcaaagtaagggaaagaagctgttggaggcgacagatggaacgctggaaggaggagattctggagaaagaaagcaggcatgaagaactctgcattggaagggacttggtctactgagggaacagcaaagaggctggagcacagtgagcagacagtgggaggagagtacaggctgaagtaagaaagaccagcagggtcttccatgcgtagccttgaaggccatggattctatttggattttattctgaagcaagtgcattttaagcaagtaaattatgagatcttatttccctttaaaaaagaaaaaaaaggttgatcactctgagtgctgtgtgaacagtgggttggggtgagggcagtgtggaagcaaggagatcagatattagaccagaagtctaataatgggggcttggactaggatggtggtcttggaaattgagggaagtggatcaagaggtttttgtttgtttattgttgtttgaaatagaacctgtaggacttactgatggatagaatgtaggggtaggagaaggcacattgactctgggtttctgacttaactgactggaggaaatgcggtgccatttaaaacgttacggggggaggatcaggttgaaggaggtttaaaagctttaaaagttgaggttcctattagatatactagcagaggtgtcagtggggagttggaatgtgaatctggagttttgagacatgtcaggggtactgggacaggtgcctgagccaaagaagcttaggtgaggaggatgaggaattggggagaggctcctcaggaagcagtgctagggctggaagatcctaaaggtggcaggggcttcctgcgcatctcccagctctcgccgactcactggtatcgtttagttttcagtggggccaagtctttttccctttgggcctggttccttcctggatccaggcatctttctcaccccgctcacgctggcttttccagttaagcgggaattaggaaaaggtctgggaccagccctctcttcgtcagatgcatctttgctcaggtgcccagtgactcagtttccctggtcacacactgaattcctctccattcctcatcattagctcggggactggggatctacatatgcaaatgaataattatcaataattacaggctgaatcagtggttacactacaaatagaacttaggcgtcttgactcagatgcctggggttcttcccaccgcccagcggacgctgcgtccgccccgcccgccccgccacccggaccctgccggcgtattcgcagcagtaacaggtttagtttctcggtggccccctctcgcttccgcgccctgcgacgtcgccggacaagtcgtgggcgggcagagggcggggcctgacctggcctggggcggggctccatagtgggcggggcttcctccagttccggagtccagtggctgaccgccttgctggagcggagatgcagccgccgccccgaaaagtgagcttggccctgaatggggactcctggcgggctgggggaacggagggagctaagggggcatccgacttgtggtaggagacgggaagtcggaaggggtcagaccccaaaccagaagtaacagaggaaagagctcagcacccccccggccccgccccctcaccgctccctgcgcggagtgttttttaggtccttgcgctggggtcttcatcctctctttgcccccacaggtgaagccggcccaggaggtgaagcttcgcttcctggaacagctgagcatccttcagacctggcagcagagggaggcggatctgctggaggacatcaggtagctcccccaacccccttcatttacactcaccttcgtcgttgtgcgccacttctccccaatatacatgtgctggggtggaggaacaggggccaagagctccccagccgacccatccacagccctcaccctaggcctggcctctccagatactggataggaatgctcccccacctaacccctcccaaccccctcccacccacwtaaacacacaggaaccctccctcaaagcccttgactccacaccactgcccccaaccccacaatcaaccttagggcagaatccctctccctcttccagacctgttggaaggctggcagacatcgtacccaggcccccatcagtcttcacctctaagcctacagatgaacctctggggtggggaggatcctgctggggcccggggcagtaaggtgagggtttcctgtgttgcagctgcccgaggtgatctcaaggactcccatcagtcccattccctctgggtgtagttacactctaggaacctggctccccccaaccgctccctcctgcccagagtagaggactgaggatgggagaacaggaccaaacataaccttatcccccacctcacccccgacctgcaatctccgcagatcctacagcaagcagagggcagccattgaacgggagtatgggcaggtatgggacttttctctggaccttacctcttgttccagcctctcttatatcaccagtaatgtctgtccatacctatccctattgtggtcaagagcagatgcctagagtcaagcagactggtgtcagatccctgctgtgtaattatagccatgtgaccttggacaagttacttaacctttcttgacctcagtttctttctctgtgaaatgggaataataataataccttaccttcatgtagggttgttgtaaggattaaacaaattaatgactataaggcatttagcaaagcaagtggcacataatgtacccaaagaatggtatgattatactctgatgtcatattctgccagttggggtgggtctttgaaagggaacttggttctgtgatggctttttcaccaggcactccagaaactggctggcccattcctgaagagggaagggcaccggagcggtgagatggacagcaggtgggccctatggagggggagggccacagaggccaaaaagtgatggggagctcagccccaggaacctgtggggatgaaggcctagcaagtggggaaggcacgtgagctgtaggtagagctgacacagcagcagcagaggagctgacccagcaaggacactgtgggtggggtggagggcaggagtgaggcttgtggctgagctaatgggctgatcgattgatgggctcccagacaagggaggatgggaaagcactctgtctcccatggtgttggtcagggggcagggggtgggggtggtctcatgaagctgtggagtgctctcctcctcaacacagaccttctctggggaggggcaggacagtgttcggtgcctggcgctgcytgctggatgccaccgtggctgggggccaaacccgactccaggcgtctgaccgataccgtgacctagcagggggtacagggcggagcgccaaggagcaggtgcttaggaaggtatggctcagaggttggggtgaaggaagagctggcttgggaccaaaggtggtctaggtaaggactttgtgtatgcatcccaatagggaacagagaacctccagagggcgcaggctgaggtgctgcagtctgtccgggagctgagccgaagtcggaagctgtatgggcagcgggaacgtgtgtgggccttggcacaggagaaggcggctgatgtccaggccaggtggggtcatggagagtgaggaagcccaaggttggggaacagggaggtggggctgtctaggggtggagccaagtcaccaaagctgggcctgactctgatctcatattctcccacttggggtgggcctgactcctttctctcatctgcacaggctaaaccgaagtgaccatgggatcttccactctcggaccagtctccagaaactgagcaccaaggttcgagggatgagggcatgagtgggggcagggaagagggaggcagagtagtctagtggtttggaacataggtgcatatgtatgaaagactgggttgaatccaggctctcctacttcctgggtgggtaaccttggttaatttacttgatctctgtgagccttattttcttctataaaatggagagaatacccttctttttcagtcctttaatatgcatttattgaggatctgtatataataggcactgttctagacattatggatacagtggagaacactaccaatggagttcctgccctcacagtctggttragagagacagacagcaaataaatacttagattaagatgaaaataaaacaaggtactatgatraagaataacaagggggtagaatttagagggaggcctctctgaataggtggcctaactgtcaagaaggagctggccttgcaaagatctaggggaagaacattscagagagaagaaatggtgagtgcaaagggtctgaggtgggaataactttgtaggctcgaggaactgagagagggccagtatggctggagtactgtgagcaagggaacaagcgcttgaaaagaggtcagagagattgcgggggccagctcatattgaacstggtggaccatggtaaggaacagtggattttattttaaatgcgtgcagaaggcactagaagattttgagcaggagttgtgtgtatgcaacatttttwgtgtagtgccaggcacatagtaagcactcaataatgtgagaatccattctggatctggcttctcaattggtcttggaaggactctgggggtctagggcttcctattgacatcagtttaccctcctagctgtccgcccagtcagcccagtactcccagcagctgcaagcagcccgcaatgagtacctgcttaacttggtggctaccaatgcccacctcgaccattactaccaggaggaactgccagctctgctcaaggccagttttaacccagacacccctatccctcagcagggagggaaaggaggacctccccctgcttcttgatccycatgacagkgggtggtgcaggggatcttgtctgtttagagtgrgtagatgatacatacatgsrctctggttctgctcctagctggctgcrtggcattgtacagtacacttaaactcttccgaaccccagattcctcatcagggataaccctttctctgcctatcttatagcactagtggggctcaaaggagagaatggatgtgaacgtgttttaaacttctaagtgctctgcacaygagggcctttctcatgaagaatgtcttcttctctccttcctatacctcatgcccatcacctgtcaaatctggaacgagcctattttacagtagaggtctgggggaagggtggtgtcagtatcttggggttctctctaggccctggtcagtgagctgtcagagcacttgagggaccccctgacctccctgagccacactgagctggaagccgcagaggtcatcctggagcatgcccaccgcggggagcagacaacctcccaggtgagggctgtggcctctaagagcttccccggggatcctttttacccttccctcccaatgcagccctctttgcttcacacrttgtcctttttcttccaagaagtgctagggacagggttggagagtgagtcagtgaatgagtgactttgacttttcccaacccctaggtaagctgggagcaagacctgaagctgtttcttcaggagcctggtgtattttcccccaccccacctcagcagtttcagccagcagggactgatcaggtgagatcttcctgcttgttggaaccaggccacatataaaggcgattatgatttaggcctcctccattatctttgttttgtgttaacttagtgagtgtacaccgtggagagggggtttcagaactccagctcacctccctcccaacaggacacacacaaaaaaacacacctcagtccacctttcagtcacttgactgcgccatccttttcattctacctctgtcccttgacctggatcccatttctgaagctctgtatctctgtgtccacattacctgtgtccatgactgtaggcatgtgcccctttctctttgtccttgtccttggaggtcaagatagagtggaaaaaggagggaactggagagaaggagcagcctcaggtcctcctcacagcaccccctgacccattcaggtgtgtgtcctggagtggggagcagaaggcgtggctggcaagagtggcctggagaaagaggttcagcgcttgaccagccgagctgcccgtgactacaagatccagaaccatgggcatcgggtgaggtgggggggcacaggtgtcatgtgcaccttcttgtctcagcaagaagagctgagagaggggatcttggagycattgagggtgtcatggagctacagaggggagggaaaggtattttaaggtaacagtgtggcacaatagttaagagcacagtttttggagctagaccgacataggttcaaattctcttctgttgcttcctagttctgtagccccaggtaagggagtgacttaaccyctctggacttcaatttcctcatcactaaagtagggccaataatagcacccacctcatagggaagattaaatgacataatgtatgtgatgcaactagcaaagtaccagtcccatagtaagtcatgccccacagtatttccacccacccctgttctctgccttcccaaccaggtactgcaacgactggagcagaggcggcagcaggcttcagagcgggaggctccaagcatagaacagaggttacaggaagtgcgagagagcatccgccgggcacaggtgaggcacacccctgaggttagagatcccaccttctcaggcaagccccactccctctactcctctttctgayggtgggaggaaggaagggagaagcagagagtaaacactgccgtcagccaggttccactaacttacttcctccccatggcaggtgagccaggtgaagggggctgcccggctggccctgctgcagggggctggcttagatgtggagcgctggctgaagccagccatgacccaggcccaggatgaggtggagcaggagcggcggctcagtgaggctcggctgtcccagagggacctctctccaaccgtgagctcctcccccaacactacccatccttacttagaagggaaaaactccagtggaaggcaaaccctataaaactggaatcacagttgtgcctaactcaaagggttattacgaggcttaagtgaaatcatcatatatcattctttgcataatttctggcatagagtcctcagtamatttttattatgagcataatagaatgattaagaagtagggttctggggcagtctgtaagggctttgagtaccagccactccacttatgagctgtgcaatctcgaaaagtgacttaacctttctgaaccccagtttccttgtaaataaagtgaggttaatagttgtgcaaaactattaacactgggtcattatgaagattaaatgagacaatatacacaagatactttgcattgtacctggcacatagtatgcactcaattactgtaactctattactgttagtattatcctgctctgtggtgactgtggttgtgtacatggtgagtggatgggtgcacctgccttggaggatccatggtgtcctttagaggaaagatggaagagtgggagatagaaccagtgcttgagagtgggccccatatgaggtctgttctttgcccctctaggctgaggatgctgagctttctgactttgaggaatgtgaggagacgggagagctctttgaggagcctgccccccaagccctggccacgagggccctcccctgccctgcacacgtggtatttcgctatcaggtatgaatgggggtggggacctctgatgggcaagggtgggggacagccaagtcctgaatccttcgtgtgtggcccaggcagggcgtgaggatgagctgacaatcacggagggtgagtggctggaggtcatagaggagggagatgctgacgaatgggtcaaggtgggtatgggaccccgggctctgaccttgggttgggggcagtaggagggacttctctgtggcctccatagacccttctaggcaaagctagaagcctgagtagaagagagccagggtcatggactgctgaggtaagtctaatatctgttcacattgctgggtgagcaggctcggaaccagcacggcgaggtaggctttgtccctgagcgatatctcaacttcccggacctctmcctcccagagagcagccaagacagtgacaatccctgcggggcagagcccacaggtamgaaagggaaattttgggttagaggaccctgggtatggagaaaaattgttaggggttgtagccctggggtgtcatggtcctggggcacygctacccacctccctctcaccgtctctcctgggcctctgtagcattcctggcacaggccctgtacagctacaccggacagagtgcagaggagctgagcttccctgagggggcactcatccgtctgctgccccgggcccaagatggagtagatgacggcttctggaggggagaatttgggggccgtgttggggtcttcccctccctgctggtggaagagctgcttggccccccagggccacctgaactctctgaccctgaacaggtgaggcttaccttctccctgaactccccaggcacctctgggttgaccctcycaccccaatraagcctcatattcatcttaatgcctcctctgctccccagttttacctcctacagtggcctgggcctcccatctcctatgggggggcagggaaaagggaaaccaaggcagccttcataggagtttggggggtcctactttagtgctggatagatctgagttcaaatttctattgtatgacttgggcaatgatttaacctctctgagcttgtttcttcacatgtaaaatggggataatacctactttagcaggctcactgtcataattagagataatcgaggtaaagccttctyyttttttttttttttgagacagagtttcgctcttgttgcccaggctggagtgcaatggtgcgatctcagctcaccgcaacctctgcctcccgggttcaaacgattctcctgtatcagcccctcgagtagctgggattacaggcacgtgcygccacgcccggctaattttctatttttagtagatacagggtttctccatttggtcaggctggtctcaaactcctgacctcaggtgatccacctgccttggcctcccaatgtgctgggattataggcatgagccactgcgccccgccgaggcaaagcctttagtgcagtggaatgcagaaggtgtttcaatataagatatctgttgttataatgtatatacatacagcagaaagagaataggagtgggcatcaggagaactgggttctagccagcactctgccaataactggcttcgtgattttggacagctggcttaacctgggtctcacttctaacataggagtcatattattaaaaatgcctacctcatggggtagtggtgaggattgaatgaattrgtacacgtgaagtgctagcagaacacttgagacrtagtaaacataagcgttcaatacatattggctgttgaaatatttgtcagctacacccccccaccgaatgcaagcatttggccacttcctgtattgagaagtgatgaggaaggaactggagatgggatgagaggaaaagctggtaaaacctccccacatgccaggaataactctgtgcccaccccacctccagatgctgccgtccccttctcctcccagcttctccccacctgcacctacctctgtgttggatgggccccctgcacctgtcctgcctgggggtgagtggaaggaactgggagccbtgggaggctaacagacaggaagaaggaggaagcttggactcccaggtcacgctctggtcctctccgtgccttcaggcatcttgcttggtggagagcacttgcctgggctctggagccaggctgactggttcaggtcccgctctgtcatctccaagtgtgtggtgggattctgaacctgtcttggcctcagtttatgttctttatgaggtaaggaaaaggtactagcttattgaattcttatgagagttaaaaaagatgcctgtggactacacagcattgtgcctggcacacagtaagtatgcagtcactgttattattttaaaaattagctaacttctctcacggtgtcctcccaatatgcaccttttgctcctagtgtccagatacctagctttgtatcattattttttctgatgcccactttttttcttttttaaatgtctatagcagttttattttattatttattttagattcaggaggtacatgtgcttgtttgtcatatggatatattgcatactggtggagattgggcttctagtgtacctgtaactcaaatagtgaacattgtacctgataggtaatttttcaaccctcgcccctgcctcyactcctacctttgccccctttggagtcctgggagtctgttatttccatctctatgtccatgtgtacccgttgtttagctcccacttataagtgagaacatgcaatatttggttttctgtttctgagttagttcacttaggataatggcatccaactccattcatgttgctgcagaggacatgatttcattcttttttatggctgtggaatgcctgccttttctaaaactttctggtacttccaccttgtccacaaggagtctccctccctggagttaccaccatctccaccaccccaagttcactttgcatgacttagcacttagtcatttattgtgtttgttgaggtttcattattggtttcttgacagccattgggggtgggagcactatgcatcctatctcccttagttttgtaccttgagcagagctgattatacagcagttgcccaataaatgttgaggacagtggatagagtgatggattttatggtctaggatggtgaccattaatttaacaaatatttatagaatgccactgtcctaagtgctggagatacagcattgaacaaaacaaagtctgaagactgacttgtggttcttatttccagacaaagccctggacttccctgggttcctggacatgatggcacctcgactcaggccggtaagggcccttgccttggaggagattgtatgtagaggggttattccaaccagtcctgttttgtctgcagggctgagggaatagacagggatacccttaagggagaactctggagcactaactgtgtgttccctacagatgcgtccaccacctcccccgccggctaaagcccyggatcctggccacccagatcccctcacctgaaggccagggaagccttgacccccagtgatgctgctgtccctatcttcaagctgtcagaccacaccatcaatgatccagagcaacacagccaaaagctggaatcgcccttatttccaccctcacctccaagggtggaaacttgccccttcccatttctagagctggaacccactcctttttttcccattgttctatcatctctaggaccggaactaccttctcttctgtcatgaccctatctagggtggtgaaatgcctgaaatctctggggctggaaaccatccatcaaggtctctagtrgttytggcccacctctttccccmccctggctccatgacccmccccmctctggatgccagggtcactggggttgggctggggagaggaacaggccttgggaatcaggagctggagccaggatgcgaagcagctgtaatggtctgagcggatttattgacaatgaataaagggcacgaaggccaggccagggcctgggcctcttgtgctragagggcagggggcctacggtgctattgctttaggggcccaccacgggcaggggcctgctcccagctgccacgctctatcatatggagcgaggtgttggggaaggcggggcaggcagcctgttgcaggcaggggaaggagaagagactgaggggctgtgacctctcctgaggcccccagcctgagactgtgcaactccaggtggaagtagagctggtccctcagctggggggcagtgctgtccagtggaggggagggctttcacgcccacccaccccctggccctgccagctggtagtccatcagcacaatgaaggagacttggagaagaggaagaataacactgttgcttcctgttcaagctgtgtccagcttttcccctggggctccaggaccttccctacctccaccaccaaaccaagggatttatagcaaaggctaagcctgcagtttactcggggggttcagggagccgaaaggcttaaatagtttaagtaggtgatgggaagatgagattacctcatttagggctcaggcagactcacctcacatactccctgctccctgtggtagagacacctgagagaaaggggaggggtcaacaatgagagaccaggagtaggtcctatcagtgccccccagagtagagagcaataagagcccagcccagtgcagtcccggctgtgttttcctacctggtgatcagaagtgtctggtttgcttggctgcccatttgcctcttgagtgggcagccctgggcttgggcccctccctccggccctcagtgttggctctgcagaagctctggggttcccttcaagtgcacgaggggttaggctgctgtccctgagtcctccattctgtactggggggctggctaggacctggggctgtggcctctcagggggcagcctctccatggcaggcatccctgccttgggctgccctcccccagacccctgaccaccccctgggtcctgtcccccaccagagccccagctcctgtctgtgggggagccatcacggtgttcgtgcagtccatagcgcttctcaatgtgtgtcacccggaacctgggaggggagggaacactggggtttaggaccacaactcagaggctgcttggccctcccctctgaccagggacatcctgagtttggtggctacttccctctggcctaaggtaggggaggccttctcagattgtggggcacattgtgtagcctgacttctgccggagctcccagtccaggaggaaagagccaaggcccacttttgggatcaggtgcctgatcactgggccccctacctcagcccccctttccctggagcacctgccccacctgcccacagagaacacagtggtctcccctgtccgggggcggctttttccttccttggagcgtccctgacggacaagtggaggcctcttgctgcggctgcaatggaggcaaggggctgcagagcccaggtgcactgtgtgatgatgggagggggctccgtcctgcaggctggaggtggcatccacactggacagcagggaggaggggagtgagggtaacatttccatttcccttcatgttttgtttcttacgttctttcagcatgctccttaaaaccccagaagccccaatttccccaagccccattttttcttgtctttatctaataaactcaatattaagatgttagtgaccatatgttcttcctcccagggctgtttgctaaaaagaacactgcttaacccaaaggagtggcactagaggtgaatgttaggcttgatgatatctagatgagagagatggtttgaaggaatcgcgatttctacaaaacaactttcttcctataagttagccagctttgcccttcccccaaccccatacatgcaaggaggctgggagaggattgtgctggaggagaggatactctccaaggcaagctaagtcatgctggcccttgtttccagctcacctggacagctgcactgtcccttctccttcactgtcccccagcatctccttcaaggcctcagcattggctgagggaagaaggaaaagagggagtcagtggaggtggaggtcagggcaagagaaggttggagaagagggagcaaggggctatgctagacccaccttcattctggatgatgcagcgaacaatcctctctactgtgtcctcattcatgtcatcgtcctcagctgaaggatgaaagagattggcaaggaagcaggaatgagtcagctttgggggaatattacctggtggctcccatcatttattgcttaggacatacccttttacctacttgctatcatgctggacctcagcatttcagggaccagaaaagatggggacaccaatgcaagcccaagactaccatccagaggaccgttcctgcccatgctgctttctctagttttgctttcagagtggtgtcaccccacttgctaactcaagagtgcatcactaggcttcctgagcaggtttgatcaggatttggcctgggtctgttggtcagggaggcagaggtgtggggagaagggtgaaaggtgactgagccagggttccaggctcctcactcacggggctgaagctgggcatcgtcaggctcagagcccctcgacgtgcggcagcggtagcccttcttcttgagcacgtggcagatcatgaagcctaccaggcccatgaggaagaagaccagcacaagcaggaagagcatatatagcccatgttggggcggttccaggtcaggctgtggttccgacatgaggccctggggggcgagcgcgggccagggcgcctcctgggtttagggggctgcagctgggaatgggggaggggtaggaatgccgtcctcaggatctgaaacaagcacgtctaagacgtccggctgaggtccggccccaccccctacccaaccagggagctgtccgggccaggagtgctgtttcgcctttcggcaagaggtcagcggcaacgcaagctctctaccacgaccctggtcccgcttccccgacgccccgagcgttcccctttccagcttgttcgcgcttctgtccctcccaaggacactgcagcacgagatgggacggcattcttaggcggcgggagcagaaatcctgcctgagtcagcgcccgcacctcctccacgccggcctgagccaggcctctgcagccccttcctctcagtactcccgcacccctctccctttttggtttctcccaccctgaccacctggccgacccggtaccggtgatttggttctggttccggcttctgctggggttccggctccaggggcgtcctagtgcggctcagggcccccgacgcccttccggcgctcatcccttgattcctcccctcccccttcgccgcctcaccggccccgggctgtggctgcggatacccgcgccgtggcaggcggggggagggaagaacagagaaggatgcgggctggctgagagcggtggcaggctccgggcaactccggccctgggtcagggagatcgcctccgcagccgccctggcttcccaaatgccttcacccgtcgcgggcccaggaccagggggcggagcgcaggtgtgcggggcggagagcgtgagctctgcgcgcgcgtgactgcgccgggcccccccggggcaatgtgcggcgccgagtctgggtccgggtaggggacaggcggtccggcgtgggtgttgtccactggtctatccggtacgcctggcgcagctcctgccctcagatgccccgaccgagcggagagtcaggaatcttctccgagggctgggggaagccggctttccgcacctttgagggacggagtggcgggatcttcggagcttcctagagaagtgaccacggcctgcgcccggtttggggcaagcggctggatgggatggctcggcttcccgaggatctgacccccggccggagacaaatggccctcgcatcctaggagctatgctgccagttccctgcccaacccgggacgctcaaagccccagataccgggagagctgagccgggcgaggggcggagctcccctgggggcgtggcctgggtgtggatggaggcggggccgcaacgcccagttccgcagaggccggctacgtgcttgcgcagcacgcacggccggggaggggctggcggcggccgcgggcggcgggcggcggaggtgcggggcctgctcccgccggcaccatggccaagaccgtggcctatttctacgaccccgacgtgggcaacttccactacggtgaggaaacagggatatgcatgaggggttgggacacggaggttttgaggcggggttgcaactccaggggtgagagctgacgaactctcttctccccacccccaggagctggacaccctatgaagccccatcgcctggcattgacccatagcctggtcctgcattacggtctctataagaagatgatcgtgagttccgccgcctcggccgggggttggggggtggggcgagctgtggccgtagggataggtgggctggactgagtgcatgaagtgcgacccgcccctagagtatcggggagctggatagaagtcaccaggagtaccttgaaagtgcagggtgttgggggtggcgtcctctgcttaatggaaagtactttctcacctcaggtcggccaccctctgactgtaggcacactagcccttggcctagggttagcgtgatgtggggctggtttgaagacagaaggtgtgttcctcctctgcattttagagtgtggatagggccttggcctcaggaattagggttaggggagcggatatcactgtatcagggtgtgaggtttaccctcagttcccactcctcttttaccacctttctttacctccaaggagctagggctccagggtggaacgatgctgccgtctttgtaaatgtgtatgtgcgtgtggaacagaggcgatattttagatattcctttttcagcctggaatacctctacatggttctgcttaatcgctatccagtttttcatctaccagacatacacatgctgtcttcccagcttggaatttatggctgtgatatgggatagtaacagttaagccacgccaggcgtggtggcccatgcctgtaatcccagcactttgggaggttgaaatgggggggatcgcttgaggccaggagttggagaccagcttgggccacagtgggacccacatctacaaaaaataaaaataaaaaaagtagccatgtgcggtgggtgtgcctgtagtcccaactacttgggaggccgaggcgagaggatggcttgggcccaggagtttaaagttacagtgatctatgatcagcagcctgagttgacagggaggaccttgtctcaaaagaaaaaataagacaaaacagctaaacccaggctttatgtgttgctagggaaactagtgaacaatatgaatgaatgttcattgcttgtgccaaggcacagacaaatggactggtcatagaaaagactgaggtgatgttagtgcaggaatctatatcccttgagattgtttgcctgtatgtacctgtgtgcattttctgggagaagaaaagctctttcttgtgcagttttcaaagaggtgtgacacatccccctgaccttccaaagataataaatctttgattttaattagaaagttgacatatatcccatatatttgactccagaaagaagaatccagaggaaagaggacagaatcagagcttgggggaggagatgagcatggagagaactgggaataggagattccaaggaacagggcaggtggatcagggctcaaagttgagaaggtacgataggctgagctggaggtggaaaggaaaagaagtggtcttcagggggctcatttgtaataacttacctggttaatcggagtctctctactgacttaaggattgtgggatgaggggaatgctatgtttggcttcatatagtctccaggactgggttcagtatgggtggtctgagcctgtggagtggggctgaccctgcctgg

SEQ ID NO: 98252 - DNA, 16547 bp, Homo sapiens
tggcctcccaaattgttgggactacaggtgtgagccatcggcgctggccctataccttgatatattctatcaaacctctcagaactcttacacctaaaaaaggttaattttactgtatgcaagttatacctatataaacctgactttttaaaaaggaaaggcttaggcaatccctagttttaggtctcaaaaaaaaaaaatagtgcagctgatacatttgaccatgtgaaaaacagaactgtaggggttttttgtttgtttgttttttgagatggggtcttgctctgtcgcccaggctggggtgcaatggtgcgatctcggctcactgcagcctccgcctcccgggttcaagcaagaattgtagggttttatagtttctcaaaaggcttggaaagaattagtgattaataccagaaaactaagcaaatgaaaaaataatgcaattgtcagctccaggaaaaacaaaaagctttagaagaaaatagattaaatcacactacactatttggcttgatagtaaatgaatctttcagagttataataatgtaaacacagaatactgatttatttttaaattactatgaagctgaaaggggaaaggaagccaatgtgatggtgtaagaagactaaatgctcatatcccatactaaaagcttaacagataatgcctaaaattgacagacgaagaaatagcaatgagagacaatacaggaggggagtatgattacaagcaccgattctggagctagactacctaggttctttaacacctactaatgatagtgaggttgtacaaactgtttaacctttctgtgcttaagtgtcctcatcggtaaaaggaaacaataatagaccctgcttcataggggttgttgagattaaataagctaatggctgtaaagcacttagaacagtacctagtatataacaggtattacctaaggattacagattagtaataacagtcaattaatattattatttagaaatccaaaggtaaataccagaagacataggggaaaggagctgaaagtggctgtcactgggcagagggatttatgggtgaaaaggagaggtctggaatttttttttttttttttttttaagacagagtctcactctgttgcccaggctggagtgcagtggtgcaatctcaggtcactgcaacctccaactcccgggttcaagcaattctcctgcctcagcctcctggagtagctgggactacaggcacgtgccaccacacatgactaatttttgtatttttagtagagatggggtttcaccatgttggccaggctggtcttgaactcctgaccttaggtggtccacccgcctcggcctccgaaagtgctgggattacaggcgtgagccactgcgcccggcttgggactacttttttatttttttcatttaaaggcctatagtacaatttggctacttatgttagaatactttgaaaccaatcagaaattcattaaacagaagaaaaattcctgattctcatcggaaatacagataagcacaactgtaacttgtttgacaggaagactgatgcagcataaatagcccagagatagtattctaattagcattccctaatcgcacaaagagcatctacgggaccccagtgtggcgtaagggctgaccctgtattcacagagctagaaagtgagctcagaaataacagcaggaatactaacaaaaaaacaagaaacctccccaaacagcatgtgactgaacaccaaatgagcagtgcagtgtgtgcaagacagagctctatgggctggtgtggtcaagaaaggtttcatggagatggtgtgaaggctgagaaggccttgaagaggttgaatagagaactaagggcattccaggaaggcatcctgtgcagctgaggtgtagggataaagttggaaaggtgccaatgccagcctaatgagttggcctctatcctacagccctggctgcttctgtcattaagatctttcaggaaaacagattagtggtttaaaaacccgggatctggatcatgccccctccaatgaccagttatgtgactacggctaagttacctagatattcccaaacctcaatttacttatatataacatcagaaaaaggtctattataatacatctaaggattggtatgagaattaagtggatttaccagcaacccttggcataatacctagcagagtaagcactcagtaaatggtagctatcataagaaattctacaggatcaacaacctggtttcttcaagaaataaattcaagggggtgacagaaaagctacaaattaaaagtcttaagagacatatcaaccaaatgcactgtatagaccttgtttagatctggatttaaattagctacaaaataattatgagacaactgcagaaatttgaatattgatcccatatttgatgacattaaggaatcactgttaactttttaggtttgataatgatactatgtttttttaaaagagtatcatttagagatacataataaaatatttatggataaaaggatataacatctaggatctgctttaaaacaatctaacatgagggagtatagatgaagtaagagtggccacttgctcagctgggtgcgatggctcacgtctgtaatcccagcacttttggaggctgaggctggtggatcacctgaggtcaggagttcaaaaccagcctgaccaacatagtgaaaccccatctctactaaacatacaaaaattagccaggcatggtggcaggcgcctgtaatcccagctactcgggagtctgaggcatgagaatcgcttgaacccaggaggcagaggttgcagtgagccaagactgcaccactgcactccagcctgggctacagagtgagactctgtctcaaaaaaaaaaaaaaaaaaaaaaagagtggccatttgctcataagcgttgaagctaggtgatggacgtatgggaggtcactgcactacttcactttcagaaatttttgaaattttccctaataaaaagtttaaaaacaaaagtaagtagaattgagcaactggtagctgtgatggttactattttttcatggatatagagtagagtgtggcttatctttgttgtccactctcttccccagagggtctaaccctgactcttctatggatgatacaagctcaatgtaaacctaatgatatcaaaccactccttcgttgttttttttgtttttttaactgcccatagccctcttaagatcccttgctttttaaaacactttgatagcttccctctactctacgggtaaaaaccccaattcataatagagctgtttgcttttaaaaggtcctatttctttagcctcaattcagttcacctcctcttcatactctgcacttggccttttttctgttcctcaaatgagtcatactcagtcctaccacagacccttagcacttgtccctactgcctgctatacttctcccctcaccctccaaccatctttcatctgattacttctactcttttttcagatctcagctcaatctttacttcctctaggaaggccccaccgaccagccactccaccaagctaaacaatcctccacgtatacactctcataatctgtcatacacctcctctttataagacttagcaaaaatacgatattaaaattttgtttttgttcatcactgcattcccagcacttagcacagggcctgcctagaacaagtgaccaataaatatttattgaataaacaaataaaatgaattatgatgcattgacaagtaggccccccttgagatcttcccactgctgccaaaagacctcactgaagggcttggcattaaactgttagacatcaaaactcccagtcctccctcaccagtcatcgcctacgttgaaggcattaagactcttggtgaagccttgcatattggtggggctgactctctgcaggaagtcaatgtagtcctcggagtggaagcggcacatgtcatgttgggaggcctggtatggcttgaagacctcgggatggagacacaagatgaacccaggcagggtcagccccactccacaggctcagaccacccatactgaacccagtcctggagactatatgaagccaaacatagcattcccctcatcccacaatccttaagtcagtagagagactccgattaaccaggtaagttattacaaatgagccccctgaagaccacttcttttcctttccacctccagctcagcctatcgtaccttctcaactttgagccctgatccacctgccctgttccttggaatctcctattcccagttctctccatgctcatctcctcccccaagctctgattctgtcctctttcctctggattcttctttctggagtcaaatatatgggatatatgtcaactttctaattaaaatcaaagatttattatctttggaaggtcagggggatgtgtcacacctctttgaaaactgcacaagaaagagcttttcttctcccagaaaatgcacacaggtacatacaggcaaacaatctcaagggatatagattcctgcactaacatcacctcagtcttttctatgaccagtccatttgtctgtgccttggcacaagcaatgaacattcattcatattgttcactagtttccctagcaacacataaagcctgggtttagctgttttgtcttattttttcttttgagacaaggtcctccctgtcaactcaggctgctgatcatagatcactgtaactttaaactcctgggcccaagccatcctctcgcctcggcctcccaagtagttgggactacaggcacacccaccgcacatggctactttttttatttttattttttgtagatgtgggtcccactgtggcccaagctggtctccaactcctggcctcaagcgatcccccccatttcaacctcccaaagtgctgggattacaggcatgggccaccacgcctggcgtggcttaactgttactatcccatatcacagccataaattccaagctgggaagacagcatgtgtatgtctggtagatgaaaaactggatagcgattaagcagaaccatgtagaggtattccaggctgaaaaaggaatatctaaaatatcgcctctgttccacacgcacatacacatttacaaagacggcagcatcgttccaccctggagccctagctccttggaggtaaagaaaggtggtaaaagaggagtgggaactgagggtaaacctcacaccctgatacagtgatatccgctcccctaaccctaattcctgaggccaaggccctatccacactctaaaatgcagaggaggaacacaccttctgtcttcaaaccagccccacatcacgctaaccctaggccaagggctagtgtgcctacagtcagagggtggccgacctgaggtgagaaagtactttccattaagcagaggacgccacccccaacaccctgcactttcaaggtactcctggtgacttctatccagctccccgatactctaggggcgggtcgcacttcatgcactcagtccagcccacctatccctacggccacagctcgccccaccccccaacccccggccgaggcggcggaactcacgatcatcttcttatagagaccgtaatgcaggaccaggctatgggtcaatgccaggcgatggggcttcatagggtgtccagctcctgggggtggggagaagagagttcgtcagctctcacccctggagttgcaaccccgcctcaaaacctccgtgtcccaacccctcatgcatatccctgtttcctcaccgtagtggaagttgcccacgtcggggtcgtagaaataggccacggtcttggccatggtgccggcgggagcaggccccgcacctccgccgcccgccgcccgcggccgccgccagcccctccccggccgtgcgtgctgcgcaagcacgtagccggcctctgcggaactgggcgttgcggccccgcctccatccacacccaggccacgcccccaggggagctccgcccctcgcccggctcagctctcccggtatctggggctttgagcgtcccgggttgggcagggaactggcagcatagctcctaggatgcgagggccatttgtctccggccgggggtcagatcctcgggaagccgagccatcccatccagccgcttgccccaaaccgggcgcaggccgtggtcacttctctaggaagctccgaagatcccgccwctccgtccctcaaaggtgcggaaagccggcttcccccagccctcggagaagattcctgactctccgctcggtcggggcatctgagggcaggagctgcgccaggcgtaccggatagaccagtggacaacacccacgccggaccgcctgtcccctacccggacccaractcggcgccgcacattgccccgggggggcccggcgcagtcacgcgcgcgcagagctcacgctctccgccccgcacacctgcgctccgccccctggtcctgggcccgcgacgggtgaaggcatttgggaagccagggcggctgcggaggcratctccctgacccagggccggagttgcccggagcctgccaccgctctcagccagcccgcatccttctctgttcttccctccccccgcctgccacggcgcgggtatccgcagccacagcccggggccggtgaggcggcgaagggggaggggakgaatcaagggatgagcgccggaagggcgtcgggggccctgagccgcactaggacgcccctggagccggaaccccagcagaagccggaaccagaaccaaatcaccggtaccgggtcggccaggtggtcagggtgggmgaaaccaaaaagggagaggggtgcgggagtactgagaggaaggggctgcagaggcctggctcaggccggcgtggaggaggtgcgggcgctgactcaggcaggatttctgctcccgccgcctaagaatgccgtcccatctcgtgctgcagtgtccttgggagggacagaagcgcgaacaagctggaaaggggaacgctcggggcgtcggggaagcgggaccagggtcgtggtagagagcttgcgttgycgctgacctcttgccgaaaggcgaaacagcactsytggcccggacagctccctggttgggtagggggtggggccggacctcagccggacgtcttagacgtgcttgtttcagatcctgaggacggcattcytacccctcccccattcccagctgcagccccctaaacccaggaggcgccctggcccgcgctcgccccccagggcctcatgtcggaaccacagcctgacctggaaccgccccaacatgggctatatatgctcttcctgcttgtgctggtcttcttcctcatgggcctggtaggcttcatgatctgccacgtgctcaagaagaagggctaccgctgccgcacgtckaggggctctgagcctgacgatgcccagcttcagccccgtgagtgaggagcctggaaccctggctcagtcacctttcacccttctccccacacctctgcctccctgaccaacagacccaggccaaatcctgatcaaacctgctcaggaagcctagtgatgcactcttgagttagcaagtggggtgacaccactctgaaagcaaaactagagaaagcagcatgggcaggaacggtcctctggatggtagtcttgggcttgcattggtgtccccatcttttctggtccctgaaatgctgaggtccagcatgatagcaagtaggtaaaagggtatgtcctaagcaataaatgatgggagccaccaggtaatattcccccaaagctgactcattcctgcttccttgccaatctctttcatccttcagctgaggacgatgacatgaatgaggacacagtagagaggattgttcgctgcatcatccagaatgaaggtgggtctagcatagccccttgctccstcttctccaaccttctcttgccctgacctccacctccactgactccctcttttccttcttccctcagccaatgctgaggccttgaaggagatgctgggggacagtgaaggagaagggacagtgcagctgtccaggtgagctggaaacaagggccagcatgacttagcttgccttggagagtatcctctcctccagcacaatcctctcccagcctccttgcatgtatggggttgggggaagggcaaagctggctaacttataggaagaaagttgttttgtagaaatcgcgattccttcaaaccatctctctcatctagatatcatcaagcctaacattcacctctagtgccactcctttgggttaagcagtgttctttttagcaaacagccctgggaggaagaacatatggtcactaacatcttaatattgagtttattagataaagacaagaaaaaatggggcttggggaaattggggcttctggggttttaaggagcatgctgaaagaacgtaagaaacaaaacatgaagggaaatggaaatgttaccctcactcccctcctccctgctgtccagtgtggatgccacctccagcctgcaggacggagccccctcccatcatcacacagtgcacctgggctctgcagccccttgcmtccattgcagccgcagcaagaggcctccacttgtccgtcagggacgctccaaggaaggaaaaagccgcccccggacaggggagaccactgtgttctctgtgggcaggtggggcaggtgctccagggaaaggggggctgaggtagggggcccagtgatcaggcacctgatcccaaaagtgggccttggctctttcctcctggaytgggagctccggcagaagtcaggctacacaatgtgccccacaatctgagaaggcctcccctaccttaggccagagggaagtagccaccaaactcaggatgtccctggtcagaggggagggccaagcagcctctgagttgtggtcctaaaccccagtgttccctcccctcccaggttccgggtgacacacattgagaagcgctatggactgcacgaacaccgtgatggctcccccacagacaggagctggggctctggtgggggacaggacccagggggtggtcaggggtctgggggagggcagcccaaggcagggatgcctgccatggagaggctgccccctgagaggccacagccccaggtcctagccagccccccagtacagaatggaggactcagggacagcagcctaacccctcgtgcacttgaagggaaccccagagcttctgcagagccaacactgagggccggagggaggggcccaagcccagggctgcccactcaagaggcaaatgggcagccaagcaaaccagacacttctgatcaccaggtaggaaaacacagccggsactgcactgggctgggctcttattgctctctactctggggggcactgataggacctactcctggtctctcattgttgacccctcccctttctctcaggtgtctctaccacagggagcagggagtatgtgaggtgagtctgcctgagccctaaatgaggtaatctcatcttcccatcacctacttaaactatttaagcctttcggctccctgaacccccmgagtaaactgcaggcttagcctttgctataaatcccttggtttggtggtggaggtagggaaggtcctggagccccaggggaaaagctggacacagcttgaacaggaagcaacagtgttattcttcctcttctccaagtctccttcattgtgctgatggactaccagctggcagggccagggggtgggtgggcgtgaaagccctcccctccactggacagcactgccccccagctgagggaccagctctacttccacctggagttgcacagtctcaggctgggggcctcaggagaggtcacagcccctcagtctcttctccttcccctgcctgcaacaggctgcctgccccgccttccccaacacctcgctccatatgatagagcgtggcagctgggagcaggcccctgcccgtggtgggcccctaaagcaatagcaccgtaggccccctgccctctyagcacaagaggcccaggccctggcctggccttcgtgccctttattcattgtcaataaatccgctcagaccattacagctgcttcgcatcctggctccagctcctgattcccaaggcctgttcctctccccagcccaaccccagtgaccctggcatccagagkggggkgggtcatggagccagggkggggaaagaggtgggccaraacyactagagaccttgatggatggtttccagccccagagatttcaggcatttcaccaccctagatagggtcatgacagaagagaaggtagttccggtcctagagatgatagaacaatgggaaaaaaaggagtgggttccagctctagaaatgggaaggggcaagtttccacccttggaggtgagggtggaaataagggcgattccagcttttggctgtgttgctctggatcattgatggtgtggtctgacagcttgaagatagggacagcagcatcactgggggtcaaggcttccctggccttcaggtgaggggatctgggtggccaggatccggggctttagccggcgggggaggtggtggacgcatctgtagggaacacacagttagtgctccagagttctcccttaagggtatccctgtctattccctcagccctgcagacaaaacaggactggttggaataacccctctacatacaatctcctccaaggcaagggcccttaccggcctgagtcgaggtgccatcatgtccaggaacccagggaagtccagggctttgtctggaaataagaaccacaagtcagtcttcagactttgttttgttcaatgctgtatctccagcacttaggacagtggcattctataaatatttgttaaattaatggtcaccatcctagaccataaaatccatcactctatccactgtcctcaacatttattgggcaactgctgtataatcagctctgctcaaggtacaaaactaagggagataggatgcatagtgctcccacccccaatggctgtcaagaaaccaataatgaaacctcaacaaacacaataaatgactaagtgctaagtcatgcaaagtgaacttggggtggtggagatggtggtaactccagggagggagactccttgtggacaaggtggaagtaccagaaagttttagaaaaggcaggcattccacagccataaaaaagaatgaaatcatgtcctctgcagcaacatgaatggagttggatgccattatcctaagtgaactaactcagaaacagaaaaccaaatattgcatgttctcacttataagtgggagctaaacaacgggtacacatggacatagagatggaaataacagactcccaggactccaaagggggcaaaggtaggagtagaggcaggggcgagggttgaaaaattacctatcaggtacaatgttcactatttgagttacaggtacactagaagcccaatctccaccagtatgcaatatatccatatgacaaacaagcacatgtacctcctgaatctaaaataaataataaaataaaactgctatagacatttaaaaaagaaaaaaagtgggcatcagaaaaaataatgatacaaagctaggtatctggacactaggagcaaaaggtgcatattgggaggacaccgtgagagaagttagctaatttttaaaataataacagtgactgcatacttactgtgtgccaggcacaatgctgtgtagtccacaggcatcttttttaactctcataagaattcaataagctagtaccttttccttacctcataaagaacataaactgaggccaagacaggttcagaatcccaccacacacttggagatgacagagcgggacctgaaccagtcagcctggctccagagcccaggcaagtgctctccaccaagcaagatgcctgaaggcacggagaggaccagagcgtgacctgggagtccaagcttcctccttcttcctgtctgttagcctcccaaggctcccagttccttccactcacccccaggcaggacaggtgcagggggcccatccaacacagaggtaggtgcaggtggggagaagctgggaggagaaggggacggcagcatctggaggtggggtgggcacagagttattcctggcatgtggggaggttttaccagcttttcctctcatcccatctccagttccttcctcatcacttctcaatacaggaagtggccaaatgcttgcattcggtgggggggtgtagctgacaaatatttcaacagccaatatgtattgaacgcttatgtttactatgtctcaagtgttctgctagcacttcacgtgtaccaattcattcaatcctcaccactaccccatgaggtaggcatttttaataatatgactcctatgttagaagtgagacccaggttaagccagctgtccaaaatcacgaagccagttattggcagagtgctggctagaacccagttctcctgatgcccactcctattctctttctgctgtatgtatatacattataacaacagatatcttatattgaaacaccttctgcattccactgcactaaaggctttgcctcggcggggcgcagtggctcatgcctataatcccagcacattgggaggccaaggcaggtggatcacctgaggtcaggagtttgagaccagcctgaccaaatggagaaaccctgtatctactaaaaatagaaaattagccgggcgtggcagcacgtgcctgtaatcccagctactcgaggggctgatacaggagaatcgtttgaacccgggaggcagaggttgcggtgagctgagatcgcaccattgcactccagcctgggcaacaagagcgaaactctgtctcaaaaaaaaaaaaaagaagaaggctttacctcgattatctctaattatgacagtgagcctgctaaagtaggtattatccccattttacatgtgaagaaacaagctcagagaggttaaatcattgcccaagtcatacaatagaaatttgaactcagatctatccagcactaaagtaggaccccccaaactcctatgaaggctgccttggtttcccttttccctgcccccccataggagatgggaggcccaggccactgtaggaggtaaaactggggagcagaggaggcattaagatgaatatgaggctttattggggtgggagggtcaacccagaggtgcctggggagttcagggagaaggtaagcctcacctgttcagggtcagagagttcaggtggccctggggggccaagcagctcttccaccagcagggaggggaagaccccaacacggcccccaaattctcccctccagaagccgtcatctactccatcttgggcccggggcagcagacggatgagtgccccctcagggaagctcagctcctctgcactctgtccggtgtagctgtacagggcctgtgccaggaatgctacagaggcccaggagagacggtgagagggaggtgggtagcagtgccccaggaccatgacaccccagggctacaacccctaacaatttttctccatacccagggtcctctaacccaaaatttccctttcttacctgtgggctctgccccgcagggattgtcactgtcttggctgctctctgggagggagaggtccgggaagttgagatatcgctcagggacaaagcctacctcgccgtgctggttccgagcctgctcacccagcaatgtgaacagatattagacttacctcagcagtccatgaccctggctctcttctactcaggcttctagctttgcctagaagggtctatggaggccacagagaagtccctcctactgcccccaacccaaggtcagagcccggggtcccatacccaccttgacccattcgtcagcatctccctcctctatgacctccagccactcaccctccgtgattgtcagctcatcctcacgccctgcctgggccacacacgaaggattcaggacttggctgtcccccacccttgcccatcagaggtccccacccccattcatacctgatagcgaaataccacgtgtgcagggcaggggagggccctcgtggccagggcttggggggcaggctcctcaaagagctctcccgtctcctcacattcctcaaagtcagaaagctcagcatcctcagcctagaggggcaaagaacagacctcatatggggcccactctcaagcactggttctatctcccactcttccatctttcctctaaaggacaccatggatcctccaaggcaggtgcacccatccactcaccatgtacacaaccacagtcaccacagagcaggataatactaacagtaatagagttacagtaattgagtgcatactatgtgccaggtacaatgcaaagtatcttgtgtatattgtctcatttaatcttcataatgacccagtgttaatagttttgcacaactattaacctcactttatttacaaggaaactggggttcagaaaggttaagtcacttttcgagattgcacagctcataagtggagtggctggtactcaaagcccttacagactgccccagaaccctacttcttaatcattctattatgctcataataaaaatgtactgaggactctatgccagaaattatgcaaagaatgatatatgatgatttcacttaagcctcgtaataaccctttgagttaggcacaactgtgattccagttttatagggtttgccttccactggagtttttcccttctaagtaaggatgggtagtgttgggggaggagctcacggttggagagaggtccctctgggacagccgagcctcactgagccgccgctcctgctccacctcatcctgggcctgggtcatggctggcttcagccagcgctccacatctaagccagccccctgcagcagggccagccgggcagcccccttcacctggctcacctgccatggggaggaagtaagttagtggaacctggctgacggcagtgtttactctctgcttctcccttccttcctcccaccatcagaaagaggagtagagggagtggggcttgcctgagaaggtgggatctctaacctcaggggtgtgcctcacctgtgcccggcggatgctctctcgcacttcctgtaacctctgttctatgcttggagcctcccgctctgaagcctgctgccgcctctgctccagtcgttgcagtacctggttgggaaggcagagaacaggggtgggtggaaatactgtggggcatgacttactatgggactggtactttgctagttgcatcacatacattatgtcatttaatcttccctatgaggtgggtgctattattggccctactttagtgatgaggaaattgaagtccagagaggttaagtcactcccttacctggggctacagaactaggaagcaacagaagagaatttgaacctatgtcggtctagctccaaaaactgtgctcttaactattgtgccacactgttaccttaaaatacctttccctcccctctgtagctccatgacaccctcaatggctccaagatcccctctctcagctcttcttgctgagacaagaaggtgcacatgacacctgtgcccccccacctcacccgatgcccatggttctggatcttgtagtcacgggcagctcggctggtcaagcgctgaacctctttctccaggccactcttgccagccacgccttctgctccccactccaggacacacacctgaatgggtcagggggtgctgtgaggaggacctgaggctgctccttctctccagttccctcctttttccactctatcttgacctccaaggacaaggacaaagagaaaggggcacatgcctacagtcatggacacaggtaatgtggacacagagatacagagcttcagaaatgggatccaggtcaagggacagaggtagaatgaaaaggatggcgcagtcaagtgactgaaaggtggactgaggtgtgtttttttgtgtgtgtcctgttgggagggaggtgagctggagttctgaaaccccctctccacggtgtacactcactaagttaacacaaaacaaagataatggaggaggcctaaatcataatcgcctttatatgtggcctggttccaacaagcaggaagatctcacctgatcagtccctgctggctgaaactgctgaggtggggtgggggaaaatacaccaggctcctgaagaaacagcttcaggtcttgctcccagcttacctaggggttgggaaaagtcaaagtcactcattcactgactcactctccaaccctgtccctagcacttcttggaagaaaaaggacaatgtgtgaagcaaagagggctgcattgggagggaagggtaaaaaggatccccggggaagctcttagaggccacagccctcacctgggaggttgtctgctccccgcggtgggcatgctccaggatgacctctgcggcttccagctcagtgtggctcagggaggtcagggg

SEQ ID NO: 98253 - DNA, 115259 bp, Homo sapiens
  misc_feature (1)...(115259): n = A,T,C or G
tccacaggagtaaccactgttaatagtttttattgttttggatagacctttttctatagattgcaaatatactattctgtatgtacatataaacaaacacatatacactcatttacagtttgtgtggtttttggtttttcgtaaatacaaatagggtcattctacgtatgctgctttacatcatatagctgttttcagctagctaatatagatctgcttcagtattttatcagctgtataataatttactatgtggatagattattttccatttttttggtattacaataataatgtggcaatgaacccccttacattatacatctttgcattcttgtttgagtgggttagatagtagaatggttgctgctaggtcaaaggctgtgtgcattaattttttttttttttttttttttgagacagggtctcattctgtcacccaggctggagtacagtggcatgattatagctcactgcaatcttgaactcctgggttcaagcgatcctcctgcctcagcccctcgagtagctggaatcataggtgtgcaccacgacacctggctaatttttttttttttttttttttttttttttttttttggtagagacggagtcttgccttgttgcccaggctggtctcaaactcctgggctcaaatgtcctcctgccccagccttccaaagtgctgggattataggcgtgagccactgagcctggcctaaaattttttatatttgctgccaaattgccgtccagaaagtctgtagcaccctatagtcttgccagcatttttctcagtctttccaggtcttgagctggacaggtcactgcctgcgtaatactctctaaggctctttgatttctttgctctgttaattttttcgggtgggataattgcattgtggttatgttttttttttttttttaaaagtctttatctttctgagatacatacaaaatatttgtagatggaatgaattaggggggaaaaaggataggatggaatttttttttaatcccaaaactttgctgaaaaatgaaagggaaagacaacagaaccaagaagtgcagaaacagatgcacttaatggggaacagatttccttacatgactgagggataaccacagctggacacttgtgggacacgctgtcttgctcccacgcagggttagaggtttgagccggctctgctgcagagcctgatgggcttctcagccccttctagaatctgcttctgtcttagaattcaggcctccgaatctctcctctggacctgggctttactgctctgactcttggggatctctgcaactctcttcctccaaggatatcccccgatcccttctgagtgaggaagtgtctgaacatctggaagtgtctggcttcagggcttccaggactattggaaattgcttttcattgtctggtttggtttggtaaaacctgtttttaagttcttccttttgggttttttatcaatagctccaggctggcatctggacctagtctctgcattataataataccaagccctgtcacagccagcagaagcctcaggcctcttcctgttcctaagccctacctctctgtcaggccacccactgagtttctgttcttctttgatgcctatagctccagcttgcatatgacttgcagagtagaaataggaagagttaccactttttgtaggtttgccaagcaccagacactactaagtgctatctattacaacatatatatgatcattctgttgccatcagacaactctgatggctcttattttcagattaacacgggaggaatctaaggctcagagagtctaagtaactttctttctttcttttttttgagacggagtttcgctctttttgcccaggctggagtgcaatggcatgatctcagctcaccacaacctctgcctcccgggttcaagcgattctcctgccttagcctcccaagtagctggattacaggcatgagcctccacgcctggctaattttttttgtatttttagaagagatggggtttctccatgttagtcaggctggtctcgaactcctgacctcaggtgatctgcctgcctcggcctcccaaagtgctaggattacaggctacaggtgtgagccaccgcccccggcgagacttaagtaactttctgaaggtcacatggctagttaaagatcagggctgagattcaacctgattctctgactccacacctttaaccctgtgcacttagaagtaactgagacattgctcaccatgcagataaggcctttcctggcttagtgcctcagcttctctttgatgactttctcaattctctgtgtcccagagaatactttttcttttctttcttttttttttttgagatggagtctcactctgttgccaggctggagtgcagtggctaatcccggctcactgcaacctccgcctcccaggttcaagcgattctcctgcctcagcctcctcagtagctgagattacaggcatgtgccaccacacccggctaactttagtatttttagtagagacggggtttcaccatgttggccaggatggtcttgatctcttgaccttgtgatccacctgccttggcctcccaaagtgctgggattacaggtgtgagctaccacgcccggcttttgagaatactttttcaaaaagaaagaaaccaatattgagtacctgttgggccctgttttgctttcacatccattctttcactatgggtttataataccacgtcactcttcttaaaattaaaactctcctttaccttgcacttagaagaaaatccaaaattttgactgtggcttaaaaaggtcctgcatgctagcccttacctacatccaggatctcatctctaactactctcctccatgcacagtgctcccggctgtcctggcctccttgttcttactggaatacatcagtctctttccatttcatgacctctgtagttggttttcttgcagcttggaatggccttcctgaagtctttgcctgcttagctcctcctcagactttaggtcttatgtcccaatagtcctgtctgaaatttcacccttttcctctcatcaccttcagtcctatcacttcattttattaattgtactctccatcatctgaaattattatatttatttactttgttagttactagtctcatttattaggtaagctttttgaggatagacaaccttgtccagcttgttactctactgtattgctaaggtttatgacagtgtctgtatagagtagttccttaatgtttatttgatacgtgaatgggtgaatgaatagcagtctctaccaacaagaggaggagtggttctcaacggggcctgagaaatggctttggaaaagggtgctgggagaagattagaacttagagtgagatcctgacctctctccccttgctttgcaggccagaggcacccaatgagttctatgatggagaccatgacaatgacaaggaaagcgatgtggagatttaagagtggcttgggatgctgtgtcccaaggaatttcttttcacctcttggttgggctggagggaaaaggagtggctcctagagtcctgggggtcaccccagggcttttgctgactctgggaaagagtctggagaccacatttggttctcgaaccatctacctgcttttcctctctctcccaaggcctgacaatggtacctattagggatgagatacagacaaggatagctatctgggacattattggcagtgggccctggaggccagtccctagccccccttgccccttatttcttccctgcttccctcgaacccagagatttttgagggatgaacgggtagacaaggactgagattgcctctgacttcctcctcccctgggttctgacttcttcctccccttgcttccagggaagatgaagagagagagatttggaaggggctctggctccctaacacctgaatcccagatgatgggaagtatgttttcaagtgtggggaggatatgaaaatgttctgttctcacttttggctttatgtccattttaccactgtttttatccaataaactaagtcggtattttttgtacctttcgcctttctaggaatgttaattcttgctagtttcctatttatgaaaggagagggaaatgggcatgatgatgcatgtaataaaagcatagttaacattcattcagcacttatcctacgttaggccctgtgtatgtattctacatttattattgtaaatataagaagttaatagaggattttggttaagagttagacaaacctgggcagatttgagaggagtagaagatgacttcaggtttttgaatctgggtgtttagagtagtgatgctagttggtgaagatacactgagataaaacatgttaagtgcttagcacagtgcctgacagaagaagttgcccattatctgtctatgtgaagaacaatgctaaatactgtagtagccacaaacatgaacctttctctagaagagtttacattccagtcagtagtatgataaatattgtagcagatacagactgatacaagaaagaggactgatagatgggtcacttcctcccctccattctctgattctgtctgttctcaacactagcttagaaagtagcttttggactttttagacaaaatgtctggaaagctcagcactaagtcaagtttgaagtatgggatggacagctctatgtaacattctatccgatcaccatcagaaggtctggaccacaagagagatgaatgccaaatttaggagccagccagcttggcagagtccctggtatatctcaggcccttgactaggtactggggctctagagtaagtaagtcactgactctgcccttcaggaacttatgcttgaaatcttgctagctgtggtcaagaatattcagtccatattgtgaaggccgactggtagccacgtaactgtcacacaagggacagatgtagctgggagaatggatgaaattgcttagggagaaagtcatgctagaagagcaaagaatatactcttggagaatactcattcttttcactcatgtttggtttatgtcagtggggaatcctggttaaacatagggtttggcagcaaatcagactaagctgggtttaaattttatatcaattatgcgttcttgggcaagtcacttcaactctcaaaagtccaaatttactatttataaaatggtgaggctagcagaatctatcacatgggactgtggggacttagaaaaatacatgtagagtgtttgcctagtgcctagcagagagcaaagggcatggttaagtggtaactgttattgctgtttaggcacatgttggcaataattagtttgtcctgattagaaacaattagatggtacctaacctggaattcgaactaggaaattaaactccagagcgagtctggtttagtctagtgcttgccctggaccgagctctgttcttgctaccttgctttcaaaacatggtggctatcactataatttttttcatgtgttccatgggtattgcacacattgaaaactgcattctcttggaaaacctgtcactaattttctgccaggataatggtctcacgcgatttttggtctgggatgtgagagggtccaggctgtcaggctgtacagccacgtgggcgctgcgtgggagccagaggcctgcgctgctccaaccgccagggggcggtgctctccgccgcggccgcggagagctgcaccgcccactcaccacccccccccacgtgggtccgaatggttaggtccgctgggcaggtagcgcgcttccgcggcttccctccgcccctctcccttcccccattggtaggggctgcgggtccgggcggaagtggggcaggcgggcgggagcgaggcgtcgtcgttgtatattcatgaggcgcgcgcagcccggcatgctaatgaggcggggcgcggcggctggctaaagagcgactgggcggcggcgggcgcggagctgccaggcgggagcggcgtaggcgcggggtcgccggccagcgtgaaccgggacatggagccgcccggcgggagcctggggcccggccgcgggacccgggacaagaagaagggccggagcccagatgagctgccctcggcgggcggcgacggcggcaaatctaagaaatttgtgagtgtccctcycatcccgctcctgcctggccccgtaaccgccctctggacccctgcagccggcccctggggcgcctgcccggctttggggagccgcccccgcgccttccttcctcgtttcgctcggtccgcagctctgcagcccgacatcctctcccttcgggacctcgggaagccccggaatcccacccggctcttgccccggccacctcggggcttccctcgttccccagcccttacattctgccctcccgcccgcatatccccggccggctctcagccccgtctctcccctctcagcctcacttcctttcttcttcctccagtacccgaacacgcctcctcttttttggtcccctcttctgggtccattttctcttcttaaccttacaccttttttggtattctcgtatttccttctcctaaaggtcacttccttctccatgattcatcctttttacctgctaactttcctcccgcccagtcccccgtgggccctccgcccggtgtcacttgataatccttcccctgaggaatgttacctgacttgagccctacccccaactccttctttggacgtttgtccttgcgattacaggaatgggctcctgcccaggtcctatggtcactggggcatgacgtttatttgtttaccagtattcctctctccagagaacctctctctttgccctgttgcttatcacttttcagaggattagaactctcatgattgtgcccttcttgacctaggatggtgataaacctctcctgtgggaagaaagttggactgcgagttcaagaagtttgtaattgaattgttttttatacatttcccatgataaccgtctcctctactccttttctactgcctcttgtgccccaaggcgactatcggcttccctttgcgtgcctgtagaagagtaagctttcctcaagtgccagttactttcaatccgagtgaaggaatagtgatatacatgtaaccctatcatatttcattaccttttgcccacaccaacgcctctctccagggagccgtttggttgcttttttgctataaaagctttgtaagatacggggcactgtccaggagaggaaaagtcttggatattgatgatcattataatagctagttataactgtagctcttttgtcttctcttccaggtatttatgcccttacactagtgtatctttctactaaacaaatggcttgtaactcttagtcccacctcccaacattttgacccagctccacaaatttgggaagaaaactgataaagcgatggaaacaggaagaaaatgttgttttatgacctagagggttgagatgttaaccctggagggttagatgtttaattctaaatagaattaaaatagtgactcatctcttcctatttctagcaagaccaagtgctcctggactgccctttccagtgatatctgagatgtcagtaaccatctgtttttatctggtgaacatctttttttccccccctagaaatataaggttaagggtattgacaccccctccttctttggtgactaaagcagcatttttgtatgtttctttaggataagaattgacccctcccccccgttagctttccttccaaaacttaagttctagggctcatattccttctatttctgtatctttttgttttgattttatttccatgagtactgtttgaccttcctcacccaaattccagctattgctgctgacttgtggtgacctcagtgacttgttttcatgtcttgagtagaattttatatgtactctattttatctaacaattatttcacgaacttgtgaagtctactatgtgtgtggtactgtaaggtgagaaacctgaggaagctcaaccccttttcacctgtcttttggaatgtccatgaagtcttctatatgtttaatggatttggctcagggttgtaggtatttgctttagagaggatggagctgaaccaagttctcttttctttctgcggtgttagtcttaacccttaatctgctgaatttttaaaactaaatagctcargtaatgaggaaaattgcattagtagctacggaattggaaggtttctaggaaagtagtgctgcttaacccttttattgccaaatgtaacctatctcaaggcatcagaatattctttcttcctcttgctccttttatgagaactctgtggaaatgagagatgaggaggagcattgcmatccacttctctttgtgtctgtgtatgtatacgtgggtgggtggagtgggcgagattgctggtgtgcttttgatacccgtggcttagttttcttgaactataggctaaaactgaactcaaaggtctttcgccgcctccaccttttctagagtatgtgtcctctggaactccattaagaatgtactgtataaaactgcactggtttggactaagtgtgcccgaaggttgtttgcatttgagggtttataattcctttagctgctacatacctttcctggcttatgcaggttctaaatacggattaactggtgagaacacagagctcacaaattgtctgagatctgctcttaccctctgaggcatcttgtgtggaaaggagatggaccctcagtttaaaagtggttgggcatcatcttttaaaaacacatgattgttagacgtgctgacagtgagtggctgaagccaggctgcctggtattaccccttggttcttcatgagtctgtcttctcctgggccatgagcataccccttctccggcattattccatttcctttcacaagtccttaagatgaaggaaaataaaaattttaggtgaacagagggttttctgacttttcagcagtgatcaatgtgggtgtcaaatagactgatttccaaaatatacgtaaggggaataagtagaaccgggatgttaggaggctgcagagtattcttacatttaatagactttgtatgcactctcatataatcgagaaagtgatgcattgtaagagagaatattgcttcctgatttaactaggagcattagcgagaattttttttttctttttttgagatggagtctcgctctgttgcccaggctggagtgcagtggtgcaatctcagctcactgcaagctccgcctcccgggttcatgccattcttctgcctcagcctccccagtagctgggactacaggcacctgccaccacgcctggctaattttttttgtatttttagtagagacggggtttcaccgtgttagccaggatgttgtcgatctcctgacctcgtgatctgcccacctcggcctcccaaagtgctgggattacaggcgtgagccaccgcgtgcggccctttttttttttttttttttttctttttctgagacgagtcttgctgtgtccaaggctgcagtgcagtggcgcgatctcggctcactgcaacctccacctcccgggttcaagcgattctcctgcctcagccttccaagcagctgggattacaggtgtacgccgccacacccagctaatttttgtatttttagtagagactggtttcaccatgttggccaggctggtcttaaattcctgacctcgtgatccgccagcctcagcctcccgaagtgctgggattacaggcgtgagccacctcgtccggccaagagaatgatttttactattattaaaattattaaaattagtttaattttggattcctatattgagttatgatcatgttgcagttacacggtcttctaaatgcaaagtaatagagtataaatgtttagtagtagactcctgtccaaaaggagacaaattaaaggatgccaggcagaaagaagtggagttgttcgtgcagatttctgcttatatcctcttaaaacattaactttaatccaaaagtttgcagaaaactgaaaaatatacagagagctttgcaaaagtttgcagaaaactgaaaaatatacagagcgctttgtacacctttttttttttttaacagatgatgaacgcaaggattatatagtttggaaagagggaggggagcctacaggaacgttagtgagatgtttgagatgacagaatggtagcttaaagatttccgccattcttcctgccttgtcttaaggacagatcatgagtctacttggtatggttacctgtactttttcaaagaaaattctccctcacaggaggtgaaagtgagggaatgccttagaattaaaatctctgccttgggagagttggtaaatttttttaaaaagctgaaaattttatgacccgtaaattatgtttattatgaaagctaagaaaatagtgagacatgatttaattttgttgatgggtgcacgggtcagaataattttatttcctgtgtcttagaatcaccttttgttattccccaaggcccttggtattttataaatgtattgccaggctattctyagggagtgttatatatcttccatgaaatgtaatagagatttaaaagataagttgtatgtcacatatgatttagaagaacaggttaaaataatttttattgataaatactagatgttatagagaagcaaagagtttgtatatgcaggtttatatatccctttttatgtcccagtagctgaaattatttatggctacaaaaatcatccccattttgaaacaaactttgtattacttaagtggttttcttttttcattgagcctccttttctcaattacctttgtttgaaagcagtaggcaaaaaattcattttrtgctaccagcaaagcattggatgtttgcccctccttggggttaggtgagacaaagccacactctccccttgcctggctgcctgtcacctcctccctgtgtttttattcctttcctacttacgtgggggctgatttgagcgctatgaatagccaggcctttggggaattaggggcagtcagaagctgttgataataaaatttcttaaaacttttaagctaaaattgaaaagtaaagaataattactatgaacatattttactgtatttctccttttttttaacacgtttcttaggatcaagaaaccctttttaaggaagtaaaagaattactgaaggaaaagagaaatagactaatattttaatgaattttaccactgattacaagataactctcattgttctttcaactttgaaattcttacttccatccattattaaatcttactgtgaatggtacccttaaaacttcagagttggaagggactttaaatgtcatcaagtccaaacacccactcagtgcaacagtcacttctgcagttgtaggttggaaacatcagggggctaagaggtggaaattggatgaacaagtggaggaagaggagcagaaattttggattctacattttctttactaaattttaggatcttgggaatggctggagtagtagaaagagattatataaaaggaacagatatactagaagctgtgagattgaaaggaaaaagattgaagaaattggctctctattgcttggctctgtaacagttagggagagtcagtttgccctttaaatatttgtttaaatttctttcctccaaggcgggggatagaacagataaggggatgcaaatgagagttagcataatggaattgaattaaaggaaacattctcttatggaggatgggaaaattccatccttggtggtggatatgactggtccttagtagctatctgggaattttgttagggtggcaaatataggtagaatttatggtgtcctgtataattttctggatttctgattttgtgacttatttcctgtcttgtgagtagtgtcatctgaaggctttggatttgtaatttcttttaagatttaaaatactgtaaggacccaagacaggatgatttataaaccatttttgatactgaaggtcacagaaaaccaaagagcatacgttggtagttggccttacatctcagatctgtctgtgttttattttcagtgtcagaactttaagatcaagtagaaaagatacccttcatctctatttttacagcattattgatatataattaaaatacaataaactgcatatttattcatgaaaccatttctatagtcaagataatgaatatagcagtcaccttcaagtttcctccttctcnctttgttatccctccctctcacccatcctcgtcctcccatctccagattaccactaattttctttctgtaactatagattagtttgtgttttctagaattttatataaatggaatcatacagtatgaacccttttgctggggcttcttttattgtgatgtgtggtctttcatatatcaatagcttaatcctttatattgctgagtactattacattgtatggatttacacaatttgtttattcatttaccctattgatggacatttggggtgttcccagttttgggagtgcagtttttgtctgtgaacattctcatacaactttttgggctggacatatgtcttcatttctcttgggtaagtacccatgagtggartgrctgggtcatttggtagatctatgcttaattgagaaattgccaaactgttttcaaactgttttccaaactgttttcattttacattcttaccagcaatgtgtaaaagttccaatttcctgtcaactgttagtatgatcagtcttaaattttagccattctagtgggtatgtgatgatatctcagtatgctttatttatttatttatttatttattattttttgagacagagtttcactctcgtcgctcaggctggagtacagtggcataatctcggcttaccggagcctctgcctcccaggttcaagggattctcctgcctcagccacctgagtagctgggattacaggaggctgccaccacacccagctaatttttgtatttttagtagagatggggtttcatcatgttggccaagctggtcttgaactcctaacttcaggtgatccacctgcctgggcctcccaaagtgctgggattacaggcgtgagccactgtgcccagctgcagtatgctttaatttgtcattccctaatgatgttgaacatcttttcttgtccttacttgctgtttatatatctttcttaagaatctgttcaagattttgcccatttgctatctatgtatcgtccgtgaagaatctgctcatgatttttccttccttccttcctttctgtcttttgtctttcttttgtctgtctgactttcttttgtctgtctttcattctgtctttgaaatggtagtctcactctgttgcctaagttggaatgcagtagtgcagtcatggctcactgcagccttaatctcctgggcttcaggaatcctgcctcagcctcacaagtagctgggactacaggcgtgtgtcaccacttctggctgtcttttcattttcctaacagtgtattttgaagaaccaaaaaacttaattttgatggagtccaattttttttcatttttgttttgtgtgttacatttcaaaaatctttgctaaaattatggtcgctaaggttttctcctctgttttgttttttgttgttgttaaaagagaatggatctcactttgttgcctggtctggagtgcagtggcacaatcataggtcactgcagccttgaaactcctgggctcagcctccccagtacctgggaccaccatgcctggctaatttttcttttcttttcttttctttttttctttttttgaggcagagtctcactctgtcacccaatctggagtgcagtggtgcaatgacaactcagttgcagcatcgacctcctgggctcaagcaatccagctgcctcggtctcctggagtatctgggactaccggcatgcaccacaatgcctggctgatttttttctttttcttttttttttttttatagtggtggggtttcactatgttgcccaggctggtcttgaactcttgggctcaagtgatcctcctaccttggcttcccaaagtgctggcattaaggcatgagtcactgcacctggcctaattttttttatgttttatttttgtagaaatgacgtctcgctaggcggggtacggtggctcatgtctgtaatcccagcactctcggaggctgaggtgggcagatcacgaggtcaggagtttgagaccagcctggccaagagaccagcctgtccaatgtggtgaaaccccatttctactaaaaatacaaaaattgggctgggcacagtggctcacacctgtaatcccagcactttgggaggtcagggtgggcggatcacgagatgaagagatcgagaccatcctggccaacatggtgaaaccccgtctctactaaaaatacaaaacttagctgggcgtggtggtgcgtgcctgtaatcccagctactcgggaggctgaggcaggagaattgcttgaacctgggaggtggaggttgcagtgagccgaggttgtgccactgcactccagcctggcgacagagtgagactgtctcaaaaacaaaacaaaacaaaaaaattagccgggtgtggtggtgggtgcctgtaatcctagctacttgggaggctgaggcaggagaattgcttgaacccaggagacggaggttgcagtgagccatacatcatgtcacccttgggcgacagagcgagactccaactcagaaaaaaaagaaagaaagaaagaaagaaatggggtctcactatgttgcccaggctggtctcgaactcctagcgtcaagtgatcctcctgccttggcctcccaaagccctgtgattacaagtgtgagccactgtgctcggcttctctcttttcttctagaacttgtatagatttagcttttaaatttccctcttttctatcatgcatatgtgagttccacatgttcactttgggatataaattgtcacctgtggtcaacagagaacatttctgatactctgaggatttcgggactttcattccatttatcgtggragcatttttttcttgttaggtggtggtgttagcaaccttttgttttcctgtattcagtatactacagattgtgtaatgccagtcttcctgtttctaaatattaatgaatgtttagcatctttatagataaggaaaattaattcattccagactaggatagggaataayaacagtagcagtaataaaagcagttgtttgttgcatacttaactgtatccctagtgcagtgctaaagagccttagatttattatctcattaatctctacattgaccttataaaataggtactgttattattcccattttataggtaatgaaactggaactcagatcaagcagcctgcttgaagacatagaactagttagtgacagagctaggattcaaacctaggcctagctgattcaaaactcatggacttactcactacattgtactgacagtttatgtgtgtccagtttttgtgcctgcagtgtaaaactggactgcagtgtaactattcactgctaggaatttcttagaaaattttggtggtattcccttagagttctttggtcatctacagtctattaaaatgaactggattctcctagagttcagttggcaggaaaaaagtactaggcttagatgtaaaaagcgtagtggctaaatgcctgtttttttttttttttttttgcatttagtaatttagactttgaagccattggaagaatcttaattaaaccttttttaggcatgaaaaaatagctattacagtgcttgcaaaacctatctttcgcttggctcatgcgttattaggatgatgcttaaattattattttttaatgtaactgtgtctcctttgtaagtagaacagctctaacatcatcacctgtcaggagttttagttgtttaaattgctgagagccacaagtagtggtaacaatgttacaggaagggggaagctgttactagactgtctctatagttatcctttttatattttaaatttgacgtttggtattcttaaagacctctgtttgtgctcctgaaatttgactgttgtaatgattgcaaatggctaataaccaggatctcttctgagtctgggaactgctgaagtttgttctttagacctggcagttatttgccagtggttaataattaagacattgccacagaggtccaagtacctggaactgggatttgtttctggtgactagtggtgaggagtagggaagagtttctgttgatttcctgagtctacatgtatctactctagatccaaagactgaccaagaagtcatgagactgtcctatcaggttcagttcttgctctttaagaaattgtaatttcaaccacgtctataaaagagggatagaaaaagctctaaggctgtgatcttagactttaaatgctgtagaaattcatagaagtgagggaattaagtggaaaggctattggactgacagaaggcctaagtttcaaaatcttagaatgctggagtcaaaaggatgctaagaattatctaattcaacccctttattttttattttttaagagtcagagtcttactctgttgcccaggctggagcgcagtggtgcagtcatggcccactgcagcctggaactcctgggctcaagcagtcctcccacctcagcctccagagtagctgggatacaggcacaggccaccgggcccagctatcaacccctttactttatagattaagaaatgttgactagacaagtgatctgtccaaatttaaaactagaaatagaacctttatctcccaccctgtctgaattattctttccatatgtagctgcttagttgtgtctttaccactaattaaccatgtgaactctaagcaagttattttacttttcttcatctttttatcttttgtaaaattagggggttattatgaatcatttctaacatctctgctaatgccccagatactgtaaatgacccagaatgtaattgcgggcagtgttaacttagcttcctagaagatgggggatatgactgggccttgaataaaatccaagatttggcagagtagagagggaaagaattcatgagatggggagcagtagaacaaaggcttaggtgtgaatatgtggctgtagtaaagagaaatggcctgattatagcaattatatgaggtttagtagaaccatttaagaaaggtaaagccacttcatagaaattattttatccctggtaagggctttaaggttccctttctataaaaacctgcagaaagcaggattgaaatttaacattttgtaacaggttgtaatacatgttgatgtccgtttttggccatgtgataagtggtggtgacagtaagtacattggaatatccaagaaggaatagtgttaaggtcagttttcagcaagttatttccgctacgtagatggagtttaaaaagttaagtttatttgattttcagtccttaccaattttaatacatcgatctttttagactttcagaaattagattttaaaaggcgtgactcttcagctggatctcaaggatgtatragaaaattatgggctcagataggtaatgccattgttgaaacaatctgagtctatctttgggccctgttgtttcttctaaatgttctttaatacagtacgatttagcttttgattgcatacttatttgaagtattcttctgtctttcttgaatgcaaaaatatatgtttatatcttattttggggtcttatctcccatctagattgtaaggtttctaagagtagtggtagtatttagctcatgttagttaatatcctttatgtattttatattttagttttaatgttaaccttgggaatctttttcttttttctcatcttaaggtttgcttcctttttttttttttttaatagccttgggaatcttgattattttcaaggctctctgtttctgtgatctaatataggagactgacagttttgaaaacattaattctctctcaccaaagtaactatggggcagagagaatcactaatgtaactatatgtgaccagaagaactctgttgagaagagattattattcatctctggagagatagttttgacttgtgtttaatgaaagaacatgtctgtaggattaaaaaaaactcttatgttattttacatagtgtaaggctatcaacttttattattaaaaatgaaagcaggcactttgggaggccgaggtgggcagatcacctgaggccaggagttcaagaccagcctggccaacatggtgaaaccccgtctctactaaaaatacaaaaattatccaggcgtggtggtgcccagttgtagtcccagctacccgggaggccgaggcaggagaattgcttgaacccaggaggtggaggttgctgtgagtcgagattgtgccattgcactccagcctgggcgacagagcgagactctgtctcaaaataaataaataaataaaaatgaaagcaggatttgactcagtgcccttagggattgttacatacatttaaagtgaataattgctaagttcccatattatttgaatctattaatatgatctttaatggctacagaaaggtttacattgagtattaaatgaagagaacaaggaagagttttcaagtcctcagggtatgtctggatatccacaaaaagtactagtggcagtaggagtgcaccatttttttcataagcacatatactcccacccagagctataagaattccttcagttccttcatttggcaatagaagcaaaatagttttggactattctaaaattatttcattttgcatggggcctagagggatatttttagttttcttagtttttgtgaaagatgtgtgtcaggcttagaggtctctagtgatttctytcttgattcttgtatttttaaaagatgggagttggtcttagttggcagctctttgcatccgccagggctgttcgttacttacttctaggtctgtgggtgacgtctgtttcctgtgattgaaaccgcaagaagaagtggtgagaagccactgtaggatatgtattatcaggcaagcagcaggcattgggctgccctcaaaaagagcagtagtacctaagtatagtctttaaggagtcggaagagaccctagaaatgatctgacccagcctcttaaaattaggaggacactgaggcctagtggtattaagttgctcaaagtcgtgtaattagatgacctaggttttagactccactaatattcttctcagtattctytctcacattgcattgtcatacctaaactttgtaactgtgccttgtcaggagtgtttccttaagcaaaataccactggagaagagtaaatactgataggcattttgcctatggtaattggatgatgatgttttgcttttagatgatgtgctaatgattttttgtgtgtgctttttttttgaaaacacatatatatttttgaaacaatacgtaagaaccctaaatttctatttttcatttttattttacagtctttgtatattttagtcattatctctatgcacaaatatttttacaacattgcctttatagtttacagatgttttttgcttttaaaatagtgtcataaaaattttccagctttctaatctttgaaaattgccaccttaatttgaaatggaaatgtatgtgtattctaaaagtgatagtttttttctaagaaaatacaaatgtatataaaaagagtaaaacagtcccatactttgtttttcagaaattaattttttttaatggttagaaccaaagagaacagtacatgatatatggaagtttctttagatcctaagtactttggcatgaaattctgtgtgtgtttgtgttagaacatagttcaacacaagtacaattgctagaagtatcagaacaaccttattttaacacttatatttctggtggtagagaaataataagatttcatcttcatgctcatctcccctcctccctaagattttttcaaaatcttattctgaatgtgtaccgggccaaaaaatattttctgtggtttcgtaggatcaagtctggcttattgagtagtagtataatttttggattagttaagcggttgtcagtaggggtaggattatttctgggtattcaggagtggtgtgaggatacaaaaaagagattatttagaaatgaaaggactttaggaatgggatttaaaacaaggtgtcctcatacttggtgcctgtatgtagaagcggtagcagttgcagaaacttcctgctgtctgctaggctttgggtgtgtcacacacatgcccacccttgaggaagagtagatgtcctgctactcacatcataacatgggaggagaagacagttgctacggcgattgggaaacagcattcctgagtcactgactatttctaaatgaatggacaacacccctttttttaaaggagtgatcatagtcttctctaagcttaggcagcagagggagaggcctagtaagaaaggaagagcaagtatcaatatttgaagcttgagaaatatgttgaaattttggaaaaattggttaacattatgttttgtttcctgtatatgtattcaaaagttgtattggaaccttagaatgtttgaaaggaaggaagctttgcttactgttctgtcaccaaatgacagactatgcatgctggctttcaccttctgaacagcagaagataccggtgtgcctgctacaccttgtgatacttgataggaaagtaggacttccagactctgagcactttctctgttggcagcttgtttgcccaaaccatgtgtgctttatagtgcaaggactggcagtttgtatggatggacttggaggaatgcagcatcctyagcccggtttctacctgttctgctgtgctggaatagtgataccagcgtggcctttcctccttccctctgggctatcaactacctaggatgccggctgccagttgcagggctttaggatgagctgagctgtaggcaaaaagttactttttccctttccccaaggtacttgccttcttgaactattagagaagtgatactttggacctgttagaggatccaattctaatattaagatagttttcccctcattttaattataattgggaaataaggtttattggaaagcagactcaccaacagttttagacagttgtgcaggacattaagttagttgctttacatttataagtaaattatttcaaatttataagcaaattattgaaatacagaatggactacagttactactgttctttatacggcatttctaacttgtgcttgacactggccactgcctagaatctttcattgttcccgggtggggttaggaaaaagatgctgattttggaaggcaggggtagattgatagaactcttttaattaggaataaaagatattggactgtcttttactatgtttcctttgttggctgttgtatgaattctaacaagtttattatttatttatgttttctcagctttattgaggtataattgacatacaaattgtttatggtatacaacatgatgttttgatatatgtatacattgtggaactaatgagtttaactctccagtgcttagtttagctgtggggctgctgaggcactctgaaccaaatggaggagctgctacagtcttacctaatccttcagcactttttcctcagtggtcatggagaacatgagcctatcatttccatttctggggactgctaggtaatcttcagccttctttcccttaaacacatttagcttttctaggtttatagtttatatttttaaattcctggtcattttgtgcccctcttctagacttcctttcctctgaggtaccctttttctttcctttattttctttttgaagtgggtactccaactctacacaacgcctgtgtaggctgcaggcaccaataagtggtgatgtcagaatctagtttgtttctctgtaaatgctagatgaaatgttgattcaattgctgttgtctttgggccattccttgaaaatggaagggaaagttcttctgtgcatttaaagttgtccattatttcattttctttagttctgactgacttctgtttaaggagtgggaattgaagaagggaaactagccagtttcagtggttccatcatatattatttaacttttacaaagtactttgcaaaacaaagtgctttatatctgttttattatttattcttcatactagtcctctgagacaacagaaccctagagataggaagactgaaactgtggtcgatttttaaaagcttaccctgactttacattcctttagtggaaatgtgataaattttgtggcaaaggccaggcgtggtggctcacgcttgtaatcccagcactttgggaggccaaggcaggtggatcacgaggtcaggagttcaagaccatcctggctaatacggtgaaaccccgtctctactaaatatacaaaaaattagccgagtgaggtgatgggcgcctgtagttccagctactcgggaggctgagacaggagaatggtctgaacgcaggggcgtagcttgcagtgagccaagattgcgccactgcactccagcataggcaacagagtgagacttcgtctcaaaaaaaaaaatttttttttgtggcaaagctagatcaggcctcaatggtaactgaattcaagatcctattatgaccctctgttgcctcagtaccctaaggaactgtgtcaatcctgaataaagaaattaatcagagctggacccttatctctctgttctgcatgattctaagtgacatatgccttaccttacctgttctttctgggtaggtagattaggatatgaaaggaaattatttttggctgtagtgatacttatttcccattttacccataggtagactttgtcattattgagggcttattgtcctgtgggctccagtcaaggttccttggtctcattcataaggaaagacattactcttgaaggtttgatttactgagctattcgtaacaatcatagtgtactgtcatataccttgaattgaaacttttccttacttttctcaatttgaatagagtaatgaaagaataaatatactgtttcggatgatgctcctaaacctgtagtgatgctaattttaaaatttatttattaaaatgtgggccacatcakttgaataagacatgattttgccctcatgcaatttagtctggttcacagaaaaagttacaacaaatgatctgttaagaaggttctaatatagtcccggtgcggtggctcacgcctgtcatcccagcactttgggaggctgaggcagatggatcgcttgaggtcaggaattcaaaatcagcctgaccaatatggcgaaaccctttctctactaaaaaaatagaaaagttagccagatatagtggtgtgcaactgtaatcccagctactcgggaggctgaggcaggagatcacttgaacctagaaggcggaggttgcagtgagccaagatcacaccgcacgttagcctgggtgacagagtgatacttcatctcaaaaaagagggagtagttcttttttttttttttctgtgtctaagattttatttttattttatttttattttttatttttatttattatactttaagttctagggtgtatgtgyacaacgtgcaggtttgttacatatgtatacatgtgccatgttggtgtgctgcacccgttaacttgtaatttacattaggtgtatctcctaatgctatccctcccctctccccccatcccacaacaggccccggtgtgtgatgttgcccaccttgtgtccaggtgttctcattgttcagttcccacctatgagtgagaacatgcggtgtttggttttctgtccttgcaatagtttgctcagaatgatggtttccagcttcatccatgttcctacaaaggacaagaaaaaaaaggcagttctagtataaaatatttagaacctggcttgagtgagtcctttagttatttttgtgtaagaattgtggctaagtatatgatttatagacaaggaatagattttttccttatgccatactgttggcataaagcatccactagtctatcttcaggtgtgtattttacaagaagtcttgtagcacatttgcctttacagaatgatctctcaccactccattttgtttatgacctcagtggtcgtaagaggtatatgtggggggttaataaatgggggaactgaagcatgaagaattaagcatgtttgctcaaaatcatacttgtagttttctaggaagccagaaataaaaatcaggactcatgagccttttcctttagcgaagttctagataaattccagagttcagcagtttgcttaatgtattggtttcctattgcttataacatcaccccaaacttactagcttaaaacaaacacacttattagctcatagttctgttggtcagaagtttggcatggattgtgtatctgggatctcagaatatcacaaggctgaaatcaaaatgtcaggctgggctaagttctcacctggaggctctgggggaaaatctgcctccaggttcattcaaattgtttgccaaattcagttccttgcagttatagggctgaggttcctatttctttgctgtctgtcaccggggaactgttctcagtacccagaggctgcctataatctgccttttggccccctccaccttcatgccagaaatggcatcctgaatccttgtgtctctgacctctagatttaaagggttcatgggattgggtcaggcccacttggatgattcccctttcttaaaagtcagttgtgcctgagccaggcatggtgctatatgcctgtaggccccactacttgggaggctgaggcaggaggattgctggagctcaggagttcaaggccagcctggcaacatagtgagaccttgtctcaaaaacaaacaaacaaacaaaaaaacatagaccaaaaaaaaagtcaattttgcctaaaatgtaatctaatcacaggaatgatatcctatcatattcacagtcctgatgattatacagggtgtgtacatcaggctagcaatcttgggggacatcttagacttccacctatcacattaaacatgttcctcacactaaattagcccatgagcaagggtggatgtcagaaaagagagaagtaggagtgtataccgagggagttagtgaattgtgttgtgattatacatataagaaaacctggctgggcatgatggcaggtgccttgtaatcccagctactcaggaggctgaggcaggagaatcacttgaacccaggaggtggaggttgcagtgagccaagaacacaaaaacctttgtagttcccagggatcctgggcctcctagaatcgtcagagtgtaaggaccaagtggcattcagctgtgctgttctggtggtagtccatttagccaagaactcaaatataattgtagttgtctattacaacttagccttaacaaaatctttagaaagtaatgaaatacaggcttacagtgtgggtttatatttcccgtgtgctggccacatggttcttgcaattaccgtccatgattaactgtccatgtgaagcacagaagtaggaattagaaacactttttgctatgtagaatgtactctgtgttcagagtaatgtttagtcatactctctttttagatccctgctaacctctctgctgctaagaactacccaattaccttttgcttggctacatgagcatcctgtgccaagagaccatgcttagttgtctgagtattctctgggccctttttctgattaaagtgaaaagttaaagattcagagaatcaagtagaggtgaatcagtctcttggatgagttttcttgtgtcctgaatttacaatagattgaattctgttactaagcaaacagagggagcctctgtgcagaagactgccattggaccgtttttaaaaagctgaagtattaatacacacaaccaccaccactgcaagaacaaatccagatatgcaaaataagttttaaacttcatttatgttttctgataataattaatcagggtgtttcaaactcattaagttattaattagcttgaccttacagggaataaataccttggggtcttttgacttttttgttgttgttgttgttataaactataaagtatctaggaagtttctaatttcctgtagatggtaaccaaaagatttatcttaccacatattacattaggatgtggtaactgaatcagaacttgaattactctctggaaggggagtaaagggacagcttttaatttttatgttgatggatggtcttagtgcagagaagaacccagccaaatatatttatatttgatgctgttatttttgatgtactgtacctttgagcaatttgtattgatttaagtaagatttgatagcactgagaatcttttggagaagagaagctcattttaatacatgcaattctattaaattattttcctgtaccagctaatgacctttagacatttatctagtcatctaattctattgcataaaaactcctatagaataaatgtttttctgcccctttaaaaatattttgttttcattaataattatttgcatataaatgaaatagataaaacttaagaaacaaaaatctaacatgtgtataaaagttggcattgccactgttagatggagtcttccaggcagagaaaaactgaataccatctcagagtcatagcccagcttcagattctgtgagtgtttacgagtgcacctagattttaaggacatcacttggccaggacataagtaaggcctgggaaacagggttcaccacagttgagcatctggcaggcctgcagtgagggccaagtactagacattcaacaggaataaggttgagggagtacactgctctgtattttctgcttctgagcttaccatatgcaacctctgggtctcctgaataagtcaaagcgggaaagttctgtggtgtgggaatgagtatccttgacagtccaggtagtagagcagagaaggaaagaaaaaaactgttaacatatggtccagacaggccaaccatctgggtcagattcacccaggtgttgtgaattttaaaagccagaacaaaagcagatgatggtgatgacaggcttcaagggtctggctcaagtctcattgctcccttttagctggtggttctctgtacctggcacatacagtcatcctggaacctttatccccgggatttccttcaatttcctcatgtgttaggtttcatttcctgtatttcaagtcttgcacttttttggtttgcatcctcattttggtggagcatgtcctacagtagcttcctgcggtatatgggaacagattttttaaagcttaaatgtctgaaaatgtctattctaagctgacatttgattgatagtttttgttgggtatagatttgtagtttggaaattatttttcttcagatttttaaaggccttgttccattgccacccagctgttgatattattgttaagaaacccagaactgctctgattcctttgtatatgacctgttttcatcctttctgtggaattttgtaggattttctttgtattccggtgttttgaaatttcaccattatatgcctttgaataatctatttttgtcctttgtgctagagacttatccttcaatactgggaaattttctttatttccttgataacttgctctctattttatgttttctcctattatttggatattggtcctcccaaactggtcttctaattttcttatctttttgctgtactttttggggaatttccttaattcttccagtccttttattgagttttcatttctgttcttgtattttaaacttctaatgasctctttttcctctgaatgtttgttgtggatattaatgatttttagaacatctttcttcttgttgcatactgtttatttggcaagttgcttcccccagccccgctttctctcatgttaggatctttcctcagatgtctgataatcctgggttgtctactcatgtttaagaatgagggattacaaagcagattggaaactctaggtgcgtgggtaggatttgaaagctggttgctttgctgtaggacagcrccatccaatagaaatctaatgtgaatcacattgtaagtttagattttctagttttagaaacgtgaaattaatatatctaaaatattacttcaatatgaatgaaatataaaaattattaatgaaatattttacttttttatattgttatgaattgcagtgtttattttacatttacagacatctcaactgagacgctaaatttttatttatttatttatttatttattttgagattgtcttgctctgttgtcagcaatgtgatctcagcttgctgcaacctctgggggctcagctgatcctcccacctcagcctcctgagtaggtgggactacaggcaagcgctacaatgcctggctaattattattactttttttttttgagacagagtcttgctctgtcacccaggctggagtgcagtggtgcgatctcggctcactgcaacctctgcctcccgggttcaagtgattctcctgcctcagcctcccgagtagctggcactacagacgcgtgccaccacgcccggctaattttttgtatttattttttagtagagacgagtttcactgtgttagccaggatggtctcgatctcctgacctcgcaatccacctgcctcagcctcccaaagtgctgggattacaggcgtgagccaccgcggctggcccatgcctggctgatttttaaatatttttgtagaggcaggttttgccatgttgcccaggctggtctccaactcctgggcccaagccatctacctgcctcagcctcccaaagtgccgggattacagatgtgagccaccacagccagtccctaaaaatttttttaagccttttttttgaagagcagttttagggtcacagcaaaattgagatgaaggtatagagatttccaatatatcgctgcccacacacgtgcatggtgtatcaatccgttctcacactgctatgaagaaatacctgagactgggtaatttayaaaggaaagaggtttaattgactcacagttctgcattgctgggaaggcctcaggaaacttacaatcatgatggaaggcaaaggagaagcaggcaccttctgctttgccttctaagggtggcaggacagagtgagtgcaagcgggggaaatgccagatgcttacaaaaccataagatttcatgagactcacttgatatcatgagaacagcataggggagactgtccccatgatcctattacctccacctggtcccgcccttgacatatggggattatggggattacatttcaaggtgagatttgggtggggacacagagccaaaccatatcgcatggcctcccccattgtcaacatcccccactagcgtggtacatttgttgcaattggtgagcctgcattaacacatcagcatcacccagtccatagtttacattagggttcactcttagtgttgtacaatccatgaatgacatatatccatcactatagtatcatacagagtatttttcactgccctaaaaaccctctgtgctctatttattcataacctgcctaccctacctgcctcccccaacccttggcaaccacagttctctttactttttccatagttttgccttttctagaatgtcatatagttgggtacatataatatgtagccttttccttttttctttctttttttttttttttgagatggagtttcgctcttgtcgcccaggctggagtgcaatggcgtgatctcggctcacagcaacctctgcttcccggtttcaagtgattctcctgcctcagcctcccaagtagctgggattacaggcacccgccaccatgcccagctaatttttgtattgttattagagaagagatttcacaacgttggccaggctggtctcaaactcctgacctcagggaatccacctgcctcagcctcccaaagtgctgggattacaggcatgagccaccgcacctggccgccttttcctttttttgagactgggtcttgctccgtcacccaggctggagtgcagtggctcgatcttggctcactgcaacctctgcctcccaggttcaagcgattctcatacctcagcctcccaagtagctgggattacaggcacccaccaccatgctgagctaatttttgtatttttagtagaggcggtgttttcaccatgttggccagtctggcctcaacctcctggtctcaagtaacccacccgtctcagcctcccagagtgccatgtttacaggtgtgagctaccgcgcccggccatatgtagccttttcagttcagcttctttcttttagcagtatgcccttaagattagcactaagacaacagataatgttctgttgtctgaatgtgccatggtttagttacctgttcacctactaaaggatgtctttgttgctttcaagttttggcaattatgaataaagctgctgtaaacatttctctgcaggtttttggtgtggacatacgttttcacttcctttggataaataaataccaaggagcatgattgctggatcttatgttagtgtatgtttagttttataagaaactgtgaaactcttcgaaagtggttgtaccattttacattcccaccagccatgaattgaaagttcttgctcggctgggtgcggtggctcacgcctataaatcccagcactttgggaggccgaggtgggcagatcgcttgaggtcaggagttccagaccagcctggccaacatggtgaaaccccatrctaaaaatacaaaaattagccacgtgtggtggcatgcgcctgtaatcccagctactcgggaggcttgaacctggaagaaggttgcagtgagctgagatcatgccactgcactccagccttggtgacagagcaagactccatctcaaaaagaaaaaaagaaaagaaagttcttgctccacatctttgcaagcatttggcatcatccgtgttgtggattttggctattctagtaggtatgtagtggtatcttattttaatttacacttacctgatgacatatgatgttgagcttctttcgtaagtttatttgccatttaaattttgttaaataaaatgtaataaattcctcctcacttacactagccaccttagtagtgctgtacaattatatgtgcctagtggtacatgttggacaatggagctctgaagtgatctacttggactatgtcacaagctttaagttgattccccagagaagacacttccaaccttctgtctcaaggggaaaggccaggctgctggggctctaagagactagagggggaaaagtgctgagtgtctcagtatatactatgcctaggtttacttttctttttagtatagggaccctggcatcctccaatccagagaccctccgttttaccctcttctgagaacaaacttccagacctctgctggaagaagggagggtagtttcccaatggcatggttgaggggtggggtatgatctagggatctaactgcttcttaaacagcttccaaccagtcttatttttagcctccccctcctttaactcccatttccataggtatctggtgccaattattcctaagccttttgaggatccttaaagtgtaatgggttggttattgctctttccggtttaggactcagctttctgtaatgtgttggatttaatacctctagttcttctagtcccagtcttcaaaatttgcagttgctcttttgttcttcccaaccttgtaggctctttccttgcatcacttcttactttctaaaaaacaccttttctgtaggtttagtgaggtttcaagaaggagagaaattagatgttttggttcagtctgacatcttttacctgaaagttcctattaatctggattcctaagccagatttggatattttaaaaaaattcattctgtatttatgcttccttcagtatctatatttgtagttaaaggtataagtgctaatgtttagtggaggactcaatagaagggccaggaagtgagatatttaccacagccagcctaggacagtaagggtttggtttgggaccagaagagaattgacagcaaacaaggagaatgatgaaagtggatgcatttagatgtaggtaggatgattagagacttaattttaagaatcttggatatctgagacctaatacataaataaagctccagtagcatttatctccctggactcctgtgtttttgttgttgttgttgttgttgttgttgttgttgttaacttgtcatgatctaggaacttattctatatttcagagaatacacacaactaatgatacaattaaaaaatgactactgaacaaagctgtttgccaacatagaatctgtaagaacacacatagtattaactaagtaaacaatacactctgaatatactgtagcagcaggtttctattttaataattgagcttgctgtttgagtgttgtattggattctaaaaccgttttgcttgtactgactgggctgtgattcactttgctggttgttgctgccctctgttggactagctcaggaaatgcagctttttttccctcgtggatcatgtttgctgtccttccccaaattgaacactaaaacatgggtaattttttttaaattttctttctttctttttttttttttttgatacagagtctcgctctgtcacccagactggagtgcagtggtgcgatctcggctcactgcaacctccgcctcccgggttcaagtgattctcctgcctcggcctcctgagtagctaggattacaggcaggcgccaccacacccgtctaatttttgtatttttagtagtgatggggtttcaccatgttggtcaggctggtctcaaactcctgatctcgtgatccacccgactcggcctcccaaagtgctgggattacaggcgtgaggcactgtgcctggcagataatttttttttaagataaaatctgtttctgatgatgccctaggaaagcaagggaaactggcatcttccttcatatatatatatatatccccatctcccttccttccttttccatctaaaggcgagagttagtggatattgaataggaaaaaggcacaagaatttggggaatgcaaagatttggcagctttggagtctggatgcctgagttctgtatccaactcatcccctaatcatatgacctcagtaatttacttcacctggctgggcttcagtctcttcattgatataatgaagaggtgtaatagacttggagagtttctccagggattgatattttagggaagcaagcctagattatagtatttgttcataggagatataatgacttaagttacaggctctgccatcaagtaacttagtctggaaatgggtagaggaaacagacaatcagaagacaattgtaatccatttttagtgctgtgagacaggcaagtgccttttactatggaaacacaaggaaaggtacatatccatttagaggagggatcattctgtagggcctgttggagttgtgaaagcacaatctaggctgaggaggcagcagcctagggcaagtctggggcattgaggcagcgtcatctgtttggagacgaagatggagtctgaggtggagagtttgctgagaagatgagactggggggaaaagccaggagagtcatatgccatgcacaggaattttgattttaacatagggcagcggagagttattgaaggcttttcaatggagaaataacatggacagcttggcattttagaaagatttcctcttggatatagtatggagaatggatgtggtatggggcagatgggactgaaggcagggagatcagttaggaggctgttggagtaaatcaaacaggagacaataatggtgtgaacttaggtagtgctagtagacatggatggaagagagacgaatcaagagtctgtaggcagaaagaacaggttgctggttaccccccaccctttttttttttttaaacttaagcttcagctgtgaacaattcagctgccattaattctttagacgcaggttctgttatctacattacatctatcttagagttgtttgcttgttgcttggttctgagggaactctttgagtttgggggacaagattttggaagcaatgactctgggagcaaataagtttaaccttggctacggtaacccaaattgtatgcactcatcccttttgtgcttgtttcaccttctatatgccaagggacttagggtggtgacaaaaggaactatgttgttggttgtcttgggtggtgctttctgcttcatcatccttctgctttgcttctattacataatcagaacacatgaagtaactaaattccgtggaccctttctcatggcaagattctcatggtttgggtgagtgattagccctcagccagtggactcttgacctattctggacaatggaggtcaaagtttgtttgcttgtttgttttattttatttcaaaagcaccaggttggtgaaaaatggacaaagtatacattcacagtttacactggattgaactgaattgtgttatatggggaacgtgaacataataatgtagatttttcttgtccatgaaagaggaaaaatagctttgtggcagaaatggaaccagtttttcattagttggggaaggttattcaagaagcatttaccaactgggtacggtggtatgcacctgcaatcccagctactcaggaggcggaggcgggcagatcacttgagcccaggggttcgagaccagcctgggcaacacagggagaccccgtctctttaaaaaaaaaaaaagatttactatactcgtctaaggacattaatgaaaaagaaatattgtttaaaattaggcaggatgaagaaaaattcacactttcccagacttgctcattcagacttttttgggggggcaggaggggtaaagtataacatgtatacagaagagaatgtaaaacatacagaataattataaactggacagtcatatgatccatgtcaagatacagaatatcataaacaccccagaagctgctttgtccccttccccaatcacgaccccaccccacccaccccaagtaaccactgttttgacatttatggtgattatttcctttatataataattttacataccaaataatacagtgttacatgtttttgaactgaatgtaaatgaaataataattcaatattatatttatgaatagctgtaagttcattcactttctttgtgaaattgctttccttgtaccaatataccagtttatttgtccacgctactcttttagttcacatctttcattaactcatacacaattatttgtcttctggtttgttgaagcaataaatcagacaacttttgtcacaataatatctgtcagagtggccagccggccataaacactgtaacactacatccatctgaagggcactcccaacgaaggtggctacttttgccattctcattggccttatgggatttcaggacagccagcttcaccttctttctcatgcttattcttcttgggagtagtgtaaaacttctttttcttagccccaccacaaagtctcaagatgaagagtggactccttttgaatgctgtagtcagacaaagcacatctaccttctagttgcttgccagcaaagatcagtctttattggtcaggaggaattcctttcttatcctggatgttggcctttatattttctgttttatccaaggattcaacctcaagagtgatggcctcccccataaggatttttatgaaaatttgtgttttggtggtggttccaatatatccagatggcggatcagaaaacccgttctactcttgatggccatttgcattgttttctgttttacatgtcatagtgttactatgaacactcttggtatacacattccactacgtatatgcaaaattcagcagggtagataacatagaaattgatgtgttgcgttgtagtacatgtgcatattttaactttactggacaatgccttactgttttccaaagtggctatagcattctatagtaccaccaagagttcctgttggtctgtgactagacggacatgaaagttttttccagtcttgggagtgtgaattgatatctcactgtggttttaatttgcattgcctcatttactatgaagttgagcatatcttataagtgtatcggtcatcagattcggattctgttcagttctgcatcatcttctttttttttttttttttcctttttaagagtcatatgttagtgaccttcaaactcttcctgccccttacttgagggaatgtgctaaggaatactttgacagaaatcattagcttgcagaaagtagcttggatcctttcaacttctctccctcttttccccaacccgtctggtgtttgggaggtttccttgtacttcactgatttctcttctttcttctccctcctttttcctgtttcctagactctgaagcggctcatggcagatgaggtaaggacattttgtttagcatgtgcatgttctagctcattgcctacactatcatatttaccagttttcataactttgactttctgtaacttatagtggtgatatggcttctactcagtatctcaaggcttttttcctaactctttgctgtgtttggcccattgcatgcatttccgtggaccttcattatcttccgaagttaggcatgctctttaaactcaaagctgacttgcagtctgaatgccactcatatcacttgaagccctataatacttacagataattactgttattttcaaacaaggagagctgataagctgttgcttattggtgactcttgttgatttgagcatcagtatttgagatttgaggaatggcttgttagcatttgtttggcagagagatggcatatatacccctgaggtacattgtattctttgctgacgagatgtcatgcaaaggggattttgaagaatatatattgaacttttgctgcctacattacacaagtgctttggagtgtacaaattaaagagaaaggaatgaatcctgactttaaggacaaatttatcctatttggcttgtatctattaaaatctgtagtaatacctcttgaagggagacatcctctggggtcctagcaacatttattgttgggtagctagaaggaaacaaagggcattttattgatagaactctgtcatgagaggctttcagttccgtactactacaaggcttagaaatggcaggggagatcaagaacaatgtttcttctagtttaaagaggtttgaaatcttaatactttggtcctcttatctttgaacatagatgagagtacagagtcagtatggtaagttagataggaggaagactgatttcttcttttcatgtcagaagagtcttgaactgcttgtgaaccagaggaaccatgcctgygtaagaggttaaaggggtaaagaatttgatgtgtggcttgttatgtaagtgaaaatggatcactgctaatgcttttttctgtttctcagctggagagatttaccagcatgagaattaagaaggagaaggaaaagcccaattctgctcatagaaattcttctgcatcatatggggatgatcccacagcacagtcattgcaagatgtttcagatgaacaagtgctggttctctttgaacagatgctggtaagtttcccattcccaaaatgttgcttcttcctgtgcatttatggacatggtgggctctttttggtgcataattcccarctagccctttattacaaagaattccaggcttaacatggaactttttaatattaaccctttaatcccataattagggactaaatatacaaataccagttcataaaattggaatctgtgcttggaaacatccgatcactgtcttgttcatggtcttctgcccagcaacactttagccacaaagacgtagtggaccatctaaccctgtgtaccagagttggtaatatggagaccacctttgggttaagccagagcagataaagtgtggaggtattcacaacaaactctgtataaaggagaaactgaggatggaatatcatttgctcaaggtcctgtatagtggtgaatctggaaagaaaatacatagaattgctagaagacctttaaagattgtgtctgaagtcagctaagtaacaaagtatatgtgcatgtgacttactttgttgtcctcagtgaggaacaccgaataaggaggatattcagtgagtgtccattagtggtaagtcttggaaagttttgatgagtacaagatttcctaagacctgtatattgcatagatatgtgatctcagattcaaatagagactagtggcaggcctagcttaattaaaagcttaggtttaaaatccttagcacagggcctggtacatagtaagcactcaactggtactactgttgttatttttcactgaatctttcagtttgtctcttaatattccaagtgcattaagagtcttaagagtatggtctgtcaagataatctcttggccttggattgcaagtttaaatgtctcttgggccaggcaggtagtataaataaggtaagcaggctagatagaagatggcaaaagaagtggggaatgtggcaaattgaagagaggcttttggcatttttgttagaaaagccagccacaactcagttctagtaggtggttgcattccagttgggaatacttgcctagtagtgccagatatttctatttttcaaaagaagtcagcaatccgtaattttaaaaaaataataaatcttgaataacataaaatatcctagtcactatttgaatwtccccaattaggtcatttttttaaaaaccagtttgttcaaatcacaattccaaatatagtccactgtactggtattctcaattttcatttaaactataggtttcccttcctcttttttttgagatggagtattgctctgtcgcaagcagagcaagacttgcaacctccgtcttctgggttcgagcagttctcctgcctcagcctcctgagtagctgggattacaggtggacaccaccatgcccggctaatttttgtagcttgagtagagatagggtttcatcatgttggccaggctagtctcgaacccctgaccttgtgatccacccacctcagcctcccaaagtgctgggattacgggcatgagccactgcacctctttttcttttatccttactattgatactaaaaaaaaattgttgaaaaaaccgtttgtttgacctgtagagtttcccacaacatgaaattcgatggatgaatcctttggtgctgttttactagagatctgtatctttatgtaaggtcccccagatttaaaatgttgagctagccaagtgaaacattttatctttgggtttgacttagcttgagggccaccattttgtaacttctgtgttcagttwatctgcaagaggaaaaatgcatctggctggcagtggtggctcacacctgtaatcccagcactttgggaggccgaggtgggtggatcacgaggtcagcagttcaagaccagcctggccaagatggtgaaaccccgtctctactaaaaatacaaaaattagctgagtgtggtggcgggcgcctgtaatcccagctactgccaggaggctgaggcaggagaatcacttgaatctgggaggtggaggttgcagtgagccaagattgtgccattgcactccagcctgggtgacagagtgagactccgtctcaaaaaaaaaaaacccaccaggaattaagtcacagaaacttcagattaattttgctgcttgcagaagaaacagaatacatccccccatccatatttttctcaattcaaataacattctggaattatyagggctaaatttgtgcacaccaaggtactaggcttggacacatggttgttatatatgtagaaagatcaagcagagcctttccccaaacatacatcagattatgtctgtcagggggcctctgctttatcatagagtttccagttctttcttcgtgggaaaggagtttgtacagggactgagttaaccaggggtaatgggtttgtaggccctagagttggtgcagagtttgttgctgttgattttgcttgtgtttagattatgccattcatccagtgcttcagtctgaagagatttttaaggtccatccttgatgcagaaagcattgtgtgtggttttctttcaataatacaaaataaatctttcatttatattgagtccatttttcttagagaaaaaaagtgtgtatatgtctatagagatttatactaaaatgttaactatacttatctttgaggaattttcatcagctgtaatagcttaaatttctagggatcaaaaagatttatttacttaagcattttacatgctcaactcttcactaagcatactaatattaaacactaaaaatttgtaaagaatttgaggcaattttgttttttctcttttttctccctctcctagctggatatgaacctgaatgaggagaaacagcaacctttgagggagaaggacatcatcatcaagagggagatggtgtcccaatacttgtayacctccaaggctgtgagtcctgggacaggtacccatgacatgggagactgtgcccttgtcttggacctgttttttttttgccaattttatgtaacattttatgtctgcatcarttctgtttcattccattatataagcctgttcactttttactgtcttatttagttaccgttcttacatacattttgcctggttaaattttcatgaagtatgtaaatatagggaatgggataggcagttctaagtctcatttatgttggtggtatgtgagatgggtatctgccctgataaacgtggcctgacatggtggcttactcctgtaatctgagcactttgggaggctgaggcagaaggatcacttgagcccaggagtttgaaatcagcctgggcaacgtagtaagaccttgtctctgctaaaaataaaaaataaaaataaagtataaactctattgactaatactagtccttaatttatgactgggtccaccattactaatctctgtctatgccttctgtctagggcatgagccagaaggagagctctaagtctgccatgatgtatattcaggagttgaggtcaggcttgcgggatatgcctctgctcagctgcctggagtcccttcgtgtgtctctcaacaacaaccctgtcaggtgaggattctgaggaggtaacaggagtaggagccaaatgttggacttcactggtggtgattgaagatcaaaggagccagggaagcatgagaatagtctgaattgggagtagtaagttgtcaggataaactttgtttggcaaataagtatttattggtttgatattgcattgcctctctctgttccttacagttgggtgcaaacatttggtgctgaaggcttggcctccttattggacattcttaaacgacttcatgatgagaaagaagagactgctgggtgaggacttccaagtctttgcaacttcaagttggagagtcacaggggacttggctatttgctctgaaggagaaagtagcagttaaatgtaaagttgtgggctaggggaatgtactgttagccaagaaggggtttatcrtagtggtggctagaggatgaatgatgattrtagatayaggaaagggaggaggaacttaaatttcatgttggataagttcaatacataccacagaatattagtctcccagcactggttctttttcaatctggaaataaaatctgatttagtgctgctgtgtaatctggtctgggtaatatccatttggaagtcttataatatacttgggactagtattgtgacagtcttcaaggttggaataattttaggtataccttggactctcttaggctaccttgaagccaacctgaagcagagtacttcctggaatctttctgaaacaaaataataacatggccaagacctacatatatcttctcagacttgaaacctctagtagcaaggcaagcagcaatagatgggatgttatcctgatagaatttagcatttaggagcctagggagagttaaaaagaagattttaatataatactaaattcttggattacaagaggatcagccagatttgttgatggtgaagatccctcttcagttatctattttcttcagtggttctgggcaaggtgctatttcctaaaatttactcatctgctagatggggctgttgttcctaagaaccttgtttgcaagattaaaaatgggaaaggggtagagaataaagggacctcactgaytatgtcttctatatacaggagttacgatagccggaacaagcatgagatcattcgctgcttgaaagcttttatgaacaacaaggtgagatttttcccattctcattccaaaccccatctggacgcctgttctttctcttctattggcaaaccaaaagaggaactaggaatatgaggttcaggacttctagctttctcttttagtatcataactgtttttcattgccacatatacatgcttctgtggatatttttttctcagttctaacttctgtttcagaggacaggctcaattttgtttctctctcttttttttttttttttttttttttttttgagatggagtctcgctctgttgcccaggctggagtgctgtggctcgatctcggctcactgcaagctccacatcctggattcatgccattctcctgcctcagcctcccgagtagctgggactacaggcacccgccaccacgcccgggtattttttttaatttttatttttagtagagacggggttttaccatgttagccaggacggtctcgatctcctgaccttgtgatccacccgccttggcctcccaaagtgctgggattacaggcatgagccacagcgcccggcctgtttctttactttcttttgctaattcttgaatttcctgacctgtagttattgtctctgcaatatttgctttatttcctgtttcttttttcttctagactgttgctccatttttatcttctttttgtctgtttagtaattcaacctagtgagcccacagtcctgtgcctctgaggacaaatctctcttcctcattgtttaattttgttataattaacttattccattggattgcggggagagaattaacaagaaacatataaatcaaagacttttattcttggaagacatctaattctgttgtgcctcctagaaaattattttggtatgttcatctctaattatattgggaaaagtattctacccctgtattaatttgctagtgtaccacaaaattagatatcttaacagaaatttattatctcacaattctagaggctagaatttcaaaatccaaggtaccagcacggttggttctttctgaagctgtatatggtaatatgttccatatccctcctagtttctggtagcttgttggcaatccttggcactccttatcttgtagatgcatcatcctgatctckgcctatgtgatcacatggtgttctccctctgtatgtatccatatccaaatttcctctttttataaggacactggtcatattggattaaggaccctttctaccccagcaggacttcattgtagcttgactaattatatttgcaatgagtatatttccagatgaggttacattttgaggtactgggggttgggacttcaacactggaatttaagaggacaccattcaacccataacaacccgtaaacttgtcccccagttagatgctttcgtctttcagcctcctttctttgttcttggtcctaccagtttggaatcaagaccatgttggagacagaagaaggaatcctactgctggtcagagccatggatcctgctgttcccaacatgatgattgatgcagctaagctgctttctgctctttgtattctaccgcagccagaggacatgtatgtgactggaataatttttcttctccattttcaattttatcattttctcttagttcagaggacaattgagttggttgggtgtcctctcggtcataaatactaggtaagattgtgtttcttcccagaagtgaacactaagcatcttaaaatttaagaacaattcctaagtgatgggtgctatcctgaatgttccactggtcatcagaggtatagcaaaatgtctcctatatctccattaatatctgtattgtctaggatgagggtttctttttactattctttttttttttaattcagaagtggcacaatgttatttttaaaactcaaacgatatagaagtatataaagtaaaatttaactgcctcatccctttgccaaatcctattctgcaaagagaatgactgttaatggcatggtatagtctcatagaacgtttcctaagcatagacaaacatattgcgttcccttgattctagacatctgccaccgcaaaagatagtatcttaagagctgaggaatgacacttatgcctataaaactaactgcatatataggatagatttttattattgaagagggatttggtttaaccaaagctaaatcattcttttcaacctgtttctttttaatagtagatcttggacatttcttctatgtcggtacttacagatctaccttattatctttagtagctatttagtattccatatacatgtatgtatggcctataatttatttaacaattcccctgttgctggacttacagattttttttttttccttttttttttttgagacggaggctcgctctgttccccaggctggagtgcagtggcgcgatctcggcccactgcaaactcctcctcccaggttcaagcgattctccttcctcagcctcccgagtagctgggactacaggagtccgccaccacgcctggctaatttttgtatttttagtagagatggggtttctccctattggccaggctggtctcgaactcctgaccttgtgatccgcccgcctcggcctcccaaagtgctaggattacaagcgtgagccactgcgcccagccaacttacagatattttttaaagcagatttcactatctgttctaggtgatcatttttacaaatgatactgcagtgaacatccttgtgcatatcttctttcacatttatgcccatatgttggatacatttctagaagtagactatatgttacatgcatgagaaattgattagtactgttaaatgcccctccaaaagttgtatcaatttatacttcattgaataggggacttgatttggtatttatggacaggagcctagggatggattgtagggaatgcatttccctgaagagatggtccttagctttcagcagtttctggaaactgagtggtgagaataataatgtgagaaatccggaacactgataatgtcctgtttcctaatcggtctgtgcccctgtgtaatttactcattatacgtgtccgtgtcacagtacctggaaagttctctccgtttcctttctcttgggcaggaatgaaagggttttggaggcaatgacagaaagagctgagatggatgaagtggaacgtttccagccgctgctggatggattaaaaagtggaaccactattgcactgaaggcatgtatatcccctgaaactgggcccaagaatagaattcaagatggacagacttaaattcatttgaccttttaataaaatacatggagtgcctcccaactatatattttacatttcagaatctgttatgaagggaaaatgattaaccttctttctaagaaggtaaagaatgaactgttttcctcattatgagatggaaaaaggcatgatatctatttacaatctaggaaaaccaagacctacaataacatatactctcaaatccttgaaaccatttagagtttaggctctccggatctgtactcaaaccaggtctcattgctatagtagaaaagtcatctttagagtttttgtattgtatctttcaggttgtattggggacctaagaatgcatgtaaagaaaatggattcttgatctccaggagttagcattgacatagctgctgaattttcttattttaggttggatgcctacagctgatcaatgctctcatcacaccagcggaggaacttgacttccgagttcacatcagaagtgaactgatgcgtttggggctacatcaggtgttgcaggtaagatattacacttcattagaaaggctagactggttccttcttgctctacagccccaataatcccggggataattctggttttcaattaaaaaccaggttgaaaagcttaggtttctaaccacagaggatacttttgggttccctgacttctacttttgttgttgacaggaccttcgagagattgaaaatgaagatatgagagtgcaactaaatgtgtttgatgaacaaggggaagaggattcctatgacctgaagggacggctggatgacattcgcatggagatggaatatccttttgctgactaggttcaaggcagatgagacattcattgtatttagttccctgatccctgtgtggaatggtttgggagatgatgactcagaacagagcatcaggcttatgtgtcttctcattaaataaggcaggtgtatttttattgcgctggctttacttagcttatcatagatcagggaagtcagtaaaggtgatctgagggttgttgagcatggaagccatcaaaatcagtgtaaacttcctagaatgtgatagcttagcttactaagatgtagaactggcttttagagatgtttggactgacagagggagtaattkagttacctgttaatattttcagtaagtgactttgaggcagttacctcttattttctgtctactgcctgatcttcaagccaagtacttactaggaatcctctgtgtgtatagtaccacccaattcactggtcccttaaaggacgttttagaaagcttaaagtttctggtgatgtttacaggaagaacagccagtagaatggaagtggtgtcttgctacttttccctagctttttcaagagttaaataagccacctgtcaaacataatttctgcatatttgctttccttagcctatttcccttttccactgactttaatgaagtctttcagattctcttaaacacagtgaaggattcaaaggcagagccacacttcctttccatcctgcagcacttactcttggtccgaaatgactatgaggccaggtaagatgctgtgcttatgagaagttttgaatttgagcctaagtggagagagtgaattccttaaattcaaagaytgttctgtaaaaggaaaatgtaaagacaaagacccaagattagggttcattagtcaccgatataaaggaagttgtcttatttctttaatccaactcaaaggcatccctatggcagaggtcagagtgtataaggtgaaatgccgttctgtttttggaggggagtaggtaaayaggatgaagatgttagcaaacagaagtggcaatttaaaattctttctagtttcctggaagtatagatttagcaatagcactatccatcacaggaaggatcaaacgcaaatttttagatgggaaagtattggcactaggagcggatggcaagaagttttgattatttgaagtagatagggtagggtagctgatgtggaaaaaggagttttcttagcatggcagcaatacttgtgttaactttacaaaagtttttccaggtctctcagttgtcagagcaattacgttttcttggtcctgaatacttctgaaaattatattttgattttcctttgatgaccctgtttttattctcttgtagacctcagtactataagttgattgaagaatgtatttcccagatagttctgcacaagaacggggctgatcctgacttcaagtgccggcacctccagattgagattgagggattaattggtaagcatactcttctatctggctcctccaagtattgcttcttcctttcattttgcatcttgtttcagtgaaaatgtcagagaagatacctttccagtccccagatagttctatttttgtcctttcttaggtcataaccagcatctttgctaggaatctataggtctttagtttatttttagataaaacacacaccagcaccttttgcaggaactcctggtggtctcagagagtcaaaaatatcactcataggcattcttcttgccacccagcatggtggccttaccgcacactcagattacatgttgaacttaactgaaagttccatttctttgtctagtgcagaacattaagaaagataataaaaatgatcaaaaagactgttctttggaagggtgtagtgtgaaagaaatagaacaagagaattaggagctttacttactgactcttcttcttttcagatcaaatgattgataagacaaaggtggagaaatctgaagccaaagctgcagagctggaaaagaaggtgcatatgagagaccaaaracatgtgtttgagtatatctttctttgagaattattattttcctgatctatgagacagttttcctctgtggtattttggaagcgtttagcacccaatagtgtagttcccaggggaaacctttccagtatagggtagtcattggagaaagtgatatggatgtcttcatagggagctctagtggtggactttcagttcttgggctactgggcaggaaaagaaagacagatgatactcatgtaatagtaatggcactctcaggtttgcttggcattttaggcctcttacccctagaacaataggaactggggtccttagagcaatagaactagaggatgtctgagttctctttttctcttcagtttttaagaacgtttattgtggttaataggtttttgatcctagagaatattgggattgtactaccatggtcgtcctcgttaaatacctttaaaatcttattttttttaactataaaaatagggaatctgtggaaatgaactgattcccctctcctttaaccttgttttattttcatttttatttttatttgttttttttttgagacggagtctcactctgtcatccaggctggagtgcagtggcgcgatctcggctcactgcaacctctgtctcctgggttcaagcagttctcctgcctcagcctcccaagtagctgggattacaggtgcccaccaccatgcccggctaatttttgtatttttggtagaggctaggkttcaccatgttggacaggttggtctcgaacttctgacctcaggtgatccacctgcctcggcctcccgaagtgctgggattacaggygtgagccactccgcccagccaaaccttgattttaaggtcagaatcatggtgcttttttcccccgagcatggcctggatttatgagctctgtaaatcaagtactggcccagaacaggaggcagtggggggattccagcacccccaggcaaaagaggaggtagggagaattatgggtaataatacttgtgcttcttactgagatggagagcttgctgggagcctgattcgttttttctctagttggactcagagttaacagcccgacatgagctacaggtggaaatgaaaaagatggaaagtgactttgagcagaagcttcaagatcttcagggagaaaaagatgcactgcattctgaaaagcagcaaattgccacagagaaacaggacctggaagcagaggtgtcccagctcacaggagaggtaatgcctgagcagggaaggcagaatgacctgtaacctcaggatgcacakggcttggaacaggagtcagtcatctcgctcctagggagggttcagctactaataggtaatctagttacatggtgcatattttaaaaataatatactggtttttggtttgtgttgggggtaagtaatacataagacagaaaatctggaaaatacagaaaaacattaagaataaagtaagtttcattaccacccagaaataaaagtaataagtctcctaataaattaggaataaaaactaaactgttaaaaattgactaatttcctgttattttagtcacctctgcacagatttatccttacacactctctctgcagtagtaaatacttaaatgatctttgatgtctgataacttgattacttatgtggttatataatcatctgtgtagcacatatattagttatataactagaacatttaatttacttgacctttacattttctaatcaagggagggtttaacataaaggttgaaattgtcttcttaatacaaagcatgctgaactaagaacatgaaaacctgaattctagttttggctctgctgccaagccgtgtgactttaggtgatcatgtcatctctctgactcctctcagttcctccatttgtaacatgagaagtttggattaagtagtttattaggttccttccagtcccagtagtccctgaagtggggtgagaagtactcacattgatgttatttctgtaggttgccaagctgacaaaggaactggaagatgccaagaaagaaatggcttccctctctgcggcagctattactgtacctccttctgttcctagtcgtgctcctgttccccctgcccctcctttacctggtgactctggcactattattccaccaccacctgctcctggggatagtaccaytcctcctcctcctcctcctcctcctcctcctccacctcctttgcctgggggtgtttgcatctcctcacccccttctttacctggaggtactgctatctctccaccccctcctttgtctggggatgctaccatccctccaccccctcctttgcctgagggtgttggcatcccttcaccctcttctttgcctggaggtactgccatccccccacctcctcctttgcctgggagtgctagaatccccccaccaccacctcctttgcctgggagtgctggaattccccccccacctcctcccttgcctggagaagcaggaatgccacctcctcctccccctcttcctggtggtcctggaatccctccacctcctccatttcccggaggcmctggcattcctccacctccacccggaatgggtatgcctccacctcccccatttggatttggagttcctgcagccccagttctgccatttggattaacccccaaaaagctttataagccagaggtgcagctccggaggccaaactggtccaaggtaagagtttctgtctatttcttcaccagtcaatcttttttttttttttttttttttgagacggagtttcgctctgtcgcccaggctggagtgcagtggtgcgatctcggctcactgcaagctccgcctcccgggttcacgccattctcctgcctcagcctcccgtgtagctgggactataggcgcgcgccaccacgcccggctaatttttgtatttttagtagagacgggatttcaccgtgttagccaggatggtctcgatctcctgacctcgtgatccgcccgtctcggcctcccaaagtgctgggattacaggcgtgagccaccgcgcccggcccaccagtcaatcttaagaaacagtttcagttttctactttgtattttgtgcatggatgggctacgccttaaggctttcatctttctatctttaagcttcactcatgcttatgtttattcaggagatattaggcatcttctttattccatacatcaccacggagagttctgtgaaccctgtattctgaatttaatcttaacttaatgttttttgccttttctctgaggctgtgaataccatggtaacacacagtttgataatagtcattcaccagtctgcaaactactgataattgtgctgatcccaaagtcatggatttatgaatccactctcctatcccaattccgcaggatgtgagttacacaggccatttttttttttttttttgagttggagtcttgctctgttgcccaggctggagtgcagtggcataatctctgctcactgcaacctcagcctcctgagtagctaggattacaggcgtgtgccaccatgcctggctaatttttgtatttttagtagagatggggtttcaccatgttggtctggctgctctcgaactcctgaccttgtgatccgcccaccttggcctcccagagtgctgggattacagacgtgagccaccacacctggcctacatrggccatatttgcatgcacagtattgttcccatgatgtgtttgagatgcctgtgattctgagtgagttagcctttttcttctagaaaccaagttaatataaaggaccttagggatttgctcataaaatgagcaaatttggcacagttagccaaactggtgggagaaatttaatgatgagcaagacttctctgaaataaagccttaatggttatgaagctagaggatttggagttaggaggaggatacgtagtatatatatgaatctagttcttgaataatcaccaattaacagatgaactggaagtattctctcctaatcccactgcagctattctgtgcctcaagttagtcttattctagtaagacattgctgataatcagccagccacctattttacagcctcatccgttttctaggacggaaagtacagggctcagtttactaattcttaacaccctgcctttatccacagcttgtggctgaggacctctcccaggactgcttctggacaaaggtgaaggaggaccgctttgagaacaatgaacttttcgccaaacttacccttaccttctctgcccagaccaagagtgagtaccttcctctttgatgcaaaggtccagtgtagggcttagaatattttttcattaggtttcctattcccttcccttccctgggtgaagatagaaagggtatgttggatggaagactgatggattttcccattcaaaagaaagaaaagatgtttttgtattaaatattatggagttacttggtttgggaaagagaactgttgtatgtaggtattttgtatcagtataacttgttagggatatgagattaaagtgacagagcttgatttgggcccattttgatacttttgaacagattctggcactgccttaaggtgcagtttccagttctaagtacataattaataagggttggaaagagtctttaacagtttgggtgactgagtgactgtctacagtaacaagaaccatatgtgattccttttcttccttccatttctttccaatattggatgccttctccctcctggcactttgctcctgaagcttccaaaggtaagaatacaaaagagccttttagtttggtctcttgaatattagagaaaaagatgaaatagatataaaggaatttctcattagaaaactgagaccagagattgagggttgacttgtctttgctaggtgttttttgtttttgtttcctcccctggagttcaaaatgaccaatagctttggcattaactaatagggaggaaagtttgcttcccgttaaactaccacatacttaatctctttagaaggtgagggacaacgtaagcaataatactattaccttacatttgtgctgttttacaattttcatagtgccttaacatatatgaccctatttgatatgcagagaagccttatgagacaggcaggatgtgtatcatctccattctgtagcatatatagactctgaacagttaggtagctttcccaaggttatgtgatcagaaccaggagtcttgacttctggtccattttttctatataaattcttgattttcttttttagccttcatatggttccttttattttacaagagctgatctactttgccctcttctttcttgacttcctaattcttgtggttttgtgctaccttgtgatagggtacttatagttacttcccctgagatagtatttgaaagattgtgtcatgtataatgacaattatagcccaataatttcatatttttatcttcttccagcatttttgtttgtttagaggcttactatgaccctagtgatgaaaattaagtgcaactttggagcatttattttccccacctccccctagtcaattagtatttttaaaggcaattcctttttttttccttaagtgatctgatggaaacaggctgcactttgttctaataaggagtctaacagattgtgaggtgccttggtggcccctagttacatatgtgtgtgtgtgtatctaggagtataagaccataatgctcagatctgtcttgttgccctgtcattcaggtcaaaatggccttttcctctaagaaaattgtcaccttccatgccaaagtccagcctaagggattaattccactctcttaattaaaatactgggatggtaaccacatatactgtattagtctatcaataaagactagttgacaaagtcaaaattaaatgattttctaatttgtaagttcacagaatccctatgttggcctctggcataagtttctttcttgagtctgggctctgcacttttagtgccattgcaaatgaatactgactgggccccttttctccccccacccccatccccatctttttatttggtgcatttgtattcctattaattctagttgggttttatacagtttagtggtcttccttggcattatattctcattatgaattgggatatggtagtattttttaaaataccaaagtggcccccttagtcacaaaaggccaataaaaagaaaactttagtaaaagatctttgtgcttcttatttagagtttaggtttttgtcagataaggaatttcaagctctcaaaaattgcaagcactcagaagacccagatctcctcagtatgacagcaagtatactttacttcagtgctttaaacatctctagtatttatatttcagaaaaagatcttcatccttaactacttttattttttttatttttatttttatttttgagacagagtgttgctctgtcgcccaggctggagtgcactggcgcgatcgtgctcactgcagccttcgcctcccgggttcaagggattctcctgcctcagcctcctgagtagctgggattacaggcacccaccatcatgtccagctaatttttgtatttttgtagagatggagttttaccatgttgggcaggctggtcttgaactcctgacctcaggtgatctgcccaccttggcctcccaaagtgctgggattacaggcatgagccactgtgcccggccatccttactactttttaaaagtaattcttgaatactgaattgaatattgaaccagttcagtttgaatgctgaagccagtgtcagttaccaagtctctcattcatagtcttgatattgatgatataattaaatgatagataactactcattatcaaccttgtaaatatttcatcttccagatgaagtagtgacatagattagataactttttccaaactgtataaaaagtgtcagaattcagactccaaacagtgactccaaagtccttgctctagccttctacttcttaggaagtgtgtatgtacttgccctaagagcctctgaaagcttagatccagacaaaagctgcaagaaaggggatatgccgccttcaggaaccacttcattcattcagacgcaaatgtccttgaattggcagtgactgagtagaaaaaagggaacaataatagattaaaaaaagtaagtgagatactagatatttagggttataaaagagaaggcatattctgactgtattcaactctagcaaaactaatccagttgaagaaataagacatgtttatctagtagaagcactgcttaggtgatttcagtccaggtggttgccagtattgatgaagaagttatttggacactgggttttcatcatattgcattatttcctctcttgcttgctaaacacaactctgctatttgttaagcatgcctgtatcccccttatgttttattgatacctaaaaccttcggtatacctactggcccctccaagaatgggcattgaagaaagcacctgcctcactctgcacatttgcctcctgtagtgaaaagtctcctgttacacatattctgaagcagaatatgtgtgcctttttacaagagaagagctgagagacaggaactggtcctagaatattatactccagattcttttacacattatttctcttttaaggattagtgtcttgtttctgaaggctttgtttcccataaatgaggtatttacttactcagttaacttattccctgccagagaatattttgaatttacttttgataggcagtgccataaaacttctggtcctttttcacattctcactttccttatagtgatcagcaaggagtctttgttgactctttttgaatttcttggaaataggtccaatagttaaatttctttttttttttttttgtttcattttctccaagggagcattttcattgctgtagtagccttaggcagctcattatttgtatgtacaagataaactagtttttcattttccatttcttctcttcgctgtcttttgttgattatgtgatcattacactaccacctcttgaaccatagcatggtgagtgataactcatgtcttaaataaatagtacagtgacttttatttttaggtttattccttccttccagaaacaatatggaacattagacttgttaaagtaagaggtgtgttatgtgaactgtgagcatcagaacagttctccaaatatttaatggcagtaatttagaaaaaactctggctaaaaagaccttcactaagaattgagaattttattaaaaaataacagtattctagttagcatttgactgtgtgggtccagtactgttgttccagaagtcagaactgttagccgtaacagataggtttacctgtctgctgccctgacataattttcttgcttcaggcttcagcaggagcccctttcccaaaaagaatctgagggtctttttctttttccctgtgatatctcttctgtccactaggtggcactcacccagttgcatctttattagtgaatttttgtagcttctgcagctttaacctttagcagcaaggttttgtgagagctcagcctgctctaccttgttcagtgagtctcttagcagaaagatgtctgttccatcagtttcttattccactcaaatcggtaagattaggactagaggtactagtcaagtgaacacttgttgggagtcttaccttttaattacttagcttctcttgggttttgagtagggtcagactactascacaaagaaattgggaagttctataatatcaagataatagtcccttgtgatttaaaaatataaatctatccctattatctggggtttccagaacttcttcacatggaaaaagtaccatacctcctccaggttgtcatctcactgtcactagtgatataaaaaaggaacctaaactgccccctcatatacccctctacaccccaacctttccatcaccattttcttttaatccactggatctaatattatgccatttatcttggtttatgtcacttaccacaggcagccccagactcctgggtcatccttcatctcccatagtttaattgcgataaggttctgtgtggttcctattctgtctcctcccatcccacctaagctcctgaaactggtccactgtaccctctggaattcatggtccattactggcaaaacctttttcactttgctctactggaaacctggttttctctcaataccactttcccttttgcttgcttatgtggttttgttttgttttgttttgttttgttttgttttgttttgtttttgagatggagtcttgctctgttgcccagactggagtgcagtggcaagctctcagttcactgtagcctctgcctcctggtcacaagcaattctcctgcctcagcctccygagtagctgggattacaggtgtgcaccaccacacctggctaatttttgtatttttagtagagacagggtttcaccatgttggccaggctgctctcgaactcctcacctcaggtgatccacccatcttggcctcccaaagtgctgggattacaggcatgagccactaggcccagcccatgtgattgtttttctttgttctcatagacctcaccccagtgggcttggagatggggtagatgtaatctttgttattcattgccactctcagatcattttgcctctttactaaaaggaaacaattcctaaaaaccaacaatttcaaatcttatgacatcgttatgtcacccattttctcttcatgttgtcatctactgacacccgtgttactcctcatttctcaaacaatttagctcttgactcatatccactcttctatactccaatactacctctgacttaattcttaggaatttttatacgaaaaggtcatgatcctaccaatattctggcctttcagttccttgaattcttctactgattttgtcctctatcctacctcaaccattcccccgttctaggatctcatgtcataccacccaggttctatctttttaccttactccctttgctatcctgaccccaacaggcctccagccccgctaatccatttgtcctaccagcatttcactgtccttcactttctgatgacttcactctttccctgagctaaaatttcttggttaatcattataatcattcgcttgggttttgttcttccattatctctctcatttcatactcgattggcaaaaccacaatcccggttaattccttttctgtctttgtcctgctcctgtagctgtgcaactgaacatggctggagaataccacaaaactgggccctcctttgacagactttcttctcttagctttcaggacaggaaacacttacttttcctgctaactcactggctgatctttctcccaactctcctctgcttaatttgtgaagttgcttggcccttgatactgccaggcactcatatttgaagcattacaaattcattgaatttcctgctctcctaaaggttatttcacacctttttttcctcctcaacagcccaaacctccctcatcctcattctcagttggggatgttttctttctacttcactgacaaaattgaagcaatcagaaaaaggaacttctaaagacttccatcattacttttacctagcagaattctgtcttcctctgttaccatggtcctgtctaaagccagttcctggactaatttgttatcatcattttaacaaatatgtagaatacactggaaatacagggtaaaaaggtgtcctcccccagagtgactgtggttaaatcatactttttatatacatatgttattctaataaaggaatgggaaaatccttttcttctttagttcaagtgagaaaggtaaatttttgaataaaactttactggaaaaggggcaagggaattaaaaataaaattacagaaacatgaaggtatacacacttcttttttaatataattggtgtgatcttatacagtatatactgttttgtattttgcttaacgtgttttagcatctcgatgtccttacatatagatttgtgtcattatttctgatagttgtattctgtcatataatacaaataagttttccatttttttattacaagcaatgctgaaggaaacatccatttttaattgtctttgcaaacttgtatttctgcacagtaaattcttaaaaataaaatctgtgggcccaagttgctaggtataagattgtagcaatttatacttccacgaaaaataaaaaaatatttatggtaatgtctagtaggggaaaagtgatatgttgttttagtctgaccactaataagattgcaccaggggttatctttcttaccttgactctatctgtaaagtgagatacatgaacctaaaaggtatctttcagttttaaacttctggttctgttactttttttccttgcaataagctgtctttggtgttatctgtcatgtcaaactcttcttttgtttctgacagccttccaggtccttttgttattttgtttgttttggtctgagtttcattctcttactctatgcaccaaaggtcaggcatcaggagctgctgcttgcttacagccagtgtttaggagtatagagctaaactggggcaaaactttaaaactattgcgcgaaggctgctgatgtagtttccacagaagacttactattggagatttaagggactgcatcatcaggtaaaggaattaagttttaattttcttctcaaccgtgggaatttgatattttatttctagcagtgtgctttactgctttcagccaccagatggcacatggatcccttttattttagatgtgtcattgttgcgtttggtagtgatgtcatcacgttagagagaggcaacctctgtcctttccaaatacaagctgattagtatactgccctctacctgtcaggaaatttatttggaggactgatcagcagttaaattatgcagaaagctacagcttgcccttttacaaaaggatcttgtcctgttgcagctagtattttcaatagtagcaatattcgtgttctttttggggtccagaggctggaaaggtttttgttctttagtctgataccttcatgaaagcatagccttcctttgagagggctcaaagagaggtttgtattttatcagcttggtagctcattgtagcctcattatatacacactcataatcccatctctgtctcagtttctgctgaaaaactactttaagcgcataatagaacctacccacattatatatggataactagcttgagataacatactgaatccatttcttcagggaattcccctggtctaacttgratagaatatgctggtgcagaaagattttcacggtcaaagtcaaccctttgtgtcatatgttaactcctaattatccccagctagtctcatttttagagcctcyttctagccatcccagctttagtgtgtgcctgtattactcttttctagaaacatatagactgaaatggtatcttttaagtccaaggtaccatctgccattatctgtggattccagattttatttctaaccaaatgtccttttaaatgtcattgtctgagacttagaccatctagttggggggtcagtattacttaaacttctaacatcttggtacagtcagttcctagccttaaatgtctgttgataccagtaaatctcaaactttagtataaggattacatgaggagcatgtttgtaacatgtaacatgtttacatgttaatggtgtgaattaagccactcttcacctgttctcttaataatattttggtatctgtatctgaataggtattatataagtattatccctgttcttatggaggtcatatgagattgattaggaaacaattcaacattttctgttgacttggcagtcaattttggagtcactgtttcagaggcacttttcttgccatcttccaaacttctcagtagccatcttagaaggacattttgaagaagtcctctgtggtcagtgaactagctcggaaccacttagagattgactctgctggagaggatggatggagggcagagtgattagggcagagtattgtgctggactggggcttgtacaacacggaaggagttgtgagaaactggaggagatagaaatcaagatgaagaatgttacagttatacagacataacttttgttcaagcttggttattctcttgctatggagacctggagttggtagacatcagagatgtgtttaggcaaagaaatgggatatctagcaagtgtcaaagcagaactaaggattggggtgaacaaaagagtgatccagtgctctcttactacatactagaacccaaaactgttgccttaaggaaaaggcactgttttgaggatcccttgaccttacactatttgggaattgttggacctgaaatgactttgctgctgatgctgaacaagtctccctccaaacataaggttgtagacaggctagtttgcaaggagtgctaaggatgtctccacagaatgtttcctctggggcttttctttcagcttctctgttatctgtttttttttgtttgtttttttttttttgcataggtaagtggttcagaagtcaaaacagtataaaaaagtctcattcccaccctagtattcatccatgccatccttctccctcccctaccttctagaggtaaccatttttattagtttgattatcctttagactttcttaaaaagtgcagttataaacaaatactgatacagattcttgtccttcctcttaccaaaacaaggaacatactatctgtactgtttctataccttgcttctatatcctggagagtcttcgtatcagtatgcagagactttcctcattaaaaaaattataagtttttaataagcaggcattacttttataatgaacacaaggataaaacaaaagtagagtaatgaaataattgttcttttttttttttgaaacagtagctacagtaacccatttgatctgactgcatcttagcatgtatacatgtccttttgatcttcctaaaaaaaactcatacataacaatgaattgaagagttagttacccacatcagctctgtaaatgtatggcaacttatgctagagcttacagccattatgatatggggaagagagacttgcaaagttcagccaggggaccttccagacttcactcgagtgtgatacttgaacaggaggagatctttgtactgctagcaaagggatgctactctataaaaggtctttaaaggaaaggagtggcctaccttatttttttcttgcttccatttcagtttttgttctggagatgaattgctctagaacttagtgtcctgtaactgttccatgtattagaactctcgcccattgcctttggagcagtgtggaagaatgcttgtgattcagtgtttggtgggaaaagcaggaaacaaattatgtacaccttattacaattgtttcatattaaaaacaaatgcattagtgaaagattagaagggaatataccagactactgtaacagagattttgttagggtactacatactttctcttttaatttttctataatgtggttatattgtttttataatgaaaaagacacagggttaaaaaggaaatttcagtgtctgacatgcttggagaagattctagagcacttctagatttctagaagtacttggacctgagatttcgtctgccaagccaagtactagcattcagttctataaagcaagtaacagtatcctttacttcactcttaacagtttctttttgaaaaaacagactccaatgtaaaaaaaaaaaaaacaaaactcttttcacttctaagtaccattggacaagggaccccagtgatataacagaagggcattggtaaccccatttctgcaagatgggatggaaccattctttcctcctgatcctacaataaccccaactcttcttagagccagtgatttcttcttttagatctattagatgggaagatacggcactctcctgtgtgtgtgtttgcatttcttttagcaagaaaaactgcaaaaatccttcccaagaatttcccgtttttcctattctgcttgcatttttcttttcggccacggggtgcgcgcagttgagctattttggctcaggttccagattgtgaggtcagagactagggattggaggagaagatcaggtgactttcagtaacagagatggcggtcctcccatctccaccccttccccccctcatctttccccaccctttcctggcttccacctcaggaacaaagaagggaaaaaaacagcagtatgacgaaaaccagcagctgtctctgcaggctcaggctgggggctgggagtttattccatctgttctctttgttctgctcttaccctgttacttcccttcccaaccctgaataaaacagaatatttctagaatcctttgttatggagaatggtttagaattctgcagtttactcagtatttatttaggttagcgtgggtgagatacagcagagattaaaactgatctggagcacctaaaaaaaagatgaaggtactttgccttctcattcagtcttaaattatgaatacctatttaatgtcagatttgtgacaggggattatcaactattatttccaattatcaaaacattatttccataatgcctaattggtattatctttgttttataattgagagatataaaagagaattaatatgtcctttgcttgttaagattttatagcaagtaaacaccaagccagaatttgagcctagatatattgggctcaaatccagcacttagtgaaagggagtggcaagaatgcaggcatgttgagagaaacctcaggtgcttgcttccagtgactgacagtgtaaagtaactgtgctagtgcttcttgatttttaccagtgattagtgtcctgatttcttcaacaaataaatttcaggggaaaaaatgagatggagaggaacatatagattaagagggaattttaaattttatcaaccagtacagtatatggaacttatttagatcttgatccaaatgaactatacaaaacacttgacagttgagacagctggaaattagtgtgataatggtttcatggcattttttaaaaagtcatcatcttttagagatgtgtacagaaataattgcggatcattatgggatttagaagtggggtgtagatgaaacagaattggtcacgagtggataactgttgaaactgagtgatgtatgcatggggattaataattgtgtttttgaatgtttaatttttcccataataaaacattttttaatccaggaaaagagttttatttctagtaccttattttaatgccttttcttctgccctctagcctattgtttccttgcataaacctgtcctctttgctgacatacctgagtccttgtttgggatagtgcctgtccttccagtccttccccacccacatcctagaagcagacctctttttagcactccctaattgagtcaccatcctgggtgtgctgggaaagtatctgtgggaaactcaatgactatattatctgaaagaccaaatgcttggtgaagtgcccagatttttaatactgcttttctgctacccttccagacttatatctgtccccttctttataactctcagcatctggttcttcctttgggattctgtgtggctttgttcttgtcctttaggtttgttcattaatgccagtttgccctgtccctccttacagcttgcacatctgtaatggtctagttctgtgggattttgcagatagttgtatattttggccaaggtatcagtgatacggttacctttgggcagggataactgctattcggttggcatgatattttttccttctataatgtataccttagtgattgttttaaagtgctgaatttatcccttatgtatattacaaccatgaagaatataaatcagaagtcctccatttgggcagcttcttatattaacacttatattaacattaagaccctcttactgtctcctcttcccagaattagagagttgatgtagtgcttaatagacatggcttattgtatgctaggtgaacttggcaattccatagctatgttaccctcacagaaagttatttcctggagagattattaagtgttctgatctttcatatatgcctgagagatctaagattcttccacaaagaccctatttcttcagagaaaactatagtgatgccagagtcttttttttttttttttaacaacttgtgatttttgtgcacctgtgttgtatgtgttgccattatctcactttagggacgttggataaactggcgtatttgtgcagcctcatttaagtagtggcaaccattaatgacttgtacccacaagtttttccagataatttctgttttttccacctttcttacatgttcttttttagtcataggtacttggcttactcaagggaggtgtagcgtaagataaagataatggagggtgttccctgtagaataggtacaaatgctgcaggctttatcttgggcagagcaagtagggttttggtcctgagtaagtgagtgaggttaggtggagctgcctgtcttccagccgtgcggatacaactgactcagtccgtgttctcaacagtttttgaaaagcccatttttctatcccacttactcccacctgcagttctttaagaacgtagtttccaggatgtcaggcaactccccactcctccatttcctgtttgtggtcttcattgagagacgccttaaacaggaattcctggggaagtgcaggctrtagcggtgggattccgggggtcattagtccattattgaagctggggaatcatgtactataaaaggacctcccttccgttctgttgtctcctagaaactattactgatcataaccaagcagtaactgcaactcagggctgttgacttgtgccctttgtctttagagactgaaaattattttcccttcttgtgcctcagtttctattagttgaattttagagctcaacatcaagatttgtgacaaaattaacttggactctgtaggactgattcgtttgaaatgcaaaagtagtgaagaacataaaacagactccctatcttggccgccagggggtgccctttcccttcgctttactgtctggcactccccaccgcattcagccattttagacagattgtttttgctcccagctaactccattttgtatttgtgacgcaggaataaaaaaaggagttaggcaaaggaggagtctggtttgcagagggagggagactggctgaggcgcagctacgtactcttttactcagcagttgctcatcagggacacaccttgctgcaggctgcctgcatcctgagcaatcgatgccgcaagtccttgccagcggagcacagagcaaaatggtttggctgccggacacctactaacagtgacagagtgctagcttttgaggcagcaggccagggcatcccctctgcctcatctagactctaatcctgggtttaggtgtttttgctacagagatgtttagggcagttttcttaattataggatcagataagaaaagatacccccaaaaaaagaagaaaaaaaggaacccctttcacttagctgtctgggaagaatcaaatgccccaaggactctagggaaatggtcctgaatttttttaaaaaatgttatttttgaaaccgtgaaaaaaatgcacgcacacatacacacatatatgtaaagagactagtatgaacacccctatgtccatcacccatttaaaaaacttaatcaacagctagtcttgtttcatatacctgtatcaactttgtctttgccacccattatttttacatgtatccttgttcatattatttaatccttaagcagttcagaatgtgtgtcaaaaaaattaggacttttaaaagaagataattactaccattatcacatttaaaaaattctttatcatcagatagccagttagtattaaatttcccaaattatcttatgatagttgttttttttaatagttcatttgaatcagagccaaataaagtctacacattgcagttggttgatgtctctataggttctctcttatgctcttttttattttttattttgcaatttatttatagacttaatttcttttaaaaagatctctgccaggcgcggtgactcacgcctgtaatcccagcactttgggaggccgaggcgggcggatcacgtgaggttgggagtttgagaccagcctggccaatatggcgaaacctcgtctctactaaaaatacaaaaattagccgggccgcctggtggcgcatgcctgtaattccagctactcgggaggctgaggcaggagaattgcttgaacccgggaggcggaggttgtggtgagccaagattgcaccactgcactcaagcctgggtgacagagtgagactccatttcaaaaaataaataaataaataaataaaaagaagatctctcaggttgggactgagaagatacaaagccagacttcccttcttgccagagcagagcctcttctttaggatttcccacagaggctattggtgaccaagtgaaggagcaatgccctgccaccttcagagggagaaagggctggactcttacttttctcctgacgtgataatctgttacccaaagtcttgagaaaagtttgcacactgccgtcaacggagaacatggtcatagaagtgggcctcacccgttctaagaattaaaggagagcttttaagctttgggacaactgtgtttggccactgtgtaatagctgcatccctatggtgattctagagtatcagctttttttttcccgaatactttttttacttaagtagcagctttctccctggtaagactcaatgaattaacagcacttcatggacttttacagaaagaaaaaatataatactgtgttggggccgggggggatgtggtgaaaagtcctttatggcttcaggattataatatcgctagtccttcccttgacctttttggagatactccctgagactgacttagatgcaaatgatcagatgaaagttcttgcttaatattcttctcccacttctgaaatgggtcagtgactctgactttcagcagccacagcaagcagtctattcccttgcccaagggaagggcacaggtgatagaagggaattagcagggtctggcttcttggcaaggctggcaggacactcgtagagtctggtctgtggagactagattggccccatgtctagtttggaaactatagttcccactagcaaaaggtttagaatctgctgaataggtcaggattgcagcagctagaaatacggatcctggcacggccactttttaaccacatagctaggtgtaagggtctctcttttctactattgtttgttgagagtcacagcctttgcagaaaaaattttcctcttttcctttgtgctaaggtgctatctatacccacctattttggtcccttatttcacacaattctgtaaactgaaattactcagcccttgatgttgtttttagggtgagggacagcatgaggcctttgttctggacttctcatctttgctcttatgaaaatgggggctggaacccaagcattgataaggttgtatattaggtgctttagtatctggatgattaattagtgcaccattcctgtaagaaggctgggaaggcagcaaatgggagcattctatgggttctacatttgactgcctgtctttactgctggttgtcagtgggagttcttcctaacccaccgtcaaagttgaaccaggcctacctgtctaaggatatgaaaataaaataggtggtgcccagagccatatctgtcttacctttctcacagtttcctgtttggtgacagtttttaaaatttacacatagttacattatcacactatgttaacaaatcaaactgttttaatttgttcatattcacttgtagtctttgcctgtgctgtatatatagcatttacatggttgtaatcagagggggacgtgtgtgtgtatcttagttcttctttatttcaggtcgaagtgtacaactcattatgcagcattaaatttcaaaaaatttaaaaggaaatttacattcatgtaatcagggtctgagaccaagatgccctttgttatgtaccccccttccagttacaactgaacctccacccccaactcagagtacccaccatcctgaagggttttgcctgtagcttttggtatatatacacattgtcaaagaagtttcttcgatttctaatatgctaagactatttattctgaatggatattaaatttggtcaggtttttttttgtattgttgagatgatcatataattttctactttaatctgtaattgtgggaagcatattaactgatttctgttacaccgattttgcattcctaaaacaaatctaacttgaatgtgatctgttattatttttattttataccccttaattcactttgctattaggaattttgtgcctgtgtttatgagtgaaagtacctatgatttttttgatactgttctttcacattttgatagtgaagttatgctagcctcacaacatgagttgagaaaatatacttctattctgtggaaaaattttttgcgtaaaattggtggaattatttattccttgagtgtttgaaataatagctggtaaagtcatctgggtctctgaagaaatttttgatcaccgatttagttcttttatggttataggactggttttttcttattggataagttttgatgtgttatgtttttctagaaatttatcaattttatctaaatttgcagacatattttgtatgatattattcctttttttggggggagcgggtggggatggagttttgctcttgttgcccaggctggagtgcggtggcacaatctcggctcactgcaacctctgcctctcaggttcaagcgattctcctgcctcagcctcccgagtagctgggattacaagcatgcactaccatgcctggctaattttgtattttggtagagatggggtttcaccatgttggtgaggctgatctcaaactcttggcttcaggtgatctgcccgcctcagcctcccaaagtactgggattacaggcatgagccaccrcgccctgcctgatattattcctcttaatgcttgagcctgagccatatttagttcagtcctgtattttgttcctgatgttagttacttatgcctgatttctctgtttttctttcttgttttaaaatactgaatttaactggtcttaaaaaaaatgttttaagccaaaactgttggcttcgtgaatcccctctgctacagatttcactaatttctgttcttgtctctatctttaaatttttcttttggtttattttattattcttattctaatttttttaaataggtacttacctctttagtttttagtcttttttccctgtcatatatgcatttgagacgatgttttcttggggggtttttttgagatagagttttgctcttgttgcccaggctggagtgcagtggtgtgatcttggctcaccgcaacctctgcctcctgggtacaagcgattctcctgcctcagcctcctgagtagctggaattacataggcgcccaccaccacgcctggctaattttttgtatttttagtagagttggggtttcgccatgttgggcaggccggtctcgaactcctgacctcaggtgatccacctgccttgacctcccaaagtgctgggattacaggcgtgagccaccatgcccggccgagactgtttttgtttaaattattgtttgggacacatctcttaagttgtttttttgagacagggtcaaaaaaaaaagacagcctgtcacccaggctggagtgcagtggtgcgatcttggctcactgcaacctccacctcctgggttcaagcaattcttctgcctcagcttcccaggtagctggggttacaggcgtgtgccatgacacccagctaatttttgtatctttagtagagacagggktttttcaccgtgttggctaggctggtcttgaactcctaaccttaagtgataggcccgcgtcagccycccaaagtgctgggattacaggtgtgagccaccatgcctggctcacatcccttaagtcttgataggaagtgtattcgtttgctagggctgccgtaagagagtgccacagactgagtagcttaaacaacagaaatttatttctcacagttctggaggcttgaagtccaagatcaaggtgttagcaagtttcatttcttctgaggcctctcgccttctcttgcagatggttgccttcttgctgtgtcctcgtgtggtcttttcttctgtgtgcgcattccttgtgtctctttgtgtgtccagatttcctctcctttataaggacacatcagatttgaagtacttaatttccatatatattgagtgtattagtttcctattgttcctataacaaattaccacaaatttagtgacttaaaacaatgcaaacgtattatcttacagttctggaggccagaatttctaaaatcgaaatgttggcagggctgtattccttctggaggctctaaagaagaatctatttcctttccttttccaatgtctaatgcctgcccagattccttggcttatggtcccttcctcaatctttaaagccagcagcatagcatcttcaaatctctttctctgacctctgcttctgtcatcacatgtcctctctgactctggtcctcgtatctccttcttataagaatccttgtagctaagtgtggtggcatgtgcctgtagtcctgacagctcaggaggctgaggcgggaggattgcttgagcccaggaatttaaggctacagtgagctctgattgcaccactgttctccagcctgggtgaccgagtaggactgcaactctaaaaaaaaaaaaacaacaaaaacaacttgtgattatactgagcctacccagataatccagattaatcctgtcatctcaagatccttaattaaatcatgcctgcaaagtctcttctgctgcataagcttgttcaatattcccagattgtgggaattagaatgtggacatctttggaggaccattattctgtctaccacatggaattttcaggattttttgtatttcttgttaatttccggctaattgcattctggtaggtgctcttgtgatttcagtctttagaaatttgtagagttttgctttagggctcagaatattgccaaatattataaatgttctgtgtgcactgaaagaacacgtatatggtcttcagttacgtgaagtgttctgtatgtctccatttgttcttgtctgttaattgtgttgtttgaattttctgtattctatttgttttatcaattactgagaaaagtagtcaaaatatctcactttatggagtaggcattgtactatttggttttattttatattttttcttttgatttttttatattgacataattttagacatacagaaaagctgctagaatagtacaaaaaatttcctgcatttgcttgaccacattccaaatcaactgttaatattttacctttgtcttacccttttctctctctgtgtgtgttatttatgtatgtgtatgtgagtatagtattttttattgaactatttgagggtaagttagacacgatgcctttttttttaagagacagggtcttgctctgttgcccaggctggagtgtggtgacactgtaaccttgaactccctggcacaagcaatcctttcacctcagccttctgagtaactgggactacaggcgtgtgccaccgcacctggctaattttttgatttgtatttttggtagagatgtggtctcactatgttgcccaggctcttcttgaactcttgggctccagtgatccttcctccttggccttccaaagtgctgggattataggcataagccactgagcccggcccagtgtgttttctaataacaggtccataaatgcggtacagttgtcaaagttagaaaattaacataagtgcaatactgttatttaatctaccgactttcttcagattttaccaattgtcacaataatgtcctttatagaaaaaagtcctggatcatgtactgcattcatttgtcttttatctttagtctcatttaattgggaacagttcctgttatggtcacctgcaagggcattatagacccccacttaaaatttggtttggatgttaagactattcgtgttacatgcataacaagagggtatgaaaaggtttattaacataattgaggtccaggagagcagggcaatcctctcaagcaggtttgaaatgactgtagagaacaaggaaaggatagctgggcatggtggtgtgcacctgtattcccagctactcaggaggctgaggtggaaggattgcttgagcctgggaggtggaggtgagctgagattgtgccactgcactccagcctgggcaatagagtgaggctctgtcttgaaaaaaaaagaaaagaaagaacagggaaaggagattcrtttgggcttttattgtggttaggggcttgggctggggtgagagttcttacacaagagcggactttacctagtttggatttcttgctgattcccaaggaaggaacatctagactttcatatcagcttgcctggataagggacttaggagaaagaaaaagaggtaaggtttacatctggcttatgtacagatataggacatgagagaaagaggaagaggtgagctgtcagcagttaaacatcaaaaaatgaagtcagactctttgttatagttcctcagtttttattttttgtgaccttaacgtgtccatcagtttggatttgtctcgtgtcctcattattagattcaggttatacatttttggtgctttatttatcttaagataatgttattaggtacatacaaatttaaaaatcctgcattttcctgatgaactaaacttttttttttaatcagtatagaaagtccctctttatcttttatactgctttttgttaccttaaagactattttcgtctgatgtgaatgcaacttggacaactttcttctagttagaatttgcctggtatagctgtactttttcttcctttctgtatccttgctctagatgtttctcataaacagcatatccttggactcttgttttttaatccacttgacaccattggtctcaaccaatacagagtgtgtagtctgtttacatttaatgtaattactgaaatattgaggtttaaatctaccgtcttattttgtgctttttatgagttccatttgttgcatgtgatgtgttgatttcattccattcaaaatatttttttctattttgtgatttcttacctgactccagagttatttatatatttgcttaatatccaaataattgggtattttttggttatctttttactgatagcttagtactttgaattatttctatcctttgaaatttgttgaggcttgcttttacccatatatggtaaattttggcaaatatgctgtatacatatgaaaaaagatatgttagtattattgggtacattgttctaacatgtcagttaactttgttagatatggtcagattttctacgtcctttccaagtttttatctgcttgttttattagtattgtgtgacgggtgttaattcttccactgtggttatggatttgtctttttcagcctttagttcactcaatttttaactttatatattttaaaactaaattattggatatttttagatttagaattattatattttcctcaaggattgaccctttattatgaaatgtatgtatcatgccagttattagagatgatatctctatctgatactagtatagctacaccagttttctcttgattattgttcttttgattagtacatcttcttccactattttactctcaatatatctgtgtctttatttaaggtgtgtcccttataagcagcacatatttagtatgttttgtaactccagtctgacagttttagtcttttcatatatttaatccatttgagttgatatataccctatttctatttgttttctgtttgattttcatgatttatgttcttttttctgtttttgccctcttacggattaatttagaactgtattatttcacatttcccctgtcgttatatacctttttactatcctcctagtgagtatcttaaaaattacaatatacatacttgacttatgatagtctaatacaaattataattttactaccctctagataatgctagaactttacaacatttctttttttatttttcttttttgaggcagggtctcactttgtcacccaggctggagtacagtggcatgattgtggctcactgcagcctcagcctcctcgggcttaggtgattctcccacctgagcctcccaagtaactgggactacaggcacacatcaccatgcttgctaatttttgtactttttgtagagacagggtctcaaccttattgcccttattgcccaggctggaacattttagctctgttatgtaccttccttttgagttactggtgtcatgcagtttgattctgtaggtgctttaaaccccacaaatatttttactgttactttgtaataccagtagtcacttagaaacacctttctagtgtttttgcttcctgtctacatttttgtatttccttcggataattttttctttcttctgcctgaataaatactccctttactatattagttcaggtctgctgctaatgaattgtgtttttttgtggatatatctttatttcatccatattttggaagatgttttttcttttttttttttttaaagaattccactgtcagtcttattgtttttcatttgaagataatatgttccaccccctgctattttgaggtttttttttttgaaacaagatcttgctctgtcgcccaggctggagtggagtggcgcaatcatagctcatggtagccttgagctcccaggcttaagtgagcctcctacctcagcttcctgagaagctaggactacaagcgtgcaccaccgcatccagctaattttttagttgttttgtaaagatggagtctcactgtgttgcctgggttggtctcaaactcctgggctcaaggaatccacgcacattagcctctcaaagtggattacaggtgtgaatcatctggatcaccacacccagcaaggattttttttttaactctgatttttagcagttttactatgatgatatgccacggtgtggttttctttgtatttatacttgagtttctctgagctgcttgattctgtatgttgaaggctttcatcacttctgaaaaatacacaactattttctcttcaaatcttgctcctgtccaatttttcttctctttctgggcctccagttatacatatgttggaccattggccttttcaatgtgtctcacttgtccattacattctttttcattcttaccatttttaacctctgtgcttttagtttggatctttgttactgtcttccagttcacccatttctactatgtctactgttaaacccatctgttgagcttttaatttcaattatattaatattttttagttgtagaatattcatagatttttattttttatttttatttatttatttttgaggcggagtctctgtcgcccaggctggagtgcagtgccgcgatcttggctcactgcaagctccgtctcctgggttcacaccattctcctgcctcagcctcccgagtagctgggactacaggcacctgccaccgtgcctggccaattttttgtattttaagtagagatggggtttcaccgtgttaaccaggatggtcttgatctcctgacctcatgatccgcccgccttggcctcccaaagtgcgggattaccgcgcctggctgaatgttcatagattttttaaaagtaaattctacttctctgatgaacttctccgtcttcatttatttttattttttcctctatattccagaacatgttaaccagagtgattttaaagtcctttttgggaaactgtaatgtctgagttgtatgtgaatctgttcctattggtttgttccttgaactttgggcaaatgatcctcccttttgacattactagtaattttgattaaatgcccaggcattgcatataacaatggtggaaactccagatgatgttacttttctctgaaaagagaagtcacactttcctctctagacagataatagtagaggctgattgtgttaatccagtcaggaattgagctgtgccaagacgtggttgtggttttggaaaagcttgatctacctctttcaccctgttcctagagtgtagtctttctaaggctttcagctgtgagcctgttttattcaactttaaggatatagccttttgtgctcccagcttaaggaggagagtctctttttttttttttcttttttttttcagagtctcattctgtcgcccaggctggagtgcagtggcacgatctcagctcacagcaacttccacctctcgggttcaatcaattctcctgcttcagcctctcaagtagctgggattacaggcacctgccatcatgcccgactcatttttgtatttttagtagagacggggtttcaccacgttgggcaggctggtcttgaactcctgacctcgtgatccacctgcctcggcctcctaaagtgctgtgattacaggtgtgagccaccacgcctggctggtctcatattttgtttgtttgtttgttttttgagacggagttttggctcacttcagcctctgcctcctgagttcaagcagttatcctgcctcagcctcccgagtagctgggattacaggcatgcgccaccatgcctggctaatttttgtagttttagtagagacagggtttcgccatgttggccaggctgcgctcaaactcctgacctcaggtgatctgcccacctcagcctcccaaagtgctgggatacaggcatgagccactgtgcccggccccagagtctcatatgttttactttataccatcttgattttttgttattcttagggaagttttcatttattcaagattatatttctgttttttatagttagatttttaatgtatctagaatttagttttgtgaatatcataaaattaggatcttactatattcctttaaaatggaaagccagtcgtcccaacactattggttagaccaggagtcagcaaactacggccaacatgttttgttaataaggttttattggaacacagccattctattgtcattgtcaatgactattttcatattatgccrgcagagttgagtagttgcaacagaaactattaatatatggtccacaaagcctaaaatatatgtctgtttatggaatttcttttatttctttatttgcttaatgtgttcttctctcatcatctcacactgttttttgttgttgctttttttctgagacagggtctcattctgttgcccaggctgagtacagtggcataatcacagctcacagcagcctcagccttctgggctcaggggatcctcctacctcagcttcctaagcagctgggactataagcatgtgccaccatgcctgactaactttttatttcttgtagagacagactgtgtcgcctaggctggtctcgagctcctggactcaagcagtcctaccacttgtccttccaaagtgctgggattacaggcatgagccactgtgtccagctgttctcacactattatagttattttagctttatcctactgtattggccttgaagatacaatttgtttagtcaggtttgctgagatataatttatatatagtaaaattcaccctttttatgtgtacagtatyatatggctgacaaatgtatacggccatataatcacagtcactccaaaaagttccttcatgttcatttgtcagtcctcctccttattgccaaaccctggcataccactgatctattttctgacagttgtgtctttttcagactgtcatataagtagaatcatacactaagtagccttttcagtctggattctttgattttagcataatgtccattatgtccattcactggctgatggacatctgggttgtatccagtttttggcaattatgaataaagctgatagaaacgtttgcatacaggattttgtctagacaaatatattttcattttggagggataaacacctagggatgagattgttgggtcatatggtatggtaaatgtatgtttaactgtataagaaactgccaaactgttttccaaagtggctgtaccatttttcatttccactagcaatgtatgagagttgcaaatgctttgcatcctcaccaacacttaagtctcataagttttgtttggttttgtttttagtgattttaaaaggttagactttgtagttttaattcctaatgagtttaattcctagtacatagttttcatgacttactgatgatattgagcagctttctctgtgcttaatttgccatctgtatatcttctttggtaaagtgactttccaaatctgtccattttttaaaattgggttgttttcttatgatctagtcataactttttaatctgtgttgggtatactagttctttatcggataagtgttttgcagatattttctcccaatcttgtcttctcatttcttaataatggcttcaaaagaacagaagtttttaattttgatgaagtctgcttcatcaatttttctttttatgttttgtattcttttctttctttatttttatttttatttttttgagatggagtctcactcttgtcgcccaggctggagtgcagtggtgccatctcagctcactgcaagctccacttcccagtttcacaccattctcctgcctcagcctcccgagtagctgggactacaggtgcccgccaccacgcccggctaattttttgtatttttactagagacagggtttcaccgtgttagccaggatggtctcgatctcctgaccttgtgatctgtctgcctcagcctcccaaagtgctgggattacaggcgtgagccaccgcgcccggccgatttatacttttttttgtgtcttacctgagaaattattaccacctcaaagctgtgaagattttcccctgttctcttctagatgtttggtagttttaggttttccatttagttctatggtccgttgtatagatgcatgcttgtctatatgcatgtatacatttatctattgattgtattgacatataattcacatatgataaaattcatctttaaagtatacaatcccattttttgtgtgtgtacagatgctccttgacttacaatagaattatgtcctgaaagccattgtgagtcgaaaatatygttaagttggaatgcatttaataacacctaacttaccaaacatctttcttagcctagcctaccttaaacatgctcgggacacttatattagcttacaattggacaaaataatgtaacgcaaagccagttttataatgttgataatgaattttgaatcaaaatttgaagtacaatttctactgaatgcatatggcttttgcaccatcataagctaaaaaaaattgttaggttgaattatcttaagtcagggatagtctgtattcagaaagttgtccagccattaccactatctaattccacagcattcttatcacgcttacaagaaaccctgaatccactagcagccacttcctacttcccattccacccaacttggcatctgctaatttacttactatcatatggatttgcctgtcatggacatgttgtgtcaatataattaataaagtatgtgccctttgtgtctggcttctttcactaatcatgatgcttgcaaggttcgtgttgcagcatgtattagcacttcattcctttttatgacaccacattttgttttttccattcatcagttgatggacattaggattgtttccactttttggctattataaataatgctactatgaacattttctttttttttttttgtaactaaactgagatgaagtaccaacagcatgaccttttacccttaaattcttcagcatgcatcttctaaatacaagttctataatcacagtgtaattatcacatttagaaaatttatcattgataggatactgttatctaatatacaatccatattcaagtttcaccaattgaattagtttttaaacatgtaagacaataaacaattttattgagatgaaattcacacaacataaaattaaccattttagagcaagcaatttagtggcatttggtatactcataatgtacaaccatcatatctatccagttccaaaacattttcatcactcccaaaagaaatcctttacactttaagcagttgctcctcattcctccatccctttagctcctaacaatcaccagtctatgtgtgtctctatagatttacctcttctgaatatttcatataagtgaaataatatatgtgacttttgtgtctggcttctttcactttagcatgatgtttttgagaattctccacattgtatcatgttatcagtagctcattactttttatggcagaataatattccattgcatatgccacagtttgtttatgcattaattgacagacagacaatttcttttttttttttttcccaagacagagtcccactctgttgcccagtccagagtgtagtggcacgatcttggctcactgcaacctctgcctcctgggttcaagtgattctcttgcctcagcctcccgagtagctgggattacaggcatgcgccaccatgcccagctaattttttgtatttttagtagaaatggcatttcaccatgttggccaggctggtctcgaactcctgatctcatgatccgcctgccaaggcctcccaaactgctgggattacaggcatgagccactgcgcctggtggacagttagactatttctacgttttgtctattttgaatagagctgctatgaatgtgcatgtacttgtatccatttgagtagctgtttttggttttgggggatatatgccttaggagtggatttgctaggtcacatggtgattccgtttaataggatgaaaggatatgttgaatctgtagatcgatttggggaaaatatacatctttcaatgttgaattttatgttctatgaacatcatgtatctttccatttatataggtctttgatttctctcatcagtgttttgtggtttttagcatacagttgggtcacgtaacttttgttcacataactgaaatgtaactgaagtgtttctttctcttttctatttatttatttgcttttgtcttatggtactttatttctctttctagttgttcatttctttttctttctttcttctttttctttcttttttttttttttttgagacagaatcttgctctgttgcccaggctggagtgcagtggcacaatcttggctcactagaacctccgcctcccgggttcaagcgattcttatgcctcagcctcccgagtacctgggattacaggcacacaccaccaccagctaatttttgtgtttttagtagagacaggctttcaccatgttggccaggctgatctcgaactcctgacttcaagtgatcaacctgccttggcctcccaaagtgctgggattacaggcatgagccactgtgcacagcccttaagtatatataaagaaatataatttagagagtagtgagagcaaacatctttaccttgttcctggtttctagagtctcagaattcaatctttcacaattaagcataaagttatttgtaaatttttcgtaaatgttctttatcaggttgaggaagttgccattaattccaagtttacctagagttttaaatcatgaataggattttaaattttgtcaaatgctgatatgattttttaaacatctctgaaatcatgatgtttctcacagtggatgtcatagtttcattggcaggactctttcatttttaatggtgcataaaatagtgtgtattttataattgctgccatcatatatttgatgaaatagcccaagctggagtgcagtggcatgatctcagctcattgcaacttccccctcccgggctcaagcgattctcatgcctcagcctccagagtagctgggaccataggcgagtgccaccacaccaggctaattttttgtattttagtagagatggggtttcaccttgttgcccagggtggtctcgaactcctgagctcaggtgatctgcccacctcagcctcccaaagtgctgggattataggcgtgagccaccacacagggcctgaaatggcgtcttttgataggtgatagtgctggtgacatgtctgtttaaaaattttcctgagaccaggtgcagtggctcatgcctgtaatcgcagcactttgggaggccaaggtgagtggatcccctgaggtcaggagttcgagaccagcctggccaacatggcgaaaccccatcactactaaaaatacaaaacttaggctgggtgtggtggctcacgcctgtaatcccagcactttgggaggctgaggcaggtggatcacgaggtcaggagttcgagaccagcctggccagtatgatggaaccccgtctctactaaaactataaaaattagctgggcgtgtggcaggcgcctgtagtcccagctacttgggaggctcagacagaagaatcgcttgaacccgggaggcgtaggttgcagtgagccragattgtgccacttcattctagcctgggcgatatagcgagactccgtctaaaaaaaaaaaaaattagccaggcatggtgtcatgtgcctgtaatcccagctactygagaaggaggctgagacaggaggattgcttgaacccaggaggcggaggttgcagtgggctgagatcatgtcactgcgctctagcctgggtgacagagcaagactccgtctcaaaaaaaagaaaaaaaacaaccttatgccttatgagatatacagaaagcactggttagagggtaatttagacctgtaaatgcccatagtaaggaagaagaatgatctcaaatcaataacctaaccttcaaccttaagacactagaaagagaagagcaaactaaatctaaagcaagcagaaggaaagaaataatagaaattagggaggaaattaacaaaatagagaatagaaaaaaaaaatagagacaatcagtgaaaccaaaagcttattatttaaaaagataacaaaattcataaaactttagccagattgaccaagaaaaagagagacttgaatcagaatgaaagagtagacattactaccaaacttccagaaataaaataaagaggattacaaagaataccgtgaacaactgttcaccaacaaattagataacccagatgaaatggcaagttcccagaaatatacaaactaccaaaactgacgcaagaaaaaataaacaatctgaatagatctgtaacatgtgaggagattgaatcattagtcaaaaactacccaaaaaaggctgggggcacggtggctcacgcctgtaatcccagcactttgggaggccgaggtgggcggatcacaaggtcaggagatcaagaccatcctggccaacatggtgaaaccctgtctctactaaaaataccaaaaaaaaaaaacaaaaaaaaaaacaaaactacccaaaaagaaaaggcccagatatcttcactgctgaattccacccaacatttaatgaagaattaatacaattaacactaattctttgcaaactcttccaagaaatagaatatttgacaactcttttttttttttgacacatggtcttgctctgttgcccaggctggagtgcactggggcaatctccactcactgcaacctccgcctcctgggtttaagtgattctcatgcctcagcctcccaaatagctaggattacaggtgtgcgccaccatgcctagataattttttaatatttttagtagagacagggtttcaccatgttggtcaagctggtctcgaattcctggcctcaagtgatctgcctgcctcagcctccttaagtgctgggattacaggcgtgagccaccacgcctggctcacatctcattttatgaggctagtattaccctgatggcaaaatcagacaatgacatcataagaaaaaactatagagcaatattttttatgaatttggtagcaaaaatctttaatgaaaaactattgactgggtgtggtggctcatgtctataatcccagcactttgggaagctgaggttggtggattgcttgagcccagcccagcctgggcaaagtggcgaaactgtgtctctacaagaaatataaatgttagccaggtgggctgggcacggtggctcacgcctgttatcccagcactttgggaggctgaggcaggtggatcacctgaagtcaggagttcgagaccagcctggccaacatggtgaaaccccgtctctactaaaaatacaaaaattagccaggcatggtgrtgggttcccgtaatcccagttactcgggacgctgaggcaggagaatcacctgaacccaggaggcggaggttgcatggtggtgggtacctataatcccagttacttgggatgctgaggcaggagaatggtgtgaacctgggaggcggagtttgcagtgagccgagattgtgccactgcactccagcctgggagacagagcgagactccgtctcaaaaaacaaaaagccgagcgaagtggctcacgcctgtaatcccagctctttgggaggccgaggcgggcagatcacgaggtcaggagattgataccatcctggctaacacagtgaaaccctgtctctactaaaaatacaaaaaattagccragtgtggtggtgggtgcctgtaatcccagctactcaggaggctgaggcaggagaatggcgtgaacccaggaggcggagcttgcagtgagccaagattgcrccactgcactccagcctgggtgacagagcgagactctgtctcaaaaaaaaaaaaacaaaaaaacagccaggcatggtggctcatgcctgtagtctcagctacctgggaagctgagatgggagaattgcttgagctcaggaggttgaggatgcagtgaaccatgattgagccactgcactccagcctgggtgaccaaatgagaccctgtctcaagaaaacccctcaaaaacaaagattctattttgatttatttgcagtgtttgagtgtattgctttatatagttttcttagatgttgttgtaggtattacaatatacgtatataacctatcccagtctaatacataacctatcccagtgttttaccaggttgagtgaagtgtagcaacttttttttccatttaagtctctttgccctcctcactttttaaatataactgtcttaagtatttcctctacatgaagctactccattttggtggaactggaagtgcatatgcttgtcttttatctgtcaaccttactgaatgattaattcttgtagttcttccttgggttgtcttgaattgctatatatagtcatatcttccacaaaaatgacattttcatcccttttttttttttttttttttttttttgagacggagttttgctctttttgcccaggctgcagtgcaatggcgcgatctcagctcaccacaacctctgcctcccaggttcaagcgattttcctgcctcagcctccctagtagctgggattacaggcatgtgccaccacacccggctaattttgtatttttagtagagacagggtttcttcatgttggtcaggctggtctcgaactcccgacttcaggtgatccgcccgcctcagcctcccaaagtgctgggattacaagcatgagccaccgcgtctggccaattttcattttttatatgattttcgttttttggagactagggactctctctgtcatccaggctggagtgcagtggcacagtcatggctcactgcagcctcaacctcctgggctccagtgatcctcctacttcagcctcctaagtagctgggactacaggcatgtgccaccatgcccagctaaatttttttttaaatggagacagggtctcactatgttgcccaagcttgtctcaaacacctggactcaagtgaccctcccacctaggcctcctaaagtgcttggattataggcatgagccaccatgccaggcctatttttttatgtgatctgtctttacctacttctctcacttcatctcctgctcttcccttcattgcatctacttttagccttagtgacgtttttgctcctccttcaacaacacatccaacatgctctatctcaggcctttgcatttgttattgcctctgcctggaatgcttttgcccctttcccctggatgtttatgtggcttgctccctcactttctaagaggtctttactcagatgtcacttacagtgagatcttccctgaccatccctctaaaattgtaaactgcccccgtcatcaaatcccccatccttttccctgtttttcttttcacagcagctatgataatatagtatactattttatctattaaatggtctagtttatttatttttgttaggacgtaagttccatgaaggcaagaatctttctctattttgttcacttcttttatttccattgcccagaatggagcctggcacatataggtactcaataaatatttattgagataattaatctttgtgtatttagtatttttcttcctcaaactgggactactgagctccaaaacagtgaatttttttgagacaggttcttactgtgtcatccaggctggagtgcagtggcaccatcacagctcactgcagcctcaatctcctgggctcaggtgattttcccacgtcaacctcctgagtagcagggactacaggtgcgcgccaccatgcccggctaatttttgaactttttttatagagacagggttttgccatgttggtcaggttggtctcaaactcctgagctcaagtgatctgcccacctcagccttccaaagtgctgggattacaggtgtgagccactgtgcccagccaagagtgaatgtgttttatagttctttgtaccttttgtatgtaacttttttgttttaattcttgtttatttgtaccaggtaatacttttcatgtggtttaaaattcaaatggtataaaaaggttgtgttcaaaagtattcctcccactgtcgtgttcaaacaccccattcctctgctcagaggcagctagctttgtcagcttctcgactctcctttcggggatattcccatatgactttctgaaaatttgataccaagttacactatagtacaaagtattttacaattatatctgtccagaatagttacttggttttttcctatgtattgctcaaccctccttggatagccagcatcaaccattttttagagaatgttactatcatgagagccattaagggagtgatacaatgaaatactgttttgcccatgcccttgaagttcaaaatctaggtgggatgagaaatatccacacttattaaataacagaggctttaaaaagatcaagataataygtatgcaatgtcacaaaacattgaataattaattgttggatgagatatagataacaaataccatgaaaataagtttatcaaagcagagagtgagtatcatttatcagggaacgtttcatgagaagggaagaatatgatggctttggatagtctgaaaagaatgcagaaggcagaagtatattttacctcaatcataggcagttgagaaaacaaaatttttttagagaaagtcatgttcaagatggagcttaaggtagggcaacagtggctcatgcctgtactcctagcagtttgggaggctgaggcaggcagattgcttgatcccaggagtttgaggccagcctgggcaatatggtgaaacctcatctccacaaaaaataaaaaaattagccgggcgtggtggcctgcacctgtagtcccagctccttgggaccctgaagtgggagaattatctgagcccaagaggtcaaggctgcaagtgagccatgattgcgccactgcagtccaacctgggtgacacagtgagatgctgtctcaaaaaacaaacaaaaaagatggagcttgaaagataagttggatttttaaataggcacaaaaggaaggataacatggtggaaggggactgctgaactactactaaccaactgttcttgtgaatcaagttttaatggaacacaaccatgcccattcatttatgtattgtctgtgcctgctttcatgctacagtggcagagttgaataattgagaccatatggcctgcaaagcctaaaatagttactatctggtcctttacaggcagcttgctgatccctgcaagtagataggatgtaggtaggaaagcattactgataaatattgaagaaatgaaaatgagatatttattagagttgggggaggttcagtaataaaagggtggttggttgaagaggaggttagttttgaaggaatacaatagaccattataatagagaggaagtgaggggccatttcacgctggacagtagttgcttggtaaagcacagaggtggcttacttttaatcatgcttttctaatcttttccctgctagccaagaaggatcaagaaggtggagaagaaaagaaatctgtgcaaaagaaaaaagtaaaagagttaaaggtgttggattcaaagacagcccagaatctctgtgagtatctcttggtcccaactattcaaaatgtgaaggaattcttttaagaatttttaattctcttgaatctatggtcccttgatatggaactttaattgttcaattcctgctatataccaaccattgcacagtgaattttcagtatcatgtttaatttcttcaatagcactgcaagatttttaagtatccagttttatgtcaaggaaacaagctaagacttttaggaatttgcttagacataaagctagtaagaaggaggtctgggatttgagccttttttttttttttttttttttttgagacacagtctcaccactctgttgcccatgctggggtgtaataatgcgatcacagctcactgccacctcagcttcctgggctcagttgattcttccaccccagcctcccaagtagctgagactacaggtgtgcaccaccatgctcagctaattttttgtagagatggggttttgccatgttgctcaggctggtctcaaactcctgggctcaggtgatctgcccagctgtgtctctgactttcttatttaaaagttcttactatgtccattgcgttcacagaaagtctaccacagatggtctagccactggacatttccttgctcccacttttgcttttttattaaataaatagagaaggggtctcgctatgttgcccaggctggtcttaagctcctggcctcaagtgatctgcccacctcagcctcacaatatgttgggattacagatgtaagctaccatgcccagctttcactttctgataagtaaaggtactagcttggcttcaattaaatttaaaattactttgtgatttaaaataactaaggtaaattttgtacttctcagagtaggatcagtaactccagagaagggttctgttctgaagtttccacgtatactcgtaactctttggtagcaaaatttcaaatgagaaattcctctgcaaagttgatataggtagtacttatttgatgatcaggacaaatgttaaatttttgttctttttaattactcatctacctacttcataccaagaaatatagacttaaatatttatttgacaaatatttcagggtctgctatgttataggctctattaggcatgtgttccagagatgaaagggtattttccgtaaaacccactcatagtcttgtgatgcagttattgtccctgtttatccaaatgagaaaaccaaagtttaaatgatgcgaagtgcccagatcacacagccaataagtacacatacccataagtaaagtcagtgatacaatgagaccagtaaactgtcacattattcttgattatataatcttaaattattgtcaataactattactacatagtgtctgtggtgaagtcttatggagattaaagtattgtgagtcagttcctcttcccaagagtatctctaggaacataagacatgagtaattggtttaaaaaatgatacaagaaagacaatggtgtagtacattatgatttctagtgttatgatattgatatggaaaacagaatttaagaaaagaaaattgagagtagtataggataggatggtctggaagatggaatttagtgattaaatgtctctcatgtgctaatgatacaaagctgaataagacaatagtccctgtctgcatgagccacgtatttggtaaagacagaaaggcagatgataacagtgcagattaataaatgctatgatggaggtatgctagaatgtttatgagagtactaggaagggagggatctaaatcaagtgggggcagtgttggaggggcaaatcccagaagatattctaaaggaggtactacttaaactgagttgaaagaccaattaaggaattaaggaggctgggcatggtggcacattcctgtaatcccagcaggaagctgaggtgggaagattgcttgagaccaagagttcaagaccagcctgggaaacaaagcaagacccctgtctctacaaaacataaaatactagctgagcacagtggcgtgtgccagtagtcaactactcaggaggctaaggcagaaggatcacttgagcccaggaatttgaggttgcagtgagctgtgattgcaccactgcactgcagcctgggcaacagagtaagacccgtctcaaaaaaaaaaaccaaaaaattaagtgaaggcgggaaggttggcttgtttcaggagagggatcagcatgtatgagagcatgagataacattgtgcagttcaggaactgcaagtagttgagtacaactgagtaaagtttaaatcaggaaaatgagtgagattatcctgtgtaatttttaggaaggctgctttggcagtgattttgaggctggattgctttttatcctgtgtaatttttaggaaggctgctttggcagtgattttgaggctggattgctaaggtaaggggagactataggcagagatgagttatgtcattgttttaaactaggtgagatgtgatcagggcctgaaactaaggtgatgagaataagagagggagaggatattaagatggtagaattaggctaggtgcagtggctcatggctgtaatcccagcactttgggaggctgaggcaggtggatcactggaggtcaggagttcgagacgagcctggtcaacatggcaaaatgctgtctctactaaaaatagaaaaattagctgggcatggtggagcacgcctataatcccagctactcatggggctgaggcaggagaatcgcttgaacccgggaagcggaggttgcagtgagccaacaccatgccgttgcacaccagcctgggtgacagagtgagactcatctcaagcaataaataaattaaaataaaaaactagccagatgtggtgccgcatgcctatagtcccagccacttgggagactgaggtgggtggaggattgcttgaggctgggaggtccaggctgccatgagctatgactgcactgctgcactctagcttgggcaacagagtgagatgctgtctcaaaaaaaaaaaagagagagagagagagaaggtaaaattaatggaatttagtgattgacttgggataaaggagaaggtgctttgaggtttaggtcactctgcggaaagtggtaccatttactgaaataggaaaattcagcaggaacagattgtcttttcggggaggtggatgtgagaggtagcaggttggtgtcttacttaaagtatattctctaagtggctgccatcttttcattggctttgtggttatggaataaatcagagtcgtggaagtgagagagaataggctagtttagattgctataaagtgaaagaaagagaaactggtaatttagagaggaacattgagtaagatttaaaaaacttgattatgtatatatgatgaagggaaaggtctgtggggctgcctcttctgttgacacatgaggaaaggatgagtacatgggagtatatatacttagacgtaaatatatgaacacatgcctcctataagcttacgaaaatgttggtatagttttcttctaggcgattccaaaaggcttatctgagtcttttctagtctggctctaaccaagagccctagtgctttatttttaagtaggataagagaaagctgagcaagtaatttgaccagtggctttgatttttctcagtgaagaggagcagggtcttcctggaacaaatggggaagtggtggggcagtggggaaagtgggaatatgttggaggacctgccaagaagggtgggagaaagtggaattgggacacacaaagagaattgctaacagcgcggaggccccagttatcattggtgctactgcaaattcatagactccagtccgcatcagcctaggtgtcagagtagagaaatgaaatggctagactgaccagggacccagaaggagaaggaagcaaaagaaaggtaatagtaggagtaataatactaatgggagtcatagtagagagcaaatgaactgatggtttagaggctcctaatgaaataggaaaggcagagtggaactgatatatcagtgaaaacagaatggtcaggagactggaaagagaggtcctgataaggctgaagagtcaagtgagagattagaaagggagagttgaaaaaacaggatgtatttgttagggaataggatatggtggtttaaggtcaaggcagctttgaggatcacgtcctgagagtggggaactaaagtagagtggggtgaaagtctttgacgtatatatacttttttgagacgggtctcgctctgttgctcaggctggagtgcagtggtgcggtcacagctcactgcaaccttgacctcctgggctcaggtgatcctcccacctcagcctgccgagcagctgggactacaggtgcacaccaccacgcctggctagtttttgtattttttgtggagatgaggtttccccatgttgcctaggctggtctcaaactctggggctcaagcgatccgcccacctyggcctcccgaagtgctgggattacaggcatgagccactgtgcctggcctaaaagagccctgttaggaagattatccagcataggtttgcaggatgggttggaagcgggaacagaccgagaagaacatgtcttaatatctcattttctggcagcaatctttttgggttccttccgcatgccctatcaagagattaagaatgtcatcctggaggtgaatgaggctgttctgactgagtctatgatccaggtaaggagtaaggtggttctgctggagcaggctcttctgtgtcgctgggcactggcctcatctctgtgtagatgaagaggatcctcctccagcattgctgacttatgaatgctggctttgagaaactgccttttctctggtggtcagattacttctggtatattttgcaaaagtacccccatctcagtagctgcctctcttctcccaccatatgtttctttctgtatggtccttgagcagagtgtgggactgacaacagagtaaaagttgtttaggcttgagttgttagcgaattcccctccagctgagatgtctcttctgtctttcagaacctcattaagcaaatgccagagccagagcagttaaaaatgctttctgaactgaaggatgaatatgatgacctggctgagtcagagcagtttggcgtggtggtgagtgaggcctgtggcagtaagcggttttccacctcctgtattcccctcccctctagagagcagcctgggcatatgctccttgccgcttgtctgtttttgaacctgtcttaatctctctcttctccctgctctggagctgtgatcctcccataggaggctcaagcgtgtatctttttctgacttccccctcttttgactgtaatggaactgcttgtgttctttactagatgggcactgtgccccgactgcggcctcgcctcaatgccattctcttcaagctacaattcagcgagcaagtggagaatatcaagccagagattgtgtctgtcactgctgcatgtgaggagttacgtaagagtgagagcttttccaatctcctagagattaccttgcttgttggaaattacatgaatgctggctccagaaatgctggtgcttttggcttcaatatcagcttcctctgtaaggtgagccaaagaggtagggcaggacaacacaaggaaggctgtagcctctatgagttcagtgttggcaggaggccatcttggacatgtcaggatttaacagtttctcctctttctctaagcttcgagacaccaagtccacagatcagaagatgacgttgttacacttcttggctgagttgtgtgagaatgactatcccgatgtcctcaagtttccagacgagcttgcccatgtggagaaagccagccgaggtggggcagtttggaatgaagctagagcccaaaagtctctgcatggggagggaaataagacacagtctagatgtgagagcattttcagttcagactatttcaagtggaaatgagataggatttaggcatggtgcctaagtcacaagggcagagcgtatggctgaggagagatctttatgtgtagaaataggaagcactctttctcttcctaaggaaacaccaaacaccaaaaaacagctagaaaggcaggtgtttttagtctaggttaatagttcttttcattaagaaaacatagactacattaacaaaaattaggcctcactgtcctggaactagacmaagaaaaagcagcattcactggaaattggaacagatttctgcccccgcctctatatttctatgtatatctccttcctcccaaaccctgttctctaaaataaatgagaccaagatctcaggggatttcatagattcatgttaaattaaatgaagtctctcttctgttcctagtactgcataccttgtgaaggctggaggttcaatgatcaaataatttatagtttcactggaaagatgaaaacttaagtatgtgacacaactaaagtacataaggaactaaaattattaagtaccagaatgtgtgtatagactgaagctatrctctgaaaggtgaaacyaaggggtgttgaggctgggattattagtaagctcttgctgtctgtttttatggtttttttttttttttttttttttagtttctgctgaaaacttgcaaaagaacctagatcagatgaagamacaaatttctgatgtggaacgtgatgttcagaatttcccagctgccacagatgaaaaagacaagtttgttgaaaaaatgaccatatcctctcttgaaaggagggagttgttccctaggaagggaaagaaaacttcctgtagtgggggaaaaacaggatagatagggcagtatgcaatttttttctcttaaaaaactctttttctttaaatacatagttttttgggtttgttagtattttgagacaggctctctctgtgtcacccaggctggagtgcagtggtgccatcacgcctcactgcagccttgacctcttggactcaaacgatccttaccccctcagcctccttggtagctgggactacaggcatgtgccaccaggccctgctaaactttttgtaacctttttttctttagagatggggtctcactttgttgcccaggctgcatagttcctgagagcattccattgttgtggagtagaagcacaccatgcagatcaaccataaaagtcccascaactcccctgcctgtaccccgtctccactacacacgctcacacatgcttccctctctttcccctccccagaggtaaccactgccactggactttattctgatttgcacctcatacatttattttaaacaaaaactgcattgtattgtgttttgcacatatgtcttggccatgtttccataatagtatttatagaaaacctccttttaggtcaagagatggagaccatcctggtcagcatggtgaaaccccatctctactaaaaatacaaaaaaaatcagctgggcgtgatggtgcgcgcctgtagttccagctacttgggaggctgaggcaggagaattgcttgaacccaggaggtggaggttgcaatgagccaagatcgcgccactgcactcctgcccggcgatagaacaaaaccctgtctcaaacaaacaaacacaaacaaacaaacaaacaacagtttaaactgccaccttctttttttataggtgtaccatagttcatggtttactattcccctatttaggggtacctacatggctttggtttttgctgttataaacagtgctgtattgaacatccctttgcatgccagtactcatctttgagtaattccttgggctagagaagtgggtctgcttcttggtcttggtcttggtcctttactccttggctgcacagctttgtgaaggatgcacaggaacagtataacaagctgcggatgatgcattctaacatggagaccctctataaggagctgggcgagtacttcctctttgaccccaagaagttgtctgttgaagaatttttcatggatcttcacaattttcggaatatgtttttggtgagcaagggatacttgctgactgaatcttttgtgggcatttctcactttcccctgggttcctgttggctggtagtaggtatacaatgcccatgtrttccttcctcctcttccctgccccagcaagcagtcaaggagaaccagaagcggcgggagacagaagaaaagatgaggcgagcaaaactagccaaggagaaggcagagaaggagcggctagagaagcagcagaagagagagcaactcatagacatgaatgcaggtgaggagtraagacgggttgatgggctgagayaggaatgttgggaagacttctctgcctagagtctagaggcagagtctcatgtctgagctcacctcctggcaaatgatttttggcagtcttcactccgagatcctgatgccggactttaaccccaattctgatacatgcgcattccaacttgccctggttaaactattaccttttctctcctttgctcgctcttgcattctctctcattcccctgtgattgtggtattgctgtgatatatactgttttccttctgtccrtccaaaggttcctctggcctgttctcattccctccactaaatctttcgggtttttttctgtaaaatattttcctgacgctcctcccatcttttaattgtggcgtgtcttccctttctgcttatttcacaaagtactatgtccctagtaccttagcacagttgtaygcacaattagattttaaatggattgaacttttggagcgggtggggagccggtcaccctcttctttcttcagcagaatctctgtttcactaccagaagcatgtctttgttgaaacatatgrtttcaattactggccctctgtttcctgtctctgcttctttcttgctgcagattccctaccccttcgcccccactgctctctctgtgggcagcggaaatacagcatacrctgctcacacagcactgagcccatgccaccctcctctaaacctgaggggccacaaaccttctgcaaatgaagaggtgttcacagagctgctgagtttgttaggaatcagtattttacagagcacaggcacaagggctgctctgatacctcttgctaccagggactttttatacttttctgtaaagcaatttccttgcccttagttgtaagccacaacttcgtaatgctattaaagcccacaccaagtatccttcaccttcccctgggactccagggtttgtccccaggtactggctaggatgcagtgggggaaggtggagtcccgctgacaygtgggatgagggctgcacacggtcaacaggtggcgtaatggaccttgcccagtttccagtacccgggtcaagcaaatgagggtggaatgtaggtcagctgcactggtgrtgctcagccagcaggtggcgctgggagcagtgagccccagccttggatctggcagcctatggactttttgggatttcacagtttcagatttcactatcctaagctgttgtcatggaaaccgagccaggctagaacaaggattctacattaactctttgtattccagccaggctgctcctcttagatgcagaggacttagacatcaggaagacttagccactggaggcagtacttcaggaaagtgcactctttgatcagtggtctttcctcggccctgctctgaaacctaaccaggcaaaacactttaggataaaagggagtgatatagttgcttagtaatttcacaatcgtagtctctacttatcctggtcttggagttgggcagttgtataattttgttgctagtcctgattggggtggggaggatggcattgcgggaaaatatcccaaggtctgcattggataataggcaatgagatcttttgttttaaccattttttagcagatacaagyaaacatgagcgtgtgagacttaaggctgagctctctttgcctcttcttagctgccagctgctgtgggagaggggaaatcaagcaatagccatkcattttgtgtggggcttgatatttgccatgctgctctggctgaagagttcacatctccatcttgttctttataacagagggygatgagacaggtgtgatggacagtcttctagaagccctgcagtcaggggcagcattccgacggaagagagggccccgtcaaggtaagtaagcacatggagctcatcctgggtgtcraagggggtgagggctctctactcctgccagtctgcggctaaagagcaaataatgatgctctaagcatctttttagtccctgcatccagaacggattatctagtcctcttcttcccatgttacagagtagcgacttagaaaactggggtttaagggactggcaataaatcagttacattggattatgccgcatttctccccactcttgaagcagatatttggaacaaaggaactgagctgcaggacccagggatttgagttggcatttgtgtgtatgaacaaaagttgatctaaatacaaaatgtatattagatatagattgaaattcaaagaaaaaataagtcagagtccttactctggacttcacaagcagaagacatacgtagagagaactaataatagaaagtataaaattttgtagacaggtttaggcatcattattcccagatagaaaaatatagaggagcatctcagttgaaggattatgccgtgtctgaaaactaccttttccttgagtgcagttagcctctattgcccttgccttccccatcactgccctgcaatctcctttcatgtcctttggaagatctaagtggattacattgagctagagattctaaaaagaattatggagctaggacaagtgatccaggcattagtatgggaaaagattaatgaataagttccctttcagggaagcttacagtggccaagagactaattcaaaggaaggtataggcaagtctgcccctcatgtggagttgacctgcactatcgtgtctagtgaaggtcttttgaggctaggagtggtggcttctttactaatttgaagagtgggaattacwaaaaaaggcatcattagaggtttctacttcagagggacttaaatctatgttccctgtttcctggctgttgcattgtgtaggcccatttgatagttatactttgagattattgtaaacagaaggagttaacacagcttgctttggccagtgcttagctattaatacagtggtatctgtagggcctgtagtacctgccacagcctggaaagggggaccttagagcatgctagcctatgtaaactcagtattctggcccaacaacagccatcactgtgagtttcatctgtaatggctggctgcccatttctacctatactctgaataaccagagtgatactcccttctgagggttctcttgtatgacttcagaatgttccccaaactgaaagctcccgagtcaaagttcttacccattttctggcattctctgagtacaggctttctaaagcgtggggagaagtggatatgaagagctgagtactctctgggctcgagcatttagtcttatagataggtgtttgcaaggagagtacagctagaggtactattactcctgtattttgtctttataggttcttacaacattatttcctactgaccacacaaggtgatgtggccttaacattaagcatttctagccttacaaaaatacattgcatcttattgtkttttttttttttttttttgaccccgtcggctaagtgcctgcatcagamttttggtggggaattcccttttaagcctcttcctgtggaactatactagaatcccagatgcttcctgtccacaggtagccagacatcagtggcttccctctgctggggaagccccattcttcacttctttccaagtagaaaatcagaactcacaggtggaggaaggaggaattttgttggaaactaaccttccagcagaggacctgaattagtcaaagtactctctcccatgcaagagggaataggaggagacttatactaggagatactaaattggaaagtaggtgaaatgacaattacatatattttaagtggctctagcctataagcttatctttctaggctctgggtccactaaatacacttgaatatatctgggagaatctcaagggagacatttgtagttattctggtaactctttagaccctggtgcattcacatcatgtaaagtgatgtgatgcggtctcacattaaacaggaggatagccatcagagtagattacaaagaacacagggctaggtagggatcaaaagacctaaagtcacatctagttctgatgctgtctgtgttatcctaagcaagtcacttaatgtttctgggactcagttcctcaggtataaaatgagagttggactagaatgaatggtctgcagggtcccttccagctctaatattttttttgtgcagtgacaacaggattaagaggagagagaggctggacttagatggccccattctcaaaatacaaaggctccactggctataggtttctctatgcagctactgaatttggctgttccaccccttgcctggctgtctctgactattcctcttggctgattgctttgagctaaaaaaacagaggcactgtggaacatatctgcctcatagccctccttttttccagagaggcagctgtccctattcaaagacactagctttttccctagaatttaaaggaatgttaaattcttccggtctctggagacctgggggagtgaccagtatacaaagactcattgaggagttggaagaggagagttactatcaggcttggttcattaaaagcaacatgtaaactcctgtgatccgcagggtgtgggagaacaatggttggagtgtcaaggggaagaatccatgtgattgtattacagctgctatttcaggcccatgattgagtcagcttgtggttttaatgactcaactttatctccatgtctgaattgtggcctcttgtatacaagtcatttgctcactgggataaaagccaagggaagaaagaaattcaactcttcctttccttccctctaccatttcccagcttccctataagctccatccatctaacagaaccatagagttggaaagactctaaagacttccagtgattagtatctaaccttctcatagggaaagggattaaaaccagataaggtgactaacacggtgaaactctgtctctaccaaaaatacaaaaaattagccgggcgtggtggcaggcacctgtagtcccagctactcaggaggctgaggcaggagaatggcatgaacccaggaggcggagcttgcagtgagccgagattgcgccactgcacttcagcctgggtgacagaatgagactccatctcaaaaaaataaaaataaaaaacagataaagtcttgcccaggtctacatggctaatgacagagcactgtagcccacttttgtgactccaagtccaggcctgtttcccctcagcctgcgtgattgaacaggagacagcagtgaacccacagtatgggccggaaatattctttcataccttccagcaaggagagtcggacataatgacattgcttcaggaaggtgctctcatgaccacctgtgttagtctattttgtattattataaagaaatactggagactgggtaatttataaagaaaaggggtttatttggctgacagttctgcagactgtagagaaagcatggcgccagcatctgctgttgaggcctcaggaagcttccaatcaaggggggagaaggtgtatcacaaggcggaagtgggagctagagagatgccaggctcttttaaacaaccagtgcttgtatgagctcattactrtggggagggcaccaagccactcataagggatccaccccatgacccaagtgcctcccactaggccccacctccaacattgtagtccacatttcagcatgaggtttggaggggtcatacatccaaaccatatcacctcctatctagagaaggttgctaagaatatttcctgtaccactgcttattctcccccctacttttgtaaataggacaagaaacataattagsagagtttgagacaagaatgagttatttagtgtgatgatgattgccccatctgtcctagtttcctcttccctaaggaagcttaatgtattaacaagagcacttcctctttagtaatagttcctagcctacgttttataaaggtcttttttcaaatcactaacctttttaaaacttgcgttatatggttgattttgctggtgtttttatcctagcccacccctaacttctaggaatctgtcctcagagagcattcaccagtatctcaacattgttcccttttcccacacagcctgtgggactgttctcttgtagtcaaaatatttatctggttctatggctacttttcartagtctaataacaagtgagtaagttgggggaagcatggggaggtcagtttttcttgactgttcaacctgctgagcataatggtgagtgagtggaaagctgggagacctgttccaacaagagctttctcatcccctgaccttaggccaaatcacaccctccctggtgtrtaggctttcaaggcttaaaagggaaattttgatcttctccctacctactctctgctcctggttcttatgaagtttgtaatacatcagaagcttcttgagtccagaaaagtctagaaacaccacttggttaggtacaactggtatcttcttattttggaggaagaaaccacagaaagcagcagctaaagacctaccacatgggacctctgccttctcctgtgttgcccaggacaagtggcccagtgttcttttcccaaggtctggagtcagatgttatttcaacatatatataccactagagttacacacacacacacacatgcacagagtcgcagtgtcttctcaactgttggagactgaattcaaagaaataataaaatgataggaaactactacccttctggatatgagaaatggggtctagagagggagtacttcagaagagagtggaaatgtaggaggcctgaggaagattttggtggtaaggacagtatgagaaatgcacacatgtagaccatcatagtcacactcacgtaggctccttttcctcacttgtctcagtcacggggcattagtttatgttcataatccaataaatggttttgtgaaaatcccacagtctcgggcacatacctatgatctgtaactagataagtcctgtggctgtcagtcagggtcttcactattctttctcctcttggtagacaacctcttgtgcccctgggaagtagaggaggaggaggagacctttaaattggtaacctgtgtgcatgctgcgtgttccctgcttgatctatgggcagcctctcctgggatgaaaacagtagctctgggtcatggctctgcagggagagaagacctggttaagacttgggctttggcaggctgtggtgactcatgcttgtaatcccagaactttaggttccaaggtgggaggattgcttgagcccaggagttcaagaccagcctagacaacatggagagaccccatctctgcaaaaaaatacaaaaatagccagatatggtggcacatgcttatagtcccagctactagggaggctgaggtgggtggatcacttgagcctgggaggttgaggctacggtgagctgtgatygcgctgctgcactccagcctgggcgactgagattccatcaaaaaaaaaaaaaaaagacgggctatctgatcctgtttggcttctgcctacctaaagctttttgctggtccaaaaaggcgcttcattccagtcatgcagctgccccagtcttggtctttatttaggagtgctcggctctttcatctggtcctgcttctaaaacattccggtactgctttctccactccagctttcccagatctccaggaagtctttttttttttttttttttccaattgagctatcatttacatacctaaaattcaccttttaaaaatgtataattcaggggttttagaatatccacaagattgtataaccattactatctaattccaggacgtttcatcatccccagaagaaaaacttcataatccccattagcagtcactactgattctcccctccccttgcctctggcaaccaccagtctattttctatctctgggtttgcctgtgctggacatttcgcagaagctgacccataacatatggcctttcgtgtcaggcttctttcgtcccagacagctgtttgtgtatacacagttgctctgtgctgttctggggcatgggaggaggaaacatcatgagatgggcatggtctcaaggagtggccttcctgctgcagatactggggccataagcctagataccataaatgaatatgagagtcttggggatgaaacccagcagttagaacagaaactcgtggattgatttggttcttcttttctaatctggtatgacagccggaacttgaccatctcttagccacctgggctgagatttcttggtaggggtcctctcctgtccatctttatcccagttctgcttccctggcatagtttttattactacctcccccccgccatgccacccccacatactctacacaccttgtagggcccttggcatttgtattacggctgctacctttgaaggggtgggaaagagctaaggcatgtgggcatctgttgttggaggaacacgtgggagtgcggtgtcagtgcgtggctgctgttcctctttgcgggagtctctccagccacttacggaaggttgccttctgctagggacaaccctcccagggctgactgagaagtgttttggcctaggagtttcctgggacctgtcaagaaaacaaaaataatactatgtactaaactttagtctatttaattccaacatccctattacgagaaaatagactttgaatacttcatctctccttaagtcacatagctaacacttcagcccagttctgtctgtctgtgttcaaacttttgtgctgttttcacacagggaagcaagggggcaaggcttgctttcctgttgcaccacactctcttacattctttgccacccaacaatatattccacatgctggatctctgcccctttcttcaaagtaagggcctctgtgaagtggccaaggtagtcatgtctgcatggcttacgctgattatctgctgtagagtttgaaagaaattagaaatgaggccttccatagacagaatctctcgtcttctcttgcagccaacaggaaggccgggtgtgcagtcacatctctgctagcttcggagctgaccaaggatgatgccatggctgctgttcctgccaaggtgtccaagaacagtgaracattccccacaatccttgaggaagccaaggagttggttggccgtgcaagctaatgtgggtcctgtgaccgcggcagctcctcagcggagccgcagactgtcctgccctgcagcatgtgcctaaaggctcaaggggatattcctctggggtggccactcccaccaccctgaccctgtctttctctctggcctgctgctctctcaacatcacatacagcttcagctgcctggaggccagaaggaaagggcagtgcaggggaggcctgagcccgacttagccagccctggctgttgtattaccaaagcagggtccatgtttgctgccttaaccctgtctcctctctgttactcagagggcctcatctcagacaaggcccagcctgctttttctcagccctgactttctaatgggctttcccccctaggtcagtcttgctggatttgtgcttttcttttgtggtttctctggccctgagaatagcatggggcttgtaaacctttgggctagatccctcctttcattgctgttgtctctgctcttccctctcctggctgtggttatttattattagtggtgtggcactgggagctgctcctaaggaagcagggagcaaatcccacctttaccccaccttcctgggaaaggcctccaaagcaaaggatctggaccagtttccctgctgtgctgtggcccaggccagagcctgtgggcaggcaggcagggcatagcgacagtgtgggacctgcccccagcttctgccacgctttatgcccttgcctctctggacgctctgcaccaaccccaggctactgagccaccttccctcctcatgccttccctgagctttggtgcatctcatctggactatgggttgtactgtgaccatcccaacacctcaccctctgtctacaaggaaatgggaggtggagcctcctggctgagaaattgttttgcaaatggatctatttttgtatgaaaaaaaaaatttttttaaagaaaactgttccttccccctttcccctccataatgtaagaagctttggtggcaggttacagagttctgggatttcttctcacaggcccaatcctgaatgtgcccctggaccttctggacccttgagtccaaggcagatcctctctcccagggaatccgacacaggaggaaccccttctctggttgagctgggccaggcctaagagtagcaggaactctaagaccacagagttttttataaatgtataaatgtatcaagccaaatgtgcagatgctaactggacattctggggaactgggcaccaggagtgccttcatacactgtaccccagctctcttctaaaagagaagtgggtgggcacactgaactgtttggtggccccaaccacaggaagctgcaattctctggcttagggtgatacttttgccctccttgtgcccctctcagctttccatccccagctaggaagaaagaatggcactcttgggcttggcccagaattagagttattagagcaagagagagcttaggaagcatgagggcaactatagtgaggccttattgccaggagggagggttttggttgctggcgcttgtgtataaaggggcaagagcagctcctttggactattcctgggaggactctgatgcagggcgtctgttgctcccctgggtcacctcctccctgctcgctgacatctggggctttgaccctttcttttttaatctacttttgctaagatgcatttaataaaaaaaaagagagagagagagaggtgtgagggacaaaatgcaaacctatttcccttgcctcataggcttctgggatgtcatcacctccagtttgttggttttgtttccaactgttaataaagcattgaaacagtactgccttacagcttcctgtgtgaatttctgagctgttttcttttcactctagtccaggctcctctagtctttcctgcctcaaatccctggttgacctgacaaatcactgtgaaaaagctaaaggtgccagacactttacttgggcacagggctagagatgattaatacatggtggctgctgccccaccagagctcacctcagggccgtttggccacagtaaaggagtgggcgcctggttcagctccctgactcttccacattgctgctacttggtttggagcccttttttggaactcacttggaacctttcatgttcccagatgtcacgcaaggtttcctggcagtacctgtgtctcttgctgagggaagcatctggctcccattttctcatcccctctgctctgttggtggccacagaccacattccagagtagaggggtttaccctggggtggaaacctgagcctgcccagcagaggttgggagcctgaggtcatgctccagatgacttgccacttggagccatacttgtctgagcacgttatgacctgcacaaaaaagccagaccagcaatgagcaggcccaggatagacagggagaggcctggagaggaccacaaacccattcgggcgggctctggaactggaaataaaagccttttaaatagccctggagcctgggcagctgcctcctcagtatggcctgaggtgtggggatgggttgcctgccgcctccctcccgtccccccggaggccacgcctttctggttcagagctttataggcacacataccaattaggggacaaaccacagctgctcacgcgctctgccagtctgctgctgtgcctggaatagaacccaggcgcccggcaccccgcccctccgcagcctggctctgagtaacaaaaccctgcttccatctcagcaaccgtgcacaccacccttcctcccacgctagaaagtcgcccccagattcttaagttggaaggtttggttcccatgacaacagacttgagctggcagaatgggtgacctggctctgggagcctccgcagcgcggaggaagccgcatacccttgctgaccagccagataaccccagtggctctgtctttgtgttcttgggtccttccgggtagttccccttttaagtcccccttcacccccagctccgtgttcttctgcagcttctctggctgcagcaacctcggaatcccacagtgcttcgaggaggcaggcggagggggcggggagatgggagagcaggcgagtgagtggaaaagcaccgacaggaaggagggaggggagctgagtctgcgatggatctcatttcctgcacgtcctttcagtccccttgacccccgcaagaagaggatgagccctccaatttcttaggcttcgctacggagatgtcagcgggaaggcgaattccagatggggaaactgaggctcgagctgcagacttggctttggaagaatcacctcccgcattccctcccactcccgcggctttcccaaaacccctaggcagcgggggtgggggtgcgggggcaaaggagagtctaccctcctcccgtgaagccctccggggcgcttcgggtaggcaattttagtcaggaaggggcgggaactaacgaaacgtcctctcccctctacccaaggcgtttgcccggcgccaacccgcccccgcccgcgccggggtctcctcttctgcctggagacagccgcaagcttagactgcacactccactgcacactgacacgccgcactcagatccccacccccacagcggaccgatcacacaatggcacacggtacacagatccataggcacacaatcgcacactgtctcataggcacaacggcattgcaagcatacacaaccatattgcacagtcacacacacacacgcaattcggaaacatctagacgcgcaatgacacaaagtggcctcccgattccgcccttcttccagcacccacctcagctcatcacttcatgcacacatgccaggagcttccatcgcttatacagaaacgttcagcttttcagaagaaacgttttattatttttttgtcgaagaaaaaaagccatataaatattagagtataaaacttgcgtgagacacaggaagagggtggggtgggagctacgtgactatgcgaagagaagcgcttataggagaagtcagtacgggggagggggtcgccttagcgcgtggacacagcacaaaacacaacacgggccgccgcgggcagatcaaggacagacggctgcgcggagcccgccgcccgctgcccacccgccatcacgtaaaagcacaccgcactacactactggctattctacaccagccgaaagagggagggggcgctacactactgtaagggcaggtctggggttctctggcagccccgctggatggccggggacccaggggcagaagggggtgggagaagaaggtctatgcacaaggaggcactggggaactttaaccaggctatggccactagggggcgcactggggacctgggcagtggccttcacggaagagaaacggcacctggcaaggtgaaggactgaggcttcaggagggcaggggccctgttgaagaagccccatcctgggctgagactttctgttcatttggtccctgccctagctccctgcctccccaacccagggactaagaatggcctggctggcccacccttcctgctggggctccgctgacccttccaccagtggcacctctggagtacccagcacccacagaggcccctctgacctctcaaggggacctggtcctaaacctgcttcgagcttccttggactgaaatgccagtttaatccattggtcctgttagctcagcccaaagctggctgcctgggctgagccctattatgtagtgggaagggtccagcctagttattggtttatggctggaatctggaggatgttgtcagtcccctgaggacatacagagcctcctccaaggccttgataacttgatgtgtcaagctttgtccatgcccccaccatccacatccacacacttcccttccttatcttaccaccccatactgtcttggaacatgcagtggagtctcttgtttgaggaggaggtgggggaagtcaaggcatgcagtggaaacgtcaaacaatgaaaaacaaaacagaagactggtccccagggcgttgggaagaggcttggtagcaaaatgccctccctaaatccagcaagcatcagtaccatggggatggtgatcatgtcctccaaaacttgagcattgatcttgggctctggaaggaggtgaaggggctggcaccaaaccatgctttgggggaagattgagaatcaaaggagaggccaagaggtcatgatgcccttccaacttttcagaactaggaggcttgtaggttacttggtacttcaacaccccaaccaccttactcgggaaagaggaactgttggagtggggtggggaggagggaggcatgggatggatgggcctgattgatttggaagatggaggagttcagctgtaactaaacggggtgtggcaaatggttcttggtgtctacagtaaccccactacccccatgggtacagcagttgattggatgggggttcccagcggaactgcttttgcatattcaaccccctgggggggaaggggtaggtgctgactgggcacttgtttctgtttcccaaggggagcatggccttggcccctaccagtattctgggggttagccctgaaactctgaggcctgggtgcaggtaaggagaagctgggctggttggggagaggccgccctgtggctcttggcctggcctccatgttacttcttctccttcttgcccgacttcttcttgttgccattgccacctgctggggccttgccatcccgcttgccagctgcgttggtcagtgtggcattgctgcctgggatgtagacattctggcggtagtcgggcacgtgctgcagggtgaactggggtccgtagcgggcgctcaatcccatggtgccggcaccccctcccagggtggagctcccatcagcagcttctgcagagacagaggaagatcaggtgggagctaaacttagggtcctcaacagtcactgtcttatatccccagcagttaatgaatgcctatacagcaccctgggccttgaccacgctgagcactgggaatataggggtcaccaaggtagtctctcttcacaagagttgagggtagaggttaagaggctctggagtgagaaagtctaggtttgattcctagctcctttccttactcactgtgatcctgggcaagtctacctaacctccttatgccacttcagttttctcatctgcaaaatggggatgataatggtaaccacctcttctggttttagtgaatgctaaataagaaaatgtatgtcaggtacgtaaaatagtgcctggtagatgtaagtgctcaaaacacattcgctggtatttctctcagggctgtgacacgggctctcagttccttgccctggctttctcaagggagcctctgactcccacactagaccatgggctcctggagggcagcagccatgaaaccatggctttacatgcccctagcctttgccaagcaaggcctggcacgagtagagattcggtagttccgttagtaagtgtgtggggtgggggtgaagagtgctcttccaagcctccatttcaaaacagcatttttttttttttttttttaagatggagtcctgctctgtcgcccagcctggagtgcagtggcgcgatcccggctcactgcaacctctgcctcctgggctcaagtgattctcctgcctcaacctcctgagtagctgagattacaggtgcacaccactagcccagctaatttttgtatttcaaaacagcatttgagcacctactgtgtgccaggcactctgctggatgcttcacatgcacaatcacttttaacctctacataacagcccagccagctatgtggtatgaccctcattttacagatgagggaaccaagtgttagaaggaccaaggccatacccggtagcatttgttagaggggcattcaggcccaagtgtacctaagcgcatgctggaagggacagtcagtcaccatcaccaccagcagcttggaccttatccctgttctgagtgaatgggaggtagagagaagatggagaagagctcggctctatgaagctgaggagatgatgatctcggggactagacatctcagggacactttaggcacaggctcagagtgccacagctaggtgacatcagacagca

SEQ ID NO: 98254 - DNA, 20516 bp, Homo sapiens
agcctcctgagtagctgggattacaggcacctgacaccacactcggctaattttttgtatttttagtagagatggggtttcaccatgttggccaggctggtctctaactcctgatccacccgcccggcctcccaaagtactgggattacaggtgtgagccaccaggcccgatttcatggtagctctattcatagtaccaaaaatttgaaacaacccaaatttccatcacaaaatgaatggataaacaaactggaatccattcatacaatagaataccactcagttggaaaaaggatgtgaaaatgtgaatgaatttcaaagacactatgctgagttgaaaaagacagtctcaaaatgttacatactatatgatttcattcatgtgacattctcaaaaagacagctcagtggctgccaggggttagggatcggggaggtctgaccacaaaggggtaccaaggggattgttttagggtaacagactattcagtatcttggttgtgatggtggttacatgaatctatacatgtgttataatgtataattcagagaactgtacattccctaaaaaagtcaatttcactgcacagtaatttttaaaaatttagaaccccatatgtcgcaccaaacaagtttattgtgtgtaaattttaaaaacaactcaaaacaatcatgattttttttttttttttttttttgagacagagttttgctcttgttgcccaggctggagtacaatggcacaatctcagcccaccgcaacctccccctcccaggttcaagagattctcttgcctcagcctcccaagtagctggaattataggcatgcgccaccatgcccagctaattttgtatttttagtagagacagggtttctccatgttggtcaggcaggtctcaaactcccaacctcaggtgatctgcccacctcagcctcccaaagtgctgggattaaaggcatgagccaccccacccagcatgatcctcttatttgggtctatatgagaagcaaagagatgaaggtccttgcactccaagggcacagaaaagatcccacatttggagccgagggtgactacagagctggagcccagaatggagggaggcccagacaggggagacccaggggctgcggtgttcgtggatgaggtgactctagaggcagggtgagcgctggggccttgagtaccaccaagaccagctcagcctctagccagtgggcagggaggaggcaccccaggggctgaggagcagaggaagatgccatccaatgggaggttggagggtgcgctgggtgagggggctggggcgagcatggtggagtgaacctcctggagctggggtaagggatgcagcacagggagcaagacacaggcccctcagggccactgtgggtgagcgctgagcacagaagtaccagcatcctagggtaccattcttccatcccacccccaccaattctccacctcctctaccagagtttcctccagaggttctcagtaggccccttgaaggagggctggaaaaaggagaagaaagcaggactcagtgagggttccagtgggaccagccctctgcatgtgctcccagccccagggcctgcagaggaggaaacgcaggtctcctgggaatgggctgttctaaggcaaccctcagcccctgcctcaggcatttcttctgcagcagccccagccccatcccgaggttagtgaccctcacatgcagcccctggcacagcagcctcccaggaggacccaggagtttacttggtggatcctgcaccttgggaagccctgtggccccctttaaagatctccacctgatctatatccacctgtggtcctcacctgatcttatgcagtcacctttgctagccggtctcttccttcttctggctccttgctggcagaatctgagtatttcctcatttgtgtccccagatgctaaaaagtgccagcacagagcaagtactaaataaatgctcattgaatgaatgaatattataaagtaaaagaggaccagatgcttctctaaggagacccaaggccctaaagtcccgagaccctttctccatgcctagggagaggtcctgtcactgtgcttccctgtacccagtgtccccagaaagaggtgggggtgagcaggaagtgactgggctgggaatgaggaagctccacattggggaaggtggtgttcagcactgggaactggacagcaaccagaagagccagcactggaaaggtaggggtggggaagagaaatgagacagagacgtggtagagtaagaggggttgagagaggcagggcatttagctggcagccaacccgtcctgcaccagctacccttctgtcttactcacctctgcctggggtttctgtccacacacttctctagtcaagaggccccggaaagtggcttcttgaggaagattctcttgtcttaggcctttgcacagatgattaaagactcggggtgctcttcccccaggtcttcccatcattcaggtctcactggatgtcacttctccagagaccttacccagtctctgtcctctcactctgcttgacctcctcattaacactaatcatctggatttgcattgtgtctgattatttacatgctttatacctccagagggtagacttcttgaatgcaggaactttttcttgttcgtttctgtatccccaggagctggggcatcactggaacacaaccaagttttgttggacggacagatgcatggatggatggatggatcaatggatcaatggatggatggatggatatgctacaaggatggatatgctacaatggatggatggatggatatgctacaaggatggatatgctacaagggatagttttccaagagaaattggagttacactttcagaaggaaatgggaatgagtacctggcagaccacacaacaggtatcgaagacatattactgtcaccatctccataaagtggcctcaatccttcctgtttgtggaaagaaggtgagttgccagccctattgccttcacctccctgatttctagtttcccttttgaagttaggattgatggtagattcccccagaatggcagtgatttgggtggctcagaggttcagactgtactcctaggcccattctcaggcaggagggaagagtggatattggctgctcatctgtcatgccaacctcctaatagtggccagggggcggccaggtgctgtggctcatgcccataatcccagaaatttgggaggccaaggtgggcagatcactggaggccaggagtttaagaccaacctgaccaacatagtgaaacctcttctctactaaaaatacaaaaattagccaggtgtactggctcatgactataaacccaactacttgggtggctgaggcatgagactcacttgaaccagggaggcagaggttgcagtgagctgagatcgcaccactgtactccagcctggatgacagagcaagaccctgtctcaaaaaaaaaaaagggggggccagtgagctagggtctggtcgttcatccttgactcttactgcaccatcagagtctgaggttgccctctagcacatcctctgccgactcaggagtaagaagagcgtagctctggcaggagaaaggtggagtgatgttctggactggacagtaaactatgtggattccctgcccttcacaacatgacatggcagtcagtcccatcaagagatgaagtttccttcccatcaatctaggatggcctgccattcactttggccaactgaatgcaatagaagtgccagattcaagcccggacctctagatgacttgcatgcttctctcctggcgtgggctagcctgctggagaatgagaaaccacatatggaagtgcagttttcccagtgtgtccattgccagccaacctccaaacatagataagtcaaggtcagcagagcttcaaacacacagctgactgcaaaatcatgagtaagctcagctgggaccagaagaaacccccagttgggctggacgcggtggctcacgcctgtaattccaacactttgggaggctgaggcaggcagatcacctgaggtcgggagtttgagaccaggctgaccaacatggagaaaccccgtctctgctaaaaatacaaaattagccaggcatggtggcacatgcctataatcccagctattccagaggctgaggcaggagaatcacttgaacctgggaggcggaggttgcggtgagctgagattgcgccattgcacttcagcctgggtaacactgggtaacaagagcgagactctgtctcaaaaaaaaaaaaaagaaaagaaaccccccgttggcctgcagacccatgcacactagtggttctaagccagttttaggatggtttgcacccagcaatagctaacagatgcaggagccagggagaacacctactcaatctcagcctgaaagctgggtggaatgcaacctgcctggaacaggcagattttggccaaagtggaggtgaggagaagggtcctaggagaggctgaaggcaccgggtttgctgatagcagcccctgctcaagaatccaaaagcaaggaagccccgacggagcaaggctgagaatagaaaccatgggagaagttatcttcactttgaatccggagtcctcgttttcatttgatgagaatgtacttaggaaagggttcactccttcaggggcttctctgggttgtttacagtgtttttcaggtgtgtttatgacactgctgagctcaatttgggacgggacacaggagtgagtgaattctaccaacatcttctcatctgcaataggatttttcaggctgggcacagtagctcacacctataatcccaacactttgggaggccgaggtgggtggatcacctgaggtcaggagtttgagaccagcctggccaacatggcaaaaccccatctctactaaaaatacaaaaattagccaggtgtggtggcacgcacctgtaatcccagctacttgggaggctgaggcgggagaattgcttgaacctgggaggcagaggttgcagtgagctgagatcgcgccactgcactccggcctgggcaataagactgaaactccgtctcaaaaaaaaatgatttttcagaggctcagcctgaacctgacccctctggtcccagattaaccgcagacacaggtcagtctgagggggaggcctcgtgagcatggggtcaaggggagccctgtggcttcgtctctcaggggaccacaccactccttcacagtttcagctgttgggccccatgggcacggggctttcccttaacaccccttctcctttttcctgataggaggggacctcactgtgcctctacacctccagtccacctctacctcctcctcgctggcttcaccccacagcaggagggagctatccactctgtgaaatcagagagagtgagcattcctttgactcacttccctggcaggtaggtcctggcaggtaggtcctggttctgacattcagaccaaagacagagctcttcccaacttggacccctgtctccaaacagtaagcccaccagtgcagggtcccactcccactcctgacccccacacctcacggcagtctgtcccctccagcttcctgacctgacctgggagaggaagcgaagccagtttgatgtgcaggtccgctgtctacagtccagtcctgaccccagcaccagcccttacaagccctggcttctgagctgaggggtgagtagcttctgaccccgaccacccagagcagtggcaggcagctagcctgaggaggtcgtgcaggacacgcagggacaggagccaggagccagttgaggtctccatcccaagttctttggaaaaggataacagccctcaggctagcagaggggcagagctaggagactgctggagtcctgtccctccccaggccgcctcccacccagtccctcatgcacccccacccccaccaagaagctacaagaaacaaggcccaaaagaggaggcttttaatacaaagagggtggggcatagcctgggaaggacttaaataaggaggataagagtgtcaggaaccagcagctgggggtacagggaccctgcggagtgggatgatgcagacagaattccgagcctctttgattctccaccatcggccaagcctgcagggagtgcaagacgcagctgagactcggcccagtctccaccccatttccaccgagctgtccagcctgcaccaccttacctgaaccctcgagggccacacatacctgtgctcctgccctaccccagccaccaggaagtccccagagctggagaacttgaggctgttgataaaacccacctgagcagaaagacaacacggaaagacattagaacgccccccgccaccaccgtcctcagcatcacagtcaagggytgggccttatcaggcctgggttaaatccctgctctgcctcctgccacctggtgacacaggccagcccttcacttgtcagggcctcagcctccacatctgcgagatgggggtaagcagagcacggggctagcagtgagtttgtraggatgaaggaggcagtgtacacccagtatggcctgaggctggctcctggtggtggggccctggagaccccatgactgtccccactgacctagaccctgcattctcagcacacatcactgacagatcctgccaccctcccccaggtcaccctagtgtggacagtgaggtccacaccctctagcctggcacccaatctggcaccagcagtacagaattcatcacagggccaggcctccatgcctctccccatgctgctccctgacttgtaccccagcaccctggacagggcctaggataggaaggggagcagaggagggaaagtggggagggttcctgccaggccctgtgctaggagctggccctgccctgagaaggttcccttctggcaggaagaaagaccttaaagagctaaytccaggggcctaggcagtgtggcagagacaggctgagcattcaagcacactcactcaccagggggatgtcacagagaaggtcaagctgccggaagccttccccacactgccaaagccgcacacaggagctgtgggagcctggggagactggaacagtgagcaacccctgcaccggcccacccggcgacccctcctccctgcctctcagggcacccacctgtggccacaaggtctgtgttgaggagggctgccaccgacgatatccagaagggctgctccaggcctggctctccccgcagcccgtgagcttcacgctgcagggcaagtggtcgcttcttggagagaccccacaaggccacagagctataaacagggagggaatacagcastgagggggccagaggcagaaaaggccccctgtgtaacacaaaggattaatgcttgaggggatggataccccatttcccatgatgtgattattacatattgcatgcctgtatcaaaacatctcaagtaccccacaaatacgtacacctactaagcacccacaacaaattttttttaattctaaaaaaaaagaaaaaaggccacatgacaggaagggatcaagggcacacagcccggacaaggccatctgagctctctgcctcatcatcctcatccatgaaaagaggttacaacagctcccccactgggggtgccctgaggcaagctcagggccccgtggacagccagcactcaggagcagaagccgtggccagagacatccaaaggacctcttacccatcgtccgcgccggacaccatgtgctcctcattgattaggtggatgcagtcgatggagcccctggagaaaggggctgtgaggagcgtggcccaagcccacccccagcccatgtagcccccactggcatggcaggccaccttactggtggccatagaagacaagctgggactcctcggggatcttccacacacgtacagtcccatcccggcccccagccgtcacacagcactcccggctcaaggcatccagtgcagccacagcgtcctggtgtccgaagctagagggccgggcagagcaggatagtggggayaggggtactgcatgaaytcacgggcacacactcccacaccctctctcacaccatccacacaccctctcccatccacactcacagcgtctccacrtaggagttctctgccacattccacaccttcacggagcgatcgtgggatgtgctgtagagctggtgggtgcctctgcggaatgccagaccctaagggtgcatggggagagggcaaaggggacctggactacagcaggcgagagacaggtcaggcccagggaggacttcccaaaaagcaagccatgtggcacgtgctgtgaggcaattttgtactgcccacatgcccatctgcccctgagcagatgcagacgtcttttttatttatttattttttttagcgacagggtctcattctgttgctcaggctggagtgcagtggtgcgatcatagctcactgcagcctccatctcctgggctcagatgatcctccatctcggcctcccaaagtgctaggattataggcaagagccgctacatcccgcccagaggcggcttctcaaggccctcgttgattcctgagcaagctcggcccggtctcccccagctcctccccatccctttagcccatttatgtattttacagcaccactcgctacccactcgctacyccaggatgcaggttccctgaggacagagactccagaggccagcactgagcctagaacactagcatgtgcccactaaagatccactgacatagacccagctcctcaccgacactgcatcccggtgtcctgtgaaggtgtacaagtgctggcagctctgggcctcccaaatgagaatgagcttgctgcggtcaccagaggcctgcagggatgaagacaatgatcacaggcacccmccatgcaccagacctcccgcctgcccccagggccaacctggccttacaaggtacttgccgtcggaggagatggccatgcagaggacgtggctgctgtggccagggggctttccctcggcacccttcttggctcgaggaatcacatgcagcttccgtccactctccacgctccctgcagttgggggtgggggagaagctactgggatggggggatagggctggctggcaacccccctcaaggggcagcatggaaaaaagagccatggcaaatgtcccggactcggccagaagacctggctcagccaccgtgagcctccggacaagctgcctcagtttcctcatctatgaagagggacattagtgccaaacagcagccacaaagcccaaaaaagagaagggatgtaaaagggctttgggattgatggtgtgagttcttctgttactacagcgggtgtagaaggaaccgctggtcagccagcaacggatgggaacccaggaggaccgggcactcaatcccaggactgcacagcctcaaatgtcttctagtccaaccacctacctgcagcattaattcccattaaatcatcatcctgactttgcccaaaggtctctagggacagggagctcataagccccactgccgggcagcagctttcactgtcacccagagagcactcctagggcagcaaacctgcctccagagacttccccacttcagggctcagcctgccatgaccactcccactcccctgaccagccctcccggatccgccatgggggctccagccccacccaggcactcactcacacttaatgatgctgcagtctttggcagcagagaagatggctgagtcatcgggggtgacgaccaaacatgtgatagagagctggtgcccccgtaaaacgcgaatgtcagctgaggctggggcctggatctgggcagacaggggccaggtcactgtggctagtggcataaaggcacyaccttcaccaaccccactgcgtagtgttggcctttcccacccaggccagaaggaaaacaagacccaaggctacaacaaccagatccttacctgaccagataggcccaagtgtccaccatgttccaagtggggcccccaattccctccaaccttataccaaaataccatgcccactcacctcttttgccaccaacttctgcagcctgcccctctgctcaagctgcatggagaagagatggatgagaccctgggagcagatcagctccacccccgtcctcccccaactctccctccacacttaccacatcctccttcaggcgccccgccacctggtcctcctcaaatgcacgggcctcagccttctcctcctctgtgcaggacagaccagaycaagtaaactgaggctgagacccctctttcccttccatcctgtccccatcccactgccccagggctggataatgcaggaagctccagctgcctcagcagaggggagggcaagctggagggtttcctcctgcctttacttatcagatcagccccctgcgggctccccaggaggcccatgagagcttctggccacccccacagggcagccagcactgacagcctgggcacccactgggaatccatgtcagtcacccatcaagtggctggggctgcagcggcgggcagcagaccagcacaggcagaagccctgcccatggctggcctgcccactggctcaccttgctgacggagctgctctaggtagagcttggccaagcgcagcttcttttcctgtgcagtttcctccagctcctcctcctcctcctcctcaggcttccttggagctaggctgtgggcaggaaggggctgggtctgaggggctcmccttgttcctctgaccgctaggatcgtgccttctggatgctcaccttgccatccaacctcccctattccctgctagcccacatggtcggtgactacactgcagaaaactgaaggatgtgactccccaaactaaaaggccccactcagtgccccacgtaggggtggaaacagacccaaatcccaaagagatcactaaagcctctcaactctgggggaaagaggaggcttccaagagaaaccaggcttccaaaagaaatcaggtcacatacaaagagtcaggaatcaaaatgtgcaggcatctcaacagcaatactgagaacaagaagacaaagaagcctcacacacaaagctctggaggaatacactgacccctaaaatgccatgcccagtcaaacaatcaacgacgacactgccaggtgtgcaaggtgccatggaattttctccctctttttctttaggaaggatagaagctgtgctcccaaacaagagggtaaactgggaaagagaaaggcaagggataccggaaaccagagatgcgacacaagagagcagaaagggtgacactatccccagacatgacgggggcagtctggatcagatccaaggacccaccaggcagacacaccaggactgtcatcaccacagcaccatcctttaccctgggaacaaggttccaagcgaaccttcactgtttggggattggcctttactggtgaagttacggctttcccctccatgccccagcccccggaccagctgagagtactcacttcacccaaagacaggtgctgctttgacctgctcctgggagctgggggtaggtcatgggcactcagacacagagaatccaaggcagcccactccctctgatcatgtgcctgaagacatctagtctctgtccactcccctaaccrtgtttcccaagactcactcgtaaacctgcccctgacttccccagaagggaccttgaaaactctcaggaaagccaaagctggaccatgccccagaaataatttagtgccctgtgcctggcaagccttcagccaacagggctagtgctgcccttcccttacacagccaagggacctgtgttaacttcggacttctactcaatttagccaaactaattaatctattgttgaaggattcatacgcatgagacagaacgctaaagaaatgcaagggaagtacacactatgattccatttacagggcatgctagaaaatgcacaactctaggggcagtggttagcagagacttggggggaaggagaggggctgactacgaaggagcaggaggagttctggagggtgatgaaactctttaccttcagggtagaggtggtcacacaactgtgtgtgtttgtcaaaactcactgaactataactttaaaaagggcatgttactatatgtaaattatacctaaatggaaaatgttaattttttaaaagaagaacaaagaaaccaaagaaatgattaactcaagttaggaatgacagttgcggcttctaagtttctgcaaatgttctagttcttaacctaagtggtaagtaagtgtacagaggtttaccattttaccattactctctgtagtgcaaatatatctcattcacttttctgtatctaacacacttcacaacacaacattctaaaaatatttaaaagcacttagcccacactagcctggcacacactcacccacaataaccttcggattaagaaaagtacattaatggctgggtgtggtggctcacgcctataatcccagcactctgggaggctaagatgggcggatcacttgaggtcaggagttcgagaccagcctggccaacatggtgaaactccatctctactaaacatacataattagccaggcatggtggtgcaggcctataatcccagctactcaggtggctgaggcaggagaatcacttgaacctgggaagcagaggttgcagtgagccgagatcgcaccactgcactccagcctgggcaacagagtgagactctgtctcaaaaacaaaaaaaaaaagtacattctttccatgagcaaattaaggcaacacatactcaattttagaagcgagttctaaagtcaactcatagggaaggcactaggattctctggtccaagagcctccaacccacagggtcaggcctgacaccatgcctgaccctttgaaaacctgcaagcaaccacacccatcacctgcagaaatgagggaggcatccaaagccctctacaatctacatgcacttatgaccagtcctcctgtttttgtgtgtggtttttttttagagacaggatcttgctgtcacccagactggagagcagtgcatgatcatagttcactgcagcttcaactccctgggaagggatccccaaaccttagcctcctgagtagttggractacaggtgcacaccaccatacccagctaactttttttttttgtacagacaagatctcgctatgttgcccaggctggtctcaaactcctgacatcaagcaatcctcccgccttggcctcccaaagtgctgggattagaggcatgagttaccaggcccagccccctttcatcttttctactgcccattctggcacacttacacctcagactttcctctgatcactgaatgccttccctacctctccgtgagagactcctcttcatctctcaagaccctatttaaatgtccctcctctgttcccagaacacacaactataaaatacacacctcactacaacacactctcttcacccgcctgcctatctctgcacttccaacagcaaaggcagtgcctggcatgttaagagacggggagcccagtaattgtgaaattgcaggaaaactggcaagggaagaaggatgcaagaaatacttgacagctttgttctgttttcctgcaatttctcaatcagtccagtccctgccaaaacctaaggaggtctcaatggcctcggattggggcccagggtccttcccacccagagacctcgcagaaacaagactttgcaggaccagaaactaaaggaaacagccacgatctcagagccaagggmcagagtcttggattctaggctcagttctgttcggactcactcagtcttccgtgcaccatgggactcagttttccctcccactatgtggaaaagaatagctcacctctcgctctcagagtcgctggagatctcctcattcatcttgccgccacccttggatttgcccctgtcccccgcagagtcggcctgggaattatacggtcttttctttggtcaggggtccagaccaccctggcattgaccaagggcccccccycctcggttccctcagaaccccaggaatggggaaggcggtggttcccgggttaagcgaacggctttctaggatttggcccgcggagagagggacgaagctgactccagcaggggtccagggcgaagggctggggaagggccsggacccaggtcccctggatgggatgacggttgtcccagtagcagggctgaccgcggccctcagaagcgccatgctcacctttcgccgccgcttgccggcccccgcgccagccccggccccagaggccrgctttccccgcttacgagcagccgctgttgccgacatgctgcccaccaggcgtgtagcagcggccgcagaactcacgtggcagctgaaccctcccagctccccagccgcctggcaagaccccgcgtattgataggcttccaccgcccgccgggccccgcctcctactgctccattgggtccttctgcaggctctgccacgcccccaggcacccataggatgcacgcttgtagccccgcctcctgaagttcctaggctcccgcaccaggctcgagtaggaagcccgcatctccacggcgcttccggcctgatgctgtggcgcttgcgctctgctgctggcccacttcgaagtcggagcaagagccttctctgtgtttgcgccccttggccgctggggggcgccagagacgcggcgccctttcgcgttctggaacgtgactcctcccctccatgggcagcccggcgctagacccaacggggatccaagcagccccggggagagggaggctgcgtctgtatccgggcccaaggtcaccgcgcgaccggcagatgcgtgctgcaggccccggccacatgagcagcgctacggacgcgactgccccggccttggatatgccagatcgagtgtccacccgtccgtgggactggtcgcctgactcggcctgccccagcctctgcttcaccccactggtggccaaatagccgatgtctaatcccccacacaagctcatccccggcctctggcgattgttgggaattctctccctaattcacgcctgaggctcatggagagttgctagacctgggactgccctgggaggcgcacacaaccaggccgggtggcagccaggacctctcccatgtccctgcttttcttgggtgagtgtcctatggtcctgcccacggcagggcagggcaaggcctggtgggactggcctttgccctctatcagttcaaggccactgatccggagttctggctcctcagaactcttgagtccattgggaagggcttctacagctctgggttctaagctccgggaggataatctggccccaagaatcctgcccccaggatcctctgcccaccctcccccatagctcggtgactcggcccggcaaccatgccagggctgaactagctgacacagggggaggagccccgaagtggaagagagagagcctcctttcactttccctacccctcaggacacacaggtgagctgcagagggtagggagccaggcagaccctgttgaccagagtgggcagactggacagagtcctaaccttgcacttgggactggggaaaggggtgtttctgagtgacaaagagctgggtgtggtctggggctgggaatgccgtcagagtggacacaggatgcagtgggaggccaccgaagggccaacccggggtggggcaagttggtgctgtgctggcccagggcaggggtggggactgagagtgggtcgttggggatgaggagaccatggaggcctaagggcctctctgtgccccaggacagccatggctccaaagccgaagccctgggtacagactgagggccctgagaagaagaagggccggcaggcaggaagggaggaggaccccttccgctccaccgctgaggccctcaaggccatacccgcagagaagcgcataatccgcgtggatccaacatgtccactcagcagcaaccccgggacccaggtgagctgcagtccccagtcaggcccagagcctgcccactgataagcacaaacacacccaggccacccccttaggactctgttctggttttggagcccaaggcccccaggtaagcgccagagcaaggccatgttctcctgaccccagacatcagggctgtgtcccgtcaggtccaggcgggtcacatctgcccttcagaccccatgcaggcctcctcccaccgcacttagggaaaggctgtgactacatcagtctcctgggcgcttgcccatgtcccctcagggcagagccatgtccctctcagattcccccatccagggcccagctgtgtcccccccagcaccccccatacctccatgtcagggtttagccatgtcctctcacaccgcatcccctagggaagagcagtgacccccccaagcttccaagacagggtccctctgactcccactgccgtcagactcctgtccccatcagagccctctcggtgtacggccaggcaccccatctgaccccagccagcctgccccccacctcccctctggcccaggtgtatgaggactacaactgcaccctgaaccagaccaacatcgagaacaacaacaacaagttctacatcatccagctgctccaagacagcaaccgcttcttcacctgctggaaccgctggggccgtgtggtgagtgccctgcctgctctgcacatactccccagggtcctcaaaaggccacagctactgacttgggggggcacctcccaactgtcccagggcactcagcacagggcctggcccgacacacaggccagcaaatgctgatggtgggcatacccctgaaggctgtcggttgcagggagaggtcggccagtcaaagatcaaccacttcacaaggctagaagatgcaaagaaggactttgagaagaaatttcgggaaaagaccaagaacaactgggcagagcgggaccactttgtgtctcacccgggcaagtacacacttatcgaagtacaggcagaggatgaggcccaggaagctgtggtgaaggtgagatggccaaggaaggtgggcaggccctggactgagggaggggactcgttggagagttcccgctggttgggctctgccactgcccagctgcgcagcctcagccacagaactcccctctggcctcaggctggctggtctctgtctggtgtcacgccctgccccgctgctcctgcccacatgtgccctctatcttcaggtggacagaggcccagtgaggactgtgactaagcgggtgcagccctgctccctggacccagccacgcagaagctcatcactaacatcttcagcaaggagatgttcaagaacaccatggccctcatggacctgggtgaggggtgagaggcaggcagggtggcaggggcctcagggtggcagggctgtggggctgagtctccccactcccctgtccccctagatgtgaagaagatgcccctgggaaagctgagcaagcaacagattgcacggggtttcgaggccttggaggcgctggaggaggccctgaaaggccccacggatggtggccaaagcctggaggagctgtcctcacacttttacaccgtcatcccgcacaacttcggccacagccagcccccgcccatcaattcccctgagcttctgcaggccaagaaggacatgctgctggtgagggctggcaggggtgcgggcaggcagtggggcactgaacagacagcctaggcgagcgagatgaagggcaggtggccaagaaggcccagaaggatggactgcctgggcaggctgacagacgggtggggaaggctgggcagacagatagggtggggagggacaggtgggacacacaggtggggtggctacaataccagtcatgtgagagaggagaggggaggccagaggtcaagtgggaagacaaactgccagggcccatcatcctaggtgctggcggacatcgagctggcccaggccctgcaggcagtctctgagcaggagaagacggtggaggaggtgccacaccccctggaccgagactaccagcttctcaagtgccagctgcagctgctagactctggagcacctgagtacaaggtgagttgggccccacagaggggccaggctatcagtgggcactgtccctctgcccacctgccctcgaggtgcccagaggaatactcgccctcagccttctcttcctgtgtctccagggcctgaggagggcttgggactgggggaagaaaaatgggggattagctcctgagcctcccaccctggcaaccagcttctgctctccccacaggtgatacagacctacttagaacagactggcagcaaccacaggtgccctacacttcaacacatctggaaagtaaaccaagaaggggaggtgagggaggttcccccacctctcccccatcaccactgtgccttaggaagatgtccttggctaatcggtcccttagcaaatcgtttagcagctctggtcagtttctgccggccatgagtgcgcgtgagtaagcagagggacactaggccttggtcacaagcagcagggcaaggcgactgagtgctcgggtggcatcactcccatttctcacttcctctccactcaggaagacagattccaggcccactccaaactgggtaatcggaagctgctgtggcatggcaccaacatggccgtggtggccgccatcctcactagtgggctccgcatcatgccacattctggtgggcgtgttggcaagggcatctactttgcctcagagaacagcaagtcagctggatatggtgaggtgcccctctgggccaagccctgggagggttggcactaagatggattgggcccagtccttggccactggaaattcatggtgaatccaagagaggaatcctttaatggttaatgactacagtgctcagtgggctgtcctgggctttggtggcggggggtcttagagaaagtgtctgatggtcagggatggcttcctgggggaggcaatacagataggatgggtgcaccaaccagacctgggagggggtaaaaggggagcctttgagccaggtgtggtggcatacacctgtagttccatctactctggaggctgaggcaggaggaacgcttgagcccacaagtttaaggctgccatgagctatgatcacactccagcctgtgtgacagagccagactccatctgaaaaaataaaaataaaaaagaggagacgtcaaggcaaggggataggcagagaggctgggaggatgtgaggatgtggcaggtcagggcttccaaacacttcctgatactggagctcagagcaatgcctagccgggggcagggtgggctaggggcccagaacgatcgaggaggctttatccagagagtgatggttagcccagctggacttgtctgtagcaggatcccagtggctacagctgtggagaggggggcagcagccagaggctgcagagaggccatcctcttatccaggctggatgtgatgggtgcctggcccaagggctgggaagtgcaggggagggagcccatgagaggggcatgtaggagatgggatggggagcgtgtgggaaagggtcaaggctgtctccagtgacttctgagtttctggccaggagtgtcctcaccaaaatgacccccccagaccagctcctccacccaggctgtccccatcattggaggccaccacccagctggccaagagagcaaggaccaaggattcatcccagaacagatggggctgaagttctaggatgcctgaggtcaccaagagcaaggggtccaccaggagggcagaggggcttaggaaagagtggcggggtggagggcttaggagagccagcgcgaggaagtcccaggtaggggctgatgatgtcaggagcaaagtcagcagagcaggccagggagaaaagcccctgccacgggtttggtcactgggaggccattgctgaccttggtgaggacagcagagggtacagatgcctggccatagggagcacagtgaggtgggagggagcaggccgggacaaggagggagtgacggttgggggagagtgagccttttcttgctggagcagcaaagccagaaggaataacatcgcagcagagaggggccccacaggtcagcaggaggcaggctgagctgcccaccggtgcctccctgtgtcttgcagttattggcatgaagtgtggggcccaccatgtcggctacatgttcctgggtgaggtggccctgggcagagagcaccatatcaacacggacaaccccagcttgaagagcccacctcctggcttcgacagtgtcattgcccgaggccacaccgagcctggtgagtcctcagaagctgtacagcccaaggagagaggtggggccgag

SEQ ID NO: 98255 - DNA, 23398 bp, Homo sapiens
  misc_feature (1)...(23398): n = A,T,C or G
gcggagcctcgcactcaaacctgtcgggcctcaactccgtgccaggccaacaagttgccctgggcagttcaagctggggataagggggatggggagcaggaagacagcagcaaggatgcgatcccgaaggaactttcctcctcagactgctccatgtccatgtggggcaggtcgctgaagagttcgaaaccgtgctcagcaccgcgtttggggcatgtgagaccgagaggctttgggaaactgacgccgctgtgagaacgagtttagcggagtctatggacgctgcgagcttgtggccacaagagggcgccccggagcacggcccagtccccgcccccgctggatggggcccggcctcttcccagcgttcctcctccggccccaggtcaccgccagcacgcgcctgcttcccgtctgcgcgagtccacgcagctccccaggtacccgccctgcactcctgaccctttcttctctccagtcaaaatccaaccccacctaccccaagtcttcctttctcggatccctgggtcccctccttgggagttgccaccattccctcccggtgctcccttccagagctagcgagccagaaccgtagtccgcggaagcaacctgaccgcgaggtcaacgcgttgggccccaggtggcagcgcgttgagcaccccgcatccccggcgggtcgcctttcccactgggcgcttcggtttccgcctctagaaaatgggctttccggtgtggaagcgcgcctgtggttccagctactgggggtgagccgggaggatcacttgagcccaggaaggtcaaggctgcagtgatccatgattgcgccactgcactccagcctggacgacagagcgagacatcttctcttaaaaaaaaaaaaaagaaaaaaaaaaaaaccgaagaaaatgggcttttagttccggcgcggtggctcacgcctgtaatcccagcactttgggaggccaaggtgggtggatcacttgaggtcaggagttccggaccagctcggccaacatgatgaaaccccgtttctactaaaaatataaaaattaggccgtgcacggtggctcacgcctgtaatcccagcactttgggaggctgaggcgggcggatcacgaggtcaggagatcgagaccaccctggctaacacggcgaaaccccgtctgtactaaaaaaaaaaaaacaaaaaattagccgggcgtggtggcgcgtgcctgtagtcccagctacccgggaggctgaggcaggagaatggcgtgaacccgggaggcggagcttgcagtgagcggagatgtgccattgcactccagcctgggcgacagagcgagactccgtctcaaaaaaaaaaaaaaaaaaattagccaggcatggtgacgcacgcctgtaaacccagctactcgggaggctgaggcaggagaatcgcttgaacccaggaggtggaggttgcagtgagccgagatcatgccactgcactccattctgggcaacaagagtgaaactctgtcccaaaataaataaatagaataaaataaaataaaatgggctttttaccccaatttgggctccctctggcctgcattgacaactcatgacctgtaacttaccgttgattgagcactgagcccttactacgtgctaggcatggtacatgcatggccttatttaatcctatcaaccacctatgagctagtactattgaattatccccatttatagaaaaggataataacgatgagaataagaacagtaattgtaatggagccccaccacatattgaggttttacagcaggcacccccactgataatttttctgttttttgtttttttgagatggagtttttctcttgttgcccagtctggagtgcaatggcgcgttctcggctcactgcaacctctgcctcctgggtgcaagcaattctactgccttagcttcccaagtagttgggattacaggcgtgtgccaccacagctggctaattttgtattttgagtagagatggggtttctttctgcatgttcatcagggagatctcgaactcctgacctcaggtgatccgcccgcctcggcctcccaaaatgctgggattacaggcgtgtgccaccgcgcctggcctaatgagagttacatgtgaccatcagctggctcttttttttttttttttttgtgaccgagtctcactctgtcacccaggctggagcacagtggcacgatctcggctcactgcaacctctgcctcccgggttcaagcgattctcctgctgagtagctgggactacaggcacgtgccaccacacctggctaatttttttttctttttagtagagacggggttccaccatgttggccagggtggtcttgaactcctgacctcaggtgatccacccgcctcggcctcccaaagtgctgggattacaggcgtgagccaccatgcctggccgataatttttcttaaacttttaattaaattgctaattcttgaagttggctttattgttcccatatttcagatcaagaagctgaggccccaggttacacactaaagtaaatggcagaggcagaaataacacctatgtcctcctgaccccaaggcatgttcttaaagttctggaaacctcctggaggcttccttgctgctcctctgggactgccaccctgggcagggtgttctgtggcccctcatcatcgtggttttgaaccacaggcccttcaccagcacagcagcagcaggcatggcagcaagcgtggagcagcgcgagggcaccatccaggtgcagggccaggccctcttcttccgagaggccctgcccggcagtgggcaggctcgcttctctgtactgctgctgcatggtattcgcttctcctccgagacctggcagaacctgggtacactgcacaggctggcccaggctggctaccgggctgtggccattgacctgccaggtacttaaggggcaggcttctgggcagggtttggggaggtctcattagggacagggccaggttcctataacatgtagcccctccccactccaggggtgggggcggtgggatctggaggacccagccaggctgggccctgaacttgacagcgtttggtcaagcacactgcaagggcctctgagcagtcttgatccagatgtggtcctcaccgcccagctgctcctcactgttacctgggcattgtctcagtgtctctgagcctctgtttcctcatctgcaatgggagataaccacactcatgttttgggctcgctctaatgagaatggaatgagataatccatgtgagtatgtggctagtacctgacacagagtaatcggtgctcagccaattggaagtaaagtattttgactgaataataaccataggcttttggaagccctaaggagtgagacctgagtcttctgggggacaaggcagggcctggtgggtggccaggcccccacttgtgatcccacatgcaaagccctgagctgggttctagggtagatgggatcagtgcccagactgcctgtcataacccagatggctgggtcccaaccctcggtgccaggtgtgaaaggagcagcatggctggccccaccccctcaggccagggatggtatggtttcagggctcaagggcgagcctcctgcccaggcaggattgattccaatggtgggttggcttgagcttcagggtgaaggtctggagctaatcttgttggtgaagcctgaatgactggaggaggagctgcagaaccgacccctcagctgctgtccttcaggagcctctcttgtcccaatccagggccaggtgcctttcacacagttaattttcacaacaatcttaaatggcagatacttttgttatccccctttaacagatggggaaactgagcagctgagagaggactgagggggacctacccaaggtcacatagacaataaatgcagaattgggttctggacccagacttcttgggcttcagagcctgattctctccaggacacttactgctggggagacaggcacagacgtggagagaagtgcctcatgcttggcacgataagatagaatgaggctactgtaggaataaacgtgggcacactgggtgttacaggaacctggccacagagaaactgacctaggagggcttcctggagagagcaaccatctcccttgttttgccattcactgcccttgtcttgtctctttcacacctgaatccctgcaggtctggggcactccaaggaagcagcagcccctgcccctattggggagctggcccctggcagcttcctggcggctgtggtggatgccttggagctgggccccccggttgtgatcagtccatcactgagtggcatgtactccctgcccttcctcacggcccctggctcccagctcccgggctttgtgccagtggcccccatctgcactgacaaaatcaatgctgccaactatgccagtgtgaaggtacccttgtgtgggaagctgaggtgcccctgccaggagcaaggaagggtgcatccctgggctttcctcatctgggggctggataatcaaggggtgtcttctgggaggagctgaccacccaactccacccttttggtttactcagcagactactgtgccaagccctgtgctaaactgtgttctggggcagacaccaatctgtgcccccacccactgggccagcttgtctctctccctcatatggggtggtcccaggaagagactgaagtggggagggctggggatgctatggcaggtccctgttgactctgccccacccccctatccttcctctcagactccagctctgattgtatatggagaccaggaccccatgggtcagaccagctttgagcacctgaagcagctgcccaaccaccgggtgctgatcatgaagggggcggggcacccctgttacctggacaaaccagaggagtggcatacagggctgctggacttcctgcaggggctccagtgaagcccagcactgctgcagggggtgggctgcctgcctgctctgagctctctcttgcacgctctctcttctctcccaggctctggctcatgcacatgcaacaggtgcgtctgtctatatgtctgggttcttgtcttttgtggtctgtttgtcttttctacctctttctcttgcagtgatagactgagggggtaaaatcaagagaaaaaactctcaggaatcaaggaacataatcctgtggagggtaatccattacatgagcttctcctgttcttccactttcctgcctggctttcactccttcccctgctctgcccagcctttccctcccacccactcctccttctgcaaatgccctgaaggccagcccttaccccaacacccacttccccacctccttaggccccagatacatacatgcccacatgcacgcttacatgtttagagccatccttgtttccaaatatgacccttcgcttgagggcaactgcataggtacatctaactctggactggcatgcacattgtcatgtgcagctttgcatatacacacatgcatacatgagcctccacacaagcacttgcacacatgtggactcctaaccatgctaacctcactggctgggaaggtggggaccccatgggccagcccttgcaggaggcccttttgcaaggcttagggtgtggccagccctgaaagctacttggacacaggtttcagctggccccagcccagaagtgacccccagaaagggagggccaccgctttgccccctgcttttacccttccttctgggtgctctacacctcaggttaccaggcctgaggcatctcagccaagcttgtttcctgctctgaggcttgtggggtgggagccagagtggaggtcggtgaaataaagtgatgcaattagaccccaccggctcctgcttctaaagagcgccgcccctcccccacccctgggaccaacactgtgggcccctcccccaccccggcgggaccagatggtccccctgccctttgtccaccaggccagatggagaggaagggagattggattcccctccccacccacacatacccaggtgccaagagactcagctgtggggggaggtggaggtcagtgggaccaggctgagccgattatggaggagtgggggggaaggaatagttgcttccccgagggcggggggtgcccagcggacttgagaacagttcatcacccccactagtatcccttccccagtaaaagactcaacggagcccgttccttgcgaccctatccccaaaaggaattccgggggtagatttggggttatcacaggatcgggtgcacagggccacacggctctcaggcccctcctccagcctgtcctgcgcggacgagggccgggccatgcagctgtgggtggccgaggagagcgggtcttggtgggcgcaagcccgagcggaggatggcgcgcagcgagcagagccgggagctaggcggggcgcagggtcccagccggagctcggagggacgcgggccgggagcgaggcggagccggggctggcggggccaaggcggggatgggggtgcagggggctcggcagaggcgccgggcgggcggcccgggccggaaggactggcctggcgggagcggaggggcttggagccgggcgcagcgcgggcggtgcggggaaggccgtggctggggaccgggcttcaggccggacgcccctacccccaacccgtggggctctgggagtggcaggggaagggtcgcccgagccctccaggaagcggccgccgctcggggcgcaccgcggcgcgcggggcggggcgggcggctgcggcactggggcggctggggcgggcccgccgctctgtaatcggatccggggagggggcggggaggggccgggccgggcgggccggggggtggggggggccannnnnnnnnnnnnnnnnnnngcacagagcagtgtggggtagtgggcaagtgctaacagccaggctcagtttcctcatctgtgaaatggagatggtaacatgtccccaggaaaaggaaaattcttgctccacgagtgtccttgtgttagtacttcagagacagccctgtccatagactttattatttggaagggggaagaggaggtccttggcactggttgggatggaagccccaggggcaaaggtttaggagttccaggggtcagctgtccctgggcagggcaggcacactggcaagggcaggcagcaggcatgtacacatgtccaccccacggaggttcacagcctcaggcagccgttcatcgtggtccgtccagcagcacaggtgtgcggttccatgggtcagcagcctacatcatgcgaccccccatcatgcagtgtacgggcgcgggagccgggctccgggccggccgggctccgcgcctgtcaaacccctcattgttcgcagctgatgtcactcgcagttgtgagcggccgcctctcccggggacaatgtgggactgagcggcccagccgccgtgccgccgccgccgccgccgcaggacagccccagcgaggtagggcgcgggccgggcggggcacggcgggccgcgaagtttgggggttcgcccgggggcagggagcccgcgcccagatccctcggttggggtcgcaggtttgtgagactgcgaggaacacgttctctgtcccacaccgctgaggcctgcacaggtgggaggcgctggtctgccagaggcgcccttggcaccagggaggggcttcctggaccttagatcccagatttgaggcccccatcccactcgctgtttctgtcctttgcgcctgctcctctctctgactcctgccctgggttctggttctgctccatctctgccctcacttgccactcccctgtagctcctggctgggcacacactccttcccatcctccgcagtcgttgggggagccagatacagacctccaggccaggggtgtatggagatgacagctgggggctcagagtggtccctcttgccccatagctcttcagcccttcagctctgacctagcttcttggctggggtcctggggggtgggggtgggaggctctgctactcacttcagcctggccctcatgcctgcctggccaggagagggaggtgcccgcctcctctctcccctatccctggcccgccatcttgagacctgtggcacccagtgccccacccggccccagcacccaggggagtggtctccaaggtgatgatgcacccagggccagttgcattcctttctccccaccaagcccaggatgctcatgttcgtgctgaaccagcaggacatgtgtccccaggggcttgccttccgccacaaaggctcttacaatccatgaactccctaggagmtgagctcctgccctccctgttccctgggtcaccctcattgcctcaggaccagtacctgggaccctattctttccccatctgaaaaaatcccctggtcttcccaggtcctggagccccctcaacctccagggcacccccatcccagcccccaccccctagccttcatcagcatgcaggctcaggctgcccaaacacaaggggattgttcttcttgcatgctcagggtggggggctgggagcaggcagcccacacaccctggcaggcccaggccacgaggaggctggcttgccccaccctgtgtccccagacaggctgtccaccctccctactcccatcactgctgcccctccagcctccatcaccattgcccagtggcgctgacatcttgaggaaagagctctgagctgcacaggtagacccctgggttctccagctctgccagttgtctcccatgtagccttacaaacatttcccttcctctctgggccgcgagcccctcttgtgattggtaagacctttccagctgtgacaggctgagcccaactcgactctgtgaaacgtaccccaccccccagcccttcttccagtccccctcttccatgaggagacccactctgctcccaccctctgaaaacctaaagcacagcccaaatcccccaccccascagcatacctagggagctcctagtcctggtaaaacggcaggagtagggctggggatgctgagaaaggaaccaggaatcctgtccaggcaggtcctacctctgcccatgtggctggccctcatgtctgggtcttctcactctactctcattactcctccgggaccctcagccccatctttggttccaaatgtccccaggccccatgaaccttaactcttctccctgcacactgaccctggtcttgtctcaaatttcctctttctggagctctgtgtatagtggaaagacaggctcagaaatgcccagcggggacttctttgagttgcagcaacatctttgaggggcacagaggcctgagtgatcacatctgacttggaagcctgsggagggcttcacagaggaggtggcrtttgagaaggattttgacagagagtggggaggatgggcgttttgagctgaggtaagcctggagaaaggcccgaagggctggaggtgctaagtgtgttctgcagcctggcatgtgtgaaggatggggtggagatgagacaagagagacaggggctggatcatgaaggtccttgatggcctgtctgtggagttcaggctttattctttggggactgggcagccatgggtggctgttgagcagcagagtaagcatacagttttcagcatggagattggaagctagaggcctttctcaatgtagatgagagagtgaggggatgggtaccatgaggctgtggcctttctcctggagcccagcctgggcccgggcttgacttggtttcccttggttccgaagactcctgggggctgcctaatgatggtgtatggaagctgtagcatttctggcacctgccaacttgtcagagctgcctttcccttcctggcactttgtctatgtggcagatctgaatcaagaagccagaggctggaacttgtggaccccaggatgctcacctgaggcttcccactcccctcctcctctcccaactgtagatgattggctatcccgggaggctgggaggccaagaggctgggcacatgtgtccaagatgctggggcagttcttatgaaggcctggctagttaggagagtsagcatctccagagaagggattgggcaggagagttaggagccctcgatgcagacgtgctgtggcccagggtccacccccaccacaccctgcctccctggatgctccgagccattccccagcatcactgggtgtggctagcatggctgctttggkagtgggaataggagaagggggctgctaggtggggagctgggggtgctgagaggatgtggggggatgtgagatggagagtgaagcccaggtgggtccacaggccctagctggtccagacattctggccagcagagcggagggaatcccccaaggggcgggccagtctacttgaatcgcctggccccaggagccctcccytcccccggattgttcttgctccagaacaaaggcagggtggacacttgatccctgcatgtggggtgagctggctaagcccccagccctttgattgggcagctgtcatgggagagagacagctgggggggaggggcaggaagggggcagccaccatcgcttacacagctgtcacccccccgcctcctccagcctgagtggcagaaagccagggacaggaggagtgggcactggggctggggagggggcctgggagtcaggagggaatgcccgaggtcagaggcctggtgtgagcttggtatgccctgccagggagccctgctgaccagagggggctgggcacccgcggaggtgagctggaggtcactgtggcatgttgtgtggctgccacgtgggtggcccggcaaagacccagggcccacccggctggagcagcaaatgactccctagagccccactgagggcagggggagccagtgatgcctcatggggctgctcgttccttgggccctaggagaataatttggaagacatgggtcagaaccccttgttcttgcctaaagatgggaaagaccttgagagtctctcagaccaggaagggcgcagatagaccagcaactctctccctacccccagcccctaaacacaatacaggtgggtttaggtcaggtgaagacctggccaaagttacccactggacttggggcggtgggtctctgctggagacccaggcatcttttcatggcagaagctctagttctggccatgttccagccctcctgccccatttttcctggagccacaagaggtcatgtggagatggtttggggacaatgtcaggtctcccactggttaccatcccaagggggtccttgaaccccagaaaattttggaacttaagaccgaggctctggacaagttgtcagtcctttccaaataggatccctgtcttctagctaggcaaaggtctcagagacgactgaagcccaatccccactttcgaaggagcccgccctccaggaagaggactaacagatccagacaggagcagcctgaaaggggaggcagatggggctttggatagcctcacactagcaatgctagtcccactgtgtcccacctctctgtgaccttgggcaggttactgatcctctccaggcatcaggttctcctgtgtagtgaattcatctgctcagctaaccagtatgttagctgagttccagctgagctcagtatgttctgagcaccttctctggcctggctctgaactgagccctggggacataaggagaaggcagcagccttggctcctgctccaaggggctcctgggcttggctgtccagagaagcagaaaccaagcacgtcatcacaagtgctttgatgggggaagtgcaggcagctgggggaatgtctagcaagggcagccagcatgaggctggccaggatgctcggagagcacagtccctgcatccactgctcatctccagcctctggagtccctgtggcagaactcaaatggaaggaggagcagctgcacccaggggagcagggtgtcacctccgttggataggtgaggaaacaaagaccttatgccatacggtggcttgctgggacttctgagaaggagccaggctgggagcccctttcaccttccgtgctcaagctctgtctagcaaggggagttcagaagagggcgttggacagaactccatgccctttcctgtcatgttgggatggggcagggggctgaggaggaaggcgcccagagacttctggagtgttccaagctcagcacactcatccttcatccccacaccctcctgggcatgaggaatttgcagtgttagggcttggtcttggcccagacttagcaccagttggtcccactccctgttttccccatagggttctggtcccccagtgagctccccatcaaggctgagccttggcaggagacagacgcctaaggagagggatttccaagcaggattaaggttgaggattaagtcggggcatgaaaaagggtcgggtggggagggctggccactgagctaatcccagcagctaatctcaggctccaccttcctccatcagttaatggccttgacattcccgcagcccaccaaatccttttcttacccatcacgcagtcccagggagaggtattccctccattttataagtgaggaaattgagactcagagcccaagtgacttgtttctggtacagtagaaagtgttccaggctgggaatgtggccagcctggacacttcttacctcctgttcccaaggccatttccagcacatagaagagagattggaaaccaacgtgcagaactgccagtcccctgacacgctgtgccccacccactgcagcccagtgctgaatgaaccctgcccagaggtgtctgtagtgagcttctgccctagtgacttttggtaggtgggagtgtgcctcaattcccccctcaacccytgcctcaagcctttaccaggcagtggcaagacctgaccacacccgaggcctscctgccttcaaggcttcccatggctgctccagcttcctccccagctgctcttctgtgctccatccaccatctggctgctggacgaaagtgcctctcatatggagtaagctttcagcctgaactccaccttcagggccccatccacagaggttacctcttccaagaggtcagggaggaggctctcctcctgactcccataggcttcctagttaattatttcttttagtgtctcagggtaagggaaaggctaggtacctaccatgtatgtgcttattgttttaattctcatcactctttggagatgggaatttgtatccccttctacagatggagaagctgaggctcagagggttgaatgggctccccaggcttacacagctcgtgagacacacataagcaccctggtcagagtgatgtgtggcgctcaaggtccatgcagtctctttcctctgggagtttgactagcccagctctggggtccccatgtaagggcaggggcagggtggactgggctcctctcgaacccctctttggctgcccctgccagagccggccargttgcagcgcggacacactcgcaggtcgctgtggccccagcctcgcctgacagaatgagcggctcggacgggggactggaggaggagccagagctcarcatcaccctcacgctgcggatgctgatgcacgggaaggtgagcgggaggtggagggccaggcgaggcaaggctgggctgggctgggtttcactgggtatcccagtggggaggggctgggcctgggcactggcacccatctgacggctcttgtcttgtccgcaggaagtgggcagcatcatcgggaaggtaggtgcctagctctgctctgtacatccccctccagctgaggcttcagcccagggaaggaggctgtgacctctaagttaagagtgattatctgttttgtacctcccacagaagggcgagactgtaaagcgaatccgggagcaggtgaggatggagtttgggggaggagcccagggcacctgatgtggaggggagatccctgccccactttctctctgaaccactccttctgggctgaccagtgagtcccccagagggtggcagttttgagccttgcctcaggcctggtgagtggggcaggcagacaagttccggcaagggagcagggaagatgccccgctgcccggcgctcattctatatctgcagagcagtgcccggatcaccatctccgagggctcctgccctgaacgcatcaccaccatcaccgggtctacagcrgctgtcttccatgcagtctccatgattgctttcaaactggatgaggtccgtggctggccagggcaggacgccaagagtggttccccaggaggaacccaactctgactccagatagtggctatgggtgggaggggaggtcaagcccagggcagtgttcccttgaagtgggactggggaaagggtaccctcctgacccctgggcagatatagcagggacgagcatggccaacccaccgtctccctgtcccaggacctttgtgctgctcctgcaaatggtggaaatgtctccaggcctccagtgaccctgcgccttgtcatccctgccagtcagtgtggctcactgattgggaaggctggcaccaagatcaaggagatccgagaggtgaggggcgagatataccacccacagggaatccggggcaagggagcagttgtaagaggggtgttgggcttatggcgtcctccccacctagagagctctgagcctgggcagcccttttctgggttatgggagcagccagaagtggcccctgttctctgtttgcagactacgggtgcccaggtacaggtggcaggggacctgctccccaactccacagagcgagctgttacggtatctggggtgcctgatgccatcatcctgtgtgtgcgccagatctgcgctgttatcctggaggtgctgccctggggcarggagagarggggcargagatgggccctgggtctgccttgtcggggaccccaaacsctatgcctgtgctgcaggtggggcarggcarggctgcagggatggatgatgagctccagggatcatgtgcatttccctgggggtcatggtgggggcctgaggccackgggcagytggggargttatcggagcctgagagggtcctgacararccctgtttatgccttccagtccccacccaaaggagccactatcccctaccatccgagcctctccctaggtactgttcttctctctgccaaccaggtgaggggaacaacaggagcagtgggacacattactggagaagggggattgagatagaggaggggatggaagaaggaattggaggtccagggacgggggaaggagtgactctggytgaactgcaatgtcacagtaacccccttttcatccactttgtccccacagrgcttctctgtccagggtcagtatggggctgtgaccccagctgaggtgagtgacccatagcccaaggcaccccttcctgaaccatgcctcctctgacctctgacccctctttggcacaggtcaccaagctccagcagctctcaagccatgcggtcccctttgccacacccagcgtggtgccaggtaagccacccctgcacaaggaggcagggggagggtcctaagagggcagccccctcccttccagggagagtggaaatggtggggcgggaaaggcccagaaccacactcagtccctcttctccccctcaggactggatcccggcacacagaccagctcacaggagttcttggttcccaacgatktgagcaggggatgggatggctggagggtgggtagggggtctgggggtctggacctcacccagggctgaattctgccttccctctagttgattggctgtgtgatcgggcgccagggcagcaagatcagcgagatccggcagatgtcaggggcacatatcaagatcgggaaccaagcagagggcgctggggagcggcatgtcaccatcactggctctccggtctccatcgccctggcccagtacctcatcactgcctggtgagcgcgggctgggcggcagtgggggagcaggtcacggttctcatgtgcccaagaaaggcaggggtggggagaggaagctggcctcctctctctgtctgggcccgacctctgcctctcctaaccctactccaattccccatggtctttgcctaattcaccctctgttgccccatctcccccctctatatccacctctcattctccattgctgtgtcttttccctgggtctctggccaccccatttctccctgcacctcgtgctatatctgcttgtcctttcttcccttcctcttccacctttcccatcttccccttattgttctctgttcactacctctctcttgcctttcatctaatctcatgcccatctctgccctcattgcccctctctcactcccactttcccctttgtctcccctctatatccctctctccagtctagagacggccaagtctacctctggggggacgcccagctcggcccccgcagacctgcctgcccccttctcgccacccctgacggccctgcccacagctccccctggcctgctgggcacaccctatgccatctccctctccaacttcatcggcctcaagcccatgcccttcttggctttaccacctgcttccccagggccgccgccgggcttggcggcmtacactgccaagatggcagcagctaatgggagcaagaaggctgagcggcagaaattctccccctactgaggccagctgaggtacaggcaggggcaggcaggaccaccagcagggggctgcctctgcaccctacccgcccaaggagactccaccctggggtcccaaacgccgctaacgcccagacgcatggatgcaccccctaccctgcctccatctatgggagttctttctctcagagtgggggcagtttctggcccaggggtctgagctgcggcagccccagggcagggggccctacctcctcagctctgtgcttggatacagggagcagccaggagactccctagtgcccccaccatggcgggtgtcactcacgcactccccatcccttagggcttcctggcctactgcatccttgtgggagtcagggaggagggcccgttgggtagctggggccaggcttctctccccaccacctgcagatttcttgctgcttccactgatacccttttgactggaatgaactggctrggcttgtcagggggcaccccaaaragggggcactgccaggtagctgggggagtggcatggggcaggggcccagttytcagcagcagacactctgtacagttttttcmatccctgtttttgaataaatattctcagcgaccaggaagttgtgaaatactggtgttgtgggcagcaaaacctccagaaaatgggtgcagctgaggtcctggaggacccccatgtgtgaatccaccaacctcaattaggcctcagccccttccacatgccagttctggggcttcaggaccctttgggggtgaagtcgtccagcctcctacttctaataccaaactggtccagttgtcttctgggcattttagaagcaggtggaggagtttcagtagctttgtccagactctccttggtgcagatgtcagggaagtccttctgagtgtctctccagtggttcttcctgctgtggctgtaacccagatactgccctgcttggcggatcactttggttgtgagcccttagggccctcttctttgtgacacctgcccatcttggcctggggaccacctgtgagtttcacaaaccacctatgctggaggggcccttagagatgctgcagggtgcagatgggaaagctgaggcctaaggaagggtcggcctatgcacagtgctatgcagtgttgggcccagaccgcaggattcctggctctcagaagtccgtgggcctcaccaggcagcagacaccctttctcctcctgttccagacccagatatccagcagggcacctgctgtgacctgtgcaggggttggatgagcccccacggaaaccaccctcctttctcctgctcaggagagagaactctcaggtggcccctggtatgcggggctccgccctcctgccaactcgggggtctgttctggagcctcagaagggcctacggcagggccctctgggggtctctggaggcattgcaagagtgcccgcgggtgccaggcttgcggagtgcaggcccgcacaggtccaggcagtgcacggcgagagaggcggcccagtgccaagcgcacggggcgctgcagcagcccgtacaggaaggggtgagccgcgaaggccgagtaggcgacccaggtgacagccgcttcggcttccgcggcccgcgctgcgggcgccaggcacgcgcagccataaggcagccagcaggctgcaaattggcccacggccagcgctggggccagggccgccttgcccccgggcaggcgaggccggagcggcggcaagatggaaaggcggctatccagagagtccgagcggagtcgggacccgcgcgccggccgtgggggcctcagggcagcgcgacgcgccaccacgaagatgccgccgtaggcgccgagcagcaggagggcgggcagcgcgaaggccagcagggcccagagcggccggaagggcccgaggcccccagccaggaccgagcagcgagcaggagcagggggcggtgcgggcggcgggccgagcagggagagcgcgcccagcagtcccgccgcggcccacacggcggtgagcacgagcacaggcggcggccgcgagcctggccgcagcgggtgcacgatgaggcggtagcgtgccaggccaagtgcggccaccccgagcgtgcaggccggcagcagagcggcggagaggaagcgagcggcgcggcatggcgcggggcccaggcgcacgcggcccagcccgggcggcggtgcggccagcaggcccagcggcatgatggaggcggccgccagcaggtccacgacgcacaggtgcgccaggtagagcgcgtcgcgcagtcccggcgtgcgcagcaccacgaccagcagcgcgccgttgcccagcagtgcccccacctccacgacagctgccaggatcaaccccaacgagcctgcgacttctgaggcgttcagccctgtggagttggccatttgggctctcaggcttcaccctgcgctgggatgtagatggcagaatggagcctaaagctgcaggatttccatcacctgtcctctgctcctcttgtcccttgctcctccggcccctcacctcattggctgcccaggaggtggctccgacgcccaggctgccatcctcttgggggcttggccaggcccatggaggggtgcaaggatgagtctgctgtctttctcccctgccccagcccagctccagcaactcagcccctgtcggagatggtactggctgtcactctgatgttgccacacacggctggcaagggaggggcagggcctggcgccagccccctgggtcctagcagctgccagctgaaggctggaggctctgctgtggaagtgcttgggggtgcctctagggtggaggggtggaggacagagcaggcacagacttggagcctagacttgagagggttagagtgtgggctttggagtcagccagagcctgctctacctttctcagtggtgagaagtgccccccccatctcctgtcctgccccatcctcatcaatgggatgagcatttagctctcatattaaagggaaactgaggtaccagtgagacaaaagctgaagcaggaggacccttaggcatgccctggccccccaagagggctagttctctcagaaagaaaggaggctggaaaagtgagagaaaagcatagaacgtggcacatagtaggtgctcagctaatattaacttcatagagaataggtgctccatgatagtgtgtgagatgagtgagaggaggccttagcaggcagatgctgtttggttttttgttgctgttgtttgcttttgtttttgctgctagcaaacaggtccccttttggtaacagcaccctgaattttctttcctttttttttttttttgagacagggtctctgttgcccaggctggaatgcagtggcacaatcttggctcactgtaatctctgcctcccaggctcaaacgatcctcccacctcagcctcctgagtagctggaactacaggcacgagccaccacacctggctaaacaccctgaattttctttaggaaaccacccctccccaattctcaggacaggaaatttgggtgaacaagatccccacactctattttcctgattaggcacaaaacccagtcttgactaatcagtgaatgtcagggttccccaccccaatgtcgttggctcatggaaagccatgtaactcccgtggggcatatgcccccaggcaaagtcacccagtttcatggcaaaaccctatctatagtctgatagcttgcatttgtatctgaagcctcttcctcttttcacgggtatccagctgccttttcaacatttccccaccaggactttcactaatgggtatctcaaacttcctatgtccaaaacagaaccatgactcttgatccctccccgacaacctgctcctcccagaatcttctccatcttagtgtccatctcaggatgattccctctcccccacgccctatatccagtccgctgaggtctctggaatcctgccatttctcaccatcaccatcaagctggtcccagctaccaccacctctcacctggaccatttcagcatccttctaactggtctcccggcctcagctcctgcaccttgtgctggccatctgcctgtttgccctcagattcattcccttcttccccagtgctatactgccttcctgggaactgtatttcccaggctcctttgtcaactgactttgggtatgttcagccaatgaaagttaccagcagaagactggcagatgggaggagggaagaagccaggatttatttccctctgaagctcagccaggggctcccttcaggtggccccctctgtggttctggctcctgcagggtgatcctagcctcttggcatcagagcaccattcacttcctttatctctccagtcttaagagtagtagtgacttccggctgttgctcatctttggattgcctcatcatcccccatttggtcattcaattctttccctgtatcaaatttcccttgtctgaaatacctagggtaatttctgttttgctgactggttgttaactgacgtatactctatagtccactctctacacaggggctgaagtggatcccgctaaaaacaaagcagatgggggcatgacccagctctcatccctccaagagcttcccatcatcagaatagatgagaatagaatctcagctcctctggaactaaaaaaaaaaaaggcagataaaagggagctaggcccttttatctaccttttccatccctttctgagctcaccctcctccttgcccacagtatttctagccacagcagtctgcttgctgttccttccgcccatcaagccagtttctttgcatttgctgtttccattgcaagaacacccttgctgcagatctgtccatggcttgctccctcacatgattcaggtctctgctctagagggaccttcagcgaccatctttttttttttttgagacggagtcttgctctgtctcccaggctggagtgcagtggcacatctcggctcactgcaagccccacctcccaagttcacaccattctcctgcctcagcctcccgcataggtgggactacaggcacctgccaccaccctggctaattttttgtatttttttttagtagagatggggtttcaccgtgttagccaggatggtcttgatctcctgatctcatgatccacccgcctcagcctcccaaagtgctgggattacaggcatgagccaccatgcccggccttctttttttttttttttttgggacggggtctcgctctgtcgcccaggctggagtgcagtggcacgatctcagctcactgcaagctccacctcccgggttcatgccattctcctgcctcagcgtcccgagtagttggcactacaggtgcccgccaccacgctcggctaatttttttttttttttttgtatttttagtagagacggggtttcatcgtgttagccaggatggtctcgatctcctgacatcgtgatccgcccgcctcggcctcccaaagtgctgggattacaggcatgagccatcgcgcccagcttgcgaccatcttttctaaaattgttccaccttcccatcactcaaatccttttatcctgctttatttttcttcccggcactttccctacctgctgtggtatttcatatttatgcatacatttgcttagagcctgctttactagaatgtaagctccatgacagcagggacctcatctgagcctcacttgtgcctgtggccctagcacccctcacagacacacggtcagcattgctgcagatctagatggtgaagacaggacatggacctcctggtttaactgattttgtgctggaattcaaagggctccagcgcagttctccattattcagatgagaaaagtagagtggagaaatgggtcccaggtcacacagctgagttttgcttcctagagctctgtccacacagctgtcccttcctgtccttggctacaacttgaatttgggcatttgcctctaggaggtgaagatggatttttgaagttttggtccttacccaggcagccctgtaggcctggggcagcccctgagttaccagagcctggagagagctcggtggggccaagtgggaacagcaaatgagaaaagtggactggggaacgcgatagggaggggtggggactgtggtgggttgcagagttcatgctcccttcgacatcattaatataaataaaaaattaaaacacttccttagcatgtgtatgtgtgtatgtgtattgcaaaatttccaaaaaacaaaacaaaataaaaaaaaaaaacacaggaaggatatgccagaaactaatgaaactggctccctccagcaggtgagtaggaatggagtgtgggggatagaaggactcttctgagcacagcttgcatagagtggaccttttggaactatgttaatgttctacatattgaaaacaataaagtaacaaagaagaatgtagacagaaatgactgagcctacctgtatttcagacgaataaaataaccacactgaagagaaagaaccaatccaagtaacatctgaacgtgtattcaaactgttactttgaccatggaccctcaatctaacgacaaaaaaaaaaaatactgagtaaga

SEQ ID NO: 98256 - DNA, 23610 bp, Homo sapiens
gcgcccacgccctggcaaatgtcaggggcccctccctcgccgaccaggggaagcgccgggcactcagcattcatttcaaacctggatctcccggcaccccctccctcccttagccaaaggcttccgcagattgattaagaacccctggtccccttcttctgggtcatgccccgggaggaggggcccctccacctgagccccaccttgcttcttgcttttttttttttttttttttgagatgcagtctctctttgttgtccaggctggagtgcaatggcgcgatctcgggttactgcaacctccacttcccaggttcaagcgattctcccgcctcagcctcctgagtagctgggattacaggcacccaccatgatgcccagctaatttttgtatttttgtagagacagggtttcaccatgttggacgtgctggtcttgaactcctgacctcaggtgatccgcccacctcagcctccctcccaaagtgctgggattacaggcatgagccactgcccctggctgctcctctgcctttttttttttttttgagacggagtctggctatgtcgcccaggctggagtgcagtggcgcaatctcggctcactgaaagctccgcctcccggtttcacgccattctcctgcctcagcctcccgagtagctgggactacaggcgcccgtcacctcgcccagctaattttttgtatttttagttgagacggggtttcaccatgttagccacgatggtctcgatctcctgacctcgtgatccgcccgcctcagcctcccaaagtgctgggattacaggtgtgagccaccgcacccggcctgcttctctgccttttatccccctctgcatgcacttctggtcactggctccagcccccccacataaatgtgccctgccatcttgaacaccgaggacctccatccaccaggccccctccagttcccttcccaagggtctgggcccctcctccctcccgctgcctcttcaaccctctctaatcttccctgggactccaatgactgtcctggaccccaaaccaccaaggtcacatgccctgatgcagcccacccttggagccctcctgtggccatgtggcagggtccccccttggggccacccagcaagcattgggggagaggtggtcctgggcctggctccaggatgcctctgtggaaccagctccccacccccacttctagaagcccccctcccctcactggtaggtcctttccatctccaaggtgtgtctgtctcccaaatgtgggtgctttttatctccaccccttcaattctttttcttttcttttttttttttttttttttgagacggagtctccagcccatgctgaagaggcactatctcggctcactgcaacctccgcctctctgcctccccggctcagatgattctcccacctcagcctccccagtagctgggattacaggtgcccactaccacgcccagctaatttttgtttttttttttttttgagacagagtcttgcactgttgcccaggctggagtgcagtggcatgatctccgctcactgcaagctccgcctcccgggttcacaccattctcctgcctcagcctcccgagtagctgggactacaggcgcccaccaccacgcccagctaatttttgtatttttagtagagacggggtttcaccatgttggccaagatggtctcgatctcctgacctcgtgatccgcccgccttggcctcccaaagtactgggattacaggcgtgagccaccgcgcccggccaacagccaattcttatggagcccttggttccatctagccctccctccggctctgtgctgggtgaagaggtggtcacacacctcacagggcaactcatcctctcctgcgagctcattccttcccactcctgcccctgttcctcactgaacctgacctctaagaacatggatgtcctgacctcgtcaccaccacaccacgcctcaagggctccccactgcctatgggacgatacccgtgctctggcagggctggctctgtctgctctcaccgcccctcccactgcctcctcccccttccccaccgcctgctccagactgcagattccaggacagcccgggacctcccccgccgaaggaggactccagggccccaggctgggttaaatgttcttcctggggctgcttcagctctggcctccccttgcgcaggccaaggtgctcaaagctctgttctcgcggggctggcgggggggcgttcagtgatgttccctggtgcttgcctggtccaagatggggagacagagcccatgagaggcttttctgcctcccccactccacacccttattcccctgcagcgcaaccaggcctagggcgccagcctcaccccagtccccaccccacaggactggatcgagtggaaggaagccagatgggcaggatcctggggcaactcctcgcacgatgcaatgccaccagttccggccaggtggcgctgcgcggctactgttccgggcggtagcgtccgacccgcgcctccagcaacgggcggggctagagccgcagtgggcggggccacgacgggtgggcggggtcgccccgtcggcggcagcggtttcctgcctctccccactcttgggtcgtcgcagtcccccggccttctctctctgtctggtctgtgggtctctgttggtcacctccttctgtcgcgctggctccgcctgctccagtttcagaatgtaaagagaggcatggtgcagcctgagggaagaggccctaggcgcggtctggttatgcttgaagggccattaatgtccattaggaagccccgcctgcctgagcagctctggaccattaccgggagtcggaatagtggccccacccccagacagggccccaggccacggccacaccccggagccccggtccaggtccaggctcgggctccctgagatcgctgggaccttgctggagggatgcgggttcaaggcccgaaggaaaggtcctgccaaaacaggagtgcacgggcggcccccaccccggtggaccccccaccgacagcccaggggaacggctgagacctgctctccctctgctggataggacccacgcctgggtagcatgctggcaggcgtgggttaagggggttgggtggagagttgggggatctcccaagcctctgattgcctctgccttgactttcttccctcctgctggggcccggggagcccacgtcgcccacaccccatctgcaccccacagaaccaggaaaataaagtccaccctcctctcgatgctgaccctactccctcccgcccacctccctagccctttcttcgagacaccaagcactttgcggcccctgaacacctttgcccaggtgcttcccttcgcctttctctgcctccagcgcagcacctatacgggccaaggtcagcctcggaccagggctgagagcttccggaggctggctggagaagaggcctgggagggtttgcccccgagagcttctaggtcacccttcctcgcctgttcctccaggcccctggactcactgtcccctctcactgactctgcacctcctctgaaatcgtgacctctggttcctctctggctgcctcattcctcctgctccctgctttgctaggcccacttcctttgttgcccggccctttgctactctgttaccctcctcagctccttcatggctttggggactcttttgttaactctgtagcagcagtgtgtccggtgatatttccttggttcctggccctggttgtgacctcatgtcccttgtggcccctccctctgccatgctgttctccatcccatctttttttttttatttgtttttaaattatttatttattgtttttgagatggtgtctagctctgttgcccaggctggagtgcagtgacgcaatctcagctcactgcaacctccgcctcctgggttcaagcgattctcctgcctcaacctccccagtagctgggattacagatgcccaccaccacgcctggctaattttttttgtattttcagtagagacggggtttcgccacattggccaggctggtctcgaactcctgacctcaggtgatccacccacctcggcctcccagagtgttgggattacaggcgtgagccactgctcccggcccctcagcccatcttcagtcactgggagtaggaatcagctgagtcctgggccagggaaggatggtgtatgcccaaggctgatcaggcgtctgccccacccagggcgggtaaggtctgcaagcccccttacccaggggacctggggctgctggagtctcccatccagccacctccctcgactctagtgtggccaggaagctacagcctgccaggttttgggtggacctggttggtgtgggatgaccccctaagcccaaacaggtgtggtatgtggggtgcgtggtggtgggtcacactgcccacagccatcttcacagactccaagggtggcagcaccaggctgtgtccagggaggccagccacaggccagacaggcagcctctggacatgcagacagagagatggaagcggccggccgggcgggagcctgaagcagccttacccaggaattgcaggggttggggtggcgagcagtcgcggcgcctcagcctaagtggcttttaggggcagctgccgggatatgggcacccagggggccatggcccaggaggctgcccagaggcgagccctgtgcttgggtgggggcaggggagcccagcccagggccccggagagacgagagggagaggaggactgcgccaagcctgcttctacggctcacatggggaattgcctgggctggctgtgcctgacccctgggaaccaggtatgtgcaagggggcctggctgggctggggaggagggcagactggggctgtgcctggactcagctaccttcctatattggagacagaggaagagctgggtggtgaagatagcatggactccgaatctcacatccctgggcccaaatggagctgaggaggcttcgtgggtcttttccctctccaggcctgtttgcaggtctgtgaagtggccggtcccctagggttgttccaggtaaaatgcacttaggcctaaatgatttcactgtggtggtgactgtcctgttggggaaggagggacactcgtgcttcaggtagaggctgagggacgtggacggctgtgggcaggggaggggaggcctgctgcctgcctgtggacactgtggagcagcgcctgtgcacacccagagcttagagcccaaataattcagtggagtgtagcccatgtcaggaggtgggtagcagggaccctcgagactcatatccttttgtcaccctgcaaagtcacagtccaggcctggggtgggctgggacacaagtgagggggccggcccggccaagggaaagaatggcagcagggcgtgggaaccgacgcggtgcagataggccgaacacggtgggtaggccagggagtctcccagccactggcccccaggatgcagggaggggctgctgcgtgtcacttttaaagccctttttgcctcctgggccctcctgagactctgccctgggccagggagtctcccagccactggctgggagggatccaggtgagacacagccgagaggagacaggcaagggggtccggaagggcttcccggggagggtggggagggctgtggcccttgttcttaccctttggcccctttgtcggggtcccttggcctggagaccctttgtccaacccgtcgcccacctcaagacctgcctcgatgctgcgcatacagtaggtatccaataaatgttcctgggatagaaggcaaaggcgctggcaccaaggcggctgcccagagtaggggcgagacagagaggtcccggtggttaaggggtcccctagccctgccgcctccccctgccccgcctcgggctggccgggcgcggaggtaggggcctggccgggacggctgggactggaggcgggggcggccgggcggcgggggcggggaaggggcgggcgcggaggcggtgccgcagcccgagccggagcccgagccggatcccgaggcgacgggagccgaacaggagccgccgctgaagccaccgccgggtgcccagcgccgccgccgcccccgagctcccccgcgcccctgcccgcgggcggccggtgggcagcgggcgccatggccgcgccggagccgctgcggccgcgcctgtgccgcttggtgcgcggagagcagggctacggcttccacctgcacggcgagaagggccgccgcgggcagttcatccggcgcgtggaacccggttcccccgccgaggccgccgcgctgcgcgctggggaccgcctggtcgaggtcaacggcgtcaacgtggagggcgagacgcaccaccaggtgggggccagcgctcgcccccggcccgccgccccctccccgagcgcgtccccctggggcgagcaggggtcgcacgggggcccgagggggctcccgcggggaggacgcggacgttgtcgggaggcagcggcccggcgccttcggagtcccggcgcaggaagctcagtcctgcacgggggtgggggggggcatcctggcagggaggggcccgcactgcggctcctggccgctggcctcgccctttggtcgcgttttggcctcagtgtgccgtgaaggagggtgttgggccgcctggagcccctccggaaaggtgaagacctgggtgcttttgcctgggtgtgtgtgtacacgtgtgcgtgtgaacacagctgggcgtgtgtatgcaggtccctttggggtcagccatgtgtgcatgcgcctgcctgtgcgtacccaggaggggtcgcagtaaaggcatcagtgtgtctgcacctgtgtgtgctgtagtgtgtgtgtgagtatacaggtctgcacgtgtgcctgtgtgtgtgcaggtctggactcctgggcgtatgggagctgggctctgtgtgtgtgcacgcctggctagtgtactcatcactgtctgcaggccggtgagtctttgtgtctgtactctagtgtgtcccagctggtgtgtctgggaccgggctgagttggycattgctggcaaccacattccttagctacaaaggcactactcctcctcagaggctgcctagcctggctggggttactggccgaagcctcctgcctcctggctaaggagaacagagccttttctctgtggkttctgacccctgaggtgtgtctgtctcccacaggccagggactccctccagaccctggttggggtccagcgtccacacaccccttttcctccaggtcccctgtccctcacagcaccgatgaatccataacctgtctacatggctggtcctggaacctaragattagcaggttggttcagctggacctggagctggtctcctgtttacctggtgccttgtctgtcactctgtcggccggcccyatgccttccacccagagtgtctgctgtgtaaggttgtttgctgaagaatgtggggatcaggccaggggcctggacctgagggattgagggtagggctgccagggctggggccaggctgctgttggatagtcactgccaccctcgccctgggaacacctgcttttccaaggccctgtggggctggtctctgargactggacacacagaccatggtggactctccccactgccccaggagggcaagaggggcagttactgccccatttgacagttgaggaaactgatgccagagattgagggtaacttgtctgggacacatagtcaagaagcagctgggcactgggttcctcttgtctcactctgggtcatggggagagaggagggctgggggaagatgggcctggctcagtccctcctatctgttcaccacccctgctgagcccggcagctggtggggagccttgtccaccctcccccaggccgcaggtgggagtaggsctgcccctcttcctgcccacttcccagtgggcactgctttctctccgcgggtgtgcgctggccccccgcgtggtccagacacttcacaggcacctgcacgcacacaccgacggccaccaagccacagctgtccacaggtgcacctgcctctccccctcgccggctgcacctgaatcctgcttccctggctgtgtgtgggtgcccgagccaggagcccagcccttcccctctctgcagatccagagggaatgggcccatggccatggcctggaggtagatataaggcctagggtcaggagtttagactcccacactgcacggcagagaatgacgggaatgggcacagacacactcaaactggggcccagggagacacacctctccttcaaacctggacggagacacagactttgaaacagatggatgcatgcgcgcacagggacaggcagactgaaaacctgaaggtccactgtgcaccatttttgtcacttccagacaggacttacccagcggccctatcctgcagccccttcccagccccgcctggagaagaccctgggctaagggcaaggctctgggagcaccctgaagccctcacagcctgggcctcagtgtccggagcctragtgcagagggagggagccgctggagtccgggggtggggggcggggccggcaggcctcttggtgcagccacccgcccatgcagaccagccgcctgtccgcacgcctgggccagcccagagtggtgccactgcccatgtgctgcccggaatgtgggccactgacccgctcctatcgcccattcgccccaggtggtgcaaaggatcaaggctgtggaggggcwgactcggctgctggtggtggaccaggagacagatgaggagctccgccggcggcagctgacctgtaccgaggagatggcccagcgagggctcccacccgcccacgacccctgggagccgaagccagactgggcacacaccggcagccacagctccgaagctggcaagaaggtatggcgggcttggcccacasggaccaccctagcctctcccagaggctctmtsagcttttgacgacgatctttgcctttggtcacctccagaagtcttggtctcttctgccttttggggctccttttctgccccagggaccatcttgttggccactgggggccactgtttctaccctcagcctgtgttttaaactgggtagggtcagggcagcctggcctgttcctcttctccaggatgctccagagccacttgccctatcgaggggtcactctgacaagctgccgcctccccagcccccagcctcgtggctgaggaaccctgggaagaggcattccaggtctgcgtgtgcgcagctctgtgcctgtgctgggtgtcatccgtggctctgtctttgtctctgttgaaggcgcctgcatgctgggaaggcctgggagagggccggccttctccacaggcagcgccgtggttggggaagcctaggaggccactctgccaggcctggcgtaggtggggctgggagcatgggagtggagttgggggtccaggaggctccagggtgagcccactcctccccctagatacaagggagggccctgggaccctgtctgctgttcctcctggactcctgctgggtagtacttcctccttcccctgcccttgctcccagccaggagacccagaaaagtacaggggcggcctgctccacctcctgctaggtggccgactgggaggggcggcctggcaggccttggggaccaggaggaacagcctgaagctgtctgtcttatcttcctggaggccctgatggcattatctccatgttctctcctacctttttttttttttttttttcattttcaaagagaaccytggccgggtgcggtggctcacgcctgtaatcccaacacttcgggaggctgagatgggtggatcacctgaggtcaggaattttgagaccagcttgactaatgtggtgaaacccccgtctctactaaaaatacaaaaatcagttgggcatggtggggcacgcctatagtcccagctacttgggaggctgaggcaggagagtcgcttgaacccggcaggcggaggtttcagtgagccgagatcccgccatagcactccagcctaggcgacagagtgagactgtctcaaaaaaaaacaaaaaaaggaaaagaaagaaatcccttcaggggatatgagtccaggggttggccagaccccactgtgagaaccgcgcttggggcaggggtgtgggatctggagttctgagggtgcaggggatatacacattcactttctccctttcccagacgtcactgctgaagctggctgcccctaggagctgagcccggggggagcggcttggcagggagacagcattccctgtggggagcccagcctgggcgcaggcctgcccgtgggacctgtgggacccgttttgttcctggggcttgagggcgggccacagtggtgctcagggccaaggtgcccagcccagggctggtgggggggctggccttgcaggggggctggctggtcctaagcccctgtctccaggctgagggttggggcctccctctttcccagccaccttccctcccccaggaggaagctccccctctgcctcaggcgtttgtccattgatttggacacraacgcatggttcaccttcctgtggaaaaatccggccctcggactttatctggagggtgcrgtggcccaggcaccttgccttgggtgggaccttccccctctgctatttcaggctctgggggctgcaggaagccctaggaggggcttcctctgggtgtatttttagaggaacaaagggtggcctgagtggcaggtccctttgtgcatgagtctggctggggacaggggctccaggaggtcagggggcacccaaggaacagggtctccccttctctcttctggcatcaagacctgaggtttctttttctttttctttcttggctcactacaacctccgctgtctgggttcaagcgattctcttgcctcaccctccccagtagctgggattacaggcgcgcaccaccacacctgactaatttttgtgtttttagtagagacggggtttcaccatgttgctcaagctggtctcgaactcctgatctcaggtgatctgccctcctcgacctcccaaagttctgggattayaggtgtgagccactgtacccggcccctgaggtctgaggtttcatttctttctttctttttttttttttttgagacggagtttcactctgtcgcccaggctggagtgctgtggtgcgatctcggctcactgcaagctccgcctcctgggttcaagcaattcttatgtctcagcctgctgagtagctgggattacaggcgtgtaccaccacacctggctaatttttgtgtttttggtagagacagggtttcaccgtgttggccaggctggtctcaaactcttgggctcaagtgatccgcctgcctcagcctcccaaagtgctgggattacaggtgtgagcccctgcgcctggctcaggacctgaggtttcttcacctgagctcccagcatgggcaggaagaggtgggcctcacctgacctccacagagcaggctcagatcctgcccttctcagcctgggttcagggcatgcctcagatggtcagggagcccaggagggcaaagcttaccttgcggggatggctccagtgggggcactggtggcagagaggcagagctctggaagggatgtgtgtagtttgtctttggtgaaggatggagagggcccaactttgggtgccccctgggagctaagggtggctctcagtgtcctctgtcctggctggggataggggaggtgggcaggggaggacactgatgtggttggcccctccttttgggggccgtgaaggcctagttagtgatgactcagccctgggccacaccaggctgggggtggccgcagctgcagtgcagctgatcctagtagtgacgacaggggacagcccccaaacagagacggggtggccagcggtgccaggccctggaggtggtggcagaccctgagccctctgccccctgcccctagcccatgtctccacccccatctggagggccttgggggctaagagcaggtgtgaggggtgacagttctgcgggaggcggctgtgtggttggggcgcggtgcctgcgggggcttccgggcttccctggctcttgctcctctggagcctcaacaggaccgtcctgtgttctggggccgggactcctccctgtcccctcagccctgggtcctggggcagggcagggccttccagcagcttccttccttcctttcttgggacggaagcctagctgggtggggggcgccgggctggagccttcgcaggggagcgggctcagtcatcaccctgctccccagagtgactcagcccccacgtccccacccatccccggggagccagggccgcagagggaggtagataagtggggtggcagcctgggtcggccagagagttcaggccaccccggccggacgcctgccacttgctgtcactgtgccgctgtcatggcacgctccgggagtgccacgccacctgcccgggctccgggagcccctccacggagcccaccccagaggctggtacaggtcaggtggggtgggaggaagggagggctaggaggaaccggcagccgctcagcctcccggggtggaaggaggggactccgggaccttgatgtaagcaggctggtcgctgagcaacaatgaaggcctttctctgccagggctggtgcgtcaccatctgggggggtgcccagggtacccccatgccagcctctttgtccggacacaggcatggctgggggaccagggatggtccagctctgtgctggccgccggcagggagggagcctggagcccgtgggagcccgagggcctggcgggaggcggcaggaagtgtgtgctgagccagggcagggaggaggaatgtgagctatgaacgccgcccgagctcctcggctctctgggccccccttccccacgagcccatgtgctgccagcagcccaccctggcccctccattgcagcccctccacctgaggttttagtgctgtgcctggcgccactgggaccctgctgacaatgaaggggtttaggtttgataggcagaacttcttgccttgtagagtgaaagacggctgcttctggacagaggcagaggggtggccagaatgaccctgagaacactgaggggtccttggcctggcctcagggccccagacacccaccagatcctgcttcctgtctggtgccctgagaaaccctgcyccgcaggccgctgtgcaggcgtgggaagggctgccgggccagcactgtggggctggccgcatgtgtgggctgctgtgcgtgtttgcaggtgtgtgtggaygtcttgtgtctgtggctgtgtgatgtgtctttgcggactgggcccatatcacgctcccacctcctccactgaattgggctcctgtccccacgccttccctgcgtcccaggccagcctgggggccgtgctccacctcccctcccgaactggactcctgtccccacgccttccctccgtcccaggccagcctgggggccgtgctccacctcccctcccgaactggactcctgtccccacgccttccctccgtcccaggccagcctgggggccgtgctccacctcccctcccgaactgggctcctgtccccacgccttccctccgtcccaggccagcctgggggccgtgctccacctcccctcccgaactggactcctgtccccacgccttccctccgtcccaggccagcctgggggccgtgctccacctcccctcccgaactgggctcctgtccccacgccttccctccgtcccaggccagcctgggggctgtgctccacttcccctcccgaactggactcctgtccccasgccttccctgcgtcccaggccagcctgggggccgtgctgtgactgcatccctgaggggcactttggtgggcaggtgtcagggtcagccttgaagccccacgcctgtgccaccaggtgtgtctgggggaggagtgagtctatgtggtggggccctggagattttgggggtcttgcaccctccaattcagcccatgtggcccagctgagcccctgtggggccagggagccacaggcttgtccctggagtttctggtgtgacgggctgggtggtggccatgcagagagggttcagagggtgggcaggaggcttcagatgaggcatctggcaggctggacaggagaagggtgttccagaccaagggcaggtcctgagcccaggggacagagcactagctgtgtggagaaggacccccttgctcccttggcggggcggtcccccccgctgacatggccgtttctggtccattggggtttggagcgagcttgaaggtgggtggctggaggggttgggggtgtctgaggcctggagacctgccctcctgaggtctgagcgcccccttgccatgccgccccagccctggcctggcctggcctgtggtccctcagggacacacagggaggtaggaggtgagggaagggccctggcagcccccagcccgcctgcacagtctcccctgcgcacgccctcaagcttggcgctccctggaaacctgagctgcctcctgcctgctccggccaccgccatgtttaactgagcacgggcagccgctggccaccgccgccgcaccctggcccaccccctggctgggaggtggtcattgggcctggccttgcctgcatggtcccctggcccagagccctacygcaggatgccagaggtaacatggggcagggcctgggatggtagcggggggtccttccgggcaccaggaggccctctgtgccctgtccacactaagctcctgccccagcscctgcttgctgggcccacgggggtggggcggctcattttcctggaatgtgaaagcaaacagagccgccaccgcagccagccycacggaggcctctggagagaaaacaaaactgctggcctaggagcgcctgccccacgctctggaggagagcccggggcagggggacgcacaggcagagccctcagggacaaccgccccaggaggccracggcgacagttcatcccacctggtgcttcctcccaccctgcctgtgcgccacgctggcctcgagccaaaggaattctcccagcaacccgggaaggcggctgggcccgtcggggaggcttctgggtttgaaaacaggctttgcccaagttcccacagctaaagctctgtcacaggcagcctgggtgcccggagtgtttgccactgagacctgggcctgcccgtggggggcacggtaccgagtttgggcagyggcggcaccaccggggagtggcctctggaggcgggaggctggagcaagagactgaccctgtccsttgggcctgcaggatgtcagtgggcccctgagggagctgcgccctcggctctgccacctgcgaaagggacctcagggctatgggttcaacctgcatagtgwcaagtcccggcccggccagtacatccgctctgtggacscgggctcacctgccgcccgctctggcctccgcgcccaggaccggctcattgaggtaccggcccaccagggctgcggggtgccgrgtgccccgcacctgtccacactggggccctgggtccttgcagggaggagggagacgctgggaacctgagctggtgcgcctcctgctgcctcggtgggcggtggctgtgatgaatatttgatgccacacctggccacgyggcgttgggggctgtctgggcccatggcggggctgatacatgctggtggcggcaggtgaacgggcagaatgtggagggactgcgccatgctgaggtggtggccagcatcaaggcacgggaggacgaggcccggctgctggtcgtggaccccgagacagatgaacacttcaagcggcttcgggtcacacccaccgaggagcacgtggaaggtgggccacggcccagggcacagggtgggtgcggtgtggtggctgagcagccactgacacgctgtccccacaggtcctctgccgtcacccgtcaccaatggaaccagccctgcccaggtaagagggtggggtgcccatgagacacagggtgcctctgggggtacccaggcccgacagaggcccccttctccctggagatccgtcctcgaggtgtgctagtgacacccgattttagccctgtcacctccctttaatgcccctgtgggtctcatcctgggtcgtgccacacacaagccacgtggggcccctggggtcggggccactgccttctgtcctctcctgggcaccacctggtaaggagttgccctccagtctctgcctcctcagggagctggcggtggcctcaccccaggcgttgctcacgccggccattcctgcacctgaaccccctctgcaccatgagccggccaggccacctgcctgtcactgccaggcgcccggtgcctgccccgccgcatctggagtccaccagaggcccgaggccccctgccgagtggaggagcacacactggggggkkgtgtgcctctgtgcacatgtgtgcgtgtgcaggtgttgtgtgtgtctgtgaaaccacaatctgcccttggtttcccagctcaatggtggctctgcgtgctcgtcccgaagtgacctgcctggttccgacaaggacactgaggtatggatgttctccactcctgagctcacacgtggggttgctagaggccttggggtrggcgtctgtggagatgtcagcccgggcagtggggtctctgttcaggaagtcctcgtgagccccagccccagcaggcagcctctgttggttgctccctaggaggggccaccgtctggggtgtgggacyagggctcactccagacaccccacccaccgtgctcaccccaggatggcagtgcctggaagcaagatcccttccaggagagcggcctccacctgagccccacggcggccgaggccaaggagaaggctcgagccatgcgagtcaacaagcgcgcgccacagatggactggaacaggaagcgtgaaatcttcagcaacttctgagccccttcctgcctgtctcgggaccctgggacccctcccgcacggaccttgggcctcagcctgccccgagctcccccagcctcagtggactggagggtggtcctgccattgcccagaaatcagccccagccccggtgagcccccatcctgcccctgcccaccaggtactgggggcctgtggcagcaagatagggggagagagacccagagatgtgagagagagtcagagacagagacagagagagagagagagagacacagagagagacagagagagagcgagcgagcgcgcggcagccgcggggcgagggcctttgctgctctgcyggggcctgctgactgaaaggaatttgtgtttttgctttttttccaaaaagatctccagctccacacatgtttccacttaataccagagaccccccccccttcccctcccccttcccctcccccttgggacgcgctctaaataattgcaataaaacaaacctttctctgcaaaccatttcctccccgccccctcccctcagcagcggccgtcctgagtgggagtccctgggacttcccagtggccaagttggggcgcccagcctcttcgtggggaccttgggtaaggccagggaggcctgatgtggccgtaggagctgcccctgcccacctgccctggtgtgggggtccctaggccacaccctgctccccacccagctaccctgtgcgcctgtgccctgctgggggcctgggctctccgaggggcctgaggatggaggccccacgtccccgaggagggcggcctctggacaggcccctcattccgcgcggcagctcccaggcctggggaacgtaggtgtgtgagagcggcacccgggaaggacgcctggcctctggctcagccctgcttggcgggctcccccgtggacaccctgttgactttgcacttccctcccgggccccgcacccccgaaccgaccaccgatcgaccggcaccgctgttgcctcgtaagccatagcgcatgcgcgctctcaggataaacaggccctgcctgggacccacacgcctctgtcttttctgagcctcctccccgtggggtgagaggggtggagggatgaggctgtttcagggagccccctccccgagtctcagcagctggaaacggtctcgttcctgagcccgtgccctgcatccatctgctcccagccctgctccatctcccccgctgacccccatgggaccccctgctgtgtggcacatcctgggcccatgcccatctctcttatttggcagactcagcctcccaccttcaccttccctgtgaagccatccggccccacacaacacccacacgggccaccctttgcccaattcaccctgcgacctctagcagtcacaggtcaagctttgtaccctgtggcgccctgcctgggtccccagtgtccctttcaaggccgggtagctctgtaaacaggggtgggaccctggcagaggctgggctttgagggcatgaaagttcaggagctggcggtgtccgggctgggaagctggggggccggcggtggatagcatgaggggccagggtccccagccagctgcccgggggctgcttgcttccccagcggacttccaacagctggctgcagctggctctccccacttcctccctcccaggttcatgcacaccccctccccctccctgagtacatagcaaagattgtcacgtccccagccggcctcccaggcagccctgctccagacacgcgagcacgggtgtgtacgaacacatccttgtatgcgattcccaggctctctgccccctcagggacagacatcagccagatcccatctgcaaacacaccaaagctttattcaacaggcgtggcttcctgaagcgtaaagccacttcacagacggtggccacagcggcacctcggccagagccatgcggccatcagagaccctgggcggccgggcagagggcttggttgaggcaggcgtggcagcgagggtgcacaggcagacaggtctgctggccgaagcccaccaagagtccattgatctcgtgccacagctccctgtgggggtgggggctgggtcagtgctgacagagggcgggcggggtgagctcttctccctaggaagccccccacatactcatacctaggcagccactcctccagggcggcgcgggtctcctctggggacttggttgccttcttggtccacctcagcctgttggcgattctgtgcacatgcgtgtccactgctgctgggaggccaagcggggtgaacaggggcacactccaccagcctagcccgtgcccctccccgcccagaggcgagtctgccaccacccccgtggccctccagttagacattggaaccgcaaagccctggctgcaagcctacatgtgaccatcttggctgcccctgaggtgctggggcaggggctgagccctctgttggggtgcaggcctctctcccatcacctgagccagcctggggggctctgttctgggctgcccactcccaacactggtgctagttggatgtgtgggtggtggggtctctgctttgggcagggcctgggggtgatgactcggctctgcttggagctctattccccacaataacagcgacagctcgcttggacaaacgcttgctgggggccagaccctgccagagagattggccagctcagtgagtcctcatgaggtcctacggatgctgaaaccgaggcccggcaggatcccgactccgaagcacctctcagccctcagcctccccaggaacgtggccctgtccccggaagggtccatccaggcttccctctgtctgtctcctgtggcctgaggctcctctcggcataagcactggctctgggcaccaggctgggtggcaacagctctgcctggcaggccggcatgaggtcactgcctgcagacctagcacctgccactgcagcggtcagggacacagcgggagcatgccctggccggccgcagctgctgtccacctgggttctggctcctgctcccctcagctggccaccccaggcgtctgctcactggggctcccttctcccacccggtggccccggccagctgcagccccagccctgcctcctcctcccgtgtttcccaaagagaaagccgaggcctgcaccagctccttcgctgctgcctagaaaaaggtgtccgagggtgtggggagaccacaaggcctgaggggtcacacccctggggctctgagcctcagtttcctcctctgtaacacggaagtggccatgcttcaaggctgagtcaggccacgtcacgttgtgtgagcctcctgcccacctggacagtgaatgacgaggactgcctcacccactttgtggccagagcttagagaagccaagggcctggcccagagtcacccagccaggaggtgcagagctgggaccggagccagcaatctatggctgtggcatttttttttttttttaaacggagtcttgctctgtcacccaggctggatacagacaatggtgcgatctccactcactgcaactttcgcctctgggtttcaagcgattctcctgcctcagcctcccgaggagctggaattacaggctcctgccaccacgcccggctaatttttttttttttggtgagacggagtcacgctttgtcgcccaggctggagtacactggcgcgatctcagctcactgcaagccccacctcccaggttcacactattctcctgcctcagcctcccgagtagctgggacaacaggcgcctgacacaatgcctggctaattttttgtgttttttagtagagacggggtttcaccatcttagcctggatggtcttgatctcctgacctcgtgatctgcctgcctcggcctcccaaagtgctgggattacaggcgtgagccaccacgcctggccacacccggctaatttttgtatttttagtagagagcgggtttcaccacgttggccaggctgatcttgaactcctgacctcaggtgatccacatacctcggccttccaaagtgctgggattacaggcttgagcccttgtacccagccagctctgacattttaactgagagcgtttctctttcggggaacccctaggaggcagccctggggtctccttgcaggtggtcaggcccacagacacctggagagggaggtatttccacatggctgtctcttgtgcccgctgctcccaaagcccgttccctgcctggctgcgggcagggaccttcccccacagccctgcccaaccacgatgcagcaccccagggacacgggcagctgaggacagccgcccagataagctcaagtgtccactgagaggctggcaggtggtgacgctgggagtctcagtcgggaggaggccctgccccggcgcacctggcctggctctggctctttggggctgctgtggctgttcagcctcaccaggtggccccggctcagaatagaggcccccggcccttggtggccctcttgcccaccagaaagtgctgcaagccccccgcctccggcacaggccccctgcaggagtcccaaaggggcctgggatgggggcacacagagggcagggccaagccctggtttctggactggctgggcccggctgcgtgtggccttaggagccccaaatcctctggacaaagccgaggaggaggcagccccaccccaaacccaggggtctgtctgcacccaactgccaagaagcctccggtgctaggaagagacaccaggacctgggaaaaggattcaaggagggccctccccccagtgcctccctccccaccctcccctcttctccctctcaaccctcccctcttctccccgcagcacctccctctccaccctccccccatcctcccagcgcctccctccccaccctcctcccccattcccccagcgcctccctccctaccattcccctcctgtccccgcagagcctccctccccaccctccccctttctccccccagcacctccctccccaccccacctgctgaggggatactcttcctcctccctcctcagtccttacctccccactctgccctcatctcattccagaacttcctgctcctggccctctctctcgcatcatggttttacagatgctgttccttctgctgggaacacacttcctcctcttggcctggctcaccccaccttgctctgcagctctcaggtgaaggatgaccttgggggccttcccagaggccctgggcccaagccaggccccaagagcaccctgcacaaccatcagggtttccactccacgagtggggaattcctcgctccacatttctcccgaatacaacgcagatggagtccagctccggggcctctctcagagccctgcacggagcaggtgctcagcccatgtgacctcctgccccagcacctgtctctgagtggggctggcctggctccaccctgggagcacctttctgactctatgggctgggtggaggaccagcatgctggaagtggagtcacaggtcacaaggatgtggggaatcccaagagcagccagtgggctggagccagccccgccctcctctactcaccaatgcctgacacagtgccccaggccacagccatagccaggtgtgccatcttgggcccaacacccggcagcgccaccagctcggccacagaggctgggatgtccccaccgtagtgctgctgcaggatggcgctggtctgcttgatgtatttcaccttgctctgaaagacaggggtgggttcagccttggaggcaagggcacagcccaacctgggaggatgcagcccccaggagacccacaggtggccagagctacctgcacctgctgaggacgtgtgcaagctcagcccccgccccccaggaggcgggaacaagcggagggcagcagggaggcccaaggtaggcctgaccccctcctcccacccgtgtgggccaatgatgcacgtgtaggctctggctggggttcccctgcccgtcattccctgccagcacccaggccaggccaagcaggccagccgctcccaggagtggggcttggctgcacctgcgccttcaggaaggagggctggagctggggcttccccaccagctgccaggcctgccgggtggttcccatcctgtgcctgagtggagagggctatttaaaacccatctgagaaactgcggcccacgcgggtgccaaggggaagcggccccacccaccaagctgctttcaacagatccgcccaccaccatccagtgctcggcggggttggggagcagcctccccagggctcctggagggtgaggggctctggacaggagggggtgacacaccgggagaggctagcagtaaacaaagggaaaggcgggtgggcaggcagccttggcggtgaggaagggtgggcaggcggcgaggcggggaagcagaggaaggaagggaggatgcgaacaggaaggccaaggagctgctgggactgggcgtcaggcctcagggccc

SEQ ID NO: 98257 - DNA, 22082 bp, Homo sapiens
gacagacatgctctacaactgctacaaaagagagggagctgggtccgctgttgcacggtttccagatctttgggggtttgatttggagacttcaccctcttacggaagaaccaccagagcatgctatgcaccccaagtgttcaaaaagaactgaaccaggctggacacggtggctcaggcctgtaatcccagcacctgggggccaaggtgggaggatcacctgaggtcaggagttcgagaccagcctggccaacatggtgaaaccccgtgtctactaaaaatataaaaattagctgggcgtggtggtggtgcgcctgtaatcctagtactggggaggctgaggcaggagaatcgcttgaacccggggtggggcagaggttgcagtgagccgagatcgcgccactgcactccagcctgggcaacagagtgagactgtctcaggaaaaaaaaaaaacaacaaaaactgaactgggcattttcccggttcgttccagagatggtgaatttgggcatctcggccatcaccccgacacttggtcatctggcagagagacatttgagagaggcctgaggccagcggtgcagtggaggggtgcccggggcggcggggggcggagagcagtgcggggtcctggggcagtgggcgctgggtgcggcagggagggaagagtcctgggaagaagcggggcatcccggggtgcaggggagagtaagggatcctgggaggtgaggtccggggtgcagtgggaggccaaaggaggcgacggagctcggaggtctccgggggtggggagttgtccccggggtgcagcggggggcggtctcaggcagacgggaccccggaggcattggaggatccaggcagggtgtgggatccaggggtccccagaggccggcgagggagccccgggctggggcttcgtacctctcacgagggtcacgggtcggtccacgatgaggtcgaacgctttcatcatgtagacgatgggattgggctgcaccggcgtgcggcgcgggggctcagggtacacatccttgtcccagctgtccggcatggcggcggcgggcgcggactccgctcccggacgcgctgccctggcctctacctccgtccgggtcccgcggcctaggtcgcccgctacagaggacgccgagggcggctgcgtctgcgcgctggcgccgcgatgcaccatgggacttgtagttccccggctccgccgggcgcggccgggacccgcctcgccgcagggcgcccccgcgtggggcctccgttctcggtctgtgccgagcgcctacgcggtgctggtcgctggtctgggcgcctgggaagcagccgcgaaccggacagattcctgcttacgatgaaagaaacagacaaaaggcaactgacataaggaataggagggggtcattcggttcccactgcgcgccaggcactgtgctgagtgcagcagggaataagataaactgtgatggagaacacaggccgttagagcgcacacgacaaagtgaacaaatagcacgcgattccaaacaccctactcctccaggaagctttcctggattgcctagtccctacagacttctctgggccccgctctctacaagggcccctcatggactggctggtgccagttaacttgggagcctgtctgggggagggcagggagcagaccaggaggcagggcttgcccttaggcggctcatagggagaaggcacctaccctgggcacagggccctctggccggctttgatggttccatcctggccctggggcactctggtgcttctaggcagctccactgagcagggtcctgctggccacatcttcagtctccacacctggcacggcccctggctgctatccaggggggacactggtcatgtcctgtcctgaggttgaggccagcgacacagaaccatcaaccctacagacaaacagtgagaggtgacagcgtgctggcagtcctcagagccctcgctcgctctcggcgcctcctctgcctgggctcccactttggcggcacttgaggagcccctttctgggctggccaaggccagagcgggctccctcagcttgcggggaggtgtggagggagaggcgcaggcgggaaccggggctgcgcgcggtgcttgcgggccagcgcgaattccaggtgggtgtgggctcggcgggccccgcactcggagagcctggccggccctgccggccctgggcaatgaggggcttagcacccgggccagcggctgcggagggtgtgctgggtcccccagcaggccggcccaccggcgctgcgctcgatttctctcgccaggccttagctgcctccccgcggggcagggctcgggacctacagcccgccatgcctgagcctcccccactccgtgggctcctgtgcggcccgaacctccccgacgagcgccgccccctgctccagggcgcccaatcccatcaaccacccaagggctgaggagtgcgggcgtacggcgcgggactggcaggcagctccacctgcagcccccgtgcgggatccaccgggtgaagccagctgggctcctgagtctggtggagacgtggagaacctttatgtctagctcagggattgtaaatacaccaatcggcactctgtatctagcacaaggtttgtaaacacaccaatcagcactctgtgtctagctcagggtttgtgaatgcaccaatcgacactttgtatctagctactctggtggggacttggagaacctttgtgtggacactctgtatctagctaatctggtgaggatgtggagaagctttgtgtctagctcagggattgtaaacgcaccaatcagcgccctgtcaaaacagaccactggactctaccaatcagcaggatgtgggtggggccagataagagaataaaagcaggctgcgggagccagcagtggtaactcgctcgggtccccttccacagtgtggaagctttgttctttctctctttccagtaagtcttgctgctgctcactctttggggtcacagtgcctttatgagctgtaacactcaaccgcgaagatttgcagcttcactcctgaagccagtgagattacgagcccactggcaggatgaacaactccagacgcgcggcgccttaagagctgtaacaccgcgaaggtctgtagcttcattcctgagctagcgagagcgcgaacctaccagaaggaagaaactccgaacacatcggaacatcagaacgagcaaactccggacaccccgcctttaggaactgcaacactcaccgcgagggtccgtggcttcattcttgaagtcagtgagaccaagaactcaccaattccggacacaacaggatctacggtcacagaaacgttcggtcttcacattatgaacttttttttctttttttgtttttgtttttttttttttttttttgagacagttctctcgctctgttgcccaggctggagtgcagcgcgtaatctcggctcactgcaacctcctcctcctcccagtttcaagtgattctcctgtctcagcctcctgaggagctgagactacaggtgtctgccactacgcccggctaattttttgtatttttagtagagacagggtttcaccatgtttctggtctcaaactcctgaccttacgtgatctgcccacctcggcctcccaaagttctgagattacagacatgagccactgtgcctggccaaagtcttggaaagaaatatgaaccatgagacccaaacaatcttgacattttagtagcctagaatcttagtatctattgatgtaagaaccacgtatcttagagatgtcataggcctgaaaaactctagaattccactgctatagaactttacaactggctgggcggggtggctcacacctgtaatcccagcactttgggaggccgaggcgggtggatcacctgaggtcaggagtttaagaccagcctggccaacatggcaaaaccccatctctactaaaaatacaaaaatcagctgggcatggtggcacacacctgtaatcccagttactagtggggctgaggcaggaggatagcttgaacccaggaagcagaggttacagtgagccgagattgtgccactgaactccagcctgggcaacagaatgagactccatctcaaaacaaaaacaaaaaaaacaaaactttacaaccatagaatctttgaattgaaaaagattttgaggggcgcagtggctcacatctgtaatcctagcactctaggaggccaaggcaggcagattgcttgagctcaggagttcgagaccagcctgggcaacataatgagatccccatctctataaacaatacaaaaattagtgaggcatggtggtaagtgcctgtggtctcagctactcagggggatgaaggcaggaggattgcttgaacccaggagactgaggctgcagtgagctattactgtgccactacattttagcctgggcaccagagagaaaccctgtctcaaaaaaaaaaaaaaaaaagaaaaaaaaataagatttcaaccccctcttcattcaaaacttaaattcaaaatttaaatttggccaggtactgtggcttatacctgtaatctcagcactttgagaggctgaggcaggagaatcacttgaggccaggagtttcagaccagcctaggcaacatggtgagacgcccgcctctacaacaaaacacatttaaaaattaggtcctgctgaggcagaaggaccacttaagcccaaaaggttgaggctgcaagtgaggtatgatcacaccgctgcattccagcctgagccatggaatgagacattgtctctttaaataaggccaggcgcggtggctcatgcctgtaatcccagcactttgggaggctgaggtaggcagatcacaaggtcaggagatcgagaacatcctggctaacacagtgaaacctcgtctctaccaaaaatacaaaaaggtagccgggtgtggtggcaggcgcctgtagtcccagctacttgggaggctgaggcaggagaatggtgtgaacccgggagggggagcttgcagtgagccgagatcacgcctctgcactccagcctgggcaacagagcgactccatctcaaaaacataaaaaagataaattcataaaagtatttcaatgattgtgaatgacaggagtcagatcttgattttttttttttttttgagacggagtcttaccctattgcccaggctggagtgcagcggcgcgatctcgcctcactgcaacctgcaacctctgcctcccaggttcaagtgattctcctgcctcagcctcccaagtagctggaattaacaggcccacaccaccacgcccggctaatttttatatttttagtagagatggggtttcaccatgttggccaggctggctttttttttgtttttaagacagtgtctcgctcagtcacgcaggctggagtgcagtcaaggttcactgcggcctgacatcctgggctcaagtgatcctcctgcctcagcctcccaaagtgctgggattacaggcatgagccactgcactcagccagggatctcaatctggaagcacagctctggtgatcctcaaggtgcagtcagccctccccctcgtctgccctgtccccagccctgctccccgctgtttatccagctgtctcccagccctcaggacaggaaccccctctgcctccaagtcggcaaactgctccagacccctcctcttggccgctgcctgggagaaggcccccaccggctaccttggcccccaccttgcctggccagtcctgtcctgggagggtcatgacccagccccagggccatcgaggaaaggagtgccagccctggctccgggtgccccactcaggctgtctatctgatgcccccaacactgccccgcccctgcctgctcctggcaccggagaccctgctgactgtgccaggggctaatctgggagctggcagctgtgagtcctggccctgccactcgacctctggcggctagcggcgaggccccttcctgaccttcagggatcggccaccatggttggtgggaccagggtgagggtgggctggggttggagctggaactctgggggggtgggacagctgggcttctggatgctccctcasagggacagtctcccagcctgtgaggggatgggaggctggagggggaaacaaggggacgagggctgggctcctgggcctgggagggccctggagatgaacagatggcagcggccacctgccccaggagcccttggctgcagtatgggtgcgaccctcctgggccccaggctgagcccacagaggcaggaagcctgtggctatggagaccccatcccaaagacgctgccccttggtgaaccttcctctcccctcctgtaggcagacaggggaggtgctgagcacaggcctcagtctgaagcctgtagtccatttctccaggtatgggttctgggaccatccagctctaccaccagggacaccccaggtctgacctccttccttcctgccccccagtcccaccggaagttttccgcccctcggcacggacacctgggcttcctgccccataagaggagccaccggcaccggggcaaggtgaagacgtggccgcgggatgaccccagccagcccgtgcacctcacggccttcctgggctacaaggcgggcatgacccacaccctgcgggaggtgcaccggccggggctcagtgagtcacagttgggacccttgggggagggggagggctgaaccttccagatgctcggagccagaactcacgcttttggtccagacagggccacagtcccagggagcaccaggcctcgcccccgggaattggggtggacgctgagcacaggcagggcttcygggcgggttctgtcatggccccagctcgcagatgaggacattgaggcacaaagcagtgaggaacctggtccagtcaccggggcggtaagcgcaggagctaggattcaaaggccagcgccccaagccctcggttcaaaccacctgccaggacatctgcactttttggccatttcgggtctatttcatgtaccattatttcatatgtacgcctatgtatatagttagtttttgttgttttaatcgtagattcacaagtagttgtaagaaataatgcaggccgggcatggtggctcacgcctgtaatcccagcactttgggaggccgaggcaggaggatcatttgaggccaggagttgcagaccaacctggacrgcatcgtgaaaccctatctctacaamaaatacaaaaattagctgggcgttgtggcgagtgcctgtagtcgcagctacttgggaggctgaggtgggaggatcacttgagcttgggaagtcaaggctgcagtgagctatgattgcaccactgcattgcagcctgggtgacagagtgagaccctgtctcaaaaacagaaaaagaaatccattgtaatcattagaataacaaatgctcatttgggctcagccccaccctctggggaatgctgtcctggctggccccacactctcctgtcctgcccytatgtgggcggctctccactccctcccccacaggcctcaggaggtcccccttcatgccccatccctrtgtctcatccagaaatttccaaacgggaggaggtggaggcggtgacaattgtagaaacgccgcccctagtggtggtgggcgtggtgggctacgtggccacccctcgaggtctccggagcttcaagaccatctttgcagaacacctcagtgatgagtgccggcgccgattctacaaggactggtgagcaccgcccttggctgggccgtccaagggctgctgggaccacagaagttgggtgcctgaggctctagctcttgctgaaatgataggtgtgggtgagtaggaagcgaagtctcaaccgtctgtgggaggtaggagtgtctgtgtgtgwgtgtgtgtgtgttgtgtggttgccttcatttcaataaaagatgagtaggctgggcgtgctggctcacgcctgtaatcccagcactttgggaggccgaggcgggtggatcacttgaggtcaggagtttgagaccagcttggccaacatggtgaaaccccatctctaccaaaaaatacaaaaattagctggctgtggtggtgcgcacctgtagtccagctactcaggaggctgaggtgggagaatcacttgaactgggaggtgaaggttgcagtgagctgagatcgtgccactgcactgcagcctgggtggcagagtgaaaccctgtctcaatctcaagaaaaacacaaaaaacaaaaaacatgagtactagaaggctggagatgaaatcaggatggaggaaaaagaggaaacaaatattctaatcctcagggttaattaaaaggctaatttgggcggcttgtggtggctcacgactgtagtagtcccagcactttgggaggccaaggcgggtggctcatttgaggtcaggagttcgagaccagcctggccaacatggtgaaaacccgtctctactaaaaatacaaaaaaaaaaataaaaataaaaaaataagctgggcgtggtggcagacacctgtaatcccagctacttgggaggctgaggcaggagaatcgcttgagcctgggaggtggagattgtagtgagctgagattgtgccgctgcactccagtgtgagcgacagagtgagaccctgtcaaaaaacaaacaaacaaaaaaccaaaaggctaatttgatggaatgttagcattggctctgagtttcctagcagccattgtgaaaagtgaaatagccagctgagaagctcttacacatagaaaggtattctcgggcctcaaatcttccctggcagtaagtcctgaaagaaaccttggtttcttcacctatagaatgggwataataataataataataataataataataataataataataatgtccacctcccagaactctgctgagggttagaaactatggcttctggctgggcacaatggttcattcctataattccagcactttgggaggctaaggcaggcagaccgtttgagctcagggcttcgagaccagcctgggcaacatgacgaaacccgtctctacaaaaaaatacaaaaaattagccgggcacrgtggcgcatgcctgtggtctcagctacatggggggtgaggtgggaggattgcttgagtctgggagctccaggctgcagtgagctgtgtttgtgccactgcactccagcctgggagagaaagtgagaccctatctccaaaaacaaaaaagaaaggatggctcccaagcccgaggtgcctggccatggcacccactgcacccttgagaagtgggaccagcagtctgagccatgtggcaggtggggtggtctctaggtgcctggactgcagggctggccagccgccttctctgagcttctgcacctctgccactcactctcaggccccgggaaacagggagggtacctactttacagaggaggaaaccggggcctagagggggagagacagtctatgttcaaagatggtggctggaaccagctcagaggcctccgggtggggggcggtcccagaggtaggacccctgcttggtgggctgggggtgaggtgggggcaggataggcctggggagctgccccggttgggggcttctgagcaccctcctgtgcatggctcaggcacaagagcaagaagaaagccttcaccaaggcctgcaagaggtggcgggacacagacgggaaaaagcagctacagaaggacttcgccgccatgaagaagtactgcaaggtcattcgggtcattgtccacactcaggtcagcccccggccctccgctgtcggtcagtccctaggaccacgctccctcaccccagcttccaggagctgtggcaaatgtcagcctaaaaatacccgagcctcggcacagacccagaggagcggctgaccagcctcgctggccacgtgcagccccaggcatggctgctgaaaggcatcggtgccttctggggtgccaggggcatcagccacgccggctagtcaactaagaccctggcacgccctgaagagccgggtccccagccaagtgtgctgtgtggagggctggtcacctctcttcggtttycagcgtaagtgtgcacaggaatycgtgtttgtacatgggtctggcttgctgtaggctgacaggcaggcggcaccctccagcttattctggaacactctttggcatctttgtcctcagggaaggcttcccgaggccctagagcagtgcccccgaccctgagcttcccacagcccccacactgcccccagctgctcgcacacttgtacaccatgcctgggccagtcactggtgtgtgttcatctccctggacagactccaggcaggcagaggccctgggcggggccacagctgccaccaagagcctggtatgcaggaggtgctctgtaaataccygccccatacatacccgccccatacatacccrccccatacatacccaccccatacatacctgccctgtccatacctgccccctacatacctgccccgtccatacctgccccctacatacctgccccgtccatacctgccccctacatacctgctctgtctatacctgccccgtccatacctgctccctacatacctgccccctacatacctgccctgtccatacctgccccgtccatacctgccccttacatacctgccccttacatacctgccccttacatacctgccccctacatacctgccccctacatacctgccccctacatacctgccccctacatacctaccccgtccatacctaccccgtccatacctgccccgtccatacctgccccgtccatacctgccccgtccatacctgccccctacatacctgccccctacatacctgccccgtacatacctgccccgtacatactgccccgtccatacctgccccstacatacctgcctcatacatacctgccccrtmcatacctatgggtcactatgtgttccccgctggcctctctgtctccacctctacattgcacagcctgtgcttcacacagcaccagccagagaccttaccaaaaaaaaaaaaaaaaaatcaagccagacatggtggatcacgcctgtaaccccagcactttgggaggccaaggcaggcggatcacctgaggtcaggagttcgagaccagcctggcyaacatggcaaaaccccatctctagtaaaaatacaaacaaattagctgggcatggtgggcgcctgcaatcccagctacttgggagactgaggcaggagaatcacttgaaactgggaggtggaggttgcagtgagccaagatcgcaccatggcactccagcccgggcgatagagtctcaaaaaaaaaaaaaacaaaaatcaggcccagtggcttacaccagtgatcctagcactgtgggaggacaaggtggcagcccgggcaacttaacgagacctcatctctacaaaaaaattaaaaattggctgggcatggtggtgcatgcctgtagttccagctacttggagaggggtgctgaggcaggaggacttcgagaccagtcttggcaacatagggagatccccatctctacaaaaaaaaaaaaaaaaagccaggcgcggtggctcacgtctgtaattccagcactttgggaggccgaggcaggcagatcaggtcaggagattgagaccatcctagctaacgcggtgaaaccccgtctctactaaaaatacaaaaaattagccaggcgtagtggcacaacctgtagtcccagctactcgggaggctgaggtaggagaatggcgtgaacccaggaggcagagcttgcagtgagccgagattgcgccactgcactccagcctgggcgacagagcaaaactccgtctcaaaaaacaaacaaacaaacaaacaaaaaaaaaacaactgggcatggtggtgagtgcctgtcatcccagctactcaggaggctaaggtgggaggattgcttcggcccgggaggctgaggctgcagtgagccttgatcatgccactgcactccagcctgggtgacagagcgagaccctgtctcaaaataaaaatataaaaaaataaaaatcaggccaggtgcagtggctcatgcctgaaccctagcactttgggaggtcaaggtgggtggatcgcttgaagtcaggagtttgaaaccagcctggccaacatgggaaaccccaactgtactaaaaatacaaaaaaattagccgggcatggtggcacacacctgtaatcccagttactcaagaagctgaggcaggagaatcacttgattcagggaggcagaggttgcagtgagccgagatcgccccactgtactccagtctgggcaacagagcgagactccattaaaaaaaggccgggcgtggtggctcaygcctgtaatcccagcactttgggaggctgaggcgggcggatcatgaggtcaggagatgcagaccatccgggccaacacagtgaaaccctgtctcaactaaaaatacaaaaaattagctggtcgaggtggcgggcacctgtagtcccagctactcaggaggctgaggcaggggaatggcrtgaaccygggaggcagagyttgcagtgagccgagatcatgccattgcactccagcctgggcgatagagcgagactcaaaaaaaaaaaaaaaaaaaaaaatccaatcagatcacatcgcagcctgcacttggaagaaagtccgagctccccactcccaggtgctgscccacgccccttgctccccaccgtctgcccacactggtctcctctctgtcccaccaactttccaaggcctcctctgccaccaggcctgtgcaaatgcggggtcctgctgcccagagcctctccaatgtttgcctcgtggctcctacttgttagcagcggcaccttctcagagaagccctctctgccctgaccactgtatctgaaacaccagcccccatagcccatcagagcactctgtcctctccaagagttacttggtytycttctgtcccccagtgagatggtggctcccgaggtgtgggactctgtctgcctcattctgcaccggatccgcagtgcctagcacaacacatgggttgcaacctgatcctgggaacacctgtgaatgaatgcatgcgtggaaggcggcaggggtcactgctggccatgccatgtttcaggtgggggtgtgatcccgtgggccgtggcgtgacctccggccatgtcctscagatgaaactgctgcccttcyggcagaagaaggcccacatcatggagatccagctgaacggtggcacggtggccgagaaggtggcctgggcccaggcccggctggagaagcaggtgcccgtgcacagcgtgttcagccagagtgaggtcattgatgtcattgctgtcaccaagggtcgaggcgtcaaaggtagggctcagtgaggatggcagctccagggcaggctscctggaggcagtggggaccagcctggcctctcagccaccagccyctctcactcacaggggtcacaagccgctggcatacyaagaagctgccgcggaagacccataagggcctgcgcaaggtggcctgcattggcgcctggcaccccgcccgcgtgggctgctccattgctcgggccgggcagaagggctatcaccaccgcacggagctcaacaagaaggtgcgtcctcagccggggtacggggacactgtgtggtcggaccccagcyctcagtactggcctcagtgggtggggtgcatgacccagacactgccggggacacaagatgcccccaccagcactgagtctgagcatgtgggcggatgggcctggatgggctgctggcctcagaggccacttcctgcccctggcatgtgcccccttctggcagatcttccgcatcggcaggggccygcacatggaggacgggaagctggtgaagaacaatgcatccaccagctacgacgtgactgccaagtccatcacaccgctggtgaggctgggagggggcgactgccaggcccatcacaccgctgatgatggctggagtggggtcaggctggccgggggscctggtatacattgtagggggcatgccccagcctcagctggacgctccctgccccaagggctcaagatttttgccccacagctggacgctgccccgccaggcacactggacagaagaccttgacagctgggcagtgatgtgggacccttgccttggctgtccaaaacatttggatatagtcacaagcaagaaatctctgctgcgtcccacatcctccgagcctcctctggaggcagcttccactccagctgctgtcatgtgggtgtggagtgcggcagctcctactgtggcctgggagtcaggccacctgggctcaaaccgcatctccaggacttagcagctgtagaggctggagcaagtgactccactcctctgatcctcagtctcccccaacaaaaatgcagactgtcaagtgagataatgcatgaaaaggacttagcttgtgactcagatgctgccctcagtaggggcggygtgatagtcacccctacatctgggggctgggcacggggctcctgcctatcactgccccctctgggggttctgctaggrcccccagccacccactaactcagaagccctttccgggcctggcctctgacctgtgtcctctgcagggtggcttcccccactacggggaagtgaacaacgacttcgtcatgctgaagggttgtattgctggtaccaagaagcgggtcattacgctgagaaaggttggcagtgctgggtgggctggggagtgggtgcccgagggctgccagcctgtcctgccctgcggcctgctacgagygggatggagtggtgggagcagaaggggagggctctggtaggaactaggtgagcaagaccttcctggtggggcttggaggttcacagcagggtgtgggggatccccacacttgatgtttactttaccatggattccccagtccctcctggtgcatcacagtcgccaagccgtggagaatattgagctcaagttcattgacaccacctccaagttcggccatggccgcttccagacagcccaagagaagagggccttcatggtgagctcaccgcccccatccttgttcttctctggggctccagctccacatccagcctgcccgagtagggagctggagctggcagggactcccctgagctcaactgcaggagagactcttttttttttttttttttttwttttttgagatggagtctcgctctgtcacccaggctggagtgstgtgccgtgatcttggctcactgccacctccacctcctgggttcaagcaattctccagattcagcctacccagtcgttggtactacaggcacgtgccaccacgccaggctaattttctgtatttttagtagggatggggtttcatcgtattagccaggatggtctctatctcctgacctcatgatccgaccgcctcggcctcccaaagtgctgggattacagacatgagccaccgtgcccggcctgcaggagagactcttaagggtctatccctgggcactgattctttagaagagaaggtgggggaggaagcagccttaggggggcagtagggccggmcctgagtgatctagagcctggctgggggagggcgtgtttctggccagagtgactaaggctcctcctgcaccaccctctcaaccagggcccccaaaagaagcatctggagaaggaaacgccggagacctcgggagacttgtaggctgtgtggggtggatgaaccctgaagcgcaccgcactgtctgccccartgtctaacaaaggccggaggcgactcttcctgcgaggtckcagagygctgtgtaaccgcccaaggkgttcaccttgcctgctgcctagacaaagccgattcattaagacaggggaattgcaatagagaaagagtaattcacrcagagctggctgtgcgggagaccggagttttatgttttattattactcaaatcgatctctttgagcatttgcggagcagaggttttttttttttttttttttgagagagtcttgatcttgtcgcccaggctgctggagtgccggggagcagagtttttaaggataacttggcgggtggggagagccagtgagccaggagagccgattggtcagggaggaaatcacagggagtcagctgtcttcttgcgctgagtcagctcctgggtggtggccacaagatcagatgagccagtttatcaatctggttggtgccagcagatccatcaagttgcagggtcggcaaaatatctcaagcactgatcttaggggcagcttagggagggtcagaatcttgtagcctccagatgcacgactcctaaaccataattcccaatattgtggctaatgttagtcctaaaaatgcaatctagtccccaggcaaggaggtggtctgctttgggaaagggctgttactgtctttgttttaaactataaactggctgggcgcggtggctcacgcctgtaatcccagcactttgggaggccaagatgggcggatcacctgaggtcgggagttcaagaccagcctggccaacatcgagaaacctcgtctctattaaaaatacaaaattagctgggcgtggtggcgcatgattgtaatcccatctactcgggaggctgaggcaggagaattgcttgaaccagcgagttggaggttgcagtgagctgagatcgcgctactgcactccagcctggaaacagagtaagactccgtctcgaaagaaagaaagaaagaaaaaaacaaaaaactataaactgagtttctcccaaagttatttcaacctaccagcagggatgaataaggacagcttggaggttagaagcaagatagagtcggctgagttagatctctttcactgtttcagtcatcattttgcaaaggcggtttcacctgggcgcggaaaggctgcatgacctccggcagctccgggcttagtaccagggactggactggggggacacgaccctacggattcgcgccgtcgcccacctggccaggccccatgtgcgcccctagccaccagggcgcgaggggcggcaggggcggggccttggggaagcggcccaggggtggtccctgggagtttccatgggcggggcctgctggggagatgcgattggactggcaccggggggcggggccttggggaagtggcccaggagtggtcccaaggagtcaacgtgggcggggccagctgggaagatcgtattggaccagccctgaggaggggcggggcctcccggaggcggaagccgggattcgccctccggggagcgattggtcctcgggaggggcggggaggtggacgcgggtaccggcggtcgtcgggtcggcagcctttggtcagttggcagcggcaagcgcgctgcggttccggtggcgccatgtcgttctgcagcttcttcgggggcgaggttttccagaatcactttgaacctggttggtcctgcggcctctcgctgggagggcagcgcggcggggggcgcgcattagcgggggcgccgccgtcgtccgggggtgatgtctctcccaagccgggaatgggggcgaatgtggctgccggggagaagcgaacaggggtcaaaaggactgcggaggagtggggagcctgggggcgaggagagtggggtacccgaggagagggggccttggggctcaccgtcctggagggggcaggcctcgagtgtgaacgtgccgtttcgggggtgggtctaagggatcgggatacgtgggggtggtaccccttccctaccccctacactccaaagtgatggcgctgggggaattcgggttagggtcggggcttcggagaggccaggttcttgtccagggccagctcctgtggccggggcgccccttcgcgggtcatcccgcaggtgttaccctggcccttcccattcccccgagtccgggatctctgggaggagtctggcaagcatagaatgtccccttcagatcctaatgtgccggcccaggtgcctccccacctgcccagggactccaaattggggaaccaggagtgccaccaggcacctgccaacagcccgtgaagtttgaccaggcaggcaggatggggtggtttggggcatggccagccctccacactggccctgatgaatcccttctgggctgggctcgcctggtagtggactaatttggtaaaaacacatccacaggcaagtctgagtgcactggtctccttgggcggatctgctgggtggcacccctgtagcgggttgggctgtgacacaggaccatcccggcaaagcctcccccagcaagactctctggctttagatcccagttgtcctcaggctgctctgccaagccagaaactccacttccacagcagctgctggcttctctttgcttttttctccagttcctggaaaaggctgggtagtttacagtctccaggggaggctgtccccaggtgatgggtgagaggtgactcagcacccctggaggttcctgttttcagtccttaaaacagttctgcaagtcagttttgcaactttcccaccccctccactccaaagggatcctttgtgggtaggctgaaatctgttgtccccagccctctttcttcctgggctcctgtgtggcctggaggccttttctctgggactgttctcttcctgcctggagagcagagcagtgcctgggtatccagcttagggcctcgttgggcagcagggaggaccacttgagaaaggagagggaccaggtggttgggccacatcagggcccctgccctctatgttcctgggggaactaggggggcgagggggagctccgtgtcctcattggactacccaggttccttcacgctgcacacacttgtagctgagtgtctgcatcaccaagcaaagatggaaatgttaggatatgccccgtcacggggctatgagaagaatcaaggagataattgtgaaaggtgactcccctggtctctggcacatctactaaacgtgagctcagcacagcgcctcccgtggcgggtgcctggggaaggagcacagcctaccctcggaacgggggcagcgctgtctttgcctgggttggtggatttgggagcttgaccccggaaaggcgggagctgatgactccacatttgcctctccttccaccacaggcgtttacgtgtgtgccaagtgtggctatgagctgttctccagccgctcgaagtatgcacactcgtctccatggccggcgttcaccgagaccattcacgccgacagcgtggccaagcgtccggagcacaatagatctgaagccttgaaggtgagaggccacaggggtgggggagggacgggggcggccagggagagcagagagccagtcccaccttcctccctctgcttgccccacagctccaggggcttagaggcgtctattccaggcctgttgcctctgccagggagctgccaccccaggctatcgggagagcctggccttctggtgcaaatgtgggaaacaggacaggtttcctgtacgggctccaggacaaaggtcaacctcttatgtcggcggtcagcttgggaaataggcgtgtgggaagaaacaccatctgccagccccagtaagggccttcactgtggctgtatcatggccagaagctcacccagctgccttgtgatctttccaggtgtcctgtggcaagtgtggcaatgggttgggccacgagttcctgaacgacggccccaagccggggcagtcccgattctgaatattcagcagctcgctgaagtttgtccctaaaggtgagcttgctttgcacagctggggccaggcctgttggcctttgagcccaggctggggggcccagtgtttgtgcttgtccacttaccatgacaaggtatggggccaccaagtcacgctgcctgggaactgtccaggatcccccagaaaggtggctgcagcgcaggggcaaaggagctggtgttccgcttcctcgcttggttgatcatgactgtcccaaaaaggggcttcagcgtgagaatgtggcaaatggttttcctcagaggcctggcctttcccagaggctagagtcaggggcggggcaggcagagcctgaggccccagtctgtgcggctgtgtctcccactggctaggactgtggccttgcttcttagccgctcagagcctgcctcctcctctgcagagtggcggtggtagcagggctgtgaggacagctgcgtgtcacgtgcacctgggcctggcacacaataatagcttgatgaatcctcatcctttttttttttttttctgagatggagtcttgctctgtcgtgcaggctggtgtgcagtggcgcgatctcagctcactgcaacctctgcctcctggttcaagcaattctcctgttttggcctcccaagtagctgggattgcaggcacgcatcaccacgcccagctaatttttgtatttttagtagatacggggtttcaccatggtggccaggctggtcttaaactcctgacctcaggtgatctgcccaccttggcctctcaaagtgctcgaattataggcatgagccaccacgcccagcccacacctggttaatttttaattttttttttttttttggtgacagagtcttgttctgtcacccaggctggagtgcaatggccaatctcagctcaatgtagcctctgcttcccaggttcaagtgattcttctgcctcagcctcccgagtagctgggattacaggctcccactaccgcgcctggctaatttttgattttttagtagagacggggtttcaccatgttagccaggctggtctggaactcctgacctgaggtgatctgcctgtctcaacctcccaaagtgccgggattataggcgtgagctaccgcacccagccaatttttaaaatttttatagagatgggggtctcactatgtggcccaggctggtcttgaactcctctgggccttggcctcccaaggtgctgggattacaggcttgagccactgcctcgcctgaaatggggctgttaacagcacacgcttgtggccatcaccgtgctgtggggttgagcgagcagcctgtcaggatctggtgcgtggtaaacctgcgatgttttcgtccttttgttgttatttgtcctccgtgtgagtggagggagaagagattctgggttctcctgtggatgtcagaacaaaatggggtacacagactcccctgagtcgggcatctggtcttttcagctcccctgtggcctgcaggccagggcagagtgtgaaagcgcagggaacggcacctgaagctctgccttgcagtgacttgctttctgcccctaccctggctttccaccgcccccgcgcccggctttccgcccctgcttgctttctgtccccgcatactttccgccccctctcctctctttcaggcaaagaaacttctgcctcccagggtcactaggcgggcagcccacacccaccccagacggccaccacactgaggccacacgttggccattccaccttggagttggaaccctgggcgtcgagacaggaaggcagggcgcagtggttgaaacatcaggacactcccaaggccccggctctgaacaagaccttttcgtttcttggaaaagagactcatttgctgatggttcatgccttctgctgggacaggcctgggctgtgcagccacactgtcggctgacttagccccctgctcactctaggtgcctccaggaggtgagccctgggtgcagctggtctctgaatgacgttacaccctcaccttcttttcctggccctgtctctggactctcccctgtgaggcccaattccaagacagactctcgtcctcaccgaagcttaggcccacatctcccaggctgcttaggagacagaatggaaacggaggccgcccctgccagccgccctggccctggtcactgcatgatccgctctggtcaaacccttccaggccagccagagtggggatggtctgt

SEQ ID NO: 98258 - DNA, 14072 bp, Homo sapiens
cttacccaccgggtgggggccgtcctgaggtctcctggagctccctgctccagccagggagaggcccccacctgccttcccgcccgcctccagctcctgcaggtcacatgcctgagcctcacaggctcgtggctgtgggatgcaggcgtgcctgcgggctcggcagtgttcgacacatgtgctgcttgtcctgtgtcaccaaatgggcctgcagtctgttgtgggcaggaggtaggcagtggcttcagtctttctccttctccagggaacccggccctgggcctgcagtgcaggtgctcagttctgtgcccgggctcctgactcagggggtctaccctggctctggggacccgcacttctaggcagtggggtagagttgtctgggcctgccttgtctgtggggtggggccatcccctccagaaaggacagtgtcctgccctgaagctggctttcgataggtccacgttcacctggaagctggtggcgcccatgtcatggtcccctgtggcttctcctggggatcacatcatctctctggaccagccctcaaccctcactgtcacaaggcctctgccacaggccccccgccaccacttagcactctccctgctgaccccctggtccattcagcccctgggtggcccccacacagtctgtgacagggaggaggctgggaggggcactgcctcccacaaggagctcacgttctggtgggaggaggccaagaatcaggaccaaggagaacttcagtgaagcaaaagaagaaaaatggaacaggggtgaaggggctggagaagcctcagggaggtgacagctgaaacctgcaccaggaggggcggggcctgtagtgggcactgggcagtaggaccctgtggtgagccaggtctgctcaggtaacaggaaggtcgttgggccacagtgtggtggggactgccctgaggccgggtggctgcagctgggcctggtgtgggggtggtggccttgcctgggggcccctgcagggctggcctagcagggaaggtgtccacaccatctcagctctgggcaggtggggtggacctggggcttatccaccgtctagaaaccacttggaggccaggcagccttggctactgctctgtggctgggcctccagggccctcctggtcatgcagaatggggcagagccggagcccgttgggagggagcctgggctgtgcgctcggggtactgtgaagtccctggaggcctggacccccatcctttcctgggtgggtcagggacagggtgggacagggacagagggcaagggtgagagggtagagagcgggcaacaggtagtaacagccggcccttctctcccagcacagcgactcggactccgaccccgagtactccacgctgccgccatccatccccagtgcggtgcccgtgaccggcgagtccttctgtgactgtgctgggcagagcgaggcctccttctgtagcagcctgcactcggcccaccggggcagggactgccgctgcggagaggaagacgagtgtgagcgtggggcccagcccctgctgggactgcactgcgggcgggcctgggggtgggcagggcagagccccatggagctctcagggctgccccagcctgggcctctcttgcagatttcgactgggtctgggatgacttaaataagtcatcagccaccctgctgagctgtgacaaccgtaaggtcagcttccacatggagtacagctgcggcacagcggccatccggggcaccaaggagctgggggagggccagcacttctgggagatcaagatgacctctcccgtctacggcaccgacatggtaagttgcttcggcccagggtgcttctggggaacctggctccggcagcccagccccgcgccctctgcctggcccctgttcctagatggtgggcatcgggacgtcggatgtggacctggacaaataccgccacacgttctgcagcctgctgggcagggatgaggacagctggggcctctcctacacgggtgcgtgaggcccagggtggggcggggccgagcctggagctcccgggctcactgcgaccctggctgcccccaggcctcctccaccacaagggcgacaagaccagcttctcgtcgcggttcggccagggctccatcattggcgtgcacctggacacctggcacggcacactcacctttttcaagaacaggaagtgtataggtgaggccgtcacaggacttgagctcctctcagctgtcaccccgagggaggcagccaccccgccccagcccaggggacactgaggttttctgaaagggttcctcccagaagcctgaggccccagggtcccagggggtgggacagtgaggccaggctggagtggcagggccagcgcgtgcaccctgccttgcctcagctgtgccagctgcccacccgggtgactgtagcgtgaggtctgaggggctgcgcccagtagctggccccttccctgcctggggttcaggctgggcccctcccttccaggtgtggcagccaccaagctgcagaacaagagattctacccgatggtgtgctccacggcggcccggagcagcatgaaggtcacccgctcctgtgccagcgccacttccctccagtacctgtgctgccaccgcctgcgccagctgcggccagactcgggagacacgctggagggtctgccgctgccgccgggcctcaagcaggtgctacacaacaagctgggctgggtcctgagcatgagttgcagccgccgcaaggctccagtgtccgatccccaggcagcgacctccgcccaccccagcagtcgcgagcctcggccctgccagaggaagcgctgccgccggacctgactgacttcccagtggaactgccttcttgggctgggacagcccctttcctctgtcccttctttctctgtcccttccttccagccacactccagggcggagttggatgaggcccgtccggagggagccatctcttgctcccgaggctgggacagtcctttctgtgggggctctagggcccctctgctgctgtgctgggtggggaagcggctgccctgagccccaggtcttgtgggaggctgcgaggacgagagcctggctggagcccgcgttgctgttcccacagggcctcggtttttcctaacttgctctgcatgctgtcagcggctgccccgccgtcatagacttaaaggactgcaataaatgtagagttgatgtctaacacccacatggcgtgagctgaaacgtatccgtgcagaggccgggcttgcgagcagcctgggccttctcccaggcctcactgcccctccacatccttgggagtcccctactgcttctggctgagggtgccacaccccaagcctccaggtggcagtggggccctggagctgccttctggtccctgccgagtgtgtgtgtgtgttgggggggcacagccctgctgctgagctcccctggggcctacgtgttcaggactcagcacaggaaccgccagccatctgccagccagaagcccctcttctcccagctacctaaaacttcccctgcaaccacccaccctccccctgaggtcagacctgctcagccagagaacccacccaggctgagggtccacatgtggctgggggtcctccccaaccgcccagggtgtctggtctgtccccaaggctgcatgctgtcctggtggtcccacgtgtggtcaggagcccaggtccagcaggagatcagggttggctgtggtcaggaagaggcagatgcggcgggagaggtcaggccccaccctgcggggacgcccgccttcactgggcggcacaggaaggtcggccaggaggcccatgcgctcccgctccgtgctgcaggcctccagcgcctaggagcaggcaaaggcatgagagggcgcctggggacggggcttctgcacctggagggcttggaggaggcaggggcccacctgctgcagaaggcggggggaggggaaggctgtgacaactgcatcagccacggctgggctgacccgactgaactgcctgatctgcctccgccaggccgcctgcagccctgcgccgtctcttgccactggctcgccggctgcccagcgccctgctgtgcagaaggagaaggcctgggattcccggtactgcctggggacagagagaagccttttagaaccgcatgtgagcagctcccaaaaggccggggaggcaccactaccttgaggtgatcctgccccccttcagccttggcatcacgcacttgaggggatactgggcgagagccttggtaacggcgcacacgtgccgactcagctcctgccaagaggccaccagtagcacgtccaggtttgcccagagctgcaggagtaccagggcctggggaggaggcaagctgatgggcacgagccagaggaaggctacccgggacacacagctgatagctgccccatgtaccacgctgggaaccaaacccagccagcagcccaatcactgggacccaggccacctgactcacccagctcagacaggccctcacctcttccacctccggccagctgacggccacctcggcaccggccaccttcgggctctctggctgctgtgtcccccgggaaacgtgctggcgagacctgagcagaggtgaccattcctccccgctccccatggggcctgccctgcccgagcttggcctctgccagagcccacctggagaagtgggatcagctgtgccacagcaaccccagaagtgtgcccacctcccctgaacccccgtcccagccagccctgctgtgggcatgagagtgagcggtaccacaggtaggcatccagcccgatgacagccaggtggggccgggcggtggtctcgggggagatccagggcacccagtgggttgggccagagatctgaagatgagaacgtgtggcacagttgttcacaggaggctgcggcctatggccatgggccaccaggccacagctggtttgcagaacagcaagcctgaaaaagagccagtggtgccgagaggagcctctgttccgttaccccttctgagaaaaccagctctgtgcctcccacgaggccaaagaggctaaggagaccctggagtggctgctcgggcacatgtcagttccattgagcccctcatcctggtccacctctgtactccagcctagctttgacctagcacaaagcagcagcttgagagacactgatcctgggacacagggacctggcagggggtctagcctaaccccacgctacctggcaccacagcacctgagcactgctccccgcaggcaggggccaggctgtctgctgtcagaggacgaagcctgcagcctactgcccggaccccggcctcctgacacttctcaggatcctctaggagcagctgtagcctccgcaggtgcccaggagctttctccatctcaccctagaaacctctacggctttggatcagagaggagtcctggcctgccccatgccccctccagccccgtctacaggggcagggaccggcggagcaggcgcctcccggctgggaacccacccctcctgattagagagggactactgccaccacccgagcacctgggtcagtgtggcgacgccctgcagaaactcctcgggctccagcagcagcagcaattcctgttcacctgcagcccacacttcaggaggcagctgtggggacatggggacgcgctgctgcctgtctcaaccccgggtgccccaggggccctgcctgggcagtccagcagcaaagcggttcgtggccccagccaagcccaggccctgacaggcctgctctacagaagcccagtgttccctttcctgccaaggccaagctcaggccaggtctctgtggccggcaggaatccagaccacagcctgaatcgagacggaaccttctccagccagctcggctctataccagcagaacggcttgggcacctccacttcccgttctccatccttgctttacccatccgcgagacgcgcacggcccagggcagctgcctcagggacagctccagggctgaaatcatggaagcaaaacagccaactcgcggctggccctcgggaacccgcgaccactcacgctgcgggggcaggggtcgggactcgctcgggtccaccgcaggctgcgggccgggcgctggggctcgatgcggcactcgcagcccagggcctccagggcctccatcaggacgtcggcaccggcgtcttccaggatggctgggaccgggggagaggagcgcggtcactgcttccttccaccctcgcgagcgccctacctgggcgggtggccggaccggggagtctccattcggcacaaacccccgactgggaggcgggcccggccccaggcccctcggcacgcgcgccccgcccagtcggacagagggcgccgcctggcggagaaaggcctttcctaccccgagtatcgcccgtgccctccgccgcacctgtgtccacgcacaccgcgaggcgcttcagsacctgctccggccgcagcagccgcaacgcctcggcagccgccctgcgctcacccgctgggtcccgggctctcgcggcggcctccgagccggcggagtcctcagcgtcggagtctgagatctcccaggttggaggtcgccgctgaccgctcccgccccgtccccggccccggccctggcaagagacccccgccctcccgggtccaacccgcgccatggccggaccgacctcttcctcgcttccggccgcgaccgaacactttagcctgggacaccggcctcttccggtgacttccggccggaccgctgaggacgcggacccgccatggcgcggaagaaggtgcgtccgcggctgatcgcggagctggcccgccgcgtgcgcgccctgcgggagcaactgaacaggccgcgcgactcccagctctacgcggtggactacgagaccttgacgcggccgttctctggacgccggctgccggtccgggcctgggccgacgtscgccgcgagagccgcctcttgcagctgctcggccgcctcccgctcttcggcctgggccgcctggtcacgcgcaagtcctggctgtggcagcacgacgagccgtgctactggcgcctcacgcgggtgcggcccgactacacggcgcaggtaggtgcgtgcaccccgtccgcaccccgcccstgcagccgcctggtctccccgcctcccctcctccctgcaggtttgcgtggctgaggctcccacctcctgacctcgggggccgagagctttgcgagctgaccccgcttccttctggctttgcagaacttggaccacgggaaggcctggggcatcctgaccttcaaaggtaaggctcgggagagcgggtgcccggcagttcgatgccgaccgccgacggcacagcaagtgtgtgcagacgcctctttttcttcatcagggaagactgagagcgaggcgcgggagatcgaacacgtcatgtaccatgactggcggctggtgcccaagcacgaggaggaggccttcaccgcgttcacgccggcgccggaagacagcctggcctccgtgccgtacccgcctctcctccgggccatgattatcgcagaacgacagaaaaatggagacacaagcaccgaggagcccatgctgaatgtgcagaggatacgcatggaaccctgggattaccctgcaaaacaggaagacaaaggaagggccaagggcacccccgtctagaatgccagaaccagcgggtggccttaggggctgtgaggcagtggggaccttattgatgaaagraaccgtctttgcgttacacccgagtctgcctctcggagcagggagctcaccttccgcgacgtgttctgagggtctgcatcttaggggggagggctggggcaaatcgccacctgtgcctttcctctggccctgctgcccccacacccaactccgagggcccacgctggggaaagcgggaagcgctcgctccctttcccccattagtgctctctctgcctggatcccggcagaagctatgaaagggaataaagagaaaagaagtacccagggtcgtggtgtctttgcgctctgtctttaggaccggggagagaagggctgacgctgtggtcgtggccctggccgggggggcgcggggggggcggggttcgggcggtgcggagcagggcgccgcgtgggtggaaccacctgggcgggttgtgggggatacagttagtgtccgagctgctggaggagacttggcctccgcagctgccctccggccccccacggctgccgggttccggggtgcaagtgaagcagcctccccgcggaggccgcagcgccccgaccaggcctctttaagcgcaggccccgccccgggcgccaccgccccgccccgcggatcccgctcccgcaccgccatcatgatctgcctggtgctgaccatcttcgctaacctcttccccgcgggtgagccgcgcggcgcgggccgggggcgggtggccggtgctgggccggcctgacggcccgtccccgcctgccccgcagcctgcaccggcgcacacgaacgcaccttcctggccgtgaagccggacggcgtgcagcggcggctggtgggcgagattgtgcggcgcttcgagaggaagggcttcaagttggtggcgctgaagctggtgcaggtgggggcgcggtgagcgagcgggggcgcggtgtggggggaaggggagcggggacctggggacgcctaggtgccgggtgcgggcgcaggcggcctgacccttccgcaggcctccgaggagctgctgcgtgagcactacgccgagctgcgtgaacgcccgttctacggccgccttgtcaagtatatggcctccgggccggtggtggccatggtgagtatccgggaagcgggcgggcggctccgggacccccacccccgcgtgataccgcgcccgttcctccgcacaggtttggcaggggctggacgtggtgcgcacctcgcgggcgctcatcggagccacgaacccggccgacgccccgcccggcaccatccgcggggatttctgcatcgaggttggcaagtaaggcccgccccggggacggtcccagccccgtccggcctccccctgttcagcctgcgtggtacccgtgccggaggtctctttcccacgctcacacgcgcctcttccgcgcaggaacctgattcacggcagcgactcggtggagagtgcccgccgcgagatcgctctctggttccgcgcagacgagctcctctgctgggaggacagcgctgggcactggctgtatgagtagcccggcagatgcgcgtcacagaggctctcacactccagcctcctccagggcccaggtgggcgggcttctggccccaccccacagcgcttggagcatccctttggacgggctgctgaacatccacctgtctggacgttgcatggagggtggcgcaggcctctccaatccctggcgtacagggtttcctgcccgaggagctgctccaggagcctgcgcggctcgcctggaaacgtgccaggacactgtcctggtgcccagcccaacgtggtccaacgtttttttataataaagtcctcgttttcgtttcggtttgggcccaggaacaggcagctacgacgttaagacatttattacatacagagcagatatgtgggtttgcttgcagggccaaagcctgaggagaatcgtcacccctcccccagccgccccactgctcagcccggagtcacttcgagatcctgggggaacagacgagggagcggacatacatcacagtggaggtggcagggtggtggggagaagccggcagcgcagcggctgcagccctcggtggccagcggggcttgtggggcagctccccaagatctgtgcttctctggttgggggtgggtgcgggggctgggctgccctcataagggcctcccagacaggagtgcagtgggcctggaaggtaggaataggccagagaggcccagctgggcagggagagcagtccagggtggcgtctgccctctgcgggcttggagtcggctgggggcggctccatcctcagccccacgggcctctgcttggtggcctctctgttgctccctgggagcaggccacagcgggcaaccctaggcacttagtagcgtgtctgggagctgggctccgtggagccccgtgcaggaggcaggccccgggagcacatcatcccccatcaacctgaggctgagcctgtgtcctaggactgatcccggagaggccaggggcctccccttcttcctgaggcctgggcctgccctggcagcctgagaaatcccaccctgggggcttctgggagggacaggactccagggcccactcctccaaggtgagtcttctgcccaggcagagcctggggggacacgggtcagaacggggctggcaagagcctgcctgcatgggcaggatggggtagcagtctctgttctcaagcagctgccccagggagccgggcctcgtgcttttatgccagttccctgggcaggggacagctggggtggggacagacaggatagaggcttgacgacggggaggccccagagaaggccggctggggtgcaggcacctgggcagcctgaggcccacctccctgggcaaaggctagtgcctggcccagctcccctaggcagagtgagggcccaggaggcagggtggccccatgagcagcatgcagaggtgggcccagggcaggcagcctcggcggcggggagcccctgcctcctccaggggtgctggggagtaggaggcccagggtagagccaggaccacctcggattctgcctgcgctgggcccaaggtgccctggacttgaggactctgggctggaagctggccaggagctgcccgggaaactgtcccgagagcatcttcccctcgggtggaagcacccctcccctcctcctcccagctgatccgcatccccgcactccctgcccgctggaggggccagactcaggtgaaagctgcaggttgagaggttagaagaggggcggcggcgcctggctggctaccccgcgggccgggcgggggtcaggtggtcgggggtcctatgtacaggtcgggccaggcagggcagcagcttcactcgggggtgtaggacacctgccacacgatgatgtgactgcgctctgccttggacagcacgggcttcacctggctcatgtcccctgcgccctcctccgtctcgtcgtcctctccgtctcctgcgggcaaagcagcagagtgagggccaggctccccccgcgcccaacctcagccctgtccctgggccccgctcaccaatgcggaagtcgatgtagccctccccgccgctcagcaccagcacgttccgcagcttctggccctcgacctccgaggcaggggcagctggcccagggccctcggctgggctgtccagcacactgccattcagggtggccagcacgttccctgggatggcagaagcgattcaggacagcggcctcctgggggaggcggcggccactggcatgcaggggatgtggatggcaggaggggcccagcctcacctggcaccgagacaaagaacttcacggcatcgcggtgcccatggaagcatagctgggcctgggccatggagcagtaggggatgaagctgctggccgccctgtcactgctgtcatcgccatacacgtggatgatgcccccgggacgggcgccctccccagaggtgggggatgtcttattggctgcagggagagaacccagaggcgctgagcccgcatacaggtggaggatgggagaggctcccgtgaggggacacgaggtggctgggcttacctcggagccccaggagctggcctcggtgcaggaccacagctggggacatgggaggagcatgggagaagaggagagcggtcagcgtaggggcagcaaggcaccctccaaggtggccctgcagagccaccccgtgaacccacgtacacctctggcagcaccactgcccctgcaggggtgcaggccactcactctctgtcagggggatggagatgaccactccgttgccggtgcccacccagagccggctgcccgcgacaagcagggccgtgatgcgtacgaaggagaaacccagcttgccagtgcctgtgggggagagcggtcagggtggctggccttgagccccccaccaccccacctggcgtggcccctcacctagcatcttgctgacgtagggctcaatgtccacgtcctgtagatgctggtgcgtgtgtgcatggtagagcctcagggtggagtccaggcggatggacacccatacgccatcgccgatccacgccagctgccgcacctggctctcccgccgcgggtgggcgtcaaatgacttctgtggagtcatggctgcccatcaacagggctggggagaggagaggaagtggggagccccaaacctgccacagctccagggccacctgcagtcccctcagacctcccagccagcgcctgctttgcgcctgttcaagcctgagtcataggtggtacaggggagatgggccccacgtagggcctcgtggacttccgtatggaagatgcgggagagctgctggccagcaggagcctcttcccctccccggggccctggccggcactcgcctctatctgcatggtcttgggctggatgacgtgcaccttgttcttgtagccacaccacacgcggtcgtacacaacagccatgcagcggatggagtggtgcgggtggcccaggtccattaggtgatagttgctcagatcccactggccatctggagggagccccggacacctgctcaggcctggccaggccccacctctgctcagggcatcgggttgagacacccactgccagactaaggagaggcctggaaccccgggagccccttggctaaacaatgccagggccatcagctgccacccacacaccccgtgctgccaggccccaccttcaccacggtggaagatggccagggtcccgtccgccagagccaccagcacacggcctttgacatgcctgaaacaggaatgcggtgagcctggtttgggccaggctgtgccagccccctccgccccgttcccccgcgccgcccggccctcggtctggggtcacccacaccaggctcagcacagaatccttcagcttgatggagtgcaggcacttcttccagttggccacagccgagtgcacatagagcctagggaaggaagcggcgatgggcgaggggctcacccaggaccctccctccaccttgccccgggcccttcctaccagccgttctgggctcccagccacatggtgggtgcagcactgctgcctgctcccgtggggtccccgctgggctctggctctggccgtgtgctgctgctgtcaggctctggcccgttctcgctgcaggaagaacggtggctccagggggggccacggagcacgcacctgccccaagaccccgaggcccttcccacctctgcaagccttccctctgctcctgccccagcccaagagctcacctgccaggctgggggccagaggacggggtcggggctgggtcagtgaagacgtgctctgtgagaggcccgggccgcaatgtggctgtctctggctcgctgggcccagggtctggcacctccgtggcctctgtggcctcctctgtggactgggacgggttgaccttcccgttggcgatggtggccacctcccctgtgttaggagaggtgagcttgggctgggcagaaacgtgggaatgaggggatgggggaaactcgcccaggactcaccctgccccttgtctagcactggggtgtcccctcgggaggagcagttgctccgcggcacgttgcagcgggtggcacagcccaccagggtgataccggccagcacgccatctgcgcccgggtcctctgggttcacgtcgctgtccaggaacatctccccgggagggtagtcgctgtcgctggccgctggggagagggacagcccgtcagcctgtgcgggggaacccactactgcaagggcgtgcccagcacttacac

SEQ ID NO: 98259 - DNA, 18177 bp, Homo sapiens
tccaggggcacggagcctgcagggcacagtggaggcggtggcgccatgtccgcaccttccactcccaccattggctcagctggacgcacccgaaccacccgtggccttagaggggattgaggcgctgccagacgatttccacctccagacccgcggccctcccagcaggctgggtcctgccacccgagagggccctgagaagggcgcgggcgaatgacctgcaggtctcagcggcatggcgtgtggcccgagaagagaggaggaaaccgctcccgtcccctcctctcccttgggcactgggggcatggaggtcaaacccgcccagggcagagatggaatgggaggccgcgaccccagcaccagcttgggacactcacctaagaagggcaccccggcgagctgggccagctcctctccgccgcccctggagaagacgctggtgcactcctaggagacggtggtgagcccagcactgcccaaagcccccaccggccaggtgctgcctcgccccctctgcaacccccgggactcaccgtgcagtgtgggcaggtgaagccgctcatattctccacgattcccatcacccgcaagcccgtcttcctacagaaggtcagctcgcgcctcacgtcccccacggacaccgcctgcggggcaggagccgaggccacggtcagccaggcgcaccggcagggacacccgcccagccctctgggaagccacccacagggactcgggaaggtgccgcagcgctacctggggcgtggtgaccacgagggcccccaggggctggtagggacgcagggcttctatggtggccatgtgctcatcggaggtccccgggggcgtgtccaccaccaggtagtccagctccccccaggccacgtcggacacaaactgctttatcagcgctgcaaagacggggcagacggggcggtcagggcagggcaggtctgcacacgtggccctgcgccactaagaaccagccaggtcaggccgaggggctgcagtccatcaggtgtcacttgccaccagcctccatcacaggctctcgggaggccctggcccgctgcaggagtgcaaagatggggccggggccattacagcgtccctttctgcagtgtctggcccctgcccacagagcccccgctgactccccgaggccccaaatcagaacacggagccaggaccctccaggcgtctgtacccacacatgggagcacccacattctccgtggtggatgccccactggtgcacccacagcctgcgcctcactcccaccagcctctccctgcctttgggggcgtctaatgccacctgctccagaggcaccagaaccccctcagctctgcccctatgacctgccacactggggcctcaggtccctgcatgccatggccagggtctcagcagaccccactccctctgaccgggagttggggacagctgtgtggcagcacggacccaactggagacacaccgccagcctgagccctgtgcctggtcgtgggtgtcatgtgcaggtccccaggaacaggcctggctgctgaagaggaacatttccacaggagaggccggcacggacgctaacccccttcaccaggacggcggacgcgccgcccggccgttaccgtttttcttggggcctctccacaccacggcctcgtccggcttctccagcaggaagcccacagacatgagcgagatgctctgctcccggtccaggaagacgggtgcccagccgcggtcgcactggtgcacagccctgccctgcgccccgagcatgcggggtatactggggccacacaggtccacatccaggattcccacctgcaaggagcggcacagcctaggccgggggcaccgccaggcctccacggggatgcgggcagctgcccggggctccgcccagtgaggggtagggcgctcaccttcttgcctgcatggcgcagtgccagggccagctccgtggagatggtgcttttcccaacgcccccctttcctgagaggaccaggatgatgtgcctgacgccggccaggtttccaggctctgggcggaaacacgacagagaaggtcagggctcctggtgcccactgtgcccacacacgcggggtcacccactgcctcttgcacccacgttctgagcggggcagtggtgaatcgccagacccagaggcagcccgtgccccacttcgccccgatgtaaagacctccaggcaggtcccctgcagccccagacccggggggaccctctaagaccacggcactccctgcacctgcctgaggcggcgctgctgagagtggaaactgcccaactcctctcgctgtgtgcaagggtgcatgcgttccttcgtgcgcgtgtgcaaacacacacgtgggtcacatgatcatgaaactgccagccccctgctatttctaacgggaaccaaacagactccactctttccccagccagtgcacctgggctcggcagaggcagcagagggcccagggtgggtggcaacaaccacgcgttgtcacacaccagcgtccccggctctcggtccctgcaatgtgcggtaagtgaggggagccggctgcttccagcacagctccagctcctcttccttccagggtcccatcctgtccctgccacacggcaggggctgctgtgtgcagataccttggcaaaacccctgcattctcaccccggcgccaccgctgaggccatgccccttgtctccagcaagctgctccatccccgacaggtccttggagggtgcatgtgaggggctcaacacatgatgcgtaaaacctgcccccttctgatccgcctctcaagggcacgttcaaaggctcccaagtccaaagcctcccggagaacctggcatgcaggcgggtcctcagacctacagaggctgcctgaggtctcctccaggggacgcggaaaaggcagccccagccccacactcctgcaaacacaaagccccgagaccacggcctcccggtcacccctggggcaataaaaggggttctgacttaaattacttcaacaccaagaggtaccagaagtggcccgtgcagagagggagcatgcacttctgtagctgccggggactctgtcaggcctgggtcctgactgccatgctgccatcagtgctggcaccagcggcagtgttaacccccaggggctctcctcgttggcagaggtgggggaacggtgcctgtctggtgtgttgggctgagcaccatggtaaatgcaggccttagtgtcaggaaccgggacaacaaccctgagggttcccccaagaacatttcacttctcagcaaactgaggcagctcctaagcagattgtcagcaaagcacagtcagcatgagcatgccgggtggggcagtggggctggaagtgcaggaaggaggcgaagcaccatctccccgaggaaggcgagtgcgctctccatggacaatgagtcccggtcagctttatgggttagcaaatccagatcattccacgtggtggacaaatatatttttacagtaaatgtatatttttattttgagagggggtctcattctgtcgcccaggctggagtacagtggcgcaatctcggctcactgcaacctccgcctcctgggtccaagcaattctcgtgcctcagcctcccacgcctcagcttccagagtacctgggaccacaggcgtgcgccaccatgcccagctaattttttttttttttcgtagagactgtttctctatgttggccatgctggtctcaaatctgacctcaagtgatctgcccgcctcggcctcccaaagtgctgggattacaggcatgagccaacttgcccagcctaggccttttgaatttttatgtgcatattttccctgtttaaagaaagcttggggccgggcgcggtgtctcacgcctgtaatcccagcactttgggaggccgaggtgggtggatcacctgaggtcaggagttcgagaccagcctggccaacatggcgaaaccctgtctctactaaaaatacaaaaaaaattagccaggcgtggtggcgtgtgcctgttatcccagctatttgggaggctgaggcaggagaactgcttgaacttgggaggtggagattgcagtgagccgtcatcgagattgtgccactgcactccagcctgggcaacggagcgagtctccgtctccccccaacaaaaaaacgaaagcttggactaggtgcagtgactcacgccagtaatcccagcactctgagaggccaaagtggaaggatcatttcggtccaggaggagttccgcaccactctcaataacgtattcagaccccatgtctacacattaaaaatgtagccaagcggggtggtgcatcctgtggtcccaggtgctcaggaggctgaggtgggagggtcgcttgagcccaggaggtcaaggctgcagtgagttatgatcgtgccactgcacttcagccttggcgacagttaagaccctgtctcaaaaaaaaaaaaaagcttctatcaatctcagtaatatccttactttgtagtaaatccgtcctgataataaggacaggcttttccaggcttctcctctggaataagactccagcactgggccaggcgccgtggctcacgcctgtaatcccagcactttgggaggctgagacgggcggatcacgaggtcaggagatcgagaccatcctggctaacacggtgaaaccccgtctctactaaaaatacaaaaaattagccgggcgtggtggcgggcgcctgtagtcccagctactcgggaggctgcggcaggagaatggcgtgaacccgggaggcggagctggcagtgagccgagaccgcgccactgcactccagcctgggcgacagaacgagactccgtctcaaaaacaaaagactccagcactcggtttctaatctgtcagagttgtgctgcaagaccttgctgtccgaggaatgttttccttttggtatcggactcgaggtctcttagaagataaatgcggctcccactactcaggagggcccacggcgctgatctggcgaacggatcgtccccactggtgtgaattctgtcccgcgcaacttacacttttctgaacactgagagcgccacttccacaaagaacttaaaagcatgtgagattctggcgtccgtcttactttcatgactgcgcgcgtgtgatttatttagagacagggtctcgctcttgcccgggctgcggtgcagttgcaaccgcgacctccaggatagcggggcccacaggcgccaccgcgcccgcctacaacgcggtgctcaacaaagttaactttaaaagctcccccaactccacgactcaggccctccgagatcacggagcttccacatcgaagcaggagcacgcgggaaacgaccctgtttagaaaatgcccgcgccgcggcctctggcccggcccagccacgccggccggtgatggtcgcaccggaggcgcgcgacgcagcgaggccgccccgggaagggacgcggcggggccccaagcgaggccctggagcggctccgcaccctggcccgccactcaccggccgccgcctccatcccgccgcctccaggagctcgcggctgcagtccgcttacgcccgcgggccgtcagcctcccagctagagcgaagggccttccaaccaatgggcagtgcgtgcccgcccgtggctcttcttgacaggcctaatcctgctgtcccagccaatcagcttgccggaggagctctcgatccggtcccgcaggttccggcgcagacgatgacacggacctactttccggtcaacgcggcctgcggtaccacctcccacccgggtccaatgtgcgcgcgagctttgtctccaaccgcttgggaactgaccaataggaacgttggattaggactgacagttcctgaaacctctcggcaatagctttgtcacccgactcccgccccctctcccgaagctccgagacaggtgtgcccgcccctcgccgccggagccaatgggcgcagggggcggggattgtttacgtctcgctccggggcggaaagtgggtcagggccgggcyggcggagcgcgcagcgggggctgcaggtgagtggcggggcacgggccgacgtctcgggctctgggcgggcgcgctgaccttgcgggcgcggcggtagcagcgcggccagggcgccgcctttgttcctctccggagggccgcgcccgagagaggcttccccggtgccgccgactccggaacccgcgcgcccgcgggagggaacagccaggccgggctgccgccggggagggcggctcccgctgcacacgcgctcgcctggggctgggcagggttcggcggtccgggcgccgcgatccgccccggcctccctggaaccccacccggggcccagcgggcgttgccagccgcgagcccggcgcaggggtcggccctggaaggctaggcgggaaccccggagctggcgagggaggtgccaggcaggtggcctgggaagcgcagacctggccctcgcagccttttgcattttataccataacagcggccagcgctgagcaggttttaagatttgtgtttcacgaggagccctggcggtagcgagcggaggggaaggcgagctgcgcggcccargagacggtggcgggaggaggatgcaggcgggtgcggcggtcgggccgggsgtgaggggaaggtgtcggggagcggtcacggtgcttctggcatgaggaactgggaggccggagatgccatttgtcaaaccggacgacagaggaggagcgagtggaggttttagatgcctgcgggacaggcgggcggggcagccaggttcgtgaggtggaaccggagagaggggctgggattcgcattccggagtcatgggtgtctgggtggcgtttcacaggatctacctgggttttattgagctgctcagatcctggrgtgaggtacgggctcctgaagcgttctggagccctggctgggcaccggtgcggcccctgcagtccccactttgagtgggtccgtggcccagcctggaagctcagggctgggagtgctgtgagtcttcctttgcccagagcctgtgttttcttctagattctttccaccatggccagacgcccccggaacagcagggcctggcacttcgtcctgagtgcagcccgccgagacgcagatgcccgggccgtggctctagcaggctccactaactggggctacgactctgatgggcaggtaggttccagcgggcgaggcggacgtggctggcctaaggtgtggagatgccctaggcaggcaggcagacattacctgaacacggaatcagtcggagaaaaagatgcttctgaggctagaggaccagtccaaacctgggcctgtctcctggatgcaccgcattcagtaagactctttaatttggcaaaggacacacacagcctcaggggtgacaggacctcagaacacactgcattcttcactgtgctttctcctctgaaacacatggtgcatggagaggttggcagttgcttttggttcattcaacagaaattctccactacggggctgggcactgtggctcacacctataatcctagcactttgggaggctgaagctggaggaccacttgagcccaggagtttgagacctgcctgggcaacatggtgaaacactgtctctacaaaaatttaaaaaatgtgtcaggcgtggtggcacgtgcctgtagtcccaacgactcaggaggctgagctgggaggattgcttgagccagggaggtcaaggctgcagtgagccgtgatcacaccagtgcgttccagcctgggtgacagagctagaccctgactcaaaaaaaacaaaaacaaaaaaattctttggtttacccagcccatttctggaggtgaccattgttaacttgctggttgtcttaccagacgcttcttctgccagtacaaacgcatactctttgttcacatatrtgtgtgttaaaaaacaaacaaacagaaaaaccctgatccttgaaggtaaaaatttctgcacttgctcagsgaggccaggaacctgaaggtattcagaacagctcargtgtttgtctgtctgcagcccaggtgatctgacatgcttgtgggctttgcaggcagagctacctgcccccatggcccytgacccccaccttggcagaccctgagggcagctgcctggcctgacggggcgcagtgaggctgggaggggtgggggtccctgtggggggtgatttcccagtcggtttcctgagatctccctcggaccagagcaggagtgtggctgcgcctccctgccccacttccagctaccacaggtcatgtgccctggagcagtctctcctggcctcgcagggtcatggctgtgggacgcgggcgtgtccacaggccaggccagtgtctgacacacgcatgctgcttgtcctctgtcaccatgggccgtgtccttccggggcggctgcttgtgtgacctggtgctgctctctgctgtcacagctcccctgcgctgctgttccggctcagccaggtgtcctgggaggggtgggctcctctcctctgagtgaggactccctaagcccggtgggtccattaggccttgggggcaaattgggaaacagggtccttacccaccgggtgggggccgtcctgaggtctcctggagctccctgctccagccagggagaggcccccacctgccttcccgcccgcctccagctcctgcaggtcacatgcctgagcctcacaggctcgtggctgtgggatgcaggcgtgcctgcgggctcggcagtgttcgacacatgtgctgcttgtcctgtgtcaccaaatgggcctgcagtctgttgtgggcaggaggtaggcagtggcttcagtctttctccttctccagggaacccggccctgggcctgcagtgcaggtgctcagttctgtgcccgggctcctgactcagggggtctaccctggctctggggacccgcacttctaggcagtggggtagagttgtctgggcctgccttgtctgtggggtggggccatcccctccagaaaggacagtgtcctgccctgaagctggctttcgataggtccacgttcacctggaagctggtggcgcccatgtcatggtcccctgtggcttctcctggggatcacatcatctctctggaccagccctcaaccctcactgtcacaaggcctctgccacaggccccccgccaccacttagcactctccctgctgaccccctggtccattcagcccctgggtggcccccacacagtctgtgacagggaggaggctgggaggggcactgcctcccacaaggagctcacgttctggtgggaggaggccaagaatcaggaccaaggagaacttcagtgaagcaaaagaagaaaaatggaacaggggtgaaggggctggagaagcctcagggaggtgacagctgaaacctgcaccaggaggggcggggcctgtagtgggcactgggcagtaggaccctgtggtgagccaggtctgctcaggtaacaggaaggtcgttgggccacagtgtggtggggactgccctgaggccgggtggctgcagctgggcctggtgtgggggtggtggccttgcctgggggcccctgcagggctggcctagcagggaaggtgtccacaccatctcagctctgggcaggtggggtggacctggggcttatccaccgtctagaaaccacttggaggccaggcagccttggctactgctctgtggctgggcctccagggccctcctggtcatgcagaatggggcagagccggagcccgttgggagggagcctgggctgtgcgctcggggtactgtgaagtccctggaggcctggacccccatcctttcctgggtgggtcagggacagggtgggacagggacagagggcaagggtgagagggtagagagcgggcaacaggtagtaacagccggcccttctctcccagcacagcgactcggactccgaccccgagtactccacgctgccgccatccatccccagtgcggtgcccgtgaccggcgagtccttctgtgactgtgctgggcagagcgaggcctccttctgtagcagcctgcactcggcccaccggggcagggactgccgctgcggagaggaagacgagtgtgagcgtggggcccagcccctgctgggactgcactgcgggcgggcctgggggtgggcagggcagagccccatggagctctcagggctgccccagcctgggcctctcttgcagatttcgactgggtctgggatgacttaaataagtcatcagccaccctgctgagctgtgacaaccgtaaggtcagcttccacatggagtacagctgcggcacagcggccatccggggcaccaaggagctgggggagggccagcacttctgggagatcaagatgacctctcccgtctacggcaccgacatggtaagttgcttcggcccagggtgcttctggggaacctggctccggcagcccagycccgcgccctctgcctggcccctgttcctagatggtgggcatcgggacgtyggatgtggacctggacaaataccgccacacgttctgcagcctgctgggcagggatgaggacagctggggcctctcctacacgggtgcgtgaggcccagggtggggcggggccgagcctggagctcccgggctcactgcgaccctggctgcccccaggcctcctccaccacaagggcgacaagaccagcttctcrtcgcggttcggccagggctccatcattggcgtgcacctggacacctggcacggcacactcacctttttcaagaacaggaagtgtataggtgaggccgtcacaggacttgagctcctctcagctgtcaccccgagggaggcagccaccccgccccagcccaggggacactgaggttttctgaaagggttcctcccagaagcctgaggccccagggtcccagggggtgggacagtgaggccaggctggagtggcagggccagcgcgtgcaccctgccttgcctcagctgtgccagctgcccacccgggtgactgtagcgtgaggtctgaggggctgcgcccagtagctggccccttccctgcctggggttcaggctgggcccctcccttccaggtgtggcagccaccaagctgcagaacaagagattctacccgatggtgtgctccacggcggcccggagcagcatgaaggtcacccgctcctgtgccagcgccacttccctccagtacctgtgctgccaccgcctgcgccagctgcggccagactcgggagacacgctggagggtctgccgctgccgccgggcctcaagcaggtgctacacaacaagctgggctgggtcctgagcatgagttgcagccgccgcaaggctccagtgtccgatccccaggcagcgacctccgcccaccccagcagtcgcgagcctcggccctgccagaggaagcgctgccgccggacctgactgacttcccagtggaactgccttcttgggctgggacagccccyttcctctgtcccttctttctctgtcccttccttccagccacactccagggcrgagttggatgaggcccgtccggagggagccatctcttgctcccgaggctgggacagtcctttctgtgggggctctagggcccctctgctgctgtgctgggtggggaagcggctgccctgagccccaggtcttgtgggaggctgcgaggacgagagcctggctggagcccgcgttgctgttcccacagggcctcggtttttcctaacttgctctgcatgctgtcagcggctgccccgccgtcatagacttaaaggactgcaataaatgtagagttgatgtctaacacccacatggcgtgagmtgaaacgtatccgtgcagaggccgggcttgcgagcagcctgggccttctcccaggcctcactgcccctccacatccttgggagtcccctactgcttctggctgagggtgccacaccccaagcctccaggtggcagtggggccctggagctgccttctggtccctgccgagtgtgtgtgtgtgttgggggggcacagccctgctgctgagctcccctggggcctacgtgttcaggactcagcacaggaaccgccagccatctgccagccagaagcccctcttctcccagctacctaaaacttcccctgcaaccacccaccctccccctgaggtcagacctgctcagccagagaacccacccaggctgagggtccacatgtggctgggggtcctccccaaccgcccagggtgtctggtctgtccccaaggctgcatgctgtcctggtggtcccacgtgtggtcaggagcccaggtccagcaggagatcagggttggctgtggtcaggaagaggcagatgcggcgggagaggtcaggccccaccctgcggggacgcccgccttcactgggcggcacaggaaggtcggccaggaggcccatgcgctcccgctccgtgctgcaggcctccagcgcctaggagcaggcaaaggcatgagagggcgcctggggacggggcttctgcacctggagggcttggaggaggcaggggcccacctgctgcagaaggcggggggaggggaaggctgtgacaactgcatcagccacggctgggctgacccgactgaactgcctgatctgcctccgccaggccgcctgcagccctgcgccgtctcttgccactggctcgccggctgcccagcgccctgctgtgcagaaggagaaggcctgggattcccggtactgcctggggacagagagaagccttttagaaccgcatgtgagcagctcccaaaaggccggggaggcaccactaccttgaggtgatcctgccccccttcagccttggcatcacgcacttgaggggatactgggcgagagccttggtaacggcgcacacgtgccgactcagctcctgccaagaggccaccagtagcacgtccaggtttgcccagagctgcaggagtaccagggcctggggaggaggcaagctgatgggcacgagccagaggaaggctacccgggacacacagctgatagctgccccatgtaccacgctgggaaccaaacccagccagcagcccaatcactgggacccaggccacctgactcacccagctcagacaggccctcacctcttccacctccggccagctgacggccacctcggcaccggccaccttcgggctctctggctgctgtgtcccccgggaaacgtgctggcgagacctgagcagaggtgaccattcctccccgctccccatggggcctgccctgcccgagcttggcctctgccagagcccacctggagaagtgggatcagctgtgccacagcaaccccagaagtgtgcccacctcccctgaacccccgtcccagccagccctgctgtgggcatgagagtgagcggtaccacaggtaggcatccagcccgatgacagccaggtggggccgggcggtggtctcgggggagatccagggcacccagtgggttgggccagagatctgaagatgagaacgtgtggcacagttgttcacaggaggctgcggcctatggccatgggccaccaggccacagctggtttgcagaacagcaagcctgaaaaagagccagtggtgccgagaggagcctctgttccgttaccccttctgagaaaaccagctctgtgcctcccacgaggccaaagaggctaaggagaccctggagtggctgctcgggcacatgtcagttccattgagcccctcatcctggtccacctctgtactccagcctagctttgacctagcacaaagcagcagcttgagagacactgatcctgggacacagggacctggcagggggtctagcctaaccccacgctacctggcaccacagcacctgagcactgctccccgcaggcaggggccaggctgtctgctgtcagaggacgaagcctgcagcctactgcccggaccccggcctcctgacacttctcaggatcctctaggagcagctgtagcctccgcaggtgcccaggagctttctccatctcaccctagaaacctctacggctttggatcagagaggagtcctggcctgccccatgccccctccagccccgtctacaggggcagggaccggcggagcaggcgcctcccggctgggaacccacccctcctgattagagagggactactgccaccacccgagcacctgggtcagtgtggcgacgccctgcagaaactcctcgggctccagcagcagcagcaattcctgttcacctgcagcccacacttcaggaggcagctgtggggacatggggacgcgctgctgcctgtctcaaccccgggtgccccaggggccctgcctgggcagtccagcagcaaagcggttcgtggccccagccaagcccaggccctgacaggcctgctctacagaagcccagtgttccctttcctgccaaggccaagctcaggccaggtctctgtggccggcaggaatccagaccacagcctgaatcgagacggaaccttctccagccagctcggctctataccagcagaacggcttgggcacctccacttcccgttctccatccttgctttacccatccgcgagacgcgcacggcccagggcagctgcctcagggacagctccagggctgaaatcatggaagcaaaacagccaactcgcggctggccctcgggaacccgcgaccactcacgctgcgggggcaggggtcgggactcgctcgggtccaccgcaggctgcgggccgggcgctggggctcgatgcggcactcgcagcccagggcctccagggcctccatcaggacgtcggcaccggcgtcttccaggatggctgggaccgggggagaggagcgcggtcactgcttccttccaccctcgcgagcgccctacctgggcgggtggccggaccggggagtctccattcggcacaaacccccgactgggaggcgggcccggccccaggcccctcggcacgcgcgccccgcccagtcggacagagggcgccgcctggcggagaaaggcctttcctaccccgagtatcgcccgtgccctccgccgcacctgtgtccacgcacaccgcgaggcgcttcagcacctgctccggccgcagcagccgcaacgcctcggcagccgccctgcgctcacccgctgggtcccgggctctcgcggcggcctccgagccggcggagtcctcagcgtcggagtctgagatctcccaggttggaggtcgccgctgaccgctcccgccccgtccccggccccggccctggcaagagacccccgccctcccgggtccaacccgcgccatggccggaccgacctcttcctcgcttccggccgcgaccgaacactttagcctgggacaccggcctcttccggtgacttccggccggaccgctgaggacgcggacccgccatggcgcggaagaaggtgcgtccgcggctgatcgcggagctggcccgccgcgtgcgcgccctgcgggagcaactgaacaggccgcgcgactcccagctctacgcggtggactacgagaccttgacgcggccgttctctggacgccggctgccggtccgggcctgggccgacgtgcgccgcgagagccgcctcttgcagctgctcggccgcctcccgctcttcggcctgggccgcctggtcacgcgcaagtcctggctgtggcagcacgacgagccgtgctactggcgcctcacgcgggtgcggcccgactacacggcgcaggtaggtgcgtgcaccccgtccgcaccccgcccctgcagccgcctggtctccccgcctcccctcctccctgcaggtttgcgtggctgaggctcccacctcctgacctcgggggccgagagctttgcgagctgaccccgcttccttctggctttgcagaacttggaccacgggaaggcctggggcatcctgaccttcaaaggtaaggctcgggagagcgggtgcccggcagttcgatgccgaccgccgacggcacagcaagtgtgtgcagacgcctctttttcttcatcagggaagactgagagcgaggcgcgggagatcgaacacgtcatgtaccatgactggcggctggtgcccaagcacgaggaggaggccttcaccgcgttcacgccggcgccggaagacagcctggcctccgtgccgtacccgcctctcctccgggccatgattatcgcagaacgacagaaaaatggagacacaagcaccgaggagcccatgctgaatgtgcagaggatacgcatggaaccctgggattaccctgcaaaacaggaagacaaaggaagggccaagggcacccccgtctagaatgccagaaccagcgggtggccttaggggctgtgaggcagtggggaccttattgatgaaagaaaccgtctttgcgttacacccgagtctgcctctcggagcagggagctcaccttccgcgacgtgttctgagggtctgcatcttaggggggagggctggggcaaatcgccacctgtgcctttcctctggccctgctgcccccacacccaactccgagggcccacgctggggaaagcgggaagcgctcgctccctttcccccattagtgctctctctgcctggatcccggcagaagctatgaaagggaataaagagaaaagaagtacccagggtcgtggtgtctttgcgctctgtctttaggaccggggagagaagggctgacgctgtggtcgtggccctggccgggggggcgcggggggggcggggttcgggcggtgcggagcagggcgccgcgtgggtggaaccacctgggcgggttgtgggggatacagttagtgtccgagctgctggaggagacttggcctccgcagctgccctccggccccccacggctgccgggttccggggtgcaagtgaagcagcctccccgcggaggccgcagcgccccgaccaggcctctttaagcgcaggccccgccccgggcgccaccgccccgccccgcggatcccgctcccgcaccgccatcatgatctgcctggtgctgaccatcttcgctaacctcttccccgcgggtgagccgcgcggcgcgggccgggggcgggtggccggtgctgggccggcctgacggcccgtccccgcctgccccgcagcctgcaccggcgcacacgaacgcaccttcctggccgtgaagccggacggcgtgcagcggcggctggtgggcgagattgtgcggcgcttcgagaggaagggcttcaagttggtggcgctgaagctggtgcaggtgggggcgcggtgagcgagcgggggcgcggtgtggggggaaggggagcggggacctggggacgcctaggtgccgggtgcgggcgcaggcggcctgacccttccgcaggcctccgaggagctgctgcgtgagcactacgccgagctgcgtgaacgcccgttctacggccgccttgtcaagtatatggcctccgggccggtggtggccatggtgagtatccgggaagcgggcgggcggctccgggacccccacccccgcgtgataccgcgcccgttcctccgcacaggtttggcaggggctggacgtggtgcgcacctcgcgggcgctcatcggagccacgaacccggccgacgccccgcccggcaccatccgcggggatttctgcatcgaggttggcaagtaaggcccgccccggggacggtcccagccccgtccggcctccccctgttcagcctgcgtggtacccgtgccggaggtctctttcccacgctcacacgcgcctcttccgcgcaggaacctgattcacggcagcgactcggtggagagtgcccgccgcgagatcgctctctggttccgcgcagacgagctcctctgctgggaggacagcgctgggcactggctgtatgagtagcccggcagatgcgcgtcacagaggctctcacactccagcctcctccagggcccaggtgggcgggcttctggccccaccccacagcgcttggagcatccctttggacgggctgctgaacatccacctgtctggacgttgcatggagggtggcgcaggcctctccaatccctggcgtacagggtttcctgcccgaggagctgctccaggagcctgcgcggctcgcctggaaacgtg

SEQ ID NO: 98260 - DNA, 13706 bp, Homo sapiens
gccgaggagaagagcagcaggcgtgtagggtccgggtggaaggccactaggctgtgggcggacgggacaggatgggtgagctgtgcagcctgggtggtgcctctgccctccccctccaccttccaactcactgcacgacaccgggcgagcctcggaagtggtgtgtcccgtagtgccgcacgatgtcccagacgcgcacggccccatcacagccacctgcggggaagcaaggtgagggggtggaatgcccaaagcccctgcatctgtgcccacgacccacctgcacggcagggccctacctgtggctagcagagtggaggtggggtcgaaggccatggtggccacgggggccgtgtgtatcgccttccacaggcgggtaacgctgccctcttgccaggcccactgagccagcagcaatgcccgactggctgtcaccagcacctgggggagggtacaggtcagcagaggggcagcaataccctgctcacatcttcctggactcagtctgggagggaggcgctggagcgggtcccctccaggccccgccccacatacctcgttgtcagggctgaggtcaaaggcagtgatgtcctcctggtcctcctaggagaaagagtggtgtgccgagcacggtgtgagtgggctgccctctccacttgcccctcacccacccaggctgccctcacctgctccagactccgcagcacggcccccgaggccacttccagaatgttgactctggtgccacagacgcagaagaggtgctggccagtctggtccagctggggacagagaggtctcagccaggcaacattcagcaccccccgcggcctctggctgcccgccccactgcccttccccaggctggtacctgtgcttttccgcccttgtagaaaggctcaattttgcgctccacagcatagctggaaggagagcgggaggcgaatgagcaccacccaccccctcagtccccagggccccgccctgtgctaggtgctcctctccaagtgaccccaatggcccctgcccttgagtttctgggcaacagcagggacagggcatggggtggaaccagcagtactgcagggggctgtagctaccgtcgtcactgagaagtagagacccgcagctggctggtgatccctgaggcagtagggggtgggcctgtgtcaggtggagtcagcccaacagcccagggcttccagggattccccagtgagagccagggggctccttgggaacacccctgccggcggtgggtggccaggcctgggtagccagcccagagcacatcctcccagtgtcttcatccctgaggtctggcatacctcttcccctccctgactcctctctccatccccaggcttgcccagagcccgggtcccacgagcagctgtcatttctgtgacctcactcgtgccccttctccttccttctccactgcctccacctggtccagcccatcacagtctctggccagccactctggcctcttcactggaccccctacctacctctttttacttatttattttttgagaaggggtctcgatctgagaaggggtctccagcccaggctggagtgcagtggcacgatctcagctcactgcaagctccacctcccgggttcacgccattctcctgcctcagcctctccgagtagctgggactacaggtgcccgccactgcgcccagctaattttttgtatttttagtagagacggggtttcaccgtggtctcaatctcctgacctcgtgatccgcccgcttcggcctccaaaagcgctgggattacaggcgtgagccaccgcgcccggcctcccctacctacctcttaaccctgctgccaggtacctttcagaacataactgaagatgtcactgccctgcgttagcccctcccttctgcccacacacctcccagaccttgcccagaagagcctctgccacccttgcctctgctttctttccttctcatggcccacagtgcaccccactgctcctgtcccagcctctgggacgggtttcctatcttccccctattccctgtacgcggcctgggcttctcttcccagatgtcaaggcctggctcactgcgcttctggaagcctgactgccaaaacgaaagcggcccctcagcccccgcacccagttgaccctcccacgacggtgctgccagcctgggactttcctttaccagtgcttggcacaaccaaagccccacagccgccagtggaaacgataatcccatgaggctgcgctgccagggcgggggcaccagcactgctgttcggcaaaggcttggggagtgacggggcacagcactcagggcctcctgggcttctgcggacccgcccctctcctgcattctccctgctccctggagaagacggatcgcggatgaaaggtccccaggccgactgctcagaggtggttcttcgcccccgccgcctcccgggaccagccccgacctaggctcagccctctcctcccctcatcgggacttctggtccccactccaccccatagccggcttctcgatgagcccacgctgctgctcccggcggccgggctccgatcgccgtcctccccgagagcagccggggccggctctcccgcctagtatcaccgcagcctccgcgaccccgcgggccggcgcacacacagcctctcgcctccacggaccccaatgcgtgcccaccccacgcgcgcctccgctatgccggctgcaaacccagctccctccccgcacggccccagagctccgggctcacttggtcttgaagcggcccactccggccgcggtctctgccatgttgccgccgccgccgctccagctgaaacctgctagggtcccggcagccaccgccgcgtgagggaggttagcaccgaactcttcacagaacgccacactcccggcgcgctgcgatggcgtcaccgcgcgcgaccactgtgacgtccccgccggcgccgcgcacttggcgccatctttgcttcgggcagtggcggctgcatcgggaagcggaagcgggcggagacgtttccggcctggagggagggccgtgagctgtgagggtgcttcgcgggtcggtgggggtagaccggcggatgtggcatcgctggtggcctggctctttgataccagtataaaaaggcatttgtagccagcgtttactcctgcttttcggcgttctgggatgtgggggtaccagctgtcgggtgcggtccgtgcgtagagccgtcaacctgaccctgcccctgggctcgcagtgtggctcttgataaataacgtaggtaaatgaataaaccgggtaatctcaaaggcattcatgtattgagcaccttctgtgtgcaaagcactgtaatcggcacttggcggacaccagagaagaaacagaacgggcgacgagtgatagttgctgagcgcgatggaaaaaggaggagggccgggcgcgttggctcacgccagtagtcccagcactttgggaggccgaggcgggtggatcacctgaggtcggaagttcgagaccagcctgaccaacgtggagaaaccccgtctctactaaaaacagaaaaaaaaaattagctgggcgtggtggcacatgcctgtaatcccagctacttgggaggctgaggcaggagaatcgcttgaaccccggaggcggaggctgcagtgagctgagattgcgccactggactccagcctgggtgacagcgtgagactccgtctcagaaaaaaagaaagaaagaaagaaaaaaaaacagaagggagggagcggaagggaggaaggaggaggctgtattgagaaggtgacgcctgagcagacacaagttcgcgaagcagggagccctgtggaacgaatggtgttgagaacagccagggcacaggcctaggactgggggtgccaagcattgagtagcaacaagccgggtggctgcagggagtgggtgcagagggcagagggcatgcagttgcctgtgcgccgtggcgaggagttagcttttactctgagttcaaggttttgagccatttgtgctactggctctgaagctggtagaaagtaacagccaggccgggcgcgatggctcacgcctgtaatcctagcactttgggtggccgaggccggtggatcacgaggtcaggagttcgagaccagcctggccagcatggtgaaacccagtctctgctaaaaatacaaaaattagcctggtgtggtggcgggtgcctgtaatcccagctactcgggaggctgaggtaggagaatcgcttgaacccggaggcggaggttgcagtgagccaagatcgcaacgtcactgcactccagcctgggcgatagagcaagactgtctcagagaaaaaaaaaaaagtaactgggccagtctgggcatcatggcgagaccctgtctccacatacacacacacacacacagaaaatttagtaggggtggtggtgtgcctgtagtcccagctactctggaggctgaggtgagagggctgcttgagcctgggaagctgagtttctagtgagctgtgattgggcctctgcactccagcctgggcaacagagaccctatctcaaaaaatagaaaagaaaaaaatgaaaaaacgaaagtaactgagaaggagaactgagaagtatgatcagggaaaatctctgagaggagagatatttgagggaaagaaagtaggccatcatggtggctcacacctgtgatcccaacactttggaggcaggaggatcacttgagcccagaagtttgagaccagtctggataacacagtgaaaccccatctctaaaataaacacaaaaattagccggcagtcgtggtgcgtgcctgtagtcccagctactcaggaggctgaggtgggaggattgcttgagcccagggaggttgaggctgcagtgagccgtaatcacgtgactgcactccagcctgggtgccagagcaagacccagtctcaaaaaagaagaaaaaggtattctgtctatggagtagccattcttgtattccccttatttatttatttttatttatttattttttgagacagtctgggtctgttgcccaggctggaatgcagtggcgtgatctcggctcactgcaagctccgcctcccgggttcacaccattctcctgcctcagcctcccgagtagctgggactacaggcgcctgccaccacgtctggctaattttttgtattttttagtagagacggggtttcactgtgttatccaggatggtctcaatctcctgacctcgtgatcggcccacctcggcctcccaaagtgctgggattacaggcgtgagcccccgcgcccggcctcgttttttgagacggaatcttgctctgtcgcccaggctggagtgcagtggcacggtttccgctcactggaagctccgcctcccgggttcaggccattctcctacctcagcctcgcgagtagctggggctacaggcgcccgccaccatgcctgactaattttttgtattttttagtaaagacgggatttcactgtgttagccaggatggtcttgatctcctgaccttgtgatccgcctgcctcggcctcccaaagtgctgggattataggcgtgagccaccgcgcctggcctatttattgatttatttttatgagacggagtctcactcttgtcgcccaggctggagtgaagtggtgtgatcttggctcactgcaacctccacctcccgggttcacaccattctcctgcctcagcctcccgagtagctgggactacaggcgcctgccaccacgcccagctaatttttgtatttttagtagagacggggtgtcgccatgttggtcaggttggtctcgaactcctgacctcaggtgatccacccacctcagcctcccaaagtgctgggattacaggcgtgagccacccacgcccggcctccttcctttgaaaaagaaaagatgaaagagagcaggcaaatgcctggagagggcagcagggatgcaccggtgacagttgtgagggccgcaggcacagaggcaggcaggccgggggtctgcttttatttacctatttacaaggtaygttggccctgggctcccccaccacctcagccccaacgttgccttctggggcagcctcggcctcctcctgtggggcaccctccagcagagcggtgtcttcctccaggaagttgctgagctccgccagctctctacgaacgacactggtggcttggtccagccagcgcacacgccgcaggagggacagcagcaggggccgacggcgctcctggcgcacgctccaggcrttgtgcagctcccggtagcagttgtggcgagcacgytcggccgggtccagggtggccccgcagcccagggggcagcgctgctgggacccttgctggcaatgctgcygstgctctgccagggtcccaygcggmacctgcgaggtgcagccctcgttggggcaggccgttagctcaaaggggcatgagtcctggtgccccttrcgatgggccagggggcatgtcactatgcagccagcgtcggcgttcttgcactgagggtgaaggagaacgtgtgaagaaaccgggcaggacacccacggaatcccccacccctggctttccattcgccaggaaccagggaaccgggagcctcccacgcttttctgactctggtgagttggtggagagaacactggggcaaatgcctagacgtgggaagaagctagaagttccaggggagagggtgaggcctgagtcttggggaactggaaggtacacagttgggttggtctggtgagtggtatggatgccaggctttcctttttaacctcggtttacccatctgtaaaactaggggactagagagtagtggcaggcacactgggcacttgatcctctaaaaatcctctgtaatctccattttaaaagtcctctaaaatctccattttctaacccaggggcttggaaaagttaggtgacttgcctaaagtcacacagcaactaagcagtagagccacgatccaaactcagctatgtctggtcrtcccaaggctgcacttgtttctctctgaagatgggattctcctgccttctctcctagccctgccccacccctacaagggtgagaagggttgagggtcaggggagtgggtactttgagctaccttgacttccaggcggccaatggttttccggagtttattcatgtggacaayctttttccttttcacctctttcctacagcacggacaggtcttttgtctggaaggaggcatgagtaggggtgagtgttgggagtgggaagggagccctggtcaagccctcactcggtgacccaggtggtcccttcattagctggatgaggcattagggcatattacagggcgctctcagctctgagggtggggccggggtctgcagacactactgagtgagggtacrcacattttagtttagggagatttggtggctgagtcttttggctgactttcccctctgttctgggccacagcaatggcccccagtctcactcctgccctcccagccccttgggtacccgctggcacctggctagccaccggaggatgcactttttgcagaagatgtggctgcatggcaaccttgctggcctcttgagaaccccatggcagacggagcacacgaagttgctgtcaggagggctggcgaagaggttgagatcatacccgccaccctgcaaaggccaggtgtcagcacctggctgggacagtgatccagtccctggtccacataccgagcaagagagcccagcaagcttttggcagggaggtgggccacagaacttcaagtaaaggggttggctcagcgcccactttgagggggcagctgtgggggttagggccccccaccccaggactactaatctctggctggagacgggggccttagcctggaattagacctagccagagccttccagaaggtttccttgtaccatatgggggtctgcaacccattgcccaccctttccgagtggagtggggtcgatccctggacaactgggcaggtttctggagttgggcacacatctcagggctggaagcaagagggccccaggctcaccatgatctgcgtctagacagcagctccacaggcccccagagctcaggagcctgcatttcacagtgggtgtgggctgacatcacaatagcattgtccagctcaagccagtcacaaccctggttcaggacccagagaccccgtacagcccagcccttgcccccttctctgaaggatcacaggtagccaggcgcggtggctcacacctgtaatcccagcagtttgggaggccaaggcaggaggatcacttgagcccaggagaccagcctgggcaactcagtgagaccccacctcttaaaaaaaaaaaaagccatacggctagctgcagtggctcatgcctgtaagcctaacactttgggaggccgaggcaggcagatcacttaaggtcaggagttcgaaccagcctggccaacatggtgaaaccccatcgctactaaaaatacaagaaaattagccaagtgtggtggcagttgcttgtagtcccagctacttgggaggctgaggcagaattgcttgaacccgggaggcggaagttgtagtaagctgagatggtgtcactgcactccagcctgggtgacagcgagactccgtctcaaaaaaataaataaaataaaataaaaataaaagagagcagctcttgacctgagataggtctatgaagcgcctggggcttgagagtggctgacagcgtttccccagaagcactgggtcagaaccaagcttcatggagctgtctcccccaggccagggcttcagtgggatcacagggattgccaccctcttctctccaatactgcggcccaggtggctggagatcctaaggcttaggggttttaggcattgactcactgggggtcttcacttaggatctgatactcaggtgctagctccacggcagtgacaactaaactcccgggtaacctgccgccccagagcagggggcccagcctcccaaaccaggtgtctgatccactccagcctagcaccacgggggcgctgagttcatctaggcctagttggtcaaatcctttagaatctcacctggtctcacaaggaagccactggaagcctctgagcttcccatccttgctagtgctctgctggctccacctggagccctttggaccaaggcattttacctgccagtgtagttcacttgagatgcgcatggccacaagactgttcgtagtctggctcctccacttaagaggcgtcggaccttacacatcacctgccaacctcccatatcctacccttgtgtccaaagccaggaaagaagaggaggcatctcgctagggttctccccgccacagcgtgaacatatgcacttgccaggctgataggcgagtcggggccccaagaacacccgcatgcagtgagttagacaaaacagctttatttgaaagacgtgggacagccaagttcccccaaccccgcggtcctggcgacgtcggtgtcaggcgtgggaggaccagtgtcctgcggagaaagaacaaggttaggggtctgcagtcggggtcaggagtcaggggccagacctcgcgagcgaccgcacccgggggggaggcggcagcgcctgtcggggcctgggtttcaccgccgcacatggggcagcgcgcggtgagctgaggcccccgggggctctgggcgccgaatctcacccgcggccacggccaaagccgggggcgattttcaaccaacgccggtctcgaagaccaccagcgagacgccagtggtcaacgcggcaggacctacctaagtgaagaggagagcgcaatggaggcgcggacgtttatagccactcttcgggtggattcccgagccgcggctggggacggaggcgccggcgtttatagtcgcttttcgggtgacgtagattcccgggccgcggctggggccggacgggaaagagcactcagagcccggtgaggacggggcaccgcggagccaatcacaggttgtcttataggagctcggcccgctcccgcttggggcggggctgcggagatctcgcggcgcttggcgtgctataaaagctgcttcccagtaggtctcgttcttcttttccgacaaaacacgtgagtcctgttggtcgctgcagcgggcctctgcgtgggcggcgggaatccgcggacatcgggtcgggtctaggctcccgagtccgcgctcctgggcgggagcccttgtctgggtctcgcggggggctgccagatgcgtaggccacactgactagttccttcttgtcgcttttcccagcaaatggcggatgacgccggtgcagcgggggggcccgggggccctggtggccctgggatggggaaccgcggtggcttccgcggaggtttcggcagtggcatccggggccggggtcgcggccgtggacggggccggggccgaggccgcggagctcgcggaggcaaggccgaggataaggaggtaggtatcagccacgctcggggtccggcccctgggcggcgccggagagcggtcctggtcactggcgccttttctccctttagtggatgcccgtcaccaagttgggccgcttggtcaaggacatgaagatcaagtccctggaggagatctatctcttctccctgcccattaaggtacgcgtcggtcgttggggcgttgagcaagtgcgaccccggagtcatttgggctggggttggaggattagcatctgccattgactcgcattaaagggcccagcgtctcgcgtgagaggttgaggttgtgttgcgggctggctgaggagaggattccacttagaggttggatggatacctgagcgaagccagagccacaaaaggcatttcagcgcatcttcccacattcgcagcgaattcatttccaaagaactgaaagagaagcagcgcttggttcatgccatccgagaggatgatgaagttcaggttgtgggaggacactgtaagggttagcaaactgtcatagtccgcgtgtacgggacagctgtcatctgcatccagcgggtgcagtggggaaaggctaatggcatatttgtcatgtgagcgttcgccctagcaaggtacggtggtcatggctaggccaaagctggacaaagcaaaaggaaatctgagtggaaagccacatctcaccaaacaagagaaaaagggcaaataggaagaaacgattgagatgcagaaatagggtaaccttacatacaagcttccaaaaacgaaacgaaggggacagatcggggggaagccaggtgagggggttcatgacttcttcggttttttttgggcggggtgggcggttacacagtttcgccctatcgcctaggctggcgtgatctcggctcactgcaacctccacctcccaggttcaagcgattctcctgcctcagcctcctgaatagctggggttacaggcgcactccaccatgcccggctaattttttgtgtctttaatagaggtggggtttcaccatgtggccaggctggtatcggactcctgaccttgtgatccgcccacctcagtctcccaaagtgctgggattacaggcttgagccaccgcccccggccgtgactttggttcttgaatatcgtaatggtattaagtttttttttaatgctctccctacaattttcttgtttgtttcaggaatcagagatcattgatttcttcctgggggcctctctcaaggatgaggttttgaagattatgccagtgcagaagcagacccgtgccggccagcgcaccaggttcaaggtacccggctgtcctggagggggctgcgctgggcttgccgggactctctcggctctgcatagttgcacttggcttcacccgtgtgactttcgtaacggggagagagagaaaagatctcctcaggacctcggatgggccttactgtggcctctctttccttgaggggtgcaacaggccctgggcggtgggcagtgattgggtgtagggccaccagctgcctcacacacatcttttcgcaggcatttgttgctatcggggactacaatggccacgtcggtctgggtgttaagtgctccaaggaggtggccaccgccatccgtggggccatcatcctggccaagctctccatcgtccccgtgcgcagaggctactgggggaacaagatcggcaagccccacactgtcccttgcaaggtaggctggtggcaggtgatgggcctgccgtggggcaggctccctcgggcccccgtctcctgactccttccctcaccaggtgacaggccgctgcggctctgtgctggtacgcctcatccctgcacccaggggcactggcatcgtctccgcacctgtgcctaagaagctgctcatgatggctggtatcgatgactgctacacctcagcccggggctgcactgccaccctgggcaacttcggtaggtggtccacacatggggcatagccatggtctctcagctccgcttaaccacacgggtccagtgtgtgcttggcgtgttttcagggaggcagagaaaggctctcctaatgcacgacagacccgcccagaatggcctctctgttcctaggagtgcgacaatttttgggttgggggacttgcctcaagcacaccactgaccctcctggggttcttttgttttgcagccaaggccacctttgatgccatttctaagacctacagctacctgacccccgacctctggaaggagactgtattcaccaagtctccctatcaggagttcactgaccacctcgtcaagacccacaccagagtctccgtgcagcggactcaggctccagctgtggctacaacatagggtttttatacaagaaaaataaagtgaattaagcgtgttactgtttttttcccgtgtcctgcatggttagtggtggtttgaatctggggcgtggggccaatagatcacaccagacacacaggcaggttgcagggctttatatttcagcaacagtcatacagagccacacagcaggggcacccacagctgcctcaggaggtggcagcggcggcctcttttgcagcttttctctcttgcagcatcctctgcctctgtttggccaggcacttcctggcagaactgtaggcccccaggtcctgatctggggaagcaatggaaacaagctgggaaccgaggcctctgctacatgcaaagggggcaaagtcaagtgagcacaagggaggggagggaagatttgcaatggttctggcccccaggcctcaggaggatggtggggggttgggggtgggtggggcacgcacagcggtcctggtaggccttggccacctgggtgaactgctccacttccttgatacagttctgctggtagttctgtccttccctctgctgacaggctttgagccgatcctgcataatgttgataatttcttggtcgactttgctggtggagaaaaggagcaagagaggctaatcacaaggaatccttttcctgtaccctgtgagaacaattgaaagcaagagccctggggtctggctcctcccatgtcacccctaaaatctgggcatgccaccctgtggcatcccagggactagtgtcccagcagcacacggtgcagatctccacactcccagcatggctcacgtactagtccctcttccactgcattt

SEQ ID NO: 98261 - DNA, 12999 bp, Homo sapiens
gccgccggggagggcggctcccgctgcacacgcgctcgcctggggctgggcagggttcggcggtccgggcgccgcgatccgccccggcctccctggaaccccacccggggcccagcgggcgttgccagccgcgagcccggcgcaggggtcggccctggaaggctaggcgggaaccccggagctggcgagggaggtgccaggcaggtggcctgggaagcgcagacctggccctcgcagccttttgcattttataccataacagcggccagcgctgagcaggttttaagatttgtgtttcacgaggagccctggcggtagcgagcggaggggaaggcgagctgcgcggcccaggagacggtggcgggaggaggatgcaggcgggtgcggcggtcgggccgggggtgaggggaaggtgtcggggagcggtcacggtgcttctggcatgaggaactgggaggccggagatgccatttgtcaaaccggacgacagaggaggagcgagtggaggttttagatgcctgcgggacaggcgggcggggcagccaggttcgtgaggtggaaccggagagaggggctgggattcgcattccggagtcatgggtgtctgggtggcgtttcacaggatctacctgggttttattgagctgctcagatcctggggtgaggtacgggctcctgaagcgttctggagccctggctgggcaccggtgcggcccctgcagtccccactttgagtgggtccgtggcccagcctggaagctcagggctgggagtgctgtgagtcttcctttgcccagagcctgtgttttcttctagattctttccaccatggccagacgcccccggaacagcagggcctggcacttcgtcctgagtgcagcccgccgagacgcagatgcccgggccgtggctctagcaggctccactaactggggctacgactctgatgggcaggtaggttccagcgggcgaggcggacgtggctggcctaaggtgtggagatgccctaggcaggcaggcagacattacctgaacacggaatcagtcggagaaaaagatgcttctgaggctagaggaccagtccaaacctgggcctgtctcctggatgcaccgcattcagtaagactctttaatttggcaaaggacacacacagcctcaggggtgacaggacctcagaacacactgcattcttcactgtgctttctcctctgaaacacatggtgcatggagaggttggcagttgcttttggttcattcaacagaaattctccactacggggctgggcactgtggctcacacctataatcctagcactttgggaggctgaagctggaggaccacttgagcccaggagtttgagacctgcctgggcaacatggtgaaacactgtctctacaaaaatttaaaaaatgtgtcaggcgtggtggcacgtgcctgtagtcccaacgactcaggaggctgagctgggaggattgcttgagccagggaggtcaaggctgcagtgagccgtgatcacaccagtgcgttccagcctgggtgacagagctagaccctgactcaaaaaaaacaaaaacaaaaaaattctttggtttacccagcccatttctggaggtgaccattgttaacttgctggttgtcttaccagacgcttcttctgccagtacaaacgcatactctttgttcacatatgtgtgtgttaaaaaacaaacaaacagaaaaaccctgatccttgaaggtaaaaatttctgcacttgctcagcgaggccaggaacctgaaggtattcagaacagctcaggtgtttgtctgtctgcagcccaggtgatctgacatgcttgtgggctttgcaggcagagctacctgcccccatggcccttgacccccaccttggcagaccctgagggcagctgcctggcctgacggggcgcagtgaggctgggaggggtgggggtccctgtggggggtgatttcccagtcggtttcctgagatctccctcggaccagagcaggagtgtggctgcgcctccctgccccacttccagctaccacaggtcatgtgccctggagcagtctctcctggcctcgcagggtcatggctgtgggacgcgggcgtgtccacaggccaggccagtgtctgacacacgcatgctgcttgtcctctgtcaccatgggccgtgtccttccggggcggctgcttgtgtgacctggtgctgctctctgctgtcacagctcccctgcgctgctgttccggctcagccaggtgtcctgggaggggtgggctcctctcctctgagtgaggactccctaagcccggtgggtccattaggccttgggggcaaattgggaaacagggtccttacccaccgggtgggggccgtcctgaggtctcctggagctccctgctccagccagggagaggcccccacctgccttcccgcccgcctccagctcctgcaggtcacatgcctgagcctcacaggctcgtggctgtgggatgcaggcgtgcctgcgggctcggcagtgttcgacacatgtgctgcttgtcctgtgtcaccaaatgggcctgcagtctgttgtgggcaggaggtaggcagtggcttcagtctttctccttctccagggaacccggccctgggcctgcagtgcaggtgctcagttctgtgcccgggctcctgactcagggggtctaccctggctctggggacccgcacttctaggcagtggggtagagttgtctgggcctgccttgtctgtggggtggggccatcccctccagaaaggacagtgtcctgccctgaagctggctttcgataggtccacgttcacctggaagctggtggcgcccatgtcatggtcccctgtggcttctcctggggatcacatcatctctctggaccagccctcaaccctcactgtcacaaggcctctgccacaggccccccgccaccacttagcactctccctgctgaccccctggtccattcagcccctgggtggcccccacacagtctgtgacagggaggaggctgggaggggcactgcctcccacaaggagctcacgttctggtgggaggaggccaagaatcaggaccaaggagaacttcagtgaagcaaaagaagaaaaatggaacaggggtgaaggggctggagaagcctcagggaggtgacagctgaaacctgcaccaggaggggcggggcctgtagtgggcactgggcagtaggaccctgtggtgagccaggtctgctcaggtaacaggaaggtcgttgggccacagtgtggtggggactgccctgaggccgggtggctgcagctgggcctggtgtgggggtggtggccttgcctgggggcccctgcagggctggcctagcagggaaggtgtccacaccatctcagctctgggcaggtggggtggacctggggcttatccaccgtctagaaaccacttggaggccaggcagccttggctactgctctgtggctgggcctccagggccctcctggtcatgcagaatggggcagagccggagcccgttgggagggagcctgggctgtgcgctcggggtactgtgaagtccctggaggcctggacccccatcctttcctgggtgggtcagggacagggtgggacagggacagagggcaagggtgagagggtagagagcgggcaacaggtagtaacagccggcccttctctcccagcacagcgactcggactccgaccccgagtactccacgctgccgccatccatccccagtgcggtgcccgtgaccggcgagtccttctgtgactgtgctgggcagagcgaggcctccttctgtagcagcctgcactcggcccaccggggcagggactgccgctgcggagaggaagacgagtgtgagcgtggggcccagcccctgctgggactgcactgcgggcgggcctgggggtgggcagggcagagccccatggagctctcagggctgccccagcctgggcctctcttgcagatttcgactgggtctgggatgacttaaataagtcatcagccaccctgctgagctgtgacaaccgtaaggtcagcttccacatggagtacagctgcggcacagcggccatccggggcaccaaggagctgggggagggccagcacttctgggagatcaagatgacctctcccgtctacggcaccgacatggtaagttgcttcggcccagggtgcttctggggaacctggctccggcagcccagccccgcgccctctgcctggcccctgttcctagatggtgggcatcgggacgtcggatgtggacctggacaaataccgccacacgttctgcagcctgctgggcagggatgaggacagctggggcctctcctacacgggtgcgtgaggcccagggtggggcggggccgagcctggagctcccgggctcactgcgaccctggctgcccccaggcctcctccaccacaagggcgacaagaccagcttctcgtcgcggttcggccagggctccatcattggcgtgcacctggacacctggcacggcacactcacctttttcaagaacaggaagtgtataggtgaggccgtcacaggacttgagctcctctcagctgtcaccccgagggaggcagccaccccgccccagcccaggggacactgaggttttctgaaagggttcctcccagaagcctgaggccccagggtcccagggggtgggacagtgaggccaggctggagtggcagggccagcgcgtgcaccctgccttgcctcagctgtgccagctgcccacccgggtgactgtagcgtgaggtctgaggggctgcgcccagtagctggccccttccctgcctggggttcaggctgggcccctcccttccaggtgtggcagccaccaagctgcagaacaagagattctacccgatggtgtgctccacggcggcccggagcagcatgaaggtcacccgctcctgtgccagcgccacttccctccagtacctgtgctgccaccgcctgcgccagctgcggccagactcgggagacacgctggagggtctgccgctgccgccgggcctcaagcaggtgctacacaacaagctgggctgggtcctgagcatgagttgcagccgccgcaaggctccagtgtccgatccccaggcagcgacctccgcccaccccagcagtcgcgagcctcggccctgccagaggaagcgctgccgccggacctgactgacttcccagtggaactgccttcttgggctgggacagcccctttcctctgtcccttctttctctgtcccttccttccagccacactccagggcggagttggatgaggcccgtccggagggagccatctcttgctcccgaggctgggacagtcctttctgtgggggctctagggcccctctgctgctgtgctgggtggggaagcggctgccctgagccccaggtcttgtgggaggctgcgaggacgagagcctggctggagcccgcgttgctgttcccacagggcctcggtttttcctaacttgctctgcatgctgtcagcggctgccccgccgtcatagacttaaaggactgcaataaatgtagagttgatgtctaacacccacatggcgtgagctgaaacgtatccgtgcagaggccgggcttgcgagcagcctgggccttctcccaggcctcactgcccctccacatccttgggagtcccctactgcttctggctgagggtgccacaccccaagcctccaggtggcagtggggccctggagctgccttctggtccctgccgagtgtgtgtgtgtgttgggggggcacagccctgctgctgagctcccctggggcctacgtgttcaggactcagcacaggaaccgccagccatctgccagccagaagcccctcttctcccagctacctaaaacttcccctgcaaccacccaccctccccctgaggtcagacctgctcagccagagaacccacccaggctgagggtccacatgtggctgggggtcctccccmaccgcccagggtgtctggtctgtccccaaggctgcatgctgtcctggtggtcccacgtgtggtcaggagcccaggtccagcaggagatcagggttggctgtggtcaggaagaggcagatgcggcgggagaggtcaggccccaccctgcggggacgcccgccttcactgggcggcacaggaaggtcggccaggaggcccatgcgctcccgctccgtgctgcaggcctccagcgcctaggagcaggcaaaggcatgagagggcgcctggggacggggcttytgcacctggagggcttggaggaggcaggggcccacctgctgcagaaggcggggggaggggaaggctgtgacaactgcatcagccacggctgggctgacccgactgaactgcctgatctgcctccgccaggccgcctgcagccctgcgccgtctcttgccactggctcgccggctgcccagcgccctgctgtgcagaaggagaaggcctgggattcccggkactgcctggggacagagagaagccttttrgaacckcatgtgagcagctcccaaaaggcyggggaggcaccactaccttgaggtgatcctgccccccttcagccttggcatcacrcacttgaggggatactgggcgagagccttggtaacggcgcacacgtgccgactcagctcctgccaagaggccaccagtagcacgtccaggtttgcccagagctgcaggagtaccagggcctggggaggaggcaagctgatgggcacgagccagaggaaggctacccgggacacacagctgatagctgccccatgtaccacgctgggaaccaaacccagccagcagcccaatcactgggacccaggccacctgactcacccagctcagacaggccctcacctcttccacctccggccagctgacggccacctcggcaccggccaccttcgggctctctggctgctgtgtcccccgggaaacgtgctggcgagacctgagcagaggtgaccattcctccccgctccccatggggcctgccctgcccgagcttggcctctgccagagcccacctggagaagtgggatcagctgtgccacagcaaccccagaagtgtgcccacctcccctgaacccccgtcccagccagccctgctgtgggcatgagagtgagcggtaccacaggtaggcatccagcccgatgacagccaggtggggccgggcggtggtctcgggggagatccagggcacccagtgggttgggccagagatctgaagatgagaacgtgtggcacagttgttcacaggaggctgcggcctatggccatgggccaccaggccacagctggtttgcagaacagcaagcctgaaaaagagccagtggtgccgagaggagcctctgttccgttaccccttctgagaaaaccagctctgtgcctcccacgaggccaaagaggctaaggagaccctggagtggctgctcgggcacatgtcagttccattgagcccctcatcctggtccacctctgtactccagcctagctttgacctagcacaaagcagcagcttgagagacactgatcctgggacacagggacctggcagggggtctagcctaaccccacgctacctggcaccacagcacctgagcactgctccccgcaggcaggggccaggctgtctgctgtcagaggacgaagcctgcagcctactgcccggaccccggcctcctgacacttctcaggatcctctaggagcagctgtagcctccgcaggtgcccaggagctttctccatctcaccctagaaacctctacggctttggatcagagaggagtcctggcctgccccatgccccctccagccccgtctacaggggcagggaccggcggagcaggcgcctcccggctgggaacccacccctcctgattagagagggactactgccaccacccgagcacctgggtcagtgtggcgacgccctgcagaaactcctcgggctccagcagcagcagcaattcctgttcacctgcagcccacacttcaggaggcagctgtggggacatggggacgcgctgctgcctgtctcaaccccgggtgccccaggggccctgcctgggcagtccagcagcaaagcggttcgtggccccagccaagcccaggccctgacaggcctgctctacagaagcccagtgttccctttcctgccaaggccaagctcaggccaggtctctgtggccggcaggaatccagaccacagcctgaatcgagacggaaccttctccagccagctcggctctataccagcagaacggcttgggcacctccacttcccgttctccatccttgctttacccatccgcgagacgcgcacggcccagggcagctgcctcagggacagctccagggctgaaatcatggaagcaaaacagccaactcgcggctggccctcgggaacccgcgaccactcacgctgcgggggcaggggtcgggactcgctcgggtccaccgcaggctgcgggccgggcgctggggctcgatgcggcactcgcagcccagggcctccagggcctccatcaggacgtcggcaccggcgtcttccaggatggctgggaccgggggagaggagcgcggtcactgcttccttccaccctcgcgagcgccctacctgggcgggtggccggaccggggagtctccattcggcacaaacccccgactgggaggcgggcccggccccaggcccctcggcacgcgcgccccgcccagtcggacagagggcgccgcctggcggagaaaggcctttcctaccccgagtatcgcccgtgccctccgccgcacctgtgtccacgcacaccgcgaggcgcttcagcacctgctccggccgcagcagccgcaacgcctcggcagccgccctgcgctcacccgctgggtcccgggctctcgcggcggcctccgagccggcggagtcctcagcgtcggagtctgagatctcccaggttggaggtcgccgctgaccgctcccgccccgtccccggccccggccctggcaagagacccccgccctcccgggtccaacccgcgccatggccggaccgacctcttcctcgcttccggccgcgaccgaacactttagcctgggacaccggcctcttccggtgacttccggccggaccgctgaggacgcggacccgccatggcgcggaagaaggtgcgtccgcggctgatcgcggagctggcccgccgcgtgcgcgccctgcgggagcaactgaacaggccgcgcgactcccagctctacgcggtggactacgagaccttgacgcggccgttctctggacgccggctgccggtccgggcctgggccgacgtgcgccgcgagagccgcctcttgcagctgctcggccgcctcccgctcttcggcctgggccgcctggtcacgcgcaagtcctggctgtggcagcacgacgagccgtgctactggcgcctcacgcgggtgcggcccgactacacggcgcaggtaggtgcgtgcaccccgtccgcaccccgcccctgcagccgcctggtctccccgcctcccctcctccctgcaggtttgcgtggctgaggctcccacctcctgacctcgggggccgagagctttgcgagctgaccccgcttccttctggctttgcagaacttggaccacgggaaggcctggggcatcctgaccttcaaaggtaaggctcgggagagcgggtgcccggcagttcgatgccgaccgccgacggcacagcaagtgtgtgcagacgcctctttttcttcatcagggaagactgagagcgaggcgcgggagatcgaacacgtcatgtaccatgactggcggctggtgcccaagcacgaggaggaggccttcaccgcgttcacgccggcgccggaagacagcctggcctccgtgccgtacccgcctctcctccgggccatgattatcgcagaacgacagaaaaatggagacacaagcaccgaggagcccatgctgaatgtgcagaggatacgcatggaaccctgggattaccctgcaaaacaggaagacaaaggaagggccaagggcacccccgtctagaatgccagaaccagcgggtggccttaggggctgtgaggcagtggggaccttattgatgaaagaaaccgtctttgcgttacacccgagtctgcctctcggagcagggagctcaccttccgcgacgtgttctgagggtctgcatcttaggggggagggctggggcaaatcgccacctgtgcctttcctctggccctgctgcccccacacccaactccgagggcccacgctggggaaagcgggaagcgctcgctccctttcccccattagtgctctctctgcctggatcccggcagaagctatgaaagggaataaagagaaaagaagtacccagggtcgtggtgtctttgcgctctgtctttaggaccggggagagaagggctgacgctgtggtcgtggccctggccgggggggcgcggggggggcggggttcgggcggtgcggagcagggcgccgcgtgggtggaaccacctgggcgggttgtgggggatacagttagtgtccgagctgctggaggagacttggcctccgcagctgccctccggccccccacggctgccgggttccggggtgcaagtgaagcagcctccccgcggaggccgcagcgccccgaccaggcctctttaagcgcaggccccgccccgggcgccaccgccccgccccgcggatcccgctcccgcaccgccatcatgatctgcctggtgctgaccatcttcgctaacctcttccccgcgggtgagccgcgcggcgcgggccgggggcgggtggccggtgctgggccggcctgacggcccgtccccgcctgccccgcagcctgcaccggcgcacacgaacgcaccttcctggccgtgaagccggacggcgtgcagcggcggctggtgggcgagattgtgcggcgcttcgagaggaagggcttcaagttggtggcgctgaagctggtgcaggtgggggcgcggtgagcgagcgggggcgcggtgtggggggaaggggagcggggacctggggacgcctaggtgccgggtgcgggcgcaggcggcctgacccttccgcaggcctccgaggagctgctgcgtgagcactacgccgagctgcgtgaacgcccgttctacggccgccttgtcaagtatatggcctccgggccggtggtggccatggtgagtatccgggaagcgggcgggcggctccgggacccccacccccgcgtgataccgcgcccgttcctccgcacaggtttggcaggggctggacgtggtgcgcacctcgcgggcgctcatcggagccacgaacccggccgacgccccgcccggcaccatccgcggggatttctgcatcgaggttggcaagtaaggcccgccccggggacggtcccagccccgtccggcctccccctgttcagcctgcgtggtacccgtgccggaggtctctttcccacgctcacacgcgcctcttccgcgcaggaacctgattcacggcagcgactcggtggagagtgcccgccgcgagatcgctctctggttccgcgcagacgagctcctctgctgggaggacagcgctgggcactggctgtatgagtagcccggcagatgcgcgtcacagaggctctcacactccagcctcctccagggcccaggtgggcgggcttctggccccaccccacagcgcttggagcatccctttggacgggctgctgaacatccacctgtctggacgttgcatggagggtggcgcaggcctctccaatccctggcgtacagggtttcctgcccgaggagctgctccaggagcctgcgcggctcgcctggaaacgtgccaggacactgtcctggtgcccagcccaacgtggtccaacgtttttttataataaagtcctcgttttcgtttcggtttgggcccaggaacaggcagctacgacgttaagacatttattacatacagagcagatatgtgggtttgcttgcagggccaaagcctgaggagaatcgtcacccctcccccagccgccccactgctcagcccggagtcacttcgagatcctgggggaacagacgagggagcggacatacatcacagtggaggtggcagggtggtggggagaagccggcagcgcagcggctgcagccctcggtggccagcggggcttgtggggcagctccccaagatctgtgcttctctggttgggggtgggtgcgggggctgggctgccctcataagggcctcccagacaggagtgcagtgggcctggaaggtaggaataggccagagaggcccagctgggcagggagagcagtccagggtggcgtctgccctctgcgggcttggagtcggctgggggcggctccatcctcagccccacgggcctctgcttggtggcctctctgttgctccctgggagcaggccacagcgggcaaccctaggcacttagtagcgtgtctgggagctgggctccgtggagccccgtgcaggaggcaggccccgggagcacatcatcccccatcaacctgaggctgagcctgtgtcctaggactgatcccggagaggccaggggcctccccttcttcctgaggcctgggcctgccctggcagcctgagaaatcccaccctgggggcttctgggagggacaggactccagggcccactcctccaaggtgagtcttctgcccaggcagagcctggggggacacgggtcagaacggggctggcaagagcctgcctgcatgggcaggatggggtagcagtctctgttctcaagcagctgccccagggagccgggcctcgtgcttttatgccagttccctgggcaggggacagctggggtggggacagacaggatagaggcttgacgacggggaggccccagagaaggccggctggggtgcaggcacctgggcagcctgaggcccacctcc

SEQ ID NO: 98262 - DNA, 36911 bp, Homo sapiens
tcccctctagaagagaatctcattatcatacctctctgaatccagacacaaaaaagatacttaaaatatctgaaagagatttaaaaacctaaactcagagtagcttctacctagaacacaattattttgttttaaaacattaacttataaaaaaaatctgaagcagaccattaaaaaaattgaacatagtatttaaattaaatgttccccaaaacactttgattagaaaatagattaaaattttacctatgaaataaatgcaggcattttgcttatgtaagtccacaacattttctgaaaggtgtacaactatttacaagaggttatggatacagtgatgggaatttaccataaagaatgaaaatttattttttcacagttttggaggctgagaaatccaagataaggcactggcatgttagggctcagtctctcgcttccaacactatgtagagcactacgtcctttggaagggagagacatttggcagaagagcaggagagtgttcacccacgcccacaagccctttacacggcggcattaatctattcatgagggtggtacccacatgacctaaacacctcctggtaggccccacctcccaacactgttgcactgggaatgaagggaatctactatttctgtactccatgtattaagagtattacatctactggcggtaggtaaggcataacaaacatcatctgcattatcttatctcctatacttcatatttatatgataaaaacaaaatataataccaataaagcttaaaagcacatcaaaattgttatactctttttaaaacttttaaagtaactataactgattggatttcttaaggcttgaatgtttcttagaaagataacacctaacacctgaacatttcatatgaagtctagttaaatgcagggtcggctgggcacggtggctcacatctgtaatcccgacactttgggaggccaaggcaggtagatgacctgaggtcaggagttcaagaccagcctgactaatatgatgaaaccccatctctattaaaaatacaaaaattagctgggcatggtggcgagcacctgtagtcctagcctgtagcctaggaggctgagacaagagaattgcttgaacccaggaagtggaagttgcagtgagccaagatcgcgccactgcactccggcctgggcgacagagactgtccaaaaaaaatgtagggtcaacattatcaaacactagattttcccatatattagtaattcttcctatggtgaaacattttcactcaagaataaacaggttactgaattgagagagataggagagtgcagtgtggctcatgcctgtaatccgagaattttggaaagtcaaggcaggcagatcccttgagcccaggagtttgagatcagtctgaacagcatggcaaaaccctgctgctacaaaaaaatacaaaaattagccaggagtagtggtgcatgcctgtagtcctagttattcgggaggctgaggtaaaaggatcatttgagcctgggaggtcgagactgcagtgagctgagatcactccactatactcaagactgggtgaaagagtgagaccctgtctcagaaaaaaaaaaaaaaactgatagtagtaataataataatgatagtaaacaatattaataactaacacttattcaacacactacgtgcccagcacttttctaactgctttttatgaattgattcttctaatcctcacaaccctatgaggtaggtagtacagtaaaaccatatgaattaaaaatcactagaatgaattacaaattaatactaaagaatttttattttttatacactattagaatttaaatctagactttcagtgaaacatacaaaccaaccacatgaatttatttcctctacctccaaaccaccaaaagatattaaaggaatataaatagtattaatccacaaaaaagcacagacgacaaagccatgagattttaacaaagtttatacagataaaaaccaggaggaagtgcaatacctaacctagcagagtggaggaagttaaagcctaagtacccaaaagggagaagcccaaaaacacaccccaccaaacctctactaagttcaggacttggaagcactaggtattgtagaagatgagagtgaggtatagggctgaaatcaggactagaagtctgtataaagagcaactggaacccaggtcctctcccctactctccacagccagcctacgccccaccctcaacctccactgacaggaaaaactgaacctgagggtcagcagccagaggaggatttggggggtggggccggatgggcatgagagaggatgaagatagagggattaagtaaaagtcatcatacaaatcttggggtcctcagctgtcttttcttaccctactatcaggacccagttttctagagaaactggccccaaagagaagacctccactgaaatttaggggacctcaacagaaaaggccaactctacctgatggccctttagacaacttataaaccctgcccacatataaagacctatgacattagctttttaatacatgactaatatgaatagatgatttctaagaaaggcttcagaatgaaagagcccaaaacaaataaatagaaagcagaaacatggtgggggagggggagaaccattcaagaaacaggaaagatgtaagaaaaaaatcttaattttatcctcagggagatatggggaaacagttaatctataaaataaaaataggtttttatgaaatgaaacagaaaaaaaagacctcttagaaattaaaatatatatataaagaaaattcaacagaagagctggaggataacaaaaagaacaaagataatataacttaaggaacaactagagagaaaaagctttttaaatttagaggcggtccaactctgggaggtccaacattcaaataacagaaattctagaaagatagaacaaagaaaatggaagagagaaaactgtcaaaaagatcacacacacacacacacacacacacacacacacacacccagaactgaagcagacaaatctctaaattgaaagattccaccaagtcaagtagccatcaagatgaatgaataaagacccacatattattatgaaacatcagaagtaatgagaagttcctaaaagcttacagagtgtaaaaacagatcccaggtaaaggaacggtatcagaattctcacagaaaaactaaatgccttaagacaatgaaatgttgcccttaaaattctgaaggcatgttattttccagactccaaactaccaatcaagagtagagacattttcagacctgtaaagccttaaaatctttactttctatgcaccttttcttaggaagttactggtggaggagctttgccaaaaaaaaaaaaaaaaaaaaaaaaaaaaaaaaaaaacctaatgtgagactaaaaactaaagggagtttcagaatgactgctgaaccatagaacaggcctggagggcaacagtacaaatggcagaagatgaaggactgtggaagaaatgtccctaaaggatgacaaaatatttttaaaaacttttttaagagaattgatacgattatctgatgtttttcagcatttaagcctttggatagtcattgtgacaggtacattaaaaactaagcaaatttgaaaatcaggcaataccaaccccagaaaaaataacattctagtaaaaaggaaataatgatagttaaccatgtggtacatcagtgaactacatttatgtctatctatttcacaaaaagtttgttctaactaaaagttgtgtgaatataaatctattttgggaggggtgggggaagaaaaatgtgggaggtggagagtttaagtaaagtaaatcctgtctaccataaaaggtattcgagaaactgtttctgaaattgataagtcaacaaaaagtagtataacattttcaaacaggaaggtaaatactaacacaaaccactaagagttccaagtgtttgtctttggaatgctaaactggggaagagggaactacactttttcactataaaccttttagttctatttgattttttcaaactatgtacattaactagtttaataaaaagaaagctaaaattaaaaaaaaaacaacagaatttcaagttaagaattcaacatgaattcaaagagtggattggggagacagaaagacatgaacaagaaggcctacctaccagctacctaccattcatttacccgccagggttattaaaagacagacctcctcaaaggaactcctgcagcctaatctggctttctttcaggccaggacactccctctgtaccaagtacccagatcaaggctcaaagtacagacctagaggtgccttattaaataaaagaactagcagagtccaaattagtggtattatcatgtatatggaattagtgtaaacagcaatctggtattaacatatcacaagggcgcatttcctgagatcttgtgatttttacatttctaaatgtgataatacatactgaaaaactacaattcaaggtcaaaggttctagggcatctgtggaaatgaagatactctatcttctgccttggaatttaagtttaagcaatagcatccatttctggatttttcctgactgaagatcatgcaataatcccatatgatgtaagaaaattcaaattcagctcatttataaaagaattgtatcaaaatccctttagtcatggaggcctgcgattcccaaagaatagtgagcaagcacttgaaatgaaaaacaagcactgcttttgcttagaagatcactgataggctgccaagagaacctccaaatttctcaataacttttcatgtttctcaataaccccatgacctagacaaagcaaaaaaaagggactactaataactaataataaccaataatttttctataaagtatagaacaacttgacaagctaaaattcttacagaattgttatatggttcatctttttcttaaaattcaaaaaagtcaggcacacttgaaaataaaggactcctcaaaatgcaaggttcccttaagctttataggtttcttcatgctactaattcactgatcaaaacctggatataattcaagatatatttatactcccacaaaaaaaatgatttcacagatgtgtttggttcctaacaataacaacaaaaagtggctccaagtcataacaaaagacatacttagggataccgcaaacctgttcaaggacctgttttaagggggaaaaaatgatacaaaccagaaataattgcattgtatttttaaaatattcacagaaaactcttcacgaacccatctatttgggtaaagcaatagaaaatggatgtgattattttctataagttcaaaagcttgttacggtgttttccttataaacctattactgcaaaaaaactcactaccagaaaaaactcccaatcaatagcaccctgaccttcatggtcttaatactgtgcaagttcttactacaaaatttaaaaaaaaaaaaaaaacaagaaaaacctgattacctgctcaacgtcataacttactacattatcaaactttttttttcaaattagacatatgaagtacaacttatgagcaggcaaagactccactgaatatagagtagtctgatgacctgtgtgttatttaaaattacaaacacttcaagtagcatacagtttacccaaacacatattaatgtatagactgtttatgtccatcttaaacttaagatggaaggcctataattacagttttttaaacaaataccaaatattaattattttaaaatatcccacataaacttacaagataaattgaaataaaatgaaataggtcacaccattctaagctcacaggcaacaaaaattatgcttcatttgtgtcttcaccagcaggcctaaatatacaaacaaactcaaatccattagaattatattagtgcctaataaagattagacagaatatcaatgaatgtaaaaaatacaatgtattatatgatgtktttgaatgcaaaaaccacgcatttattaaacatatgattaacttaaaaacaacacaccagtttgttttaaagtgctccttatccaaaaccttaaacaaaactatcagcccaaaatgaattcaaaaaaacagattacaaggcaaacaatgacaataggtatggacaggcactaccaaaaaatgctatttgttctttaattaaataatgccattctcaagtgatatagagcagtcatcttgacagaattcctttttgtataaatattcataaataaaaatgtctctagatattggaaagagctgcaaacaatactttacaacagcagcttaatatctattttaggaaaaaaaaagcactaaaattytcttccattgaaagttgtttatttctctagtgtaagtgagcaaagtcactacagcattaaaatctcttttctagaacaacgtaaagaacaacgtatacacatcttaaatttggtaggtcacaaaagttagaatgcaatcatcttttgaggcaacaagaaaataaatacataaaaattaaacactttaacccaaaatttggtattgacaaatcagtagtgtcaacttcacatatgaaggacaatacagtctggttatttaaagatgctcaatatgtcatggtatttgggctaaagatacttagaatattgtgtttcctttttgattaaaggaatacaatacaatcaccatcaagctgctatcgtaactcatttttagctgtggtaaagtgaccatttggtccatggcacaagttacatatatcacacttctgtcaaackgaaaccttataagatttcatgtttataagctacaatacaccctgaccatgctgtcagtcccctcasagtttttaagaaaaatatctacatttgtccttatggatgtcaaaatgttacaccatcatttgttcaaaaaaaaaagatgcacattcatactgtgaagttattaggaaaatactcttgcaaacaaactatataaagataaaatacacttcaaaagtatgtggtttgttttcttgtttgtctgttttacaacattctataaagtgcagagtcctaagggaaaaaactactccctataacaatagtttaattacagcagcttttgcatagcaatacttagaggaagttggacacttcagtttcttcaggaagagaaggatggaagagtatcttctgattcagattgttttttggccataagtctgctttcttcaggaatggttgctgatgccaaatctccattaagtgtattttttgaacagtgaacaggtcctatraagacattgataaaaacgttaaacatcctgtcaatattaactccagtcctctgtgaaagaacattttaaatttcctgttcagggacatgaaattcctttagyttctggctaattttgtatttccttgtttgtttcatgcaggaaaacttaacttttagactagagtatcaacagccacaaggagaaacatcagaattcataagataaatgatgaaattgcctgaagtagagatttttgttttgttcactgctagaatcatggttggcacataataggtagtcaataaatatttgctgaattgaatttaatctttattaattaactattgctttttcagcctattttaatgctgttaatatcctccttgttcctaggcaaagaaaccaagacccataaaaggatacatgccttacccaagatcacacaattggtaacagaacgaggactaaattcaggtattcctcttttcattctaagactttctgagcaaagctgacaaggtacctcatactgaaagatcccatttctccatttgtaatgcagctcacagaactatcactgcaactccatgttaacacagctgactacactggcatagtcctgttctaaggcagttgtacctttatatatatagtttgagtttaccatcatcatttattactttcatactttttgaaaaagcttgttaaagaaaatagaagcagttgcatctcacaagaagaatatttttgagtaacaactttcaactaagactgccaattgcaaaatatatactttctggaaagagcactaattcaatctttgctttgtcagctaattgaaacactaaactagtataaacaggaaaaaatctaaggataaaatttctgacctagtctatacttgctaatttaaagatgttctagagaagtgaactatatgtatgcgcgtgtgtgtgtgtgcgtgcgtgtgtgtgtgtgtgagactagttttgttacagtccataacagttaaactgggggatgctaaatataatagagcatgtacacctagatcttttgaaaattgttttcaaatattcaggactagagtaactagaagaaaagaattctaaagaaaaatggatggctttaaaaaaattattttagtaatcacaaatgatccccttaaaaaaaaaaaaagatgtcgcacttaaaactacaaggtagcatacagaactccttcatgaactctggattaagagtcatgtgtaaaaggcataaagaataaagagaatcagagtctatcttacctgcctcagataacttttttcacatactcaacctctttaaccctcctcctctcctcctcttctcttccaggtcttgcttgattggcccaagaaagtttctttctcccttccccttcccggtttcyttccttcatttctccacccacatctcaatttaaattcaaaatgttaatgagcatagaatagtgccatatattaataaatagatgattaattcagtttaaaaaaaaagtgggcattaaaaaaaaaaaaagattctatcaactcctaaaaatccaaaaatgaccagcaatcctttttaaaattgccatatgtatgaactaaacctgtttaactttctggttacataaaacaactccagcttaatcagtgttttcaatacactcaaatgctagaaatacaccattgttttgtcccatttcagccatactatgaattcactgggctcttccaaagaatggttagctatccaaagagctaaccaccacttatcatgtcatttccacaagaaaaataaaatctgttttccaaacaactgacttacaaatgaactaactattggaacacgacctgttccttaattggaaattgtacatagtttctatcccacatgcttcctgagaaatagtagagacttggagagtataagtctattaatggagatgtaataataagactatatttgtgttcactgcaaatcatggtcactactatcttactagatattctgacacactttcaaagcttcttctctgaagagaaaaatttaaaaattttaacataaatcacaaaacctttcctaaaaacattcaatcacagtatgctgcctctttaataaggaagaaaaaggtagaggaatgaatgctactataattcactgtgactaccagacaaaattcttttccttagccatttctaggtattttagtaaagtaacaatgctgacttttatatgaacttggaacttgcctttattttcccctagaatcctgctaacaattcatgccttcttctaaaatgttttttaagtcctagtggtggtaaaagatcatgatattctataaatatatatctgagatacgatatttacaaagcaatcctcagcactccttagttartaacaaacctgtttgtaaggggatatatgagctttcattgattgagcgctgtttgcttacctctgaattaaggaatcaaagaaacaaagtacaatgttcagtcagtatacttcatttccagaaatyacagagccccacagtaattttgctgaatatgccaaagaaagagacagaatctatgtcacttactatctgggtcttcaagaggaatatcactacaagaatctgtatctgagtaggttcttcggcgtcgctgggagagtcggtgaagtgtagatactggttcttttatagagtggctactcctgcaaattaagtaaaaagcattaaattgtaaggccttacataaacaaaaacacactcaactggaattttaaatgacttctctttaagtgaaaaaagaattatttttatgctcaacgtcccgtgttagcaacattctactcagaagtcaaaaacaagtgaacccatttagaagacagctggtaacctggagaatatggcttctgagctgaactaaaaggaagaggggtacaatgaagaagtagtgacttctgtaggggagactccagagagcagacatatcagtcggtttacaaatgtttgaaaactagaagtcataggtttcatgaatgcatgtattttaagtcaatccatatctgatcaaaaccagcagactgaaagagatgggcraggagttcatagagctagaggtagactcactgacaacagcaagagaagataaagatggcaaaaaggggcctagaaaaactcttttaaaaatctgtctgaaaaatttaaacagagaagcaaatcaccaccacctaacagcatctcagctactatttttgtaacagcccaactttactgtacttaatgacaaccttgattcatcaggaaacaaataagattttaaaattattattttatgaggtagaaaggatagaaaaatttctttcataaaaataaaagttggtcaaaaattgattaagcttccatttttctggaaaattcagttggtgggactcttgattccctgacaaggttggatatatacatcattggattcctctgagtatttgacagtttaatcaaagattatacaatcatcaggggaaaaaattaaaacatgacaaaacagcatttaacagtccaaatatagagaaataaatgccaatgtcactataattaaatcactttccaaagaactaaataagacaaccatagcaacttaaaggactattacctaacaaaataatagtttaacaacttagcattttggtaagatctatccagaaggtaaaatttttaaacgtattgatatgaatatgtactttaaaatatcaagtggttttctctcttcagcaagatctttctctcttaatgaaacaacagctcagcatgaatagatgatgctataaacagctgaggtaaaatgagccctagctgtggagtctcaacacatcaaaaatgtacttctgtctaaccatcacttgatatacagtcatgcgtctcttaatgacaaggatgcattctgagaaatccatcgctaggtgattctgtcactgtgcaaacatcacagagcgtgyttacacaaaactagctagtatagcctactacacatgtaggctatgtggtatagcctattgttcttaggctacaaacttctactgcatgttactgtmctgaatgttgtgggtgactgtaacaatggtatttgtgtatctaaacatacctaaacatggaaaaagtacagtaaaaatatggtattataatcttatgaggccactgtcacatatgcagtctatcattgatggaaaagtcattcttcaatatatgactgcatttcaaacatctaaaaaaggtaaaatggctggcaacgtgcttaccttgctggttaattcattcatttttttctttactgactacctactgaggccaggcccttatactaaatactaggagataaatactgagagataaaatgctggttttgaaccagacctaacccatacagagtttacattccacaccacttgttaaaggcccaaagaacttccctagatggatataatttgagagaacttagtcagaagaaaaggttcttttacctctctgaactgcaagaaccagggtggctgacagaacgcttcatctagaaattttggaaaaaaaaaaaaaaattagcataatccatatgtcaagtagaatcatgcagctctaatttactattatcataataaacataaatttactcagagaaaaagataactggcaaaaaaaaaatttaatctttcacagactcaagcaacataattagtacaacatcaagctttctccctaataaccattaattggaatctttttcaacacacaccaaaaacatgctggattcttttttcaaaagtraaaaccaaattttatacataatacatatatatgtgtgtgtatacaaatataaaaaacagggtatataactataaataagatataaatgtgataaaaaaggagtatctagcaagccacaaaatattctaataaatatctcttttttaaaggacagtagtagagtctggcagcaaagcttctctttatcattaattatttaggtagctgatatacaaatgttctaaagtgtggttttcatggaaaacagcattaataattcaagactttaaagaactcagaagaagaaccctaagtctcagtggatttccaaaacatatatttaaaaaaataaagaatacctaattaagcagaacatttaaaaaatatgataaatactaaacataatttggaagatccaactactccatcaaaatataaagggaggcagccaagtaaaactgattatttcaaagtttaacatggtagcagaaaaacaaagattatactaaaggtttagggtggttgcttttgtatacatgagcccaagagtctaacaagcccaggtctaacattgatgttatgcaaatgccttctatatttggaacatgagccactagttgctctgagaaataccagttgaaatgctaagagatatgacccacccagtttgtagtctgggaacatctgataagattgacattaagatgcaaatgsccactaacatctcctttaacagaaattacttcctttaggcttactaacccaaggacatccccactataataatcactcaatctgtaggtccagtgatggttgtctgaacttttatgacaacttgaaataaagttaaatgcaagtttactctaagatgaattcattgagattaactatataaagtgcttataaagatcagattaaagcacttacaaagatcagattaaattgttttggaatactcaaattttcagctttatttttcatataaataaatgtaagtttttcatataaataaataaacaatgttatttaaaaaaaaaacatgaagattgtctgaccttactttccatgctatttgtctctagaactaataattattttagtttcttatatgtaaaatacgcattgacttctctggactacagagcatttgtaacataagggatttcctgagaagttcaatgcagaagcaaggcaactctgaggtgttttactgcatttgactctaaaaagtacagcttaaaaaaaaaaagtgtaccctttgtctatcaacctcaggaacacagcactacacatccatctcaaaacactggtttctttgttcacacatacttgttaattaacagtttatagcatatctacaattgtcctaaaaagcaacattgtcaaactatgttttactcaacaccacaccacagtcctgtaagatggtattaaaaaatacataaaatgggccaggcgcagtgtctcacgcctgtaatcccaacactttggaagactaaggcgggcagatcacgaggtcaggagatcgagaccatcctggctaacatggtgaaaccccgtctctactaaaaatacaaaaaattagctgggcatggtggcaggcgcctgtggtcccatctgctcaggaggctgaggcaggagaatggcatgaacccaggaggcggagcttgcagtgagctgagattgcgccactgcactccagcctgggcgacagagcaagactccatttcaaaaaaagaaaatatatacatatatagtatttatatatatatttattttatttgtgtatatatataacgggctcaattgtcaaataaatttcagcaacactgtacactacacttccacctctcagagattcataatacacttcagcataaaagagggtgtgacggctgggcatggtggcttatgcctgtaatcccaacactttgggaggctgaagcaggaggactgcttgaagctaggagtttgagaccagcctgggcaacaaaatgagactccatctctacaaaaaataaatttaaaaacttagcttgaagccaggagtttgagaccagcttgggcaacaaaatgagaccccccccatctctacaaataataaattaaaaaacatagccaggcaccgtggtgtgcrcctgtagtcccagctactcaggaggctggaacttgggagtttgaggctgcagtgagttatgatggtgtcactgcactccagcctgggtaacagagtgagaccctgtctctaaaaaaataaataaataaataagtaaaaaggctgtgacaagtcccatcaaacccaattcatatcatttaagttaacctagcaattcccaaattaatctggccataaaactcattttcatggtacgcttgcctcagaggaaactattagcccatcaaatactgattagaaaacaattctctaaataaatctaggcaataatctttactaaatctcataactaaatttgctgggataggtaagagaacctaggaagaagttagaccctattctcctaacaaatagatcttcaggtaattgctgaaacagcaacaaggtggcattcttactcctataaatggactcctaaaaacactttgatgcaataaacttgaagtctcattaaagcttatctcacctacaaatttctaacagcatgctagagcaaatttattagctcagaaaggacaacgaatctgccacccctggcaaaaagaggacttgttctgagcaataaggaagtaagaaactaacactgagcacctaacagtaagcaggtcagatcgtttgcagtgactctctgatatacactgtatttttacacatgaagaaactgaagatcagctactctgagggttcagatccaaatgcttagtagagaataccgttcccaccggaatatgtttcaaattccttctaactcctttaaagatatacgtaattgtaccccattgtgactaaaatctcattccattgtgtaattcttaccaagcagaatagagctccccaactttttctttgtcacagcactttgtaatattttcctagacactggggaaaatggatgaagcagcctgtgggcaggccatgcacagcccctccaaggagaagggaatgaggacactagcacaagtgctcagctcatcagctaagaagctcgaatatgaaacagtacaaacaaaaaaattcaacttgttagctgttccccgccccccaactgcctgcttccacccttaaaaataaataccaaaatgaaacgaaaaccacatgcaacattactactgagggaaaaaaccaaaacaagaagttcaaaccatttgaacaggagaaggtgacacaggagaaactaagggatccggatggtgcagttgaaacatctcaggtttaaacttggcattggctatcttcacacattcctcaagcgttgtgatgaatgtrttacacgtggcactaagcagagaagaggcttcattcatgttctgaaaaattacacaaagacttgaacagatttgcatacaactacatggaatcatatacaaccttatcattaaataataagacatctccaacagacacattactatgttatgttcaaatttatttaaaatacagtaccttagaaaattaagctggggcaaaaaaagaaaaaagaaaacattaaaacatctatgtataagaaatgcctgtctcctaaacaatgtatgaaactagattytaagaaaaaataagctttgcatttaattatcatattgaaaaactgtgtacaaaagtttatcttagagaaatctaacctaaacagtaattttcactttcccaaaagtggacacagacatggaatacccttagagttaattagtggcagtacaattcatgcctaccctctatccattctcccacttcttccttgatagagtaaaaagcccaattttgttcaggatcgcaaagtgccctgatcctgggggatgaatagagactgatctaacctagtcatggctattccaacactctttactaaatgctcattttttcctagtttcctttgagccggraaaaaaaaaaaaaaaaaaagatgagaagttggctagggaatttctgggatttttgtttcccgattcaaaaccaagcacagcaagttgagaaggactctctctaccctggcaaccccactgcctcctgcctctttgtgagcttgacagtcatcttgacacctggggcattaggagaaaaactcaacacaccaagaatggcagagtggaaggatggaacaagcctgggtccctaatactgtcactgagctgctgtagcaagtgtgaggtcaactacctccagggagcttgtggtcagtttgtccttgggcttcttacacaagattcctccccaacaggagaaggccacagaagaaataggaagatttcttgccccacttctaccaagttaggcaaaaagggacaggcaacatgctggcctttcacccagagagtggtatagctcactggtcctattttaccatgaagaatgagcctattatagcccgatcctactaatctgagttttgattcctaagtcactgttctgagaaggatttgttttaagttatttcataaagataagttatcaactctcatagttgaagcagggaccttattaccaaaaaaagagaatagcagctgtccagtgaatttatgccgctagcctggagaacaaagcctggaatgcttcttccccactccaacctccaaattatcagactggctgcaaagacaagccttgacccctggagaaatatgctacttcatgttcttctctggccacacagacacaatcgagaagatgctacagatttccagatagtatacagtaggcagaacccagaaaagctgaaaataactcaatgtgaaaatgcctgtcatcttatggaatgactgaggatccccccagagtactccaaagcataaccacacgtgaagagatcctcttcgctctacctctgcactasgagatgaatgattctcatcatggtgaacaaattcctgtatygtatgaacttgctgcattaagaggtcacagtagaggcgaagttcagacattttggttttcagcgattcactggtttcacttatttctgaaaagaatatacataaatatacagttagatcattttcatattctttgagcaatgtaacaaaatgtaatcatttaaaaaagcaatgaatataaatacctatagctcaagaaatgtgagaccttggaaacaggatacaagagccctaaggaaacatcttctcttcagataattgggaaaaagctgacagttatatgcctgccatgtttaggtgatttccagagataggatgatgaccactggatgttttatacaggatatttccattccattactcatcttccatttaaaaagtgcttggttttcttttgtgaattgcttttttattttgtcctttatacattttttccagttctgatgttggtttttctcttaacaatataaactgatagtktgtaaaagttcttacaaattaaagatagtaatctttcctctatcttatatactgcaaataccttatccagatctgttagcttcctttcagttttctttattttggcttacagaagttttaaatttttatgtaattaaaactattgtttataaacattcatttattttcttctgtttctttcagtttcattctcacattatactattttcaaaattttttattaagagcatactttcttccttagtatgtccagacaaactaaacatccagccataatctcagccactcacaagccaataccttttaaactagaagtataagctacagaggaggaaaattcatagagtaaatttctggtgcttctccacactccctgggccaggccccagtggtcttgctctctggtcctagccacaaagccacttttgccagaatggacaaagcagctctatctgcgcatttaatctaacctaaatcaattcctgctcatatttaagcctattctttctcctttttaaaaaaaactgtggtaaagtatacataaacataaaatttactattttaaccacttttaagtattcacttcaaaatgtgccattaagtacattcgtatttgtaaaatcatcaccaccatccatctccagaacgtcttcatcttccccagctgaaggtctgtacccactaaacactaaccctgtttccacctccccctgggccctggaaaccaacattctattttctgtctgtataagtatgactgccctgggtatttcatataagtggaatcatagactatatgtccttctgtgattagcttttttttttttttaatcattattatactttaagttttagggtacatgtgcacaatgtgcaggttagttacatatgtatacatgtgccatgctggtgcgctgcacctactaacttgtcayctagcattaggtatatctaccaatgctatccctcccccctccccccaccccacatgattagctttttttacttattgtaatgtctataaggttcatccacagtgtagcatgtgtcacaatttgctttttaaagctgagtaatattctattgtatattttgtttatccattcctctaccaatgaacatttgggttatttccatcttttagctattgtgaatattcattccttcttatcctacctgtagctatattctgtaatgttttcatatatttcaaaattgttataaattcaatcctcagccttcatttctcaatacctataatttacttgctttcactaatgtaattaatttgcatttaattatataagtaatacatacttaataaaaaattttgaaaaatagaaaaaatatagaaaagaaaaatcaaataactgtactatggtttgaatatcgtttgtttccagcaaaactcatgttgagtctgggtccccagtgtggcagtgttaggaaagtagtacttttaacaagtgattaggtcgtcaaaggagtgagtgagttctcaacctcttgggactagattagttactatgagagcgggttgttataaatcgaggctgcctcttgggtttgatctctttccgcacacacccgctttcccttgcttcctccgccatgctatgatgcagcatgaggccctcaccagaagccaactagatacagctgcccaatcttgaacttccagcctctagggccatgagtcatacctcttttctttataaattacagtctcaagtattgtgtcaaagcaacagaaaatgaactaagacaaactataatctcactatcaagaaattgtcattttcacattatatctgtatatagttgaactaataacataaatcatttgctttgctttcagtttctaaaaatctttttgaattggcaatatgcgtacatggtaaagtcaaaagataccaaagggtatatacagtgacaactgagtctccttcccacaaattccacttccaaaggtaacaatctgaccaattcttacatacctttcctaagccagccaatgaatactaacaatacacataattctgaatcctgcttttttcaatgatcatttaaccctgggcattttctcacattgaaattccttttcaacatcttactgtctatatatcagccagtgaaagcacgagtttaggctgggcgcagtggctcatgcctgtaatcccagcactttgggaggccgaggcgagcggattacctgaggtcgggaattcgagaccagcttggccagcatggtgaaaccccgtctctactaaaaatacaaaaattagccaggcatggtagcaggcacctgtaatcccagctactcgggaagctgaggctggagaatcgcttgaacccaggaggcagaggttgcagtaagccgagatcgcgccattgcactccagcctgggcaacagagtgagactccatctcaaaaaaaaaaaaaaaaaagaaagaaagagtttattgagccattcccctaaatttatagcttttacaaaatgtttactatgataaagatatacgtaaatctacatttctaattatttccttgggatagatactaaaagtggacaggctaatttagttacatttatatttatatttaagaaagtactctcaccmcaagggaaaagtttatagttacctttttcttttttagtccttgtatcagtcaaacatgctttggagctccccagagcgaccagccacctctgtctttcagctgcattcactgccttcatgtagaaatgctgctctccaggaatgattaattccattcttgtgttgtctgctgaatgaactatgatgataaacaaaggggaaatacagttatagacttaagtaatttaagggtaatcaaataatcatctaatcacacagtatcagatgcttcatataccaaaaacattgaactatcattcatgatgcaggcagtgctgctccctgaggggccacccagtggcactccccaaatcaacattctcatatagacccggggtaacaatggtgccaaagcgatgacagagtatgaaaaagaaaacagggacatactaactactgagaagtgacagccctcccccaccttggggccacttatcctattaaatacaactgcaatgaatgttacactatcacatattttttactgatttccttgaaaacaaagtctttgttttcatatatagtgcctgacacatagaaggaatgtaataaatgacaactacagccaccttctgtcagaaaagtaactctatgatatgcccttaattatggatcatagcataacacatggaaggcatgtatattttgaagacattcatctcttcccctctttctacctcttctcctgcacacacacacctcctttgatgctctgagaaaagagagctaatcaggaattatgatgagccaatcccaagtctttgttgtaaaacaaaatttgtgttaagctgtcattcatcaacaaatatttactcagctcagagcagtgctagtagaagagaagatagaggggaagaaaaaaggtgtctttgcttctatacagttgacaatttaaccaagaaacaaactgacacaccaaaaacaatcagaatacacatatgtttaactctttggtgcagagatttcttgtgtaattatgagagaaagtaatttaaaaaggcttcaagaagaagggtttgatgaaagcgggatttggttaagaaaatgaatgagaagaagcttaaatgagaaaataaacacagaatgtactgagaatattaggaaacaagcataaatagaggcttccattgtaatgcaaagtaatattcatactcgtttagccagtatagtggtgcaagcatgtactcccagcacctgtagacccagcaacttgggaggcggaaggctgaggcaagaggatcgctggagcccagtacaggctgcagtgagctacaatcataccactgcactccagactgggcaacagagcaagaccctgtctcaaaaaaaaaaaaaaaaaaaaaaagaaggaaaagaaaagaaaacaaattcatattcatgaatggacaagctgggaggagccaaattatgagggtcccagcaaaatctggcagaagccccaacttaaataattaattgctataaatattgaccagatgtttagtgtattatggcaagtaagtgccacagaaatgttgctatcttattattctacttatatgggtcattcttagttgcagacactgaaacatacaaccatgcaacaatcaattatgaatgcaaaagatttctaggctagggtaaaactactgaactcctaaagctataagagtaactcttccttgctacttgccaatactagtgaaagcaccaatacctactttaaaagaaagcaatgctctaatttctaatgatgttgctacaagatgaaactaaaataagatgactcatttttaaacataccagaatttatgcatccaatcaagggtggtcccctccaaagttgtcacctgaaaaggcaacaaacttaaaaatgatgcttccaaaacatcagaaaagatggacaagacctctaaacacaaaactacaaaacattactgagagaaattaaatatctaattaaacagagttaatggaacagaagactcaatatcatcaagaatataattctcctcaaattgatctgtagattcaacacaattccaaacattccagcagatagctgtggaaatttataagcaagttctaaaatctgtaaggaaatgcaaagggcttacaatagccaagacagtactgaaaaagaactaaagttaggagactttggctatcagatacaaagagaataaagctaaagaaattaacacaatgtaatatctgcacaaggattaacaacaacaacaacaacaacaaaaacagggccacagaacagaatagacagtctagaaaaagactcacatatacatggtcacttgctttgtgacaaaggtatccccatgggggaaaggttgctattaagtcaagtacagacctactatagacctaaatataaaaggtaaaacaataaacattcaagaaagtaacacagaagatgtcttcagtgggtcataaaaggatccaataaaagaaattaacaaattggatttcactgaaatgaagaacttctgttcctcaaaaggtatcatgaacaaaatgaaaacataaactacacagtggaagaaaacatctgcaacacaaagactcaaccagactatacaaagaactcctacatatcaacatgaaagatagccaaagttagaaaatgggccaaagacttgaaagaggacttcaaaagaagacaacattcaaccctttttttttttcctttttgtggagacaggagtctcattttgttgcccaggctggtctcgaactcctgagcacaagcgatctgcctgccttggcctcccaaactgctgggattacagacatgagctaacactcccgacaagaggacattcaaatggctaacatctaaaaaagtattcaacatcattagttattgaagaaatgcaagtaaaaaaccaccatgagataccactacaaacaccagaaatattccgaattttttaaatggataataccaagttttggcaaagatgcagaacaactggaaccctaatactctgatcgattgcagaaaaaatttatataatcactttggaaaacatctggcattatctgtgaaaaagattattggccaggcacagtggctaacaccagtaattccaacactttgggaggccaaagcgggcagattgcttaagctcaggagttcaagaccagcctggtttttgcaacacggtgaaatcccatctctacaaaaaacataaaaattagctgggcatagtgacatgtgcctctggtcccagctactcaggaggctgaggtaggaggatcacctgaacccaggaggtggaggctgcagtgagccatgatcacaccactgcattccagcctgagcaacagagtgagaacctgtctcaaaaaaaacaaaaaaagaaaagaaaagaaaaaaaagaaaaaaagaaaaagattctcttcttgaccaaattttagtcaggctcatttgaatcctgtactcacctaggcttccttctccatccttgtagaatccagttttagcaagaatcctactaagtcagtttagccagaatcccctaacaccatatttcatcacccgcccttgatatctgaccacattcttcattccctaccatttcccagcaatgtctgatcaccctggcctcagcctgccttcagcaagaatcctgttaggtcagtttagccagaatccccccacttaccttttagtaactttccctccactgacactgtctccccctaaccctgctccttggctataaattcccacttttccttgtacttggagttgagcccaatttctctcctccaatgcaatagtccctaaatctatcacaatagtcctaaataaagtttgccataccatttcaacgtgtcaagaatacttttttctttaacatctattaaagctgaaagtatgaatattcagtgccttagcattccactccacttctagagatacactaaacagaaatgcacacatatgttcaataaatgtrtaagaatgtttatggcagctttagtcactgtagtcccaaaacggaaataacccaaaaatccttcagtactagaatggataccaaaattgtgagatattcacacaatggaatactgtacaatgagaatgactgaactactgttacacagaacaatatagataaattttacaaacatgatgttgagtaaaagaagccagacacaaaagaaaatactgaattattccatttataaaacattaaaagacaacacttatgtatggcaattaaagtcagattaatcgctacctttcaggaagactgtttgatagctatgacccagagctcaccacgtcaaaggaaacacacttcatgaaggacaagtattcaagctagagtggagaaatgaaaacgaccaggaaggagtttaacagtcactcccctggtgctctagtttttccttcactctctttgaagaattcagtccttttcactgccattttatctgatttcgcctccaccccacacactccaaccacacacacaaatgaatcaatggtccataaaatcttccttcacgaaaattacagcaggacctattgctttatttctccccttttggaagaaaaggaaaccatctctatcacccagaggaacttacctccaaattcagcaaagaaccagagtttatgactccaacttcataccttatcaaaaccctacagagctggccccatcatctttagagttcagcctccaacttttacaatatctttctattaattacaacaataatgaaatagaatgcttatagactgaaggtggacactaaagtagtatccacaagaaattgtttgtcaaatccaaattggaagactagcaaaagttatttccattcaaaaatacatttgtagagggagaattatcaaaaactgtgtttaattgtgttaactgtgatgaaatgccactcctgactgctaaggatataaatggtattagatgatccctacgtggttagaaatgctttttttcctcgtctggagtatgctgaagaacccttgactatctaacctccaattcctctaattctgtatattcacttacctttaatttcacaaactgccatctttatgcttcctttgctccctttgcaaacatcatcttgtgaatcatagtaggataagattccattatctaaaacaaaccaacgaggctgccagcctaaaaagaccataaataacaaaaggtcaattggaaacacattactttcaccacatagaaaactgtgatttcaaaacctgccatccacattatttcttggctctcaaataacattycgataatgaaattttcaatcaccaagccttaccaaaaatgtttttgcatcagtctccactttattgggagaggtttctggagcaagctccagagcagcaaaaacacggggagtaatacttctaattctagctcacagtgttctcattaacaacccataaggcccatcctcagtaatagccctaaaccgggtatagcataactgccctcttttcctaaaaaggaacagagttggggttacgatattatgggaaaagccacagaagacaagggttctagccttacctatagtatcattctttaatggataatcataccctggggacaaatcttttcatttcaataaatctctaaaattcccagtccctaaaatgtgtaggttgaacaagatgacctctcaggtgccacctagccctctaattctgcaatgtgcctcttataaaatacatatttctaagcaaactcccttaaacacaatgagtgctaaatgaattccagtctcttaaatagaagctacataccctatggtgagaacacagattccccatatgaccccctcttcccttgtctgcagttgcacagctagggttgaaatcctagaaactgcaattgttcgattgatatttattcagtgactagagctcacatctatcacagacttggctccatgccaaagctgacgacaaggatgatgactttccttggcacccaattcccactcctctttgaagccaaacttggtgttccccggagtcttatcaagcatgctactaatttacaacagttcactgactattaacatggtgaccatgctgggagcagtgtgactgtccttgttctttccatgactattaaataacaattcagcacaaatattcatggctaaaatgtacattttaaaccatggatgttcgtatcccggtcacttttgccatagcctgccacatgatcaatttgatctttccagggtcagatagtgccgagaggggagatgggtcagtcatccttacactttaatacagatccaggacttaattccccaaaaggatttatctgtaacacttttgaaatgacaacactgagtcatcaaaaagattaaattttactttgtaaccctgtttaggaaggcagggaatgcagtaatacagttcagaaagagagatatctaaagcaactaaaaaccagcaactttcaggttcctggaagattcctttttatgaaacaacagagtattccctagtgagacctaaacaaattagaaggtaagttattttggtacatggactttatcttgttcatcactgcattcccagcaactagaatggtgcctggcacataagaggtaccaaaaaaatctatttctcaagtgactgaataaataaatgaatgaatgaataccccaaaagtgagatatttcagggattgttgctgttgttttgtttggttttttgagacaggatctcactctgctgcccaggctgaagtgcagtggcatgaacatggctcaccacagcctcaacctcctaggctcaaaaggtgctcccacctcagcctcccaagtagttaggactacagaagtgccaccatgcctggctaattttttaattttttatagagacgaagtctcatcatgttgcccaggctggtctcaaattcctggactcaagtaatcctgccatcttggcctcccaaagtgctaggattacagatgtgggccatcacaccctgcagatatttcctattaaccatgagagtatagacatacaatatatctttgagagtatattgtattgatcatgcatggaaatgataaaaacattatctttccaaacactaatttaccttgycaaacaaattataagcagggggtggtgaaaatacattcctccacccaggtctagtgtgcctataggacaaattatgattttgcaagcctgcagtactgcaattcaatatctctttaaaacaaatattgggcaaaatgattcatttagaatttgcagcaacgtgaaaggtgagtggttgaacacattaatataatcaagcctgttaattatctctacacactttttgaagaaatatttaataaaacaatttctaattggttcacacacttatataacagagggtaatatctgtgaaaaagattcacaggtattccctttttaaaattcttttttttttttaattctttttatctcaaactacaaaatgttactgaaattcttactctctacaaaggattctcaaataacactttttttttttgagatagagtctcgctctgtcgccaaggtttgagtgcagtggtacaatgtgggctcactgtaacctctgcctcccaggctcaartaattctcatgcctcaacctcccaagtagctaggactacaggtgcatgccatcatgcctggctaattttttgtaatttttgtagggacagggtttcaccatgttggccaggttggtctcaaactcctgacctcaagctatctgcctatctcagcctcccaatgtgctgagattacaggcatgagccaccgtgcctgaacaacactatcattacacttaaagatcacttagtatgaacagctgctcattcttatgacctaagatgaactaaaattaataatcagcacaccatctacccaaatttaacttttaaaaataaattcttccaaacaaaagatttcttttcaaccagcttctacaatgcatactagaagttgactaaatgccctgcaaagactaaaatctaaatcacatgtgattaaaagctcaacccctggttatttagtaccataggagataaggaaatcgccaccaagcccaggtttcatctcaactcttaaattatgactcatctcagtaatggcccaatggttccacaacaccatgcttaggaacacttgcaatgagatgagcatttgcatctcaaagcatacaagctaatgtctttttttttttttttttttgagacaggatctcgctctgttagccaggctgaagtgtgtgggtacaatcatagctcactgatcctagctcactgcagcctccatttctctagctaaagcaatcctttcgcctccgcctcctcagtaactgggactacaggtgtgcactaccacacctagctgttttttgtttttgtttttgtttttttagtagagaccacgtctccctatgtggcccaggttggtcttgagcaagcaatcctcccacctccgcctcccaaagtgctgggattacaagcatgaagcactctactgtctttaacagttaacactatacctcaaccaaacagtataactgctctcacaatggccaaaatgaaaatgcccaataaaaaatatttatctaacttttaaatgtttcccgttaaaacatgtcacttatagaaataaattgagtttttagtttgaacaaaataaaacatctgtgtatcataaatgttaaaagcatttgctgctacaaatctggctttagcattctaataaatcaaaaagcaggtataactgtagctcagtgcttatgccttaaaaagtttacctgcacattttgcacaagatcaggtggacacaagtcgagagtaccacacaattactgagggatgtgatacttttggcagagcgaagaagtgggcagcaagtcatgatttgcctattatgctagacccccccccccaaaaaatctgtttactgttcaaatttatgttaaaaccatcttctcacttagtgaggtcatggaattctggagttggaaggcatcccggggcaaaataactaatcaccctggccttatcagactgaggtcctgaaagaataactgacttgccttcattgttggttgatggcagagattggactacaactcaaatttaaggagcttttaaataagcctacaggctgccaatgtcatggtaaggggccctttcctgctggtctctcatttcttcaaagtttttccttccaacccacttcacaggtgaaagtgacttgcctgttccccttctgtgtattgacactttcttccactatttctcagttaacagaattccccaamgtaaggatacttcaatgacaatccctaagagaatattatctggggacagcttccaaaatcatgctcgctaagcttgaacaacctcaacaagacaacgttttaaataaaatgttaaggaaattaaaagaaatacaaaaaagaattaaaattaaatcttgtagttgaaacaattaaagggtccattccagtccaatactccgacaactcagttattaacaaaatgctcttaaagtatgaatactaagtgtgaataaggacggagatcgcaacaacacatgtagggtgactgagaattgttcctgaggctacaggaggcaaggattagtattattacactagcaaagaagtggcaggtgcacttcccaccctctagaaggtgcgcagcctcaaaccctcccctgaagaggccagaaggactcaacaagccctggaatcgagtagagcgaattcgctctgagggtccgcggaggccagacggaggaagaggagccccgacccgccttctcagcagccccccgcctctcccctcttccctcatcacacgagcccccatacctgtgagatagttggtccacttgtacaacacccsctccatgcttcagagccccacaccgcgcatcctcccggcccggcgccggccgcggtgatggggtaggcgcagggcctggggcagcccctcccggcccgcccgggccccctccgccggcacgaagccgctttctgcctgcgcgcgccgcagggacgtggcggcctttagaggccgggacagcgggcgcagcgtggagcttgggggccgcgaggcgcgggcccagacattcccgggtaagcctcggcggcggcggccgcgacaacggcaaaaatgcgcccgcgaccggcctcctgctcgcgcttccgcagcccggctgctccctccggcgccccggcgctgcctcttcctcgcctgccttccttccccctgggctccccgtttgttttcattgaccccgacgtcgatttcacttcctggatgaaaggggccggatcgtcccgggaaacccctccccggcggcggggctgaaggagcgggcgcggcctgcggcctcgccgcctagccggaggctgcgcgaggagggcgggccggcgcgtcacaccctcggcctgccagccagggccgcctttactcctcccacgggccggtggccaacagtcccgaggctcccaagtttccccttggccgccaaggcccaggctgaccgcccccgggggacaagaccttcgagctccgctgcgcgcgcagccccggtgcctacctaaggaggagctgcccgcacactcatcccgcgggcacttagttctctcgggttttcctgggttttcttcagaaatacataatatcctgtttcttcatgaaatcctgtttttattttacataaaatcctgttttttcttcaaaaatacataaaagccttcctatttctgtttgcttcgtattttcctcatattcaaggggtctgaaattatctcctaggaaggcaatgtgcagcagacggggtcctctgacaaggaatggcgagggcccccaaggaactgtcatcacgccgataaccttggatagccacaattttatttagaatataaaacatggaactcgacttcggaattttagtctagaaatggggacttccccctagcttttatgatttttgaaactcctgcttggacgcaattgtcatcttgcataatcgacagtaattttcaggtttatggaattttgcaaactttaagcaaagcacatcaatcaggctcagtgctgcggcttttcttcgcatcaccgaggtagaatagcacctctactcccagaacttaatccaggcgaatgcagaaggcctttgctggttttctggtttgggtagtctttgggtattcacttggaaacaaggcgaattgatggatggatagagtgatggatggatatgtaataaatataatatagttcaatgacaggatccagatggtgggtgtaggagagtttactgtagaattcaactttctgtgtattttaaaggttttcatactaaaattggtggtgaagtggtgttgtcacacagatttgaccaaatccctgctgcgtattagctgtgagattgggacaacatgcccaatactcaagttttcttgactgatgtggacaattacgtatcccatgggatggtacaaaaaagtcaaaagaacattccccgcactaccagaggccctcgaatcaagggcggccccgagtggcggggaaaagaaatgcaagccagcggaggatgctgaattgtggaggtcggctctcggaaacgcctgcagccaggcagaggagttgcggtaccgcagtttcgttgcatcgggctggccttcaggttgtgcgactcagcctggaacctctgaatgcaagattccgacctgagaatgcgcttcaaggacacctccgaagcacccagaaagccaccgccagcctattttttacgctccttttccagcatgcctctccctccccccagtatctatctgctcgttccctaggggtcttagaagccttttgcttccagaaatgacaaccatattccctgactctacgacatcccaggctgtttatttcgtcttatgccagtttcattttagaaaatgcgaatgttgtcaccgaaccctgaggaaacctgctgtaaaatacgcgggtttagcgagaagaagcggagcgagtgtgcgttgcgatcttaaagactgaggacagccagcccgagggcctagaaacagcgttaaccgcgctgagcccgctgcgggaggcggaggggttggggccatgagagggcggggccgcatctatggccccgccccggccctttgtgacgcaggacaacgcctgccacgcgtcggaactcggccgcgggacatccacggggcgcgagtgacacgcgggagggagagcagtgttctgctggagccgatgccaaaaaccatgcatttcttattcagattcattgttttcttttatctgtggggcctttttactgctcagagacaaaagaaagaggagagcaccgaagaagtgaaaatagaagttttgcatcgtccagaaaactgctctaagacaagcaagaagggagacctactaaatgcccattatgacggctacctggctaaagacggctcgaaattctactgcaggtaggaaatgctgcgagctgcccgtgcgtccagttgcacaaaatcttgcctgcctccaccaagcggaagcctcattggttggttggttggggttttattttttaacggtaaaagttgagccctttattcattaaaaaaaatcacattatatggcagtgtttctctaataaactgaatatttttatttaaagtattgaaaatgttgtggcaataaattatcaaaaatacgatacatccacacacacatcaaccaccaccattacccttgggacctccagaattaaatcaaggttctgcctataaggatgttcacatttttcccttgccagaagtattgagtctttacggaggaatacatggaataaagagatttaattctggccttcagaagcacgatttttataggttgtggccactttctatcaagaaaaacagttacttccctggtgacttctggtgggccctgctccctcattccacctggtgcctactctgatttaattgatggcttattactcagagggagaatcttttctttaccctgtaaagataggactgggaaaaacagttccatccatttagaataaaatagagaaatttaataagaatttatacaattttataatttaataagaatttaataaattatatcattagaatttaataagaaaatataccattttaaattactattaaaatgactttttgaggctaaaactgccctatcatttttttacaacaaacccagggagttaaatgagttctttgtacaagccatgcacctagttaggggctggagacccattaaaaagttaactgttgaatagtttttgtaaagataacaattttaaaaaatgagatggctgttaatgattaactttgggcaaatcatacttctttctggtgattatagggaagtttgagtcaaacaccccattaagggttttagaaagagtgattatatgggaatgatggttagagaggactccaattttaaatgcccagctgtattttcaagtttgatttcttgaaatcagtttacttaagtattgctttttgttatagccggacacaaaatgaaggccaccccaaatggtttgttcttggtgttgggcaagtcataaaaggcctagacattgctatgacagatatgtgccctggagaaaagcgaaaagtagttatacccccttcatttgcatacggaaaggaaggctatggtaagatgtttaattttaatttcttgttttagttatatttaaaaaatgattaatagatttctgggtatataggtctgaaagaattgaaagcacagtctcaaagaaatatttgtacagccatgctcatagcagccatgtacaatagacaagagatggaagcaagccacatgtccatacatagagaaatggataaacaaaatgaatacatgcatatatggaagccaggcacagtggctcatgcctgtaatcccaacactttgggaggccaaggtggtagaatcacttgaggccaggaccagcctgagcaacagcaagaccctgctctacaaaaaaaaaaaaaaaaaaaatgaaatggaatattattcagccttaaaaaggaagaaaattctgagacatgcaccaacatgtatcagccttgaggacattatgctaaatgaaataaaccagtcacaaaaagacaaatactgtataattccatttatgtgaggtacctggagtagtcaaattaatagagacaaagtagaagggtgattgccagaggctgaagtgagagggaaaaggggaattgttgaccaatgggtatagagtttcatttttgccagatgaagagttctggagattggttgcatggtagtgtaagcgtactttactgaacaacacacttgaaaattgttatgatggtaaattttatgttatgtgtattttaccacaattaaaaacaaaaaagtgaaataaaaaatgatagatgaaataaagagaacagtaaagcccaatgaccttaagctctatctagttcagtccagtcccttctttttgcttataaggataatatgacattgtttgaatatagatctctggccagagttctttcttctacattgtggcaacactcatgatgattatatatattctataagctctaccttaagcatttttatttgttttcagcatatgttattattacataaatatttataacacagatctttggtaagcagtaccaaagttaaattcataaaactcagaaactggaacatgtaggtttagagtaaaaggacaggacgggcacattgtaaaaggaacagctgagatataatgggctgtcagtcattattaccccaatacaggacaagccttcaaatgtgcaagaaatgatcttattctttcaatatcttgtcattttaaaaatcctacagcaaaaagatctgaaaacctaggtaaagcaaataagcgggaaaaatgtttgtaacatgtatgaagacttgctaaccaataatgaaaatgacatatccctagaaatgggccaaattcataaataagcacccactaacaaaaaactacaaatggcctttaagtctatgagaatacttaattttattcataaagagaaattaaaaatgagacatcatatttcactcatcagattagcaaacacaaaacaacttggcaaaagcatggaaaaaccagcattattgctgggaatggaaatcattcaacttctctatcaactgttatcaaaagtgaaaatgcaggcccgggtgtggtggctcatgcctgtaattccagcactttgggaggctgaagtgggcagatcacttcaggtcaggagttcgagaccagtctggccaatatggtgaaaccccgtctccactaaaaatacaaaaattagctgggtgtggtagagtgtgcctgtaatcccagctacttgggaggctgaggcaggagaatcgctcgaacctgggaggcagaggttgcagtgagccaagattgcgccactgcactccagcctgggcaacagagcgagactccatctcaaaaaaaaaagtgaaaatgcacgtgccttcttatccaatagttccatttccaggaatgtgcacaaaggtatatgtaaaagaacattcactgcaggcatttttgggtgggagggtggcaaaaggttggaaaccacctgcctatccatcaataggaaattagttaaataaattatagtatatctatacaatgaattactgtgtaaccagtaaaaagaatgaagtagagctatacttattaatatgttaaaaataaagtggaggccaggcatggtggcttcatgcctataatcccagcactttgagaggctaaggtgggaggatcacttgagcccaggagtctgaaagcagcctgggcaatgtagggagacacaatctctacagaaaattaaaaagttagccaggcgtggcggtatccgcctgtggtcccaactactcagggggctgagatgggaggatccctggagcctgggaggtcgaggctgcggtgagctgtgattgtgccactgcactccaatctgggcaacacagcaagaccctggctcaaaaaaaaaagtggacaagactatattccacttttgggatatatattgagcatcagtgccaggctttgttctaggcactgggcataaagcagtgaccaaagtagacactactcccaatcctctatgagctttcatttcagaggaggagtttcacatatgcatgtatctacacagaatacatctggaagaatatgcagtcatctgatgacattaagtgttcctgggaaggaggcctcagggtcaaggatgagaagatttcttttcactctaacattttgtaccatttgaaagttttataaggcatgtattaatttttccaaaattaaaattttaaattacaaaaattgcatgtagcagaacagagaagaaaatttttaaagcaggcaggaggatgggcagcctgataggctgtaccttgcatccttagttaggttcttgctccgtgttgctgcttgaaggctatacagaaagaatctttgcctccttaccctatttagagccactgctgactccaccggtttgaaatagt

SEQ ID NO: 98263 - DNA, 24071 bp, Homo sapiens
cctaaaccaggaaacttttacctggaaagaaaaacagatacaaaacataaaaacgaaaagcaaatataacagaacagaaaaagcagtaccagggaaagtggttaggacagaggttcccaacaagattagcaatcacagtagcggaaaccagaaaagttggaaggggaagaccaacttataaattcttgatctgaaagtaacagtgaggaaatagaatagataataaaaggtaaaatatgactaataacttagtaaagtggaaaatggagatgacaagtagagtcctgaaaagtcctcaaaggaagactccgctttccctattataatcccaccgttatggatgcctaactcagcagccatcagtcaagggtgatagatgagggtcatcactgcgcaaagcgctcacctttcgaaaagaaaacatcatatggccgccgtccacctcccatagctctcagcctcccacttctcagtatcctcccttccgctgtttaagcaagccttgtgtaattagcatgggggggaggggcggtgcaagacaaatggctcggccacaaaaaaacaaaattcatgtctccaccctacaataagaaagctaataggtgacagagaaaggcaatccccgcccaggctttaacaggatctttaccaagtggtctcacatcactgttacgctacgaaggtgagactccttttggagaaacatacaatgacaccaatcgtatcgtaaacacttggaaggcactccaaattaagttgggcaagtcaaggtgagaaaaatccaactgggcccagaaaccagctcctcctcccagtcccaccgagggccgaaaaagagctcaagaaagaacaaggaaggtgagaagagccccgccctccgcaaataccaagaccaagggacgccgagcaccgcctctcattgatgctgaggcctccaatatgagaagaacccattggaagaagggagcaaaacgaacacaatggcgccgaggacaccatcttggattgggtccccccttagcttcccttccttcccccaggagctctttgctctcgaaagggatgcaagctaaggaaatagcgaaccaactaggccccagcgaccagaccatcgcctgtgaaaagggtatcaggaacccatgtgacgggatgggtgcggagaagcgcagatggaaacggattgtagcgaaggccaaagcttacctaaacagggagagcgcgtatggcggcagcaacagcgacgaaggagggaaatctgccttcacttccggttgcaggcttccctctactccagcctcccgccttcttggctgcaagagcgcaggcgcaagggaccggaaacagggccttccgcggttatacagatccgtgcgctccaggcttgcctttggaaaatgcctgtctgaaatttgttttaaaaccgtttctaacttcactgctacctccagtaacaaaagatataaaggaaactaacgtctcccccccactgttatctttattctcttatcctactcctctccatgcccctcatctcttcgtttaggtttttgccacgcaggtcttctctgtaggcacccctccgtggatgcgcgaggaacgagtgtggcgaaggctgcgagttcccacggggtccttggcccggtagtgaaggtgacctgaggactgctgggcacgcactaggaaccggcaggccctagctgaggggagggaggagggaagtctcagggaactggattgctcgggggtgtttcccgactctttcccagtcgtggggctggtgggcggtattttcccaaaaggatgctgtccgaggtagctgatgccctagggccagtgagtcaggaaggtgttctgaatccgagcgggaagacggggtctggattcggccccaagtgttaatagtagggcttgagggttatactacattccattaatactgtttttgtttttgttttgagacagagtctcgccctgtcgcccaggcgggagtgcaatgtcctgatctcggctcactgcaaccgctgcttcccgggttcaagcgattctcctgcctcagcctcccgagtagctaggattacaggcgcccgccaccacgcccagcaaatttttgtttttttagtagagacggggcttcacccatgtatgacctcaggtgatccacccacttcggcctcccagagtgctgggattacaggcgtgagccaccgcgcccggcccattaatactgttaattcgagcagaatgttcttggccccgccccaacagccccattgttcaacctggatttttttcctgaatgaaacatttgctatccccgtctttgagatggggagccacaaaagtaagacctgatgtcctgctgtgtaataaaacaacaaacgtttggccctctccctgttaacatacttaatcatttaatactaaggagtaggtaccgttattctcatcttattgacagaagcgaagcaaagcaacatatctcaagcagtacggctggtgaggttacagccaggatgcaaacatctctcattctctattgtattctgcctccctgctcaaagaatctggttagtaaatacactgcaggttaccttattggttcaaattcttggtgaagtaagcttgtcttcagtgacaaatgaagtaactaattcaagaatggtgtcatagaaggtattttcccaagtatcatttaatttattcaaaagtatttatcaactgcctcccttgtgccacatgttgtcctaggatctggggacacaacggtgaacagccctgttctcacagtgtttacattacaggaaagaaaacacataaacacaaatataatgtcaagtatcgataagtggtcagggtgcagtggctcaggcctgtaacccaacccttgaggaagccgagcccgaaggattgcttgagcccaggagtttcagaccagcctgggcaagtgagaccccatctctacaaaaaattttaaaattagcaaggcatagtggcactcgcccgtaatcccagctactcaggaggctgaagtgggaggatcatttgagtccagggggtcaaggctgccgtgagctggaactccagcctgggcaacacagcaggaccttgtctcaaaaaaccagtagcagtaagtgctatgaagaaaatgcaaggtaaaggggcaaagagcacttgctcctacactccagcttttctctacagttgcgatctatagtcctcagattcccaaatgaggaaccatgtttctcactttagagaaataataaagtactacttgttcttgtttctccaagaagtttcaaaggatagccatttgggctgtttagggaatatgtaaacaaaaaacaagaaagtgactgaaggccaggcacagtggctcacacctctaatctcagcactttgggaggccaaggcaggtggatcacttgaggtcaggagtttgagaccagcctgaccaacatggcgaaaccccatctctactaaaaatacaaaaaatagccaggcgtggtggcacacacccataattccagcaacttgggaggctgaggcaggagaatcgcttgaacctgggaggcagaggttgcaatgagctgagatcacgccattgtattccagcctgggcaacaagagcaaaactccatctcaaaaaaaaaaaaaacaaagtgactgaaaatgagaaatgatgaggcaaaaggaggctgcttcaactcaccaatttatttgccaataattattttattgatactttttttattgttacaatgggaaagtaaggtgtcaaggatatagaaaggaagggcatgcatatgagggaacacagtatcattttagatcttagaaagcaatgagcatctgataagtctttggggaaataggaaaggaggaaaatctaataaagacaaagatcagcaaaagaaaaacaaagagaggctacaaaatgcagttatctacctggaattataagagaggggctaaatgtagtcatctcctctttttggagatcagaaggtctctgggaaaagagaagaaccaatttttcagaaaataactagggtcacagaatgaacaagtggaattagagagccagtgatggacgtgaggaaacagctgtgtaggttttgaccagtgagcaggtggtggtaatagtatcacagggttgctacttactgaatcactgctacaacatgcaaggaactgtgctagactttacagaatgattcctaatcattgaagcaaccctcacaaggtaggcattattatcatcccagtttcacagaggaggacatcgaggctaccaagttaagtagcttgtcctggtttcacagccagcaagtgacagggtcaagagagggacccacatcggccagacactgaagtcaggatgttttccacattcctacttccccatattacaaatttcacagagggtttaggtgagaatgacttggaagtttacaaagtcccagtgagggttaaagaacaacaaggagattcagatgtgagcaggatatttataagtgtcacaggaaaattattggatcctgcctcccaggatttctaggggatggaaagaagacagggattatggtgggaggtgattttgattggaggatttctttgagggagggaactggcagaaggagtcaggccctacggtggccctaggcagaaatccggtagttggggtggacctggggcctgacgtcgcagaccatgccaagaagctgggccaggacacgctctcggtttctctgctgggagctctgcatgccctgcacctggcgccttgtagcctgctccacctcagcagacaggttcccctgggagcccatggcctggggggtagggagaggggtggaagagagaaagggaaaagcagaaacagacaagggtccaggcatatgaggggaaagatcctgaaacaaagcctagaagaaaggccctctcagaaaccacccccatcccacagaaatatcccaacaccaaagagatcaacacagtcccctttccccttagacctaacatgcaacttcatcctaaaacagaccgtaatatccccaccacctcaccatccatgaccataaaactctaccctccaccacaaatgttaatcatactccacatagatgttatactttacacagactgtggcattccgcccacaagctctatgtggccttcaaaactcccagactctcctacatatcatcacaaagtttcaccaatgttgtggtccctgccagggtcccctcagcctcagccctctgccaccatattttcttgttgagtcacccttacacacctcactagatgcacccaccaacttgcagtggggtctcatcccgactctgcctcaactcaccgcctgctgcttgctctggaattcgtgctctcgctctctgcggtattgctccacctccatctgtgcctcctcctttgcctgcttcagtcgccgggccttccctggaggcagaagaaaggacagtgagtggggatggacccacacacacacaatgtaatagcaggagtcagtcccttccagaaagttatacagccttctctcagccaaccaggtgccagattctaatatccatccatttcttccctcctaaccagcctccagaccctagctgtcttcccgccagccttgggttttcccaaaatgtttgctgtcccccacccccaattttctttccaaactcctaagggaggaaagaggagactcactctttctggcatctgccaccttctcagctgcccgcttctcagcttgcagaagctgctggataccttgggactgactggccatttctgttgttatggccgatgctgttttgaatgctgtcaaagtaccagatggctcccaccccccaccgcttacttctcctcctccagctcgttgctgcagtcctccactacccctgggtcttagtgctcccctgctcactcagcctcctgcaccgagtgtctctcccaatctcatcctcctattgatgactggtcctcctctccagcacttcttgctcaggcagtacccaaaggggccgcctgggagcagcagagaccaggcccaaagctgcgggcttacaacaggttagccatcccagtcggaaaggtctagggatgaggcaggggcggagacgggggagtactgaggtgagagaaggagaacttgattggtggtaacagaggaagcataaagggttgtgaatgcggtgaaaaggtaaggatgtcatcatgcaacctgtgttgggaaaagagcattctgggcttaattctaaactaactctctacctttctctctctctccaccatcccgccccctcccctgcctcccgttgttaacatctccatctttttctacatatttctcaagtccaaatttttgcatctcacttgccccatcctacgatagtcttcttccgtcttttgtctgtattttttcttttttttgatctgtccctgttgttgtcccactgtggtttttgtttttgttttccatgtttaatgtgatttttatcctgtctttatctcctctattttctctgtcttctcatcttttcgtccatcactgaaccatctcctctctctgccaagttagaggaggcgggaaaaaacctccaaataactctcttttctccctcccctcccctcgcctccttttcctcgcctccagtccagtcttctggtttcagacggcccctttaatttaagttccctagtttcccctgggagatctggccaagaactacccggtcggggcggaacgacatccggtaacgcccctcacagttcacttccgtcctccaccwgcgtctctgcttgcgccatttcctccagcctggagtgtctccgcccttcccgcctcccgtctccgagcttcttaaacacaggccttkggsctacggctctgggggtacttgggggggcgggggcaggtctgatgagtaacccctccccccaggttccagaggaagaagcctccacatctgtctgccgggtacatgatattcaatttctagatcattattggagattatctgtgactttttaaaactcagatttctgctgataaaaattttccccatccggccctgttgggtttttttaaagttctttgttaaaaattaaaaatttacctgggctcctgagccttaaaccaattatttacccttttctcgaattttacattaaaaaaattaaacctctgatcctatcacccccctcaaaaaaawttttttttcaaatctatcatctgataaaggatcagrgttaggttaggcctcatctcttgctgaagatattaaaaaaagacggaaccaaagggagaaacaacaggggatgtcagagatggagggagaaggaccagccaaggctgaagtcctgactgctgccttttttccttccccagcccaagagttccatggcctccacttcccgccgccaacgccgagaacgtcgctttcgtcgttacttgtctgcaggacggctggtccgggcccaggccctcctccagcgacacccaggcctcgatgtagatgctgggcagcccccaccactgcaccgggcctgtgcccgccacgatgcccctgccctgtgcctgctgcttcggctcggggctgaccctgcccaccaggaccgccatggggacacggcactgcatgctgctgcccgccagggcccagatggtgagtctgctcagtggggaacaaggtcataagcagctgaccagacctgaaatgaaagccaaccaatagttgagaaataagctggttatttggtcatcaggacctagggaaggagttaaccaagttggcatgtggctgtcatttgtscctttacattactgagctaccattgtctgaagaacccaacattccccaaagatcaactggtcttcaaatttcacatctgtttagattagtagctactttgtttcttgacagattgtttgctcgtagccaaaaagtagcatagaaggtaggctctggagttagattgcctggattcaaaccccagctccaaatcccagctccacacttcatagctacgtattcttggacaggttacttgaggcttagtttgcccatgtgtaaaaattaaaataataacaacctttgctatgtgccagacatttcttataaagtaacacatttaatcctcacaacaatcttaggaggtgagtactgatattatcccccatttcccagctgaggaaacagggcatagagaagtcatttgccagagttacagttattcactggtagagcagagattataacccagatggactagatagagtgtccatgcttttaacagctacattgtcctgtgttatacattatagcattgtacattgattgtgcccatgttcagagtacccatgttgtgccatatatgttttgagaatcaactgacatagtacataattagagtacctggcacacacgataagcacttggtatatgctggcgattgttgttcctgtttctctgttttttgtttttgtttttgttttttatgaagtttcactcttcttgcccaggctggaatgcaatggtgcgatcctggctcactgcaacctcyacctcccaggttcaagtgattctcatgcgtcagcctcccaagtagctaggattacaggygcatgccaccacgcccagctaatttttatatttttagaagagatgggttttcgccatgttggacaagctgatctygaatgcctgacctcaggtgatccaccaacctcagcctctcaaagtgctgggattacaggtgtgagccaccacacctggccttgttcctgtttttgttatcaacaggtccatactcccttaaccacaattctaaactcaaaaacactctgagaaccaacatttttcatcaggctgccaccaaaattcatttggtgacagaaacctaatctgaactaaagtaagactattatttattttcatcctactgatgtcaatattcatacatttccctgcagaaacactcatgtgtttggttcttgggctgcctaggccctcctgggctacctaatatagagtgagtgtacttttaggtcagccctatcaagtcccaaaaacatttgaattctgcaaaacctttggcactgaaggattcaaatggggaacctggtgatattataatagtggtggrggccaggtgcggtgggtcatgcctgtaatcccagcactttgggaggccaaggcagtcagatcacgaggtcaggagttcgagaccagcctgaccaacatagtgaaacccccatctgtactaaaaatacaaaaattagccaggcatggtggcacacacctgtagtctcagctacttgggaggctgaggcaggagaatcacttgaacccsgaagacagaggttgtggtgagccgagattgcactactgcattccaacctgggcaacacagcaagactccgtctcaaaaaaaaaaaaaagagtggtggaagcagctctttataggtagagccctgcttactagaataaaagctgaaaccttctttccccatctagagatttccttctggagtaagaacattacaggaaaacctctagatccagatgaacaaccctaacatcccccagctcaagtatagacagaargcccctcccccraaactcccccaaatggtcaaaaaaccccctatttaaaaatttcctttaacgtacctgagataggctagcatattcagatttgtttcttgttgtttttacttaaaacagagtaggtttactgagtgcaggcatctaacttgacagctcatattgtaagaggcaggaccctggaaggcaaaagagcrgattaccccgaagcagacctgcatccagaccccagctctgccatcaacagggacatgcagcttacctctgtgagcccaatttgcctcgcaaaaatgggagttttgttttttgttttgttttgtttttttgagatggagtttccctgttgttgcccaggctagagtgcaatggcgcgatttcagcccacctcaacctctgcctcctgggttcaagagattctcctgcctcagcctcccaagtagctgggattacaggcatgcaccatcacgcccggctaattttgtatttttggtagagacggtttctccgtgttggtcaggctggtctcaaactcccgacctcaggtgacctgccagcctagcctcccaaagtgctgggattacaggcgtgagccaccrcgctcagccaaaatgcccctgatagtgtggtagggatttcctttattgtttgtttgcttgtttgttttgagacagggtctcattctgtctcccagcctggagtgcagtggtgcaatcatggctcactgcagcctctacctcgtgggctcaagcagtcctcccacctcagcctccctagtagctgggactacaagcacacaccaccatgcccagctaattgtttgtatttttggtagagactgttttgctatgttatccaggctgttctgcatctcctgagttcaaacagtctgcccacctcggcttcccaaagtgccgggactagaggcgtgagccaccacacccaactccattgtattgaattttaagaagctggtgagactgatattatcccatttacagatgaggaaagcagggcccaaaaggttcgggaacttgtctgaaatctcacagctctcaggtcattgtcttccaaagggggacccaagctcagtgccttcactcccagaccctggtgtcctctctggccttatttactcctggtcctctgccagccctgccaccagatggccttctaactccttggttgaaaggcccatctcattcagcttccagcttcctttttcttttccttttgagacrgagtcttgctttgtcgcccaggctggagtgcagtggcatgatctcggctcactataacttctgcttcctgggttcaagcgattctcctgcttcagcctcccaagtagctgagattacaggcacacaccaccatgcccagctaatttttttatttttatttattaatttttaaatttttatttgtttatttatttttgagacggagtctccctctgttccccaggctggagtgcagtggcagtatcttgactcactgcaacctccgcctcctgggttcaagtgattctccttcctcagcctcctgagtagccgggactacaggagcctgccaccatgcccgactaacttttgtatttttaatagagatggggtttcaccatgttggccagactgctctcgaactcctgaccttagatgatccacctgcctcggcctcccaaagtgctgggattacaggcatgagccaccatgcccgacctaatttttgtgtttttagtagagatggggtttcaacatgttggccaggctggtctcaaactcctgacctcaagtgatccacccacctcagcctcccaaaatgttgggattataggcatgagccaccgtgcccatcccacagaatgtcttttggttttgtttttgttttctgttttgttttgttttgtttgaaaaggagtctcattctgtcgcccaggctggagtgcagtggcacaatctcggctcactgcaacctccacctcccaggttcaagagattctcctgcctcagcctcccaagtagctgggactataggcgtagggactgtaggcgtatgccaccacgcctggctaattttttgtatttttagtagacacggggtttcaccatgttagccaggatggtctcgatctcttgaccttgtgatctgctcacctcagcctcccaaagtgttgggattacaggcgtgagccacagcgcctggccaaaatgtttttatgtttatttttcttagtatgaaactccagcgtattaaagagcattgagaacggttgatctggtaaatcgctataaaggcggcatttcttttttttttttttttttttttttttggcgaagtgggggatggagtctcattctgtcgcccaagctggagtgcagtagtgtgatctcggctcactgcaagctccgcttcccaggttcaagccattctcctgcctcagcctcccaagtagctgggattacaggcgcccgccaccacgcccagctaattttttgtatttttagtagagacagggtttcactgtgttggccaggctggtctcgaactcctgacctcatgatccgcccgcctyggcctcccaaaatgctgggattagaggcgtgagccaccgcgccaggcctaaagggggcatttctaatactggagaaaggtgaactttttttttttttttttccgagacagagtctygctgtgtcacccaggctggagtgcaatggcgcaatctcagcttgctacaacctccgcctcccgggttcaagcaattctcctgcctcagcctcctgagtagctgggcacctgccatcatgcccagctaatttttgtatttttgtagagatgggggtttcaccgtgttggccaggctggtcttaaactcctgtcctgacctgaggtgatccacccacctcagcttcccaaagtgctgggattacaggcatgagccactgtgcctgaccaggtgaactattttataaataatattggaacatttggctcatctagggaaaaacaagagtcccacctcacacctaatcaaaaagtaaattccagcagattaaatacctgaatatgacaggaaggtayacaccaaattcatgggacagatggcctggggaggaatgaaacttggaaggcggtatcacsgtaaactacctttatctgtgatgattttatttccttaaaataaattatactacaaacatgacagtacattaacaaaccctgtggtaggaatggggttgtgtattgtattatactttgtatttttgagagttttttaatttcttttttgttgttgttgagacagagtctcactctgtcacccaggctggagtccagtcgcgcaatcttggctcactgcaacctctgcctcccgggttcaagcagttctctgcctcagcctcccaagtagctgggattacaggcatccgccaccaygtcaggctaatttttgtatttttagtggagacggggtttcaccatcttggccagactggtcttgaactcctgacctcatgatccacccaccttgggctcccagagtgctgggattacaggcatgagccaccgcgcctggccgagttttttaatttctaaaaataaaaatgagtatacatctaaagtagtagaagaaaatgcagagaatgttttataatcttaaaatagagccttcctaagagtgaagtgaaataaaaagtcagaaaataatatattgatatagatttaactacatgaaaattttagkcygggtgcgrtagctcacacctgtaatcccacactttgggatgccaaggtaggcagatcacttgagccaggagttcaagaccagcctgaacaacacagtgagacctggtctgtacaaaaaatacaaaattagccaggcgtggtggtaygtggctgtcgtcctgtagtcccagttactcaggaggctgaggtgggaggatcgcttgagcccaggtggggcagagtttgcagtgagcaagatcatgccaccgcactgcagcctgggcaacagggtgagaccttgtctcaaaaagaaaaaaaaagyttttttaaagatagatagaagaaaatgtttgcaatatgtataacacatacagtatatagaaccctcatatcaatatatataatttccaaagaaaaagtggataaagaatatgagcaattcattcacaaaaaatacaaatagccaaaagacatgaaaaagaaaaaaacattgttaataaaataattttttaatctatccaactggcaaaattaaaagggttgatgatattcaattttggtaaaggaagacataggcacacttgtatattggcacaaacttattgagagcagtttgaccaaattgcgcatgtcctttgactcagaaattccacttatgaaaatctacccccacagaaagactgtaagatactcatgaggctgaacattttttgaaacaaagtctatcgatattggggtaaggagatttgttttgtacacacagtggaacactaattataaagtcgtcaaaaagtatgaggtagactgtatatattcctgtggaaaaatataaatgagatgttaaatgaaagaagcaagttgccaagcaatatttgtagtatggttacatatctccaaataaatgtgtcatatgtatgcttttaggtacaccaaggtgggactggaagggatcacagtacactgttaatagttatcaaatttgttcgtccttctttaaaaagaaaatttcaacttaattatatccctttcacattaaaatgtcaaataaaattgggggaaaagccacctacagccccaccacccataggctagaatttttacatattttttgccagtctattttttttcttttttttyttttttttttgagatgggagtctccctctgttgcccaggctggagtgcactggcatgatctcagctcactgcaacctctgccttccaggttcaagtgattctcctgactcagcctcccaagtagctgggattacaggcacatgctaccacgcctggctaatttttgtatttttagtagagacagggtttcaccaygttggccaggctggtctcgaactcctgacctcaggtgatccacccgcctcagcctcccaaagtgctgggattacaggccatgagccaccacgcccggcctctttttttccaaccataggatttggtctcttgttttagacagttattatctgatcctctctctctctctcttttttttttttttttttttttttgagatagagtctcaccctgtcacccaggctggaatgcaraggcgcgatctcggctcactgcaacctccgcctcccaggttcaagcagttctctgcctcaacctcccaagtagctgggattacaggcgtcagccaccacgcctggctaattttatatataatataaaatataattatatatatattttgtttgtttgttttagtaaagacgggttttcaccatcttggccaggctggtattgaactcctgaccttgtgatycattgtccccccccccagcctcccaaagtgctgggattacaggcgtgagccaccgtgcctggccacatctgatcctctctacagttttgtagccagcttttttcaaacacatgcctcagttgtagtggctgtttaatattatgtttttatagttggaggccctactccttaaaacctatgaatgtaaacctcccatgcaagcctgagcactcaccatgctcaccacctgagctcaggtggggaacaagcgaatgagagacaggaccaggtactttctgggtgggacaagttgagagggtctgtgacaggtcacagcagcactagggagaagtgccccccccaccaaccctgatgtgatttgggtagggatggtgggccttcgccagccacacctgggccattctgtcttcttgccttcctggccttgccttcccctattccagctttctgccaggtaaacagtactttccagcactaccaaataaagatttaaggactgctagcccatttcctcttaccccggggaaagaaagtaggtccacaggaaggaaggctgcctccctccccttcttctatcccccaagtgaaagaggtggttggtggccacagcaggtgggcctggccaggatgcctgggttggcagtgaaggaagtagcatggcactcagctaaccttgggccagatgcagcaaggttgggactgaagaaaaggggagttcaggaacgtcggttcctctcctgttttctctcagcccatgggtgagaccctctgtcacactccactccctttcccctgccctaggtcagcagtcatttggaaagagcttgctctgccgccggccatagttgttgccggttcacctccccacccctctcccatcatcccctggtaaggctggctgagagaaattcccctgaaaacatttattttactcagtttattgataagtgataataaaagataagtattacatatttgtgtatttattaatggcccagagtagagcattcagatattttcccagtctgatatatggtttcaggtgagaaaataagggatttatatagtgacaatatttttaagtgaaaagtggaatacatagtcaaagaatttgggcactgccttggtggctggaggcaggtcagaaaatgtcagttggcatggtagaacttctaggaygctgaaatagtttgtggagacacaagtaagaattttttttttttttttttgagacggagtcttgctctgtcacctaggctggagtgcagtggcacgatctcggcttactacaagctccacctcccgggttcacatcattctcctgcctcagcctgccgagtagctgggactgcaggcgcccgccaccaggcctggctaattttttgtattttttagtagagatgggatttcaccatgttagccaggatggtcttgatctcctgacctcgtgatccgcccgcctcggactcccaaagtgctgggattacaggcgtgagccaccgcgcctggcygagaatattttaaactaccacacttaccatgcatgtggtaaactatcagtctgtatttatcagtgatggttatttcctaatacccaggaggcatccatgtgagccacccttccattgctttaagaccaagggagygagtgaccagcaggattcaagatggcagctctgccgaggagtgggagtcccagctaacttctgctccctgctctcccaccaacagcctacaccgatttcttcctcccgctgctaagccgctgtccctcygccatgggaataaagaataaggatggggagacccctggccaaattttgggctggggacccccctgggattctgctgaagaggaggaagaagatgatgcctccaaggagcgggaatggagacagaagctccagggtgagctggaggacgagtggcaggaagtcatggggaggtttgaaggtgagaagtccactgctatccacagctgcccttccccactggctgctttccatctgcatgaatgcgtcacactaggctcctctgccccctcctctgtgcttccctgcttcttggggcccatcaccttctcacagcctctctccaactacccccatcccaccctcccaaacaggtgatgcctcccatgaaacccaggaacctgagtccttctcagcctggtcagatcgcctggcccgggaacatgcccagaagtgccagcagcagcagcgagaagcagagggatccygtcgacccccacgtgctgagggctccagccagagctggcgacagcaggaggaggagcagcggctcttcagggagcgagcccgggccaaggaggaagagctgcgtgagagccgagccaggagggcgcaggaggctctaggggaccgagaacccaagccaaccagggccgggcccagggaagagcaccccagaggagcggggaggggcagcctctggcgatttggtgatgtgccctggccctgccctgggggaggggacccagaggccatggctgcagccctggtggccaggggcccccctttggaggaacagggggctctgaggaggtacttgagggtccagcaggtccgctggcaccctgaccgcttcctgcagcgattccgaagccagattgagacctgggagctgggccgtgtgatgggagcagtgacagccctttctcaggccctgaatcgccatgcagaggccctcaagtgaccctagggaagaagcaagaaacttcggggctgcagcctcaggatgaggcagaaggaagggtaagggaaaggatggggaccacaaggaagagccaggtgctgctcagcagaggatatgggtgggagcgaaagttgtaacaagtgggggtggggggtgcgggccgccaccactgctccttgactctgccgtttcctaataagacctggttccacatctcactcccagtgtctcctctgtctttttccattgctgtggttttcatcacccatgacatctcctttcccgccccgcctgctgaaacccacagctcccacacacctgcaacacacacgcacacgctaacacgggctctgagctggaggcaagaagcctctgcatgccccctcagttcagccctaagaaggcccagtttgccatccagtctcactccactccctacactggggtcttgtccaccctgcaatctgtggctggagaaatagatgcgaacagaggcaaaaaggggaacaaaaccagtttccctcccctccctggctccccaagctgaaccacatcctcctccccacttaacacccccttcccccaacacagggctttccctttgctgagtcactgaatgagcgagttgggggtagccggcgctggggggccatgaggaggctgggggaggatggggaatacaagcagaatggctggaggaagagccctgtgggggagtggaatttcagttgctaaaattaggagcaggggaaggaggtggaaagagcaaaattatgtaacatgggttgtctgttcttgggcaactggagctccacacccaaagccagccaggctgctggctccatccatctctgccctctagcttgtcagttgtatctctcttcctccagggccccaatcctcatctccgccattcagctgctgccccatcctaaacctgagttcatctctgggcagcccaggcatggccttccctataaacatttccttttccaagaaccagtagttgaagtcctgagaggtggagggagagtctgggattcccacggaggagagaggggggctccctggaaactaagataggtagaccccactaccatcgcccaggacacaactgggaacttggcaaaaagaaaggacagggctgcaaggagagtacagacatgtgctggtgagtgcactgtctgcatagttacaccagagcatcttatcaatcagaaacttatctttcaggttttgagcccagttctctacaggagaatcccaggagtggaagtggaaggcagtagaagacagggagggcacgcctctgggaacacgggaacatgggtgggcatgagatccttgaataagacagcctgaagttcggaagagaccaaggcctctgaaggaccaggcagatgttcagggtgcaggagggggaagggctggtgagaaagatcctgtgagaggaagctgctgtgattcagagaagagacttcaagctgtgtgtgaccctggcgtccggttcctctcacaggctggagcttttcggaagtggcatgcaaagagtccaggtttggccttggggggagttggggttaggatccctaagctggaggttgagaagtaaattacagaaaactctggtgaccaaatttgctcctccacccaggagatttctcactggtttttaagcacatcatttccccttctgcaagagttacataaaaccaaagcaaaataagccctgaaacctgggcccaccggaccacagtcttttcaacgtcccttcctggtgtctggcccccagccctggtgggggttcccctgagataagggctgttcactttctctgaccacatggtttccgcttctgtgtctcttgtttcctaggctgataaaaatactgagccctagaggccctggcttcctctgaccccttggggcaggcagcaggcatcctgtccagcatggtgggggcagggacaggggccagggattcccaaggggtgactcagtgcctgccatgaaacagtgggtaggtggaagtgtatctctgctctctagagctggcaccaggagttgagtctcagtggaggatgcattgggattcaattggaggaacaggcctggaaaagaataatgagattgaagagggtcagtttgaggactcaggttggggcaggtttggattaagttaggaaaaggatctgggagggactctgttcagtgtaggtcaactgagcattatgtagcccaaagataaatttaaaccctgcttcaagcttacaatctagtggggaggcagacccatacctagttaactgattcaaggcatgatgagtaaactttaagatgattacagaaagaggggagattaagtccatttgaaagcatccagggagcctctgaggagacagcatttgaacttgctctaatgaatgggttcactaggtggaggtggatggaaaggttccataggcgaataacacgtcttgagcgagcctgacaagtcagaaaatgcagtatgttctgggaaaggagcgtcctgagggagaagaagcacaggtgtgagggaacatgtgatgaagaaaggaccacagaaagtcaaggtcagagattggactgcatcctgtgggcagtggtccaggtgacgatgaaaaagagggagaacaggtgagtgctgcagtacagacaaggagtaagaaaacggccatcatcttgtgaattaatacctactgtgtgttaaccagcccttttcctaacaccacaaatcctctcaacgtctgtccaaaaggtgggtggtggtggccaggcacctcactcctgtaatcacagcactttgggaggccaaggtgggagcactttgggaggatcacttgaggccaggagttcgagaccagcctggccaacatggtgaaaccccgtctctactaaaaatataaaaactagctgggtgtggtgttgggcacctgtaatcccagctactcaggtgtctgaggcacaagaatcacttgaacccgggaggcagaggttgcagtgagctgagatcatgcctctgctctccagtctgggtgacagagcaagactctgtatccaaaaaaaaaaaaaattattaagcacctattaggagcagggcactgcttgacaataggtataaataataaagtcactgccttcatagaacttgcagtctaatgagacagtatacaaataataactatacattatagttataatgtataggtatgcctgcttagggtaataaagtgctcaatgaaggtttgaggtaccagcatgactctcaggtggagatttccagaaagcaggtctggagctcaagagaagttgggtctggaggaacagatttgggcatcattcccttcccagtagaggttgagcctttgagtggacaggatcttcaagggagggggcggagtgaccagaagagccctgagcatgatcaaaggaagagaaccaataaaggagaggttggggagcagtcagagaagcagggcacggggggcgggggatgccaagcagagacagggcagccatgtttgaggcttcaaagaggtctagtaaatgagggttgaaaagattgttgggttcaggaactagacgattacaaattttgagaaaaccgtttccatttaatagaggggcagaaatcactttacataggttgaggaatgagtgggaggtgaggaaaaggaggtggtgggcatgaggtcagaatggtgaacacagaataactgagaatcatctcttagttctacccacagattttacagttgagggaaattttaccagttcctgaaaaagtggttcgttaagggggctagtcttttgagacatcacacgaaaacggaaggtgagatagactggacatttgagggagaaatattccaaggaaggatcttttttgttgtttattttcaagaaataaaattgaaggtaaaatgaagatgcttaaagagacaaagataggccaggtgcagtggctcacacctgtaatcccagcactgtgggaggccaaggtgggcagatcacttgaggccaggggttcaagactagtatggccaacatggcaaaaccgcatctctacgaaagatacaaaaattagccaggcgtggtggcacatgcctgtggtcccagctattcactgaggtgggagaatcgcttgaactcaggaggcagagggtgcagtgagccgagatcacaccactgcactccagcctgggtgacagagcgagactcagtctcaaaaaaaaaaaaaaaaaaagcccaggtgcggtggctcacccttgtaatcccagcgctttgggaggctgaggtgggcagactatagatatcaggagttcaaaaccaacctagccaacatagtgaaatgctgtctttactaaaaatacaaaaattagctgggcgtggtggcacacgcctgtaaccccagctactcaggaggctgaggcaggagaatcacttgaacccgagaggtagaggttgcagtgagccgagatcgcgccactgcactccagcctgggcaacagagcaagcctatcccaaaaacaaacaagaaagggagagatagtgaaaacataagcaagaagtggggagagaatatagtaaagatagaggaagtgggatagagtacagataaaaggatcagtcttggaaacaagaaaaagtactgtgagtcagtatgtaaggaaagattaaatataacaaaattaaggaaaaagagggaagtgagatccacacttgatggccttaagctcaatgaaatattaatagatgagagtgaagaacatcagaggcacggagatttagaacatcacgcacagtagtataatggggagtcaacaaagaatgagtaaaagttgtgtccaagaacactgatgactctctgagattagctggccaggattagttataggcctcttatggtgactcagctgtctactgcagcgcttggcagcctaagacaaagccccaagaatgagaccacttagtttacccaagtcaatttttgagacagagtttcactcttgttgcccaggctggagtgcaatggctcaatcttggttccctgcaacctctgcctcccgggttcaagcgattctcctccctcagcctccagagtagctgggattacagttgcccaccatcacgcccagctaatttttgtatttttagtagagatggggcttcaccacattggccgggctggtctcgaactcctgacctcaggtgatccgcccaccttggcctcccaaagtgctgggattacaggtgtgagctacggtgcccggcggtaagagattctaaaatgcagacaaagtggagttgaaattgttgaccatgcagtacatgttaaatcaacaagcaaaaccaggaaagcagaagcagccggaagtcttggtaagaataaagaactgattcaaggggaggcagagagtgggagatgtgaaaagtgagtggttgtgatgagaagggtaattcagagatcaagatcttgaaggcataattcttccaagtgatgctggggtttgaggtacaaccttactcctgggtggctaaaatggaggagggaagaagaggctgtaaaaccagtagacttgagaaacttggagaattgagaggccagactgtaagactcatctgatctgtgtggcttctttttttatttttatttttttcctctgagacgaagtctcgctctgtcacccaggctggagtgcagtggtgtgatctgggctcactgcaagatccgcctcccgggttaatgccattctctcgcctcagccttccgagtagctggggctacaggcacccaccaccacgcccagctaattttgtttttgtatttttagtagagacggggtttcaccttgttagccaggatggtctcgatctcctgacctcgtgatccacccgcctcagcctcccaaagtgctgggattacaagtgtgagccactgcgcccagccgatctttgtggcttttaaagtcactaaagatggtggtaggaggccgggtgcggtgggtcatgcctgtaatcccagcactttgggaggctgaggcgggtggattgcttgagctcaggagttcaagaccagcctaggcaacatagcaaaaccctatctctggaaaaaaaaaaaaaatacaaaacttagccgggcacggtggtatgcgcctgtagtcctagctactcaggaggctgacgtgggaggatcactt

SEQ ID NO: 98264 - DNA, 18379 bp, Homo sapiens
taggattacaggtatgagccactatgctcagcccgtcttcacaaattttttaaaattaatttttaaattttttttgagacagaatcttgccgtgttgcccaggctggagtgcagtgactcgatctcaactcactgcaacctccacgtcctggcttcaaatgattctcctgcctcagcctccagagtagctgggattacaggtgtgtgccaccatgcccggctcatttttgcatttttaatagagacagagtttcaccatgttggcagtctggtgtcaaacccctggcctcaagtgatccgcctgccttggtctcccaaggtgctgggattacagataggcgtgagccactgtgcctggccaatttttaattttttaattattatttttaatcaacagctttagacagagaaccttggtttcatcttcagtgggctgtggccatgggcagtttcttcatctgcaaaaggggagtagtactaggacccagctcacaagctgacaggggaagatgctcagacaaacactgcctgcctggcatagaaaaatgcccagcatatgttagccatgaccacgaccgtcgtcgttatcatcatcatcatcatcatagcatctcatgtttcaggaaactttccaggaagaagggacctcgattccctctggggaatgtccctggtggttgctctttcagcagcacagctggctaactaaggctttggcagttgcagcctctaaaggaaaaattcctcaggttcagactaaacacaaattgcactgacctttgatcagaaagtaatttcagagagagagatgctcagacagggagggcagctggttttgagccccaacctttcatcttccccttagctcctctcctttccattcacactgccccctcccccatcacctggccctcgggggtaagctgattcctctttaaaactctggcccaaggaagacaaaatttaaagcccactcccttcctccttagcatcactggaccaaggtcaaatgctacaaaaacattttattgaaaataagcaggaaaccaaacgaaaatagtcaaagaaaacgcacaaggcacgatcgttgtctagctccaactgtaactgtttctatctgggccattgccagattgcctcctggctgaagatctcttggtccacctaagcaccttgctttttacacacaacgcggggctctctgagaacaaaaatgggccacaaggggtgcaaaggctgggagaggagtagactctgtggtctgtctgagggcagttctgactggcaccacagtcggaggacaggcgcggcctgttgtgtgggtccagggcctccagtgggaaaacgtggctttaggcccttctcccagatgctaccttttacagaggaagaccagatctgaggtttagtttccatgttgtgttctgagttctttctattcattcagtcatttaaaagtacttaccaaactaccacaaacctgggtggcttagaacacagaatttctttttcttacagttctggaggttagaagtctgaaatcaaggtgttggcagggccgtgcttcctcagaaggctcttgggaagaattctttcctgccttttccggctgccggcagctccaaccttggcttgcggcagcataaacccattctctgcctctgtcttcaactcgccttcttttctgtgtgtgcctctgtgtcattacatgctgttctcttatatagataggagacccactacctgtgtctttgtgtccaaattcctttcttctttttctgttcatttgtttgagacagagtctcgctctgtcacccagaagcccaggctgcagtgcagtggcgggatcccggctcactgtaacctctgcctcctgggttcaggtgattctcgtgcctcagtctcccaagaagctgggattacaggcatgtgccaccatgcccggcaaatttttgtatttttagtagagacatggtctcgccatgttggctaggctggtcttaaactcctggcctcaaggcgatctgcctgccttcgcctcaaaaaaactgccgggattacaggcatgagtcaccaccatgcccagccagttcacttttttttttttttttttttttttttttttttgagatggagtcttgctctgttgcccaggctggagtgcagtggtgcaatctcggctcactgcaacatccgcctcccggttcaagcgattctcctgcctcagcctcctgagtagctgggattacaggtgtgtgccagcatgtctggctaatttttgtatttttagtagagacagggtttcaccatgttggtcaggctggtcttgaattcctgacctcgtgatctgcccgcctcagcctcccagagtgctgggattacaggtgtgagccaccgtgcccggctcacctcttctttttttttttttgagacggggttttgctcttgttgcccaggctggagtgcaatggcgcgatcttggctcaccacaaccaccgcctcctggtgattacaggtgtgagccaccacgcctggctctggcttacctcttcttataaggacctcagtcattggattagagctcaccctaatctagtatgacttaatcttaacttgattacatctgcaaagaccctttttccaaataaagtcacagatactggggattaggactcgaacacatctttctgggggacacaattccaccattacagggaataaacaggataagaaaaccatagaacccagcaggtggtaggtgacacaagctaaggggtgttgccatgttgcccaggctggtctcaaacttctggcttcaagggatcctcccaccttgcctcccaaagtggggatgaaagtttgtctggggcattgcagttttagacaggaagaccagggaaggcctcactgagaaggtgacatttgagccaagacttaaaaaggtacgaaagtgagccatgtggaagtctgggggggaggagtgaactaggcagaggcacagctgggcaaagggcctgaggtgtgaccatgcctatggatttgaggaacttcaaagaggctgtgtgctgcaggagagtgaagggcagggagtggcaggaaatgaaggcagacaggtagcagtggggaggacgcaggggtccagctcatgtaggtcttgattggacacagtgagtttcagatgacagcctcctgtctcatggggtagccccaaagccacaggagtctggtgatttccctcttccccaccagacatctatgccatcggggtgggcaagctggatgtggactggagagaactgaatgagctagggtccaagaaggatggtgagaggcatgccttcattctgcaggacacaaaggctctgcaccaggtctttgaacatatgctgggtgagtgagctttgccctccttggtgtggggaggatggtgaggagcccgccagaggcccgtgttgggaacctggacacagtgcccctcacttgcctccttccccatctgatcctcacacccacagatgtctccaagctcacagacaccatctgcggggtggggaacatgtcagcaaacgcctctgaccaggagaggacaccctggcatgtcactattaaggtaccaggaaggaggggcagggcttggattccagaggtaaaagcggccatgggccagacatactgcaatctctgaaaatcacctgttcccctgcagcccaagagccaagagacctgccggggggccctcatctccgaccaatgggtcctgacagcagctcattgcttccgcgatggcaacgaccactccctgtggagggtcaatgtgggtaaggcaggggatgcaccagcctcctgatcctgaagccacagatcctaccacctcacccagcctctggcccctgcaggagccctggtctagcctaatctagtgtatcatttccaggagaccccaaatcccagtggggcaaagaattccttattgagaaggcggtgatctccccagggtttgatgtctttgccaaaaagaaccagggaatcctggagttctatggtgatgacatagctctgctgaagctggcccagaaagtaaagatgtccacccatgccaggtgcctggagtctgggatgggagggtgccctgcagggaagagtgctctggagatccctggaagagatactggggacaggctggtgtgacccttgctcttctccccaggcccatctgccttccctgcacgatggaggccaatctggctctgcggagacctcaaggcagcacctgtagggaccatggtgagtgctgggacttatggtgcttgagagctggggccggggtttgggggtgataacaaggactaggctgcagtccccaagccaggaacctggattctgggtaaaaggaccagcaccaacatccccttctcttgactatagagaatgaactgctgaacaaacagagtgttcctgctcattttgtcgccttgaatgggagcaaactgaacattaaccttaagatgggagtggaggtgagggtctcaggttggggatgctgggatccccctgtgacagctcccagaatgtctctcttccttctccaggtctggctgctttctctctctgacgcgggtcacccctcctcccaagcctcacaaacctgctaggtgtccctgggtctgcttattctttttttgttgttattgagatggagtcttgctctgtctcccaggctggagtgcagtggcacgacctcagctcactgcaacttctgcctcctgggttcaagcgattctcctacttcagcctcccgagtagctgagattacaggtgcccaccaccacaccagctaatttttgtatttttagtagagacgggatttcgccatgttggccaggatggtcttgaactcctgacctcaagtgatctgcctgcctcaacctcccaaagtgctgagattacaggcgtgagccactgcacccacccgggtctgcttattctacccttctctctggttccacccctgctgcagtggacaagctgtgccgaggttgtctcccaagaaaaaaccatgttccccaacttgacagatgtcagggaggtggtgacagaccagttcctatgcagtgggacccaggaggatgagagtccctgcaagggtgagtccctcaccatgcctggattcccaaggggaaggccacctgtgtctctgtggccagcatgcatgccagaacaccagtccactgccctagatgacactgtctcctgtcaccctttgctggcaggagaatctgggggagcagttttccttgagcggagattcaggttttttcaggtgagaaggtagaagcttgcaggacccaggggttacaggatctcagccttgttggggggatgagggaggcctttgagggatctagggaggttggggcttacagttggggctgtggcagcctcccagccagttctctccttttctccaggtgggtctggtgagctggggtctttacaacccctgccttggctctgctgacaaaaactcccgcaaaagggcccctcgtagcaaggtcccgccgccacgagactttcacatcaatctcttccgcatgcagccctggctgaggcagcacctgggggatgtcctgaattttttacccctctagccatggccactgagccctctgctgccctgccagaatctgccgcccctccatcttctacctctgaatggccacccttagaccctgtgatccatcctctctcctagctgagtaaatccgggtctctaggatgccagaggcagcgcacacaagctgggaaatcctcagggctcctaccagcaggactgcctcgctgccccacctcccgctccttggcctgtccccagattccttccctggttgacttgactcatgcttgtttcactttcacatggaatttcccagttatgaaattaataaaaatcaatggtttccacatctctcagtgcctctatctggaggccaggtagggctggccttgggggagggggaggccagaatgactccaagagctacaggaaggcaggtcagagaccccactggacaaacagtggctggactctgcaccataacacacaatcaacaggggagtgagctggatccttatttctggtccctaagtgggtggtttgggcttactggggaggagctaaggccggagaggaggtactgaaggggagagtcctggacctttggcagcaaagggtgggacttctgcagtttctgtttccttgactggcagctcagcggggccctcccgcttggatgttccgggaaagtgatgtgggtaggacaggcggggcgagscgcaggtgccagaacacagattgtataaaaggctgggggctggtggggagcaggggaagggaatgtgaccaggtctaggtctggagtttcagcttggacactgagccaagcagacaagcaaagcaagccaggacacaccatcctgccccaggcccagcttctctcctgccttccaacgccatggggagcaatctcagcccccaactctgcctgatgccctttatcttgggcctcttgtctggaggtaagcgagggtaaccttcccttcctgctgtctccagcatccctccttggccttttggggccaggcttcatcagcctttctcttcaggtgtgaccaccactccatggtctttggccyrgccccagggatcctgctctctggagggggtagagatcaaaggcggctccttccgacttctccaagagggccaggcactggagtacgtgtgtccttctggcttctacccgtaccctgtgcagacacgtacctgcagatctacggggtcctggagcaccctgaagactcaagaccaaaagactgtcaggaaggcagagtgcagaggtttgagggcaatgagtgtgggcagtggcctaaggcagaaacagggcaggcggcagcaaggtcaggactaggatgagactaggcagggtgacaaggtgggctgaccgggagtaggagcagttttagggtggcaggcggaaagggggcaagaaaaagcggagttaacccttactaagcatttaccctgggcttccaggcagccctggaagtcaagagaacactcagaaatggggagggagaagcagtggaaatccatatgggttgaggagtaggtaagatgctgcttctgygggactgggaatgcgctgtttctcagtgacatggtctccgagaccaggagggatacacctaaggcagcctttccctcttgatgacttctacttgtccccccttctcaaagcaatccactgtccaagaccacacgacttcgagaacggggaatactggccccggtctccctactacaatgtgagtgatgagatctctttccactgctatgacggttacactctccggggctctgccaatcgcacctgccaagtgaatggccgrtggagtgggcagacagcgatctgtgacaacggaggtgagaagcatcccctccccctacattgctgtctccctgacggcgcccagcccgaggagtgggcactcggctccggacactgtaactcttgctctctaccttgctcacggggcctcaggcttcagtgcttacctcgatgtctcatacctctgcagcggggtactgctccaacccgggcatccccattggcacaaggaaggtgggcagccagtaccgccttgaagacagcgtcacctaccactgcagccgggggcttaccctgcgtggctcccagcggcgaacgtgtcaggaaggtggctcttggagcgggacggagccttcctgccaaggtgacctttgacctgtacccccaggtcagatcctggtcttccatcctactgtcttctctccccacctcaaccctgctctttcctcactttgtttaaacctccctgtacaactatctcacttctgagccttttataccctggaaacccatgatcccccgtctctttggtcactgtatccctgacactcccagacatttgacctcatttctgactctcccagactccttcatgtaygacacccctcaagaggtggccgaagctttcctgtcttccctgacagagaccatagaaggagtcgatgctgaggatgggcacrgcccaggtttgaagacagagaagggaggcagggcagggaactgggggaaaatggagaagggacagaactgttaatgctggagcctgagccactctcctggcacccaggggaacaacagaagcggaagatcgtcctggacccttcaggctccatgaacatctacctggtgctagatggatcagacagcattggggccagcaacttcacaggagccaaaaagtgtctagtcaacttaattgagaaggtggaatcctcctatccctgaactcgggggaatggaatctcgctgatcttccaggactagctccctgatcattccagcccctctgaacaacagggccccaggaaaatctccaggtcctattctgtcctccttcccttttacttgaagcagtttcttgactggtaattcctccatgaacctcagcccttgagcctcttactgagrgcctccctgtcccagcaaagtcgctgaaatctcccaatcacagtattctattttcaatgccatggcgccttgttctcctcacccacaggtggcaagttatggtgtgaagccaagatatggtctagtgacatatgccacataccccaaaatttgggtcaaagtgtctgaagcagacagcagtaatgcagactgggtcacgaagcagctcaatgaaatcaattatgaaggtcagaggttagggaatggtgggaggttcactttggggtcaggaggttcagggtggagggggtcatgagactaccttgagggcgacagggaggaccactttgtagtcaaargttgaacagcaggatcgttgggcaatggaggttagtgggaacctgttgggggctggaagggccactttgtggtcaaagggaagtccgtgtaatgatgattaacttaaaaagttgaaagatgtgggatttcagttgcagattggtctctggggttaaaagatggcttggaagaccaggtgaggtgatggtctcttccctctccacagaccacaagttgaagtcagggactaacaccaagaaggccctccaggcagtgtacagcatkatgagctggccagatgacgtccctcctgaaggctggaaccgcacccgccatgtcatcatcctcatgactgatggtcagaagggacctctctcctgtcccagcctccccaccttctcagaccagcatgtggcccttaagtccacttgtaacactatacccatggttggggccctgaatgtgactcatagctggctgttcatctctcctgtgacccttcataaggaattcttcctaagccctgtgatcractrtctctaacccttcctcaacttgctcaccctgccaygtgtatccctgcctttagccagtttatcttcctwatctcctaccctcatggtcctgtctcttctgcaggattgcacaacatgggcggggacccaattactgtcattgatgagatccgggacttgctatacattggcaaggatcgcaaaaacccaagggaggattatctgggtgagtaacctgcctaggacccagcaccccacttcctcagggcttggaccctcatccttcctttttatccctcagatgtctatgtgtttggggtcgggcctttggtgaaccaagtgaacatcaatgctttggcttccaagaaagacaatgagcaacatgtgttcaaagtyaaggatatggaaaacctggaagatgttttctaccaaatgatcggtagggagatacaagggaataaagaacacaactctcctcaggttcccctgaagtaattcattcttcctctacacctgaagctctagttgcctggaaagccttcttcattcctccttctctacctcagtgtcactattcttgtttcctggcactgttcacttaaccttagaatcacagagctctgagcacttcagagatctttctayagtcctacatttgacacgtggaaacagaagccaaaggaggtcaagggacagcaagttagcaacaagggtgggcttgaaaacagccaggcctctgacagcttgatcccaagttctttcccttttcagtccaccatagcagttttctcctaacacgaggaaacaaatacccgtggtctttccctttctccttttgggcctttgctccccatagactcctacccaaaaggctgctgccatttgggaatgaagtgttcmgagttttcagcacattctccttctctgccagatgaaagccagtctctgagtctctgtggcatggtttgggaacacaggaagggtaccgattaccacaagcaaccatggcaggccaagatctcagtcattgtaagcacagaatcccagtagtggggacttgggggaggtgaggtcaaggtgaaatgggagtaggggaaggaaaaaatggccataagagatggtggtttgtgaaagttgagctttccctctctactgttgtgtccccagcgcccttcaaagggacacgagagctgtatgggggctgtggtgtctgagtactttgtgctgacagcagcacattgtttcactgtggatgacaaggaacactcaatcaaggtcagcgtaggtaaggatgcaactgaaggtcctgggctgcacctatgctctccaggcaacacctcccactttctacagatcctacactccacccatcctcaatgcagccccattccttgcaccccagaccagtcagggatgggggaagacgtgaagttaggaatgacacggggccagaggcaggaagctgcccacaaagaggtggtacctactctcctacttcaggaggggagaagcgggacctggagatagaagtagtcctatttcacccyaactacaacattaatgggaaaraagmagcaggaattcctgaattttatgactatgacgttgccctgatcaagctcaagaataagctgaaatatggccagactatcaggtgagagcgtccagatccctgaggaaaggctgggaaaggctggaggactggggtgaggagcaggcctggtttgctgttctccttgtcctttataggcccatttgtctcccctgcaccgagggaacaactcgagctttgaggcttcctccaactaccacttgccagcaacaaagtaagacatacttggcaagaggataaggatgagatcccaagagacaagtggggcatgagagggaggtgcaataggaagagatgatgcctggcccagaacctagctctagaagggcttaggggacatctactgagtgacraaggcaatggggagatgacagtggtgggagcagctgaagtgacgcagtctattcgtccagaggaagagctgctccctgcacaggatatcaaagctctgtttgtgtctgaggaggagaaaaagctgactcggaaggaggtctacatcaagaatggggataaggtgagaaacgggcatcctaaggaggcactctaggccccaatccttcctaagccacttctgttcattacttctccatgcttcccacctcccctacagaaaggcagctgtgagagagatgctcaatatgccccaggctatgacaaagtcaaggacatctcagaggtggtcacccctcggttcctttgtactggaggagtgagtccctatgctgaccccaatacttgcagaggtgagagaatgctctttggtygtgctacaagtgcccaaggcccaacagtccttttctctacagcttctsctctccttgcaggtgattctggcggccccttgatagttcacaagagaagtcgtttcattcaagtgagtcctccctttcctatctggggagatgccaagtggtcagcatgggccccaaagcaggaaagctcaatgcatgtggctagtaattcgaggtaggcagagcctgcctcaccttaggaccgcatgtcttgcctgcgtgtgtcaagaacgaggctgagctgggtccctagtctgattcctttaggtcagctaagacrcaagcaggaacagccatgcttccaggattaggaattctactgaatgatccatggcaccccactgcctctgcaggttggtgtaatcagctggggagtagtggatgtctgcaaaaaccagaagcggcaaaagcaggtaccygctcacgcccgagactttcacatcaacctctttcaagtgctgccctggctgaaggagaaactccaagatgaggatttgggttttctataaggggtttcctgctggacaggggcgtgggattgaattaaaacagctgcgacaacacctgtgttccagatccttttggggcaagggagtggggaacaggcactggccatgttgttacactgagatcaaacctgacagccgtttttaaaggtttaaccccaatcccaagtgctgaaaaaccagaggctgagggagatgtgtaagcttccacctcagtgttttactgagaccagcattggggcatatgaggcacaaggaatccagctctgttccctagaagccatccacaaggttttccttgtagacgtcatcactgtagacaatctgggtcctcttgtcccggtggcaacccttagggctgttctggacagctagggagggaggagaggaacagttaaggtctaaaggagatcatagaacagaccctgaggctgactcctgaccacctcactcctggccactggcccctggaagcccagtttccacgctgccctctggtggccaggatggcctgtcttccttagctcctttgtgccaacccatggccaagaaaagtataagtggacattttgatgaatgttttgttcttagaaaaatcccaaatgtcattgttgagacacgtgaatgatattaacccactacttacagtcagtatgtcagaagctaaaaactagaaaacctctgtagcccttttttgacatgctggtcaattctagttcctttcttttgcctgaagggccactgtagctgagcccttctttctgctcactcctttcccaggaaaatctactttcagggaaaatggattattcacactaagaaatgctactagctccaccagaactcattcagggtgtagctttggccctcaccattctctctcaagcctctagctgtttcttccccttcctctttcctccctccaccagacatgttactctcttcaccccatccaatggttccatccccaccacccttgagctacagagaatctctctcacccactcccatcctgtgatctctgtgcctcaacactgctggctactccctctttctcaaagtgtgtgtccttttgcttcagtggcccaggcccctgcggtgctgctcccagccctccgacccctcctcctgtctcctttgctaacgttaggctcaacgttagcctaacatgtcaggacagctggggacatgtggggtgtgaggtgaacagtcctgtttcctaacatagtcccagagtactcctcaaactgagtcctgggtcgtttttttttctctgaaatcagagtctccctgatgatcctattgtttggcagccaccctgtgatgtggatgacttaatctatgttttccttccttacctcacacctgagttccagatccctgatttcgaatacttatgaaactcactctactccatctcaaaatgaacaagccccatgagacactcatcttcctcaccaatctcactccagctcccactttcttccctgttccagtcactgctttggaagctgttttcaatccttttctctcctttctttacctctaactgacagaggatctgaaattttccttcccattcccatagcctccgcacacactctgacctcgatcatctctaggaaacccaaggatgtgtgggggaaccaaaaggaatggcctgtgggggagaggatgggaaaggaagaatcccattcttaccgagggagccccagacagacttgccagtagcggcatccagcatgggctgttttcgggctatgttgactttgagctgtacagactccacctgggtcccgttgagctgaagcagaagaggggaggcagaggatggggaggaaaacattacagataaaccaaagaagttattccaggagttgctatcctaggaggagactgaataaggaatctgagaatgtgagtttttctgtgtgaatagggagaggctttctttatcaagaggaaccaacttcttcctggcatctagtattttgaggagaacacatgagaacagcagaagcgatgggaagaacagatttgggaagttccaacctcagcaacggcctgatctgctgactccatcttttcataggtgacgaaggcacagctgggataagagaaaacacggtcagtggagagccaaggggctcttctggacccaaccaaacccagtgataataggcggctgcagggagggcagcttcttccctcaggtctcacaccccaggattctcccaggacttctcatcatgccctgttgtcatccttactttctgggtgggtccatggagaggtcaatgatgtttccaaaaggagagaaggccccacggagaagggtgggtgtcatgtcttctccatatacatagagagtattccctttcctaggggctcgccgttcagggaatgaatccgaccctttgggagcacaaatcatagtcacaagacatagcccatgccacatttcacttagtaggacccacataaacctcagttaaggtcaccttgacctccagccaaaatcactcactgcggaaaggaccctctcggtctcggtctcgatcccgctcccgatccctgtcccgttcccggtctcgatctcgatcccgatcccgatccctgtcccgctctctgtctctgtctcgatcccggtctcgatcccgctcccgatctcggtctctgtcccggttcctctcatggctgcggtcccggctgcggcttcggggaggggaggctgaggagtgggcaccactgcgttcttcatagccccagtcaaagcttcgagggggaccatcaccagcccctgggccctctgcctcttctccatctggtcctagttctcgaagtcgatcactagaagacacaaagctggggagatgcagactgaagatcaaaggggggttttaccttctcccctcagaccctgtggagactcaatattccctctatagcccagctcctacagcccaaacctcccaaggactcaggcaatcaactccaccaaatgggcccagccttatctctactctctaacctctcatacagagatttcctctggggacgtctggatgactgtaaaagagaccaagaacagttaagatgatttccagttgctgacatgtggtccaaaatatatttgtctctcatattcctccatccccaacccctcagggacagaaattaggagcctttacctcttgcaggtcatcatcagcagatatgctcctctggaacggctggaaagtggggactggtcccttctcggggtcctggagtggtgagagacctacctcagtgtggagcaggaggttgcccaaccatggaccagaggtgttcctcttccctcaccctcttctaggtttcctctgatcttttcttcccttttaattctacatacatttcttatttgacgtggttttacttattttttttttttttttttgagacacggtcctgctctgttgtccaggctggagtgcaatagagcaatcgtagcttgctgcagccttgacctcccatgctcaagcaatcctcctacctcagcctccctagtagctgggactagagatgtgctctaccatgcttggctaatttctgtatttttttttttttttgtagagatagggtttcactatgttgccagggctggtctcaaactcctgggctcaagcaatcctcctacctcggcctcctaaagtgctgaaattaaccaggaatgagccattgccgcacctgccattgtggcttgttttgttttgtttttgagacagaatcttgctctgtcgtccaggctggagtgcagtggtgtgatctccactcactgcaacctctgcctcctgggttcaagtgattctctggcctcagcctcctcagtaactgggactataagtgtgcaccaccacattctgctaattttttttttttttgagacggagtctcgctgtcacccaggctggagtgcagtggcacaatctcgactcactgcaagctccgcctcctgggttcaagcaattctcctgcctcagcctcccaagtagctgggactacaggcgcccgccaccacgcccggctaatttttgtatttttagtagagatggggtttcaccttgttagccaggatggtctcgatctcctgacctcgtgatccgcctgcctcggcctcccaaagtgctgggattacaggtgtgagccaccgcgcccggcctcacaccctgctgatttttgtatttttagtagagacggggttttaccatgttggccaggttggtcttaaactcctaatctcaagtgatctgcccacctcagcctcccaaagtgctgggattacaggcatgagccaccacgcccagctggtattttttataagtgactcgatatattatgtattcagtttatttgaacctctcttgaacctgataacattttcagccctttccatcccttagggcaacatattccaagagctccaatccaaggtggattagaaccacagaatttgtaaaatggagaattcaggagtcgtctagttttttcattttatacatgagaggtgaaactcagaatggtacagcaatttgccagtgcttgagtatgcatatttttccccaaacccatctacattccaacttggagggatgccctttaaacaatctttctgcttgtgctcacctttaacttcccctcaagggttcgagaacgcttgaagcctgagttcttggtctcagccttgatggcactgatggctcctgacttcaccagctgctttgcctgctctgttgctgtggctgtgtccatgacaggctgctctgatagtgctggagagacaaggggaagaggcattatgttggccaagccatgatgaaggtcagctccatgctgcccacttccagtccatccccatttcccctgtcactcacagcgtttgacaccaccttggctggttgtgctgctgctactttgcttcttcagagccagcaatgcctttttctgggaacaagggtgagaagagagaggtaagtgagggccagcccctagccggttcctctcctaaggcccctgggcacatcactccagggaccgtctttcttgatgccctcagagtggtacactgatgtgctctgcctcttgcctctggtcccctagatcatgtatgatgctggaaattcctaatctaaccaaaccacggaacccagaggttttccagagtgttacatttttgaagttgaagacaaataactcaatcatggactagaatcctaggatataagctgcaagtaagtataagtttatgtgcctttcctggaagcttcatccatctatttcctgcatattgaatgaggcccagccatgacttcgtaacagggatatccaggaggctaatgcattgttcctaccctcaagaagcttacagtctgagaaataaaatacattgagttagcaatacaattataagaggtgcagattattcatagctgaaagctagtaagattttctgatgtttaatggctattaaactaggccctctcccgtatctctgcacaacacagagaggagaagggtattttagaaaaagaaaacagggtggcaaagatgcagagataagaaggctttgggaatgcatcttttggaagtagtgaatagttctactttactagacaaggctgccaaactaaggttttgaggcttttttatagacaatgtgaagccatttatggtttttgagaaacagagggagcagaattttgtgttttcaatggatcatttgaacaggagtgaagaagtctgttcaaaaaaaaagactgagaaatttgttgagagaccattacaatggcccacatgaatgtcaataaagccctgctcgggggaatgcacagtgaagaataaacaggaaaaattacttcaaaagaagaaacaataagacttggcaaaggtttgactatgcaaatagtggggaagtcagagttttgagtccaaacatgtggcagaattggtgtagtcaatcttatttggaagatcaagaatagaaagatgatagcttcaacactgagtatctgaagtttttcag

SEQ ID NO: 98265 - DNA, 24990 bp, Homo sapiens
ctcatgcctgctcatcttccatttcattctcaaatctttaggggaaagggagaggagagagacattgctgtttccccactttccagtccaagcatctatcccaacagataagcaaatttcacttgtcatcctctttatgtatctttctcaaatgtcttgttctctagccaggcttaaggatataatcttcctggtttgtggctctctttcgtcttgattccttgatgactgcctccaaagagctgagctctggcacaattagacttgagggagatagtgtgagtcagtcaacaagcatgtagtatctacactttgggggagagcctatactctttcttatttctttttttacaaattattattttgagacagaatttctcaaattcctttctacctcaggaaaggaaaggaaattggataaggcgactttgtcgccaggctgaagtgcagtggtgtgatctcggctcactgcaacctctgcctcccgggttcaagcgattctcctgcctcagcctcctaagtagctgagactacaggcacacacctccacaccagcctaatttttgtatttttagtaaagacggggtttcaccatgttggcccgactggtctcaaactcctgacctcgagtgatccacccaccttggcctcccaaagtgctgggatgacaggcatgagccactgcgcctggccactctttcctatttctgaatcttcacaggttgttggtcccttcctagtcctgtgtttctcaagttaagactagggggaatctacaggtccatggctatcttctctggggaactcttctaaaactttaagtttgtgcttacctcttgatgggccatatttttaaaaagagaaatattttcatacatgatgatttggattaggttttttttaggggtttcaatgcctatatttgtatttgtgtttatttatttatttattttttgagacagtcttgctgtgtcgcccaggctggagtgcaatggtgtgatcttggctcactgcaacctccgcctcctgggttcaagcgattcttctgtctcagcctcccaagtagctgggactataggcgtgtgccaccacgccaggctaatttttgaatttttaatagagacggagtttcaccatattgaccttgtgatccgctcgcctcggcctccgtgcagtggcgcgatctcagctcactgcaacctccgcctcccaggttcaagcgattctcctgcctcagtctcctgagtagctgggactacaggcatgcgccacaccagctaatttttgtatttttagtagagacggggtttcaccatgttggccaggctggtctcaaactcctgacctaaagtgatccgcctgccttggcgccgtggctcacgcctgtaatcccaacactttgggaagccgaggtgggcagatcacttctggtcgggagtttgagaccagcctggctgacatggtgaaaccccatcttcactaaaaatacaaaaattagccaggcatggtggcaggtgcctgtcatccccgctacttgggaggctgaggcaggataatcgcttgaacctgggaggcagaggttgtaatgagccgagatctcgccagtgcactccagcctgcgtgacagagtgatactccgtctcaaaaaaaacaaaaaacaaaaaaacaaaaacaaacaaacaaaaccagggagagaattgttttgacacaagtctttggctaatgatgaaaccgtctcccttcctggctgtcctggcatggtttttatagtctgaggcacaatggtgagagcaaacttaagagggagccaaagtgaggtactcaagagagggatccttctttcctggagaactgtggtagcccaggctgtgtaggtagctggacaagcaagactgaatcacaataggtctctacatcttctattaggaggagaacctgcaacatccagtggagcaggtcacaccagttatacatgtaaaatgtaggataaactaaaggggcacagagccaggggagaagacaatgggatgagactgttctagaatctcatcccattggttcattgctgggtgtggtggctcacacctataatcccagcactttgggaggctgagatgggatgatggcttgaggccaggagtttgagaccagcctggtaaacacagcagaccccatctctctaaaaaaaaaaaaaaaaaaagaaaaacatacggtttatgaaccagcagcatctgcattaaccagcttattgaaatgcagaatcacaggccccacaacagacttcctaaatcataatctgcaacttaacaagttccctaggtgatatgtatgcacacttatgtttgaaaagcactaagatttcttgatgaaggaggacttgaaaggcaatgatggatgtgaaaggaaaggtaaagagaagcctcaggtagtcacccaagggacagggccggttggagagagagtcccgaggttttatcctggagaacaccctgtactgaatgagctctgaacataaagatagttagcataggagggcctgaagtctccagataaaaggctgctgccactatcatttaccacgacctctgccattctccactctattgtcatccgcccccagtctccattccaggacttctctacactttgactttttgtttgtttgtttgtttgtttgagacggagtcttgcgctgtcgcccaggctggagcgcagtggcacgatcttggctcaccgcaagctccgccttccgggttcatgccattctcctgcctcagcctcccgggtagctgggactataggtgcccgccaccacgcccagctaattttttgtatttttagtagagacggggtttcaccatgttgtccaggctggtctcgaacccctgacctcaagtgatccccccgccgccccgccccctcccccccgccccgcccccccccgccgcctcggcctcccaaattgctgggattacaggcgtgcgcgatgcccggctttttatttatttatttatttatttttgaggcgggaatcttgctctgtcgccaggctggattgcagtggcaccatctcggctcactgcaacctccgactccctggttcaagcgattctcccacctcagcctcccaagtagctgggattacaggcacacgccaccatgcccagctaactttttgtatttttagtagagacgagatttcaccatgttgccaggatggtctcgatcacctgacctcgtgatccgcccacctcagcctcccagagtctcagttgccaaagctggagtgcaatggcgcgatctcggctcactgcaacctccgcttcccaggtaagccattctcctgcctcagcctcctgggtagctgggatataggcgcccgccatcacgccgagctatttttgcatttttagtagagacggggtttcaccatgttggccaggctggtcttgaactcctgacctcaacctcccaaagtgctgggattacaggcgtgagccaccgcgcccggcccaccttttttttttttttttttttttttttttgtttgagacggagtctctagtctcgctctgtcgcccaggctggagtgcaatggtgtgatctcggctcactgcaacgtctgtctcccgggttcaagcgattctcctgtttcagccttccgagtagttgggattacaggcgcgcgccaccatgacctactaatttttgtatttttagtagagacagggtctcaccatgttggcccactttgactcttgagcagcctggccagcccgaccgcgccaaattctgttcgattctgcctagttcggttgctctggcctagttcagttgctaaggcctggagcttcatggttgcggaggaaatgatgtcacgttcaataggcgggctaaccagattcctcccttctcccgattggctgccaggaatttgactagattcggagtctcgcgggctccagggttagttgtcagtatctttcccagttgttccgccccctacccccgcctcccgcaccgcgcccctctccggctgccctctccgtgtggggcaaggctccgagggcagcattcagtagccatttagctttggaaggagaggtgattcgaatggcccggctcctcctgtcaccatgctaggcactttggccgcgcaggtacttattgacccgaccgggtgtccgtagttggcgcggctaccttaaccgcagggaattgtggaatttatagttctaaattatatgtgggtggaacggggaagctggagcagatttttggaggaaagcaaaactggggactttcaggactaggggcctgggtctcagaagaatgggaaaggacgagaaaggagtctaaataagaaccctgctattagcattgtttggttttcttttcaggtgctgacctgaacctggttcatccctttctgaccaaaactgttcactcaccgtggaagggactaagcatccatatggagacgccaccagtcaatacaattggagaaaaggacacctctcagccgcaacaagagtgggaaaagaaccttcgggagaaccttgattcagttattcagattaggcagcagccccgagaccctcctaccgaaacgcttgagctggaagtaagcccagatccagccagccaaattctagagcatactcaaggagctgaaaaactggttgctgaacttgaaggagactctcataagtctcatggatcaaccagtcagatgccagaggcccttcaagcttctgatctctggtactgccccgatgggagctttgtcaagaagatcgtaatccgtggccatggcttggacaaacccaaactaggctcctgctgccgggtactggctttggggtttcctttcggatcagggccgccagagggctggacagagctaactatgggcgtagggccatggagggaggaaacttggggggagctcatagagaaatgcttggagtccatgtgtcaaggtgaggaagcagagcttcagctgcctgggcactctggacctcctgtcaggctcacactggcatccttcactcaaggccgagactcctgggagctggagactagcgagaaggaagccctggccagggaagaacgtgcaaggggcacagaactatttcgagctgggaaccctgaaggagctgcccgatgctatggacgggctcttcggctgctcctgactttacccccacctggccctccagaacgaactgtccttcatgccaatctggctgcctgtcagttgttgctagggcagcctcagttggcagcccagagctgtgaccgggtgttggagcgggagcctggccatttaaaggccttataccgaaggggggttgcccaggctgcccttgggaacctggaaaaagcaactgctgacctcaagaaggtgctggcgatagatcccaaaaaccgggcagcccaggaggaactggggaaggtggtcattcaggggaagaaccaggatgcagggctggctcagggtctgcgcaagatgtttggctgattaaaagttaaaccttaaaagagacaggaacttgtgaattgtggtctgtgctgtgagatttgggggtggggggccagagggaaggtttcagcccatatcccattctcagcttttggcttcctaggggaggtagcagtggtcacagtgcgccccttttgaggggcttatctatctccgaggacacatagaagctgtctaaactaaacttagtagtggctgggggagatggtggaccttaatactgggtactacatctcccaggcgctttatcactggagcctgtttggcgcatgcgcttggcggtatggcactgtctggaagttacttcctgctgctgtgctcccattgggcccgcctacacagtcatccgcatctgttgattcacgtgctcagcacccaggtctcttactggtcggtagagcttccgggacgcccccttttttgaaagagtcaactgattagttggtgatggggagaggcgggccttgggaaccgtctcctggttggggggtgggggggaaagatggcggasctgatgctgctyagcgagattgctgacccgacgcgtttcttcaccgacaacctgcttagcccggaggactggggtctgcagagtgaggcaccggggaggggagagggctgtggcaaactgtccctgaggcacgcgggaaagaagcgggggcctaaagaggaagtctgggcaaatacggaatccgccatctgaaggagagcggagcagggggctcgttgtgcattaagggggatacaaaagtcagggaagaactctgctccctgctggaacgtcgagttgttccggggtcggggaaggaggggctgaagcgccctggttgtatcacttttcaagtgggcgggcggtgggtctggccgagcggagccaatgagggatggggcgggggcttgtgtgcgatctgtaggctggggccaccgaacgaccccccgacgctcagcatttcttgcagacagcaccttgtattctggcctagatgaagtggccgaggagcagacgcagctcttccgttgcccggagcaggatgtcccggtattgtgtccccagcctttctctaacccttggtgggtggaaagtgagcccagaayctggacccattcacaggccataactcatctggagtcacccctactttctcatcctttctcacactcctgccctcttgtatcctcccttatttagtttgacggcagctccctggacgtggggatggatgtcagcccctctgagcccccatgggaactcctgccgatcttcccaggtaaggtagtctttgtcgttccctcagatttccagaaaccctcatcttcccactgtttcccagaaactacgtagcttcctatatcctcacgcttctacataagtgcctatcctctctccttcaatcccctatttttktttcttctcccttgctgcggtacaggaatccccaccgacatgtccttgggtactttttggactcttcttaagctctgcttcctgataatttctaactccctttcctccagatcttcaggtgaagtctgagccatcttccccctgctcttcctcctccctcagctccgagtcatcgcgtctctccacagagccatccagcgaggtgagagagccatatccctcttactctctgtgacggggactctgcttcattcccttcacccgtgggtgacaaagaaatgatttaaatgatttgtgtgctatgagtcatgaggtgtgtgaggtgtggggggccttctccactacctttgccgtttccttaatatcttcattttccacatcccctttggttatctagcagtgaagatttttttgtttgtttgttttttgttttttgcttttttttgagatagggcctccctctgtcacccaaactacagtgtagtgacrgggtcacagctcactgtagccttgacctcctgagctcaggtgatcctcctgcctcagcctcctgagtagttgggaccacagacacatgccaccatgtctggctaattttttttattgtttgtaaaaatggggtcttcctatgttgcccagagtggacttaaactcctgggctcaagtgatcctcccaccttggcatcccaaagtgcttggattacaggtataagccaccacgcctgatcttgggtctttttaatataaagagttatgtggggctgggaagaagagagttattgactgctgagaattctggaactgttcttgcccaagttgtccactctgaggccatatttgaagtcatgagacttcatcaattctcccagaaataaagtagaaagaatgaacaggttagaaagatggtcagtaccattcagaccagaatgtcaaataattgatggcttgtaagccctaaacttctaaagcttttgttctcgctcttactgtcaacatctcccttgttttttgcccttctttytgccccctgccccacaccaactctcacccaggctcttggggtaggggaggtgctccatgtgaagacagagtccttggcacccccactgtgtctcctgggagatgacccaacatcctcatttgaaaccgtccagatcaaygttatccccacctctgatgattcctcaggtaataaaacagcctgcccccaatccttggctctactacgggagaatgtgttatgtgtgtgtgtgtatgtgtgtagatggaggggaagtgcaggcagcaggacagggagaaaaaggtggggaggggaaatggcagaaaaccaggagggaaggcaggaaggagaggaaacatttcagggaaccacagcaagggcagtgctgaggagatggatattatttttctctctttttcttgttcctagtattctgtcatgccattcaacttactttttaaaaacttgtgagcagtttagggcatatgtatctgtgtgattcccctccacccaacattttattataaacatttttgttgttgttgagacagagtctcacactgtcgctcgggctgaagtgcagtggtgtggtctcagctcactgcaacctccacctcccaggttcaagtgattctcctgtctcagcctcccaagtagctgggattacaggcacccaccaccacgcccagctaattttttgtatttttagtagagatggggtttcaccatgttggccaggctggtcttgaactcctgacctcatgagtcgcctacctccgcctcccaaagtgctgagattacaggcgtgagccatcgcgcccagcccataaacatttttaaacatacagaaaggctagaacaccatatactaaactagattctacaattaacattatttgttctatttttaaagtgttcccaagtttatttactcgtagctgtgtatttagtaaatgtttattgatgtgatcatatctgaggtataataattataaaaaagaaatatttattaagcacctactccatgccagatactgagcagcatgctgggaatgcaaagatgaacaagacctgaccaccatgctgactttcaaaccctgtgatttggtaatgggagaaagacaagtaccagtcaatacaggtgtggtcattctaggatagaaatcactagaggtggggctgggtgtggtggctcatgcttgtaatcccagcactttgggaggccgaggtgggcrgatcacgaggtcaggagattgagaccatcctggctaagatggtgaaaccccgtgtctactaaaaatacaaaaaattagcctgtagtcccagctacttgggaggctgaggcaggagaatggcatgaacccgggaggcggagcttgcagtgagccgagatcacgccactgcactccatcctgggcaaaagagcaagactccgtctggaaaaaaaaaaaaaatcactagagggtaccatgaaagctcataagaggggacatttcatccacattggcgctgaatctgggatgtgcccctggaagaagggtttcctgagagttttaaaggacacgtagaaattagccaggaggacagtgtgggggttgacttgtgtctgaggaccctgcatttcttcagagtggatgtaagaaggatttggggagtgatgtggaactgcaggggctacagggccaggtggggcccctgctaaggggctcttagcttttatcctgtggataggtgggggccwttggagaattaagcagggaagtaatatgattaggaagatgattctagtggcaaagtagagaatgggttgcagaggggcagggccagaggcaagagaaccaaggaagaagcttatgcagttgatcaagtaagatrttcggatgtcatgaagaaagcagacttgagaaagaatgaagtggaatagatgagttgtgacctcctggacattggagagaggtaggagtcaaagaggtttgtggctaggatggctgtgggtgggtgatgttactgttcactggatggagactgcaaaagcaggggctttctggtcagggaagatgatgaattcagcgttggacatgttgattctgttgttgttgttgttatggagcttcactcttgttgcccaggctggagtgcaatagtggtgtgatcttggctcactgtaatctctgcctcctgggttcaagcgattctcctgcctcagcctcctgagtagctgggattacaggcatgctcyaccacgcctggctaattttgtatttttagtagagacagggcttctttcatgttaggctggtcttgaattcccgacctcaggtgatccacccactttggctcccaaagtgctgggattacaggcgtaagccaccatgcccagttgacatgttgattgttgatttcaaagtaccttctggatctcctggcaccatctctcactggctgaactccaaccagggagcccgctgatgcagtccattcagattctccctggatctcagggagcacagcagggagggatggaaagtggatttggagggacaaacagattatatctagcagattaatacatgttataaaaaagatacacaaaataaggattgaaataccattagcaggccaggcacagtggttcacacctgtaatcccagcactttgggaggccaaggcgggcagatcacgaggtcaggagatcaagaccattcgggctaacacagtgaagcgccatctctactaaaaatacaaaaaattagccaggcatggtggcaggcacctgtagtctcagctactcgggaggctgaggcaggagaatggggtgaacccgggaggcggagcttgcagtgagccgagatcgcccactgctattagcagcaaaaggattgtaaggattgttggtggctttgcattgcatagtgttattagagtcagattctcctccatacttaggtattttttgagggcctgtactttaccctcaatggacatgagacatagttcttgcttttggagagttttgtgagggttataatacatcatggttaaatagttcccttttttttttttttttttttttttgagacagagttttgccctgtcacccaggctagagtgcattggcgtgatctccactcactgcaacctccgtttcctgggtttaagctattgtcctgcctcagcccccctaatagctaggactacaggcacgtgccaccatgtccggctatttttttgtatttttggtagagacagggttttgccatgttgttcaggctggtgtcaaactcctggcttcaagcaatccacctgcgttgggtgtcggcctcccaaagtgctgggattacaggcgtgagccaccatgcccagccatggttaaatagttctgatagtggttatctctgtgtagggaatctgagtgactggaggaccgggaagggaagttttttttttttttttttttgagacagagtctcgctctacccaggctggagtgcagtggcgcaatctcggctcactgcaagctccgccccctgggttcatgccattctcctccctcagtctcccaagttgctgggactacaggcgtccgccaccacgcctggctaatttttctatttttttagtagagacggggtttcaccgtgttagccaggatggtctcgatctcctgacctcgtgatccacctgcctcggcctcccaaagtgctgggattacaggcgtgagccaccgtgccccgccaagattttttttttgacttaattttcctttgttcgtttggatttgtatcatgactgtattatctattcaaaaatataaattgaagttttaaaaagcaatcttagtgatcatataattaagtaccaaagtgaacggtatggaccagaggtagtggtggactgttgacctgtgggctgaatctggccctcagaagggttttatttcaccgacatggggcctagcattttctttcatggagtgatcaacaagtcataaaggcagatttattggaggccatggaggctcagaggtgactgaggctttgctgtttggtgcctgggaggaaaacttgtgtgacggggcaatcaggaagcctcatttatggccagttagatttgggtgactggtgaggcatgagaatggaagggaccagcaggcagcttggaagtcagaatctggtgcaggtgagcagccagggggagatgcacacttggcggttgtcagcatggagatgcattgggcagggataaggtggaaatccagcaagataggaatttgggccatgtgaatgctggagacccccctgccacttcccctgctcaggcctattctatgtgaatagacaagttctgtgaacaagaaagagggaaacgcagaagggcaaagacagctttgaggaacatggagcagggatgagaaaaatcagaggagccactaaaggagaaagggaagcactaggcgaaaagcggggcggagagccagcaggtgagcagctctgtgactgcccctcctggatggcctgtaatctagggccagaagagttttattttcaggttcaaagagaaaggacccatttccccatcttaaccctcttttttatttttttgagatggagttttgctcttcttgcccaggctggagtgcaatgrcgcgatcttggctcactgcaacctttgcctcccaggttcaagcgattctcctgcctcagcctcctgagtatctgggacacagggatgcgccaccatgcccgactaattttgtatttttagtagagacggggtttctccatgttggtcaggctggtcttgaaytcctgacctcaggtgatctgcccgccttggcctcccaaagtgctgagattacaggcgtgagccaccatgcccagcctcccatcttaaccctcttaacccttcagtgtttacatgatatccagcttttgcctmatcctgcctcccacagatgtccagaccaagatagaacctgtctctccatgttcttccgtcaactctgaggcctccctgctctcagccgactcctccagccaggtgagcaccaccttccttccttcctccaggttttccagtgagttcctcctgrcctagaggtatgagagctttcccttcttcagctccttctcctcgacactcttcctgactaatgtatctctggaatgccccacataggcttttataggagaggaggtcctggaagtgaagacagagtccctgtcsccttcaggatgcctcctgtgggatgtcccagccccctcacttggagctgtccagatcagcatgggcccatcccttgatggctcctcaggtaatggagtctcctgacacttggaatccctagtgagaggcctttggtcctgacatttcttgttcttttctctcaccttccttcaggcaaagccctgcccacccggaagccgccactgcagcccaaacctgtagtgctaaccactgtcccaatgccatccagagctgtgcctcccagcaccacagtccttctgcagtccctcgtccagccacccccaggtactgaagaaggagaaaagggccgggcatggtggctcacgccggtaatcccagcactttgggaggctgaggcgggcgaatcacctgaggtcagaagtttaagaccagcctggccaacgtggtgaaaccttgtctctactaaaaatacaaaaattagcgtggagtggtggcaggcgcctgtaatcccagctcctcgggaggctgaggcaggagaatcacttgaacccaggaggcggaggttgcagtgagccgagatcatgccactgcactccagcctgggcgacaaagcgagactttgtctcaaaaaaaaaaaaaagaaaaaagaaaaaccaaaaaataaaaataaaaattaattaattaattaaaaaaaaaaggccaggcacagtggctcacgcctgtaatcccagcactttggcaggccaaggcaggcggatcacaaggtcaggagatcgagaccatcctgactaacacagtgaaaccccgtctctactaaaaatacaaaaaaattagccaggcgtggtggcgtgcgtctgtagttccagctgctggggaggctgaggcaggagaatggcgtgaacccgggaggcggagcttgcagtgagccgagatcgcaccactgcactccagcctggtcgacagagcaagactgcatctcaaaaaagaaaaaaaggagaaaaggaggcgggctgcattgaccctgtcagagagcttgcagccattgaggctgcccaatccttgggtgctcttgtgtgggtgtggacacaaggaccccacccagcgcacagccctctgacctctgctcacttgccccagtgtccccagttgtcctcatccagggtgctattcgagtccagcctgaagggccggctccctctctaccacggcctgagaggaagagcatcgttcccgctcctatgcctggaaactcctgcccgcctgaagtggatgtaagtgttggggaggagagaagtagggcgagtgatgggaagggaagagggaagtcttgccatagagagaactgtgggatgaggagggagtcgatacctaggagaaaaaagtgaggaaacggacccattagatcattctgagggtcagaatggactcctgtttctatatgaatatcaactccaggtagttttagggtcctttaggtttgctgtcactgcagatggagaaatggggttggtctccataaattaaaggcaaggaagtcgtactgtactatacgactacggtcatggccatagttggggagggaggctgcctcctaggggaaaatcaggtaaactrtataagcagtataacaaggttaaactttgaaccctacaaatgtgggctgacaggaagaaagagttacgaaggaaagagtttccaccagcatggagaaagttcttcccacactctaacctttcccacctctgaggagcagtagcagggaatgtttgaaagaagggccccttccctagcgtgtttgagtagagaggaaaaacstctctggctatgtaggtgggtcaggaaggcaggggaatggccatgtgagctttgggtaaatcattccttggggtttgagagcatagtctccttctgccaactcatctgtcattcttttttgaccttccgggtgcctaggcaaagctgctgaagcggcagcagcgaatgatcaagaaccgggagtcagcctgccagtcccggagaaagaagaaagagtatctgcagggactggaggctcggctgcaagcagtactggctgacaaccagcagctccgccgagagaatgctgccctccggcggcggctggaggccctgctggctgaagtaagaccagtctgtccctgggagaccaacaggaatacagcctccttggaatgattcccctttttcttgtctccttctttgtaccttagaacagcgagctcaagttagggtctggaaacaggaaggtggtctgcatcatggtcttccttctcttcattgccttcaactttggacctgtcaggtgagaccttccttgcttcactagaaccttccaggtggagcccacgttacagcctcctagctgcctgctttggcccaggccatttccttctgcttatatacaaatggttctggtgtccttggcaccgatgatgtgtctggccagccccttcctgctccattatttgtctttttttcttggagatggagccttgttctgttgcccaggctggagtgcagtggcacgatctcggctcactgcaacctctgcttcctgggttcaagtgattctcctgcctcaacctcccaagtagctgggactacaggcgcacgccaccatgcccggctaattttttgtattttttagtagagacagggtttcactgttgttgcccaggctggtctcgaactcctgagctcaggcagtctgcccacctcagcctcccaaagtgctaggattacaggcttgagccacctcgccyggcctcctgctccattatttttccagtggagagtagatgatggtgataatgctggtagaaatagtgactattaagtgcttactgagttctaggctctaggtgatgcactgtcttttttgtatgtagggaccatccttattcccatcttacagaggcagactcaggcttgtataacagattgcaactcaagcagtccatctgcagagtctttattcttacctagatacttgatacagctgaaattcttcattgtgctcagtccttctttatccacagcatcagtgagcctccttcagctcccatctctcctcggatgaacaagggggagcctcaaccccggagacacttgctggggttctcagagcaagagccagttcagggagttgaacctctccaggggtcctcccagggccctaaggagccccagcccagcsccacagaccagcccagtttcaggtgaggagagagagagagggccccctctcgtttgaggrtatgagttggtcttctccccgctttcagtgagggggacccaaagctttctcttgccgtcatcgccttctttgttgtgggagtgctgggcagtctccaagtgttgtctccttcctgcttcactccagcaacctgacagccttccctgggggcgccaaggagctactactaagagacctagaccagctcttcctctcctctgattgccggcacttcaaccgcactgagtccctgaggtgtgggattcattgctggggcatccagctcccccggcctcccaaggccttctgcagtcagcctggctggcctgtgtactaaagcgccagtgctccctgccctctcctcactcctgtgggtgggcaaggagggtgggaatcttggcctggcatggaggtcctgagctcctccatttccccaggcttgctgacgagttgagtggctgggtccagcgccaccagagaggccggaggaagatycctcagagggcccaggagagacaggtagggcgggtggctggttcaaggaaggccacttgaagacaagggctaaaggccttgtctggggatttctagtgggcatctcgctgtggaagtttgagggatcgtttgaaggaagtggagggttgagtgggaggtggcatcagcttccaggggctgtttgtctctttcccttttcccttcaccctctccaagtccttagatacttctccttccagaagtctcagccacggaagaagtcacctccagttaaggcagtccccatccaaccccctggacccccagaaaggtgagtgtggggtggggtgcttacttattaagtgaaattccactttcaagagctgtacccccagtagctgtcctgtgcctgtcattactgtcaccagtgggattatacctccctcctccactgggggtctcctgtctttttctctcatcctacccgcttccctggtagaaactgagcattgggcttagttcccctcaaatcctgtttccccacctgcctagggattctgtgggccagctgcaactatatcgccacccagaccgttcgcagccagcattcttggatgcaattgaccgacgggaagacacattttatgttgtctctttccgaagggtgagtttctcctgcccttccatctctgtcaccccaggttcccagcagtctgtcttcagtggggggatgtagagtagggctggggagcttgttggcatctttgcctccacccttctggcctggcccatctgttccccaggaccacctgctgctcccagccatcagccacaacaagacctcccggcccaagatgtccctggtgatgcctgccatggcccccaatggtaactctttccctgctgggtatgggggcagttccaacagggagatccagcctgggagctgagggggaagggggagaggagcagggcatccagagagctgctggacccacaggtgagaagcagcaggaagtaggtggagggaagagcaccatgcaggagacttgggagggagacaagggtgagggtccttccctggtgaaggtgcttgggtagatgactgggcagaggcggggggccgggaacctgctagactctcacttacttttttctcttgatgtcctctcctgtgtgaccccacactcaatgcccttttcttttcctaccctctccttgcccctgcaccaaactctgtccctgccatcctgtttaactcccgctatggatctgcctcctcactattgccctttctttttctctctgctcacctctacttttctgacctcctcccctcctccctgcaatccctgtttgcctccccatctcctcttccttaactctccccttctcacagagaccctgtcaggccgtggggccccgggggactatgaggagatgatgcagatcgagtgtgaggtcatggacaccagggtgattcacatcaagacctccacagtgcccccctcgctccgaaaacagccatccccaaccccaggcaatgccacaggtggccccttgccagtctctgcagccagccaggcccaccaggcctcccaccagcccctctacctcaatcatccctgacctctgccattcacactgacttagaacggggggagggggtaccaggtggccaggtgggactgtttcaaatttccctgatccccaggcttggggcaattggtaaaggaaagagcaggtgtgggggttaagcacttatttgaggtgggggtgttcacctctcttctcatcccttttcagaatatagggctcctctcattcctgtgaacccccagtccyggcttctttgtttgaggggattgtgtgaggttcagttgtggggtgggtggtgagctgctgcatattttttattttgtttctctagtgttatggcagtggaggtgggaatttagtccccaggtggracaagggaagttttttcattttggagctagttactgggagtaagggagggtggggtgggggggagttcaggtttatgtgtgtgcatttcttttttattattattaaataaacaacttggrgggagttgaaggaatggtggctgccttcctggctcgtgatggggagtttgggggaaagtggcttttccagagccagcatcaaagaatcaagcactgaagacatagctggctctgaggtggggtgggtgcgggatcacagaccgcatgtcatccccttgcccccacccctgcaactctggggtatatctgtgtctagcaacgatgtctcatggcgtgacagactagaggatacgcatccctggaatgtgagtcaacaggaaagatggggccccacgcccttcagggtgagcagcctctgggtctcctgctctcgagcaggttctccccctcttcttgctgtccaggatgagcagctcaaacaaacaacaagagctggggccagaggctcagagcccaggaagtgggggtctcggtgaagaaggggtgatatttggaagggaagggggatgtggcaggatatcctctaagccctaaactggaggggactgagacttgagagtccagatgaaagacaaagacaagagtggggcaggcagaaaaagctgtacattcttatgtttttaattttttttttttttttgagacggagtcttgctctctcacccaggctggagtgcagtggcgcgatcttggctcactgcaacctccgcctcttgggttcaagtgattcttctgcctcagcctctcaagtagctgggactacaggtgcacgccaccacacccggctaatttttgtatttttaatagagatagggtttcaccatattggccaggctgcccacttcggcctcccaaagtgctgggattacaggtgtgagccaccatgcctggctaggctgtgcattctaattaggaggaaggggagcaggacaaagtgagggattgagtctgaggccaacctggaagaatccccctccagctgctcctgttcagcagtgcctcaggcctgaccctgcaggagtgtcctgggtcagctggagggtgtgagctgggcctgggctcaatgcccagatgactggacaggggctgcctgggccataagcccaggcctgaaggagggaggaagaacctcatgtgtccagccaggcaacccccacacccctcccactgccctcacccattactgtgtttggggtgaaaacagaccaagtaactatggcaacctggaaccagggatcccaggaactagacctttcctccctccagagggcagcccagcttctcagctatgctttctatcccagagtccttgagccttatccaccgtatctctggagggggtgcagtgagaacaaggattttggaagcacatcacctaagctggattccctaccctgcctttcgttagtagatgtccttaaacattctgagccttagtttgcttatctgtaagatgggatgttcctacctcctaatcagggttgatgacaggatgaaagacgacgtcctcagtgcctggtccataatagatacaccttttcctcatcccttgcccctttctgtccccatctctgttgtccttctctcttccacttttatcccatttgggttcattactgtttcgttgtcccattgtcttcctccttcctgcccccagttcgggaaagtacttgaagtgctggcatctcaggggtcaccctggggtgggacatcctgctcctctgctgattggcaagggacagctggcactttggtgtggatgagacatcagacctctcttggctgagggattgtggtggcaggaaggattgagaaggacggtgagtgggtacctgatgcagggtgaaagccgggcaggctctgggctgctgccttctaggcccatgtggatctccattcctctggccacacccccaaggccactcagcatgccaggtcgctgtcactcctgcacctcattggcccctcctgccctatgcccactttgtctttctgttctgctttccttgtgccaccatctccttcatttcttcctcaggatcccaccttttgttctctctcatccctgacctcatcatccctcccttcctctttctagacttctttcctgcctttctttgctctctacctcattagcagttatcacaacctctttttgaaccattattcatcactgtttttttcttcttttgtatcttccccaccccatccactgcttcactgtcttaaattttttttttaatttaaaaatagaagtggggtctcgctatgttacccaggctggtcttgaactcctggcctcaagcagtcctcccatgttggcctcccaaagtgctaggattacaggcatgagccaccgtgctggccttatttaaaaatatatatatatttttaaattcactgtctttttcctttgtttttcttggtcttctcatctgctgctgctgctgaccctgtgcttgtctcctccctttctcatgccgccccctttctatttcccattctgctccctcgtccacatttcttgcccctttccattatgtcctctcttttcccccactttggtcctctcctcctccttccttcccccactccctttacttcccacaccagttctccatcctcttcccagctgtgggggccagcactggggagcctgatgtttgcctcatcgttctgctatggcttctggatacagcacatctggattccggggcccagatgtgtggttgccacagcgacctgggtccctctggtaaatacaggcgcccacccgcctcagagcagagaacaaaacaattgtgtgactttcttttgtcacgagatagaaatgtccttcctcctcccttctccccacacccatgtctctaggcaaaggaagttttaagggtccaaacccttccttctgaggctcccttgcccccttttcagctgtagcctcttagttctctcccatctttcatcctgcgctctgtctttacattctgtgttccccatcctcacccgacccccagttctcaataatggaatgttgaccacccccttccccatctgatgccatttcttctaagtgaatctacacaataactggatgcagaaaagtttcaaaaatctggattctccacccttctttgtacaagtgcttcaaagaagccacttcatttgttccctaagtcttcaatcctttcctttcctggagttgtttggggagaagagcgaatacaggcttaggaatgagaacacctgggtgagacccaccttcaccactactgacttagccccttgaacaagacccttaatgtctatgagcctccgtttcctcagccacaaagtgggattaatgcccgcactgtgtaggaaactgttttgtaaacggaagcccggcacaagtgttttctatctttcccctctctgggactgctttcttggaccgcagcccctggcatctcttgttcccctgtcttcatccttcaggtccttgccctcaattgcccttactcttatgtgtctgccttctctcctccctatctttcctttccttttctctatctttcatcccttttcctcctgaggtcaggacaggaacttggaggatcattcaaggagggaggctcagagctgaagacacagggactgaggttacagagaacagccggagcttgtggacagttctggacaacactgacctttctacccaccaccacccagacacctcagtgaagccaaccccagctctgaccactgggcttccctgccttcacgcctgggctccttaccctttccccctcctctctcccagtcctttcacatttcagtgttgacttgcatttattggtcacctacactgtgcaaggcttggtgcttttcttacaagatgtgaacatacaagacatgagcttctccatgagcctggaaaccaaagggtgaatcaaatggtaaacaaagataatttcagaacctgaaactatatctgctaagcttccagtggcttccccaaatgccttataagcttgtgtacatctggaatcccacatttctctctgagaccccaacagtgggcttccagaacatcccaggaccatccttcttgctgtcttctctgaggtccctggccactctctgtgccaaatgtacttatgttgaccattcttcctaaataataaagccaggacatagggcataggcacacgcgcgtgcacacacacactaaaggatatgaccatggaacagaaatctgaaggtgtcagaggaaattcataccctgtgttctgccctctgtgtgatactgtctccagaccctccctcttcctatcactgcagggctccccacctcctgccaggagatccttgggaagctgctacctactgctggctctgggggcttcaggccaaggcagaggaaggaagctgagcctggctctgtccaagatgctgacttcatcctccccatcaaagccaggaaaaaaacagccacacacacccagacacacggacacacacggggacacccacgcaaaagcccatgtgtgcctttgccctcggccacatggagcttactgggcatctggccacagccacatgcagtgcaggcacgccctgacccaggaacaccacacacctgccaccatggggatctgacctggtgtgcagacacctgggccgtcacccatgtggcagaatcaagcacatatgggctccctcacgtacctttcacccgtgacttggccaagttacacctcagtggtgaggtctgtagcaggatagagagacccagtcctcactgtgaagctgggggtagtgggttcccactcagctgggatatttctcctctgtagcaaagtctctttttcagctccttgtcagggcagcacatggggagatgaagctagggaaacacccaacagacttatgtggggtgtgtctgtctccctgtcccccctgtcctctggctgtcagtcttctgcctgggaccagagacagcgtgtccgtttcctccagcccctacctctccccgcctctgttcctgctcccccgcagcacccaggcaccagccccccaccctgctttccaccacttcaccctctattcaggtgacccacccttatatttgcctcctgtctctagccctttcttcaaccctaaaccttcctcctaaccttcaggctttccttccttgtccgccccaaccccagcttcctccccaaggcttgtatgtcccagtgttcacccaagcccttgccctgccagtgcccaagcctcacctgctctttctctagggacttgctgaggtaggagaatgcaaagggggcagtgacaggagagggactgaacagaacagacagcaggagtggctcggggacgggataagccgagaagatagaaatggtgggactggagcagggtggggacttggggtcccagagacggtcccagttggagaaagaggttgcctcttgcctcctgccctctgcccctgctccctgccccagactgccaggggagaactggtgagaggatgagggagccagcactgggtgatagacatggggtgcgatccagagatccaagctagagcagtggctgggaagagatgggagaggagcatgggggagggaggggaagggggctggccatgaggaaggatataggctgagaggaaaccactggggtcagagaggaggggcagcaggtggagaaatggtggggaaaaaagaaatggcaggaagggtggggggtgtcaagttgggcaaaaattagggtgagctaaaaatggcatagggaaaggacgtgggaggtaagaccggggctgggggttgagatgagggtatggtgagacagtgatgctagacagggagtgggggctggggtgggggcaggagaagaggaggggtggcatgtgggagggcctgggaggggtgggaggacctgccctatctccgctcccctccctgacctcatcctggtcctccccttctcctcccctgctcgctgcagactccctcctcactgtcgctgccgagatccacagtcggttgtggctcagcccctgttgcaggggacaagtgagggagactt

SEQ ID NO: 98266 - DNA, 23545 bp, Homo sapiens
atctgcccacctcagcctcccaaagttctgggattacaggtgggaatcacggcgtctggccctgcttcatgcgtttttggtatctttccgcccccagcacctgaaggggaagaacgtgatccacccattcctgtctcggagccttcccattgtcttcgatgaatttgtggacatggactttggcacaggtgggcaaggggctggtcctgtggggagaggaaaagactggagctgcaccctagctgtccatcttctctcagagaaaaagaaaataagcttcagccaaatagacagagcttggggtggttctcaagggactgtattagacaagtgggggccaggagtggtctcggagctacatccttcagcaaaagaggtgagtgtaggaaggaactccgtggagtccctcatgacctgggcatcctgatgtacacccaggtgctgtgaagatcacccccgcacatgaccaaaatgactatgaagttgggcagcggcacgggctggaggccatcagcatcatggactcccggggggccctcatcaatgtgcctccgcctttcctggtgaggctgcctgaggcaagagtgcccgggtcagggagatggagggatggctgggcatcgccatgatgaggcctcattcctacccagggcctgcccaggtttgaggccaggaaagcggtgctggtggcgctgaaggagcggggactgttccgtggcattgaggacaaccccatggtggtgccactttgcaagtgagggtgggggcctgggacgggaggaagatggagggctcctcagggttttaccgcctggccttctcacctacgtgtacccccagccggtcgaaggacgtggtagagcctctgctgcggccgcagtggtacgttcgctgcggggagatggcccaggctgccagcgccgctgtgactcggggtgacctccgcatcctgcctgaggcccatcagcgcacatggcatgcctggatggacaacatccggtgtgtagggtcctcagtgtgggaggggcttgccgagggctgagcagggctcactcgggccaggctccatcaggccctccctgatttctcctccccgacatttgcagggagtggtgcatttccaggcagctgtggtggggccatcgcatcccagcctactttgtcactgtcagtgacccagcggtgccccctggggaggtgagcagagggccagagctagctgctgggacaccctgctggagtggtgggtttactgggtccttggtggggggaggggcagggtgagccagaagcagacacacccccttgggtaatcactgcacctgtggcaggaccctgatgggcggtactgggtgagtggacgcaatgaggcggaggcccgggagaaggcagccaaggagttcggagtgtcccctgacaagatcagtctccagcaaggcaaggcggggctttgagggtctggagggagttgtggggggcagagctccactccctctgacctctgacctttggcctctctcagatgaggatgtattggatacctggttctcctctggcctcttccccttatccattttgggctggcccaaccaggtgtgttcctggggccggggcttggcgggacaggggactggagggtgggtgttggctccccttcacaccctggtctgccctcagtcagaagacctgagtgtgttctaccccgggacactgctggagaccggtcatgacatcctcttcttctgggtggcccggatggtcatgctgggcctgaagctcacgggcaggctgccctttagagaggtgcggagacagccgagaccctcccatcgcccccagcctcctctcctaccgtcctgtgctgcagcgcagaccccgcgtggctggggcatggggttagctgtgggcaggcctgacccgggggctggtgtggggttgaaatccagcctgggccctgctcagtgattcctgtgcccagggcttcatcttcccagaggaaggagtgcttctgattcacataaaggcgctcaacgagctcttggggacactcagtgggacctgaggttcacagtggggtagaccagacacagtcctggtcggggcactgaggccggggaaggagaggactgagtctcatgggcctccccacctgctctgcaggtctacctccatgccatcgtgcgagatgctcacggccggaagatgagcaagtctctaggcaatgtcatcgatcccctggacgtcatctatggaatctccctgcaggtgggctgggtgctgggccagccaggaagggccgtggggctgtggtcacagccacctgactgctcccactccaccctcagggcctccacaaccagctgctgaacagcaacctggatcccagcgaggtggagaaggccaaagaagggcaggtatggagggttgggctgggctaagcaggagcacagcgtggatggggctggctgaggacgctcctccccctgcctcttccctgtagaaagctgacttcccagcggggattcctgaatgtggcaccgatgctctccggtttggattatgtgcctacatgtcccagggtatggcccccaaagcgtccctcccagccactccttcctccttctgtgaggcccatccctcttctccaccctgagcctctggtgggcatgggctgggaagagggtgatgaggactcacatctcacccccgacccaggtcgtgacatcaacctggatgtgaaccggatactgggttaccgccacttctgcaacaagctctggaatgccaccaagtttgcccttcgtggccttgggaagggttttgtgccctcacccacctcccaggtaagggcctggtgggcagcaaagctggcagcactcacacaggctgtacccctgtccggagcagcctccatgtagctggggggacagatagacacagagacagacagttaaagggaaagcccagcgcattgggggctggggcctgtcacttcttcccagatcctggcacataggtggttgctttggactcatcagactctggatgaagatttgcccatgactcctgcccccatggggttctggcaccctcccctggcccgccggctgatacaccctctctccccaagcccggaggccatgagagcctggtggaccgctggatccgcagccgcctgacagaggctgtgaggctcagcaatcaaggcttccaggcctacgacttcccggccgtcaccactgcccagtacagcttctggctctatgagctctgtgatgtctacttggtgagaaggagcacagcggggcaggggatggtgggggcaggtgggcagcagagccctgggctcagttttgccagagttggccttgagacctaagccaacccatccccttcccagtcctcacaggcacagcgagggctcaaggctagacctccagccgtgagccctgtacctctcgtcccctaggagtgcctgaaacctgtactgaatggggtggaccaggtggcagctgagtgtgcccgccagaccctgtacacttgcctggacgttggcctgcggctgctctcacccttcatgcccttcgtgacggaggagctgttccagaggctgccccggaggatgccgcaagctccccctagcctctgtgttaccccctacccggagccctcagaggtatggcatggcctggagaggggagtctgacctgccctccaggccccctcaccccctcctccaccccacagtgctcctggaaggaccccgaggcagaagccgcccttgagctggcgctaagcatcacgcgagccgtgcgctccctgcgggccgactacaacctcacccggatccggcctgactgtgagcctcaggcccccatgtccgccccatcccactgtcccctcagcctactctgggacccagtgtccggcagtgactgcttggtttcctgtctccatggagctaggcctcacctttctccctccctggcaggtttcctggaagtggcggatgaggccacgggcgccctggcatcggcggtgtcgggctacgtgcaggccctggccagcgcaggtgtggtggctgttctggccctgggggctcccgccccccagggttgcgctgtggctctggcttctgatcgctgctccatccacctgcagcttcaggggctggtggaccctgcacgggagctgggcaagctgcaagccaagcgagttgaggcccagcggcaggcccagcgtctgcgggaacgccgtgctgcctcgggctatcctgtcaaggtgccgctcgaagtccaggaggcagatgaagccaaggtgtgtggcctgggtgggcatttcccacaccatccccttcctccatcaaaaccctggtctgggctggtccgagtgcagtggtgttgacaactaattgatcgtaaccagttacagatttctttgttccttctccactcccactagccttaaaaaacaaaacagcctggctcagtggctcacacctgtaatcccagaaatttgggaggccaaggtgggtggatcacttgagcccaggggtttgagaccagccaacatggtgaaatcccatctctacaacaaaaatacaaaaattagctggccatagtggcacacacttggggtcccagctactcggggggctgaggtgggcggattgcttgagcctgggaggtcaagactgcagtgagccgagatcatgccactgcacttgagcctgggcaacagagagaagaccctgtctggaaaaaaaacaaaacaaaacaaaaaccaatcctggtctggaagctggactctgtacccaaccctggggaatccactggggagcatggagcccaggcgctttgagcagggaccatagaaggccctccccttacacatggggagcagctgggggctgggcacaacccagggtcacacaacaggtgggagacggaggctgacctagaaccaggcatcctatctcccagccagacccttcgtaccccacccagctgcccaaaatgtggaaacctgcatgcctggggctgggcttggggtccacatgtagtcggggagccctgggcctcccaccacttactttcaagcctactgggctgaccctggaaggccagtcttgtttgtcccctgcctcctgggttccgccagagagaagcagtggagtaaactgcacagacacagagaaaaccagtcatggaggccaagagctagagagccttgagtggacgtggttaatctcacttggttctcccaagagccctgggaggggggcaatatcatcatcatcatctgacaaatgaagtgaccggcctgggagactgtgctctcctgcttaggtggggacactgaatggggaacacgtaggctctgaggttcctttgttcttggggactcaccacttggtggaaaaaggcaagacccaagaggtggtggtggaagtgggggtgctggtgggaatgggtggggagccaggccagccaggttcacgcctcctctgagctactgacctcccatggtcctcgctcatctttccaactttgttgtcctgggtgtttgggggtctcttcacttggacctgggtcctcacccaccccctggttccactccagctccaacagacagaagcagagctcaggaaggtggatgaggccatcgccctattccagaagatgctgtgatccaccacccagcttcacccctcacccccagcggctcaccatggggatggcagcaataaaatattttcccacaaaatcctcttgtcatctgtggtgggggcagagaggggagcagaggggctgggtgcctgaatccttgggggctgcagggtgggagtgaggccctggttctggagggcagaggggtgcgtctatctgggtctgtccctggcactgtgccaggcctgagtcacgctgcttactcccttcctcctccccagctctcactcacctccgcactgcagccaagggaggcccgccctggcgtgggctgctgcctgtggctttgggcaggcaggagcgaaagggccaggggttgcctgtcctcccccaccctgttgaggccttcctccccctctgctgagcctcggttaattataactctgacctaagtgccctgtgacgtcaagcccgggccagccctgcccaggagacccagcaaccaggtaggggagggcctgagaggactcaggcttcctgagcatggggagtgtttctgcggcagggctggggacgcagccagggactggggaggggggcgtgggggaggaaccttggacccctctcctggcaggtgtgtatgtccctaatggtccgatgaggccctcaggttgtctgggtgacagcgagagggtggggaagccaggctggagcagacacgacttttgaggtaaagcaggttcccatggagacccgcagagccggcctgccctggaatcgcggctgcttcctcctcccttgagagccttctgtctcccaggtccatgtctcagccatgctccccacggaggtcccccaatcccacccgggcccctcagcgttgcttctgctgcagctgttgctgccccccacatctgccttcttccccaacatctggagcctgctggctgcccctggctccatcacccaccaagacctaactgaggaggcagcgctcaacgtcaccctgcagctcttcctggagcagccacccccaggccgcccccctcttcgtcttgaggacttcctggtgagcatcccagggtcctgtcacacccctgccagagtccccaattccatggggcctctactccttgagggctctggttgccaagagaagagacacccatggccccacccctgcagcaataatacccagtagtcttggtcctgaaattaggagtccccctccttagaaaggtccgggactgtccctcctttgtggggctcaggaccctcatacccagccttgagtgtcagttgctgagataaggtgggcaacagtcaatccaaagggcctccctggagccccgtcgcccgctattctccccagggtcgaacactccttgctgatgacctctttgccgcctactttggacctggttcttctcggcggttccgagcagccttaggtgaggtgtctcgtgccaatgcagcccaggacttcctgccaacttccaggaatgacccygacctgcactttgatgctgagcgactgggtcagggacrcgcgcrcctggtaggggctctgcgggagaccgtggtggcagccagggcccttgaccacaccctggctcgccagcgcctcggggctgcacttcatgccctgcaggtgagaacagggttgggttgatggtcagaggggtcttcacttccgtgcctgtccgggatggagcgcgtcctatggtgccttcttgatcatgtctcctccactctggaaggggtgggcactggcacgcggtgccccgaggctgtgtcccagttccccacctccaagctggcagtgcttcctgtaggaacagcaaggagggcgctgtggctggagagaagtgagggtgagagaggaaggctgcgaggtcagagagctgagggagcagcacacgcagcaggactctgcaggccgagagaggccttgggttagactctgagctgggaagagatgctgggacagtttccacctgggcaaagctctgctctgagcaatggagagagggcagtggaggggacttggggtgtctggtgggagcagtaggggtgggaggggactttcgggatggggaactcaaaggagtggcatattagtgctggagatggtgagaaaggccagactagtgcctcactccccttctcctgtcctccggaccaggatttctacagtcatagcaactgggtggagctgggcgagcagcagccacaccctcacctcctctggccaaggcaggagctccagaacctggcacaaggtatggctgtgaccctggtggtgaggcaggagtccacagggccacctcagtccacccagccactgtgtcacattctgaagtcccagagggtatgatgttacttaatctccacaaggactgaggtcccccagtccaagcaacgcctggctcagttaagcagcttccccaaggtcacacagggaaaagtagctaggaccaggtctccagacctcagtcccgtcttaagtgtggcttcctccccgcactgactcccatggggccttctctcacagccccctcaccctctcacctggaagctgcctcctgtccacaactcacagagggcataatccccataggattggtccctacacgtactgtgtttgtttttttcttattatttatttatgtatttattttttagagatgaggtctcactgtgtggcgcaggctgctctgcccgccttagcctcctaaagtgctgggattacagtcgtgagccaccgcacccagcctgtgctgtgttttccagcacagcccyagtttcaaacattcaggctcactgcgggcccatgatcctaggttttagttcagaaagctttgctagggaacttctgggtgttcgcctcatcccagctgggaggagaagctgaaaaggtttgggtgggtggggataaaggctgggggtggcagaatcttgggttctagccctgccctctcttcccagtggccgatcctacctgctccrattgcgaggagttgagctgccccaggaattggctgggcttcacactcctcacctctggctactttggaactcatcccccgaaacctccaggtaccagacaagaaagttccccagaagtaaggggagaaagtcattcccttryaggatctctgtcctgtaggcccgtatgcctttgctatggcatctcctcctaggaggagaggatgctgggaacagggtgggtggaggaaagtcccctgaggaggctgtggtggggttgaggtaggggagcaacttcttcctccgctgataggatttctcccttgtcataggcagytttgggggactggctggagggatcaggggatccaccatgtgctgtggtgactgaccaccacgccctaagatttactccagaattcccctccacaaagcaccatcctttttatcctttttttttttttttttttttgagatggagttttgttctttttgcccaggctggagtacagtggcacgatctcggctcactgcaacctccgcctcccaggttcaagcgattctcctgcctcagcctcccgagtagctgggattacgggcatgtgccaccacgcccggctaattttgtacttttagtagagacagggtttcatcatgttggccaggcttgtctcaaactcctgacttcaggtgatccacccacctcagcctcccaaaatgctgggattactggtgtgagccaccrtgcccagccatcatttatttatttatttattttttgagaccgagtcttgctctgccacccaggctggagtgcagtggcgtgatctcggttcactgcaacctcygcctcttgggatcaagctattttccttcctcagcctcctaagtagctgggattacaagcacgcgcsaccacacctggctaatttttatagttttagtagaaacagagcttcaccatgttggccaggctggtcttgaactcctgatctcagatgatctgccggcctcggcctcccaaagcgctgggattccaggcgtgagccaccgcgccaaccccgtcatcatttcttgctgaacccttgctgaggggtgagagggtcaggccaggcctgaaagggcctcattttcttaggaggcagtgggtttttgacctccactctccagatccctttccccaacccagggaaatgtagccacgggggccattttgaccggagcagctcccagccaccgaggggaggcatcaacaaggacagcacatccccaggcttctcccctcaccacatgctgcacctccaggctgcaaaactggcccttctrgcctccatccaggccttcagccttctgcgaagccgcctgggagacagggatttctccaggtgagtggcctcctggggatggaccccttcatggggaggcgctcctgcgggaagggagaaaccaggcgctggggacaaacgtgcaggcccttcactgtgtctctggcttgctccccaggctgctggacatcaccccagcctccagcctgagctttgtcctggacaccacgggcagcatgggtgaggagatcaacgctgccaaaatccaggctcgccaccttgtggagcagcggagaggcagccccatggagcctgtccactatgtcctggtgccttttcatgacccaggtaagtgtggtctggctaggacagtagaggggaggaaaattcaaggtaagggatagactgggcgtggtggctcacgcctgtaatcccagcactttgggaggctgaggcaggtggatcacctgaggtcgggagtttgagaccagcctgactaatatggagaaaccccgtctctactaaaaatacaaaattagccgggcgtggtggtgggcacctataatcccagctactcsggaggctgaggcaggagaatcgcttgaacccaggaggcagaggttgyggtgagccccgagatcgtgcctttgcactccagcctgggcaacaagagcaaaaagctctgtcacaaaaaaaaaaaaaaaaaaaaaaaaaaaaaagaaaagaaagaaaaaaaaaagaaaagataaaaaggtaagggataaaggcctgtggtgaggaagtgggctcggggtggcacttcctgtagtcccgagtgagcctctactgtgtgcatacagaaaattagcagcaacctgggtggggtggctcacacctgtaatcccagcactttgggaggcagaggtgggtggatcgtttgagcccaggatttcaagaccaacctgggcaacacagagaaacacaggtctctacaaaaaaattaataaaaattatgtgtgggtgtggtggcacatgcctatagtcccagctacttgggaagctgaggcaggaggatcacttgagcccaggagactgaggytgcagtgagccgtgatggcactactgcactccagagcggcctgggtgacgcagtgagaccctgtctctaaaaaaaaaaaaaaagataactagcagacttgcctcccactctttctaaaatggcagcactttccatgagtttaatgcatgattcatgctttggcacgtggcctctgctttcttaggctttcatgctaataaaccattttctttttttttttttttttttttttttgagacggagtctcgctctgtcgcccaggctggagtgccatggcgcgatctcggctcactacaagctccgtctcccgggttcacgccattctcctgtctcagcctcctgagtagctgggactacaggcgcccgccaccacgcccggctaatttttgtatttttagtagagacggagtttcaccgtgttaaccaggatggtctccatctcctgacctcgtgatccgcccgcctcggcctcccaaagtgctgggattacaggtgtgagccaccgtgcccggccgccattttcaattctctccatttcctatagacagagattggtatcaagatggggttgttggggccaggcttctgggaagcatctgagataactagctacattgtattccttttccattgattagaagttagactctctggcttgagtctgactgtgtgtctttaggctggtcatgtaaactttctttgcctcgatttcatcatctgtaaaatgggtatcagttatcacatcagggtggggcaggatgttggaatgtcatcagttaaggctattttcacttcttttgtggatcttcagttgcttcaggccatctggatgtataagtgccagtcacaggggatatgattggttagcttgggctcagaggmctgacacctccctcatcctgcctaactcccagagttgaaatgatgatcaaataaaatgcctactggactgagagttgcctaaatttgagtcttatttgcctgcatacatcctacagtggctggcatttaatagacttattatgtttgatgaagatataaataaaggtataactaagaacttagcacttatgtgtcaaagcactatcttaagatttgcaaaatcaactcatttagtcctcccaataaacctctgaggtaagtgctattcggtctcttttcttatgaggaaacccagtttttttttttcttttctttcttttttttttttttttgagagagagagagggagagtctcactctgtcacccaggttggagtgcaatggtacaatcatgcctcactgcagcctcgattcaagcaatcctcctgccacagcctcctgagtagctgggactacagatgagcaccaccatatctggctaatttttgtatttttttgtagagatggggtctcactatgttacccaggctgatctcgagctcctgggctcaagtgatcctcccacttcagcctctcaaagtgctgggataataggtgtgaccatttttttttttatatacgcacatgtagccaataaaggcctacaggaaatgccaccatttttttcagggagtggaggccaccttcccaccagggacacctaggtctgccctgccctgccccgccctgccccgccctgcactgacaagtatgactttttttttttttttttgagatrgagtctgtckccagactggagtgcagcggcacgatctcggctcactgcaacctctgcctcccgggttcaagtgattctcctgcctcagcctccccagtagctggggaggctactggggagcctctggggaggctactggggaggctacgggcatgcatcaccatgcccagctaatttttatattttttagtagagacgaggtttcaccatgttggccaggatggttttgatctcttgacctcatgatccacccaccttggcctcccaaaatgctgggattacaggtgtgagccaccgcacccggccaagtatgagtcttataatggagtattgttatttcaatacctgtcggctccagaagcacaccaggcccctcaactggggaggtggctctgggtaagaatgaggggagctctttcctcacttatcttaacctcctttccccttcccagggttcggccctgtctttacaaccagtgaccctgacagcttctggcaacagcttaatgagatccatgccttggggggtggagacgagcctgagatgtgcctgtcagccctgcaggtctggcccctcccttcttccccgtttcctggccccaccaccagggggagctagatccctcctggggctccccaccwccttcagcacctagatccactagcttcactgtagggttcccgggccatattcccttctgcttcatcctccgtggctctacccattcccctcctactgccattgttaacactggtcgttgccttccctgccagctggccctgctgcacacacctccactctcagatatctttgtcttcacggatgcctcccccaaggatgcctttctcaccaaccaggtggaatccctgactcaggagcggcgctgccgggtgagcagagctagtgggagacccagtgttagcctyccagggatgtgagagaccctgtgatgacaatctcataacgagggttgcaccacactatggtggcccaacaagccttggtatatggtgggagaagcagacaatgagtggaacatttcctgatacctttaatgatatacgtaagaggccctacccttaataacgctgaatttttatttgaccctgcctaataaacaatgtgaagaactggggctctagtcgccaaaaatccactgtgacagttacaagggggtggccaactactaactgaaggcagggggttctgtcattgggattccccaccccagcagccagaaggcaggcagagaccttatcacaaaccatcagctctggagaaagcttgagcacagggattctcattcataatagtggatggcacttggacaccccaatcactgagctctcttctgggtacaggtaacattcctggtgactgaagatacatcaagggttcagggtcgagctcggcgtgagatcttgtcccctctgcgttttgagccatacaaagcagtggccctggcctcaggaggagaggtgatcttcaccaaagaccagcacattcragacgtggcagccattgttggggagagcatggctgccctggtaagtgggggccagggccctcacttaggaactgaagggtggtcaggctgcacctctcttcttataggagaaaggggaatcactctcactgctgtgttgttcttccagtcacggggcaggaaaggaagtttctcttcctcttagatccatgactagccacttctttttttttttttgagatggagtcttatggtcacccaggttggagtgcagtggcacaatctyggctcattgcaacctccacctcccgggttcaagggattctcctgcctcagcctcccaagtcgctagagttaccagtgcccaccaccaggcctggctaatttttgtatttttttagtagagccggggtttcaccgtttttttggccaggctggtttcgtactcctgaccgcaagtgatccgcctaccttggcctcccacagtgctgggattacaggcgcgagccaccacgcctggcctgcattgtccttttatatcagtaaacctctccccacttggcttccagtattctgcctccagggttaccacaggaagtcctaccatctttttggggaggtggcttgtattttgcagagacagagtcttgctatattgactaagctgttcttgaacccctggcctcaagtgatcctcctgccttggtctcccaggtgctgggattacagacatgagccaccacgcctggcctatcatcttttaatggggcacaagatgtgattgtctcatcctgaatcccttgcctccaactttgtctctgaccataataacttcatccctggccccgtgcccctctcttactggtatccctttctgcctgtttgacgtggtttctttcttttttctttttctttcttttttttttttttttttttttgagacagagtcttgcactgtcgcccaggctggagtgcaatggtacaatcttggctcactgcagcctctgcctgttgggttcaagcgattctcctgctccagcctcccaagtagctgggattacaggagcccaccaccacacctggctaattttttgtatttttttttttttagtagagatgtagtttcactgtgttggccaggctggtctcgaactcttgaccttgtgatccacccgcctcagcctcccaaagtgctgggattacaggcgtgaccaactgcgcccrgcccaatgacgtggtttctttctatctcccctttcttctttgttcctcatcccatacctcatcttcttccccattttctggtcctgccaatccctcaaggtgactcttcccctggaccctcctgttgtggtgcctgggcagccacttgtgttcagcgtggatgggctgctccagaagatcacagtccggatccacggagacatcagcagcttctggatcaagaaccctgcaggtacctctgaaggtagagggaagagaggggaccggggaatagacaatcgaggggatgtactcaaggagagcaagtgcttcatgtgacaatctcttccctgaccccaggggtctcccagggccaggaggaaggcgggggtcctctaggtcacactcgccgctttgggcagttctggatggtgaccatggatgaccctccacagacaggaacctgggagatccaggtcacagctgaggacacccctggggtgagagtgcaaggtaaggagggaggtgttcctgggaaggggaagcagagactgcaggcctcagagaacacgatcagtcacattcctttcaggaagggctctgactgcctttgccctttcccagcccagacctccctggacttcctcttccactttgggatccccatggaggatggaccccaccctggcctctaccccctgactcagccagttgcaggtacatttattccctgagcccccacccacctaacccccagttttwtatatatatataaaatatataatatataatatatatattatatatataatgtatatatgtatacatacatctgtgcatatgcataacttttatattgagttataatttacataatgtgcactaaagtgtacagtttgatggatttcatataatacacccagttcaggatatagaacatttccagcaccccagaactccctcctgatgctccccatcaatacccctcgaaggtaacctattttcccatccatactccccagagggaacccctattttgaaggccattaattcttttctccctgtgtctccgaatctcacaatgttctcccctcctcgcccctgtcccaggtcttcagacccagctgctggtagaagtgacagggttgggttccagagccaatcctggggatcctcagccgcatttctcccacgtcatccttcgaggggtcccagagggtgccgaactaggccaggtgcccttggagcccgtgggacctccggagcgaggtctcctcgcagcctcgctgtcgcccacgctgctgtcmacccctagacccttctccctggagctgattgkccaggacgcagcggggcggygcctgcacagggctgcccctcagcctagcactgtagtccctgtccttctggaggtgagacgccaggggaaagtgcggctggggctggagagagttagagcggccccttccctgaagaacccttctctgcagcttagtggcccctcgggtttcttggccccgggcagcaaagtcccrctcagtctccgcatcgccagcttctcgggccctcaggatcttgaccttaggactttcgtcaaccccagcttctccctcacctccaacctctccaggtgaggctcatgaaccctccagctccctctggcatcttgcccggccaatgcttatcccaagccctgcccctgtccccctccgactggccctcagaatcctcctctccgctcccgtgcccctgcaggcgtcccgactctaggctctgggcagcctggagctttakcgacgcctatatcctctctccagggctcacctggaactgaatgagtcggcctggggccgcctgtggctggaggtcccagattcagcggccccggattcygtggtgatggtgactgtgactgcagggggacgagaagccaacccagtacccccgactcatgctttcctccggctcctggtatcggccccagccccgcaggtgaggaacyactactttccatcacagggtgggcaaggccggggagggtggtgtaggtttaatttgagtacagctctagcacaccctgtcattctcttccttttccccacaggaccggcacaccacccctaccggctcatctgacccgatcctcaccacggccacccctgccttttcccccttcacattggtgactcaaggcagggctggggcagggctggctgcgggcagcccctggtggggcacagttggaggggtgctgcttctgctaggcctggcctcctggtgacacaacgggctctaaagggatgggtctccagcactattttcaacctgccccattggtaagaagacctgggacacatttgtcacataggtcttaggaccttacctctcctagctgggatgaaggttttctcttttttgttgttgttgttttttttttgagatgtagttttgctcattgcccaggctggagtgcagcggcgcaatctcggctcgctgcaacctctgcctcctaggttcaagcgattctcctgcctcagcctcccaagtagctgggatcacaggtgcccgccaccacgcccggctaattttttgtatttttagtagagacagggtttcactatgttggccaggctggtctcaaactcctgacctcaggtgatctgcctgcctcggcctcccaaagtgctgggattacaggcgtgagccaccgtgcccagccaatgaaggttttctttctccatcacatccctttcctttcttagaaacttcgagactggggctgggtgcagtggctcacgcctgtaatcccagcactctgggaggctgaggcaggaggatcacttgagcccaggaggttgaggctgcagtgagttgtggtcgaaccactgcactacagcctgagcgacagtgagaccctatctcagaaacaaaacaaaacaaaacaccctgcaagactgggatagagggcaatggatattcccacaatgcacttttcctaaccctatgagaaacaaaccaaagacatttttggagaaagctgctttctggagcagtttcagttttatttttgtatttaaggctgaaggacagtttcaataaacatgcttcttcccagagggatttcaaagaaagatcgtttttgcatgtcatataggggagaatgaggacatgagacaccaagaagatgaagttttcaggagcagaggagaaactttacaccaacatgtctgaacttcattgactcactacctggagccattttttagctgttgagttaagaaacagaaaaaggagcctggggcttctgactctttcaccaggcttaggggagtgagaggagggtttagacacgggtagggcctcttggccccttggtgcagccccgctgagccatctcctcctttggctgggtgactcctttctgctgccttgacaactcctggaggagaaacagatggggcctctgggctcctcccagccctgtagggtggggctcctgccctccttcttgaagtttacctgttgctgccacaagttctgctcccttcgtctttcctttgaatcctgggtggtgcaggaactagccttgttcagtggacttggggagaactggaggggaaattcgctgtgttttctgttaagccagcactgaccccaacaactcccctctctagtccaacttcccaaaagtctaaactgaaaacaataaactcaccttctcatgaatcagattctgcaaacagatgttcaccttttgaatctgggctaacggggggcgaccaggctctgagtgtaaatctgttagaaaattctagaggaggagttggaggctgacaacatggtgaaaacctgaggtcgtctgccactctattcctgtcaccacaggccatccctctcatctggatcccctcgtcccagtaccctcccaggcaggtgggaaaatccagtactctccacctccatctctttagcacatcagttcctccatctccctcaaatagcacaataccccctttcactactcttcatggagcctccctgtccatccctgccccattggaataatccaggccacaccctcatctccatggagtgatccaaatccctctgaatggaatgcagaccagcttcctccagccccaacaatgaacaccaacttaacacttggtggcatcctgtcattacgatgctgcctccaactcatgatccctgaccattaactctcccctctccagagtggtctcaggctgtgtctacacattccctgttcctccctccctggtcctccccccattcacacagaggggcagcccccatacctcaccaagggcccctagatgcagctgctgtcgctgtgcctccctcagatggtcttcaaaccaggcctggccatgctgtagcagctccagaccctgccacagggcatcctgttctctctccagagcctgcatcctgcgtagctgggaaaggcaatcacagaggctgactctcacgccacagtagggctctgggttatggccctttctctccacccctagttgggttcactgtgtggtcactgagtgtgaacccagactggccactgaggacctggagggcaaggggaggcaggcgggaacactgtgggccctcaagttgaatggaaatataaagggcagatctattgagagagttcccctgggacctcttgttgggctgatactcacccaaaggaagaagctctgggcccctgggtcttggcggcttgtccccagcggcagcagcaggactgtgtagggagcctgcaccaagggcaccccgccagagccctggctccccatggctctgaggtgggaagggtggagccactcccactggtgcagcccgggctggtccctcccctccacccctgccttgcacccatcctgcctctgtcagcctctcaggccccttcctgctgtgtctgtctgaggctggggtgttcctacttgagaagagagaccatctcccttggacccctctgtcttccctctaatctgttttgtagggcctctctgaaggggttcgttctcatgaagtatcctggggtagaatccgggagtcttcctacagcaacaacactgtatttttactgaggcagggcaggttcccctgtggactcctgctctgtgttttggatctttcctagtctcttgttttgagactaaagaaacaatatctttcttcaaaataaactttattcctaatatgaaacaaaatttctagagaaactaaaaactctgcgtctgagggagataaggaaacaaagagggcatggcagcccaccggagtctcaggaggctggggaggacactggaaggactctcagaggatgctggtggcagcaggcagcacttcctggctcatgaaaacgttcaagtccaggttaggatcttccaaatccagtttcataaacttatccactaatgtctggcaactgaagaagagagaaaatcgcaagatttatggcagaatggacaaccaaatccctgggcagaggggagaggctgtggcacagaaaacctgggatcttgaagatttagggatttcagaaagaaatggtgggtttctgaagggcaaagtgctggaggaaggctgagtccctgaaaaggggagaagagttgcaggagaagatgcagagagggtaaagacactggggccatatacgcacttttccatttggttcttctttagcaaatccttgacaggcttgatgggttttccactgcggatcaagtctgagacctaggaacaagcaagaaggtgggaggagtaaggggagtggggaagagaaggggaaataagggtcagaaatcctgtggacctagacccaggcccagtaggactaggaatgaaagggagctctgatgtggaggtggttgcacatttggatctcatcacctccttgccacgagccacaagcttgtcaggaagcccagcctgggcagctgtgtgggaggcatggctggccttcgcaacaccttcgcaaacctgatagaagaagacaagatcgttgccatcctcacaggtctccatggtcttaaaagagaataaaagacagtgtatcatcaatcacctccttcctgtcctgaaacccttggccaatcctgtggggagggagaaaagggaagggatgtggtctctgtgctgagggagcccttgttctgatagaggagccaatccccacctctgggaaatgcccagcctgggggtccccgaggagctagattggtctcctcaccaaatactgcaccaggggcccttgtggcagcagttgtagctgaacaaggctcagaaagttggtggccacaaagatgtgggggcatgtgggtccacgtgccagccagtgtcggagcacagcggccagaagcgcgagcccatccacctgcaaagagggcagaggttagcattcggagccatggggaccccatatgcccctctgcacttgcactgcctttccctgtctcgtgttctatttcttttctgcccacacagccctattccattccagaggcccagcctcactgtcatgctccttcatcctcctccattttcccctccttagtttctcccctcatcagtttctcccctcaccgtgttggttccctttccaaattcatcaataaggaccagcgactgtgcagtggcattgttcactgctttcgccacctgctgggtataaggtggacaagggaaagttagtattggaagcccgtaacgcactgaccacagttggcctgtgaataaagctgtatacatgccctccctactgcactgcaagttcttgaatggtgaggtgcacgctttgttcatcctctttgccaacagtgactcacatgaaacaagggttcaagaaatgtttatggtattgattcttcttatctctgaccttagtgctccccacttttagtataaagggcatgcagcagagggcatgctttcctgttatgagcattttcaggggttcctttcccattatccccttcctcaatcccacctccctttgttccctttgacctggttgaggtcgatcatgaaggtggagaggccaagggagatggattcgcagctatgaattcgtgtgaagatggcgtctactgccccaatttcggcctcctctgctggcacaaagctgcctaccagggccatgaatgtgatcaagcctacctgaatagggaaggagacagggcctggggcctggtgccgtgggctgaggtgaaagtgaggctcaaggcatgaatggcacatcaaagagaaatggacagggtgaaacaggagaaataggtaacagacacactgactctgtctctcctccccgaatcctgaccatagccctgtgggctaatttagaatcagtgaagaggcacgggacgtgggcagagacatacttgggagtggtgtgtacctactcagaggcaggtgaaggaatttgggccacggaaagttccattagagcatggctctccagtggagaataagaacatgtgaggtggaagcacagggatgtgggtgatggtcctttcatgaagagcggggtcagaaaatgggagaagagctgcaggagcctgagttggctggcaagtaggggtggagtagatgcaggagacgccagaggcccaggctgcagggcttctcctcacctgtttgaggtatatgctcttccctgatgagttgggtccagtgatgactttgaccctccctttgtccccaccacattctgtggagttgggcacaaaggttcgggcacagagttccatcagaggatgtctgcagtgggcggagaggcacctcgcatggcttgtggatcaagatagatgaacccccagaagatgtagcctttgggcccctcatgtctattcctccacccgcctctattcttacctgccattctggattcgtaccccaaggacttgtggggagtaacgcggccttgagtagccatagtcccgggcagcactggcaagagccagcaggacgtccaggcgggaggcaaggtccaatactcgggttaagacagctgctcgtgccagcacctggcactgtagctggtacatcagcagcgtctcctggtctgggagtgggtgaggaagggagctggaggtcagttccaggggaaa

SEQ ID NO: 98267 - DNA, 27797 bp, Homo sapiens
cccatcatctgggctgcagagcacaagcacatcgaggtgatccgcatgctactgacgcggggcgccgacgtcaccctcactgacaacgtgagtgagcgtttggttgaggtagggcagccccaggcccctgagcaaggtggaggctggattcaagggcccagctgcctgcacctcatctgttcccctcctacctccacaggaggagaacatctgcctgcactgggcctccttcacgggcagcgccgccatcgccgaagtccttctgaatgcgcgctgtgacctccatgctgtcaactaccatggggacacccccctgcacatcgcagctcgggagagctaccatgactgcgtgctgtgagcccctgccccgcccttgatgcccctgcccccacttcttgcagcctcagaccctgcattgggcatcctgtcccctcttcaggttattcctgtcacgtggggccaaccctgagctgcggaacaaagagggggacacagcatgggacctgactcccgagcgctccgacgtgtggtttgcgcttcaactcaaccgcaagctccgacttggggtgggaaatcgggccatccgcacagagaagatcatctgccggtgagccctgggcccctctctgcacccaagaccacctcctccccacccataccctccccaggctccattgcatcctcacaacattccccaacccctccccatgcaccactgaatccccagaaccacccacaggccccctccccactagggttgccagatacagcaaataaaaatagaagacacccagttaaactggaatttcagatgcacagatgcatacttttttagtgtgagaatgtcctgtgtaatttttgggacatactaaaaagctatttcttgtttatctaaaattctatgttaactcgctgtcctgcatcttacctggcaaccttactcccctgcccccagccccaggaacctccccaactctcttccttatacctggagtagctcctcacccccttttccagcttcccagccccttcttcccgtcttctgcagggacgtggctcggggctatgagaacgtgcccattccctgtgtcaacggtgtggatggggagccctgccctgaggattacaagtacatctcagagaactgcgagacgtccaccatgaacatcgatcgcaacatcacccacctgcaggtgagtagggggcccggggcctccccaaaaggacaccgagagctgccaagtacagttggacaagcttcaaaccagcaaaggcacctggccaaggaagggttggctgaaagggagccctggtgtggggtcgcatccccaccaggggagggatccttttcctaggtcacagcaaggtatcatatgagctcccagtagccctggggacaccaccatactgattacccgtcaccctaggaccatcaccacccactgttgtaacacatggaccccaaagaaaggacagtggttagggggtcagggggcatcaagagtagaggggcccagaccgatcatggggttgagctgacctctgcctcctcgccccagcactgcacgtgtgtggacgactgctctagctccaactgcctgtgcggccagctcagcatccggtgctggtatgacaaggtgcgtgccccttgccttggccacagacacccggcccctccttcagaggagccagcctccaataaaccagctccctgggaccatgtccctcacctcctaccctgtgggggaagtgactgagaggactgggcaaggcctgggaatcctgggatgtggctgggacagcgatgggcgtgtgcccaggtctatgcaaaccagggatgatgctcctgcatttcgtgctctcggatctcagagcctgtgtgacctccccaaccccaacttccctgtctctgtagagtcttggggttcctgggtgggcagctgaggtgggccccacagagaaaccactatcctcccctccgcaccctaggatgggcgattgctccaggaatttaacaagattgagcctccgctgattttcgagtgtaaccaggcgtgctcatgctggagaaactgcaagaaccgggtcgtacagagtggcatcaagtgaggccctgctccacagcccaccctctccccacctcaccctttcctccctgcccctggggcttttccagggcctccacccaacagcgccatctctcctacccccagggtgcggctacagctctaccgaacagccaagatgggctggggggtccgcgccctgcagaccatcccacaggggaccttcatctgcgagtaagtcaccgggagcaccttaacacctggtgggaaggggatacatggccactgctgactgccaggcctccctctcagccatctgccctgatgagtcacatgtctccatctggccactctccagccagcctcctctgacccctattcctgcagctgagcagccagccgcctctgacccccatccccccagctgagaatggcacctgcctccactctgcccagaccacagagcttgtcttccctcccctccacctccaccctctaccttcccctccaccccctcctcgcccttcctagctggagaaagtgccagtttgggagacaaacagacttgggtttgagcccctctctgcttctggatgttcttggccaagttacttaacctctttgagccttatttttcttgtctgtagagtggaggtgataacagctacctatctgtccacctcctcaggggcctgtccctctccatcagttctttctctgcccagcatctgtaatctccccctttctcttggctgccatcccacaaccctcaatcttactttagtctcctttggctcttttttttttttttttttaatttattttttgagacggagtttcactcttgttgcccaagctggagtgcaatggcacaatcttggctcactgcagtctccacctcccaggttcaagcgattctcctgcctcagcctcccaagtagctgggattacaggtgcgcaccaccacacccggctaattttttgtatttttagtagaaacggagtttcaccatgttagccaggctggtctccaactcctgacctcagatgatccgcccacctcggcctcccaaagtgctgggattacaggcgtgagccaccgtgcctgaccattctttggcctttaaaaaagatagtcctctaaccatacttgcctgttcaacagaccatccagtttctttccatcatgtcatctctcaacttctctggcaagcagccccttcctgctgggcctcagtttccccaccatccactcactgcctgtccctgccaaaatcggcctttgcccttcccactctgctgaagctgtctcttgacagtcacttcccacccacgtcctctccgtgtgtctgaatctcccatgtctgctcaccctccttagatagctggctcctctcctccctctggtgtccagatatgtgtgggtgctcttgccccgaatcatgccttgagttccttgccactcctgtacctctggctcttcctgcagtcctggcccctctcctgttccatatcgcccattcctgccgggtggctcctggaacacaaacctctctgtgtccaaacccgaacttccccacccaggccaactgcccctacacattaatccccttaaccacagagcttgttgtctgtctctgtgctgactgaaggcttcctctgtcaaggctggaatgctgccctttcacttgcccaccactgctgctccaggccttcccttccccacacctgccagccctgcccattccagattccacaggcttgtgaagagagatggggcctggagccacctcctaatagcccacactcaccttcagaaccatggattcctgtcccacaggtatgtcggggagctgatctctgatgctgaggctgatgtgagagaggatgattcttacctcttcgacttagacaacaaggtgagcaggagaccctccttaccctgctgctccccagggctggctttcaggagcctctgggaagtcagcaaatggaaacctggggaggagggactggggagtcagtgggtggggagggcaagcagggtcgggggagatgtgaagagtgccatccccctgccccaggatggagaggtgtactgcatagatgcccgttactatggcaacatcagccgcttcatcaaccacctgtgtgaccccaacatcattcccgtccgggtcttcatgctgcaccaagacctgcgatttccacgcatcgccttcttcagttcccgagacatccggactggggaggagctagggtgagactctaggggtctctaggggctctgccagggggtgggagatgcagcaaacctgggacctgaaggctggcatgtacctggtgtccaggcatggagtagtgcagagcttctcagatttcagtgtacataagtatttcctggaggacttggggaaacagtcctgtgcctcccagagagattttgaatcagtaggcttgggatggggcccaggattctgcatttctaacaagtccccaggcaatgctgatgctgaaagtccatagaacatacaaggggctcagatcccatctggagaagataggttgggtgtcgggtccctctcagggagcaggatccacagggtcttcggggtgggctcttggtggctgggtccaggtcccacaagctcctgttttcctctgacaggtttgactatggcgaccgcttctgggacatcaaaagcaaatatttcacctgccaatgtggctctgagaagtgcaagcactcagccgaagccattgccctggagcagagccgtctggcccgcctggacccacaccctgagctgctgcccgagctcggctccctgccccctgtcaacacatgagaacggaccacaccctctctccccagcatggatggccacagctcagccgcctcctctgccaccagctgctcgcagcccatgcctgggggtgctgccatcttctctccccaccaccctttcacacattcctgaccagagatcccagccaggccctggaggtctgacagcccctccctcccagagctggttcctccctgggagggcaacttcagggctggccaccccccgtgttccccatcctcagttgaagtttgatgaattgaagtcgggcctctatgccaactggttccttttgttctcaataaatgttgggtttggtaataaactgcgatttttgtgttggggtggggagaaagcatacttggctagagggaatgtgggtccaagggccagaataggatgggaagcaggctggacaggtgtggctggtgtgatggccgcccagtgcggggcagggaggtggggggccactatgaagatccagtttcacaggcacggtggctgacacctataatcccagcactttgggaggccaaggcaggcgaatcacctgagatcaggagttcaagaccagcctggccaacttggtgaaaccccatctttcaaaatagaaaaaatttgctgggcgtggtggcaggcacctgtaatcctggctactccagaggctgaggcaggagaaccgcttgaagccaggaggcggaggttgcagtgagccaagattgagtcactgcacaccagcctgggcaacaagagcgaaactccatctcaaaaaggaaaaaacaggtccaatttccacactttaatctttggcgggagcgtgttgggagtgtacggcagttaaggtagtttgcgagattataaagcgttttcttatcagagcatgccaggtcgttcactgtggtccgtagtgcccccaggaaatagccctgagcccccgtcccaggctccagctccccagcccgctgggcacaaagttgagaagaaggaactagagtgtgtcggggaccacaggcgggggtggggctgtgacgtgtgggagggcggggcgggcagcaggtgagacgccaggtctccagggctccaatcactccggagactgagccatggggggaaagcagckggacgaggatgacgaggcctacggtgagactggggcgaggcccgggaccctgtggagggaggggaggacgggtactttgggaatggtgtctggggctggctccagggagaggaactaaggagagtactgtgtccctgaggggagggcccgggaaccgggagccatggagggagggagtcagggtcctgggaggaggatggggcccgggggctggggctgttgctggggagcccatggggagtgaagctgggtgcctctgaagagttggggctgaggtccttgggaggaggggggtatttcaggcctggactctgggtccctaagggcagggccctaggaaacaaagccgagatggaaggtggcaggttggggccctgagcagaatagggctggatgctgggagtgtcctgtgctgcagagcctgcaaccagtgaggccagggtccctgtaaggaggaggaggttcagcctggagtctgggtctctgagggcgaaagctgcttgtggcctgccggctcccttgaggagtgaggggaccctgagtgggctggcctctgcctgccagggtctctgggagaagtggcagagggagtgggttctgctgggggtccctgtgaggagttggggctgagggtctttgtggaaagggggctggggtcctgcctaggggtctctgtgaggagctaggagcaggagctggtcttggggtactctgaggaatagggacagggcccctggggttcctgtgaagggtgaggcctgaggggagaaacagcagggagcctgtttccagaatctgcaaggaaaaggggctggggttctgaggagagagggagctggggactggcctccagatccccacgagcagtgaaggctggggactcacctgcggaggcccccctggtcttctggtctgaaggggaaggaacccctatgagggaccttctcgaggagaggcttgagtcccttagggccataggggagcaggcagtgaggactcccgagtagacttcctggagcggcttcaggtcaatcattgtccatgagccatggagggacagagtccagcgcacctggggaaagtggaccccacccgctccttcccagactcctgcccagccctcggctctccctcctcagtgcccacaaggaaccctgactgcccagccctcctcctccctgtgtgtgtactcagggaggaccaggaactcaacgtgcctgcaatctctatggctgggctcaggtgtcactctgactgctggcccagagcccggagcacactgtggccaggggactgaggtcccaccagagtgaggatgtacagggccgcttccctccccaggccctgctggggttgacacctttgtctccagtttctttccccatagccttgaaccagagggtaaggtagggcctggggcagataggggaagaggccatgacctccctgaggggctgtgggtctgtgtggtccctggggagggattagggaggaggcagggatgagaatgagggagtgagagccactgggagtcccacatcccagctaaagggagactcaggagaaccgtgccagggtagggcaggggaccaaggccatttcccagactgactgccttgagatgtgagccggaaactataaaggccttccttcccctccccatggcagcctgggtggagctcccagggagctgctgagctgctgaccaggcctggatcctacctttcctgctccccagttttcccctcctgccagtcctgccctagcccatctccctccaaacacctgaggcctgggtaggatcctggggctaggaggactcagcaggacaagatatgcagagagagactcatcctccacacctcttctcatgtccctcagggaagccagtcaaatacgacccctcctttcgaggccccatcaagaacaggtgagctctgggcactgctccgggggctggcgggggtggtgggtgcagtgtggaatccagtatttgctttgtatttgctaaaatattagtaggaaacttgtgaaaaagagaaactcctgccccagatgggtggtgccctggggggattgttgtgtctggagcaggcatcgagggcttcccagttctggggggatgttctgtttcttgacttaagtgccggcttcacaagcgagagaactcacccagctgagcccttgcgagttgtgtgcttttctgtcttttacttcagaagaaagtttacccacccagaaaaaggttttctttctttttgtgttttggagatgggggttcactgcaggctcgaactcctgtgctcaagtgatcctcctgccctagccttccgagtagctgggactacaggcatgcaccatcacaccaggctaatttctttgagatgggatctcactatgttgcccaggctggtctcaaactcctggcctcaagggattgccctgcctcagcctcccaagtagctagtattacagtcgtgagccactgtgcctggctaggttttctaaataaaatatttaaaaaaaattagccgggcagtagtggcacgcgcctgtaatcccagctactcgggaggctaaggcaggagaattgcttgaacccaggaggcagaggctgcagtgagccaagattgcaccactgcactccagtctgtgtgacagagtgagaccctgtctcaaaataaaaaagtaaaagcaataaaaaaataaaaataaagcctactgatgcccatgctgcagcatcacccaactctctaacccttaacccctccagaccataagccctacctccccaagtctccttagctcagcctcccrtttcgtttctctctcagaagctgcacagatgtcatctgctgcgtcctcttcctgctcttcattctaggttacatcgtggtggggattgtgggtgagtttccagctgctcagagccagggcagtgggtgagggacaggaamccagggagggaccattcccataactgccccactaagtccctgccctccaatgactcatctgtgcctctgtctrcagcctggttgtatggagacccccggcaagtcctctaccccaggaactctactggggcctactgtggcatgggggagaacaagtgagtacaaaggcgagaagaggagtgcaggagcgaggcgaggtagggtgggcaggagacacccccccaactcaggctccagacctgtccgtgctcttccacagcmtttccctgctgtccccaccccacctcagcctccctgaatctgacaactccaggccacgttaagaaccattgctggacagttagcttcttgagtccccccagaaatgggaggcagtggagagtcgtgttaagtgtatgagttttacagttcagagattggtgtttggatccccaactggaccaagttttggttgtgtggccttggacaagttactcaagctctctgagctttgatttccttatttgaaattcaaggggaattccagaagcaatgccaacagtcctcacatacagatgtccaataaataataaaacctcaaatatttatatagcatttactatgttccaggcaggcagtaaactttacacacacaagcgcattgaaatctcatgaggtaggcactactgttttatatggagtagaactaagaccgagaacaggtgacttgctcaagatcataaagatgatatgaagttgtggagctccaagttcatgctctgagctatttgtcagctgctgcaatggtgacttactctgagagatcttctaggcatctccctacctccccagctgagctagggccaggagctgggaggtgactggtatgggccacgctgggctgggcccactgtattcttgagaagccaccctagtggtccctcccctcccccaacacctgaccaggccctgatgcacatggtccctcccctcccacagagataagccgtatctcctgtacttcaacatcttcagctgcatcctgtccagcaacatcatctcagttgctgagaacggcctacagtgccccacaccccaggtcagagcctgggacctgcctctaccccagatctcacccagggtctcaggttccagccccttagtgttctctctgcacccaggtgtgtgtgtcctcctgcccggaggwcccatggactgtgggaaaaaacgagttctcacagactgttggggaagtcttctatacaaaaaacaggaacttttgtctgccaggggtaccctggaatatggtgaatattgcccctaacctcatcactgtcgcccagaagggccagggtgggcacgagagggagggggagttgggtagatcatcaccaggttggctctcctggggagtgtgggacaggctgagccccatggtggtggtgaggggacctgcttcttcatcctgctctgtgtctgtgtgtctgtcctttcactcctgccacagacggtgatcacaagcctgcaacaggaactctgccccagtttcctcctcccctctgctccaggtgagaagcacagattccttcctcagacgtcatctagtccagtgttttcattgcttgaatgaagaaatcaggcccagagagagtgaagtcacatagcttgttggtggcaaaattggaattagcatcaggtcttcattttgctctttgttatgtggccttgcagtcagaccatcagtgttttggggacctactatgtgccaggtgctggggacagaggcagggataacaactgctccctgcttcagctacattctaggtgaagagattagagttgttcacaaagagactgtatgaaaatctcatgaaaacatacatgggtgaatctacacacacattttttttttttwgacggagtcttcctctgttgcccaggctggagtgcagtggcgtgatctcggctcactgcaacccccgcctcccgggttcaagcgcttctctgcttcagcctcccgagtagctggaattacagcacatggtgcccgccaccacgcccggctaatttttatttttattttatttattaaatttatttattaaatttgtatttttagtagagacggggtttcactatcttggccaagctggtcttgaactcytaacttcgtgatccacccaccttggcctcccaaagtgctgggattacagacatgagccaccacgcccagcctgcacacatatcatttttatatatgcacagggaaaaggctagaaggatatttgttcaaatgttataagtgaacgtggctgggtggtaggatcacagttgaactttttttcttttacagtgtgctcttccttccagtagcaaatgtctttttttttttttaagagatgaagtcttgctatgttgcccaggctggtcttgaactcctcgattcaagcaatcttcccacctcagcctctcaaagtgctgggattacagacatgagccccgacacccagttgcaaatgtcatttttaatataaaacaatttttaggccaggcatggtggctcatgcttgtaatcctagcactttgggaggctgaggcaggcagatcacctgagatcaggagttcgagaccagcctggccaacatggcgaaaccctatctctactaaaaatacaaaacttagctgggcgtggtggcatgcacctcttatcccagctactcaggaggctgaggcaggagaattgcttgaacccgggtggcagaggttgcagtgagctttgcagtgagccaagatcgcgccactgtactctagccttgctgacagagcgagactccgtctcaaacaaaaattttaggccgggagcagtggctcacacctgtaatcccagcactttgggaggccgaggcgggcggatcacaaggtcaggagttcgagactagtctggccaacatggtgaaaccccgtctctactaaaaatacaaaaattagccaggtgtggtggtgggcacctraaatcccagctactcgggaggctgaagcaggagaattgcttgagcccagaggcggagtttacggtgagccgagatggtgccactgcactccagcctgggcaacagtgagactccatctcaaaaaaaaaaaattagacaatttatagcataagatgagatatccagttaycaatttaagtacagtaaggagtatctcaagtgaatacttcaaagtcaagtagatctgaatataaattctagcactttccagccctatggtcttgacccaactatgcaacctctctgaaccttgtttcctcatctttagaatgtaaatracagtgaggtgcagtggctcacgcctgtagtcccaactgctcaggaggctaaggcgggagggtcacttgagtcctggagttggaggttacagtgagctatgattgtgccactgcactccagcctgggcaatagagtgagaaaccctgcctctaaaaaataaataagctaggtgaggtgactcacacctgtaatcccaacactttggggggctgaggtgggaggattgcttgagcccaggagtttgaggccagcctgggcaacacagcaaaaccccatctgtacaaaaaatttaaaaattagccaagtgtggtggtgcacatctatagtcccagttgcttgggaggctaagtggggaggatcgcttgagcccagaagttcaatgttgcagtaagctatgatcatgcagctgcactctagcctgggtgacagagcaagaccttgactcaaaaataagwaaataaataaataaatagataaataaatgacaaagcaaggctgcctggcaaagttgttgcaaggatggcagtaagtggctctgtaggcacataacagttgccaaaggaggtggggataaggtcagaaggcttcctggaggaggtgagatggagctggatttgaacagggagtcatggatgggatttctggtggaaagagagccctgagagagaggcacagtaagagcaaaggtacagaktagaagggaacatgggctggatttgsacaggagagcctggaagcctggccagggagtgtggatgctgtctctggggcagagcctctggagatgtctgagtcacaaagggacccagaaccctggagtgatgaagtccaggcagtgccacggtctccctggcactccactcgggtggagggtggatggaagggtgacagggtgttctaagagttgaggccagcggagaggagggtccaaaccaaggcacgacagggaggggaggcaggggatagactgggctccacaggrcagaagcccatttgtgaaatcaaaagcagcccactgagggatgcaaggcccatcacccttccctcccctaagggcactgtggactgggagggggccagagaccctccaggcagagctcctggcccccaacccagcagcccggctctcccttccagctctgggrcgctgctttccatggaccaacrttactccaccggcrctcccagggatcaccaatgacaccaccatacagcaggggatcaggtaggcacctccctcccccacatcctggccacaccccttccacccacagccccatctgactctgtctccccaacagcggtcttattgacagcctcaatgcccgagacatcagtgttaagatctttgaagattttgcccagtcctggtattggattcttgtgtgagtcaccagattcccctcctcttgtgtccttgccttcttcctccctgatcctctaccccctcgcccaatgtctgaaacacaggctttggacagaggaggaggagccagagctccgaatggattccaagaccaacaggatttataaggraaagaggcctaatctggggacattgggtggtgtgtggaaaggcagggagggcctctgtaaggggaaagatttgaggggctagggctgaacctcactgtcctcaccctgcctacagtgccctgggggtggctctggtcttgagcctactgtttatcttgcttctgcgcctggtggctgggmccctggtgctggtgctgatcctgggagtgctgggcgtgctggcatayggcatctactactgctgggaggagtaccgagtgctgcgggacaagggcgcctccatctcccagctgggtttcaccaccaacctcastgcctaccagagcgtgcaggagacctggctggccgcccgtgagtgtcctgcccacccccaagccaccagctgcccaaggacygccctgggccatgcccggccccagccctggccctgacctaggtctgtctgccccrtcctctgcagtgatcgtgttggcggtgcttgaagccatcctgctgctgrtgctcatcttcctgcggcagcggattcgtattgccatcgccctcctgaaggaggccagcaagttagggcctgcctgggagggagatggggttgaggacagcgtggacccaggagtgctaggggacctagggggtgctagagaggtggcagggagcctcagaggagaagggaggaatatagcacagtggtgaacactgctgtggctttgcttccccatctgtaaaatgggggtaacaataattcctgccttctagggttgtcttgaggattcaatgagtgcctggaatatgacataggccttctagaggggttggtgggagtggtggtggctgagtggaacggcaggaatccgggccaggaggggcagcagcttgctcccgatcaggaactgccacacacacctgccaagggatcacgcttgggggtgatcttcccttactccacccgaagctgccccaggtggcttctctgtgacccyagtttcctctaagggtcctgtgagcctgatttattcagttctgtttatccagtgagcacctacagtatgcctagccctgcaccaggccctgaggacacagatatgaaagacaatgtcactaaccctgttggtcccaccctgggggagtggggcaggccccagtgagggcagmggggtcagcccccccctttttttttttgagacggagtctcgctctgtcgmccaggctggagtgcagtggtgcgatgtcagctcactgcaaactccgcctccygggttcacgccattctcctgcctcagcctccggagtagctggcactacaggcgcccgccaccatgcccggctaattttttgtatttttagtagagatggggtttcaccgtgttagccagcatggtctcgatctcctgacctcgtgatccgcccgcctcagcctcccaaagtgctgggattacasgcgtgagccacygcgcccggccggggtcagccccttgagaagatggacagctggggcggtgccggttaacagctttgtctccctgcagggctgtgggacagatgatgtctaccatgttctacccactggtcacctttgtcctcctcctcatctgcattgcctactgggccatgactgctctgtatcctctgcccacgcagccagccactcttggagtcctgggggktgatggaaaacaaagcaatacttgccytgtagagtgccttggtgtcactggaagaggtgcccctttctctgggcagacacaccagcactgtgcctgaacagagttgaaagggtgcacacaggctgaatttcagccctctctgtgcagcaaacgatctgcacaagcacctaggaacaggtccctaaggagcgagtgacctgtggagacctcrtgtgatcatgctttccttgactcccctctgggtacctggctacatcggggcaaccccagtatgtgctctgggcatccaacatcagctcccccggctgtgagaaagtgccaataaatacatcatgcaaccccacggtaagaggaagcaggggacatggaggcgggactagtaggggtgaggggctgtaggggccacattcctcattgtgcagagaagactgaggccacagagggcragamacttgtgcaaggtcacacactcaacccccagcagagctagaagaaaccagttcccagaatacctggtactcctgttgagccatccatcatgtggggagggaaactgaggctgggagagacagccctggataccaggacttactccacccctccccaggacattgctctgacttgaggaccatcaaccacttcaccctctgagtctcagcctactcctgtttgtttgtttgtttgtttgtttgtttgttttgagacagggtcttgctctgttgcccaggctggagtgcagcagtgcaatctcagctcactgcaacctccatcccccaggctcaagcaatcttcccacctcagcctcctgagcagctggaactactagcgtaygacaccacgccaggctaattttaagctttttgtagaggcaaggtcttgctgtgttacccgggctggtcttgaactcctggggttgccccgatgtagtcaggtacccaagcaatcctctggcttaacctcccaaagtactgggattataggagtgagccaccacatgcagctccattcctctgtaaaatgaggataattataatacccatccctggggtggctgagaagatgaaatgactttgggcacataaagtgcttagtacaatgcctggcacctgataagagctcaayaacaggttgaattgtattatattgttaagtcttactcccttggaacacagagccctaggtagtagccaggtgggactccctgcgggggacccgagagagaagctgcttccaaaattcccctgtgaggttccccgggagtggcgctgggctgctgggaatttactcttctcaaacctgtcatatcttcacctcgtctgagctgggaacatgagctgtgctgcaggcattagccccacccctattaaaaaggggaggtttggcaggcgcggtggctcatgcctgtaatcccagcacttaggaggccgaggtgggcagatcacctgaggtcaggagtttgagaccagcctggccaacatgacaaaaacctgtctccactaaaagtacaaaaattagccaggcatggtagcaggtgcctgtaatcccagctactcaggaggctgaggcaggagaattgcttgaactcgggaggcggaggttgcagtgagctgagatcgcgccattgcactgcagcctgggcggcgagactccgtctcaaaaaaaaaaaaaaaaaggtttatttacatgtacagaggacccactatgtgccaggcactgggtatacaaagcccaaaatgatgtggttctttttctttttcttttttttttcttttttaatgaaaaaaaggctgttacacaggctggagtgcagtgatgcgatcatggctcactgaagccttgatctcccaggctcaagtgatcttctcacctcagtctcccaagtagctgggactacaaacaagtgccaccatgcccggctaatttttttttttaagagatggcgtttcactatgttgcccaggctggtctcaaacaaatgggctcaagcaatttgcctgcttcagcctccaaaagtgttgggattatacacatgagcaactgtgctgggtatgacgtgagtgttgttttcaacttgcttgtgatctagcagtaaagactgacagaaggccgsgcgcagtggctcacacctgtaatcccagcactttgggaggccgaggcaggtgaatcatgaggtccagagttcgagaccaacctggccaatatggtgacagagtgagactcyatctcaaaaaaaaaaaaaagattttttgattagccaggcatggtggcacacacctgcagtcccagctacttgggaggttgaagcaggaggattgcttgaacacgggaggcagaggttgcagtgagctgagattgagccactgtactccagcctgggcaacagagcgagaccctgtgtcaaaaaaaaatttttttggttatatttgctagaaagggttgctttttaatttgtgactttttactttttattatgggaatttttaaacatatgcaaaagtagagatgatagcacagtgagttccctgtacccagattccacaaccctcaactttttgctattcttatttcatctatatcctcacctataattttttttttttttgagatggagttttgctcttgtctcccaggctggagtgcagtggcgcgatctcggcccactgcaacctctgcctcctgggttcaagcaattatcctgcctcagcctcctgaatagctgggataataggcgtctgccaccacgcccggctaattttttgtattttcagtagagatgggatttcaccatgttggccaagctagtcttgaactcctgacctcaggcgatccgcccacctcggcctcccaaagtgctgagattacaggcataagccaccgcacccgcctcataaatttttttttctggagacttttaaggcaaattctggacatcatgccatttcacctgtacatgcatygagatggatctcaacagataagaactgtttaaaagcatagccactatatcattatcacatctcacaaaattaacaataattccttaatatcatcaaatacccagcctgttcaatttgccrgaaagggttttggtagacgttgcagaggctgctctggaatgggaatgctgagtgagtgccttcccctctgattgagactgagggagctgattatgcttatgctataggcagaccaaactgagtttgagcctggagatggaactctccgacagaacttgattcccgcagtccagagaagctacttcccacctgtcaactctgggaggggcaggagctactgggaatgggacgcccaggctccatactgaggcccccgatgcctgagcctactctatccccgtctaccctcccaggcccaccttgtgaactcctcgtgcccagggctgatgtgcgtcttccagggctactcatccaaaggcctaatccaacgttctgtcttcaatctgcaaatctatggggtcctggggctcttctggacccttaactgggtactggccctgggccaatgcgtcctcgctggagcctttgcctccttctactgggccttccacaagccccaggacatccctaccttccccttaatctctgccttcatccgcacactccggtaaggatggggcaggggcctggtcattgtaggcacgsgggccccaggggtcctggagctgtctctgactgcataacaccctctgcagttaccacactgggtcattggcatttggagccctcatcctgacccttgtgcagatagcycgggtcatcttggagtatattgaccacaagctcagaggtgagtctggagtyggagtaggagtcaggagctggggaaggccattagggaggggcagtgaccaaacatgagccttcctcgctcccaggagtgcagaaccctgtagcccgctgcatcatgtgctgtttcaagtgctgcctctggtgtctggaaaaatttatcaagttcctaaaccgcaatgcatacatcatggtgagctacactgcaagcaaccctttgttctggtgccctttggtctagacaccyccatcctggtccaggcagctcgccttggtaactctgacctttccacctccctcagatcgccatctacgggaagaatttctgtgtctcagccaaaaatgcgttcatgctactcatgcgaaacattgtcaggttaggctgctccccccccgctttgtggctccctcctctgatctcccacccaaggctggcttcgtgggtgtgctgtgctcagtcgggccctagacttagtttagtgctctgctcttgccatcttgaaacgtgaacaattttcattttgcaccagtccccacaaattaygaagccaatttcactctcagcattgccaggcctctcaccctcaacctgccctaacttctggcacagggtggtcgtcctggacaaagtcacagacctgctgctgttctttgggaagctgctggtggtcggaggcgtgggtaagggaccagaagctgtggggacagagggtaggggtgctgggcagctgaagaggtggcctcagaggtgcagcactaacccccagaattattccacaggggtcctgtccttcttttttttctccggtcgcatcccggggctgggtaaagactttaagagcccccacctcaactattactggctgcccatcatggtgagtgactcccctctctgctgctccacccccaactccccagaggaacccaataaccccaacgggtcatgtcttccagacctccatcctgggggcctatgtcatcgccagcggcttcttcagcgttttcggcatgtgtgtggacacgctcttcctctgcttccgtgagtgacacccccagccacctgtccccaaccttaaagtactgagccgttcaagcatttttttttttttttggagatttggtgcttctagaaacaatgcctttgtgagctaaacgaaccagagggagcttcttgtgacatcctgaggccaggcgtttagggaagaaggaagagagtgagcccccaggccggtaggctctccaaagaaggagcattctgatggagaggtctctgctatcttccctaagaaatctcgggtagaagttagccattagaggccaggcatggtggctcacgcctgtcatgccagcactttgggggaccgaggtgggcagatcaccctgaggtcaggagttcgagaccagcctggcccacatggtgaaacccctctctactaaaaatacaaaaaattagctgggcgcggtggcgggcgcctgtaatcccagccacttgggaggctgaagcaggagaatcgcttgaactcrggaggcggaggttgcagcgagccgagattgcgctactgcacttcagcttgggcgacagcaagactccgtctcaaaacaaagaaaaaagattaaaaaaaaaaaagagccattagagagacttcccagcaggtggctgtagcggcaggggattttcttactctacagcatgcatccattcagggtttgccagtctcctcctaagcgactgacatgcattttttccgctaattcttatcatcgctctatgcaacataatattcccgaccccacttcacakgaggaaactgagattacataacctgcccgggggtaagggtggtggtgcagcttggattccaaatcccgcaggcagcttgcctcccagtccccgatttcctggccccagggtccgctctaaccggtctctgttgcggctcagtggaagacctggagcggaacaacggctccctggaccggccctactacatgtccaagagccttctaaagattctgggcaagaagaacgaggcgcccccggacaacaagaagaggaagaagtgacagctccggccctgatccaggactgcaccccacccccaccgtccagccatccaacctcacttcgccttacaggtctccattttgtggtaaaaaaaggttttaggccaggcgccgtggctcacgcctgtaatccaacactttgagaggctgaggcgggcggatcacctgagtcaggagttcgagaccagcctggccaacatggtgaaacctccgtctctattaaaaatacaaaaattagccgagartggtggcatgcacctgtcatcccagctactcgggaggctgaggcaggagaatcgcttgaacccgggaggcagaggttgcagtgagccgagatygcgccactgcactccaacctgggtgacagactctgtctccaaaacaaaacaaacaaacaaaaagattttattaaagatattttgttaactcagtaaatctgtgactcattctctccacgacgacaggcggcctttttttttccgcgcccggctctttaaaatcggccccgcccctgtgacgtgtcctggtgccgcggccaatcaaaaagcccaataaggatggtgccagtcccttcttcaccccagccagtccgcttcccgttcgggtcacgcgctccgggcctccaagagggcctccaagagggccaatcggaagggcaagcttcgagatgctgcgtgatcacgtgggaggagatgagctacttgaagaccaattagagtccgggaagcgcggcggggcctccagaccggggcgggcttaagggtgacatctgcgctttaaagggtccgggtcagctgactcccgactctgtggagtctagctgccagggtcgcggcagctgcggggagagatgactggggagcgacccagcacggcgctcccggacagacgctgggggccgcggattctgggcttctggggaggctgtagggtttgggtgtttgccgcgatcttcctgctgctgtctctggcagcctcctggtccaaggctgagaacgacttcggtctggtgagtcaccctttgcatagccccatccccgacccgcgcaggtgatcgacacctagtgtcccccggaacgcgggcggctgagccgactttccgcgacaggacccttttctttctcccagaccccgtttcctcctaccgctcccagcccctctccctctccgggtccccgtccttctcctcattcgagccccttcctcttttggggtccccttccctccctgaaggcgccttctcctttcgtagaccctcccctgctccgagcctccagcttcgctccaaactccccttcgtgttcctctttcttgttctgggaccccatcccctactcgggatccccattagatcctccctctcccatcggaacgtgggttcctaaaacccccaagacaagtttgtctttgttgacccttcctcctcccatgacaggtgcagccgctggtgaccatggagcaactgctgtgggtgagcgggagacagatcggctcagtggacaccttccgcatcccgctcatcacagccactccgcggggcactcttctcgcctttgctgaggcgaggaaaatgtcctcatccgatgagggggccaagttcatcgccctgcggaggtccatggaccagggtataaagatgtctgggtgaaagagccggtgctaggttggatgggtgggcagcccaatgagcccaagggccctgaggataggggaacttagagggttggttgcctgagtccctgaggggtagagggaacccgagaagggcaagtgtctaggacagtgatctggaaattgggatcaccaaggagttggacattcacttagcaaacatttattgggtactatatacctataccaggcactattttaggtttcatgaatatagccacgaacaaaacagatcaaaaatctctgccctcaggatttaaattgtactggaaggagacagacaagcataataaacaagtaaacttttttgtctgttgcaaggtgataaatgcaatggagaaaaataaaacaggacaagaggtatagatagtgcaagtgttggattgcaccctgggaccatcggaaggcctgaggtccctagcagaaggtgggaaattaacgggaagtggtagaaagggtacctgcagagtgctcactctgggtttcttcctccaatttttttcaggcagcacatggtctcctacagcgttcattgtcaatgatggggatgtccccgatgggctgaaccttggggcagtagtgagcgatgttgagacaggagtagtatttcttttctactccctttgtgctcacaaggccggctgccaggtggcctctaccatgttggtatggagcaaggatgatggtgtttcctggagcacaccccggaatctctccctggatattggcactgaagtgtttgcccctggaccgggctctggtattcaggtctctgtcctaggagataggtggagggggctgccttgtggagagtctgagggatacccccaaatggactcctttccaaggggaagattctctgaagtcagattttctggcttgggtgggattccttgaaagacagggcatcctggtaggaacacattatcaggagaagagggaactctgccattggcttcccatttggcattgtcaacaggactgcgttagtccatgcaataccctcatgcaaagtagaaaaaggcactgcctctttggacagacacaagcctgtgccagggtgcacagcttggcgagtgagcacaggttgggtttaagctctcatgcaccctgtggctgggcccctggtgcacatgtccagctgtacaccctgggagagcttcttaattcaaacagggtgtgtatttatgggatctgactggaaccctcagtgagcaagggctgaactcaaggggaccatacatgtgattgcatttgggaagtggtgggttctctgtccctgcctctgagcccctagagtctccttctgtgacacccagttccctttcccacagaaacagcgggagccacggaagggccgcctcatcgtgtgtggccatgggacgctggagcgggacggagtcttctgtctcctcagcgatgatcatggtgcctcctggcgctacggaagtggggtcagcggcatcccctacggtcagcccaagcaggaaaatgatttcaatcctgatgaatgccaggtcaggagtccatgagatgttccctacccatttgaccctccctgccctccagaacatcatttcacgcacagacccagggtctgactgctccactcagtgccacacacccttgctcccctcggggacagggcattttccctgttccctccctgaggtcctgtcctctcccctcagccctatgagctcccagatggctcagtcgtcatcaatgcccgaaaccagaacaactaccactgccactgccgaattgtcctccgcagctatgatgcctgtgatacactaaggccccgtgatgtgaccttcgaccctgagctcgtggaccctgtggtagctgcaggagctgtagtcaccagctccggcattgtcttcttctccaacccagcacatccagagttccgtgagtgcctcatgggtggggtcagcagggagagccctgtgtctagacaaggcctgggcagagaccctctctccctgactctcctgctctccccaggagtgaacctgaccctgcgatggagcttcagcaatggtacctcatggcggaaagagacagtccagctatggccaggccccagtggctattcatccctggcaaccctggagggcagcatggatggagaggagcaggccccccagctctacgtcctgtatgagaaaggccggaaccactacacagagagcatctccgtggccaaaatcagtgtctatgggacactctgagctgtgccactgccacaggggtattctgccttcaggactctgccttcaggaacacgggtctgtagagggtctgctggagacgcctgaaagacagttccatcttcctttagactccagccttggcaaaatcaccttccctttaccagggaaatcacttcctttaggactgaaagctaggcgtcctctcccacaaaaaagtcctgccctcatctgagaatactgtctttccatatggctaagtgtggccccaccaccctctctgccctcccgggacattgattggtcctgtcttgggcaggtctagtgagctgtagaattgaatcaatgtgaactcagggaactggggaaggctgagcctcctctttggtgttgcggtaagataaccgacagggctggtgaaagtccccagatggcaggatatttggtttcagagtaaggactaggtgcaccaccatgactgactatcaatcaaaatgtttgtaacttaaaatttttaatgaaggataatgaatatttgtagagtctctatggttctgtcaatgcacatcttcgtgtctgttttcctcatgtatccttgtgagcctgggtgagttctggggagagacctgatgtgcgtactgcctgtgaaaatctgactttggcaaatcaaatcctcttttccttttgacatgccctctttttttgttgttgctttttttgagacagggctcgctctgtcacccaggctggagtgcagttgcacaatcacggctcactgaagcctcaacctcctgggctcaagtgatcctcacgtctcagcctccggagtagttgggactacaggtcagtgacaccatgcctggttaatttttttaatttttattttcagtagagacaaggttgcgctatgttgcccaggctggtatggaactcctgtgcttaagcaatcctcatgcctcagcttcccaaagtgctgaggttacagctatgagccaccgcacccagcctacattccttcttatcaccgagaaacaggttgatcttcacaggtgtaatgagtatgaagggagtgccataagatattttttattttttatttatttattttttaatttaatttttttttttttgagatggagtcttgctctggcacccaggctagagtgcagtggtgcgatctcggctcactgcaacctctgcctcccaggttcaagcgattcttctgcctcagcttcccgaatagctgggattacaggtgcccaccaccacacccggctaatttttgtatttttagtagagacggagtttcaccatgttggccaggctggtctcaaactcctggcctcaggtgatccacccgcctcggcctcccaaagtgttgtgattacaagcatgagccatggtgccggcgggctgatttttttaatttttagtagagacaaagtctcactatattgcctaggttggtctcaaactgctgagctcaagcaatctgccggccatgttctctcaaagtgctgggattacaggcttgagcccctgcacccagcctgtaagatattttaaaatccacacttggccaagcgtggtggctcacacatataatcccagcactttgggaggccaaggtgggcggatcacaaggtcaggagttcgagaccagcctggccaatatggtgaaatcccatctctactaaaaatacaaaaactagccaggcgtgttggcttacacttatagtcccagctactcaggtggctgaggcaggagaatcacttgaaccaggaggcggagtttgcagtgagctgagatcacagcactgcacaccagcctcggcaacagagtgagactccgtctgaaaaaaaaaaaatccacgctgttttatatttctaacatggggtaggataccatcctccatgaaatagggtgcaagtgtgtgaaatgcagatgggaatcctgtcccagctagcctgacagagaagtgagcacttcctatggcaaattatgtaagaaaatattccccaggcagatgcttatgaaaagaatctgttcagcctgcaggtaagtgggagagcccttgctcaaaaaaaaaaagaaaaagaaatagtggaagacaaaaaggaaaggacactatgaatgtctgacccatgaactactacctgttagaaacagaagtgctgggaggcttgagagacagacactaccttcctggctaggtgtggtggctcagatctgtaatgctagcacttcgggagaccaaggcaggatgatcaaattaaagggcatcctgggcaacatggcaataccccatgtctaaaaaatttaaaaattagccaagcatggtaacgcacacctatagtcctagctacatgggaggatggcttgatctctttgaccccaggagttcgaggcagtagtgagctatgattgcaccactgcacaccaacctaggtgacagagtgagacctcatctccaaaaaaccaaaccaaaacaaaaaaccttcaagaaagaaaaaaagcttgaccttccctccctcactcttta

SEQ ID NO: 98268 - DNA, 21597 bp, Homo sapiens
tgggtgtggtggcattcacctgtggtccaagctacttgggaggctgagacaaaaggatcctatgagcctgggaggtcaagactgcagtgagccatgattacaccactgcagtgcagcctgcgtgacaaaacgagaccctgtctctaaaaaatgagaaaaaaaaatggttgttaccaggcgataaagggaggggaaaacgggagttacttaatgagtatacagtttcagttttgcgagatgaacagaattctggaaattggttgaacaccgctgtgattgaactcactaccaaactctacacttaaaaatggttaagatggtacaatttgtatgtattttaccacaataaaaaataaaaaataggctgggcgagatgttcactcctgtaatcccagtacttggggaggctggggctgaaggatcgtttgagccctgaaggagtttgagaccagcctgagcaacataaggagaccccatctgtacacaaaattaaaacattagccaggcagagagctggtcacggtggctcacgtatgtaatcccagcactttgggaggccgaggcgggcggatcacctgaggtcaggagtttgagaccagcctggccaacatagtgaaaccgtgaaaccccatctctactaaaaatacaaaaattagctgggcgtggtggtgccctcataatcccagccactcgggaggctgagacaggagaatcgcttgaactcaggaggtggaggttgcagtgagcctagatcacaccactgcagtccaaagcaagactccgtctcaaaaaaaaaaaaaattagccgggcatgttgtctccagttattctggaggctaaggcaggaagattgctggagcctaggagatcaaagctgcagtgagctatgactgcgcctctgcactccaacctgggtgacagaggaagaccctgtctcaaaaaaataaataacattgaaaagcactctcccaaaacagtatcttattctttctccataggcctcagagaaccatggctactgccaagggaatcgccataggcatcgacctgggcaccacctactcctgtgtgggggtgttccagcacggcaaggtggagatcatcgccaacgaccagggcaaccgcaccacccccagctacgtggccttcacagacaccgagcggctcattggggatgcggccaagaaccaggtagcaatgaatccccagaacactgtttttgatgctaaacgtctgatcggcaggaaatttaatgatcctgttgtacaagcagatatgaaactttggccttttcaagtgattaatgaaggaggcaagcccaaagtccttgtgtcctacaaaggggagaataaagctttctaccctgaggaaatctcttcgatggtattgactaagttgaaggagactgctgaggcctttttgggccaccctgtcaccaatgcagtgattaccgtgccagcctatttcaatgactctcaacgtcaggctactaaggatgcaggtgtgattgctggacttaatgtgctaagaatcatcaatgagcccacggctgctgccattgcctatggtttagataaaggaggtcaaggagaacgacatgtcctgatttttgatctgggtggaggcacatttgatgtgtcaattctgaccatagatgatgggatttttgaggtaaaggccactgctggggacactcacctgggtggggaggactttgacaacaggcttgtgagccacttcgtggaggagttcaagaggaaacacaaaaaggacatcagccagaacaagcgagccgtgaggcggctgcgcaccgcctgcgagagggccaagaggaccctgtcgtccagcacccaggccaacctagaaattgattcactttatgaaggcattgacttctatacatccatcaccagagctcgatttgaagagttgtgtgcagacctgtttaggggtaccctggagcctgtagaaaaagcgcttcgggatgccaagatggataaggctaaaatccatgacattgttttagtagggggctccacccgcatccccaaggtgcagcggctgcttcaggactacttcaatggacgtgatctcaacaagagcatcaaccctgatgaggccgtagcatatggggctgcggtacaagcagccatcctgatgggggacaagtctgagaaggtacaggacctgctgctgctggacgtggctcccctgtccctggggctggagacggctgggggcgtgatgactgccctgataaagcgcaactccaccatccccaccaagcagacacagattttcaccacctactctgacaaccaacccggggtgctgatccaggtgtatgagggcgagagggccatgacaaaggacaacaacctgctggggcggtttgacctgactggaatccctccagcacccaggggagttcctcagatcgaggtgacgtttgacattgatgccaatggtattctcaatgtcacagccatggacaagagcaccggcaaggtgaacaagatcaccatcaccaatgacaagggccgcctgagcaaggaggagattgagcgcatggttctggatgctgagaaatataaagctgaagatgaggtccagagggagaaaattgctgcaaagaatgccttagaatcctatgcttttaacatgaagagtgttgtgagtgatgaaggtttgaagggcaagattagtgagtctgataaaaataaaatattggataaatgcaacgagctcctttcgtggctggaggtcaatcaactggcagagaaagatgagtttgatcataagagaaaggaattggagcagatgtgtaaccctatcatcacaaaactctaccaaggaggatgcactgggcctgcctgcggaacagggtatgtgcctggaaggcctgccacaggccccacaattgaagaagtagattaattctttttagaactgaagcatcctaggatgcctctacatgtatttcattcccctcatcttcaaacatcattattattcttgaccagacctgaatctaagttaccatcccttggaaattctggagaaggagtctcatgcaccacctatcacactccctcacatcctgtttctgactttggaatggactcaggaaaactaggcccctctttaaaccgtgtgatgtatttgaatgtctgttatttccagccaccctaacattcttcttcctgtgtggatgcttatttgtcaatcagtaaatttgttcgtaaagaaaattacttctggtatttaggctgtgaatgtaccttgaaggggagagttcatggagagagcatgtgttctctgattgtgaggtcactgtgaatgattaaattggtaagggtaaagtatttgaattttcatgaactcattttgtgtgtgtgtgtgtgtgtgtgtgtgtgtgtgtgtgtgtgtgttttgagagacagtctcgccctgtcacccaggctggagtgcagtggcacaatctcagcttactgcaagctctgcctcctgggttcacgccattctcctgcctcagcctcccgagtagctgggactgcaggtgccccccaccatgcccggctaattttttgtattgttttagtagagacggggtttcactgtgttagccaggatggtctcgatctcctgacctcgtgatccgcccgcctcggcctcccaaagtgctgggattacaggcgtgagccaccgtgcccggcccatgaactcattgtttcaatcagccacataatttttgatcctcagacacctttagcacagatggaacagatggcaaactataactgcttttaatcagttacaagctggttttggagtttaggactcaactgggggtggagggacaaatcctgcttgatgtcctgatgtcacttataggtaaggtccaggagattcagcatctatgcactcacagagttcattgtttacatccattacatggagaaaatatttcttttctttttttttttttttggaaacagtttcgctcttgtcgcccaagctggagtgcaatggcacgatctcggctcactgcaaactttgcctcccagattcaagcgattctcctgcctcagcctcatgagtagctgggattacaggcgctcaccaccatgcccggctaatgtttgtgtttttagtagagacgggatttcaccatgttgaccaggctgttctgaactcctgacctcaggtgatccacccacctcagcctcccaaagtgctggaattataggcgtgagccaccgtgcccagccccagaaaatatttctataacaaactcttgacaaataagtatgtctatgcaagatgacaaatacaagttttatgaagtctcagtccatgaaaaaatatttttaccagctgggcacagtggctcacgcctgtaatcccagcactttgggaggccgaggcgggcggatcatgaggtcaagagattgagaccatcctgcccaacatggtgaaaccccgtctctactaaaaatacaaaaattagctgaggacggtgatgcgtgcctgtagtcccagctactcaggagggtgaggcagaggaatcgcttgaacccgggacgtggaggttgcagtgagctgagatcgtggcaccacactccagcctggtgatagagcgagactccatctcaaaaacatttttttcttttacctgtgtcctaatacatatttataaaaacctgggggatatgagttagaataatatgtaactgcatttctgtctgtttgtgtttgaaacatttaacagtgaaatgttagactgggttatttgtatctgtgagccacagtctctttagttttacacagtcctttacaggacagtcttggcaaaagtgtgtaagaaatgcggagattgaggttggctcctttggagaaatgtatttattggtaacctttgataaaatcaaaatttgtgctccagctcctccttatctctgggactgctcaacgttgtttgtttataattttcttttttctagagagagtctcgctctgtcacccaggctggaatgcagtggggagattgtagctcactgtaactcttgggttcaaatgatcctcctgcctcagcctccccaaatgctgggatttacaggcctcaacattttttgttttttgggatggagttttgctcttgttgcccaggctggagtgcaatggcaagatctccactcactgcaacctatgcctcctggatttacaggcgcgtgccaccacacccggctaatttttgggtttttagtagagacagaatttcgccatgttgaccaggctggtctcgaactcctgacctcaggcgatccacttgccttggccgcccaaagtgctgggattacaggtgtgagccactgctcccggtcattttttttttttttttttttgagacggagtcttgctctgtcgcccaggctgcagtgcagtggcgcgatctcggttcactgcaacctccgcctcccaggttcaagcgattctcttccctcagcctcccgagtagctggtattacaggagcctgcgaccacgcctaattttttttgtatttttagtgaagatggggtttcaccatgttggctagactggtctcgaactcctgacctcacacaatccacccacctaggcctcccagagtgctgggattaaaggcttgagccacggccctcggcctttttttctttttatcagctgaatttaagattcaaaacattttttaattttattttttaaattttatgtttttactttaacaaatatagaaaagtgcacacttcataatcttaacaaactccccacaattctcgataggaagtgtgtgtagggcacaaacacatcacgctgtagatggcaggattctggaaaagaacaaaatcctttgagctcaggcgctgagtcccgccacccgtctggcagcccaggctagggtccgcgcctgcgcaatgggagccggccggccagggaggaagtcggaatgaaggaaaccccgcccctttcccggcttcctcctcccctctactctacccagcttgcgctccccagccgcaagtcggccgcgctttgcccgtcagcgcttggagctttctgcgtcgcttcccgctgcgcctgcgcggtcccgcctcgccccacgcgcgggctcgcgcttcggtttccccagacctgctcgcagcaccctgctgtcttcccggtccggcccgctgcccgcggcgccagcaccatggtgggtaccgtgacgtcaaaagggggcgccctcggggacctcgcatggttggggcgggggatctggcctttgtacccctaggctggagttaggtccggagtttttatcttcatctttagtactgtactgtttctcaggttcattgaggaggcactgagaacaaatgggatattttttccatgatgagggaaaaaaccccaaccctgagagagattcagtgaggatagcgggagacggaaaagttagacctcagagcacttctctgccaggcaagcttcggcagggtgcgggtgggatattttctacaattcattgaaaggagtgggcaggtacccgagaaaggtggtcgactgagagagcacagtggggaggccgacgtatgcagggcagagtctctctgggactttaagtgatgggctcagtgcagtgtgcagaataatttgggctccagcctttcagctctgtcaaccaattattctttcctgtgaaattttgagaactgtcagggatgcagtggggttcacaataccagtatttggtaatactgtcaaaggacactcctccctaccatgctccttcccacatgatggttttccccctctctcccaatagctcttctattcttttttcaagtcccttgtgggcaaggatgtggtcgtggaactaaagaatgacctgaggtaggtacctgttccaacaagtctgttgggrgtgggtgtgcccagggccctggaacctctttaatttgagaaatatttcagggctaggcgaggtggaagatgtacagaagaaataaatggatagggtgcagtggctcaagcctgtaatcccagcactttgggaggctgaggaaggaggaaagcttgagcccaggagtttgaggctgcagtgagcagtgattactccattgcactctagcccaggcaatagagcaagaccccatctctaagaaaaattttaaaatttagcaataaataaatgccttgtgccttaaatttacagataagcttagagattgtatcgtgtattggaaaacaatacaaagcaatatatagtttaaagagtaaatacaggtcaggcgcagtggctcacgggctggacgtgtggctcatgcctgtaatcccagcactttgggaggccaaggtgggcgaatcacgaggtcaggagttcaagaccagcccggtcaagatggtgaaaccctgtctctactaaaaatacaaaaattagccgggcacggtggctggtgcctgtaatcccagctactcgggagggtgaggcaggagaatcgcttgaacctgggcggcagaggttgcagtgagctgagatcacactgctgcactccagctgggtgacagagtgagattctgtctcaaaaaaaaaaaaaaagtaagtactaggctggccatggtggctcacacctgtaatctcagcactttgggaggctgaggcaggaggatcacttgagtccaggatgtcgagactagtctgggcaacatagtgatgagacctctatttctataaaaaattagccaggtgtagtgtacatgcctgtagtctcagctattcgggaggctgaggtgggaggatcacttgaacccaggaggtcaaggctgcagtgagccatgattgtatcactttactccagcctggttgacagaggaagactctgtctcaaaaaaagaacaggccaggccgggcgcggtggctcacgcctgtaatcccagcactttgggaggccgaggcaggcggatcacaaggtcaggagattgagatcatcctgtttaacatggtgaaaccctgtctctgctaaaaatacaaaaaattagccaggcgtggtggcatgctcctgtagttccagctacttgggagtctgaggcaggagaatggcgtgaacctgggaggcggaacttgcagtgagccaagatggtgccaccgcactccagcctgggtgacagagcaagactccgtctcaaaaaaaaaaaaaaaaaaaaagaaaaaaaagaacaggccataggcygggcacgatggctcatgcctgtaatcccagcactttgggaggctgaggcgggtggatcacgaggtcaagagagcgagaacagcctggccaacatggtgaaaccatgtagtgtatctaatacctagcataggccagttatatgataggtgcttaaagaaagaaaaataatatccgaagacgtattgactaaccactattctgaatacatttattgattgatttctcaaacactgctaagtaatatatactattgctgttttacacgaggaaactgaggcttagatcagctataccacttgttcaagtctacaaaactagtaagtgacacaactgaaatatgattctgtccagctttttttctttctttttttttttttttgagatggagtttcagtctgtcacctaggctggactgcaatggcktaatctcggctcactgcagcctctgcctcctgggttcaagcaattctctgcctcagcctccctagtagctgtgattacaagtgcccaccaccatgcccggctaaattttgtatttttagtagagatggagtttcaccatctaggccaggctggtcttgaactctcgaccttgtgatscacctgcctcagcctctcaaagtgttgggattacaggcgtgagccactgcgcctagtcctactttctttcttaaaataatatttatttatttaaaaattagagacagtgcctcactttgttgctcaggctggtttcaaattctttgagttcaagcagtcctcttgcttcagcttcccaaagtgctggggttacgcgcatgagccagcacacctggccctgtacttatctgtacagtcctttaaataatatgtacatttaggccagatgcggtggctcatacctgtaatcccagcactttgggaagtcgaggcgggtggatgcctgaggtcacgagtttgagactagcttggccaacatggtgaaactccatctctactaaaaatacaaaaattagccagatgttgtgttgtgcgcctgtaatcctagctgctcaggagcctgaggctggagaatcacatgaacccgggaggcggacgttgtagtgagctgagatcaggccactgcactccagcctgggcgacagactgagactccatctcaaaaaaaaaaaaaaagtacatttaaaatattgatacctgttacctcattatcctttagaaagatgggatcaattgtattctcttcccaaaagcgtcttccacatttatttttttgagatgggggtctcactctgttgtccaggctgtagtgcagtggcaccaccatagctcactcagcctcctgaatagctggggctatatgccaccatgcccagctaattttttaattatttggagaggcagagtctcactgtgttgccgaggctagtctgaaactcttgggctcaagcagtcctgccaccttggcctcccaaagtgctggaattacaggtgtgtgccactgtgtctggctgtcttccacatttctatgtgagataattttttcatgggttacacgttgacagggcagggaatggtgaggagagggacttaagggcctttgcgttttagaacacaggtttccatttgtagcactggcaatgcaagtgatattgatgtgtatagattggggccacagagcaagacaagtacggtaatcactatcagtcttaggcaatttggtgtgatgacttgtttttgattctcctcttttctccttcctgggccttttacatgggaagcctaactgttgtgttataaccctaggccctaaagtacctttattttttttattttattttgtttttgagacagagtcttgccctgtcgcccaggctggagtgcaatggcgtgatctcggctcaccgcaacctctgcctcccgggttcaagtgattctcctgcctcagcctccctggtagctgggattacaggcatgcgccacaacgcctggctcattttttgtatcttcagtagagacagggtttcaccatgttggccaggctggtctcccaactcctgacctcgtgatctgcccaccccagcctcccaaagtactgggattacaagtgtgagccactgcacccggccgtagtaacatttcttttctttttcttttttcttttttttattgagacgagtctcgctctggtcgagtctacgccaggctggagtgcagtggtgctgtaacctccgactccctggttcaagtgattatcctgcctcagcctcccgagtagctgggattatatgcatgcaccaccacgcccagctaatttttgtatttttagtagagaaggggtttcaccacgttggccaggatggtctcaatctcctgaccttgtgatctgcccacctcggcctcccaaagtactgtgattacaggtgtgagccactgcgcccagccttcttttttttctatttatttatttatttttgtttgagatggggtctcactctgtcacccaggttggagtgcagtggcatgatctcgggtcactgcaacctctgctgcctgggttcaagtgattctcctgcctcagtctcccaagtagctgggattacaagtgcctgccaccatacctggctaatttttgtatttttagtagacatcgggtttcaccatcttcgtcaggctggtcttgaactcctgacctcgtgatccacctgcctcggcctcccaaagtgctgggattacagacrtgagccactgcacccggcctttttatattatttttaaaatttttcatagagacagagtctcggccgtgttgcccaggctggtcttgaactcctggactcaagtgatcctccyacctcagcctctcaaagtgcagtgactacaggtgtgagccaatatgtgtgtggctttaaagtgacttttctgttgggatgagaaagaagatctttctccttttttttccttgagacagggtctcactctgttgccctggctggagtgcggtggcgcgatcttggctcactgcaacctctgcctcctgggttcaagtgattcttcyacctcagcctcccgaatagctgggattaccggtgcatgccaccactcccagctaattttttgtatttttagtagggatggggtttcaccatgttggccaggctggcctcaaactcctgacctcaagtgatcctcctgcctcagcctcccaaagtgctgggatcacaggtgtgagccaccacgcctggccaaaagttctttctcttatgtttgttgtcagaccacttttgtgctatgtatctccccctccttaagggacttaataaaatgacaccactttgtacaattcccaaatgttatttcactgctggagatggtggggtgctgtcaaatgtttttcagcagctagcaatatggtgagaacattactgaggcagtgggtttcagatactgggtgtttgtttttgtttttgttattaggcagagactcaccctctgtctcaaaaaaaataatgattgcctagtactagttcatttaaattaatttcctagagcatatttaagtgggycttttttttttttttttttttttgagacagatccttactctgtcaccgaggctggaatgcagtggcatgatcttggctcactgcaacctctacctcctgtgttcaaatgattctcgtgcctcagcctcctgtatacctgggactacaggcatgcaccacacacagctaatykttgtatttttatattttatttttaaattttttttttcctcctgggttcaagtgattctcgtgcctcacctcctgagtagctgggattacaggtgcacaccacaatgcccagctaatttttgtatttttttttttttgagacggagtcttgctttgtcacccaggctggagtgtagtggtgtgatctccgctcactgcaagctctgcctcccagttcacgccatttttctacctcagcctcccaagtagctgggactacaggtgcccgccaccatgcccggctaattttttgtatttttagtagagacggggtttcaccgtgttagccaggatggtctcgatctcctgacctcgtgatccacccgcctcggcctcccaaagtgctgagattataggcgtgagccaccacgcccggccaatttttgtatttttagtagagatggggattcgccgtgttggccaggctggtcttgaagtcctggcctcaagtgatcygcccaccttggcctcctaaagttctgggattataggcatgagccaccgcacatggcctagacgctgggttttaaagactttcagaattttacaaaaattggggcagagaactgccaactttatttttggcaagataaggacgtttttaaaactgctatttattacgattatttttatttatttatttttcttgagatggagtctcactctgtcacccaggctggagtgcagtggctcgatctcgcctcamtacaacctccacctcccgggttcaagtgattctcctgcttcagcctcccgagtagctgggattacaggcgtctgccactatgcccagctaattttttgtatttttagtagagatggggtttcacgatgttggccaggctggtgtcgaactcctgacctcgtgattcgcccgcctcgtcctccctaagtgctggaattataggcgtgagccaccgtgcccggccacagttattttattttataactttaaaatagagatgaggtcttgctatgttgtctgggctgttctccagctggcttcaggcgatcctcctgcctcagcctcccagaatgcttggattataggcgtgaacaaccattcccagccaaaggctgtttttttaaatttttgcaccattctctcaaagagcactggtgttttgatagcattcctcaaatagcatttcaaggggctcgaggattggggaatggagaggacatcactcatgcctgcatcatcaagagtaatgctacctacctttatccacatatgggctctggttccaaagcaataaatgtttgaaaatagctagcctgggtgacattcacagtgagaccctttctctacaaaaaaaaaaaaaaaaagtcgggaatggtggctcatgcctgtaatcccagcactttgggaggctgaggtgggcagatcatgaggtcaggagatcgagaccatcctggctaacacggtgaaaccccgtctctactaaaaatacaaaaaattagccaggagtggtggccggcatctgtagtcccagctactcgggaggctgaggcaggagaatggcgtgaacctgggagatggagctttcagtgagccgagattgtgccactgcactccagactggccgacagagcgagactccatctcaaaaaaaaatcagctgggcatggtggctcaagcctgtaatcacagctactcaagtggccacagtgagccatgatcacgccatttcactccagccttggccatagagtgagaccctgtcgcaaaaataaaaaaaaaatagctgatggttttgggagtcacacagacttggactgaagttcccatttgttctaaactcataaagtttaaaacaacctctctgagcccctggaaggtaataactactttgaaagatggctgtaaagattacaaatactatatagaatacaggtctagcctttaccagttgtttaatggtagctgttaagaataggttggtttggccggggacagtggttcacacctgtaatcccagcactttggggagctgaagtgggcagatcgcctgagatcaggagttaaggaacagcctggccaacatggtgaaaccccatctctactaaaaataaaaaattagccgggcatgatggcatrcgcctgaagtcctagctactcaggagactgaggcaggagaatcgcttgaacctgggaggcagaggttgcagtgagccaagatcacaccactgcacttcagcctggctgacagtgagactccatctcaaaaaaaaaaaaaaaaaaaaaaagaatggattggtttagggagaggagatgtggggttgaaaataaactactctgttagttgtctttcctackccagggcttaggaatgcccccttttggttctaccttttctgacatcctcaagtccttgacttctcccagtcatgttctcatcccagctctgaagtcacctctatgttgactttgttataaactaatttgattcttctctccctctgcccttgacagcatctgtggaaccctccattctgtggatcaggtgagatatagcacgggccccagaattggttcctggagaaggagaggggagacttaagggttgggttcttacatcatgtctctagggttaataatggtgttcgtcggccaggcacggtggctcacgcctgtaatcccagcactttgagaggccgaggcctgaggtcaggagttcaagacaagcctgacaaacatggtgaaaccccgtctctactaaaaatacaaaaaattagctgggcgtggtggtgggcacctgtaatcccagctagtcgagaggctgaggcaggaaaatcatttgaacccaggaggcggagattgcagtgagccgagatggcaccattgcactccagcctgggcaacaagagcaaaactcttgtctcaaaaaaaaawwaataataataataatggtgttcatcttcctttcctagtatctcaacatcaaactaactgacatcagtgtcacagaccctgagaaataccctcacatggtgagttggggtctgtggagaagaggaaacacctctaaagcaggaggcccctgggtggttagaggacatttttaagggtgttttcatatttgtccatctttgtctagttatcagtgaagaactgcttcattcggggctcagtggtccgatacgtgcagctgccagcagatgaggtcgacacacagttgctacaggatgcggcaaggaaggaagccctgcagcagaaacagtgatggctcctcctcctcttcccctccctctttcattggtgwcccataaccccaagtcccagcccagaacccctaacccccaatacttgaaggggttttgtttttttactaatgatggttttgtgggttttttttaagggatgagtggatgagaggagtaatagggaacagctatcctctcttgagaaggggaggataagtaggctgggaaacttcaaagccttcccagtccccagcacctgcctttctcactacttctctggagatggtaggagagtttcctaggtctttccagggcagcatgtgattcatttggggatggaaggaatctgtcccgcatcgggaataaaatttatgatgcaaatttgtgttttggttctgttactatgtgttgggcagggggctgggacatggaaaaggatgtcgaattcatccaagcccctgttactctgcgttaacccagccaagaatccaactcagcttcccactactctccttggtataaagcatataatacagttgctctacaccatgtttccccaacatgtccctacctgtatgttctccctgtggccttttgcttataccatacctgcaactggagtgcttgctgtccttccattaatgtgatagtgtcataagatacatttcatgctaccagacttcaccaatccaaccaaatcagttcatgttttctgaatatgtatagaagataaatacaagtgatgtaatttatattttagagaaaagttgtgactgggaattactaaacttcattcactcattcagcaaatatgagttcatgatacagatgagacttctcagccttaagggacccttagagaccatctagtgtgaccctcctttttgtttttgagacgggagtctcactctgttgcccagggtggagtgcactggcttggtctggctcactgcaacctccgcctcccggttcaagcgattctcctgccacagctcctgagtagctgggattacagatgcccaccaccatgcccggctaatttttttttttttttttttttttgagatggagtctcactttgtcacccaggctggactgcagtggtgtgatcttagctctgcaatctccgcctcccaggttcaagtgatcttcttgcctcagcttcccaagtagctgggcttacaggtgtgtgccaccacgcctggctaatttttgtatttttacaaatactgcagctctgtcgccaggctggagtgcagtggcacgatctcagttcactgcaacctcaacctccagggttcaagcaattccctgcctcaggctccggggtagctgggattacaggcgcctgccaccacacctggctaatttttgtatttttagtagagacggggtttcaccatcttggcctggctggtcttgaactcctgacctggtgatccacccgccctggcctcccagagtgctgggattacaggcgtgagacgggctttcaccaccttggccaggctagtcttgaacttctgacctcaggtgatccgcccacctcggcctcccaaagtgctgggattataggcgtgagccactgcgcccggccgtcacccttttttcatacatgaggagatgaggctcaaagaggaagctggacgccagggcctcggcaaatggacctccccttcggtcctcatcaggcggctccctgctgggcacctccccgctaccgggtggggaacgccctccaccggcagggccggccgaccctcttgggccagttccctagctgcccgctgggcgccgccctcgccacccggccgaggacccgcacaaggtgcccgtggcggcgcctgacgggagcgtcgtgctcaggggtgtcctctcgtcctgcgtccgcgcccagcgccccgcgccccgcgctgttcctcgtgagaccggcgggcggcgagccgcgcggcccccggggcagtgtcggacacggcgggcgcgcactcgcaggcggggcacggccgcccccgccaggacccgcaggcccggaaacgctccctgtcacaaaggggggaacacgtgggcgccggctgccggggcggcgatcttagggaactagggtcacctggagagccgcccaccgtctctgcccgctcgactcctccgcccgggccgctcggccggtccagccgcggccggcgcctggctgtgaggtggattcccggcccagtctgaccatctccctccagtacgtacacgcggctcgaacccgcatccaaccagacgccgacccgctcctgagagccttccacactccccgaagccccgcgatggtggatagttcctcttccccaggaactccccactgacactgcccctctgagagccaggtcctcggctcctgacagcctgcctggtcagaccctcagtcctatgggactcgggtgtctgcggcgaaggagctcccgtgagggtcccctctctactcaaacataggacccacctcgatcccgcagtcttcccctgtctctctttctccttaggtttttccacttcgttcggaccttctcataactatgtccaccctctacgtctcccctcacccagatgccttccccagcctccgagccctcatagccgctcgctatggggaggctggggagggtcccggatggggaggagcccacccccgcatctgtctccagccacccccgactagcaggactccctttcccccaccccgcctgccggccctggagcaggggcccggtgggctctgggtgtggggggccacggctgtggcccagctgctgtggccagcaggcctggggggcccagggggcagccgggcggctgtccttgtccaacagtgggtcagttacgccgacacggagttaataccagctgcctgtggagcaacgctgccggccctgggactccgaagctcggcccaggacccccaggtgagggggttgtacagaagagggggaggggagaaattcagaggagggaagcgaggactggaatggacaatgagacaagaaggtagtacatcagatgtgggaaaagagtgatcaaatcccagattgccaactggtatggtaaccctgggcacgtttcatagacccgctgtgtcttggtcttcctatgtctatgaacacgcaggcaagttgatgtaatgcttgcctcactgagttaataggattaaaagatgtgcgcagagcacatagtttagtgccaggcacttttaaagtctcttagtaaaagtttgatgagtctgaaattgatgaggatagaagttatttgaattgtaggaaaagactgggtgagggagagatgacaattgctgggaggagataaaagagaaatgaaatgaggaaggtaagtgagaggagagataaccctgccagattgtaactatcagtccttccaaaggagacctgtgccttggtgtactttcaactctgcctccttgcatggtattgagcacatgatggaaaattagtatttcttgaatggatgaatgaatgtggcagaccctgacttgctccctcatattgtgatcaccctatctacaatagagtccttgcattcagaatgtctgtccaaacaaacaaataaaatagagtccctctcttctggaattccctgtttgttcccctcttttatttcttttcttttctttttttttttttttttttgagacggaatctccttctgttgcccaggctggagtgccacggtgcgatggtgcgatctcagctcactgctcaagcgattctcctgcctcagccttctgagtagctgggattacaggcgcccaccaccttgtccggctaattttttgtatttttagtagagatggggttttgtcatgttgaccaggctggtctcgaactcctaacctcagatggtctgctcgcctcggcctcccaaagtgctgagattataggtgtgagccaccacgcctggcccctgttcccctcattctgctttatttttcttcataggagttaagaaaaatagggcacttcattttatatttgctcatttgttgttcccctacaagaatgttaactctaccaggtcagggttctgtccatctgttcgtgttttcctctcattccctggagaagtacttaatacatatttattgatgttctgaacctggcagttattgagatgcctcatataatctttacttctatgcttaacatattgcatctaacacataagtattgagtagggatttgttggatgagtcagaagtgttttgtttttttttttctgagacggagtctcgctgtgttgcccaggctggagtgcagtggcgtgatctcggctcactgcaagctccacctcctgggttcatgccattctcctgcctcagcctcccgagtagctgggactacaggcgcccgccaccacgcctggctattttttttttgtatttttagtagagatgaggtttcaccatgttagccaggatggtctcgatctcctgacctcgtgatccgcccagaagtatttttattgtgactatttgagtgaagaaatgggactcagaggtggtgatttgtgagagtggggtggagggaggccacatggattgggttgtggtgggagatggaggtgggccaaaccttgtctcacacttcttccccttcctgccaggctgtgctgggggccctgggcagggccctgagccccttggaggagtggcttcggctgcacacctacttggccggggaggcccccactctggctgacctggcggctgtcacagccttgctgctgcctttccgatacgtgagtcaccaggcctggggaagaacaagactgctctcctcagacctcactgtagggtgactgagaagagtcatttatttcctgttccaggtcctagacccacctgcccgccggatctggaataatgtgactcgctggtttgtcacgtgtgtccggcagccagaattccgagccgtgctaggagaagtggttctatactcaggagccaggcctctctctcatcagccaggtgaggaagggcgaggagttggaggataggggcttccctggggccttccatgcaactcactttctttttttcctagaaatggcagaatcactggggcagggtcctgcgggagaggagggagaggggggaggtcagcatgggcaagacctcgggcatctaaaataccccatctgaaacctagtatggccgtccaagagggtccccagctggctgagtctgaatttctgcacctctctctaggccccgaggctcctgccctcccaaagacagctgctcagctcaagaaagaggcaaagaaacgggagaagctagagaaattccaacagaagcagaagatccaacagcagcagccacctccaggggaggtgaggcgagggtggagctggaaggaaagttgatgtgtgcggtgatgggttggctgatgcctgggcctatgtcttctccctcccaagcagaagaaaccaaaaccagagaagagggagaaacgggatcctggggtcattacctatgacctcccaaccccacccggggaaaagaaaggtactaggagtgggaaggggctcacccctcagcagccccttctaagttttcaccctatcttgctctattcttgctctcaccactttgtttggtgaggaattgcagaccccctgccctgcctctaggcccctcaaatgcctgtcctatgatgtgagtgacggagatcccgatccctctctgccagcacgtctccttcccagagtgctcccagccacggcactgagccctcccttcctctcccccagatgtcagtggccccatgcccgactcctacagccctcggtatgtggaggctgcctggtacccttggtgggagcagcagggcttcttcaagccagagtatggggtgagtaggcactgctgcccaggcccagagtgggtggggtggggaagggcaggactgaaggatgtgttgcctgggaggggctgggagaggtgacctgaggccttaaacatgtgccatccttctccaccatcagcgtcctaatgtgtcagcagcaaatccccgaggtgtcttcatgatgtgcatcccaccccccaatgtgacaggctccctgcacctgggccatgcactcaccaacgccatccaggactccctgactcgatggtgagcttctatctgcaccttcctctggttccctctgcctagtctggctctctccttttccctgacagccccccgagcctctctccttctgggttggtgctcacttctgcccccagtggtgctacacttctctctgtcattccaatctgatcatttagcttcctctcctagtccagtactcccatgcaacaccgccacttgcagactctcttctatcc

SEQ ID NO: 98269 - DNA, 13731 bp, Homo sapiens
gattgaggtcatgcattttaagcaagaatactgcagaagtgatgttgcatccttcttgctgcatcacatcaggagtttacaaggtcaatgcattaactttgatcacttggtttcagggaggtgttttttgagggggctgaaaatccctttgggctccttgaaatcacatctgctctgccccagaaggcaagtcctgaagccaggagtccaacaccccagtttcattctctctctcagccccagtgaccttgattcaccaacatccagcctgcgtcgcagcccatcattgcaatcaagtggagacagagtcggtgggagacgtgacttatccagcccacagggactgctacctgggagacctgtgcaacagcgccgtggcaagccatgtggcccctgcaggcattttggctgcagcagctaccgccctgacctgtctcttgccaggactgtggagcggatagggggagtaggagtagagaagggaacaagggagcaagggaacaagggacatctgaacatctaatgtgagaagacaaacatccttctgtgagtcattaaaatctatgaaccactctacagctgactggaaaattacatctatctttggttgatgggagggctaaaagcgtaatatggggcatccaggttctagtttgggggttaccaagcaacagcgggcttaattacagtggtgcactccttaaccaactaaaccccaaagggcaatggcttatctgccttctgtggctcctggatcctgttgctgggttgaatcttccttagcaatgagattcattgagtggggttgccagggttttgtgagcctgagtctgggtttgctcccctatttcccatttgcaagttggctcccaataggactattttgaattgagaaaagaaatgtaaaaactgtgataggtaaaaactgcttgatgccctacttactaactaggctaggtgaggcctttgactctaacctgagagaaactgaagaaacagggtctcaggccccatctccatgtacctctcctatcctttctggagagccctcaagccaggccgcaccttcttcttggcaatacatcaggggtgtggcctaaatttaggatatgagttgttgtgtgccacctggagacactggaagggaggatgaagacctgaaaaacctgtttctccattttccccagcccagcctcccagggaacctccctgaaggattcctgtgtaagggagggagattgagagtattatttcctgggaggtgacctgacccttaggtcttcttataataaatgtacattttatcagactcagacatttattactcaaaatggaaagaggtgagtatgggggatggggtacatatgggagcctgggtttggggagtcagctctgtacagtgaggtcatcaggtccttgtgggagccttcactggggacaacacagaagccccatttcaggcccagatcccaatccctcctcaagtaggggacagcagagtataggaagcaaagtggggagcccttctaggagccaatggaggtcctggaaggaagtgggaagggacccagaaaaaggagagtgaagggtgtgaggtgggaaggatggatgaggagaccactcggaacagtgtttaattaaagaaatgggagctagggagagacgattctgtaaagccaggggatacagagacacagggagagaggctcaggccaaggcaggtgggaggaggggcagccaatggaatgagtctcagtgcagcagccagaggccaaggccagccaaggaggtaaggaagacaaggcccagggctggagtgggccggggtcctgcgctgttgcagttgtccttgttgcagcaggtggtgttatatgtcagacccagcttgcggttggtttggttgaaggcctcctgacagggctcttctggtgtgccacagcgcagattggagaaaacccacatcttacctaggggtgggaatgggcagggaatcggccaggatgggcacctggcatgcctgtgtccacctccccaccccatccacccacctaggcttccttccttcccaactctgtccctggccctccccttctcttttcttagtctgatcttccttctgcacatccttacccaccactcccccagtcctggttctatcacttgctggccatggacctgttactgtctctgttttttgtttttttgttttttccaagacagagtctcactctcgcccaggctggagtgcagtggtgccatctcagctcactgcaacctccgcctcccaggttcaagcgattctcctgcctcagcctcccgagtagctgggattacaggcgcccactaccatgcctggctaatttttgtatatttagtagaaatggggtttcaccatgttggccaggctggtcttgaactcctgacctcaagtgatccaaccaccttggcctcccaaagtgctgggattacaggcatgagccaccatgcccggctgtgttactgtctctttttgaggccgttttctcagtataataatagcacccacatcacagggttgtcatgaacattaattgaaaaaaaggcatgcaaagacataggatgttgcctggcacacaaccatctttggccaaatattatcattgctataatcctctgcttctccatctcagtcttagacccatttgggcctcagtcctggtcatagaggctcccacctccctgttcaccccactaaggaaggggatgttaccaaggtatgcatgtgttgtcaggcattgctgtcctggctccaggcggcaggactgccggtccacacagcccagcacagggaccttgtagcaggagtgacagcgaatgtcagctgggaagacacaagtcaggctgaggtgatggggtctctgacttacctggggataagctgagctgggggcaggggtggagggtggagaagagcccatcccgtaggtgctccaacctgtttggctgtttggtctagcaagcacagagcaggtgagtgatgcagggaaaatggaaagtgggcggcaggtaagggtagagctgttgctttgtgaaaggcccacgccctacatatcttccatcactccaccccgtttggaggtgagtcaagagggacagaactatgaagaaaaacatggggctggagatagatggaatgtgaggaagataccatggggaaagaatgtggatggtgaaggaggagatggaaacttgaaagaaggagaaataataaaaatgaaaatcatgagggttacaacactgtcagaaatgccttggaacttgaggctggcgagaaagccatctgtggccagctttagcaatttacaatttactcttcacctcctggagctggcaagagtgtggcaagaggaaccagacctgaatagaatcctctcaccccagtagctcttcagcagaaaggaatgatacctgagagacagatcaccagattccatcttagcaccttatcaaaatggagagggtggatacagaaggtggcaccccaagtttcctgcttcagttaattcaaggtttgggcaggcaagatttggtgacgcagggtccgagggtggaagagcctggtaagtgtacctcagtgaaatccacttcaccctggaggtaagtggcccagttgtcccctcttcagaaggctcaagaaaacgctctgtttccatggaggctcttagatgtcactgcaaccatctagaaagtttgtatcccctgtatgggaggaggtatgcaacccaggaggggagtagggggtatctaggaaaggccatggctgagagactgaacatgtgagtccctgatggagtagatggggagggtaggttacaaaaggagcctggggctggatgcctaggtcttcgagaggacaccttactgagcacagcagatagaggagaaggcaggtaagctagactctggagagttgcatattgaagtggggctggttggggaactggataccagagtttccaaggaggagacaccttggagtggggaacaggggacccagagccctggcaggtgagagaaatgggtctttcttggaggtggggaggatggatggagacctggctttttgagaaatagagcaaggaggctgtcatagggaagcctggtcttggtggcacaggagagctgagccagttggggctgggggtgttgggatcccgagtggtgggtagggccgggaagtgggtagagcagggtgtaaaggtcctgaccaggcaaaccaggtctttggggcccccaggtgctcacctgagacccagcagagcagaacagacagggtgagcagcataagggctttcatggcgagggtcctgagaatggtggcaaccacagcagctgatagagtagattttcaaggatccagctctaggagttgagtggcctttttggaatttataaacccaaaggctcctcccttccctgcctctggtagcccctcccttctcacttactacgcagctgaccagagaaaagacaaggggtgggaaggcactgagcaggactgagtggggagtagggatgggagagagggatgggggaaggcaggtgccactagtggccaatgccattgtggttcttggtttcaggccaagatgcccttcctggtccccagctaagagtcctgctgctcagtcctctgaatgagcatcatcaaaggcctctgtgatttacagtgtccatggtggcagcttctgctggttcctggaaaatggacaaaaggatgtggcccaaattaattgctgaatttgggtccctgggtccctgctgggcattgataggggcatgctggtggaaattgggggaggaatgggtcaaattaatctccattcagcccccactcggtctttccaatgcctgctcagcaataagtgactcactgatggcttctgtgatgccacagcagcagaggcaggggctggggctactcatccaggagagccaccacaggtctgctaagtagggctgcctcaggctcccatgaaggttctcaggatgtcacccgtgctccacttgcgcttggtgtggccttgttgctccagtccagcagcagcaattgtcctaggtgtggctgtgtgcacctgctccaaagcacctccccagtcaaaacctgccaacttgggcagggtaccaagccaggaggaacagcatgggcacagagaggtgaggtagaagctaaaataagaatagaaatagtaggccgggtgtggtggctcacacctgtaatctcagcactttgggaggccgaggtgggtggatcacaaggtcaagagatcgagaccatcctggccaacatggtgaaaccccatctctactgaaaatacaaaaattagtcggtgtggtggcatgcacctgtagttccagctactcaggaggctgagacaggagactcacttgaatccaggagccggaggctgcagtgagtcgagattgcactccagcctggccacagagcaagactctgactcaaaaaaaaaaaaaaaaaaaagaatagaaatagtaataataatggcaagcacttacatagtgatcctatgtattctaagcagtttacatgtattactttatttcgttatcacaatcccctacaaaacaggagtttttgttgttgttgtttttgagacagggtctggctggctctgtcgcccaggctggagtgcaatggcctgatcacagttcactgcaacctcgacctcctgagctcaagcgatcctccctcctcagcctcctaagtagctgggattacaggcgcacctgaaaagttaagcaggccaaagcatttgtgtaaatggcccgagcacacattttaagtgagaaccatttgaagactccgagtttgcctgcgaggattcccaaagggatctgggcagctggtggccccgccccctctcttatcggagccccccagcccctccgttctccccacgcctaacttccctccggtccccccccaaccggccccacgccgctgattcgctcgcagcttctcctcaccacatcctaaccatggctgtgtttctkcagctgctaccgctgctgctctcgagggcccaagggaaccctgggggtaagcgatccctgggagagttgtgatagacgcagaggggctgaagcaagataagggccgcctagtagggtgggttgtgtgtgggaagatccaggatggctggagtgcagaacagagaagagaaagaggagacgggatggagggtcgtcttgccctgtggacgtgccctaaccacagcctccggcctctcctagcttctctggacggccgccctggggaccgggtgaatctctcctgcggaggagtctctcatcccatccgctgggtctgggcacccagcttcccggcctgcaagggcctgtccaaaggacgccgaccgatcctgtgggcctcttcgagcgggacccccaccgtgcctcccctccagcctttcgtcggccgcctacgctccctggactcyggtatccggcggctggagctcctcttgagcgcgggrgactcgggmacttttttctgcaagggccgccacgaggacgagagccgtacagtgcttcacgtgctgggggacaggacctattgcaaggcccccgggcctacccatggtaggtgcaggcctgtgcgcacaagggtacttaactccgacacatacccggaggagggaagagggccttggctgggggttcttgagcgggactgctggctgtccctcgtcaaacccctgacctcagcatccctmcccgccacgcctttcccccagggtccgtgtatccccagctcctgatcccgctgctgggcgctgggttggtgctcggactgggagctttgggcctggtctggtggctgcacaggtgagcaggagggacccggcctcgttaaatggggagtgaccagaggtggaaggggcaggaccagaaccttcgcaaaagaaagagctagacctagagctctggtcctggcttggcgaagaatgggagaggtcaaaggtgggagcgaggccgctgrctggtgagtagagccccaccagagcagatgagctggaagtgcagcagagttagagcctgggctggactgtcggtggggtagagtctaagttgtttccggtctgagccttcaagttgctgggctgtccttggcgtggcgagtcccaggagaaccagtgagacaagactggtggttctcaaagactcatatgtcccttacaggcgcctgcccccgcaaccgattsgaccactccctagatttggtgagactaattccaccccattttctttctcctacatgcccactccccacccctcaattcctgagtctgagcccttgctgggagcagacacgttggtcaccttctctccatccttcagctctgtcccccccacatagctccacttgtgaaaacygagccccagaggccagtaaaggaggaagagcccaagattccaggggacctggaccaggaaccggtaagggcatggggatgggaaggggatagccagaatctctgaggaaaatggaccaaaaaaaaaaaggcctgaaccccaaggaagactgtggagaccatcttgtcttcctccccttcctcctccagagcctgctctatgcggatctggaccatctagccctcagcaggccccgccggctgtccacagcggaccctgctgatgcctccaccatctatgcagttgtagtttgaagggaagcccttactccaaacctcccaagctaggggatcccagctccccataatccctctcccctccttggttcctcacctggaagaggaaggcaccatggtatagaaataagtgctagactgggagttgggagacctgggttccaggctgtctctgccactggtcttacttctaaacttactcccatctctcctataacctccatgtctccctcaccaccagtgtcctctctatacccaatcaagccctagctccttttttttttttttttgagacggagtctcgctctgttgcccaggctggagtgcagtgacaccatctccctcactgcaagctccgcctgccgggttcacaccattctcctgcctcaggctcctgagtagctgggactacaggcgcccgccaccacgcccagctaattttttgtatttttagtagagacggggtttcactgtgttagccaggatggtcttgatctgctaacctcgtgatccacccgccccggcctcccaaagtgctaggattacaggtgtgagccaccgcgcccggcctgattctttaagctgtttttctttgttgctggtgttttctttttggactcctcttccttgctccatatccctacagtatttcccaccattctaggtttgtccctttctcttcttctgggacactctcatcaacagtcagtcctcagccccctcctctgcaaatgacactcagaactctctctggctcagatctcagatttgggattaacaaacttccacttagacattctgcctgactgacctcaggcatttcgcactctgaatgtcaaacccaactcattgtcatctctgaagctgctcacttaattctcctctgtattctctttaacaacccagttgcccaacccagaaactgggagtcacgcagacctcctttctctcttactcccacacaatgagccatgaagtccagtctttctatcttaacatcactgtcaaacccacactgtattccatgcccagcgctgccacgtgaatgtactctgctcacttccttcctggattacccatagccccacctcatcctcctacccttgctttcctccctgaagtcagagagatcctactcaagagataactgctcctgacagcccttattacagaactgaagtactctccttagcttcagctctgtgcccacgtgccttggctttggatacaaggtactacagcactttgtccactctccaggcttacctgtgtcattccacatgcacatcttagaaaatgccagccttagagaattctccctagccccaaaatgtctttgcccagtgcaattccttcttcctgtattacccctttccctccttcacactatctgcctggctaattcttatttatccttagttcaagtatggccttttctgggaaggtgaccctccttggccaccccttgcatatactttgatgccctagggcacaccccctttatttccctcatagaaacagccttctgtaaattgttccatgacaacctgtatttcaatttgtaagaaatttgcatgtactgtgagctccccaacgtcaggagactgacccttttgatatcattgctaagcctcattaaatgaatgaatgaaaatgaatgtccctggaagtgtcatttctttttctttatcaaataggggtggactggtaatctaccagtctctgaatcatctaacatttagataaattcagtgagcaatccacccatacactcttttctctgccctggacacacttcccatgatagaaattctgtcttgttcatcttgtgctcaagtacctatgacatggttgggcaatgagttgataagtacctaacaagatttttgaataagaggccttcttccctgcactgaccccaaactcaggtttcagccctgccctatccctttgccccagtaagacaccagtcacagcccagtctaaaaggtcaattctattttattggttctgagagggaggattcacccagtggatccttttccctacactctcccctcccccaatattgaggctctctcccaactactgcctattcagcattctctatctaaccctccttccccttctacttcctatactatcctacccctggccagcagtaccccaaggccaggccctcagctgtgggggcgtgtgctgagcaccaagcagagggagctgagcccggcgccagccttctccagttctgagcaggacacaggtaccagggtgacatcagagagcttctgcagtgcctgcacagggaagacatggagtggggagaggggagtgagacctcaggctgagccaggccactcttccagccagctcagagtggccccacccaggcttctagagaaggtacccttccttcctcccactaggaaagcctgaaactcttttctctgatggtgcttggtgttggagttcctgccctctctcacctcctggctgttgggcagatccccacctccacggtgcaggaggaaagggggcacaccaggcaacccaggacgaagaaagagacagtcagcagctgcgtcatctgggagggtcagggaggcatatgggtgatctgtcagcactgccattgcctagaggaaagaggaagtgttcgagtctcagaacctctccacagctgtgtctgcctgctcaaccaccactaagggctggggacggactgacatttgtggaaaataatgacagcaagcacatagagcttacgatatgtcagacactaagtactttagttacctttgctaatttccaccttggaatcacatgcagttattttcaaccccctaccttccccagcccctcctatctgtcctacccatccttagagtcacagtttaggtgccacctttggggtttcctgaaactccggaagagcaaattaatcacccctgttcccagtcctgctgttgtaacttcttattttctcctgtgttctttcatgtaagatggacagcccattgagggcaggggttagggctaatttcctaagcctcccagctcccggcctcccgggcccagaactgcgcccactttcgttggccccgccccctcctcacccggacagccttttgggcagcgtcgctgctgcctgccacaacagtgcgaggtccccccatgccgcagagaccgcgcaggtgggagggacccgagactggcacagtggagacggcgaagtcctagggagagcgaagggaggtattcaggggcgcgggaggggtgatggggtatcttcaaacataggctgctctctgcctctcatttcctcagcgggcgcccaggcccttccgacccccacctgcaccccctccctccctaggctggtcccgctccgcacccggaacgtgtccgccacgatctcagctcctcggtgattggtccatttggagaggcctacgaaaaactcccggcctgagtccgggaggccgcggaggtttgagggcgggagtgagttagaaacaaggctccagacggccgagtctcccaaactctacttccctgtgccaagacctatgcctccccccagcctcaccggtgaagagaacgtcagtgccatccagcgtcgcgttctcgtctcctatttccacaattcggagccccaggtcttgcagggctttgcggactccatcgaccttaggataggagaagagggcacggagctgtgacacccccatcctcaattcttccccaaagccccgacatccagttccttctgcctttccccataccacacccgcgccacggcgctcacctctggcctacgagcggggctccagggccgcgtgattagggccgtgtccccttggatcacggccgtgtcgccaagcagcggtcccagcggcaatgactcctcaggtggcagttctagcagctgtagccccagtcgttgcctcagtttacctcccagcaccccgtgctccctttgagctttggccagatccagagcgggaaggccagcccccgcaccttcccccgacgccaggctctctgggactccccggatcagggcatgggagcagcggcccagcccctcccccggcgtccccatcccatccacacagactccccctccaaccgctcggatttcttagttttcttgtttcttcacctgtctgggagaagaaacagaaaaggaggagacagagaaaaagacatgcagacaagggcgttgggggtggttaagagcgcccaggtcttcctcctgccatctctaggcgtccctcccactccgccccacccactccagaccttccgctcctgtcgacctcactctacccagcaccctcaggggtcagattctttaagaggagcctgaggaacaaggctagggtctctaatctccaaaacacctgttgcccctgcttgggggcttgtgaggtccctgtcgggcgcccctcttggcagccactaggatgcgctcactccccaaaaatgcagcagccccgcccccttaaccctcagctgctcgctaccgcagggactggaagtccagcccgcgacccgcaggggttatgggacagaaggagaaagctggagaggcaggggctggggaatggaagtcctgaatacccgaacgagaagggagagaggtgggtaggaagggaggagttcgagcctaaggagttaagcatcctctctccgccctggctggtcacgctgcccctagcacgacctagtataaaccagaccgagtcccgaaggactgggagaggtctaaaacgaaatgcgaggggcggggtaacagggggcgtggttccggggcgctggcactactcccggctccaggacccggttccccgtctatgtcccaaagtccaccccgcctagctccgcgcccaaataccggctccccatactctctgtctggtgcaggcatgggcccggcacccccaaactccggcccccacacggttcagggccccccacgcaagactcacctccagcggccacccccactcctgtcgcgctgtgatctcggctggggccccaccccccgaggacagagttggtggagaagggagtccccgtcttcaagcctcggggactgggagctctggcttttagcgggggtccttgtgtaggcgagctcatatactacgatggggcaggggcgcgacggtctggcggctccggggcattgtctaagcgggacggggcggggcttcttcgggccacgcccattccgccctgctaagccgcgcccattacatccagactgcgccccccttgccagaaatcggcaccgcccagcgagcgctgcccaggcccacccagatctggccggccctggcgacggggctgcaaacgcttcgtagacctcagaacagcgcaacggcggaccggcggaccggcacgaaacatagcagccccaccacaaacatttcccttcttaattcctggcttctgccctgagctcaagatcactgacccacccctcattccatgtcgcccacactttaaacccccattgcgtaaaaacacttgatttttattctgtattttattactgaaatatgttgtcctactcatcccaccccacaataaaaatctgacccaggccccccatttctttccctcatcccctcttccaccacaccatcccggaacaagtgctccaggattccctgcccactggccattttggagtgtgtccattgggtagcaatgtggaaaccaccagggcctttgtggagaaaatggagggggttgagggagtcccaggaggggcttatttgagggcctttgccacttgctcataggcgagctcgatctcctcatcatctggacaggtggaagcgaattcttcccgggcgtaggcattgctcaagtaccgatgcactccccggaaggcctcggggatggtgaatccccggtacttcttacacaccacctgaggatggggagaggagagggaccaacatgttagacccagggaagccaccttggctttcccttctcccca

SEQ ID NO: 98270 - DNA, 16837 bp, Homo sapiens
ctttttgttcactaatgattcccaactcccaatcatctggctggctccagcccagtctagaaaagtcttgttccctttccagctctccttcctctgatgtaccgaaacactggggacccaggtggagcacacatgcacacacacacatcaacacgcatatgctgttttgctctccctgcccttttacctttacaactgttacacaaagatgtgctttcctccttgggatgccttcaccatcccctctcttcatccctatccatctcttctcccaaactctcttgtaaagccctgttccctgggaagtcctgtttgatttaccctcggggcagttttccctctcctgacagcactctgggcctctcagactattggcctttacctgagagcagggagaagatgaagaaaagagagaggaagcgctgaaggggtgggagggccaagagagctcctggagtaggctgggctagcgcctaggtccaggaggatggcggagcctccagaagtgttgcagtatctccgtcacctctctgtccctcccccaggactgcctttgctcccaccaaaaacaccgatatttcctggtgtctattctaaagtccttctatgggctggaagctggaggcccagagataaaaaaggaatgggggccctattctcaaaacacccacaatctaactggaaaaatgatgcaggaaaagaggagcaaaaatataaaatagcaacacaataatgtggatgaattaaaaggaaggcagggtgtcaactggccaagtaggtgaggaagaggtgccagaatttggttaatgatgggctaggtgtggtgtctcatgcctgtaatcccagtactttgggaggctgaggtgggaggatcacttgagtctaggagctcaagctcctatattgtccagcctggacaatataataataagatcctgtctatataaaatacttttttttcttttttgaggggggtttcgctctcgttgcacaggctggagtacaatggtgtgatctcagctcactgcaacctccgcctcctgggtttaagcaattctccttcctcagcctcccaagtagctgggattacaggcatgcgccatcatgccaggctaatttttttgtatttttagtagagacgaggtttcaccatgttggtttcaccaggctggtttcgaattcctgacctcaggtgatctgcccacctcggcctcccaaagtgctgggattacaggcgtgagtaagcacacctggcctaaaaaattaaaaaattagccagatgtggtggtgcgtggctgtggtcccaactactctggaggctgaaatggaaggattacttgagcccatgaggttgaggctgcagtgagctgtgactgagccactgcactccagcctgggtgacagagtgagaccctgtttcaaaaaaaaaagaatgtggctagtgatgaggggagtgaagggagggtccttgtaagctgaaagcttggagttcaggggaagaaatgatctctgagcaccaattatgcctcatcctcatttccccttatcccatttcaatccccaagatgagaaactaccagggggttctggggaaggtgattcagccagctaactgaagcagagtgtgtttcagggtcattgtctacgggaccctgaatgtcaggtggagcacaggttctatggtaggggaggacatcgaggaataacacacaccgggacctgtggggtcggggggcaaggggagggagagcatcagatcaaatagctaaggcatgtggggtttaatacataaatatatggactgggcatggtggcttatgcctgtaatcccagcattttgagaggctgaggcgggcagatcatgaggtcaggagttggagaccagcatgatcaacatggtgaaacctcgtctctactaaaaatacaaaaattagccgggcacggtggcacgtggctgtaatcccagctactcaggaggctgaggcaggagaatcacctgaacccaggaggcagaggttgcagtgagccgagttcgcgtcactgcactccaacctgggcgacagagccagactccgtctcaaaaaaaacgaaaaacaaaaaacataaatacataagtgatggattgataggtgcagcaaaccactgtggcacatgtttacctatgtaacaaacctgcacattctgcacatacatcccagaacttaaagtaaaatttaaaaaccaagaaataaaaagtaaagtgcccccgaaatccttgaggagaagagaattatgggatcaggagcacatttcagcaggaccagtttggatggtatgtgtgggagagatggcagaaaacagaggctgcaggttagctgaggtttacacagtagttcccatcaggcccacgtcagccttaggccatgtcatgatgtgatgtggtcattgaacttcctctctgggactttctgtctgtggactgtgccactgtttctcgtctcaaatttaaagctgaatatggtccaggcaggccccttcctttatcccttgttctcaaaaggaagtcagcacttggggcaccatgaatttagagggacgggttgagtgtgagagacacagcatgaaggatcagaaaaccagggtataatgtagatgcggaggaggaagttccagtagagtttgtttatggaaaagcttaagtgatagcccaagctatttagcctttcctcagcctggaagaaacttctcagcaaacccttctcacacaaaggccagacagaatccgacagttttgtaccttggcccacactcttggtctgagtgctgaacatgtgcttcagatttctgccctgggtactaaggcagagggcatcccaatggcaggaaggcagagttcaagcgtctcagtctgcaaagagaccggttagaccctcagtgctgatggccatacaactggggatcatgctagagggagggggaaacagggaagtgtaatcctggggtggtgggtggaactggactgtgcaatcgggcttagaatctagaaagtaacagctgggcaggtgggagcggcaggcagggagaatctgaggcagtggtagcagcgtgggaagcgggggctggaaattgaggagggttgaggagggagtggtggatgttagaagctggcaaagtgttgggctttttctgaacgataacctacaaaggagtagcacagccttttttttttttttttttttttttttttttttttctttgagacagggtctcactctggttgttccaggctggagtgcagtggtgtgatcttggctcatcccttccaccttagcctcctaggtagctgggactaaaggcatgcaccaccacatctggctgatattttgtatttttagtagagatggggcttggtcatgttgcccaggctggtctggaactcctgggctcaattgatcctcccaccttggcctcccagagtgctgggattacaggcatgaatcactatgacaaacatctttaaagagccacatcaatctgggtgcagtggctcacacctataattccagaactctgggaggccaaggcggaaggatcacttgagcccaggagttccagaccagcctgggcaacatgtcgaaaccccctctctgctaaaaatacaattagccaggcgtggtggtgtgtgcctgtagtcccagctacctgggaggctaaggtgggaggatcttctgagcccaggaggtcaaggttacagtgagccgtgatggagtcactgcactccagcctgggaaataaaatgagaacctgcctcaaaaaaaaaaaaaaatctagaaccagaccagaaataccatttgacccaacgatcccattactgggtatatacccaaaggaatataaatcattctattataaaaatacatgcacatgtatgtttattgcagcactattcacaatagcaaagacatagaaccaacccaaatgcatggaatactatgcagccataaaaaggaatgtgataatgtcctctgcagggacatggatgaagctggaagccatcattctcagcaaactaacacaggaacagaaaaccaaacactacatgttctcacttataagtgggggctgaaaacaatgagaaaacatggacacagggaggggaacaacacacactggggcctgtggcggggtaggggctaggggagggagagcatcaggtcaaatagctaatgtatgcgggacttaatacctaggtgttgggttgacgggcagcaaaccacatggcacatgtttacctatgtaacaaacctgcacattctgcacatgtatcccagaacttaaaataaaataaaataaaatttaaatttaaaaaagagccacactgggatcctgcaagagcacagccatctctttccccttcccaacttcccacaggctttccatcttattcaggagcaccaacccgaagtccaggagaaagaccctaagaccctagccagaaccatgtgtaggacaaaataaatagtgataaagggtgtgcagcaggaccccagtactctggaacccatctctgacagccttggttccagggagcttggtcagagcttgtggcagggggttgaagagccttggtggaaggggtgctttctctcacccctttcccaattttgcccttcctctcctctgccctggtctacttctcccatcagcagtagcttctcccatcagctgccccacaaccctctcctccctgcctctccagtctgcatcagtatctcagggaaacaggaaaacaccattctccaaacacatgtcctagggtcccagggttgcatggcgaagcgggctgtgctgacaatgaggttcgtattatttctatttacctaaaagttcaagaaggccttgctgacattgttgcttggggcccagcatttaaacttagtcactgcccagagcccttgttttaggaaagaatgagatggtccctgttgcataacccagagttgggtgggtgtgggttgccgaaggaaacaatccctcttcctctctcttgtgaggcctggctaggagtgcctgggatgggcgggacactgcctggggaaggcgggtggggagcggtggaacccgacccttggagcgaaggcggacaagtaggcaggcaaagatgctgagtagtccctccccaaagtcccctgggcacaagacagtctgatgaatctagaaaaccccatggatgactgggagggaaggaaacggattctgggagaggagaggaatggaggagcgagcttacctgaaggacggggatggggaggggggtggggtctgctctctggccactgtccccaagagcatcccgaatacgagttcctttaattctctccctctctagtttcaacctgccaatttccccctttccctgcctcccagccagttctcaccctgcacacagccctctccaatccttccagactccgcatgcgcccaccacaatgctagggtctcctacggttcattcaagttgtatccctccctgcctcccggcccttcccccattggcttaccccagtctggttcccctcgggccccttttctccatagtcttacctcaagggtgctttctcttactcctttcccaattttgcccttcctctcctctgccctgttctacttctcccatcagcagtagaatttcccaagaccccgttatccaccctctccatcttttctctgtccctccacatttgcccactcctcttgtgatccacacacaccatctcttctcagttccctttcagcccccgtcttctcactccccaccgggtccctgcatgcccctcgtcgtcctacacatacacactaagtggattgcactcccgtcctccccttcttccgctcctccccaccctccagtccctccagccagctgtacagctcccaaattccgggccgagattcccgggaacaaagcaagaaaaatcagagcaatttgggaagtaaacagaaactggaaagggagagggaaagaagagtggggaggacccaggttgggggggccctctccagtcccacccagtttagggaatgcccctgccctctcccccaccccccttcacctggctcttaaagggcccggcccctggccggcggctacttaagacagaggggcggcggcgggcagcagctgcgctgcgactgctctggaaggagaggacggggcacaaaccctgaccatgaccccccacaggctgctgccaccgctgctgctgctgctagctctgctgctcgctgccagcccaggaggcgccttggcgcggtgcccaggctgcgggcaaggggtgcaggcgggttgtccagggggctgcgtggaggaggaggatggggggtcgccagccgagggctgcgcggaagctgagggctgtctcaggagggaggggcaggagtgcggggtctacacccctaactgcgccccaggactgcagtgccatccgcccaaggacgacgaggcgcctttgcgggcgctgctgctcggccgaggccgctgccttccggcccgcgcgcctgctggtgagtccgcgccccgcccctgccccgcccacgtgagacccgcgtcctccaggcagggtcctggggagacgggagtgggtggcccggcaagcctttccgccctggcccttgacgcttccgactttggggggcacatttgtgtgggggagaaggggcaagtgcaggaagctgaggtgcagccaggggacctggtgatacagcagaaggtgtctgcgctctcggccttcttttttgctccatttattttcccttgatggagtgtgcgtgcaggtgggaacttgggggaggcagggggagaaatgggagggttttagggccatcccatgggctccagcaggcccagctcctacaaccctagacggccaagctggggaaaggacccaaatgttgttctcagcttccacttggagaaaaggggaggggaaccccagactctgaaattctgcacacactgagaaatgactcctttcctcctaataccggtgttcgaagcacctaaacaggaggcgtctagaaccgaagaggccccaaatccagggttgtattagacttgagtagggactgagggcaggctagggcgtaggttaggggagaggggagaaagagtaggggaaagagggaatctgccaaatcagggttatgatttaaacctgctcagaatcgytcacccatcctaccccaccctgctccagggaggagagcagaagctgagtcacygggtgggtgggacagaagtgaatcagccgtgaaaacatggggggcagcggggagatggggagggcaggaaatgcaaactgcgcatcccagaggctctgggttccttccacgggaggggatggagaattcacttggagtttctttcagttccaaatgcccgagtgcaggcttctgggcgtcctcctaaaaggtggtctgggtggatgagaggaggcagtttggaactaaatggttgggtgctaaatgtagggaatgaaggagaaggtctggggaggggtgggcatcctgaggaagaaggatcagactcaggaytgcaggggaaatgtctcctgggttgtgagtggtagttagctgggagcttgtctttaggcacagaggaagaggatcccttcaggggttctgatatctgattagatgttaggcaaattccaagcagtcagtacatgctcccctttctgccttttcctgtccctgacttatttcctcaccccttcccagtcctgagctctccccggaccctccggaaactttctccagagccaggagcaacctgcaggttggaagcccctcattccttgcaccttcttaatctgccctcagcctatcttggttaagggttgaatccatgtgctcctgggaccactggggttgagctggcctgggtcacagggtaccagaagggagaggttcccactgcagtgccccagaagtaaccacatctcaggcctgggaggggtgggttgagtcatagcaaggtcacagcmgggacacacattccttttgggtccctgttggcccccctcctacatccgttgctcttctgccccagctctcyggcttcgtgcgcccccttctggcctctggtggaacagccaggtcttttcacccaaagcccaaagccccaaatagtcctttgaatttgttctccattttttcatttattttattatttattgtaattaattgattgatttttaaattagttaattttttaaaattaagtaattagttaattttttaaaattaagtaattaattaattttttaaaattaagtagttaattttttttaattaagtaattaattaattttaaaaagtatttatttattttgagacaaagtctcactctgttgcccaggctggagtacagtggtccagcgtctcactgcaacctccgcccccccgagttcaagcgattctcctgtctcagcctccggagtagctgggactacaggagcctgataccatgccaggctaatttttgtatttttagtggagacggggtttcaccatgttggccaggctggtctcgaacgcctgacctcaagtgatctgcccaccttggcctcccaaagtgctgggatgacaggcrtgagccactgcgcccagccaataatttatttatttttgagacagggtctcactcggttgtccaggctgaagtgcagtagcacaatcatggctcactgcagtcttgacttctggggctcaagcagtcctcctgcctcagcctctcaagtagctgggactgcaggtgcacgccaccacacctcggtaattttataaattatttgtagagatgaggttctcattatgttgcccaggctggtctcaaactcctgggctcgagcaatcctcccacctctgcttctcaaagttctgggattacaggcgtgagccattgcacccatcctcattttccatttttgctttccaaaattcatctcctttataagccttaaaaatcagtatgggaaatactggggaatattgtcaggaaaagtaatataactatttgtcagagaaagaaactagggccagcatcatgcaacagcggggcataaggccctcccttccttacttcagcaggtgatgtgggcaaggcccttctccacatggctctgcctgatttctgacctctccttctcctattcctcctccagttgcagaggagaatcctaaggagagtaaaccccaagcaggcactgcccgcccacaggatgtgaaccgcagagaccaacagaggaatccaggcacctctaccacgccctcccagcccaattctgcgggtgtccaagacactgagatggtgcgtttggagctggtagggagcaggaggggtgggaagccytggagacttccatctgagactgctcccttgggcttggagacgtctccattgtctgtcctgggtgcttgcctggtgggccagaaggttggaatggggagctgggctggagcggttctaagctgcctactctcccttccccagggcccatgccgtagacatctggactcagtgctgcagcaactccagactgaggtctaccgaggggctcaaacactctacgtgcccaattgtgaccatcgaggcttctaccggaagcggcaggtgagactatttttcttctcctcctgctccagcagaaggctcctgccagggagtgggggcggtgctgcttacaaagctgcataaataagacactgccccatctttaaggatcttccaactttaggagaacatagagaatataatttattaaacaaacttagagaataatcaaccacacactgtgagagaaaacccacttaaggaatgccctaactcagtggctcttgaacttgaggcatcagaatcctccggagggcttatgccacacagatagctgagccccaccggcagccttcctgattcaggaggtgtggggtggggcctgacaatatgcatttctaacatgttccctcgtgatccggatttgggaacgtcactttgaaaactactgttccaggctagcagaatgcacacaatttattggttgaagagggggaactaaagagagggaacactgggccgggtgcggtgtctcatgcctgtaatcccagcactttgggaggccaaggctggtggatcacgaggtcaggagttcaagatcagcctgaacaacctggtgaaaccccatctgttttaaaaattacaaaaattagccagatgtggtggcatgcacctgtaatcccagctactcaggaggctgaggcaagagaattgcttgaacctggraggtggaggttgcagtgagcagagatcatgccaatgcattccagccagggcgacagagcgagactccatctcaaaaaaaaaaaaaaaaaaaaaaaaaagagagggaacccccgaggagacgctcaggtgtttttacatcctcagactcagatgtcccctctcattctcctgstggaagcctctggcctcactcctgacctgtgtgcctctctctccagtgccgctcctcccaggggcagcgccgaggtccctgctggtgtgtggatcrgatgggcaagtccctgccagggtctccagatggcaatggaagctcctcctgccccmctgggagtagcggctaaagctgggggatagaggggctgcagggccmctggaaggaacatggagctgtcatcactcaacaaaaaaccgaggccctcaatccmccttcaggccccgccccatgggcccctcaccgctggttggaaaragtgttggtgttggctggggtgtcaataaagctgtgcttggggtcgctggcttgtgtctctgtgtctgcctctcacaattctggaatccctggccctctctttaccccactacagctcactcacagcatttctcctttcctgtggatacctttagtccttcctgtgacagccaggcagaagcttcaagccatcaagcctcacagagctgcccaccaggagttgggagtgggaaggggagacactgagatcatggccttaatctgaagttgtgaccttgtttctaacactgatctttggacacaaagggaggggaaggattaatagttaatcccagcaggaacccagcaaagaggaactctcaaagcacatacccttctgttacttcctactaaaaaaagaaggaaattattactaatatatgagctcatcccatggccctgaaccatgtgattttacctggacaacctcattttgagcttacgataaccttgtgatatagggatttttacccctatttttcagaggaggaaactggcttaaaatttggggtcacttgcctgaaattatatagctggtaaatgacagagggaggtttgcatccggttcttccatatgtgacaatacctggtattccctaggtgctgaatacgtgtttgtttagtctcctttctgcctacatgctcacccaagcaggtgtcaggaagcggccctgtcagttcaggggccctgacactcagcctttcctggaggggccccagttccgtgagtagcacagtgccaaccccatcagaatattaccacatgtgtcaatcacacaccttgtggtgaaagcgagctgaacgcactgatacatgaagacatttctgactcctccctgaccttcagcctgctgggagagagactggaaggccagccatgctaggtgacaagcttctgagaggcaaagttcccctccccaagatgtacccagccactattcctgtgtgtgtgtggcggggtggatagcacccttggagctgggcatctggatggtggttggggtgttagggggatgtggcgatccctgcgacagacagcagagtgaggtctgaatctgagaagctctgcctccagatcagataacctatcgcactcccagaggccccctcctcctgaaaggactttagtctttggagctgtcacctgagctgagtgggacaagagctctacagggcaggccacactgcgaaggaaggaggcaacacgggcaagggctgcctgctgcccgctggagaccgcaccatggagccaggcggggcccgtctgcgtctgcagaggacagaagggctgggaggggagcgggagcgccaaccctgtggagatggtgagccgccctcgggggtgcagaaggcacaggcaagtgggggggaggcggggagagatgcgctatggagagaaggctccaactgcctgatgccaatccttcctgctgtccagagaggccaaggaaggtagaccctggcctcagcccagagccacccagctggaagatggaacagaaaagagctatgtcagagctgtggcctggccttatccttctgactgtttagccccagatagtgaatggagtagcttcccattccctgagtgccctgttcccagtaatgtcaccaggccccctgcttgcctatggcctcctcaccactggcaacagcaacttccccttctagtagccccaaccatgatactagatattggctggttggggtgagggcagctgctgagcacacaaagcatttcctgaccacaggatgcctctgggtctgcagaaccccaattcctcctgttgactgtgcctttgatccctcctcacaggaaacactgagacgcacagagccccggacttggtacaatggacccgacacatggaggtgagggatgtcagaggtcagaggtcaagtggacagatccttggtagcaggaagcaggagtgaggcttggtgataaagatgacttttttttttttttttttttgaaacaaagtctcgctctgttgctcaggctggagtgcattggcacaatctcggctcactgcaacctctgcctcccaggttcaagcgagtagctgaactacagatgagtgccaccaggtgtggctaattttttttttatatttttagtagagacggggtttcaccatattggccaggctggtcttgaactcctgacctcaagtgatctacccgcctcggcctcccaaagtgctgggattacaggtgtgagccacggtgcccagcctgatgacttgttcctgagtgcaaagatcggattcgaattaaggatggagatggaggggtttgaagcacaggtcccaaaggtcaccaaaagtcagccagtagatagagtcttcctgctagtgcggctggaggccaggggtgaggagtgacaatcggaggtgaccaggctggaattcagacccagggaggggaagccttgctcctgctgtcactccctgatcctcgctgctgccccaggaagccagaaggagatcaactctgggcagggatcatggcttgttcatctttttaccacagcacttagcactgcggggtcctaccccaccagcagacccatcaccaccccaccaatgcctgcccttccccccgcaggcctgccaccactgaacccccatccctgctgaccccccaggttgtttttttttttaaaaaaagcactgtgcctggcatagacagaaattcagtgaatgtctggtgaatgaaaggatggctgactggagggacagtgggctctaccctggctttgtcccgtaggctgtgaaggcacaattgctggagcaagcgcagggacaactgagggagctgctggatcgggccatgcgggaggctatacaatcctacccatcacaagacaaacctctgcccccacctcccccaggttccttgagcaggtgagtctggggaatggctgcgcgggctcctctgtagcaaggatcatgagctagaaacatcacgttatgtgcccttgccagctttatcaggaccgtgactccagccttccctcttccccccttgtcttcctaacactgacctccatctactgggcctcgctctgccctggccctgaccttctacccggtcctgccctctggccctagccctgacctttccctaccactccccttggctcccaagtattgaccttctgcatggccctgccctctgcccatttactttttcctgaccctgaacaaacatctcaattcaggacccaggagccatccctggggaaacagaaagttttcatcatccgcaagtccctgcttgagtaagtcggggtgatgacaagtaatgggaggaaaagaaagggctttggctaggggtcaaggtacctcatttctcatccccagcctctaggtggtttgtggagaggacttggaaagggtttctaaggtgcaggtcccctatttgccctaggcatggttgtggaagaaaggcctttagctggaagttctggatcgctaggccccatgcctcatgtgtacagtgtctgagctagttcacacaaccctgaggaccctcccacactgactttcgggcccctgtccctctagtgagctgatggaggtgcagcatttccgcaccatctaccacatgttcatcgctggcctgtgtgtcttcatcatcagcaccctggccatcgacttcattgatgagggcaggtaggtccccttcccacctgggacaggcacacctatctgatcagaccctctgggtcctcagtgccccacctgcccttggggcaagaggacacaggttccccctttggttattggacatgtaccaacattgctcccaacaacctttccacctgaaacactctctaggatcccttccttccccagccttggttggccctttgtctgtcctcccagggccggccactctcaaatgcttctcaatgacaccttgccctgaggcagatgtgtgtgtgtgtgcacacatgcacacccatacacactcctttccaagtcagttctattcaagtaacctccattgagcacctcccgagtaccagtcctagtggccagagaaatgaggggggcagaccccactcctgtctgtgaggcactcccagtcttgtggggaagacagacatgtaaccaagtgcctgggtgggtcatttcccccacagagcaccccatccaactgtgaggatgagcctcagagagctgtatacccctgggggtctgtattttcatacctcccactattcccagaccaaactgagggttggggctgctatttctcatggcccaataacgagatgcagatgaactggggaggaagtgagtttttatttctgtaaccagttacagggagaaggcctggaaattatcaccaggccaactaaaaattacaatttccagagcatatataccttctaagctctacatctatgtgtaggtgtgcattcatctaaagacataagtgattaacttcttttaatctataactaaggtctgagtcttgaagaccttcttctggagcctcagtaagtttacttaatctaaatgggtccaagtgctggggtgattacccttctcttatctcctgctaaataacggaggtttggggagtttcttcagacccccagcaaaacttgtttaatcatgctttgaggttcaggaaaggcctaggcaaaactcttggtgggcttttgttacattccagcctttgtataagggcactggtttttaacatttaacttaaccactcagtcagtactgaaacagttgttatggaggtctgcattagtgagacctgcttgtcacagtccccactgtcaatttacacgatttttatcatgcatggatatttatttatcatgagaatcgcagggagatggggagtcgtaatctttctggctacttcctgctgagagggggtcgtcgttatggggcaccaaaagcagcagtggagtggaagaggttgatttgttcgcagtagcactctctgtttcggggccttggaggcagcacctgctgaaacataatagtatgtaacagtacatataaataggctactgctcttttcttctgaagtttaagttgtctagtcttcagtttgcagggctttaagaaagcagagcttaggtttcagtgattaccaattaggaagaatgggggaaaatggaaaagaaagaggaaaaaattgaaaacattattttggagacctgtagccagaaaagttagaatttaatccaaactgcagaaaataataaaaactgaaaaacatcaggcaagactagaatttaacaacagatgtacttttttttttttttttttgagacagagtcttggtccgttgcccaggctggagtgcagtggcgtgatcttggctcactgcaacctccgcctcctgggttcaagcgaatctccaacctcagcctcctgagtagctgggactacaggcacgtgttactgtgttcggctcatttttgtatttttagtagagactgggtttcaccgtgttggccaggctggtctcgaactcctgacctcaggcgatctgcccaccttggcctcccaaagtgctgggattacaggtgtgagccactgagcccagccatagtttttgaaacataatttttctctctccagtttcccatttttattaaaagacagatcatagtaggactggtttgctttattatacttggtttaattatttgtatacagtacagcaagaataattagtttcacataggccttttaaattggctttgatggaacttcgttccatagaaggaatctgagataagtccttttaaagccgagcccagccatggatttgtaccaataaatacctatgagttgggtgaattcctcttctcttgaggttccaagataacttggggttcctggcctgtcagaaaatgacattctttacctaccacagatcagaaaccctggacagggactgtgtacacaaaatatgatgccagttttcaagggctttattggcttcataagtcaagttcgattccttaa

SEQ ID NO: 98271 - DNA, 13102 bp, Homo sapiens
tatgtttatagaggcttattccctaaaataatatttactggggcctcctcaaataaaaatactgtatttatagaggttttctctaataataatgacaattgaagatttctctaataatttattgaggcctatttaaatagaaatatttgccgagacttattctagtaatcatatttataggggcttactctagcaataataatgatataattatgactccagactcaggactccaacttacctgctcaacttacttactcaacattcccacttgaaaagaagaggcatctccaatctcacatatccaaaaataagttcctgatctcacacacagcctatgtgttcctcccatggtcttccccatcttaggaaatggcaaccccattttttattttacttatttgtttttttgagatggagtctcaccctgttgcccaggctggagtgcagtggtgcaatctcggctcactgcaacctccgcctcccctcctgggttcaagtgattctcctgcctcagcctcccaagtagctgggattacaggcgtctgccaccacgcccagctaatttttgtatttttagtggagacggggtttcaccatgttggccaggctagtctcaaactcctgacctcgtgatccgcccgcctcggcctcccaaagtgctgggattacaggtgtgagccaccacggccggccaaacaactcaatgttggcttttttttttctttctttttgagacaagggtctcactcttgcccaggctacaatgcagtggcgtgatcacagctcactgcagcctccacctcccacgctcaactgagcctcccacctcagcctcctgagcagctaagactacaggcatgcaccacccactatgcctgggtaattttttaattttttgtagagatggggtctccttatgttgcctagactggtctctgtctactggtctcaagtgatcctcccaccttggcctcccgaagtgctgggatcacatgcgtgagccaccccagctggcctgtgtctgcttttggtttcctgtaaatcctcaaagacagcacctggcacatggtaatcactcaaaagaacatttgttgaacaataaatctttattcaggccaactgacttacataaagtaagtgctgtttattgacttacataaagtattatttattgaaatgtactctaatgatactgagatttaatatctttttatcattataatagccattaaatattatgactagagtgcacctcaatagaaatgatgatgccttccataataactgtttaccattagcattcatttctttaatagaacgtaggttaattgaggattagtctttttaaattttattttattttattttttttgagatggagtctcactctgtcacccaggctggagtacggtggtgcgatcttggctcactgcaacttctgactcccgggttcaagcgattctcctgcctcagcctcccgagtagctggaattacaggtgcacgccaccactcccagctaattttttggggtcttccgtggcagatgggggctactgaggagctttcaagcccgggagaggttggaaggggctggagaaagttggaagagacctgggtgattcaaaaacactgacagtgcttagacaagactgacagagacctaagaaaaccaagtggccaagcaggcgacgtgagctgtgaaccccgaaaatctgagacaggtctcagttaatttagaaagtttattttgccatgtagtcacagctactcaggaggctgaggcaggagaatggcgtgaacccgggaggcagagcttgcagtgagccgagatcgtgccactgcactccagcctgggcaacagagcgagattccatctcaaaaaaaagaacaatagaaagtttattttgccaaagttgaggacatgcgcccgtgacacagcctcaggatgtcctgacgacatgtgcccaaggtggtcggggcacagcttggttctatacattttagggagacatgacatatcaatcaatagatgtaagaagtacattggtgcatccaggaaggtggggacaactcaaagcagggagggggcttccacgttacaggtaggtgagagacaaattgttgcattctttgagtttcttttttcctagatggagtctaactctgttgcccaggctagagtgcagtggcacaatctcggcttactgcaacctccacctcctgggttcaagtgattctcctacctcagtctcctgagtctgagattacaggcgtgcaccaccatgcccggctaatttttgtatttttagtagagatggggtttcaccatgttggccaggctggttttgaactcataacctcaggtgatccacctgcttaggcctcctaaagtgctgggattacaggcatggcctcttttgagtttctgataagcctttccaaaggaggcaatcagatatgcatcgatctcagtgagcagagggatgactttgaatagaatgagaggcaggtttgccctgagctgttcccagcctgactttcccctttagctcagtaattttggggccccaagattttcctttcacagagctctcaggaaaagcttcagaaggaggcctggggttttcctctggcaaccacagaccacatctggttgagaaagctgctggagatcctgcgagcaattctgtcttcaaggccccagctgccttgcctttgtgctcttaagagatggtcttggctggctgggtgcggtcactcacgcctgtaattccagcactttgggaggctgaagcaggtggatcacctgaggtcaggagttcgagaccagcctgaccaacgtggagaaaccccgtctctactaaaaatagaaagtcagccgggcatggtggcgcatgcctgtaatcctagttacttaggaggctgaggcaggaggatctcttgaacctgggaggcagaggttgctgtgagccccgatcatgccattgcactccagcctgagcaacaaaagtgaaactgcgtctcaaaaaaaaaaaaaaaaaaaaaaaaaagatgaccttcactcacccgctcttactggcttgtggtgtctgtcagagggcctgggcctgtgatcagcctgtgatacctacatgtgcagagactcactggagccaggtacaggtcacctctgtgtatgcatgcatgcatgggtgtgatggtggtggtagtgggacccacttggggagatgagaaatgaggttacaggcttggacctggaggtgaaaggagaatgaaaatggtcggagttaggtatgaattatagaggttgcagagaagaatgaaaagacagtggctgggcgcagtggctcactcctgtaatctcagcactgtgggaggctgaggcaggtggatcacctgaggtcaggagttcaagaccagcctggccaacatggcaaaaccccatttctactaaaaatacaaaaaaaaaaaaaaaattagcctggtgtggtggcgtacaaccataaccccagctactcaggaggctgaggcacaggaatcacttaaacccaggaggcggaggttgcagtgagccaagatcatgccactgtactccagcctgggtgacagagtgagactccatctcaaaaaaaaaaaaagggttgggatgggaatgagaatagggtcaagtttcaggaagaggatggggttgggtttggagtaggggctggggttaataatggagaggggtttggtttggagatagggtggggtttcagaatgagaatggagttagatttgagggtgggaagggtataagggttggaactgggaataaggatgatgttgagtttgggaattagaatgacgctaggtttggggatgggggcgaatcgggggatggggttgagtgtgtagttgggactgagaatggagttctatttgaggatgggggttggagctagggtggagattacgaatagggatgggattgggtatggagttgtgttcaggaatgggaatagggttaactttggggatagggatgggttgaatttgtggttggaactgggcttgatactgagtttggggatggagttgggtttggggttaaggatggctttgggtttgggagggggtcagggtcacagatagataggctgtgtgctctgacctgctactcactgcacaccatggcaggttttccggagacctggcctgctcatggcctctgccacctctgggagcctgtgctcataaatgtgttctcagagtggtgcagatctgagtgaaggatgggggctgccgatctgagtctctccaataaaggagaggaaccagtcttccaggtcatttcccattctccacatttgccagctgtcctgggactgctggaccagttcatctccaagtacagaggtcctcttccagactactccctatgtattagtctattctcacactgctataaataactgcctggccgggcgtggtggctcacacctgtaatcccaacactttgggaggccaaggtgggcagatcacctgaggtcaggagttaaagaccagcctgtccaacatggtgaaaacccgaaaatctactaaacctgaaatctactaaaaatacaaaaattagctgggtgtggtggcgggcacctgtaatcccagctacttgggaggctgaagcaggagaactgcttgaacctgggaggtggagattgcagtgagccgagattttgccactgccctccagcctgagtgacaagagtgagactctgtctcaaacaacaacaacaacaacaacaaatgcctgagactgggtaatttataaaggaaagaggtttatttgattcacagttcagcatggctggggaggcctcaggaaacttacaatcatggtggaaggtgaaggggaagcaagccactgtcttcacagagtggcaggaagaaggccaagcgaaggcaggaagagccccttaaaaaaacaccatatcttgtgaaaactcactcactatcacaagaacagcatgggggaagccggccccatgattcaattacctccacctggtctctacctagacacgtgaggattatggggacacaattcaaggtgcgatttgggtagggacacaaaccctaaccatatcaccgtttcacagaggtcaagttttcctgggccttctacctgggctgtggtaccgtcaccttatacctgctcgtagatgaggtgttgccaggacctgatggtgtggatggaagaggctagcgtttggggggctggagaaccctaaaccaaaatccttatgtcccccaacaccccctaggccccccgatcctggtgataaaggccaccaggctggagcccccacccaagcagggatgccactgaactcattaatcagatgaggatgtgggtatgtctgactctctgcaaacctttcagaattgtgattctctgctgtttgcctgcccttggcatatgctccaaactggggcccaggattctgagctcctgcccgcctcttcctccctcaggacctggagttcaggcccccagctccttcctccttaagccccaggagttctaactcccaagtcccctccttcagtagagaccctagacttggggacttcctctcccagaatggaagactgcataacccacaggaaagcatgacacatccccagctgtcccctccagccacatctgccctcccccttaatgtacaccctagcctgattggcttcctcccacctcagggcccccaagcctctctctctcacctcttccaggaagccccgacttggtgttgaaggttccatgggtgggagttgtagaatctgtgacagaggcaagtactaaaccaccgcccaaaccactgatgatctgacaccctcagtgccctcccccatcacacactaagcggggaactggaccccagggaggggagggaggacgttgcctgtgcaatccaggaagggagggtatgtgaaaagctaccgggaactgtgtgaaaccaaaccagcctcatgtgacaaagcrcaggacccctcactgccccaactgcttgctgttctctctttcttgggctctaaggacccaggagtctgggtgcacagcctccttctctctgagattcaagagtctgatcagcagcctcttcctcctmcaggacccagaagccctgagcttatccccatggagctctgccgrtccctggccctgctggggggctccctgggcctgatgttctgcctgattgctttgagcaccgatttctggtttgaggctgtgggtcccacccactcagctcactcgggcctctggccaacagggcatggggacatcatatcaggtaaggggaatgggtgtcctacagaggggttgccagcggggatgggtgctcartggtcttctcccgawcaggctacatccacgtgacgcagaccttcagcattatggctgttctgtgggccctggtgtccgtgagcttcctggtcctgtcctgcttcccctcactgttccccccaggccacggcccgcttgtctcaaccaccgcagcctttgctgcaggtaaggactctggactggackggggcatcgcgagccagcgaattcctgccgaggagctgagccatctctcttgtccttgtccccagccatctccatggtggtggccatggcggtgtacrccagcgagcrgtgggaccagcctccacacccccagatccagaccttcttytcctggtccttctacctgggctgggtctcagctatcctcttgctctgtacaggtgactatcctgcccactgccctggggagctttgggagggtccagttggggtccctgaggacagagggcaggggcaagtgcttaaactctttctggctccccaggtgccctgagcctgggtgctcactgtggcggtccccgtcctggctatgaaaccttgtgagcagaaggcaagagcggcaagatgagttttgagcgttgtattccaaaggcctcatmtggagcctcrggaaagtctggtccyacatctgcccgcccttccagcccttccccagcccctcctcttgtttcttcattcattcaacaaaatttggctggaatctggttattttgagattaattctgccaagacataagccaactgtctgccagctccatggtaggagctgggcaccaagggaaggtgagggcccaccaggccgaccagcctgcagggcgctcctgcccagtacgagtgcccggcccgtgtggacacaggctccaacccgtgtctatgtctccccttctccagcacttttcttcctccctgtgtctttctccctttagctggctctctttccttctctctccctctctgattttgtcccccttgccagaactcagcccttccttgcactcagtcagttctctttgcacatttccccatgctggggacactggcacgggtcagacccaggccctgcccagcaggggctcagtctgtggggtggtggggaggaggcacttacagaccagaagcagttaatacaggccagacagcagtcccagtgcagggagaatgccggaaaaagactgaccatattgtggagggatggagacgacttttctggagagagaacatttaggagcttcttaagggccagggaaaggtaatatccaggcagaggggcccaaagatgaacgtgcagaaaagtcaggagtcttgtggggatgaagatcggtaatttagggtcaggatatagaatgtggggggcgggggatggaaaatgaagagggagaggcaggtgggggctgtggcctctaatgtcatgctggactttctcttgaacatgatggggagttgggagaaaaattgtgggcaggggagggacagtgtcagctctgggtgccagaaagacccccctgtagacatggaggggaggccagaaggtgagggaggaacttggcaatgcaataggtgggacatgatgaggcctgacctgggaccaggaaaggagggaatgagccagacagattcaggggcaggaggagcaggacttagggacccaaggcttttcagggtgaagggcaagaagaaggtgaggacagtgcccaagggtctggctcgatgaactggatgggatggcagggccatccctaatatggtggaagacactaagctcagttggaatatggttgactattaaggccctgaggggcagccaggagcaggtgagaacttgagtcaggctcaggggagagaccttgggttggagatggagttttggatggagcattaaggagcactgaaactttggccgtgaggaggcttgcctggcaagagagtgcagggtggagcttcaagggatacccagatttacaagtgaaggggagaaggcagaggagcagaagtctgcagtcagacagctggggacctggagagcttctgcggtgcctagaatgtcaagggaagagaaggttgtttttttttttgagacggagtcttgttctatcacccaggctggagtgcagtggtgtgatcttggctcactgcaacctctgcctcccgggttcaagcaattctcctccctcagcctcttgagtagctgggattacaggcgtgcgccaccatacctggctaattttgtctttttttttttttttttgagatggagtcttgctctgtcgcccaggctagaatgcaatggcgcgatctcagctaactgcaacctccacctcccgggttcaagtgattctcctgcctcgcatccccagtagctgggattataggcacctgccatcacccccggctagcctggctaatttttgtatttttagtagagacggggttttgccatgttggtcaggcttgtctcaaacccctgacttcaggtgatctgcccgcctcggcctcctaaagtgctgggattacaggcgtgagccactgcgcacccggccaagggaaagagaagtttctaagaaagggctgggagtggtggctcacatccataatgtcagcattttgggaggccaaggtaggaggatcgcttgagcccaagagtttgagatcagattgggcaacatagcaagaccccatctctacaaaaaatcttaagaaaattagccaggtgtggtggcacatgcctgtagtcccagctactcaggaggccgaggcaggaggtttccttgagcccaggagttcaaggctgcagtgagctgtgatggtgccactgcactccagcctgggagagagagatggctcacgcctgtaatcccagcactttgggaggctgaggcaggcagatcacaaggtcaggagtccaagaccagcctggccaatatggtgaaaccccgtctctactaaaaatacaaaaattagccagatgtggtggtgtgcgcctgcagtcccagctacttgtgaggctgaggcagaagaattgcttgaacccaggaggtggaggttgcagtgagccgagatcgtgccactgcgctccagcctgggtgacagagcaagactccatctcaaaaaataataatgataataatgataaaagaaggactcggcctatcatgtaacggcccccaaagctgagatctgaatctaagcagtcactcagttgagagctgcgggggtgtatgcgatggtggtggggggagtgattatccctttaaacagccactgggggagggggttctggaacccctggcctcacagagacccagcctccctccccccgtctctctgggctctgtgtctaaggagccctagggcactgggtgtgagtcacttaggtgggcctgtgtggaggggtgtctggggaggacattgaacaggctgggctgaaagggcgttcggctgtcgggggaggtctctgggaagacaggttcctcacagcaaagcctgtggtgaaggtctcagaggcctctcaggggaagtctcaaggtctccagtaaggggaacgaggtctggagggaggaggttgtggatcctcaggcagggttgttgagggaggggggtctccaggtccccagaagcagggacctcaggcaggagtaccaggggaggagtgtggaggaagcgggctcctcagctgggggcctcggggtaggaaaggcctgggcccatcctgcccttgtggcccccggctgcagcctcagtggcatgggggtgaagcggagcctccagagtgggggcattctgctcagcctcgtggccaacgtcctcatggtgctctccacggccaccaactactggacccgccaacaagagggccacagtggcctgtggcaggaatgcaaccacggcatctgctccagcatcccctgccagagtgaggctccgcccgcccagatgtcagagggcatttcagacccccagggctcgggacacacagctgggcccatggcgagacgcccaccccttccaccccgggctcagttgcagctgtcccttgtcggccgaggccgccacgaaccccgcccctcgacttgtgggcttgtccccgaccccctccccgtcctggtagcggcagtaaccgcaggtcctgatgtgacctccaagtctcaatccaaacgcctgactcccggtcggtggagctcggctcctggccacacaccgggttgggggcaggagacgggagagcttccggttgcggccgaacccgtagtgactggggcggcgcccgcgggggctgatgcgcccgctctccccagccacgctggcggtgactgtggcgtgcatggtgctggcggtgggtgtcggcgtggtgggcatggtgatgggactgcggattcggtgcgacgagggcgagtcgctgcggggccagaccacgagcgccttcctcttcctcggcggtgagactgcagaccgccccaggcgggcaggcaggggcgggccctgggtgatggaggggcctggtcgccaggggaggggcttgaggtactcggccaggatccgaggggcagggctggaagaagccgagagaggtgggcggggctcgagacagagttcagagcgggaggagcaggaaggggcctgggccaggggcgggctgagaggcgataggcgtggtctgatagaagggggcgggtctgaaggggcgtggcctgggtgcagcccccaccaggcccagctagctcatcttgcggctgggcggggcccaggactgctgctgctgaccgccttgataggctacaccgtgaagaatgcgtggaagaacaacgtcttcttctcttggtcctatttttctgggtggctggccttacccttctcaattctcgcgggtaaactggacagcgggaagagggtggaggagactgcccagaagaccctcaccccagaggctccccagctgccctcccaggaaaccccggggacctctcggggactccccaacacactaacgactcccgcagacccggcagagacccccttggagccccaaaccccagtccccggggccctcccggccatccgccccagggcccaccttcctctccctgctccgcacccccgtccccccaggcttctgctttctgctggcagacatgatcatgcagagcaccgacgccatcagtggattccccgtgtgtctgtgactgcagcctgcctggggcagaataaaggaacggctttttttagcgctgcggctccgcgtgcttttctgcgggtcgtggggacgcaggcacggggttgcatagaggctcagggaagacataaggacatgaactcatagggaacgtggagacagggagacacagacatggagacacaagtctccatggattgggatgggaacagggacatgtgggaggggcggggccaggaggggacgtgggcctttggagagggtgtggagaggctgtggggacgacatggaggtgaagtagagacacggacaggggaggatacggatatggaagggacagggaacacggggatggagagagtggagagaccgacgcgcgaggattcagaggcgtgggaatacgagtaccgcgacttggagaggccgggaagaagtgggggatctggagagggagagcagatccggggataccgggaagtgtttataggaccgggaggatctataaactccgggcgcgcttccctccagtgcacgacctttcccctagttctctgccctgccctctccgccaggcctttccttctctctccaggtcccgctcgctccccgagatccgcttcccattggtttgcattgcttgccacacctcccttccttccggcctctcgattggtcctctgtcggggaggcgggctctgcagcggttgactggctgaccgtgctgcgcgcaggcgcagagaggggcgcggggggcgggggtggtggggcttctggactgagccgctgagggtgcgggctgaccctgtaagtggctgcggcgggaagatggcggagctgcgcgtgctcgtagctgtcaagagggtcatcgactacgccgtgaaggtgatcgggcccccctctcccacatccctgagtcccgcagccgtgtgcttccggggccacgagcgcacactgggtgggggtcttctcgtaacccccgacctctgccgctttaacccccaaacgtcaaagtcacctgagggcaaaaatccaagagtgaagttctaacatccgatcccttcggggtcacggccatgttctcttttccctcgttctggattcactctcttgataactgttcagagtgagttgctttctctatttcttacccactggaagaagtcacggtccctgtttaatgcacggagaaactgaggcacagagaggtcacccagctagagaagggcagagccgagagttctatccaggttcctctgactgctttcacccactaggctgcattacttaccattgtactcttatattacccgaaatgtgctatagagggagtcagacagggtcctgtggggccccagaagctgctttccaccctccatagccacagggtgagccaggaggctctagctagggagagagaagtgtgtttgctagagatgaaagttcaaggagccaacctgactgagctgggggtagctcacattctccatgaaagaggtgggggagggtgctctctgagcgcctggcttgttgtccccag

SEQ ID NO: 98272 - DNA, 13614 bp, Homo sapiens
atttttttatttttagtagagatggggtttcgtcatgttggccaggctggtctcgaactcctgacctcaggtgatccgcccacctcggcctcccaaaatgctggaattacaggtgtgagccaccacgcccggcccaagagggattttataaagtgattttcgacagctcttcctgaacccctgacacagctcaaggacttgtgtggttctgtcctctaggcttttctgtcaagcgagtccctgggcacgcgctagggcactcagcaagcaggacagccaaggccagggagccaccccagtgacagatcactaactcggcggggggcagacagagaactcgtccctgaggtgacatgtgagccccacgtgtgccctgtcagacaaggtggccttgctgagagcaggaggggcaagtgcgtggagcccaaagaggaaaacctgaagaaacaccaggcgctcccagacgagagggtgtggctggtcggggttgggccccgagatggaaacacgttttctgggcctggagtttctatcctgtggggtcatctctaagaaaatgaatcccagataatgaatacaaaattgcccagcctctcctgggtttttttttttttttttttttttgtgagacggagtctccctctgtcacccaggctggagtgcagtggcacgatctcggttcactgcaacctccgcctccctggttcaagcgattcttctgcctcagccccccgagtagctgggactacgggcacgcgccgccatgcccagctaatttttgtatttttagtagagacagagtttcactctgttggctaggatggtcttgaactcctgacctcgtgatccacccacctcagcctcccaaagtgtgtgtttacaggcgtgagccaccaggcccagcctttctcctggggtcttgaaagaggccctgaaggttaagcttcatcagcttcctgtaaaatgtgcccctgaacaggacagggtgttactgagttgccaaatacctattaaaatgttagatacacgcacatacccagaaacatacacacagccggacacacatacacacacacacacacacacacacacacacacacacacgaatacactctgagcacagcatttgttatgttttgaataaatgactaactaaacatccattactactactcccaataaaaacacttattgcagctggtcacagtggctcacacctgtaatcccagcacgttgggaggctgaggcgggtggattacctgaggtcaggaggtctagaccagcctggctaacatagcaaaacctcgtttctactaaaaatacaaaaattagccaggcgtggtggctcacacgtgtaatcccagctactcaggaggctgaggcagagttgcttgaacctgggaagtggaggttccagtgagctgagatcatgccactgcactccagcctgggcaacagagatagactccgtctcaaaaaataaaacaaaacaaaccactgtgtgccaggcactgttccaagggcttatttaattttcattacaactcaataaagtagatagtaccatcatccccattgtacagagtagaaaaatgaggcttagagtggtgaagcaatttcctcaaggtcacacagcaggaagtggacgcaggcgctgggcttggagtctgaggtctgcactattctagtagtgcacccactgtctcaggaagcagtgaccacatcaaactgtctcccccacacctggagctcaaattccagaaggggcgacagacaccagagcaatcaataagtaaacaacactgtggattacaaagtgtccacaccagcttccctctggggacaagctgggctctcagagggtgcccctgctcccacctccttcatggagaatgtgagtcactccctccactcagttaggttggctccttgaactttcatctctagcaaacatactttcctctccctttctagttgctaagtataggggaaaacacagcaaaacacagggacctggggcctgtgattttaaggaggcaagcagggaagtcctcccagagaaggtgatgtttgaaaaggaggtgaaagaggtcagggagtgagcacgtgattctgggaacagaggtggatcagacatggcccctctctgcagggagctaccagcctggggatgatggagtagggcagtggggaacatggggtaaacagaggatcccaatccagtctggcgagggctgatggaagcaaatctagggactgcagaagcccccagggatataccaaggcaacctgagggtgtagggtcaggggcttcctggaggaggcgatgccagggagaatcactaaattattattattattattttgagactgagtctagctctgtcacccaggctggagtacagggacacaatcctggctcactgcaacctctgcctcccaggttcaagcgattctcctgcctcagcctcccgagtagctgggactacagatacgtgccaccatgcctggctaatttttttatttttaggagagatggggtttcaccatgttggcctggctggtctcaaactcctgacctcaactgatccactcgcctcggcctcacaaagtacagggattagaggtgtgagccaccgcgcctggcagagaatcactagattttgatataatccatgagttggagatgggcaggacaaaggacagaaagcagaggtaggagggtggtgctggaagaaggcatggaacgggcgagccgcggcctggtctgtcaggacaggaggagcaggtcacagtggcagaagcacaaagggtatgggagggtccaaggagggaagtggacggctgaagcagaccatgaagaggaggctggaccacaaagcatcccaaatgccaggcagaggggctgcgactctgtcctgagggtgctggggagccacaggcaggctgggagcaggggagagcagggtgagctctgggtgcagaaacgcccctaaggctgggtagaggtgggctgagagggagagactgggagtgagggaggacccgggtgagggtccaggtgagacaatgacaccaagagacaatagggcaagaagggtggggggtggagaactgacagctttgggagaagggaaagagggtgggacagtacccaggtctaatctggtgtttaggaagctggcagggtctgaatcatttatttgttctgaaaaggacatcaacagacacatccagtgagacaggatgtaatgcagggagccctggggcactgcgggaggggaaggcagcaccctctggaaaggacagtagctgattcaacgcggccttcacgcttcccctctgttctctccctgagcacaccagagacatccatgtgccaggctctgtgctgagtgatgctgggaccagagctgagtcaaacgtgggcctgcaccatgggggagacggatccaatcccagacatgccaggcggggaaggccagggctgggatggagagaagaggcccagggagctgtaggactccaaagatgtgacagtaacgaacagtcagagcagggaggaaaccaagtgttgggtcccaggaccccaagaggaatgtgtctcaaaagggctacaggtgacatccctgtcatgtgctgccagaggcatcattaggacagggggcattgagggagataggagagcagagtctagagccagacttgcccggggtttcgatcgtaactctgccacttactggctgggagatctgactggcctcagtttcctcatctatccaatggaattaataatacaaagggtcggccaggcacggtggctcacacctgtaatcccagcactttggggggccgaggcaggcaggtggatcacctgaggtctggagtttgagaccagcctgaccaacatggtgaaaccccatctctactaaaaatacaaaaaattagccaggtgtggtggcacatgcctgtaatcccagctacctgggaggctgaggtaggagaattgcttgaactcgggaggcggaggttgcagtgagccaagactgcgccattgcactccagcctgggcaaaaagagcaaaactccgtctcaaaaaataaaaataaataataaataatacaaagggtactgaaaggactgaatgggttaatctctgcaaaggacttggaacgatgcctgccacgtaagtacccgctaaatgctggctgctatcatcactgacactttcatgctcaagtctggctcctgtaccctcttccccagcccactccctaagcaggcaggggcagtatcagtgtcaactttgtgaccctggttttgcccaccctgaggcctccagggtgccaggccctgcgctaggtaatgctgtggacacggaggtaagtccccaggctgatgggaaggacagacatggacagacagtcaccatcttcagtccagttcaggccaagcattgagagaaacgggcctgagagaccgtgtctgattcacctctgtccacaccagcttccctctggggacaacaagccaggcgctcagagagcaccctcccccacctctttcatggagaatgtgagctacccccagctcagtcaggttggctccttgaactttcatctctagcaaacacacttctctctccctagctagagcctcctggctcaccctgtggctatggagggtggaaagcagcttctggggccccacaggaccctgtctgactccctctatagcacatttcgggtaatataagagtacaatggtaagtaatgcagcctagtgggtgaaagcagtcagaggaacctggatagaactctcggctctgcccttctctagctgggtgacctctctgtgcctcagtttctccgtgcattaaacagggaccgtgacttcttccagtgggtaagaaatagagaaagcaactcactctgaacagttatcaagagagtgaatccagaacgagggaaaagagaacatggccgtgaccccgaagggatcggatgttagaacttcactcttggatttttgccctcaggtgactttgacgtttgggggttaaagcggcagaggtcgggggttacgagaagacccccacccagtgtgcgctcgtggccccggaagcacacggctgcgggactcagggatgtgggagaggggggcccgatcaccttcacggcgtagtcgatgaccctcttgacagctacgagcacgcgcagctccgccatcttcccgccgcagccacttacagggtcagcccgcaccctcagcggctcagtccagaagccccaccacccccgccccccgcgcccctctctgcgcctgcgcgcagcacggtcagccagtcaaccgctgcagagcccgcctccccgacagaggaccaatcgagaggccggaaggaagggaggtgtggcaagcaatgcaaaccaatgggaagcggatctcggggagcgagcgggacctggagagagaaggaaaggcctggcggagagggcagggcagagaactaggggaaaggtcgtgcactggagggaagcgcgcccggagtttatagatcctcccggtcctataaacacttcccggtatccccggatctgctctccctctccagatcccccacttcttcccggcctctccaagtcgcggtactcgtattcccacgcctctgaatcctcgcgcgtcggtctctccactctctccatccccgtgttccctgtcccttccatatccgtatcctcccctgtccgtgtctctacttcacctccatgtcgtccccacagcctctccacaccctctccaaaggcccacgtcccctcctggccccgcccctcccacatgtccctgttcccatcccaatccatggagacttgtgtctccatgtctgtgtctccctgtctccacgttccctatgagttcatgtccttatgtcttccctgagcctctatgcaaccccgtgcctgcgtccccacgacccgcagaaaagcacgcggagccgcagcgctaaaaaaagccgttcctttattctgccccaggcaggctgcagtcacagacacacggggaatccactgatggcgtcrgtgctctgcatgatcatgtctgccagcagaaagcagaagcctgggggracgggggtgcggagcagggagaggaaggtgggccctggggcggatggccgggagggccccggggactggggtttggggctccaagggggtctctgccgggtctgcgggagtcgttagtgtgttggggagtccccgagaggtccccggggtttcctgggagggcagctggggagcctctggggtgagggtcttctgggcagtctcctccaccctcttcccgctgtccagkttacccgcgagaattgagaagggtaaggccagccacccagaaaaataggaccaagagaagaagamgttgttcttccacgcattcttcacggtgtagcctatcaaggcggtcagcagcagcagtcctgggccccgcccagccgcaagatgagctagctgggcctggtgggggctgcacccaggccacgccccttcagacccgcccccttctatcagaccacgcctatcgcctctcagcccgcccctggcccaggccccttcctgctcctcccgctctgaactctgtctcgagccccgcccacctctctcggcttcttccagccctgyccctcggatcctggccgagtacctcaagcccctcccctggcgaccaggcccctccatcacccagggcccgcccctgcctgcccgcctggggcggtctgcagtctcaccgccgaggaagaggaaggcgctcgtggtctggccccgcrgcgactcgccctcgtyrcaccgaatccgcagtcccatcaccatgcccaccacgccgacacccaccgccagcaccatgcacgccacagtcaccgccagcgtggctggggagagcgggcgcatcagcccccgcgggcgccgccccagtcactacgggttcggccgcaaccggaagctctcycgtctcctgcccccaacccggtgtgtggccaggagccgagctccaccgaccgggagtcaggcgtttggattgagacttggaggtcacatcaggacctgcggttactgccgctaccaggacggggagggggtcggggacaagcccacaagtcgaggggcggggttcgtggcggcctcggccgacaagggacagctgcaactgagcccggggtggaaggggtgggcgtctcgccatgggcccagctgtgtgtcccgagccctgggggtctgaaatgccctctgacatctgggcgggcggagcctcactctggcaggggatgctggagcagatgccgtggttgcattcctgccacaggccactgtggccctcttgttggcggrtccagtagttggtggccgtggagagcaccatgaggacgttggccacgaggctgagcagaatgcccccactctggaggctccgcttcacccccatgccactgaggctgcagccgggggccacaagggcaggatgggcccaggcctttcctaccccgaggcccccagctgaggagccygcttcctccacactcctcccctggtactcctgcctgaggtccctgcttctggggacctggagacccccctccctcaacaaccctgcctgaggatccacaacctcctccctccagacctcgttccccttactggagaccttgagacttcccctgagaggcctctgagaccttcaccacaggctttgctgtgaggaacctgtcttcccagagacctcccccgacagccgaacgccctttcagcccagcctgttcaatgtcctccccagacacccctccacacaggcccacctaagtgactcacacccagtgccctagggctccttagacacagagcccagagagacggggggagggaggctgggtctctgtgaggccaggggttccagaaccccctcccccagtggctgtttaaagggataatcactccccccaccaccatcgcatacacccccgcagctctcaactgagtgactgcttagattcagatctcagctttgggggccgttacatgataggccgagtccttcttttatcattattatcattattattttttgagatggagtcttgctctgtcacccaggctggagcgcagtggcacgatctcggctcactgcaacctccacctcctgggttcaagcaattcttctgcctcagcctcacaagtagctgggactgcaggcgcacaccaccacatctggctaatttttgtatttttagtagagacggggtttcaccatattggccaggctggtcttggactcctgaccttgtgatctgcctgcctcagcctcccaaagtgctgggattacaggcgtgagccatctctctctcccaggctggagtgcagtggcaccatcacagctcactgcagccttgaactcctgggctcaaggaaacctcctgcctcggcctcctgagtagctgggactacaggcatgtgccaccacacctggctaattttcttaagattttttgtagagatggggtcttgctatgttgcccaatctgatctcaaactcttgggctcaagcgatcctcctaccttggcctcccaaaatgctgacattatggatgtgagccaccactcccagccctttcttagaaacttctctttcccttggccgggtgcgcagtggctcacgcctgtaatcccagcactttaggaggccgaggcgggcagatcacctgaagtcaggggtttgagacaagcctgaccaacatggcaaaaccccgtctctactaaaaatacaaaaattagccaggctagccgggggtgatggcaggtgcctataatcccagctactggggatgcgaggcaggagaatcacttgaacccgggaggtggaggttgcagttagctgagatcgcgccattgcattctagcctgggcgacagagcaagactccatctcaaaaaaaaaaaaaaaaagacaaaattagccaggtatggtggcgcacgcctgtaatcccagctactcaagaggctgagggaggagaattgcttgaacccgggaggcagaggttgcagtgagccaagatcacaccactgcactccagcctgggtgatagaacaagactccgtctcaaaaaaaaaaacaaccttctcttcccttgacattctaggcaccgcagaagctctccaggtccccagctgtctgactgcagacttctgctcctctgccttctccccttcacttgtaaatctgggtatcccttgaagctccaccctgcactctcttgccaggcaagcctcctcacggccaaagtttcagtgctccttaatgctccatccaaaactccatctccaacccaaggtctctcccctgagcctgactcaagttctcacctgctcctggctgcccctcagggccttaatagtcaaccatattccaactgagcttagtgtcttccaccatattagggatggccctgccatcccatccagttcatcgagccagacccttgggcactgtcctcaccttcttcttgcccttcaccctgaaaagccttgggtccctaagtcctgctcctcctgcccctgaatctgtctggctcattccctcctttcctggtcccaggtcaggcctcatcatgtcccacctattgcattgccaagttcctccctcaccttctggcctcccctccatgtctacaggggggtctttctggcacccagagctgacactgtccctcccctgcccacaatttttctcccaactccccatcatgttcaagagaaagtccagcatgacattagaggccacagcccccacctgcctctccctcttcattttccatcccccgccccccacattctatatcctgaccctaaattaccgatcttcatccccacaagactcctgacttttctgcacgttcatctttgggcccctctgcctggatattacctttccctggcccttaagaagctcctaaatgttctctctccagaaaagtcgtctccatccctccacaatatggtcagtctttttccggcattctccctgcactgggactgctgtctggcctgtattaactgcttctggtctgtaagtgcctcctccccaccaccccacagactgagcccctgctgggcagggcctgggtctgacccgtgccagtgtccccagcatggggaaatgtgcaaagagaactgactgagtgcaaggaagggctgagttctggcaagggggacaaaatcagagagggagagagaaggaaagagagccagctaaagggagaaagacacagggaggaagaaaagtgctggagaaggggagacatagacacgggttggagcctgtgtccacacgggccgggcactcgtactgggcaggagcgccctgcaggctggtcggcctggtgggccctcaccttcccttggtgcccagctcctaccatggagctggcagacagttggcttatgtcttggcagaattaatctcaaaataaccagattccagccaaattttgttgaatgaatgaagaaacaagaggaggggctggggaagggctggaagggcgggcagatgtaggaccagactttcccgaggctccagatgaggcctttggaatacaacgctcaaaactcatcttgccgctcttgccttctgctcacaaggtttcatagccaggacggggaccgccacagtgagcacccaggctcagggcacctggggagccagaaagagtttaagcacttgcccctgccctctgtcctcagggaccccaactggaccctcccaaagctccccagggcagtgggcaggatagtcacctgtacagagcaagaggatagctgagacccagcccaggtagaaggaccaggagaagaaggtctggatctgggggtgtggaggctggtcccaccgctcgctggtgtacaccgccatggccaccaccatggagatggctggggacaaggacaagagagatggctcagctcctcggcaggaattcgctggctcgcgatgccccagtccagtccagagtccttacctgcagcaaaggctgcggtggttgagacaagcgggccgtggcctggggggaacagtgaggggaagcaggacaggaccaggaagctcacggacaccagggcccacagaacagccataatgctgaaggtctgcgtcacgtggatgtagcctgatcgggagaagaccactgagcacccatccccgctggcaacccctctgtaggacacccattccccttacctgatatgatgtccccatgccctgttggccagaggcccgagtgagctgagtgggtgggacccacagcctcaaaccagaaatcggtgctcaaagcaatcaggcagaacatcaggcccagggagccccccagcagggccagggaccggcagagctccatggggataagctcagggcttctgggtcctggaggaggaagaggctgctgatcagactcttgaatctcagagagaaggaggctgtgcacccagactcctgggtccttagagcccaagaaagagagaacagcaagcagttggggcagtgaggggtcctgcgctttgtcacatgaggctggtttggtttcacacagttcccggtagcttttcacataccctcccttcctggattgcacaggcaacgtcctccctcccctccctggggtccagttccccgcttagtgtgtgatgggggagggcactgagggtgtcagatcatcagtggtttgggcggtggtttagtacttgcctctgtcacagattctacaactcccacccatggaaccttcaacaccaagtcggggcttcctggaagaggtgagagagagaggcttgggggccctgaggtgggaggaagccaatcaggctagggtgtacattaagggggagggcagatgtggctggaggggacagctggggatgtgtcatgctttcctgtgggttatgcagtcttccattctgggagaggaagtccccaagtctagggtctctactgaaggaggggacttgggagttagaactcctggggcttaaggaggaaggagctgggggcctgaactccaggtcctgagggaggaagaggcgggcaggagctcagaatcctgggccccagtttggagcatatgccaagggcaggcaaacagcagagaatcacaattctgaaaggtttgcagagagtcagacatacccacatcctcatctgattaatgagttcagtggcatccctgcttgggtgggggctccagcctggtggcctttatcaccaggatcggggggcctagggggtgttgggggacataaggattttggtttagggttctccagccccccaaacgctagcctcttccatccacaccatcaggtcctggcaacacctcatctacgagcaggtataaggtgacggtaccacagcccaggtagaaggcccaggaaaacttgacctctgtgaaacggtgatatggttagggtttgtgtccctacccaaatcgcaccttgaattgtgtccccataatcctcacgtgtctaggtagagaccaggtggaggtaattgaatcatggggccggcttcccccatgctgttcttgtgatagtgagtgagttttcacaagatatggtgtttttttaaggggctcttcctgccttcgcttggccttcttcctgccactctgtgaagacagtggcttgcttccccttcaccttccaccatgattgtaagtttcctgaggcctccccagccatgctgaactgtgaatcaaataaacctctttcctttataaattacccagtctcaggcatttgttgttgttgttgttgttgtttgagacagagtctcactcttgtcactcaggctggagggcagtggcaaaatctcggctcactgcaatctccacctcccaggttcaagcagttctcctgcttcagcctcccaagtagctgggattacaggtgcccgccaccacacccagctaatttttgtatttttagtagatttcaggtttagtagattttcgggttttcaccatgttggacaggctggtctttaactcctgacctcaggtgatctgcccaccttggcctcccaaagtgttgggattacaggtgtgagccaccacgcccggccaggcagttatttatagcagtgtgagaatagactaatacatagggagtagtctggaagaggacctctgtacttggagatgaactggtccagcagtcccaggacagctggcaaatgtggagaatgggaaatgacctggaagactggttcctctcctttattggagagactcagatcggcagcccccatccttcactcagatctgcaccactctgagaacacatttatgagcacaggctcccagaggtggcagaggccatgagcaggccaggtctccggaaaacctgccatggtgtgcagtgagtagcaggtcagagcacacagcctatctatctgtgaccctgaccccctcccaaacccaaagccatccttaaccccaaacccaactccatccccaaactcagtatcaagcccagttccaaccacaaattcaacccatccctatccccaaagttaaccctat

SEQ ID NO: 98273 - DNA, 33150 bp, Homo sapiens
  misc_feature (1)...(33150): n = A,T,C or G
tcccaaagtgctgagattgcaggcgtgagccaccgtgcccagcagagatttcctttcgacacaggaattccatcacaccactgtgcctatcaaaaggtgctcacttttgtgcaaaaaaagcttctgcctcttttttttttacaatccattcgcaaaaccgcacaccagccaaactgttctctgtggtctaccaggccccactggctctggacccatctgaccttatcgccctcctctctctctctcctcccgcactctggggagccacactggcctcttccctttcccaagcacaccctacccggggcctttgcctctgtctggggcacccttccctcacatcgtcagccttttctggttctctgggtcctagctcgaatccacgctcatcagaagggtcttcccgggccactctgtctcaccccatctcagctttcagcactctctgccatatcaccattgtttgcatcatattttgtattattatttatgagtgtactttgttgttgttgtcattttgaactttttaatgtaaataccattgttcacagctgttttctccccttcagaacagtgcctgtaccagatttggaactcaatgaatgtttgttgaatgaatgaatgaatggcctaatttaactcttacagcaaaccccattggttcatttcagtggttctcaaccatgactatgctgagaatctcttggagagtttaataaaaaatactgatgttcaaacccaaacccagtaggttctaatttaattgatctggggttgggtgagtctgggcattattattattttttaaaatcctcaagttgatcctaatgtgtagccatctatacaccaaaactgacacttaaaacttaaactggtgactcctggtagagaaaagcctcccaaggcagggcccatcagtcagatttcccattttcactgaagctcatacctgcaggaagccaaggccactcccagggttcctggggccaaggtggggctgtgctgggggtggggccacaaactctgtggcccttaagaaggaaggttgtagcctgaagaggaggctcctggcttctccttgtgatcagggcaggacccgcagacgactgggcattctaaagaatccacaggcagaaatgaagtcccttcctgggcacacagaggccacagcagcctcagcagcaaagttctgagttctggggttctagaggaccaggggtgaccctgtagaagaatgggccattgttgagtaagagggggccctgcctggcagcccttgctgagtttgcttgaggggctagaaacaaaactcagtgtggggtgctgggtatggcccaggagggctctgaactcagtgcctatagattggaatttgaatcccagctctgtcttgaacagctgtatggccttgagaatgtcacttactctttctgaggttcagtttccatgcctgttacatggcatctaactcatgggggtgttgtaagcaaagtaaattatgtggaatttagaagataattaatgatatgaagaaaaataaaacctggaaggatgatgaggaacgcctgagagggggatgggataaaataagaggatttatgcaaaacgagnnnnnnnnnnnnnnnnnnnntcagtacctagaaggcaggagcccctcacgcatcaccaccctggcctcatctcctaggggagaaagatctccactcaccctgctccagccacactggtgtccctgccagtcctccaatacaatgtctgggcctctacacttgtggtttcccctgttagggaggctcttcacccaggtggactcagggttcaccccttagctcgttccagtctttgcccaaatgtcacttccacagttgggcctttcctggccactttgtttaaatttgtaagtgccccatccccctctcaggcgttcctcatcctccttccaggctttattttccttcatagcattaattttcttctaaactccacataatttactttgcttacctggtgataggtgctcagtaaatatttgttgaatgaataaagaaaaggctgttgatattattagcatcgttattactgtcagagtttgcagcctttggctatctgctgcccaactgttattaaatactgatggagatgactaacattcatttcactaaattttaacatctgtgggttttagtcctagcgctttgctcttctctttcttttctttttctttgagacagtgtagtggcgcgatctccactcactgtagccttcacctccagggttcaagcggttctcctgcctcagcctcctgagtagctgggactacaggcatgcaccaccacgtctggctaatttttgtatttttagtagagacggggtttcaccacattggccaggtcggtctcaaactcctgacctcaaatgatctgcctgcctcggcctcccaaagtgctgggattacaggcgtgagccacggcatgcggccccactcttctctttccatacttaacttccatacttttgttggcttgtttaaatgcatgacttcaaatacacccctttataagttactctctcatttactctccaggatttgatcaattgattacatttactattaagaccgttttccatctgcctattagaaaagctctttttggttgaaccacactcactgaatatctgaatgtcttaatttgaactcatcatgtccctttcaacttttcttggcaattattccttttctggatgttgtgtttgcaaataattcctgggatgtgtttgactcttttttctcccaggcctaaatcaacaatctagtctggcatatattattttgacatctttcacacttgtcaactgttagtcacaaactaaaacacttgggttattatcccaaatgtccttcattcattttccttcactcttgcacacagttgtttcttgacataacataggcacttttatgatgatactcatttactgataaagctgctgctgctttttttttttttgacagagtcttgctctcttgcccaggctggggtgcagtggtgcaatcttggctcactgcaacctccgcctcctgagttcaagtaattctcctgcctcagcctcctgagtaactgggattacaggcatgcaccaccacggccggctaatttttgtatttttagtagagacgaggtttcaccattttggccaaactggtctcaaacgcctgacctcaggtgatccacctacctcggcctcccaaagtgctgggattacaggcgtgagccactgtgcccggcttaaagcttctttttataaaataacattaatttctttctgattagaaaagaacaggatttaatttctaaaacatagaacatacagaaaaaatgagttaattgaaatcatacatcatcttacttagagaaacattcatattttgttacgtatgggattaatatatactttttaaaaataaaattgtgattatattgtctataaagtgtatccagttctttcattgaacatttatgaaacatttgtcatgacttatgattatatattcttctaaaaagtactgattgagagtaacgatattgagattagactgctggagaaataatgttcaacagtccgtccacccctctgagggtagagattgtatctttacatctggctgcagattcagagatgaggttgtatcctgggtcgcagtagaggactgaatgctgagcaaatggacattgagggctcataagatggttccctgtggccaagcttggcggcaagggagaggagctgcctgcgtggaaatgggccaaactggccaggccaggaaatgagacagagtcacaggggaacaacatacagtgatggataaaaatccagggtgaagtttgaatcactgcaaagataggcagttaatggctcagcatcctctctataggacacccataaccctgtcatttgcaacaacatggatggaactggaagtcattacattaagggaagtaagccaggcatagaaagcaaacattgcacattctcgcttacctgtgggagctaaacaggaaaacaaatgaactcatggagacagtagaaggacggttaccagaggctggaaagtgttgcagggagttggaggagaagtggggatggttaatgggtacaaaaaagtagtaagagtgaatgaataaggcctagtatttcctagcacaataggatgactatcttcaaaaataatgtaaccatacacctaaaataactacaatagtataaatggattgtttgtaacacaaaggataaatgtttgaggtgatggacaccccatttaccctgatgtgattctaacgcattgcatgcctgtatcaaaatatctcatgtaacccataaatgtatatacctactatgtacccacaaaaattaaaaataatttaaaaagaacttcagagaacaaacaacaaaaagaccggtatggctggagcagactgagacaggaggtttgaggcgaaaggctcacaggaattcctgtggggccctgtaggcaattgccaggactttttttttttttttgagacggagtctcactctgtctcccaggctggagtgcagtggcacgatctcggctcactgcaacctgtgcctcccaggttcatgccattctcctgcctcagcctccagagtagctgggactacaggcgcccaccagagtagctgggactacaggcgccaccacgcctgactaatttttgtatttttagtagagacagggtttcgccgtgttagtcaggatggtctcaatcttcagacctcgtgatccgcccgccttggcctcccaaagtgttgggattacaggcgtgagccatcccacccggcaatcgtcaggactttggcttggactgtgagtgagatagggagttgcaggaagctttttcaaaaaaccacctttgggccaggtgcagtggctcccacctataatcccagcactttgggaggccaaagcaggcagatcacttaaggtcaggaatttgagaccaacctggccaacatgttgaaaccccatctctaccaaaaaaatacaaaaattagccaggcatggtggtgcatgcctatattccccgctactcgggaggttgaggtgggaggatcgcttgaacccgggaggtggaggttgcagtgagccaagattgcgccactgcactccagcctgggcgacagagcaagagcctgtctccaaaaacaaacaaaaaaacccaaaaaacttcttttggcagtgtacaattattattactattttttgtagtaaatttacagagatctgcagtcatgaccacaatccaaatttagaacaattctatgacttcaaagggatgccttagagccgttccctggaaccactcctctgttctctctgtatctactggagggttctaagcagaaaagaaacaaagtctgacttatattattatcactattgcaccttttctgttaaaacatcataatcccagcactttgggaggccgaggcgggcggatcacgaggtcaggagatcgagaccgtcctggctaacacggtgaaaccccgtctctactaaaaaatacaaaaaattagccgggcatggtggtgggcgcctgtagtcccagctactcgggagcctgaggcaggagaatggcgcaaacccgggaggtagagcttggggtgagccaagatcgcgccactgcactccagcctgggccacagagggagactccgtctcaaaacaaacaaacaaacaaaaaaaaaaacccgtcataatcttcctgttgctttttccgattagatggcgacttgaatttttagggaatacatccaccagtttgggcacacccaccaggcacgacagttgaggtctgatcttccagccactgtgagtactgagaaaacttggcagggggccactctcactggctcaatgcaccctgaccactggaagccactgtgtcagctgctgggttctggctctgcccactcttggctgcatttggggctgaagttccctgtgggaggctgttttctgagggagctgagtgtttacagccactcagccctgctctgctcagctgaagcagaaaacagagaccttttgcattactttggttcaagagcaaggtaatttggaaagaaatttttcagacgaaggtatcagctgcctctgaggcctttgctgattaaatcaagaagtgacatctgaaatggtgtcggggaatgggaaggaggcctggggattctaaattatcagctgtttaggtggctgaggaatccaggggtgggagactgaggaaaaggactggggcagagctcagttcaggagaggtgaggggcgggagaggtgaggggcgggagaggtgaggggcgggagaggtgaggggcgggagaggtgggtcagagaaaggaagtctctgaggctgcaggcctaggcctggtggccactgcagaggctggggcctatgtttttccaggaagtgaaacctgaaagtcacttttcccctttaagcctcattttctttatctttaaatggagaaaataacatttacagcatagagttgttataaagatttcatgaaataatgcctctaagcactcttaaaatgcttggtacacagtaggccttcaatagactgaagctgttatggtttttcttgttgtgccacgttattattgttggttgttattaccrtattttgttattattattactaagaggaatttaatgcaaggaaactgaaactgaggtcacacgcagctcccgggccagtgcctctcaaactttaacatgcatatgactcatctgaagatcccgttaacttgcagattctaattctacatatgtagggtggggtcccatctgctggtcccaagatcacactttgagtagcaagacactaaaactgggctgggcacagtggctcacatctgtaatcccagcacttgggaggccgagttgggaggatcacttgaggccaggggttcaagccctgcctgggcaacatagtgagatcctgtttctacaaaaaaactttttaaaagttagccacacatggtggctagtgcctgtagtcccagctactaggaagcctggggtggaaggactgcttgagtttgaggctgcagtgagctatgatggcaccaccgtactctagcctgggcagcagagtgagactctgtctcaaaaacaacaataataaaaattttaaaaataataaaattaaataaaaaaattaaaaagacactaaaagcccatcatgccatacagcagccacttgtggcttttgagcacttgaagtgtggctagtccaaattgacatgtgtttgtaagggtaaagtctatttcagattgtgaggacttagtaccaaaaaaaacaaaaaataaataaaagtatgtaaaatatctctttaacaatttattcttctattgactaggaattgaaatggtcatactttggctctatctggttaaataaaatgttttattataataaatctcacctgyttctacttttcttaatggaagtactagaacattgtaaattgcacaggtggctcacgttctatttctgttggacagtgctgccctagagctgtcttcagctttgcaaggtcagttcaggattggccaaagcctttttgagggattccttttgaagtattgaggtttgagaagtgggatctgagttctgacctcagacccagatacccacaagtcagtgagaggtcaaaaggacagacctcggggtcagaggagagaaatgaccatcacacagcagaactgagactgaaggtggagagtttattctacaagtcagtaaggatcacagtcaccatcagcactaaccacaggtttctcctaacctatgtgttgtccccaaagcccagaatttatgacaatgccctctttcctctctttggtgacagacaggaggcgactgcatgagaccatggctgagacacctagtcctccaggcactgaggaactccagggcattctgtgggtctcatgggaagccagcacctctacctgttcctcagaagatcgtggccacctgggaagccatcagcctgggaaggcagctggtgcctgagtacttcaacttcgcccatgatgtgctggatgtgtggagtcggctggaagaggtgaagcctgttctgtcctagagtccatctggggcatctgaggctgccctcatgtaccacaatgagactcaaggctccaagcatgttgatgaggaaatttggacctgggaattttgctagttctaaaatgtaaactgttggcatttgagacttaggaaaaaattctgagtcagtgttgtgagccttagacatgcttgttccttctctgaagtgtcctgcattcttgagcccaaatcacacagtgagacagttatgtcccttccgattcccttccagttgttcatcaactgaaggaggaagttttgttttgctgctactctgtctttgatgtttttctctcactgtcacgcccttctcttctaaataaggaaagaaggccgggcgcggtggctcatgaccataatcccagcactttgggacaccgagaagggcagatcacctgaggtcaggagttcgagaccaccctcaccaacatggtgaaactccgtctctactaaaaataaaataaaaaaaaattacccaggcatggtggcgcacacctgtagtcccagctactttggaggctgaagcatgagaattgcttgaactcgggaggcagaggttgcagtgagccaagatcatgccactgcactccagcctagacaacagagtgagactccacctcaaaaaataaaataaaatacaacaaaacaaaataaaataaggaaagaatagggctcaggctcaaagctttttgcagatcataacagatacatagaattgaataagataaccctgatttctttgtgtgtctctgtgcatctgctttcttctttattttcccttatatctgtgtctgttgggtctctctatttcatggttaccttttatttgtgttacatgatactaacttttcatttatawgaggaagacatacttctaaaactgtatttcaaccaatgtgaagcttaaccaatgagaaaagcctttkccctaggggtttttgtccaaaacaattacggacaaatgtttaacttcattgttgcctaaggtggtggataacagtaggcacaaacaatagattcaccaaaaagtgaaaaaagaaaagctggagaatacaaaactggaaatataaaatttaattcaaagaattgtattcatgttaattataagaagagattgtttaaagaaaaaatatgaagtaaatggcattgttagtagatacaataaaattaactgtcagcagatgtagtgaaacttatgaaggtggtatgaggatgactgagacttaaaagcaggatttgcagtcagatagacattgttcatccgtgtacttgaagtgtgaccttggacaagtgccctaagttctttagatctcaactttctcatctgtaaaatggtagtcagaccatatgctacttagagtaatagtgagaattaaatgagaattgcatgtaagacatgaagccaggatgctccattcctgatggcctgcaaaaatctaagttctttttgcaatactaggggtatccttagaagacttctcctaatgataaaaacaagcaagcaggattaagtcaggaaaaaaaatggtagaataaggactttccagctatgtggtagccttgaaaaataacagcccccatttctggtgcatcacggcaaccattagatgggccagaatggagttggagttttttcaaagcttcacttatgaagaactgttgttatttgagctgcccattggttctttggaagaccctacttgtaaaactgtatttgaatcaacttgaagctcaaccaatgagaaaagccttttccctgggggtttttgtccaaaacaatcacagacaaatgttttagcttcattgttgcctaaggtgatggataacagtgggacaaacaatagattcaccaaagagtgaaaaaagaaaagctggagaatccaatgtctatgggagctttaaaaaattctattgtattcctggaaatctagaaatcaacacacctaagtaaggctgtgtgctttcctagggctttgcacacgcttagaaaagatctgaggaaactctaagctcgcacttctggcagactgagagttggagcatgcaggaaattaacactaaggcaggattgttaattgcctggctgagtgctaaaggtgtgccccaacacccacccaaagactgggagatttattggtttcaggcatttaaagatatttctgtctaatcataagatgactactaagctaaccaagtagatatctcagtggccacacagaacaaataatgcagacttcacagaaatggttcacaaaaatcactaaacaaatgacaacaagcagcaacagcaaaccaaactctggggagttgtggggaatgggtgggggtggatctgatttcctgagtaatcacatgatgtaattttaaatttatagttttcaacaaaaatttacaagatacgcaaagaaactagaaagagcatggcaatggttatcaaaataatgcaccccttccccaagatttttataccttaatccctgaaacctgtgagtatgttatcttacatggcaagagactttgcaaacatgattatactaaagatattcatatgaagagattattctggattatctggatgagcctaatataatcataaggtaccctatgagaaggcaggagggtcagagtcagagaaggagatgtgacaatgaaaacagaggtgggagtgatgtggggccacgatccaaggaatgtgaattgcctctgaaaactagaaaatgcaaggacacaggttctccactaaagcatccagtaggaaaacaattcttctgacaccttgatgttagtccactaagactgattttgaactgtttatctccagaactataaggctgtatatttgtgttgttttatgcaattaagtttgtgataatttattacagcagcaatagatgggattattcaaaaccaatacagattttggcaccaagagtagtaatgagagctgtaataaataccaaaggatgtgaaagtaggtttggaattaggtgatgggtagaggctggaagaattttgaggagcacggaaaaaagcctagattgccttgagcagactgttagtagaaatgcagatattaatgattttgctagcgacacctcaaaaagaaaggaggagtatgacagatgagactgtattgttttaaagaatcatgaagactgttagtagaaatatgaacattaaagrcacagatgataaaaactcagaaggaaatgaaaaatgtaatatcagaaactgaaggaaagtggatccttattatatagtggcagaaattttggctgaatggtgtcctagagctagatggatagaataacttataagggataagcttggatatttagctaaggagatttcccagccaagtgttgaagatgtggactgatttcttcttgctggttatattacaatgctgaaggaaagaaatagacagaggaaagaattrttaagcaaaaatagagccagaacctggtggtttgaacaattctcagccttcctatattataaaagacattaaagttaggatattcactgtcagaaaagtatgctgcaaagggaaatccaagagtgtggttggacaatcttttgctagcaattcgagtatcaaaaagtcacagagagctttttgaagagattagacaaagttcctcagttccttcagccatggaggcagaaaccagcaatagagatgggattatctggaaaagatctgtggaggagccacttccctaatggggtgaatcactgagacatacatgagagaaccactagtttcttgagaatgttttatcagcagaaatactgccatcttgtactggacagagagaggaaaatatagaagaaggctgttggactccccaaattctacaggcaggaaacaggtggttaaatctacttagctacaaacatgtgttacccttcttgtaaaagaagagatgatttagggcagagttgttagtcaagaatgtggaattgggagcccagagggtggagctgagcaactagaaagcaaagccacaatcacagatgattaagggctttgaaacctaatagagttttctcagttggattcagagttgcttgggattggtgactcattgttttccttttattttaattcattgtttgaatggttatgtctctgactattatggtatccctacttcatcattgtattttaagagcagataacttaatactcaatactcgagtaaggagcaataaaaaatgaagttaagaaatgatttcatttactaatagcgtcaaaaagaacgaaatacatataaataaatttaaccaaagaagtataagggttgtacatggaaaatgacaaaacattactgaaataaactggaaaagatgtaaacaaatagaaatacaccccatgctcatggattaaaagaattaatattgttaagatgaaaatacaccccaaattgagctgcacatttaatgcaaactttatcaaaatcctaggagacttgtttacagaaatagacaacctgattcaaaaactcgtatggaaatgcaagggacccacagggaccaaaacagccttgaaaaaaaaaaaaaaagaagactcacacttttctatttcaagtctactgcaaagttacagtaaccaagacagtgtggcactagcataaggatagacttggataaataggtatgaattcagagtctagaaataaatccacaaatctatcatcaattgattttcaacaagggtaccaagacaattaaatgggtgaaataattgtctttccaactaatgatgctggcacaactgtgtgttcacatgcaaaagaattaattgagtctcctacctgaccctaaatacaaaaattaactcaaaatgtatcaaagacctaaatgaagaaacataaagtacaagaaaatttttagaagaaaacataggagtatatttttgtgacctctgattgggcaatggtttctaaagcaaaagcaacaaaataaaaaatagattaattggacttcatgaaaattaatagtatttatatatcaaagtaaaaagctcacagaataggagaaaatatctgaaaaatcacatattggttaagggtctagtatctatcatgcataaagaactcaaactagacagtgaaaaagacaaataacccaattaaagtatgggctaagaatctgaagagacatttcttcaaggaatataaacaaatggccaatagacacatgaaaagatgcttaacatctttattcattagggaaatgcaaatcctagccacaaggagataccacttcataaccagtggcatggcaaaaaaaaaaaaaaaaggtacaataacaaacgttggagatgatgcagagaattagaaccctcagacatggctggatggaaatgtaaaatggtgcagtgctgtggaaaacagtttggcagttcctccgaaagttaacatagagttattataatactgacccaggaattgtactcctaagtagatatccaagacaatagaaaacatgtgctcacagaaaaacttgtacataaatcctcatagcagtgttatttataatagccaaaaagtggaaccaaccctaatgtctatgaactggtgaatggataaacaaaatgtggtctatccatacagtggaatattattcagccatcaaaataatgtaatgccaattcatgctatgacatagataaatcttgaaagcattgtacaaagtgaaagaaaccaaacataaagctacatatcatatgattccattcatatgaaatatccagaagatgcaaatccatagagacagaaagcagataagtgataaccaggagctggaggaggagggaatgggaagggacagctaatttgcacaatgtttctttttagggcaataaaaatgttttggaattagagaatggtgatggttacacaaccttgtgaacatactaagaaccagtgagttgtgcactttaaaatggtgatttttatggtacctgaattatatttcaataaaaaagggaaaaacagaaaacagtgttaatcatgtgctaccttttgcattaaaaagatagtagaaaaaaatatatgcttgtgtttgcctaaagaaactatggaaggatatgcaaaaaactaataaaattggttacttatgaggcagaggaagtggaaaacagggcaggtaggtataaggaggggagcaagccttttcaatgcatgtctttccatattgctttgctttttgaaccctgtgaattttatattaactattataaaacattaaacagcaacaagcaaacaaaaattctcaataaattgcttctttttttttctgcctgtaccaccatctaggctggacaccgccccccaaatcctgccttctggtgggtcaatggcacaggagcagagatcaagtggagctttgaggagctggggaagcagtccaggaaggcagccaatgtgctggggggtgcatgcggcctgcagcctggggacagaatgatgctggtactcccacggctcccggagtggtggctggtcagtgtggcttgcatgcggacaggtcagtaagcagggctgggaattttagttgggggcagacacaacttgccagagctttgcagtgtccacagggtcttgaagatggagcaaaaataaactgtatgtggagttgtgtttacttcctatttgcctaacaatcacagacttgattgtatagtaggggccagacaatgatgtaattgataaaagcaggccagtgcaaggcagtagggagttgtgaggactgcggcaaactggagatcacatgctttatcaaatggggtcgctgcttctcaactcgaaccaaatgttcccacgacagaatgaataccagtgttatcagaacttctgatttgtaattgaaaactctggatttttatgaaaaatccccctgtcttttaatgttggcatctatcattttaaaaagtcctgactgggacaaatcaagcatattttctgctggttgtggtttgggagccttgctttagttgctagaattttacccgaacgatgcagttatagatgagggacccttataaccaatctatgttagtttcactcttagactttatgattctcattatcacagcatcatccagctcccaaaggaaggaagataaagatgaaataaaagaaccagtgatattatcccttgcaggaggttagggggacaggtcctcctgttgtcatgaatgtccagggcagtgaaacattatcttcttagaatggttccttcagcagagaaacagaggaggaaagaggccacagtgagcctagcaagcctccactgatgctgagtgaataagtgatcatgcacttattcagacggctagggtttttaggctgttattattattattgttacgtcttccagctcatgcattccaaccctccccagccccttcctgccttcatctcttacctctatacccaaggccttccccgctatccactcaacatccccttctgttttatgccagggactgtgatgattccgggtgtgactcagctgacagagaaggacctcaagtaccggctgcaggcgtccagggccaagtccattatcaccagtgactccctagctccaagggtggatgccatcagtgccgaatgcccctccctccagaccaagctgctggtgtcagacagcagtcggccaggctggttgaacttcagggaactcctccggtgaattggggctctccagaacagcagaaaaatgaagtcatttcccctttaagcaacaaaagatgaaatgcattgctgattccacacatagagagcgaatcagagaggagcactcccattggcagccaggctgacctgagcataatcctggtccctaccttaatgttcaaggtccctcattcagtcagtgctggatttgtcagcagcttttctgtgcttcatttgcttctataatgcggtggtagttattagagctaccattcagagtacatgaaataaccaatatggtgcatttagcacatagcaggtggtcagttaataataaactagtggccatgtattgggtacttagtgtatcgctagatactgtgctatgtaagccttcaccttcattcattcatgcagcgaagatttaatgaacatctatttcacgacaagcattgtgtttggtgttcagaacaccataatggatcaaacatcaccttatttaatccctgaacaggacattgtgatgggccctttaacccagttttacagatgaggaaactgagacttggaaaactaaagtgacttgcccaaggtgctaaaaagtagtcaagtcaggagtgggcagagccgagagcagatgtgccttggagcaagggcctggtggaaacccatctcagaatttgagactttgtcctgattggaagccagaacccaaaaggagcctctcaggggcctgaaccattgagttatgaatgctcaccccacagaccagctgcatcagattcacctggctgctgttttgaatacagatgacaaggcctcacatctgacctacttaaccagacacagctgagcaagagccctggggatcttttttaaaaaaatcagcccatagggccaggcgccatggctcacgcctgtaatcccagcacttttggaggctgaggcaggcagatcacccgaggtcgggagtttgagaccagcctgaccagcatggagaaaccccgtctctactaaaaatacaaaattagctgggcgtggtggcgcacgcctatattcccagctatttgggaggctgaggcaggagaatcacttgaacccgggaggcagaggttgcagtgagccaagatcccgccattgcactccagcctgggcaacaaaagcgaaacaccatctcaaaaacaaaacaaaaaaaaatcggctcatatgattttgagagctgtcaggtgggcctagatcagtggttctcaattttggctgttactagaattactgagaagcatttaagaaaacattaaagattctgattttattttgttcagggtggatacagacaagtttcttccaaaaatttaccaggggacttcacagtgcagccagggatgagagcccgtggattagctgatcatccagatcacagaactttgggaattacctagatctcaaaaccccatattgggggaaacctttagaaaagagttctaaattattagaaattgggatgggggtggaagctgtgcctaaatgtgcagaattatagacatggacatgtgtgtgttctaccagaaagtcctcataccttggtaagaaagcatggactcttttgcgtgaattatttatctattttgagcctcagtttcctggtctgcaaaagggttataatgatagtacctaccccatgaggtggttgcagattacccaagccagagctttcagcacagcacctcacatgtggtatttatgaaacggtagtcatattgttgttacacatattattggtgctactaactgtttttaccgtggtagtgccacctagtgtatttacgttttacagggaggcttctacagagcacaactgcatgaggacaaagagtcgagacccgctggccatctactttaccagcggaaccaccggggcccccaagatggtcgagcactcccagagcagctacggactgggttttgtggccagcggaaggtaccagagcagcttgtctagaggatccaagaacagaaagtggggagtggtctggagggggtggtgtgaggggaaaggtgtcaggaacggaggtcagagagccaacagaattactgagaagccaataggagcagcttaggaaggatcttgatggttctggattttactctgagtgaggtgaaaagccatgggaggtttctttttaaatcgtggcwatatatatatatatatatatatatatatatatacacacacacayatatatacatacatacacatataaacatatatatacatatatcataaatgtacccttttaaccattttaagtgtacagtttaatgtcattaaatacattcacattgttgtgcaaccacaatcaccatccatttccagaatttactttatctttccaaatgagaactgtgcccccattacccaataacaccccattaccctctcccctcacccctggtaacctctattttacttttcatctctgtgaatttgatactctaggtatttcgtgtaactggcatcatgcagtctgtccttttgttttgcaatttggcttctttcacttagcataatgtcctcaaggttcatccgtgtcatagcatgtgtcaaaatttccttcccttttaagactgaaaaatattccattgtatggatagaccacattttatttatttttattttttattttatttttatttttttgagacagagttttgctcttttgcccaggctggtgtgcagtggtgcgatctccactcactgcaacctctgccttccagtttcaagcaattctcctgcctcagcctcccagrtagctggggttacaggtgcccgccaccacacccagctaatttttgtatttttagtagagaccgggtttcaccatgttggccaggctggtctcgaactcctgacctcatgatcctcacgccttggcctctcaaagtgctgggattacaggsatgagccactgcacctggcctcgaccacattttaaataatccattcacctgttgatagacacttgggtagcttccacattttggctattgtcaataatgttgctataaacactggcatgtgagtatctgttagagtctctgcttttacttcttttggatatacatgcagaaatgaaattgctggatcatatggtaattctatgtttaattttttttgagaagcattgggtattttgagcagaggagtgacataatctaatatgttttttaaaggctcactcaggatgttgggttgacaatgtaactgtaggggaaacaggtaaagaagatgaccagtgcattaagaggcaagcatggtagcttgcccggggagcagtagtgggagaagagatgagattctgaatgtattttcaacctagacccaataaggcttgctgacagaatcagtgtggaatgagaaggaggagtcaaggagagctctaagaggaatggcctgaacaactggaagcactaaatgatgggggaagaactgtgggatgagctgtctggtggcaagaaaacagtttgtttatggagttgtcaatttgagagtcttcttagaaatctccatctccttgttaaaagtggagatgttgagtgggcatttggatacacatgtctgaagttaatgagaaagattcatgctgaacttatcagtgtaaagatggtatttcataccatgagatgggatgagatcagcaaagtgtaatataaactgaaaagagaatgggtctcaggactgagtgcccgaggcatttctgcactgaaggggaagaccaggaggactcagcagaggagactgagaagggaacagccaatgaaatggggagaaccaggagtgcgcgtgtcccaggattcaagtgcatgaccgctttttatgtcttccatgtttgcagacactgtttcccattcctgggatgctcctgcttctctgcctcacctatataatccctatttattctttatgtctaactcaagtgtcacttcctctaccagagcatttctcagaaacccatgtccatcattgctctgggttaggtgcctattctctataattgcacaaggctttgtgtttagctctattaaaacatgctctccaggggcttcctataaggccctcaaagcaagactaatcgttcatttctagatccctagtgctaagtccagactaaatgctaaataaatgttggctaaataaagtgaccttagcacagagtattgaggttaattttttccccttatatatcacatccactggactgtgaactttctggaaactctttttgcttctgtattcttagcctagggcataggtacatggaagatgctggttgagacaatagttgacttgatggtcttgttcaggtttcacaagtataagtgagtacccactgagcagggctccaaatgtggtgatatagataatacaatcctttttaaaggtagagtcattgccaaggttactgacgttctctaatttttggcagacggtgggtggccttgaccgaatctgacatcttctggaacacgactgacactggctgggtgaaggcagcctggactctcttctctgcctggcctaatggatcttgcatttttgtgcatgagctgccccgagttgatgccaaagttatcctgaatgtaagaggaaaaaccaacaataccccatatgtgttgggtacaaatgagatgagtgggatatagatttcagactgcaggagaaaacacataaatcagtgaatttaaggcttctttggtgtggctccctggccttccataatctggttcctgaccacctggttcccttcaatcattgcctatgctctagctacattcctagatgtaagaccattttgttgctatttcttttgcatggggtgcccttgtttccaccactttcttccctatgctcctgccaaaaccctaggtatttgtcaaacccttaggcaaaatcagtctatgcctcaactccaaatgctactgtccatggttcttaacatgagtagttggcccaactagagagtcctggtgactcctgctcagcctctcagggtcttctcatggggagggaggagattggtggccccagtcaagacacaggtcacctttcttccaccccccacatcctgtcattccttaaaatgtcagaggacacttctgctcatattatttgtactgagataagctgtatcacatggtagctaactgcataggctgtgccatcagtcaaagagtcagacctggactctgatcctacacctttgattcrctagctstgtggccttggggaagytgcttaatctcctgagctgcagtttcagcctcatctgtaagaaagggatacatttctctatagatttgctgcgagaatgaaatgatacaaggcaaaggggccagcacatcataggttcttttttgaaataatttttaatttttgtggatacatagtaggtgtatatatttatggggtacatgagatgttttgatgtaggcatgcaatgcgtgaaaatcacatcatagagaatggggtatccatmccctcaaagcatttatcttttgtgttacaatctaattatactctttcagttattttaaaatgtacaattaagtttttattgactatagtcaccctgatgtgctttaaaataacaggtcttattcattcattctattattttggtaccaactaaccatccccacctttctcccagcccccgactacccttcccagcctctggtaatcatccttctaatctctatttccatgagttcaattgttttgacttttaaatctcacaaataagtgagaatatgtgaagttagtctttatgtgcctggcttatttcacttaacataatgatctccagttccatccatgttgcagcaaatgacaggacctcattcttttttatggatccattgtgtatatgtacatcttctttwtccattcatctgttgatggacacttaggttgcttcaaaacatagtagattctttttttaaaaaaaaattattttcataggttattggggaacaggtggtgtttgattacatgagtaagttctttagtggtgattgtaagattttggtgcacccatcacctgagcagtatacactgcacccaatttgtagtcttttatccctcacccccttcccaccatttyccccaagtccccaaagtccattgtgccattcttacacctttgcatcctcatagcttagctcccacttatgagggagaacataaaatatttggttttccatttctgagttactttacttagaataatagtctacaatctcatccaggtcsctgcgaatgccattaattcattcctttttatggctgagttgtattccattwtatatatttatataccacactttctttgcccacctgttgatttatgggcatttgggttkgttccacatttttgcaattgcaaactgtgctgctataaacatgtatgtgcaagtatctttttcatatgacttcttttcttctggatagatgcccagaagtgggattgctggatcaaatggtagttctacttttagttctttaaggaatctccacactgttttccacagtggttgtactagtttacattcctaccagcaatgtagaagtgttccttgttcactgcatccatgccaacatctattattttttgatattttgattatggccattcttgcaggagtaagctggtatcacatggtggaccaaatatagtagattcttaacccatattgattgttatcatcatgatcaaactcatcaccatcattatccatgtagtgcttgatcagccaatgtatggaccttctccttgcactgtccccagctctgatatagtgttttcattatctattgctatgtaataaattataccgaaacttagcactttaaaacacaagcatttatctcacagtttctgatggtcaggaagctggaggtagcttaatgaggggtttttggagcagggtctctcatgaggttgcaatcaagaggtcagcaaggtatgctcatgttcatagcagcattaacaataactaaaaggtgaaagcaacacaagtgtccatccacagatgaatgaataaacaaaatgtggtgtatatgtacaatggaatattacccagccttaaaaaggaaggacatcttgttgtatgatataacgtggataacccttgaggacattatgctaagtgaaacatgccagtcatacaaggacaaatactgtatgattccacttacatgagattccaagagtagtcaaattcatagagacagaaagtacaatggtgtttaccaggagttaggggagagattaatgggaaattattgtgtaatgggtacagagtttaagtttgagaagataaaaatagttctggaggtggatggtagcgatggttgcacaacactctggaaatgtttaatcccactggactatacacttaaaaaccgttccaatgggcaaatcctatgttgtgtgtattttgccacaataattttaaagaagatatttgctaggactgcaatcatcttaaggattgactgaagctggaaaattgcttaaaagttcactggtggccgggcacagtggttcatacctgtaatcccagcactttgggaggccaaggcgggtgaatcatgaggtcaggagttaaagaccagcctggccaggatggtgaaaccccgtttctactaaaaatacaaaaattagccgggcctggtggtgggcacctgtaatcccagctactcaggggtctgaggcagagaattgcttgaacccgggaggcagaggttgcagtgagctgagatcttgccactgcactccagcctgggtgacagagtgagactccatctcaaaaaaccaaacaaaaaacaaaacaaaaacctcactggtggtttttagtagacttcaatttctcactgggtgtttgctagtctccagtttctcactgtgtgcacctgtccgtaggatggcttgagcatactcaaaacatggtggcttgcttcccccagaacaagggatccaagaaaggcagagagaaagaatatccaagacagaagccatagtctttgtataaccgaatcttgaaagtggtattcatcaccttggcagtatgccattgctgtcacagacccactttggtatgaggtgagaggggatcctccaaaggtgcacatgccaggaagtaggagtcactggacaccatcttggctgctggattccacacatagttttcagcttctctgctttggtactgagactataaagatgcatttggctccatcttcatggtcccaccccagtgattctaaggacatctttcaccctttgtttttgtttagactctctccacattcccaataaccaccctctgctgtgttccaaccatctttcggctgcttgtgcaggaggatctgaccaggtacagcccatctatttcgtgctttgagggcctaagtatgtgaatatatagcatgggtatccacacacacaactaccctctcattccaactctctttctttctctgtctctccctctatatatttttctgcctctctctttgtctctctctcacacacacatttatacacgtacacattgacaagtcaacatacctgtaaatctcacagatgcccctcaagaacaagcttctggccccccaaaatttgcatccagatggaactaaatagatttaaggcagactgaaattttagcacctgagataggcttctcctcacaccatacacccatgggctattctgtcagcagtgtgtctgctacttctgtgaggcgagagaagtgattggaaaattgttagccacctgtggagtggggtctgtggccagggccctcaggtgtggtgaaactaacaagcccgcaccacagtagatgccccaactctcagcctcagactaaccccagccaactgttgtctgagcacatgccattgggcacccaagagaaagggacaaggcactgatgatggctccatcctgggtgaagccaaagcaacatcttctagcagaacagggctggttgctggggtatatggagagaggcccaccatccttcagtatccaccaaccctgacctgttctccctcttttgtcctcccgtaagtcatgaggagtcgtcctctcatctttcctaatcacatgaatctacccaccaagtgtccaaaagagggagttcttacatgcttctaaaagtgaattcttctccaatgtaagaaaatcatcccattcattgatctgatgtgtgcatctccacatgatgattttggctgaaagcaagctccaagtacctcgttaagaacaatgtcgttgaatgctctttggtaataataagtaacttaatcaagccaatttgatctcccctctcctccaagattaaaaatgtacttgcagtcactgttcttttttataatttggatgatttgttgaacagagagggcattttgcaacataattaatatctgtaggaatnnnnnnnnnnnnnnnnnnnnnnnnnnnnnnnnnnnnnnnnnnnnnnnnnnnnnnnnnnnnnnnnnnnnnnnnnnnnnnnnnnnnnnnnnnnnnnnnnnnnnnnnnnnnnnnnnnnnnnnnnnnnnnnnnnnnnnnnnnnnnnnnnnnnnnnnnnnnnnnnnnnnnnnnnnnnnnnnnnnnnnnnnnnnnnnnnnnnnnnnnnnnnnnnnnnnnnnnnnnnnnnnnnnnnnnnnnnnnnnnnnnnnnnnnnnnnnnnnnnnnnnnnnnnnnnnnnnnnnnnnnnnnnnnnnnnnnnnnnnnnnnnnnnnnnnnnnnnnnnnnnnnnnnnnnnnnnnnnnnnnnnnnnnnnnnnnnnnnnnnnnnnnnnnnnnnnnnnnnnnnnnnnnnnnnnnnnnnnnnnnnnnnnnnnnnnnnnnnnnnnnnnnnnnnnnnnnnnnnnnnnnnnnnnnnnnnnnnnnnnnnnnnnnnnnnnnnnnnnnnnnnnnnnnnnnnnnnnnnnnnnnnnnnnnnnnnnnnnnnnnnnnnnnnnnnnnnnnnnnnnnnnnnnnnnnnnnnnnnnnnnnnnnnnnnnnnnnnnnnnnnnnnnnnnnnnnnnnnnnnnnnnnnnnnnnnnnnnnnnnnnnnnnnnnnnnnnnnnnnnnnnnnnnnnnnnnnnnnnnnnnnnnnnnnnnnnnnnnnnnnnnnnnnnnnnnnnnnnnnnnnnnnnnnnnnnnnnnnnnnnnnnnactgctgaaggccattgtttgtctccaccaagacagtctacatctgccactgttcagagtccaagattctaagcagcatcctcctatagtcatctaggaagagatctggggatcaactgagtcttttggcttagagatgggttaagttctttatgtttgaatgcccactggagtgccccataattgtttgttaactatggaaagaaaagaagaaagacaggcaagaaagagggaagaaaataggaagaaaatgaagaaggaagggagggaggaaataaaggaaagagaaaggaaaagaaggaggaaaggaagggaaaaagatgaatggaaggaaggaaatagggaacaaagaagaagggaggagagaggaaaatggagaatgaaataacggggaaaagaatgaaaaaaaggaggaaagaaaatgaaggagggaaggaagaaaacaggaaaggggaaagaaaggaaagaaagaggaaaggaaagaaggaagggaaggagtgagggaggaagaaaaaagaaaagaaagaagggaggaagaacagagagaaatggagagagaagggaaagaaagaagaaagtgagggaggagaaaaaagaggatgagagaaagagttatcaggcagggtgagagaaaggcatggcccaggaaagaagctaagtggaaaggctcttctttatctgtactgcgttctccccaggttgtcatctgtgccaatccaaaaggcatgaaaatcaagtctggatccatggggaaggcgtccccaccctacgatgtgcaggtagcagcctcccccaacttctggcaaggcctggcatggagaggagaaagacacacaggcctggttggcacgggctgctgggctgctgggagaggcccagggtgtagacactcaygtatgcacctctgtgatgatttccttaccagattgtggatgatgagggcaacgtcctgcctcctggagaagaggggaatgttgccgtccgtatcagacccactcggcccttctgtttcttcaattgctatttggtaagagacrgggaacagccgttctcatgacagtgactgtgtgctaagcattgtgcaccacactttgtaaatatctatttgtttaatccttacaatgactgcatgaggtaggttgctactattattaataaagttctgttattgataaggaagactattattgataaggaagctactacaaaggggaagtgacttatccagcatcatgcaactagtacaggcaggacatgggatttaaacgtgggtgtgtctgaaagcgtaaacatgacatgagggcagcaccgttgttttaatgaggtgaaaatcgaggtacagtaaaggaaaggagcttctgaaggtcaaactgcagccgggtgcagtggctcacacctgtaatctcagcactttcagaggccgaggcaggtggatcacctgaggtcaggagttcaacaccagcctggtcagcatagtgaaaccccgtttctaccaaaaatacaaaaatcagccaggcatggtggcgcacgcctctattcccagctacttgggaggctgagacaggagaattgcttgaaccagggaggttgcagtgagccaagatcatgccactgccctccagcctgggcgagggaacgagactccatttcaaataataaaataataataataataataataataataataataataataaaataaataaatacataaaggtcaaactgcactattgtgtcagagctgtcttcaggattctctttgtggtttgctagcagggcacaaacctgggatttcagtccaagtttctgggataattcagtaactgcttctcttttgtattcatcttgggtggtgtttatgtcgggctttcttttcttcacagctttctctataaaactctcagacctggctgtgcattagaaacacctggcaagcctcagttattgctgatgcttgagccccacctcagcttaattaaaatcaacatttctgttggtgtggatcagtttcccaggcgattcgaatgtcaagcctgagagccactgcttaatagaaatgccatctcatgtgtctactaagctgtcaatcagctacagaattagaaggagcagaaataaatcagtccatttcttttcaaaatgttgcattttagtggtttttctgtcactacaagagaaataatcttctactttattttgtttaaaatcacagaaacttacaaaatcccacaacatagtaatcatgccaagctgagatcatgttaacatttaatgtattttctgctaatcagtcttggaagcaatagtaaatctttgaccccactgaaaaaatgcattcattcattatttattgtcgacttcgtgccgctcggtgtggagcaggactctggtacttagtgtggagcaggactctggtacttactgcacttgtacactttctttctggttgtgagattgttccactgagtgtactaaagtaatttgaaaagttatttgctagacaacaatctagtttttttgactgtttctttccgtcacctgtaccaacagttagttttctttccagatcattctttttttttttttttttttttttttgggacagtgtcttctcactctgttgcccaggctggagtacagtggtgcgatcttggctcactgcacttccacctcctgggctcaagcaactctcgcgctccagtctcccaagtaactgggactacaggcgcacaccacttcaccggggtaattttggtatttttagtagagacagggttttgccaccttggccagactggtctggaatttctggcctcaagtgatctgcccgcctcgggcaactcccaaagtgctgggattacaggcatcagccacagtgcccggcccagctcattcttaattaagagaaaaatattaaatgtcttcgtgagaatcaggaaacatgtgaaaattattatagaggatctcagaccaaaattgttctgtgagttttgataagctaagctcattctccccctacaataaacataaacatttcaaattcacgttggtcattcccatttagctgaaattgcacatgtcagttaaatgaatatgcccgtgtcaactgtatatcccatataaggaatgtgcttattttcctagggaaacaaattatcaaatgcacaaatatttgttatagtgctggctgtttataacagataaaaaaggtggagggactatctaaatttctaatatcagaaattagttatgtaaaggattatattatagcattgtgaacaaaagcaaaaaaacaaaagaaaaggagaaaaagaagagagaaaaaattttaaaaaaagaatccaggaatttgttcaaatgcataatatcaccaccacacagaaatattatgcaactatttaatacaatttttttttggaagcagggtctccttctgccaccaaggctggagtgcagtggcacaatcatggccactgcagctttgacttcctgggctcagctgatcctcccacctcagcctcctgagtagctggaactacaggcacacgccaccacacctggctaattttttttttttttttttttttgtaaagatggggtttcaccatgttgcctaggctggttttgaattcctgggctcaagtgatccacctgcctcagcccaccaaaatgctatgattacaggcatgagccaccactcccagcctataggagttcttaatatattcttcatatcggtcctttgtttgttttaacagttgctaacatcttcctccttggttgtagcttatcttttcactttctttcactttctttaagctatttttgttgaacagaagcatttatttccatgtcatcaaatcattaagtttttaaatgttatggatagtgctttttgtgtcttataaaatcattttcaactttggggtagaaaatacacatattcaatagtttcttccaatagttttataattctgcttttgacatttaagtttataatccatctgtggttgatgtatgcatgatatgagataggggtctattttatttttttctatatgaaaagccaatttgttgaataaatcctccttttcccagttatttgtcatgctaattttgtcagatataaaagtttaatataggccaggtgtggttgctcacgactgtaatcctagcactttgggaggccaaggctggtggatcacctgaggtcaggagttcgagaccagcctgaccaatatggtgaaacaccctctctactaaaaatacaaaaattagctgggtgtggtggcgggcacctgtagtcccagctacttgggaggctgagacaggagaattgcttgaacccgggaggcagaggttgcagtgagctgannnnnnnnnnnnnnnnnnnnctgagatcacaccactgcactccagcctgggcaatagagtgggactccatctcaaataaataaatcattttttaaaagtttgatatagtcatacataggctttggcactttcttgtatttccttgatcacttactctgtctctgtactgataccataaagtcttatccacaaaagcattaccataagtcttcacatgtgggagaacaactctaaccttgttattcaactcatttagaagtgttttacctattcttagccctttgctcattcatttgtattttagaatcaacttgtcaagttccttggaaaatgtttgctagcattttgattagaattgtattgcctataaaacaacttagggataattgacatctctattaattaagtcttttttgttttgttttgttttgaggcagagtcttgctctgtcacccaggctggagtgcagtggtgtgatcttggctcactgcagcctccgcctctcgggttcaagtgattctcctgcctcagcctcccaagtagctgggattacaggcgcctgccgccacacctggctagtttttgtatttttagtagagatggggtttctccatgttggccaggctggtcttgaacttctgacctcaggtgatccacctgccttggcctcccgaagtgctgggattataggcatgagccactgcaccaggccgattaagtctttctttcactttatttatatcttctttaatgttgtgtagagttttaagttttctccatacacatctcagagattttgtgttagatgtatttttagggtagcttatattttttcttttttctcagaaggtccttgttgaattgagatataatttacctacagtaaaattcacccacgttaagtgtgtaagtcaatgacttttaacacatgtccgcccctgtgtaactgccaccacagtcgaatagggaacatttttcactcccttgacaggcaatcctctccactccagacccagcaattgatacattgtttgtcgtcagtatataataattttgcatttttaaaaaagaacttcatgtaaatggaatcacacactattccagtttatctgtctgggttcttttactcagtatgatgtttctgcaagtcatctgtgtggtttcatggtatttttattgctgagtagtagctttttctttgaaactttgagaatcagagtttcattgtttttctctttcctctactcttgccccacaccaatgagctttttggtgagcccttctcccaccctccctttctttctttctttcttttctttccttccttccttnnnnnnnnnnnnnnnnnnnnnnnnnnnnnnnnnnnnnnnnnnnnnnnnnnnnnnnnnnnnnnnnnnnnnnnnnnnnnnnnnnnnnnnnnnnnnnnnnnnnnnnnnnnnnnnnnnnnnnnnnnnnnnnnnnnnnnnnnnnnnnnnnnnnnnnnnnnnnnnnnnnnnnnnnnnnnnnnnnnnnnnnnnnnnnnnnnnnnnnnnnnnnnnnnnnnnnnnnnnnnnnnnnnnnnnnnnnnnnnnnnnnnnnnnnnnnnnnnnnnnnnnnnnnnnnnnnnnnnnnnnnnnnnnnnnnnnnnnnnnnnnnnnnnnnnnnnnnnnnnnnnnnnnnnnnnnnnnnnnnnnnnnnnnnnnnnnnnnnnnnnnnnnnnnnnnnnnnnnnnnnnnnnnnnnnnnnnnnnnnnnnnnnnnnnnnnnnnnnnnnnnnnnnnnnnnnnnnnnnnnnnnnnnnnnnnnnnnnnnnnnnnnnnnnnnnnnnnnnnnnnnnnnnnnnnnnnnnnnnnnnnnnnnnnnnnnnnnnnnnnnnnnnnnnnnnnnnnnnnnnnnnnnnnnnnnnnnnnnnnnnnnnnnnnnnnnnnnnnnnnnnnnnnnnnnnnnnnnnnnnnnnnnnnnnnnnnnnnnnnnnnnnnnnnnnnnnnnnnnnnnnnnnnnnnnnnnnnnnnnnnnnnnnnnnnnnnnnnnnnnnnnnnnnnnnnnnnnnnnnnnnnnnnnnnnnnnnnnnnnnnnnnnnnnnnnnnnnnnnnnnnnnnnnnnnnnnnnnnnnnnnnnnnnnnnnnnnnnnnnnnnnnnnnnnnnnnnnnnnnnnnnnnnnnnnnnnnnnnnnnnnnnnnnnnnnnnnnnnnnnnnnnnnnnnnnnnnnnnnnnnnnnnnnnnnnnnnnnnnnnnnnnnnnnnnnnnnnnnnnnnnnnnnnnnnnnnnnnnnnnnnnnnnnnnnnnnnnnnnnnnnnnnnnnnnnnnnnnnnnnnnnnnnnnnnnnnnnnnnnnnnnnnnnnnnnnnnnnnnnnnnnnnnnnnnnnnnnnnnnnnnnnnnnnnnnnnnnnnnnnnnnnnnnnnnnnnnnnnnnnnnnnnnnnnnnnnnnnnnnnnnnnnnnnnnnnnnnnnnnnnnnnnnnnnnnnnnnnnnnnnnnnnnnnnnnnnnnnnnnnnnnnnnnnnnnnnnnnnnnnnnnnnnnnnnnnnnnnnnnnnnnnnnnnnnnnnnnnnnnnnnnnnnnnnnnnnnnnnnnnnnnnnnnnnnnnnnnnnnnnnnnnnnnnnnnnnnnnnnnnnnnnnnnnnnnnnnnnnnnnnnnnnnnnnnnnnnnnnnnnnnnnnnnnnnnnnnnnnnnnnnn

SEQ ID NO: 98274 - DNA, 32487 bp, Homo sapiens
gttttgagacggaggcttgctgtgtctcccaagctgtagtgcagtgtcgcgattctggctcagtgcaacctctgcctcccggttcaagcgattctcctgcctcagcctcccaagtagctgggactacaggaacctgccaccacacccggctagttttttgtatttttaatagagatggggtttcaccatgttggccaggctgatttcaaactcctgacctcaagtgatccgcccacctcagcctcccaaagtgctgggattacaggtgtaagccatttccccagccttttttttttttttgagacggagtcttgttctgtcaccaggctggagtgcagtggcaggatctcggctcactgcaacctccgcctcccgggttcaagcgattctcctacctcagcctcccaagtagctgggattacaggcacacgccaccacacctggctaatttttgtatttttagtagagacagagttttgccatgttgccggtctggaactcgaactcctggcctcaagtgatctgttcactggggcctcccaaagtgctgggattataggtgtgagccactgtgcccggcctggcctcacttccttcgagcgcattctcttacctcctctactccaggcctcctcgcctccttgctgttttgtcattcacaccaggcaggctccctcctcatggttgttgcacttgctgttccctctacccagaatgcttttccccagatacctacatggctcactccctcacctccttcagagatatactcaaataccaccttctcatcaaggacctccctgaccaaatcatctagaattgaagctgggcgcagcggcgcttgcctggagtctcaactactcagggggctaaggcagacggatcacttgagcccaggcattcaagaccagcctgggaacatatcaagaccctgtctctgcaaaaaataacaaaaattagccaggtgtgttagtgtgcacctgtagtcccagctacttgggaggctgaggcaagaggatcacttgagcccaggagtttcaggctgcagtgagccatgatcatgccactgcactccaggctgggcaacatagcaagaccctgtcttttaaaaaaaaaaaaagaagaaaaaggccgggcgcagtggctcattccagcacttcgggaggccgaggcgggcggatcacctgaggtcgggaattcgagaccagcctgaccaacatggagaaaccccatctctactaaaaataaaaaatcagccgggcatggtggcatatgcctataatcccagctactagggaggctgaggcaggagaatcgcttgaaccctggaggcggaggttgcagtgagctgagatcgtgccattgcactccagcctgggcaacaagagcaaaactctgtctcaaaaaaaaaaaaaaagaagaaaaaagaaaaaaaagaagaagaaaaaaaaacttgaactgtaccagtaaaactggaattcctcactcaaacccagtaagtagttcctaccccgtctttccttgtagcatatcatcaccattatatatgttatttatttgtgtgtttggcatctttactagaccacagactgcatgggggcaagggcttgtccatctttttttctgccatattcccaacatctagaatagcgggcacatagtagatgctcaataaatacttttttatttgtatatatttttggacagggtctcactctgttgcccaggctggagtagagtggcacaatcatggctcactgaaggctcaaactcctgggctcaagcagtcctcccacctcagcctcctaagtagctgggagtacaggtgtgcaccacgatgctcagctaatttttagaaaaatatttttctttggagacagggtctccgtgtgttgcccaggttgatcttgaacttctggcctcaagcgatcctcctgcctcggcctcccaaagtgctgggattactggtgtgagccaccaccacactcagcctaataaatacttttttttttttgagacggaatctcgctctttcgcccaggctggagtgcagtggtgcgatctctgctcactgcaagctccgcctcgcaggttcacgccattctcctgcctccgcctcccaagtatctgggactacaggcgcccaccaccatgcccggctaattttttttttttttttttttttgtatttttggtagagacagggtttcaccatgttagccaggatggtctcgatctcctgacctcgtgatccgcccacctcagcctcccaaagtgctgggattacaggcataagccaccatgcccggccaatactttttaaatgaaggaatgaagcctgggtatggtagctcatgcctgcaatcccagaaatttgggaggccgaggtgggtggatcacctgaggttaggaattcgagaccagcctggccaaggtggagaaactccatctctactaaaaatacaaaaaattagccaggtgtggtggcacatgcctgtaatctcagctatctgggaggctgaggcaggagaattgcttgaacccgggaggcggaagttgcagtgagccaagattgtgccattttactccagcctggatgacaagagtgaaactcggtctctaaataaataaaggaatgataatctggccctcgatgggcttcccttttctgcacaatagtttagcatccaaggcctcccccttccttgggctcatcccccacctatgtccacccaagtgccacagcaggctcctgaggtgctcccggtagagtgctccattttagagagctccccacccccacccctgccccagcatccttcctttgtccactccctgctgcaatcccactgcaacaccctgttcgaatgtcaccacctctgggaagccaccctggttccctcacctaccaaaaccatgtctgtctcccccactgcagtgggaacatcttgagtgcagaacagtggccccagagcatggtttcccatttaatgtttgatgaatgaatgaatgattaaatgaggaaaagacttagcagaaaaacagagtttaaagagaagggcaagcccgggtgcagtgcctcacacctgtaatcccagcactttgggaggccaaggcgggtagatcatttgaggtcaggagttcaagaccagcctggccaacatggtgacgccccatctctactacaaatacaaaaattagctgggcgtggtggcgggtgcctgtaatcccagctgctcaagaagctgaggcaggaaaatcacttgaacatgggaggtggaggttgtagtgagcctggattgcaccactgcactgcagcctgggtgacagaaagagactcagccttaaaaaaacaaacaaacaaaaaaaagaagtgaaaggcacactttttttttttttttaagagatggagtccaggctggtcttaaactcctggcctcaagcaatcctccctcctgggcctcccaaagtgctggattacaggcatgagccactgtgcctggccacatttatttctttattcatttttcatgctactatttaatatgcgtctcaatgagtgatgcttggtgtgacaccagggctctcagagggcaggagctgagcctccctttcctgccctctccctaaggggccagacactgggctctgggggcatacctgtgacccaccccactgactcaccctgcaggctagaccaggagtcaggcagactcccctgtcacttgtcatctctgggcaagttcctctagcacttacctccttacttttcctctgtgaagtggggcgccatcaatgcccattctgcagggcacccaaagttgaagccgggacaactggaacagggtgtggctgttccctctgccaggccacatcggaccgtcttgggccagattttccagggaagaagggaaagctggaacagtgtccctagcttgcctggcagccagctaacctgtgcccatagtctgggagaggtgccaggcccagacacactgggcagcagggggctggattggctccagagctccaatgctttggcagtcctggggaagggaagggatgtgcttggcttcaggtcaagagggtgtgggccacagaagtgacagctgggggtggtggagggcacagcgggcttatgggggtgtgtgcgagaccactgttgcaacaagatgctggcagggaccttcaaaagaacatctgctgttgactggcctccccactcccactcctccacaggttttcccatgagtcctagaggaagccaggccccaggcttctagatagaaaatagaacctacattggccaagcgtaatcccagtgctttggaagcccaagccaggaggatcgcttgaggctaggactttgagaccagcctgggcaacatgaggagaccccgtctttacaaaaacgaaaaaagagaaaatagaacctcaggcctagagccagagttcaggattggggatgcagggaaaggaggagaggggggccataactcaaatctctttcccaaagatagagtagttcctggctgggtgcagtggctcacacctgtaatcccagcactttgggaggctgaggcaggcagatcacttgaggtcaggagttcgaaaccagcctggacaacatggtgaaaccccttctctactaaaaatacaaaaaaattagccaggcgtggttgtgggtgcctgtaatctcaagctacttgggaggctgaggcaggagaattgcttgaactcgggaggtggaggttgcagtgagccaagatcgtgctactgcactccagactgggcaacagagtgagactccgtctcaaaaaaaaaaaaaaaaaataggccgggcacggtggctcacgcctataagcccagcactttgggaggccgaggcgggagaatcaagaggtcaagagtttgagaccagcctgctcaacatggtgaaaccctgtctctactaaaaaatacaaaaaattagccgggcgtggtggtgggcacctgtaatcccagctacttgggaggatgaggcaggagactcgcttgaacccaggaggcagagctgagatagcgccactgcactccagcctgggcgacaagagtgaaactccatctcataaataaataatcaaacaaacaaacaaacataaaaagatagaggagttccttcatcctgcaggaaaaaggggtgggtcacgcagcatcagagctgtgaactgagaaatcctagggaaagaagaggccagtgcctgagtccctactggatgatgggagcaagggggaagggtggaggctcccagactggaactctccaggaggtttttggctggggaacagaagggagagcaggaggtcccaaggtaatgaaatgaaggagggagttacaaccttcagcaaattctggggaagtgaagggatctgaggatgaggaccggattctgggacagggatgctgagctgctaagtcgggaagaggctggaagccaggcacggtggctcacgcctgtaatcgcagagctttgggaggagggaggatcgcttgaggacaggagttcgagaccagcctgagtaacatagcaagaccctgtctctacaaaatatttgaaaattattcaggagtagtggcgagcaactctagtcccagccacccaggagactgaggcgggaggattgcctgagctcaggagctcaaggctgcagtgagctatgattgcaccacagcactccagcctgggcgacagagcgagaccctgtctccaaaaataataaataaaaaacgagacagggctggggcagaggaggcagcagggtctctggggacccatccccgggagcgatcacgcgtgcggaacgtccaggacgagaccccagggcttcgatccccacggggctgctcgtgcggggtggggcggggtctgggcggggtctgggcggggcccgggcggggtggggcggggccggggtcccgggggccggggcggggccgggctggcgctgcgcagccgcggggcggccgtcgcgcatgcggggctcacacggctgcagccggcgccgctgccactcccgggagcatgaaggaccgaacccaggagctccgcacggtgagtccggccccagcgcgcggccgcccgccgcccgccgccagcgccaacgcgccggacacttcccgcccggctcccgcggccaggatggtggccgctcctgcgcccccagccagggctgaagggagcggggcgagccagggacctcgacccccctccgggttccgcccctcggacccactcggggtcaggctcgcgtgagctcggccgcgctgacacgtggacggtcggctggagtccggggtcctggataaacttttcggggccctcttgatttggggggttcggagggtatgatggggttttggtggcgggacctcttccccctcccgcagagcaggccctttctctggccccctcactgcccctcatctctgacctcccgtgccccctcggtgtagacagacgaggggaccgcggtgggaacctccttggtgtagacagacgaggggaccgcggtgggccggtgccggtcccctgcgcggggccccgctgcggggcgcgctgcggaaacctgatcgtcgggtggtggcggcctcctcgggccaccctggtcacctgtggctcccatcacctgtggctccccctctgcttggtcgcagtagggatccactgcccgccccaggtatgggggggggggcgtcacacccgcccccggtccacctatccaccttcgggctttcgggcagcactggctggcgtttccagacccttcagggttccttgcgacttggatctatttttctacstgtatctgggaaacccctggggtgtggctcctggggcggggtttggggggagtaggaggatgcacaaacgttctgagtcagagcccaccttctcccagcccagagacccctgcagcctgcgtgggtccccttcccctggcctctgcccttagggatgaggagcccaggaggatggtgaccgggagtggaggacagcgacggaaatgaagcctctctgggtgtgtcggggagggggggtggatcaaggctcaagactagattgagtctcatctggtcatctggtcccctggctggccacctggctggcagccctgcctgctgatccctgggagcaccccccaccccgctccctgggctaggaactagaaccctaaggtcccctcctatggaaaatgtcaagtgtcctttgggcatttgaccccacggcttgtcttctccacccagaggctccctgagttggagcctgtctgccccattatgtcatggttgcctcctgggcatcctggagccgggacctgggctcccctgccttcatgtcccccacttgctctggcaccacggcctccactttgcctccagacctgttattcctggccgagcgcccagcccctggtgtaaaccccatgaggtttcaaaggaagaagatggtccctcaagtcgcatatgggctctaaacacttcccccgcggcccctgtggttgccctcaagtttcctgagctccgttgagtcagaatgagtgttttcctggtgacggatggctgtgtggtgtaatgtgctgatgtttaggcgcctggtaggttacctgagggtgtgtgtgggaaccaagtggtcaggggaaccatgggcccctacataggataatagcctctggcatgtcagccttcatccccctagctgaaggggaaactgaggcacaaaagaaacacggcttgcctgctagagggaggggtggtagaaaagggctttgcctcatccctgaagatagtcagactcaggcctggctgacactgggggacagccagtggagctggggttgtgaagcgtttgaacccagatctttttgctctgatgtctgtctctgttactacctcctcgccccctgattagatggtgaagccaggctttgctttgaatggtctgaggcttccgctccagacacccccaccctccccacacaaggcattcagagcccagggaggctgtacccattgctgggtggccctgcccagggagggctttctagcagacaggtggacggctggcaggcaggagcccacccggggtggggtgagacagtcagtcttggtggggccactgttcccacaggctgctttccctctggacctagggttcccatctgtgaagtggggatgggaaagcctagaattcagtttctcgggacgagaagcagggctacaggtctcctgactccagctccacatttgtaggaggcctgaagccccaggagtcagaattttcagcccagaatccccagaaaggaagaggccagcactggctgagctggactgggctggactgggctggactggggcgggctgggctgggctgggctgaacagagatggtgctggggacagcggctgtgcaccgctcccagccctccctccctccctcttcctcctcctcctccctcttctttctccttctcccccacccaacaccaccacatttggaaggaggcgaagagagcttatttataaaagtcacacttggggaaggagctggcgcgtttcctcactctgcaggcccggcccagccctccagccttctccagccttctccagctcccaactctccctctgcagatggggagtgaagggggtcactggggactagccagggggcctcaatgctgtcgcagtccctcagagatcagaaaggccacttgcaggttacaggtaacaaagagagaccgaagacagggccagggtcacacagccagggaaagacttttaggttagagcatccccaggagccccactcaggctgtagctgcctcctcccctcaactcagagactccytgattttcttcctggggactttgcagagctgacctttctccctgggcccagaacatgtatttgtctatgtgccaggtcatgtgggacagacacatgggacctgttgcaggaggctgaagacgtagcaaggagggagagttggagcagcacaatcctggaaggcttcctggaagaagagaccctgggatagcacaggagcaggagctggatttgaataggaggagagaaggtgatccaaaggaggggacagcttagtgaaggcagagagattggaatgctcaaccaggagagaatagcaggtggtcctgacagctggtgtctggggccccctgaagtgccttgaggtctagactagggcccaactcactggagcagcccaggcaggcctggatgggaaggcccagggccctgctttgcccatcagtttccccttctctttcgttgctgggaagagtctggcggttgggtggcaacaccgggcaggttcatccttaatctccctctgctcatttcctcatctgcagaatggagccagtgttacctactttgcagagtggcaggcacgagagtgtaagaacaggagccggacagggctcgcccgatccttcctcccattacgttccagaggtttcccagcatgaacgatgcatttgggtacattttcatctggggtgcaggtggaacggcctcccgggaccatctagttcaacctcctatcttacagatcagaaaacaggtccagaaagggccaggtgtttatctgaggtcatgcagcctgtgggggcagagcctggccccttccacggcctgaagctgcctccctgagccactctggggccctgtgaaggggcaggctctgcagggcggggacctggtgtacacacagctggaggctggagacagggtgaggaggctcagattgcacagccgtctttcctggagacccagcttggcctctcgcacacccctgactcagctccgggcctctctgcactagtgatattgactttgattagtcatttaaaagaagaagggaaaaaaatagccctcgaggcagacaacagccactgtgctcagcagtgatgaatcaaccttgccagcctggtggcttcccctgggacacgcctggaggctgcctggcctctgcgcctcttggaggagtcagactattacatccaggaaggtgtcctggaatcctggagtctctgctaggagagaccaccagggctgccccacctctgccaggggaagctcagggcatccagctccccgtggttccagcagggtctgttcttcctagcagtctccatgctagggaggtaaggagcactccctcccagccttcctggttggaggtggtgttttttgttggttttttttttgtttttttagacggagtctcgcactgtctccaggctggagtgcaatggtgccatctcagctcactgcagcctccacctcctgggttcaagtgattctccttcctcagcctcctgagtagctgagactacaggtgtgcatcaccacgcccggctaatttttgtatttttagtagcaacggggtttcaccatgttgggcaggatggcctcgatctcttgacctcgtgatctgcccgcctcggcctcccaaagtgctgggattacaggtgtaagccaccacacccagccaattttttttttttttttagacggagtctcattctgtcatccaggctggagtgcagtggcataatcttggctcactgcaacctccacctcccaggttcaagtgattctcctgcctcatcctaccgagtagctgggattacaggcatgcaccatcacacccggctaatttttgtatttttagtagagatggggttttgccatgttgaccaggctgttcttgaactgctaacctcaggtgatccacccaccttggcctcccgaagtgctgggattaaggcatgagccactgcacccggctacccctataaattctgattcagtctctttggggtggatccctggaagccgtttttgtttttttttttttaacccccccaaaggattctggtgctcgcccagctttgagaactgctgaatgcagaacaaaaaaacaccaggatgttagctgggcttgggggctcacacctgcagtaccaactacttgggaggctgaggcgggaagactgcttgagctcaggagtttgagaccagcctgagcaacatagtgagaccaccatctctacacaaatttaaaattagccaggtgtggtggcaggcacctgtagtcccagctactctggaggctgaggctggaggattgcttgagcctgggagatcaaggctgcagtgagctatgatcttgccactgcactccagtctggacaacaaagcgagattctgtttcaaaaaaaaaagagctgggcgcggtggcttacgcctgtaatcctagcactttgggagaccgaggcgggtggatcacctgaggtcaggaattcaagaccagcctggccaacatggtgaaaccccgtctctactaaaaatacaaaaactagccgggtgtggtgcgggtgcctgtaatcccagctactcgggaggctgaggcaggagaatcgcttgaacctgggaggcggaggttgtggtgagccgagattgcgccactgcgctccagcctgggcaacagagcgagactctgcctcaaaaaaaaaaaaaaaagtgccaggacaaattggatgttggttggatgggagaagaggaggaagatggcagatgtcctaggtttctggcttggggttctgcgctaggcagttcagaggatggggctctggcaaaacaggtggagcctggttttggccaggaggcaggcaaggtgcccgtatgatatctgggcacatccgtccgtaagacacttgggcctttgagtttgtgccccacagttccagctgccacctgcacagcgaagggttccaagtccccaactccaatccagccccctctccagagctgtgaatgccactcagaaagcattggtagatccccaagggagctgggccctaattattccacagaaatctgtgtgtccacttttgtttttttgagacaggatcttgctctgtcacctaagctggagtgcaatggcacgatcatagctcactgcagcctcgacctccagggctcaagcaatcctcccacctcagcctcctgagtagctgcaattacagatgcatggcaccacgcccagctaatttttgtagcttttgatagagatggggtcttgctatgttgccctggctggtctcaaactcctggactcaagtaatcctcccaccttggcctcccaaagtgctgagattaccggcgtgagccatcatgcttggccactttatgtatacagtgcccgccctggccagcccaagacaccaggaagacagcatgccagggtagccacatcacctagttacattttggtcaagagtgtgtctgggctgggaaacagaggaggtgagggtggcagtggggctctgccatcccgcgtccttatcagtttattccgtgtccaatgagaactgattccttatctgagtgaatctggaggacatctctagaatgctgccaccaggctctagcttggatgtggatgagggtgcaggggcgacagagccaggagccatcagaatcccacaaactgaaataagcatcagaacaaatgaagaaatgaaacaggaagaaggtccttcactcgaaccccaaatccactccacagacagtggttgggaagggcttggggcttttcttgacaggaaatgctacatgatcacttatctgattcctggctgtattactagaggtagatcatatagaaagagggaggggatgggccagatctttggcattgcccagaccacagtcagcagcagattcagtttgtgtgctgtatgacaggagacagaggcacagtggaacaactcttgggcaggggctgtaatttggggtccctgggaaggatctgaaagggaaggaatacttaaaaagaaaaatctagggaggatgtggatgcygccttcaaatctatagcaggggtaccccagggagagggcacccacaggttctttatggcctggaaccaaaccacagggaagagaaggactctaacagttggggctgcccgagatgggcagagctgtctggggaagctagtgagctcactgtcacaggaggtttgcaagctgaggctggcagctgaagccagggggacttttcaggtcccttagggcctgagagttttcagccatggctccaataggaatgtgaatggcgtgtggaagaacaaggtgcgagatactgatttgggggggcagggaggcttctggaaggaggtggcatcgaggaagaagggaatgtcaccttcatggaatcagcatcccgggcaaagggatgtgcctgggggaagttgggggcagagggtggattgtagggccaggaaccagttgtaggtgtgggggagtggggtctgatcccaggggagggcagcaggataaagagcagagctgggggtgaaaattcccaagaacgaagaagtagaaggacgtggggaggaaaggcccacttcgcccatcccctctaggttttgcttggagctgtggctggtttgaccatgcctcagaggtcaggccctcagccccccgactggctttggggccaatctcaatgccacctccagggtagacttgacctgcgtgcccccatctaccctggccctgatctccctttccccagccctaccctcatagacggagggtccagaggaggatgcgggcatctctcctcccagcccttctgttagagaagcttcctggtccagccttcagccttctgggaaggtagcaggtcagagctggccggatgcctggagaagatctgccctcattacacagatgggcaagctgaggtcaagagaggcaccagacaggtgccaggggtctctgagggcaggacaggggttcggtggggctggcagtgacgctcgtctctggccacggaaaaggagctggataattctccatccaccctttgtcatctaccctgatcctctgagcaccagggcagagagggcaggacactgaatggcaggagctcctggggccacttcccaacctggcagcctgcccaggaggaggaactgggctcctcctggcagtgctctgcctcagtttccctagggagggctcctctgactcaactcctaggcctgtcacggtctaaaagcgtgaaaacggctcctggattttctgtgtctgtagggagcttggtgggggagggggtaccacctggtgacagccccaggcactcggtggggagtgggaacgaggatttattttagctgctggggaggtggtacgatatcttaaagagaggaggcccctctgagccgcctctatcaaagctcctaactaccccctctccccatgagtccccactttgatggggtgatrtgagcccctcacagaacatgctcaggccgggcatggtggcggctcacacctatactcccagcactttgggaagccaaggtgggaagatcacttgagcccaagagtttgagaccagactgggcaacatagtttgaccctgtcgctacaaaaaaaaaaaaaaaatcaaaaagtagctgggtgtggtggcatgcatctgatgcatctgtagtcccagctgcttgggaggctgaagtgaaaggatggcttgagcccgggaggttgaggctacagggagttatgattgtgccactgcactccagcctgggtgacagagcgagaccctgtctcaatcaatcaatcagtccatccatcaatcaaacaaacatacctgccctgcttccccactttttctcagccctccytccatgcagccaggtgtcactgtccccatttcacagaagagtaaatagagccagaggggttaaggcccagcctgatgagtcccrtcagttctctcagcccctcaacctccacctgcctccgtcctgacgcgagagcaccgaggtggggtcagtgctgagctagtcagtggccactcccgtgaggcactcagaaatgaggtgggaacaagatcagatgtggtggttcacgcctgtaatcccagtactttgggaggccgaggcgggtggatcacctgaggtcaggagttcgagaccrgcctggccaacatagtgaaacctgtctctactaaaaatacaaaaattagctgggcatggtggcatgcacctgtaatcccagctactcgggaggctgaggcaggagaattgcttgaacccaggaggtggaggttgcagtgagccaagatcacaccactgcactccagcctaggtgacagtgcgagactctctcaaaaaataaaaaaataaaaataaaagaggtgggaacaagccctgagccccaggctgagagacctcagtccctgccccagggtggccaccccggatatccttgccttggctgcagagagagacctggccttgccagcagcgtgggctgaccctggccaactggcggtatgaggcagacagtaataattgtgcgcagcatgctgggaagtcagaagtatgattacccctgccccacgatgggggtggcttttgtacagctggtcctgggacagtggagtggggcttgtaactgtggctgaggcctaaggcaggacccaagccaagtggcaacatgactgtccccttgtgcctgctgggcccaggtctggggactggaaggaggcagaccgaggtccaatggcaagaccgacagggaggccaagtgcagtggctcacacctacaatcccagtgctttggaaggctgaggcaggaggatcgcttgaggccaggagttcaagaccagcctgggtaacacagtgagacccccgtctctacaaaaataaaaattaaatttaaaaactgttttaaaaaaagactcacaggagattcctaagagatctgatccgtgccacctcgggactggggtttagtggtgcccagggctgggacacagtaggcaggtctccccttatagggcccactctggaaagggagcttgggacctctgggctccacctgaattaaaaccactggagccaggcatggttgtggaaacctataattccagctactcgggatgctgagttgggaggatcgcttgagcccaggtgtttaaggctgcagtgagctgtgattgcacccctgcactccagcctgggtgacacagcaagacctcaactctacagatgtgtgtatgtgtttgtgtgtgtgtgtgtaaaccacagggccaggagagtagagaatgcactttccaggcagctgtcctaggggcctaggggacccagagggcccagacagagcggccggccccaggctcgcttgcctccccagccacagggagggggcaggcagataggtgagggaggaagtccctggcccagaggctgagacttggccttgacaccagtgtatcaggcaaggttcctctctctgtgccgggcccccagtggtcctccagatcttactgtggctgggagcggaacagccaggcctgttcttgtccctgcccagaggcccccagggagagggggaggggcagggccctggcrctgtaccctgggcacctgcgtgtgtacaggtgggtcctgtacatacgtccacttaygtgtgcacaaccccgcacaggccaaggacagcgatgatgatgatgatgtcgctgtcaccgtggaccgagaccgcttcatggatgagttctttgagcaggtgggagccagcacaccccacccttcccgcacactggcagaacttggggggccactctcgcctctgagccaggttcagtgctctttcacacctgcacctggctcagcagctccggggtgccaacgaatgaaccgttttgagggtgaatagatggaagctcagagcggagctaaatctgggatcacactcctccccatctgggtctggaaggatgcacccccactgcaccccagcacccggagcctggcccgtcctccccctgagccctgaccgcagccctactctgggccatctctgggccccagaaggcttctcccctgatttccttctcctgaccacctggccttggtccgcaggtggaggagattcgaggcttcattgacaagatcgcagagaaygtggaggaggtgaagcggaagcacagtgccatcctggcatcccccaaccccgaygagagtgagtgtgtggggcgggggacgggtttcaggccccacaagcctcgggaaggggctgctgccagggaggcctcacgggacctctgcagccttcatggctggtgggcttaggagtgtctgggcgggccagggtcgggagggtttcacgagaagccttgggaaatgcagctgtccccggcttggaactggggggtcagtacccagcatcccaggccggccagaccaggtctccatgaaagacttgggtgatgggagaggcgatcggccccgcccttcccaggtgaactggccttttttttctttttttctttttttttttttttttttgagatggagtcttgctctgtcgccaggctggagtgcagtggcacaatctcagctcactgccacctctgccttccgggttcaagcrattcccctgcctcagcctcccaagtagctgggattacaggcacgcgccaccatgcccggctaattttttgtattttagtagagacggggtttcaccatgttggccaagacagtcttgatctcctgacctcgtgatccacctgcttcagcctcccaaagtgctgggattacaggcatgagccaccgcgcccagccgaactggcttttttccttttttcttttcttttttctttttttttttttcaagacggagtcttgctctgtcacccaggctgcagtgcagtggtgccatctcggctcactgcaacctccgcctcccaggttcaagcaattctcctacgtcagcctcccaagtagctgggattacaggcatgcgccaccacgcccggctaatttttggtatttttagtaaagatggggtttctccatattggtcaggctggtctcgaactcccgacctcaggtgatccgcccgcctcggcctcccaaagtgctgggattacaggcatgagcccccacgcccagccccaagaaggtattttttttcatttcgaactggcttttttctaaggcaactgggctggctgcagccctgggcttctgggagcgagggaaggaaggagggaaggaggaagctgtctgtgatcaataggaaggcctctcggtccagccccgcccctcccctcgcctcccaggggagcagatggcagctctaagtcgtcagcgctgtgggagggcaagctggccaagcaggcagagcttccggaaggagctggcagccctggcacctggccacgtggcaccccggggcgggcattctcagggctccaggaagtcacccctctccctccacactgggagcctgtgtgtcaggctcgcactctgtccccagacaggtccccctgacccggtcctcacgttcctgttgagatgttgtttactacactgagagatgccaggctgatggcataggtgcccttccctggaggggggctcaccatgagccccagggatgcagccatcaggtgtttgagggaggcaagcgctggccacccaggtgcccggggtcagattttcttctcacctccagcacggcctcctggtctatgacccctcacccccaagcccactggcatcttcaagaacccagagtaaatctttycacagccccaaagtgtgcatgaacccaggtcagtgccacaccaactaagccagtgccccgccctcagaaggcaaaatgggtcaggtgggagcagggtggactgcctcaggaagggcaggagggagagagggacgcccagggctcaccacgctgagctccttgcctgagagatttgttggatggcagcatgagacggatgtctgtgcgcccagaggtatctgggtcactgtgtgtccctctgtgggctgttcctgctcagggtcaggaggtggctgattgtggggtggggacggagggctctaaagagcaggggagtgggtctctcactgctggcaggtggggcgggcatggggcagcagagctgtctgctccacaccttgggctcctgcaggccacctcctgcaccgtctcctgctgcggtgtcatgcacagtcatagggaccggttctgagtcaccacccgtgagctgagcagttgagacctggcggagtcccaggctctcgctaagaggagggggctcatgttgggggttctagggcacaggcggcacagagttaaggagaagtctcaaggaaagatggcaatgagtggggggctctcccgggcaaggcaggctctgcctcctctgggggctgccatccggcctgggctattttgggtctgagcaaaagaggctgagacgtcagagcagctggtaaccgacttttcctttgttcctacggatgaggcgccctcctccgcgcctcggaacccccccttccccgctccacctcactgcattccacttgggaggtgaccccatccggggccttcctgatagaccactctcaacacccctccctgtcccctctaggacaaaccccagccccaggggcaagcagaggggcaggtgggaaggtgatagccagagctcagtcccggcttctctcggggcagagtcctgggggtgtcctgagactggggtgttgccaggagcacccccaagggaggcagctgtcttgtcccacttttccatccagcttctctcaggcaggggggcaagctgggcacccccatggcctctgccagctttagggagatggttctagttggaacaagggccacaaaacactatgtcaccaccctcgtccaatttcaccagggccccagctacctgccacggccagggccaactgtgcccacctctttggacctgagggcccacatcagcgcccacccaggccatccaccccttgccctcttccgcccgccaggtacttagcacccagggaggcgtagctttgtgggaacagcaaggtctgccccacccagagtgtttgcgcatatgactcagggagtgtggggtggtcccctgtcaaccccctgcctggctgcgtaccctcctgagccaccaggtaacaccaggtgagcccacaccgcccccccaccccttcaactccagcaagcatcaagtcactgttcccggcgccaactccagcatcgccagctgctccacaattacttctgccttaaatttagacccatctgttatctccagggggtgggggcgccagcaaaggaggaagggaggctcctccgaagacagcacaagagggggtgaagctgcagctggtgcagccctggcccagaattgggggaggggggcgggcaggcagagccttagccaggggaacaggggagaacagggatcttcccagagcctcccactgggccccctgggctggaggctgagcctgcacatcagtccccgcggagcctaggaggcctacccccaccctttctacctccccagagacgaaggaggagctggaagaactcatgtccgacataaagaagacagcaaacaaagttcgttccaagttaaagagtgagtcaggcttgtctgggggtgggtggggggcattctaggcctgcttcctctgcggagcccatggggttttgctcgccctgagggggtgcgccggatcttgctttcctttctgagggtggcgtcatgtgcccattcactcagcagctacttggcaaggcccgttggtgccagactctgggctgggcccagggacacacccacctaaggctttggcgagggagggctccactctggatgggcactgcccctcacctctgctaaagagggttgaagaagtggccagtacttcctggtctcttgcagaagcccggtattctgggtgaacagacacgtgcaycccatgagtgccaaggcctcggggccacatgccctgcaggaggggccacctggctctccccgctgtgggcatggtccctcgtacacagcctttctgagcagaaaaggagtggtacccaggcatagggtggccggagctaccagacctcacacacacgcagagcttggagtgggtgtgcatttacacacatgcacacaccacacagcgtcacagctggaagggcttctgtaggcccctcctccatcggtgcctggcactgatcccaccagccacaggccacacacataccctaggggatgtgggaaggtggatagatgctgggtgtgcgggtaggggacggggttgaaggggcctggttatgacttagcagccacctgtgcccccaggcatcgagcagtccatcgagcaagaggaaggcctgaaccgctcctccgctgacctgaggatccggaagacacaggtgcggccacggagtctaggatgggcgggcacctgagtctctgggtcggtccccgcagggcctgacccctgcacctccatctcgggcccccagcactccacgctgtccagaaagtttgtggaggtcatgtcggagtacaacgccacgcagtccgactaccgcgagcgctgcaaaggccgcatccagaggcagctggagatcagtgagctgggggtggggcctggggcggggcctggagcctggaggggcggggcccgagtctgctgctgagtgcgtggctcaaggctgctgcttagttaggggcccgaggcgggtggcccgaggcagctgctgagtttggggctggaggggcgggggcctgaggcggctgctgtgttaagggccgggggggcggggcctgaggctgccgctgagctcggggctggggggagcccgggcctgggacggagggggcggggcccaatgctgctgctgaactccccgaagagggctgggctcagtgtgaccccactcgcttgcagccggcaggaccacgaccagtgaggagctggaggacatgctggagagtgggaaccccgccatctttgcctctggggtgagtgtaggccccatccctcctgccatgaccccctcaccatgttccctaygtccatgacccctagtgctgggtctggacagtatttggacacagaccccttgtaaggcaggttttagggaaggaagagtcccagagaggggaaaacaccaggctgaggtcacataaatgtcagcggcaaaggtggactcaagacccctgtctcctgatgcctcccagttggactcactttcgccggcggccagcggctcctcctcttatccgtgggcccttttcctctcctggaggacatttggccatttctgtgttcacgtgaagccgggcaggggtgctccctgaaggatgtggcacacaggtgttcgaggcaggcttggggctgtgagttccaggagagaggggaggagcagtcacattcaatgtgggggaagggacgggagaaaggcagttccaggcttgggtccacggggcagtcaacttcggctctgcaaaatgctggtgataaggactgtcactgagcactcgctctgtggccagcacaggtggaaagtgtcactagccccacgttacaggtaggagattggcttgcagagaaattaggtaacagctagcatgtggcagagccaggtagcaaggcggggaaggctgcggcttgggaggaagcctcaggcccccttccggagcagctctgcccaccccaaacgccctccccctcggccctctgccctgcccctcagcaagcctctgggtcccagccccctgctcccacccccagatcatcatggactccagcatctcgaagcaggctctgagcgagattgagacgcggcacagtgagatcatcaagctggagaacagcatccgtgagctacacgacatgttcatggacatggccatgctcgtggagagccaggtgagtgccgggcccccctgccctccactccagcccacaccagcacccagggctgcactaacctcgccctttctgcccgacacgctgccctgccggggagggaccaagttctcaggtaaccaatcacccgctgttgaaactgccgccagggccctgccgacccgaaggtccctgtcctctgcatggctctgcttgagcttcaaggaccccaggccctgcatggccccaccctctataccccgccgtctctcattcccctactactgtttcctcatggggccactgtgggccacgcatttccccagagactgaaggcatagcagtgaccaggacagctcagggacctgcttcctggagtgaatggctgttgggcaaaagagttgcctaagaacaaatcgaaggttctccagtggggctcaaacttgaatgagtcacctggaggacttgtaagtttccaggtccccgtcccagagactggcagctgaggtgaaggtccaggaaggtgcctctctgacaagctcaaaggtggtgccaccaccactatggttccaaagttacacagagtaacaccgtgaccacgatggggcggctgcctttgttggagtgagtggtcaaggaaggcctctcaggaggggacatttgagctgatgccaaaaaagggggaaaaggagccagctgtgaagacttcgcagcggagwtgaagagctggccccagcaacactaaggtcccaagcccagcaagacccagacttatttcaggaacagaaaaaggaggtccttgctgctggggcacaaggagtggtcggagctgagatgaagctggagacgaggtggacggggccttggcaggcagtgtgctggggaatttgcggtctcttctagattggagggggtttgggttgtttgttttgktttagcaaaagatgggatcttgctgtgttgcccaggctggtctcggaactcctgggctcaagtgatcctctcacctcagcctcccaaagtgctgggatcatagatgtgagccacagcacccagccaggttggaatgtgttaagtatgggagtgatgtggccttggttaggaagtacggaggccgtcaggaggctgccgctgccgccatctggtgagaaacagaccatggtgacgtggacgccagtgaaggcaaccgatggacttggagagggagacacgccctaggagtcttgtggggcagtgtcatggtcagattggcctctgggggcagcatgggaccagatcacagggctcaaaagggctgtgggctgggcagggggttctatttttttttttttctttttctttttttgagacggagtctcactctgtcatcaggctggagtgcagtggcaggatttcagttcactgcaacctctgcctcccaggttcaaccagttctcctgcctcagcctcctgagtagctgagactacaggtgctcgccaccacgcccagctaatttttgtatttttagtagagatggggtttcaccatgttggccaggatggtctcgaacctgacttcaagttcttaaagactgaagaccccagacagcagacagagctggatggagctgtcatgcctgaggatgggggtgtgggcaggctcacctgtggccacctcaggagctatggccagggcaggaccagactccagcatacccactcctgctcccaccttcctctgcctggcactgccacatctctgacagtgttctctgcatggtccccaaccctcagctgagactgcatggccagctccacccccaggattgctgctctgcggggaaatgtgggagctgccttggggagcctgcctggccctctacaccccacccagggtacctggcccaggtgagaagctgtaccctaacctcctcacgccccctttttgtctctagcctcagggtgctttcctgaagtcctgccccgagccccaacccaaccctgaggagggggccctctggagctcgggtgcccccggccccgcagggagagatgattgacaggatcgagtacaatgtggaacacgcggtagactatgtggagagggccgtgtctgacaccaagaaggccgtcaagtaccagagcaaggcgcgccgggtcagtagcccagccctgcccaaggccatgccccagcacccattagggacccccaaccatccccacatccctccccatcccacctctctcccttctctcaggagctccccatgacagccccctcccaggccgtcaccttcccctgcttggatcccccccgactgtccagtcctcagcctttgccatagtcccaccccacctgccgccaacactgtctgaggcctctcctgcccgcttcccatgcagaagaaaatcatgatcatcatctgctgtgtgatcctgggcatcgtcatcgcctccactgttgggggcatcttcgcctagaagccacccaaactgccactccactccaggtgggccactccaaggaggccctggctgctgccacctggctgggctgccctcccaacccccgcctctggctcagagcaccctccctcccggcccccatgctcccttctctgccatgggccctccgtccccgccccgtgtcgtgtgcatgatctctgtgagtgtgcgtctgtacgggaagaggcagagggaggcagccagcggggcgtgatgcagtgtgcacagcgargagcagacccaggcagggccgccagggtgacacaggccacscttccttgccttcagtaactcggtgggcccaggttctgctcttccctgggraccctaacctcscctccagctgacctgccctgtcctctccagctgtccccacaagcagagccctgaggggtggggaccagctggccacatggtgctgcttttcaggttaggggagaggtgrccctgagggacagcccagctctgagtctcagtcgctgatcactgccagggaggctcaggctgccatggctccaggctccctcccctgcctaggggcaaagtccatcgggtcctgggcctcagcttcccttcccacattcctccggccccaggagcaaccccttgggctaggtctgaccccaggtgtccctctggaaggggctggctggtgccctatttccagccaccccagcagctagggaggcaaagcaggctgcagtcagtccctcaagccagcgttgcatgtttgggatggtggctcctgttgtcttgcgctctgggaagtcagatgtcatttcaggcctgcagtctcatcctgcccttgccatcctcccatcgatgtgccacgtgggtgtcacgtgtcccagatgcagtattcggcagccagccggggagggctacctcctcctcctcaccaccttggggcttctcatgggaaatgtgcccccgccccaggaccctctcccttgtggacaggcagggagatgcatgcgagtgcatgcagcaggggatggggccgtgtccgtgtgccccaccctccctcggctttactcctgcccagtgactgtgaccactgtccgtgttgccttcttgaacagcgattccccccaaccccttcaccaaaggtcttggtacaaccagctgcccattttgtgaaatttttatgtagaataaacatttgtatctgtaccaggcctctgttgtagatttcttccccaggtctcctgggggaaaaccttaggagggttctcactattgcccaagctggcctcccacctcagcctcccacagagctgggaccacaggttgtgcctggcctggctgctctagacttcttgccatctgcagtgtcacagtcttagaacctgaggatgaatgaatgtggcactaagaggaagggctcagaggcgaggatcccaactcagcctcaaccccaccctgggccttcaacttcctcagacctgtctctggccgtgcagtggaaaacatccaggccttattccctgagaacaggcccagaggccactctcaaggcctggaatctgacacctgcaggaaaccccactgcagggcttagatcctcaggccccaagcctcaccccactcccagacacccagcccctcgggccccggcacccattccctaatgtcttaagctgctgaacacctaatccagctctgtactgcaatgcccaggatcttgcccctcttcccacatggaccaaaaggctcaagcaaccattacacctcctctcctatcacagccagctggacagtcccacactaccccagagcaggaccttccctttccaaccactagtgacgggacaagagatcagcccaagacatccaagcactgggctggtaggcagctgaccgtgcagctcagtgccacagttcaagctggggccgctggactggcaaggccttcacaggaagggaaaacggactggccagcaggcaccacgaacacatttcatgtgggccctcttcccaactttgcttggtgtgattatgatacagttatatataagccctaaattaaaggactctgtgttccttgcaaatggaaagaatgctttcatctaagtgttttaaatctgattcctgcctggggagtcgagcagtagcccaccaggaggaactggagtttggtgagaatcacagagctgggagatgccagagctccacaaaaggaaattttatttcttgcctttaaacaaaataagatgctctcagagcttttttttttttttttttttttctccctggaaaggaagtttcattatgttgcccaggcaggtctcaaactcctggcctcaaatgatcctcccacctcagcctcccaaggtgctgggattacaggtgtgagccaccacgcccggcccagagaactttttttttactgcagaaaacatttttataactttagaacttttctaaaatactactttgtcagctgaacaatatagaaaagtgcagaggcaagtgcctttccagaaccgcgtggtgacttagaagcggggcttgcgcttgcggccggtgtactgggtgtcaggtctgacttccctgtgcagaaaaggaataggacagtctcagaaaaaaaagatcaaagcagccctggacccttcaaataaagggaagctcttcatggcaatagtcatccacccccacccaccctgccagctcccaggctggcactcacctgccctggcgcctgtgccgctccttcttctccagcacccatgcccgactcttcctcaccattccccgcctcgacatccttaatgggaacctgtggcggagacacagctatgagctgatggacagctgatggatggggctgcccgactggcccccatgtgaatccatggcaagcttacctccgagtctggtggcctcggatgccccttctctcaaatgctccaccttccctataacacaattccccgctctggacaccctccttcctgataacatccatccgggccacagaggttgttgggtgggcagaggaggagagagctgggccgggcatggagacctaaacaccagcgagcagtctgttccctcttcgggaagcagctaagcagcagtaagcaggccgctttctaccaatgcaatgacacatcatcacctagacttcaagagcacagtcgacagttcacagcaggagcttagggtcccacagcttgggggcaggaagacagggatggaaaggagggtctgaaaaggaaggactgaggggtatgagggaagaaggaaagagggcggggtaaccccgaagacccctgtgaccatccgtagaaaccagagacagggcaagccaaggagctgccattcggatgcctgagcctgatgagccagcacaaagcaggagcagctgcagagcagggctggggacacaggaggagtcatctcaagattctacaaagagtacaaagtgagggcagagtggcgaaccagggggcaagaggtgagccatgggagaagcagcaagggggaaagtcatcaatggagctaaaggaaggaggtgaagacggggagtgccccaaagcacaggtcccaagagaagtgggggcccagccctgcaggaggcacatgagaggcatgggagggaggcggccaggaggaagggaggaacaggccaaaaagagagcctggagactgattaggtaaagacttaaaaaactttttcttaattcacctgtttatttaaaataaacaagtgtcctgaatgtggttagactgagatgacagtaacgggagaagctcctccctgccctgtacctcatctgaggaactggaagtgagagcctacagaacgagggatggcaaggtacgtgctgggcaccctcaacacactgccaagataggtggcactacccctactttttgaatagctgaggaatggatgctcaggtcattcaacttacccacatttacttttaggacatgtcgtttgaagacaccagtgtaaggacaagaaggatcctaagacacatggagataaggcaatgtgtacttcccctgggagggaggagatgggagtgctccctgggagcacgagatgggcgcctcagagaagaggtcatccagaagggtcccagctccccatggggaatgaactagggaaactaagggaaatgagcaaagacccaaggggtcaggcagcataaacctatggtggacgtgaggaacatgcatggctgtgcccagctgtgggccttccaaacacatgcattttgggctcatttttcctcttaaatgtcttaaaggtcttaagacctttccctcatgtcaactggacctcagatataacctccctcttcactaccttataatcaattattcattcagaaaaatactgagcactttttactaacaagacactatttttaatgtcagggatataataccagtcctcaccaagttttcactctagctggagatacaaataataaccaagtcaactggtatgtgtatgacttagagcagtgaagggtgttaaggaaaatcaacatgagcggggagcacaactgcaatgaaggcactaaaagagcaatgacaagatacaacttacattttagaaaaaaagaaaaagaccagtcttgctgctatgcagaaaataatctgaaagaggcaaagactgcaaaggcaaggagacaacacaggcagctgttcagcaatccaggctaggggcagtgctggattaggctcgttggaagcagggagggtcagcacggggatacacactgagggacggacagcagggctcaatgacaggctgacaagatgtgaaatgtagggaaagacaggaatgatcaagaatggtaaagaatggaggatgaggccaggcgcagtggctcacacctgtaatcccagcactttgggaggccgaggcgggcgaatcacgaggtcaggagtttgagaacagcctggccaacatggtgaaaccctgtctctactaaaaacacaaaaaattagttgggcgggcgcctgcaatcccagctactcgggaggctgacgcaagagaatcgctggaacctgggaggcagaggttgcagtgagccgagatcaagccaccgcactccagcctggggggaaagagtgagactccatctcaaaaaaaaaaaagaatggaggatggccaggcatggtggctcacatcagtcatcccagaactttgggaggccgagacagggggattgcttgaggccaggagttcaagatcagcctgaacaacatggcaagacctcatctctaccaaaaactttaaaaattaaccaggcatggtggcatgcacctgtagtctcagctacttgggaggctgaggcaggaggatcatttgagcccaggagttcgaggctgcagtgagctaagattccaccactgcactctagcctgggtaacagagagagactacccatggaaactccaggtatagacactgagggggcattgggaaaccccaggtggcaagagactgaagatacacatttgggaattaggaccttccggctggcatttacagcaccacaggtagagaagggatccaatccaggctgggcccagcactcgaagaggaagcagcagtggagtgaggagcagccaggaaggctgaggaaaccacgatggtgggtggaaggccaagtgaaggaagcgtcaaggagggagcgcactgctgtctttgaccctaccgagcaggcacattaaggacatgaaaaaaagtcacaagtgaccagatgtggcttgatggaaattggtggtggagttgacaagaacaatttgtgatgagacagaatcgtcagcctgagaagtggattgagagaatggtgggaggggaagaagaggcaggtctgagttctgctatgaagggaagcaacaacggggtggttagttgttgttatggggttaaggaaggaacttttctagaaaaggagaaattgtgcagcatgtctgtgtgccgacagcagtgacccaggagagtcaagatgaggatgcaggaaggaagggagagccacagcacccaagggagagggtcccagatgcaggtggagggcagcatcagaaaagaaggagacagcctgccaggcgtggcaaggggaaggggcatgtgtgggctcacaaagggagtccaggctgcatggctgcacccagacatccaggaccccaaacccctagccccaaacaggcacagtccaaatgggacctgatgtttctaccgtcaccttggtgtccctgctgcatgtgacctgagaggcttgggtgagggcagagagaaagtccatgtctaacaaatgtggcagcccccgctgcagccggggcaggcttcagcagttgctttacctctcattggtgaacacagactccctgggttcaacttcatcctgattttcactcagcccctgcaggaaccaaagtgcactcaggtcaccctggagagttctcaaaccatctgccccactccagaagcccaggcacccaggcctgacccttccgacagggacgaggtccagtcccacgagaaggaactgacacgcctttctgggacctgcagagcagaggtctctgcctccagattccagaggatgtgagcactccagggtctgcactctggggctgggccctgcttccccaccagtgttctcccagcaggctctgcaggctgagccccactgcctggaagtcaaaagacacaggcctgcctgcaaacccagtgtccctcacctctggtataaaggtcgaaggcccagaaaacaagcagaggtagaatctgaaaggagaaagtgcaaagtgagggttgggtggagaaagccccacagggagacaagccctcagctcccccacccgcaccccctccgcctgcctggaccctggtgacccacaccccagcactcctctgcaccactgagtggcctgaaagggctatgccactaccctccctcctgcagcccaggcagcacaccggcccccagcgctcacttctttgctttggcactgttagggtagtctaccaccatgccaccggagaagcctgcctttgtggcctgggttgtgatcagctccaactgaggaaagaaaggcagcgggtcaggcagcggaggttgagaggagcagacagcttcacctccctcccctccttcagaagccagtctgctccaggacaaatcctgcctgggagaactta

SEQ ID NO: 98275 - DNA, 16515 bp, Homo sapiens
acaggatctcactctgtctccaaggctggggtgcagtggcatgatcatagctcattacagcctctgactcctggcttcaagtgatcctcccacctcagccttccaagtagctggggccacaggtgcatgccaccatgcccggctaattttttggtatttttttgtagagatggggtttcgccatgttgcccaggctggtctggaactcctggcttcaaatgatcctccagccttggcctcccaaagttctgggattacaggaattagccaccatgcccagcctgtaaattgaggctcttgagaagggaagattctggattatcagggtgggcccattgtaaccacaaaggctcttaaaacaggaaggcaggagggtcagggtcagaaaaggggatatgaccacaaagcagagatcagagagactggaagatgctatgctgctggctttgaagatggaggatggccgtgggcaagtggcctctagaagctggaaaaagcaaggaaatggattctctcgtacaccctccagaaggaacactgccctgccaacccactttatatctctgacttccagaagaaatgtatatgtgttttaagccactgtgtttgtggtaatttgttacaacagccataggaatctaataccgttatttactacaaacagctttaacttcctctattatttcataaatgcatctcctctcataaattaagtgtaggctcatcaagcacaaggattagatctttttattttccatctccactgaggagttcgacacagtgtcaagttcagatcaagtactcaataatggaatctctcagtgttttttgttttttgtttttttgagacggagtcttgctctgtcgcccaggctggagtgcagtggcacgatctcggctcactgcaagctccgcctcccgggttcacgccattctcctgcctcagcctcctgagtagctgggactacaggcgcccgccaccatgcccggctaacttttttttttttttttgtatttttagtagagacggggtttcaccgtgttagccaggatggtctcgatctcctgaccctgtgaaccacacgcctcagcctcccaaagtgctaggattacaggcatgagccactgtacccggcctggaatctcacagtgttttaagtgtattaaaaactaacaggggagactaagggatgggtcagtgggccacagagtagcagaggggtgtctgagatactcatggatgtcccaagttgcaggtgagtctcttcagcagacgggaagggaggggtggtgccctactcagaggccgagtacacactatgcccagtcctgcctgacagagtcctgcctctaacctgaagcagtttatttcccatttctggcttccaacctgcgctgctgtgtcaccaagtagtgtgagaatggaatctacaatgaggaaatcaatgagcagtcccataagtacgtatgtatttttccagtcttttaaacttgtttttttccccaccagtaaaagaaagctgctatggtttgaatgcattccccaaagttgatgtgttgcaagcttaatcctcagtgcaacagtgttgagaggtggaatctttaagaagcaattaagttataagggctctgcccccatgaatggattaatgccattatcattggaatgggttagttatcatgggaatgggttcctggtaaaaggatgagttcagtccccttccctctctctcacccatgtgatgccttctaccacatgatgacacagcaagaaggccctcaccagatgccagcaccttgatctgggacttcccagccaccctccagaactgtgaggaaataaatttctcttctttataaattagccagtctcaggtactctgttatagcagtgcaaaacagacaaaggcctatatcattttcatcaggaaaagaactttcttacacctcagaaaaagaaccttcttatacctccagatgtaaacctaacacttaagtgtgatactacctgtggtcctaatgttaacatacaatggttgtcctcagagaagcccttctcctgggaggggcatgtggcacggtggttgagggtgcaggctgggcctgaacttgaatcccagctctactgctgaccagcagtgtgaccctgagcaggtccttggatgtctctacagactggggggaccaacagcatccacttcataaagttgcagcaaggatttaaggaggccgtgggagttgggtgcctaggtcagcacactgcccatagtaaagatacgcactcaagaagcacaggctatggtcaggagacctctgggaactcaactgctgaaggtgagcacaggctgacccaaaagacagtgagcctcacagcccaggcaaaggttggaagtgaactttgtctgaaggtccagggaaggtagacaccaggtcaggtgacaagcaagctatactttctgggaaagcagcatttgagtattcaaggtctcttttaaacttcaggatcaaagataacaagaacccatggatagcatttcacacccattttgttttgcagggaccaggtactaacactgtaccctcttcctgaaggtgcttttcaagacattgcatgctgtcaccttcaagcagaataacccacagaagcctgtggtgcccagagctcttaaaatatgttactcttggctttcctaggaaaaattaagcctgtccaaagatcaaacaattgaacagtgaggtgataaataacctttgcctctccattttcccattaccacccttgtgcctgtcgtttccccccttctctggtttcaaaacgcactcttgtgaacacaccctgtaattatcacttgtctccatatatttttagttaatgtttcacaagagtatctattagtggatttttcatgcttccaagtgcaagtttaccctcatgcttttaagtctatgggtaaagagaaaaataagagacaagagatgtgactggtagaagtgagcaagtaaaaacttaagaagccgcacaggctgtttttcaagttcaagttttgctagcattcgctacaagtataaattctgacaataggcagcattgggcccattctttttttttttttttttttttttttttttgagacaaagtttcgctcttattgcccaggctggagtgtaatggcaggatctcagctcaacgcaacttccacctcccgggttcaagcaattctcctgcctcagtttcccgagtagctggaattacaaacatgcaccaccacgcctggctaatttttgtatttttagtagagatgaggtttctccatgttggtcaggctggtctcgaactcctgacctcaggtgatccgcccacctcggcctcccaaagtgctgggattataggcgtgaaccaccgtgcccggccgcattgggctgattctaatcagaagttgtcccttgaaagaagagatttgtagcctagaagactattaaccaatactgctccaaaagtttttcttagagataatttttatatatacatacacacgtcatatgtaatatatgggtgtattatatagaacatgttatctttcatcctatatcgttactaagatgacatatagttattaaaatcatttcttcagatgcaaaaaataggccaggtgcagtggctcacgcctgtaatcccagcagtttgggagactgaggcgggcagatcatttgagcccaggagttggagaccatcctgggcaacatggcaaaacccatgttgtatttttctacaagaaatacacaaaatatatatatatgtatccgggcatggtggcacatgcctgtagtcccagctactcgggaggctgaggtaggaggatcacctgagcccatggaggttgaggctgcagtgagctgtgttcacgccactgcactccaacctgagtgacacagtgaagtggcttcaaaaaaataaacaaaaaaaccagatgcaaaacataataaacaccccatttgattttagctcactagtggtaatttgagagaaaagatgatttaagatgctattcaacaattggagagatttgacgtgggctatgataatggcattgtggttacataggagaatgtctttgtccttaggagacagatgctgaggtgctcaggggggaagcatctggatgtttgtaattgattctcaaatgactcaggggtggaggaaagtatctgtccagagaaagagaaagcaaatgtggagatgttcgcaattagtgaatctagtcgaaaggcagactggtgttcattgcactattcttgccacttttctgtagatctgaaatattttttaaaagatgtttaaaaaaagatagttcttgttatgattaagcacaaacgcctacttcctcccaggaaaacagaacatatgtgtaaaaacactggcaattttctaaaatcttgattaaaatgcattgccaaaatcagaatatttttgtgtaaaatcttataactaaaaataaaatgcctgtctttactccaaccagtgagttaatacatattctatattggtgcatagcaaagtcaaagaatccataataaaaacaagaagaatatatacaagacagcaaagacacatggaatgataaatgctcaagactggcgggaagcttttaaggaattctattagatttcccatttgttctccaatgtaaataaggccctagaattttagagctgagaaacatcagggagaaatacagtcccaatagtccagtcctcagtttgtaggtgatataaggcagagtcagggaaaattctataagtgtggaagtgtacaagtgtttcaaagctgtaaagtgctcttaaaatccacctggaaccccttcctgtgagttacaatcagcattagatcaatgtcccttggaaatgtcctacttatttcatggaactctttccagtagaaatcaatttccttggcaattttaaatcatggcagttacaaaaagtttgaagtatttccaactgaacaagagtaagtcgagtgttctcacaagtttttcgaatgatcacgaaatatatttggtaaggaaaaggataatgagaaataaaaagcagacacaggaccaacaaataatgaaagagctgaaaaaatgaccatgttactcaatattgatttgccaaataaaaccacaaattactgagtatcttctttccacttcttaaacctgcttctgaagcaatacttccattcattcattcatgtattcaaatatttaagctgctaatatgtaaagacatcagaaggacttcaatggccataccgtaattttttaaactatgtaatattgtccttctatgacagcattttttcttttttacagacaggatctcactctgtcacccaggctggagtgcagtggcacaatcatggctcactgttgcctcaacctcccaggcttaaggaatcctcccacctcagcctctacagtagctgggactacaggcatgtaccatcacacctggctgattttttaaatttttcagtagaaatgtcttgctgtgttgaccaggctggtatcaaactcctcacctcaagcaatcctcctgcctcggcctcccaaagtgctgggattacaggcatgagctaccgcacagggcagcatttattttttctggatatgaagaaagttattttttaaagcctaaatatgcaactaaattgaaaagaatcctctatatctaagctttatgaaatgtgaactgtgagcaaatataattctacattggagggaaaatataatctcagggggaaaaaaatccaagcttacgactctgaaccatgaagcaactgtcgagatggacctttactggatcttgcccttaattatggggttcatgcagtcttaagcctgagtttcaaaaaccattaataattacccttaaatggccaacaaaaggaaattttcataatcagggtggcgtgcccgtaaagactataaaagtgtcatgattctgctcagctcttcaaactcctctttgattcttctagctgtttcactattgggcaaccaggttagtgtgattttggtactacctagagctccttctgtttgcattaatactctgcttccttttagaatggtgtgaaagataatggtctggagagaaggtgagtttatgccatctggagatattccctgtaacttagaagctagaagctgtggtcaagtattcttcaagaccacagcctgcagagtgcagatcaggtacataaaaagtgtagaatgtcattaattactaataaaaatgtttggctccagggaccatctcctaacagatgtactctaagaacagacatttaacatactatctaagatgtctttttttttttttttttttttttgcagcggaggctcgctctgtcacccaggctggagtgcagtggcatcgcactcactgcaacctccgcctcccgggttcaagcgattctcctgcctcggtcttccaagtagatgggactataggcacgcaccaccacgcctggctaatttttgtatagagacagggtctcaccatgttggccaggcttccatggtctcgaactcctgacttcaagtgatccaccctccttggcctcccaaagtgctgggattacaggcatgagctaccgtgcctggcctaagatgcttattttttaaacatgttagtagttactggtgccattccgaccccgaccattctcttttccttattcttccccatttatgccaaggaaatggcccaatggcactaaaatcctgcagacaaccctcagcacaaaactgtacttcagctttttggtaagtttattttcttcccaatttatargacaccagaatgagtactaaaaagtctcctgaggaactgaagaggatttttgaaaaatatgcagccaaagaaggtgatccagaccagttgtcaaaggatgaactgaagctattgattcaggctgaattccccagtttactcaaagtaagtggccatccgcagagcccacttaatgggactgatggtgggaggggagggaggraggggagaggactccggtagagccttatagggaccgtcgcttgagggaggacacatgcaggtggggtttcttccccttaagtcaggccacatttcagaaggcaagctctcagaaaacaagggccaagccttctatccctcctgcagcctcagcacaggactctgcaggactagccataataaatggaagcaatgccaagttatgcctggaagacccacaagtcaccaagcaaacccaataaggccttcagcatggattcagtacttctgtgccaggctttaggaaaacaaagaggactgcaaaatagtgttagctggccttggacaggcttcatttgtgtatgtaaaatccctcaacaagaccaacacttacttagcagtctgttaggaaaacccactgacaaattgccttgtcagcactcatttatatttcaaaagcatttacatttgtgttcatcacttaaatttgtgttaatgaggcaaccgtgcatttctaaacaactttcaagaaaggactaaatttcctgggccataaagtttcacatcaaaatcaccccagagttgtcaaaatcaaaatgcattcaaggcaacagagtacagagaagagctgatcgtcctcactccaatatacagtactgtctttccttttgctaaagaaaaagctgagtcaggacacttgccaaggatggtaaggcaacttactccaggagggccatggcgacccatacagggaccactgaaacgtgttcttgccatggggagagagattgggctcaactccagaaaggataagtgggggtttatgaccatagagcaggatgggggsggccagtggatggaaaattaccaaggaaatatccaggataaggagcttctggctaaattgccttgataggattctagctgaaggcaggccaggtgatcaaatattaagggtagtcagatacaaggacagagagggaagcccaaggtcaggcctagtcgagcagaggactcaaaggagagagtcattgtcattttgcaattaaaaaccatcttcacaacagaagtgactatggaattgttttgtatgactcagtcactatttagctctaacttcaggaaagaacatttcttcaaatattttaaccagctctccagattttaaccagaaatgtcccttctgccaatatgacaattggaaagacttctgtttttaatactaaaaaagaaaaaagctgaattcaatgaccccagaatctgatattttctcattttctcatagttgaaatatagaagaacttgtaaaaacacttaaagtcactagcagaaaaagggactttttaattaaacagcaaaacaagttagtgaaaaaatttaaaattttaaaagaccctttattttttctaaaaggaagaaaaataatcatctaacaggaaagcctaggccatgtactcaaacaagttgtttcaaaaggtaacacgggtaactttttctatattttatgtctttcctacaaaaagtacgtaagacataatctggaacgaggtaggaagactaatggtaagttctgaaagtctacttaacatgtacctgattatattcccataaggtttccattactaaggttttccaccatactctgtttacatatatcatcaccatgcatggtttagaatctagtaaaggcttcaggaaaacagtgtttcatattcataaatcaaaggctgaataagtaacttacagtttggtcttgtaattaaagcaaagtgctaagtgtttttgtaggaatcttaggggttaaaatatatcttccatagagatgtgctgcacaaaattgtgaatctacttagcactactgaactgtatgcttaaaaatgattaagagcgtaaattcaatgttatgtgttttttaccacaatttatatatacatatatatatataatatagtctaatttgaaactgacaaactgaactgttatttcaatcggttttctaagtagtattttgcacagatagactcctacctgaaagtccaagtagtaatggctttaagattagagttttatggtagagacaaaaattaactccacttaagacactgcaggaagtccagtagtcaaaaagcctgcacacgatctcacacgacatctcaagcagtggttctccaagtgtggtcccagagcagcagcattggcaccacctgggaagctgttgaaaatatagattctccagcttgaacaacacagcaagaccttgtctctattaaaacttttaaaaaattagccaggtgtggtggcacacgcctttagtcccagctactcgggaggctgaggcaggaggatcatttgagcccaggaggtggaagctgcagtgggctgtgatcatgccactgcactccagcctgggtgacagagcaagaccttgtgtacagattctcgggccccaccccaggcctagtgaatcagaaactctggaggtggggctggcagtctgtatttactaaggtcagcaagcctatcgtgtgattctgatgcatgctaaagcatgggaaccattgagccaaagtcattttgcatagctcaacgtttgggaaaaactgggcggtggttagttaaggggttgagctctggagtcaacgtgtggaccccaacccctctgttaaccagctgtggacactcaagtaagtgactgcctgtctctgagcctgtttccccacctgtaaagtagatctccctcatagggtggtcggaaggattacagaaggagccctccctgcctgctgcctcatgtaatatgtcagccctagccctggagcaggagacaaacccagcttccaggaaaaccttggggcaggggtcctcaactgtttgtgtgccgtgggcaatccagtgaagcccacagatcccttctcagaagaatgtttttagaggcataaagaaaaagacccaagatcgcataagaaaacaactgtattaaaatacgcattgtattaaaataacagatgtgtgatatggaggacaaaaaggtagccagttctatgacacggagcaatacaacagctaaagctggtttctctctgttagctattagatgcatgtcactggaaacctgagctgccttcttggcacacagaccccaaggcctctaatttctgagaatgtgtagcagtaactgattcattttttctcccctcccttctcccatccttttttatgtaaaacagggtccaaacaccctagatgatctctttcaagaactggacaagaatggagatggagaagttagttttgaagaattccaagtattagtaaaaaagatatcccagtgaaggagaaaacaaaatagaaccctgagcactggaggaagagcgcctgtgctgtggtcttatcctatgtggaatcccccaaagtctctggtttaattctttgcaattataataacctggctgtgaggttcagttattattaataaagaaattattagacataccttactttgttaagtactgacctcataacataatagacttgaaagtaaccttagtctgattcaactaattctatagatttaaaaaagagagagagagagagagagagagggaggctgaggcaggaagaacacttgagcccccgaggtcaaggttgcagtgagacatgatcacgccactgcactccagcctggaccacagagggagaccctgtctaaaaataaaacaaaataaaaataaaaataaaaaaataaaatgtgagggccaagatagctctgtgatcctgccgaaaactacaaagatggtgtgggagacctgaaaagaatccagaaatgccaaaccaactcccttgctccacttttccaccagaatcaccctgttgcttgctctccttccttaactcctcagtgctcaggtcatctccaatttccactctgatctcacactatccactagcgagcaagaaaaacacttcacaaacagacagttgacgtcatgctatctcccagcactcgctgtgctttcttaatgaatgaccctcgacggggaacagaaggaacacaggacctagaggcggccccactcatcactgaccgggtggcctcgggtctaccagcctaacgccatggtactggcatgtgacgtgtaatataaaagatcacaggaagaccttgggccctctcaactcttggcatcctgtattctgagaaaacagccagccctcaagttcaagttccactttttgcgtccagctaggggatgcagggggtgaagtgacaacagtgtggaatatggaggcaagaagtgcagaggagggaagggaactttctgctaccccttaccagataagagttcaaatgttaacgttcaaggagggaagggaactttctgctaccccttaccagataagagttcaaatgttaacgttcaagtttgtccaagttaccaatggctcaagctgaccctaatagcctggtcacagcagtgccccggaagctagatttttatttcttctttatcctcgcaactctcctccgcaaaacacccatgaagtatcaaagtatcagtattgggtcccattgcctttgaacagtctctctcaacctttctttttttctttttctttttttttcttttttttctttgagacagagtcttgctctgtcgcccaggctggagtgcagtggcacgatcttggctcactgcaacctccgcttcccgggctcaagcaactctcctgcctcagcctcctaagtagctgggattacaggtgtgcacccccacatccagctaatttttgtatttttagtagagacggggtttcaccatgttggccaggctggtcttaaactcccaatctcaggtgatccacccgcctcagcttcccaaagtgctaggattacaggtcgcacccggcctctctcaacctttcctaagccattatcaacctcctaaggagctttgttaaacacttgtttctaatcgccaccccccaggaaattttaactccagagatgtcttgtgcatctgtttatgtgctgtgcacatatctgtgctttagacatgagattttttttaaccccactgctgccctccccatcaaaaacccaattgtacatgatatgcctttgaacaatgttcttcaagccatttattatttttacctcgcgctctagagcccagactgccacactatactttctgtagttaacatcagaaagatatgggatcatttccactttcctttttttttttttttgagacgaagtctcgctctgtcgcccaggctggagtgcagtggcgccatctcggctcactgcaagctctgccttccgggttcacggcattctcctgcctcagcctcccgagtagctgggactacaggtgcccgccaccacgcccggctaatttttctttttgtgtttttagtagagacagggtttcaccgtgttagccaggatggtctcgatctcctgaccttgtgatccgctcgtctcggcctcccaaagtgctgggattacaggcgtgagccaccatgcccggcccatttccactttcaaagtgtagaaaatgatgatactgaaggcgtttcaaacaacataagccctctccaagattctgctatacggctctaccttcaagctgaaaataactgcctgcaaagtactgcctttgacttatttttagtttcagggtttttttgtgtttttttgtttgttgttgttttgtttttgagatagggtattgctcggtagcccaggctggagtgcattggcactttcagggctcactgcagtcttgacctcctgggctcaagtgatcctcccacctcagtctcccaagaagctgggactacaggcatgtgccaccatgactggctaattttttttctttactttttgtagaaacaggggtcttcctgtgttgcccaggctggtctcaaactcgtgggctcaagcaatccacccaccttcgtctcccaaagtgctgggattacaggcatgagccaccatgcccggccttttttttttttttttttttaatctaatgaacttgaatgtgtatgctgggttcttctgtcaagttggctgctatcatttttccagaagctggatgactctccgaggtgggcaaaggaacacgtacccatgctcccacctcatctacccataaaaggctgggcagggccaggcttctctctggggtgtttgagctcagagagagagaagtaccggttgatgtaagcacagggatggtggggacagggtgaccaaagtgaactgggcacgagatgagtagctggtatatagtgacttggaaggcaaggtgcttgaaatttcctggaaaatctctgcaagtgcacagtagaaactattatcattggttacgtgcttcaagaggactgggcagatgggggggcaggaataagagagccactattcacttgacaaattcttggacattttgatttctgagccatatggatgtgtgtcctatcaaaaagaataagtgaaaatgttcaatagtaagagaacactttgtaaatctctggctgctgctctttgtgattagcctctcagcactcttatttggaataatcagaaaaatacaactatctaaattttgggaggagagtatacttgtggagatttgggaagaaagaaaataagtgtggaagtttcccccaataataaaatgaaattcattggaagccatttcaaacatttagaaagttaaccagaaaaatagaaaggtggccgggcgcagtggctcacgcctgtaatcccaccactttgggaggctgaggcaggtggatcgcttgagtctaatagttcaagactagcctgggcagcatggtgaaaccctgtctctacaaaaaatacaaaaattagccaggcatagtggcgcacacctacaatcccagttactcgggaggctgaggcaggaggattatctgagcccgggaggcggaggttgcagtgagccaagattgtgctattgcactccagtccaacctaggtgacagagcaagactctatctcaaaaaaaaaaaaaggtgatttctaacccaccaagaaacagaggagatttttataaacagttgagggactgtttaaatacaatttgtatcattctaattcaacacaagagcattctcatggtattaaaactcttaaacatttctcatgactcattacattccactgtacagataccccataataatcttaactatttccccattgtggggcatttagattgctgtcatttccgattcttccaaatgttatgatgagtagattgttgtcatttctaattcttctaaatgtaatgagtacctattcatatttctgtcaacatttctgatttccttaggagaatttctgagaagtaaatgtctgagtcagagggtatggatatttgtatggtttgtcaaacagaccacctaactgatttcccaaaaggttgtatggattcataactctacaggcaggaaggagaacgccagcttcacttcccagagagcatttgctggtctcattttaacaactgttttgttcacgatggtgcacattttttatttgttgctagttgtaataagaatcccttactatttcaccatgaactttactgttggctactgctttgtggaagatattcttcttgtttaagaagtactggtgtcttcctagttcattatgagactgtgagcaccaggtttcgatgttgagcatgtatggcgctacacagtctctctcttttgttcaatcaatataatgtgttaatttaattcccaggataaacacactactcagtcatgatcattctttaatgctgttaaattggatgttcgaatattttatttgagatttttcatatcttcattcccaaccaacgttagtctatggtttgagtttttattatttgtggtgtgtgttttgttcagttctgatatctagctcatgctagcttctcattttagcctatgttcattctaggtatcaattagcccctcgcagagttaatatacattatctatttcaactccaacatatataaagtacttattatgggcaaggcactatacaagatgccatgagagacacaaatttccagacctctgagattctaagtcagtaagtttgggaccaggtcaggggaaggattcatcaaaaaagtagcatttcaactgggctctgtagaaagaaccttgaggggagcatgcaggaaaggggcagcagtgggcattcagaaagagagaaaacagcccaagcaaacacatcatgcccaaatgcaaggctgtttaaagaatgtgtacaccatgtttggggtggaatgtcaagtatgaggaatgaagagggcacacccacttcagatcatgaaagtctttggtcaccatgctgagtccacccaaggtcacaaagggagtaagaaggtgtaggagtcacagaatgacaaaaaaaaaaaattgtatatattcaaggtgtacaacaagatgttttcatctctgtatacactgtggaatgattaccacgagcaagctaacatattcatcacttcacgtagttactgttgtgtgtgtgtgatgagagcaatgaagatccactctctaagcaaatttcagcctcccgaagtgctgggattacagtattattaactatggtccccatgctgtacattagatctccagaacttactcatcttataactgcaagtttgtgccctttgaccaacatctccccatttctcccacacaccccacattttccattttctttatctattcatctatcagtgaacacttaggttgattctgtatcttggctactatgaataatgctgcaacaaacatgagtgcagatacctcttgaacacaataatttcatatcttttggatatatacccagtagtgggataagtggatcatatggtagttctatttttaattttttgaggcacctccacactattttccgtaatagtaatgccaatttagattcccaccaagagtgtgcaagggttccctttcaggagaatttttctttctttctttctttctttttttagacagggtctcactctgtcacccaggctggagtggagtggcatgatcatggctcactgtagcctcgacctcctcaggctcaggtgatcctcccatctcagcatcctgaggagctgggactacaggtacacaccaccacacccagctaactttttaatttattttttattatttatttattattttttgagacagtcttgctctgtcaccaggctggagtgcagtgacgcaatctcagctcactgcaacctccacctcccaggttcaagcgattcccctgcctcagcctcctgagtagctgggactacaggcacgtgccaccatgcgcagctaatttttttgtttttagtagagacaggatttcaccaagttggccaggatggtctcaatctcctgacctcgtgatccacctgcctcagcctcccaaagtgccag

SEQ ID NO: 98276 - DNA, 21979 bp, Homo sapiens
ttggatcctcccttctgcctttgctatcagttccctctactcaccagcaggtcagtggtaatcaaaactctgctagagccagaacgaaactccctcataatcacgtctcgttccttttggtccatatctccatgctggaagagaaaacaaatatgcagcagaccaggtaggcacctgggttccaggaaccctggcttcaagtaggacacttctgacgggcagacccacaacaggctggcagcgggcaaacacaccatggcggatacagtgaaatctcgagcatgcatcttctcggtgagccagtccaccttcctccgggtgttgatgaagatgactgcctgggtgatggtcagggtttcatacaagtcacatagtgtgtccagcttccactcctggaggttgggggacaaaaatcagtcaggggctatacccaacaactcactaccaggcccgcctcctgcactgggccccacctctcgttccacgttgatgtagaactggcggataccctccagggtcaactcttccttcttgacaagaatccgaatggggtccctcatgaacttcttggtcacctcaagcacatcagaaggcattgtggctgacagcaaaactacctagtggaaaaaaaggccagtcttagagtgctggttccttcctgaggcctgctcccttccctagccacacctaaaactgaagcagatgcataaaaaggctcaagaatccagtatatggttcccctggcacttactatttttcaagaatcattagctattcaagcaagactgccctcacctgggtgttgctgttgagcttttggaatatgtcatagatctggtccttgaatccacggcttaacatttcgtcagcttcatccagtacaaacatcttgatgtatttgggggctagagaagaaaaaaaaagccaatatatagcatatgattagggaaatgtgggagagatatatccaacttcgctgataaaaaacagagaggagccaagtagtctgctctcagagtacaaagactgatcctttgcccaggaccttcccgccaggcagacaacagccctgggaagtaggacactgccagggctgcactggcagggaagccagaggctcagatgacacgcatgggctccatcacagagcagctcttcccccagagagaaaccagcatccttgggaatgactctggcttacgctgaaagactggaaagcgtgcacaagagcaaagtgacccaggggattggagaaccgaattactcacacaggtatctccggttaagcatatcaaacacacggccaggggtacccacgatgatgtggggagcttccatctgcagtttctgcacctcagcacgcacgttggtgcccccgatacaggcgtgacaggaggcgcccatgtagtctcctagtgccatgaccaccttctgtatctgagcagagagaggcaggtgctcatatgtcagttaccactgtgcccggcaccattcttaaatgtttttcatgtattgattcctaaccaacaactttggggcatgcactattattaaactcacattcagctgagaaacaggcagaggctaaaatccacttaagatcgtgctgtcaataggtggcaaagacaggatttcaactcagtctggttcctgagtgtacagtgattcacaatgaggccgctcagataattaattcagtttctttactctagatatttagaacccttaaccttctgaaaactaatttgaccaactgcctcatcacgcagcaaccattttttttttctttttttgagacagagctttgctcgttgcccaggctggagtgcaatggcacaatctcagctcactgcaacctccacctcctgggttaaattctcctgcctgagcttcccgagtagctgggataaaaggcacacgccaccatgcctggctaatttttgtatttttagtagaagcggggtttcactatgttggccaggctggtctccaactcctgatctcaagagatctgcctgccttggcctcccaaagtgttgggattatacgagttgagccaccgcgcccagccagcaaccagttttatagaacaggtgatgcatatccatgtcctattgcactcctgccataggacccaagctacgaggcatgttcactctgagaaaactgagagccaagtgccttagaatggagctctgctgtaacttcttacattatccacacccagaataatcactgcccctgccacagaacatttaaaaacatgctctgacatcagtgttgcagcatgacccaggaaaaagtccagcattagaattgtgtgtgccccaggcatgaaacagctctggctattaagcaagggtgaaaaggactgtccatctgctctgactactgtaagatcacccccacaccaagggatctcttagcccatagtgaaggtgcttattcagaacacagtcaaacttgcccagccagccaggcttcacccaacagctttcccatttgactcaggaaatgggtggaggaagcaatggttacgtttgggtaagaaatagcttttaattaacccagcaggtctcgagagtgttagggcacccatgtcttcctcccaaggtggtgatcagagaagacttctctggtccttggattatactcatcatccctaaatcagccctgaaggagggaatagaagccactcttacctgctgagccaattctcgagtgggtgctaggaccaaggcctgggtggcttttagatctaattcaatctgctgcagaatcgatatggcaaatgtggccgttttcccagtcccagattgggcttgagcaatcacatcataacctaaacaaataaattaggagttgaatgtggtaaagagcataccctttgggatattcaagtcctaggttaatgaggtcaataagcaaccaatgaaccaagcatttcatggctcacaaactaccttcccaatcaacacagttacacaatgggaaccagatcagaaacaaggaccagttattaactcatctagtattgcacaccaagctggactagaaacatggctgtagatgcaaatataagctggctacaataccacctctttaaaggaaacctatgtgtccaaggcatgaaccaggcatgggcacggatcaaaagccaagctgggatgaacaaggagttgctttgtccctggctgatatgagatgggcatcaccaaccagatgccactctacccaggtcagggacagtccacaatgtcttctgggactgagaggtctcacccttgatacaaggtagaatggctcgctgctggatggcagagggcttctcaaaaccataggcgtagatgccacggagaagggactccgagaggttcatgtcatcaaagctgtcaacaatctcattccagttactctaggggatgcaaagaaattaaagcttgagtcatggaaaaggtggagctgagctgtagtctccgagcaaacagaatctggtgcctactaacaaaagcctcagagcttacaaccctcctccctttagggaaaccagctgcttctagatgatctgggaaatcaatcaagaggccactctaactctatacggctgaaagttgtaatgggggaggacagaattccatttctccagtctcacctcgatgacgccttcgggctccatcccatcggggccattgtctctggatctgttggtttaaagcataagttttgtcccctgcccgaccgaagcactcagaaatcctgacagccgggctctgtcaggagtggcctgcatgatgccatcaacctgctgtcccagatccaactcccaccagctcccaaaaaatacccaaaggaggagtttctataaaactgaggcatttgccccatgcaggcagcggctcaggccaggccacccccgacataagggggtgaccctttctgaagacaggccggcaggcgtgccgccgcgctcacggtgcccagaggtggtgcttgccgccgggtccacgtgggcccgacccagccgcttaaagcccaagcgcgtgcacctcccaccgcagcaccagcgcgctggaagtcccgcccttcacctcccagatcggagggtaggacatccccttccccccacgtcatcccgcccgcgccctcccccactccctccagccgaagcccccccctcgcgttgcccggatgtgggaggccgcgggcggtggcggcctcgcgcacaatgagcccaagccgagctagcaaagggggagattgcacaacacttagaagcgaagcagactgggggaggggaacgcctcaggccaccatgtgctcgctccctcgaccacccggcggcgtctcccacccctccatggaacaatccacatcccgcccgcccccgtcgcgaagtagcgtcgccctcccatacctcaggccgctcacccccgaaggaaggtggacctgcccatccgcagtttgccaatagcccggcttgtgcggcaaaatggacccgcccgcccggcgccgggtgggctcctggtgcctcacgcggccgctcctcggggttaggctcagtcctggccgtcaagaaaaccagcacactgaacggccggtttcttctccccgacccgtgttttagccgcgacgaagtgactggatctaaggaccaggcacccccgcctctcgcgagtggtaccgtcagaatgctccggaaccccgcgcgccgtccctcccccggcacagggaggcaaccggacctgccggctctgggccacacatagtggcggccgcctccacctttctttcccacgccaggtcgcgaccccgtctcgccactcagcgccggggcttcgcgcatggcaccgcctcgggtcgaggcctcgtaacagacctcgcacgcctgaccctagccgggctgtccctaccctccgcctcgacctggtggccgcgtcggccgtgggtcttccccctcgcccctccaagtcggaccctccccccacccggttcggtttctcccgcaaccctggtgggcctctcagctacccccggcgggcccgtcggaagggggcggcaaaataagcagccacaatctcttgcaaatgcctttcttaccgggaatcctggctcgcagacatgatccttagaaactagggcggagtgcccgcctatcgacaacttatagagcgcccgactccgccccggccatcgcattggtttggccgccccggccccgcctgccggcgctcagcaactcggcatgacgttagttcctagtcgctccggcccgcaggcaccattggataactcgagtgcctatcaaggtgaaggcccgccccgcagcctcattggctggagggcccgcctttctcgccggtacggaagtgacatagaagagtcaggcctcgaggcctggcagccatcttggggccctgcactctcacacgtgcggaggcgacagtgccttggtcatgtggctccgtaggccctatcacgcaaggggggcgaggtctcagcctccagaggcttccgggctctgggggttatcacttccctttacttctgctcccggtctccactggactcaaatgttatttgttttcccctgtagcagagatggattcgacactgcctggacgtgtgccagggatgaaggaatcaacagcgatatcgtagggatgggaggattcccctggctggatggtggagggatggaagaaaactgtaaagggctttggggtactatcatgaatcctggttggtcccctccccagtcccttgtgtccagttccccacgcttccctctcggatgcccttattcttgaggcttatctactttccctccttcctgctctctgctcccatctgggggatttgtttgggtgaagacaaggtgttggcagtgcctgagccagggatggaaagctgaaccctttagtctcaagagactggctggaaggtctgagctaagcatatccactaatttgaagccccttaaggaagaccaccacttacgtatcaacaaaggatcctttattgaccagagcaggaccgkggcatttttwtatatatatatatatatatatatatatatatatatatatatatatatatatatatatatatatatatatatatatgatatctggcgggctgtgatcctattgtccgcccccctccccccatcctgatttcctgctccctgcacggggaagggggaggatgactgctccacccagggccacagggccacactcccctgcaaacagaggaagaaaggggcttttctgtagccaycccctgcacatcagaaatcaacaagtattctctcaaagaaaaaaaaatacacgaaattgaaacatttaaatatgaaaaaccaaagggaagtgagtgggaagaggcaagagaggaaaggaactggagtttcttgggaagggactcccatgtctcccttcccatttatgggcttggggtctsgggtacgaggctcacacagtgagtttgcagtgacacagctccttgtagatctgccgacgaagtttgggcatgtcctgctgggtgaagctgaatggctgagacagggccagatgcttgcagtactgggtgttaacaaagcaagccatgagaaaccccccgtgtcaggacctgtgctacacatttcatatgagatgtgtctccatccttcagagaacatccccaaagggagccagggtcccacagcctggggttcaaaaacagcctgactctaaagctagtgttcttacttgatagaatgttttagatggagaaaatacactgagttggaggttagcagggagctctatgaaggccagaggcccaagactagagacccagtcccaatgtgggatggagaagtccagaagagaaccagtgaagccagtgttttggtgttctaaaacagattacttcctgctccacaactgactatgagccaaatgaggggatgcataacagcctcccgaccctttaacccaactgacttcagagctagrggaggtggccccatcatctgcttacctgcaacacaaaagcaccacagtcactgtcattattctgcctggccacattctagagaagagaaagaaagcaggcccttcacatggagactcccaggggtaggacttcaatttctgccttctaccactgtccccaccaacaccctatacccctccctcaggaaactcaccattttgaagtaacctttccagccctggtggaaatccagtcggtctttctttaccgcctctgcctgtagatacttggcaatatgctatgtggatgggggaaaagaaagtgatgccctaagtttctcaattgaacacagtatggtgggtacagtgctggcagacaccatgcccaggtcgcccctcaaagacccaaagcccacccttcttcctgcaatgccttgccactgcaccgccccacattttgcccatctctctcctaccccctcaaaccttagggcagcggcggtttagggtacgctgcgagtcaaaataggtgatggtgcgtcgcctcacatcaacagagatgagggaccaatgcacctccaggtggatggggattagcagtagctccttattgaagatgtccacctaaagagatagtgccacaggtcaggtacaacaaacagaagtcttgccttytgccatgaaggttctagagaggaacagagacacaggtaagggaaccaagtgaaagaacagaagacccaaggcytagattgtgggcaagctcaggatctgcatgtttcggttcttcggggtaagggaggaaggtcagacaatggaggagacatcagaacgaacactkgagaacccatgatgggcaggcgcttttcacactttaaagggagaagcacttagcagctaagaacccaggcccaggattctggagcctgccagaattcaaatacagctcctccatttactggcttatgacagtgggcaacctacttaataaccttctatacctcagtttccttatctgtcagagagtgtaaatagtagtacctacacctcatccatttgatatgaggattaaactagtgactatccataatacacttagaacaagacacagcacaaagtaaacacgcagttaatgctcataacaatcctaccgggaagttctcaacattcaacctaacagatgaggaaattgcagcttggaaagtcgtgacttgcacaaggtcatgaaagaaagaaatggcagaagtgggactcaaactcagtatgaagaaggccaacatgtttttcactgtacgtcaccacccttccctctactgcaagaagatccctgagggtgtaagctcttgattttgaggactgaaattaaggaatgccggagccaatcatcctgcctagctgtagaaatttcctggcytttgaatgggagggcagggaaaccagaagagaaaagaactcttcattttcctcccccaacctgttcctctcccacttttcccgttacataggccaaaaacctaggcatcatcctccatttctttttcttcatttcccacatccaacctgcrgaggaaaaaacaaatctttttttttttttttttttttgagacggagtcttgctctgttgcccagactggagtgcagtggcgtgatcttgcctcactgcaagctccacctcctgggttcatgccattctcctgcctcagcctcccaagtagcttggactacagacacgtgccacctcgcccggctaattttttgtatttttagtagagacagggtttcactgtgttagccaggatggtcttgatctcctgacctggtgatccgcccgcctcagcctcccaaagggctgggattacaggcgtgagccaccgcgcccggcaaaaaaacaaatcttctttcctactatactctcacaacacaaaatacttctgtaacctgtggtcaccaagaagtgtttgtggggctttctctccaccaacaaccaagcaagcaattttgcggtggacacagctgggtatcccccaattcaattccaacactatctacctggagataatgtgtcacaggtttagggctcagtctcacaaggctgcccccaattctgatgccagtcctaagccccaggttgttttatctgtgtttctcaccaactggttagatcagcgttcccatgaccccctccttgaatttgattaatttgctagagcagctcacagaactcatggaaacacatttaccagtttattaacaaagggtagtacaaagagtacagatgaaaagatgcacagggaaaggtaccgggaagaggcctggagaccatcctgtgggagcctccatgccttcagctatctagaatgtctccaaactcctcctctcgggtttttttttcttttttgagacagagtttcactctgtcacccagggtggagtgcagtggcacaatctcggctcactgcaacctctgcctcccgggttcaagcgattctcctgcctcagcctcccggggactacaggcgcamgccaccacgcccagctaattttcatatttttagtagagacagggtttcgccaggtcggccaggctggtctcaatctcttgaccttgcgatccatctgcctcagcctcccaaagtgccgggagtacaggcgtgagccgccgcacccggcccctttccggtttttagaggcttcactactaggcatgactgattaaatcactgatcctcagtgattgccttaacctttggccccattcccctcccaggaagttggtgggggtgaggctgaaagttccaaccctctaatcatgaagccacctagaggggctagccatgaatcaactcatcagcacacaaaaacacacatcactggagattccaaggattttagaagttgaatgccaggagcctggtcaggagaccaaatatgtatctctcagtatcacagagcctgtcagtcctactggttttactcgtaaaatttatcctacataaaactactctctctctcttcctttagcactccagttcaagtttctcacctggactactgtgctctgttcctgcttccattcttgcccccctttcaatctgtcattgaaacaggagtttaaaacagaaggcacttctcagcctgcttaaaactcaatggcttctcagtatacacgcaataaaatcccccctcctcagcctaccgtacatgtcttacatgatctactctctgaccgaattttgtatccatctccctttgctcactctgcgccaactacacaggtcacccccacaagccctctgttcctcagccatggtttttcactatgggtcttgtgtacttgctattcccaggtctgcgcatggctggctgctcatcattcacgtctcagctatgagaggccttcctagatcacccaatctaaagtacccacttcccacgctatgacattactgtgatttttttttttttttgagacggagttttgctcttgttgcccaggctggagtgcaatggcggggtctcggctcactgcaacctctgcctcccaggttcatgggattctcctgcctccgcctccaggaatagctgggcttacaggccacctgccatcacacagggctaatttttgtatttttaatagagatggggtttctcaatgttggccaggctagtctcgaactcctgacctcaggtgatccgcccgtgttggcctcccaaagtgctggggattacaggcgtgagccactgcgcccagcctcacgttactctgtgttgatctgcccacagcacttatcactagctgcaatttaactttaagggcaagttttccttatttaacactgtatccttagtgcctacacacacaagagacgtttaatctttgaaagactgaatgaacacggtcagggaaagggctcagagaaaacaagactctcattctttagaggcaaggcattacacaagtggatgtgaattcaaaactcacgtttttggtccaccttttcaccccatcataacccttggtacggagtttatcatagaagaaactattgaagaaatgcacctgtgccaatgacacaaaaaagctcaatggaattaaaagacctcagactctcccactaagtctcccctcctcagtccactgacagtaaaaacaaattctgggttttttcttttttttttggtagagacagggtctcactatgttgcccaggttggtctcaaactcctggcctcaatctgtctgtctgcctgcctcggccttccagagcattgagattataggtatgagtcaacaaaccaggcttttttttttttttttatttgaggcagggccttgctctgtcgcccacgctggagtgcagtggcatgatttcgactcgctgcaacctccgcctcccgggttcaagcgattctcccgcctcagcctcccgagtagctgggactacaggtacccgccactatgcccagctaacttttttgtatttttatatttttagttgagccagggtttcaccatgttggccaggctggtctggaactcctgacctcgggtgatccacccgccttggcctcccaaagtgctgggattacaggaatgagtcaccgcacccagccgaagttgttttttgtctttttttttttttttgagacagaattccgctcttgttgcccaggcgggagtgcaatggcgtggatctcgactcaccgcaacctccgcctcacgggttcaagcagttctcctccctcagcctcccgagtaactgggattataggcatgcaccaccatgcccggctaattttgtatttttagtagagacgggatttctccatattggtcaggctggtcttgaactcccgacctcaggtgatccacccgccctggtctcccagagtgctgggattacaggcatgagctaccatgcccggtggcctttttctttttctttttttttttaaatcttgttttacaatagttacrataggaacccatcccaatccttggggctggccatagcgaaaaacactaaatactggcagaaaggaaaacaactgataaatccagagcccaagattacrgatttgaaattaatacactaccactaccacctctctccctgaaacagagaccctctctgtgtaaaatgaaagagatgaaaggagcttaaaaagctgcttaaaactgcagaagttcctctgggtactgacctatctggttgggcctaccttttcagggactgtgtccatgaccaggtctccatacatgttcatcacctggggagaagatgggagscagcttgccatggagggtgcggcatgggtacagggctcccccatgcagagggccccagacaccctgctccctgaatcccctctcaggcctgtttctctaccctttctcacctggtcattgagccagttctgtccatacaaggtccccaagtcatccatggtcagcacgtgccgcttataagccactcggaagcccctcaccatggcattgcctggcatccgctggtaagactggatcagctgcaacaccaggcccttcctgagtaggccaagggtggagtcacacaaaagatgatgcagctggggcacacagaaatacctactactmcctggaatacaaattctaactgactcccttttttctggctcatgatgggtccttctgaggacctgcgaaaggcccactccccagaaagataaacatgactactcaggtagaacatttcagggtcccaggtaaagactctcccatcagcttccaaggatttggcacctgcctgcagagtcctccccttcagctctagcttcctcctccccaactacagccctatggaagaaaaggcagcagtattctctccacatccccaaggccccagcccttctttcaaggagggctttcaagcctcacctggaaggggtggaaaactcctgctggaaaatgtcctccagcttctctactacctcatcagtgctgaggggtatgaggctgccatacgtttgaaggaattcgtccaagatrcctggtggaaagggagagaggagggggtgaggcctccagactctcctctaggagtcggagragggagagaggctagttgcttaagggctccttactctgtacgcaggtcacatgctcctctcgcagggggctgtgctggccggstttctccccagrcctctctgcctcttctgccatgcccaaatctgagccctgaaaaagctcctgggccacatggtccccgatgctgcacacattgctgatgaggatgctggcatcagggggtgccaagctgcgctccccttctggcccagattgtcccccaaaaccgttgggcagagtacatgaaaggaggcctatagggcaggggaaatggaatgggcatgagagactggcctggggaaagcacaatgggatgcacacagttgactcatgcatgcaaataagaccgcaagaaggatacactgaagcagaatccaccaatgtcaatcccactccaagaaatggggaccccataagcatgagataaacatgtccaagagattctacagggatggagagagagttcctactcatagacaggaagaaagaaaaaggattagcatttagaaatgaaaacttcgggatatttgtcaccactatatgccaaacacccagcatagtacccagcatattgtaaaggctcaatgaatactagaatatgtaataaagacctagagagcctgaaactgtttggctggagttctccgaaagggaaatattctttcacaactgtaagatgatgtactccactactgggagagatcccatcccgtcactttgggaatggtaccctctggagatgtatacacgggggttcttatactgagaggccgacaagggatttcgtgtggacaggatttttgtaaaccacatctccctttctcatctgcgctcaagaccacgggatacctacttagggcatctgtttcctagctctgcctgggaaactgccaggctcactcccaggcttactttctgctcaaagtggggcttaatggagacatttcgcagctcttctggagccggcactcttccatcctactttccttaagcccagctctcaccatggcaacaggctcctggtgctccaggctcttaaccctccctaacccctcccccgcaaccccacacccctttcccaccttacccgagtcagggtccagaggagactttggagtccacctgagtccatcttcctccatggggggcccagagggcactggtggagaccctctcaccccatcctcagccatgagagcacctagcagacccagccggggtggaggtggcccccggggggagtcaaaacgacaacagggggatggcacctgtggcgtcgcacccccttgctggggtgaaagatggttcttggggtgtgcgaggccccgccgccggccccggtggcgcccccaaagcttccagtggaatgtcagcgaggtgctttttgagtagagcagcatccggaaggctctcatggctcggcggcggcgctgtgagcaggtttttcgatgagtggggcgggaagggcggggccgctgggaggttcccagctgactccatcttgggggcagcctccaagctgccacttcctcctcttcatcttcatcctcctcctcctcctcttcttcctcctcttcacttgctgaggcatcaaaagagggtcgggggacagggaggcgtctggctggcactgtggtccctgacccaggatctggcccaaaccctccacctgacttgagtcggggtttgggaggtgggggccaacgaagacgctcccgcctgggacttgagtaagctgggggtatgccgggtccaggaggctcaggcccccaggacccggtcccttgtatagtctctttcatcttccagtaccctgaaaaacaaaagatcagggtatcaaaatctaagcatcaccccaccgcagatcctgcctctcttcctggccatgcctcctctggattcagatgcaaataaagaaaagaggaaaaaacgcaaaactcctaacttaagatcttcccggttaacgcggtccacaaggggcccttcagggtctgtgccatcatctctccccagtccagagacaagggaaaatggctaagcagcaggcctcagagatcttatttctaagatcaccaggccaaacccaatagcactgccaggttctacgtctttattttaataccaccagggctgtcctttgagggcccaacaagggcagtttctttcctcagggacatgataaccgtggtacttgaggagaatgcaacttgcacgtggaaactggactggaatgggagacagttctctaacaccctggatgaacggggggcatgggaaggctgcggtcatctcaagtgcagatgccagggatatggttcagggggcagaggctgataaacggggaagaactttgaaggaaacttaaagagaaccgaatcaagacgctgggacagaacggagcgcacaagccaggccggcccagccccctcctacttcatcctcggggaccagaatgcaacccggcaccagtccggtcccacgagcttggatggctcggcgcacacgggccttaagaagcccctatgcgggcctctgggccccggttcggtgggagcgaggcccaggaatgggagaggccaaggcagggctggggggaggggagggggcgtcctcaccgggagcggggaagccgggcggacgggcccgaaggcgggcgtctccggcctcaagcttcccggctcatctctccggcgacggcggcggccccgccactcctgctgtctttaggcgcagccgtctcaattcaggattccaacgcttctgggccgcgtgccgcgccgccgagcaccccgccgcgccgcctctggctctgcttcagcttcagcttccacctccacctccacctccgccaccgccrccaccagcgccaccgccgccgccgccactcctccccccctcctccttcccctcccgcgagccccgggcccaccggcagcggtggcgcacgattagtacgtcacacccggcgaagagcgccggcgcggccaccaagcgcgcggtcccgtctacccgaggacgccggcgccacgggactggccagcccagagcgctacgcgaggctgcgcctgcgcacatccgccgcccggccgcgcgtggcggccccgccactttcccttttgcgccgcgctctgtcttctccgcgctcgcgggcctgaccctagcggcatccccagtaccttgatccggcggggggcgcgccacaggagagccaggagggcgggagatccccgtacgaggaccgggctgaggcgaggcagtgggggaaatggagccggggtatcattcattctattttatttaactttaagcagggcttgatcagaaagaagagctcagaggagtgaggcaacaccaacaccagggcgtacgatacacccgaggctcctccgacaccagttccagcccggaagggcttggaatggcctgccacgccggggcaatggagcgcgtgaaagccaaaccttgggacccgaagagtaatttgactgcgaaggcaccgtcatcgtcgggcaccccctgtagacgggcgcataatagctacatctctggagatagtgatggaaactggggtccgatagatggagagaaggacgtaggataaggcttcttgtggggtgaagaggcagagggcacctggagagaggtgtggcatggagaaccaggggttttccctagcagagggcggcttcgtggacttcggccaaccggcgggtgcttccctcgagcggccgctagatggtggtgctgttctggatgcttccagtgggccccgaccaggtctggacaatgcctggcgcccgtcccccgcccctcatctacacacacgcaagaattcggagctccatggggaacagaagcaagatatccgtaaaatcaaagtctagggggtgggaatgaaaagggaaaagtgaggaacggggagccaaacccaggaagacgcctctgttcctgcacattccctctcctttatatactcagctcttggctgtctccagtatgtacccaccctggtcttccaagctgggagccactttttataacacaatcacagtttcacaaaccccaggaaggttccatgtggagagaggttaagtttcgcccttgcccggggaattatgacactcagaatatccccttggtgtaaatggaagacacctgagaaaagagagaaagtagattcgcagtgaagcacagccatccagatgccctgtttccccctgccttctccagctccaccgttcctctgcctcctgtaaggacccggcattctgcacttcactcctcagacccgcctctgtttaggtttccaacctccctcctagcggtagctccctgcactgctacccccggtcagagacgtcctgctttcggctgcccacacggctctcacctgcgctatagcagctgttgtaggcccggtccgggtgggagggcatacttcttatacatcggaatagagtctcctgccttccttggccttctcgagacaccacctgacccatggtgaaagtcacgtcttgaaacaggacctggcagggaagggagatgttgaagaaaacaggatggcctggctcagttctgggaggcctcaggagcgctaacgagggaagaaagaagggtctgctgggtttggtatgaatagaggggtcaggaaccctcagtagggggccaaagaggccctctgtgaagctcagagtgtggctggggttacctggctatacagcagataaactccagcatcctggattcggacaccatatccttgggcctgtaggcctctcccacgcctaagagctggttgccacatcacctctgtcacatcggagtcatctggaggtgagagtgtgtcggtcaggacttcttggcactctcaggtgctttttggttctttccctttcacctataaggaccccttgagcccaagtgccagcccgagttcctggttattgcccctccccaaagccattatttaaaatagtgctcacccttggaggtggcgttaatgggaaccaggtgcaggacagagtgctgctctgaggagagaaggagggaatctcagccgcatccactttcccccgttgtgctgttggcagcctccaccctcaccctgactcgggcttacaatccccacgctgcttgatcacctcccacccctgctgcaccctggaagcctcactcttctgtttttgggtgagcactgctctccttttccgggatctctccccactctcccaggcttccagggcatcggaactctgctcatggaaagagggtcaaggttaggttaagatgcgagggtcccagccagcctgccttcccagccctcccctgcccccgagatgcctcagatctctcacgcaccttttcccagcaccctgagtgttggtgctggctgccctccaggatttgttaggtatgagaagcattaacctttaacagtttcctttcctggaatggccgcgcccctgacttccaaaccggagaccctctcttgcacccccttgaaactttgcagaccaggaggcccagagaccccccatgctaaccatcctctcccagacaccctcctcccctcactcacctgctccgggagactctgccagggatacccttccccattctgggaggggcctcctgtcccctgcagccggctcacctctctcctgaggctctgcagctctgtttgttgggtcagcagagccatggcacaagccacggcccccagagctgccccccaactcaaccagagggcaactgagagtgccggctctctgactgggccccccatgttgcctggaggccctttgggggctagcaagaaaggagatgaggctggcatgagctggggaccctgccaacagctgtggtttcaagagtggggtagcaaggaggtggcggggcgggtaagggtacgggcagtggtgcagaagggaagaaggttgttacgcaaggagaaataaaaaggaacttgaaaataaaaaggagggaggaggaaagcaagctaagggtactgttagtgctcctggcactccgtcgtggggccagcgttgccttgagaccctccaccctccctcagcctcaggagaattaggttccagtccctctaggaaggacagggctgccagtgacacccaggaggaacaggcagtgcgcaggaaccctggggcggccccagggttgggggagggaaggttggctggctagagggcattgtgccaggagcaggatggggggccaagctgggcagtgtccagggtcagggcgagggtggaagaccctcggggtcaagcacagcagagatcgctggggcagttcactaggggtgactgaaggtgggaaaggaggggtgggctcgatggggaggagaaccaggggcacggaagcaagaaactggctgagttctggggttaaggctgggccgggtgtgttggaataaggcctgcactactccctgtgctgaaattggcaagcaggacttcctgtttcccgagaaaagctcttacataaggctctggacgaagagacaaagcagcggcctcaagccccccggccactgcgggattcctccccagcacacagggttccgggttcccgtgtgcctgctgactctcagcccctcctccaggctggctcctgcccgccccacctcccagccagggcctgtgccagcacctgctgaatgtccgaggccaccaagaggaagggcccctgctcctcccagccagggagggatttccccgcaggaggaagtctgcctcctaggccaaggaggccgcttctgctgtaccttgggcggaggattgatttttttcctgggcagtgtgccttcctacctctgctcccacctgggggctggaggcatggaggtccccgcccccaagcctgaacatcatcccggagttccagctgtgccgctccgcaacgccccccttcacgtggcccccagctaccctgagagtgtcccctgagccccaataaagagagagactatgacttattctatttaatatccatttatcaacattttgtcacaataataataaaaataatatctgttttaaaaatccacagggaattctcaagggaggagcttgtcttgtttctcgcccctcacatttgggaactcctggcctaggcccagtctctttggcttcctgccgccaggtccagcccctcttagtgcctgaagtggggtcttctggacccatccttgcccacagagtacagtgaacacaatgccctgggggtctgtggccaggggggagtcgagatcactgggggcctcaaagggtcagggattggggagctagtgaggtggagagtgggcggtgggggagttgtaagataagagtgggaatactgtatttatgtgggatggaaaacacgtgaacaggcccaggcagcctctagagggaggggcaggtctggagcaaagagcggctgagggtggggcagaggggaccgggtgcccagagagctgtcgaggggagccggcagcctgggacgactgcggggagaccagggcccctcagtgaacctggaagagtccgaagtaggtgaggaagggggcagccttgagatgggcccaggggagggtgcggatccgcagggaggaccctggccgcagggccaacagcccagacacctggcagaggcggagctggggcccgagggaactcgccgcagtggctgagaattcctccaggcagcgcagggccagcacaccatccaccagcaagtccagcttcaggtagacagccttcccctcatcaaagtgcacctggggtggggacaacaggccgagtccaggcctctgcctgccctcgcctcaatttccaatttcctcagcgacgcaggcatcccatcccacccaaaccccaactcaccctcccagccctgtagcttgtcccccactctcctggcaaacccttcgccactctcttactgcgttacccatgcagccagatggggcttacctgacagtacaggtagtagagcccagcccgggtgactataaactccccgatctggcggttgtagcgcagagggctggagctgttgattctggcttcctcccagccactcactgtcccgtccacacctgaacacggatgctcagagataaggaaacgtctctctacaggactcccccacactccccagggatccattgagcatatgaacattcggcgcccactttacccagaagacacatagatcaccccgggcaagggaggacccatcccctatgatgcccatagttgactaggaagttatgtgaaaaaatctaatgtatatggccagagacattcagggcagattgtcacctgcagtcacttctggggagaagagtagaactgaaggagaagcgtgaggggatttaatgttttacttcatggatatctatattatttgcttcttttatatggaggatgtaaacatacattatctgaattagtacaactaaaaataataaaatgaaacccaattgtccatcaacaaaatgtctatccatataatggaatattatttggccataaaaagagtgaagtactgatacacactatggcacagatgtgccttgaaaacatcatgctcagccaggtgcagtggctcacgcctgtcatcccggcattttgagaggccaaggtgggcggatcacctgaggtcgggagttcgagaccagcctggccaacaaggtgaaaccccgtctctactaaaaatacaaaaactagcagggcatggtggcaggcacctgtaatcctagctacatgggaggctgaggcaggagaattacttgaacctgggatggggaggttgcagtgaaccaagatcatgccactgcactccagcctgggcaacagagctagactctgtctccaaaaaaaaaaaaaaa

SEQ ID NO: 98277 - DNA, 14483 bp, Homo sapiens
  misc_feature (1)...(14483): n = A,T,C or G
nnnnnnnnnnnnnnnnnnnnnnnnnnnnnnnnnnnnnnnnnnnnnnnnnnnnnnnnnnnnnnnnnnnnnnnnnnnnnnnnnnnnnnnnnnnnnnnnnnnnnnnnnnnnnnnnnnnnnnnnnnnnnnnnnnnnnnnnnnnnnnnnnnnnnnnnnnnnnnnnnnnnnnnnnnnnnnnnnnnnnnnnnnnnnnnnnnnnnnnnnnnnnnnnnnnnnnnnnnnnnnnnnnnnnnnnnnnnnnnnnnnnnnnnnnnnnnnnnnnnnnnnnnnnnnnnnnnnnnnnnnnnnnnnnnnnnnnnnnnnnnnnnnnnnnnnnnnnnnnnnnnnnnnnnnnnnnnnnnnnnnnnnnnnnnnnnnnnnnnnnnnnnnnnnnnnnnnnnnnnnnnnnnnnnnnnnnnnnnnnnnnnnnnnnnnnnnnnnnnnnnnnnnnnnnnnnnnnnnnnnnnnnnnnnnnnnnnnnnnnnnnnnnnnnnnnnnnnnnnnnnnnnnnnnnnnnnnnnnnnnnnnnnnnnnnnnnnnnnnnnnnnnnnnnnnnnnnnnnnnnnnnnnnnnnnnnnnnnnnnnnnnnnnnnnnnnnnnnnnnnnnnnnnnnnnnnnnnnnnnnnnnnnnnnnnnnnnnnnnnnnnnnnnnnnnnnnnnnnnnnnnnnnnnnnnnnnnnnnnnnnnnnnnnnnnnnnnnnnnnnnnnnnnnnnnnnnnnnnnnnnnnnnnnnnnnnnnnnnnnnnnnnnnnnnnnnnnnnnnnnnnnnnnnnnnnnnnnnnnnnnnnnnnnnnnnnnnnnnnnnnnnnnnnnnnnnnnnnnnnnnnnnnnnnnnnnnnnnnnnnnnnnnnnnnnnnnnnnnnnnnnnnnnnnnnnnnnnnnnnnnnnnnnnnnnnnnnnnnnnnnnnnnnnnnnnnnnnnnnnnnnnnnnnnnnnnnnnnnnnnnnnnnnnnnnnnnnnnnnnnnnnnnnnnnnnnnnnnnnnnnnnnnnnnnnnnnnnnnnnnnnnnnnnnnnnnnnnnnnnnnnnnnnnnnnnnnnnnnnnnnnnnnnnnnnnnnnnnnnnnnnnnnnnnnnnnnnnnnnnnnnnnnnnnnnnnnnnnnnnnnnnnnnnnnnnnnnnnnnnnnnnnnnnnnnnnnnnnnnnnnnnnnnnnnnnnnnnnnnnnnnnnnnnnnnnnnnnnnnnnnnnnnnnnnnnnnnnnnnnnnnnnnnnnnnnnnnnnnnnnnnnnnnnnnnnnnnnnnnnnnnnnnnnnnnnnnnnnnnnnnnnnnnnnnnnnnnnnnnnnnnnnnnnnnnnnnnnnnnnnnnnnnnnnnnnnnnnnnnnnnnnnnnnnnnnnnnnnnnnnnnnnnnnnnnnnnnnnnnnnnnnnnnnnnnnnnnnnnnnnnnnnnnnnnnnnnnnnnnnnnnnnnnnnnnnnnnnnnnnnnnnnnnnnnnnnnnnnnnnnnnnnnnnnnnnnnnnnnnnnnnnnnnnnnnnnnnnnnnnnnnnnnnnnnnnnnnnnnnnnnnnnnnnnnnnnnnnnnnnnnnnnnnnnnnnnnnnnnnnnnnnnnnnnnnnnnnnnnnnnnnnnnnnnnnnnnnnnnnnnnnnnnnnnnnnnnnnnnnnnnnnnnnnnnnnnnnnnnnnnnnnnnnnnnnnnnnnnnnnnnnnnnnnnnnnnnnnnnnnnnnnnnnnnnnnnnnnnnnnnnnnnnnnnnnnnnnnnnnnnnnnnnnnnnnnnnnnnnnnnnnnnnnnnnnnnnnnnnnnnnnnnnnnnnnnnnnnnnnnnnnnnnnnnnnnnnnnnnnnnnnnnnnnnnnnnnnnnnnnnnnnnnnnnnnnnnnnnnnnnnnnnnnnnnnnnnnnnnnnnnnnnnnnnnnnnnnnnnnnnnnnnnnnnnnnnnnnnnnnnnnnnnnnnnnnnnnnnnnnnnnnnnnnnnnnnnnnnnnnnnnnnnnnnnnnnnnnnnnnnnnnnnnnnnnnnnnnnnnnnnnnnnnnnnnnnnnnnnnnnnnnnnnnnnnnnnnnnnnnnnnnnnnnnnnnnnnnnnnnnnnnnnnnnnnnnnnnnnnnnnnnnnnnnnnnnnnnnnnnnnnnnnnnnnnnnnnnnnnnnnnnnnnnnnnnnnnnnnnnnnnnnnnnnnnnnnnnnnnnnnnnnnnnnnnnnnnnnnnnnnnnnnnnnnnnnnnnnnnnnnnnnnnnnnnnnnnnnnnnnnnnnnnnnnnnnnnnnnnnnnnnnnnnnnnnnnnnnnnnnnnnnnnnnnnnnnnnnnnnnnnnnnnnnnnnnnnnnnnnnnnnnnnnnnnnnnnnnnnnnnnnnnnnnnnnnnnnnnnnnnnnnnnnnnnnnnnnnnnnnnnnnnnnnnnnnnnnnnnnnnnnnnnnnnnnnnnnnnnnnnnnnnnnnnnnnnnnnnnnnnnnnnnnnnnnnnnnnnnnnnnnnnnnnnnnnnnnnnnnnnnnnnnnnnnnnnnnnnnnnnnnnnnnnnnnnnnnnnnnnnnnnnnnnnnnnnnnnnnnnnnnnnnnnnnnnnnnnnnnnnnnnnnnnnnnnnnnnnnnnnnnnnnnnnnnnnnnnnnnnnnnnnnnnnnnnnnnnnnnnnnnnnnnnnnnnnnnnnnnnnnnnnnnnnnnnnnnnnnnnnnnnnnnnnnnnnnnnnnnnnnnnnnnnnnnnnnnnnnnnnnnnnnnnnnnnnnnnnnnnnnnnnnnnnnnnnnnnnnnnnnnnnnnnnnnnnnnnnnnnnnnnnnnnnnnnnnnnnnnnnnnnnnnnnnnnnnnnnnnnnnnnnnnnnnnnnnnnnnnnnnnnnnnnnnnnnnnnnnnnnnnnnnnnnnnnnnnnnnnnnnnnnnnnnnnnnnnnnnnnnnnnnnnnnnnnnnnnnnnnnnnnnnnnnnnnnnnnnnnnnnnnncacgcacactcctgcgaagggagggcggccgcctcagtctgagcacctggtccagctcgccacgacttcccacctccagccgcagtccccacgggcggcgccgctcgctttctaggtacccggcagtcccactttctccattccggccccgcggccccgctcacccgtgagcgcgcagggctcgcgccaggtgatcggccacgagcaccgtacgcagctggctcaagcggagtgcgcagggggagctgcgcagtgctgggcagtgtagtaagacgcgctggcccagcgaggcaggcgaggcgggcgtggcataggcggccacggcgctgaggacgcgctcgaagacggcggaccgctgcagttggagagacagacccgcgggggtcggcgcgcagcgcagcaccggggccacaccggggccctgcaggcaggcgagggcatggagcaaatgctccggaacctgcgggagaacgggcgtgtaaaagagccacggcacggggcccatctcccggccgcacggccccgcccggctcacgcccacctggccgtcatcgaagcgcgcctgcagcgcgcggtgcggtgccagaaagtctcgggaacgcaggtggcgggtgcgcgtctccttgatccacaccggaccgcctggccccagggccgcgttgagggcccccagcgtctccccgaccccaaggcgcctggtcgccatggtgaccggaaggagtaagcggaaccggaaaaaaatttagggaggtggaacttccggaaaggaccgactagctggggcggggatgcggcggtggtccccgtaagtggacaggtgcgccagtggtagccctgtcggctgctttcgacctaccgcccccagcgccccttccgcgtggtccacctgcacagccgggccccggatctgaaatctcggggccctccctgggcctagggttctttcgctgtgacccaggccttaaccaggaaaaggatcctcgcgacccggtgggcgcttagaccgggtaccgtctcttctcatcgaagtctcacatgtttgttttaataacatttcatttctcccattttacacatgatgaatattcgtcactggaataaggcagtataacattaaggccactttcacgacctacttaaaatatctcgttttaaaaagaatagtgttccgcggtttcaggttatttgcaagcattttctcgtttgagatatgggtgtttttttgtttgtttgagacggagtcttgctcttgtctcccaggctggagtgcagtggcacgatctcggctcactgcagcctccacctcccggattcacaggattctcctcctcagcctcccgagtagctgggattacgggcgcccgccaccacgcccggctaatttttgtatttttagtagagacggggtttcgccatgttggccaggctggtctcgaactcctgacctcgtgacctgcccgcctcggcctccgaaagtgctgggattacaggcatcagccactgcacccagcccgggtggtctttatgcccaataaataagcactctgatacagttggcggttttcttctcttgatacctgagaaatcacaaccatcatgatggcttccagaattaccagactttttttttttttttttgagacggagtttcgctcctgttgcccaggctggagtacagtggtgtgatcttggctcaccgcaacctccccctcccgggttcaagtgattatcctgcctcagtctcccaagtagctgggattacaggcacgcgccaccacgcccggctacttttgtatttttaatagagacggggtttctccatgtttgtcaagcctcgaactcccgacctcaggtgatccgcctgcctcggcctcccaaagtgctgggattacaggcgtgagccaccgcgcccggctcagaatgaccagcttttaatgtgactcctttaacctggtgtgctttaacaacgatccttaaagcttcctgttttaggcaacagccatttacgggccaaccaaataatgcgaccataatagaaaataggcctcagttggagtatcttgctcctctaccaataggaaaggtctttttctttctcccacaaaggttcccaaatgtcttcatttcactgtaacttactcaccccccaccccacccccattccttttaatagagaagctaactcagtagagagagttgggaaatccggagagcagggaaacccaggggcaggaaaagcttggcaaggcccctttctgggccagggctgaggccctgctgggaggcgccgaaagagcactgggcggacacgacattcccgatggcttctcgggtgcccactcaacgggagtgatcgtgtcattccaaagcgctttccattctgaaggtgcatgacctggagacaactgcttagcagggttgggaaccctcagtcaaactgaggacttcagatactctcatccacgaagacggttggggtggtttttccccaggaagtaagagggctatctttagcgagatgcgggctgaggcagccctgggggagtcactaccattgcagccctacccagaggtcctgggtccaccctccctcgccaatcctccccagggttccagagatggccaccagcctcggctctcccacgtctacacccatcacctccagcctgagggcgcaactgagaggaactgagacccaagcagctcagtaaagtatgtctgggggtcaggggcaccccatctgggccagggcgctgctcaggcaggagagcaggggacgaaatccaagcgcagctggaatgctctggagacaacagctgcttttgggattccgttgcccgctgtccagccgttggcggggggcgggggagctcctgcccccaggtcactcgccctggggccacatcagaacccgcccatccccagtcccaggaggaagacccgggagtaggttgtgaaacggagtctagagggaacaagacgctcacctgggccacagaacaatagaaggggaggtgggggcctcccctgggaccgggtcccgatccggattagatccgtggggcaggattagccctgttggtcccacgaagcctgggccactggtgcggtgacggtggtggggcgggcttcggaatccgtcaggagggaagcgcgcccgtggggccggagaggaagtaaacccgcgcgtccacctcggggacacccccgcgctcggtggcctttgtccggtgacgctgccagcgcccggagcaccaggggccgaaggggtccacagagcagccgcgggacccccggaaacccattgcgaccggccccaggagacccaccaccaggctcccactgtgccgagcttcccgctcgcccggccccgcgggtagcgaaagcgacaatgttcccctgaggccacgacagagccggcgtgccgagatgcccaaaccccgcgcgggggccagcgactctcgcgccagtaggcccttgacttggatcaagacgggggackggggactcccaggacgcgagcagagtgaacgaggacaaggtgatgctccacgcgcttctacttcaagtctggtccggttcggcctggtctgggccagccgaacagccacccaaacactatcacagcttgcccttccgcttgctctggctgcctgcagacttggagccattttaaggagaaaccacctggccacgccccctagagaacccgagaagccaatccacgctcggccacgcccctctccgcgcgctgcggagaggccaacggtcgcgcgggtgacggttagggcggggcgtgcttccgcgtctagccggagaaacttgagccggctgccccgcccacggtgcccgaagccccaaaggctggaattaggggctagaagtctggcacccaccgcctggccaggtgttcgggacgcgaccaggtgggcggtcgccccgccccgggagcgcggcttaatagctgagagcccgggggccaggccgcggctgcggcccaggcaacgccctgagggtggccacgctgccaggtgttccactcccccgggactatgggcaagggcccggggcggggagggcggcaggtgctgacactggagctgcgccggaggtcggggaactcggcctcctaagactgaggacactcgcctgctgggccggtcgagctgtgcggtgccctccgggacgcagggggcgctgcagccacgctgggtcaggctccgcagggccctcccaacccggggactaacggcgccggtgacgacttcgccgcgcgttggtcagccatggccaccgctctcgcgctacgtagcttgtaccgagcgcgaccctcgctgcgctgtccgcccgttgagcttccctggtgagcttggaccccgcgccctcgaccatccagccccctaggccggcgactgccagcccagcaccttccggcctctcgggctgcccggcccggccccgcgcccctgaccctttccctccgcagggccccgcggcgagggcatcggctctcgccggcggatgacgagctgtatcagcggacgcgcatctctctgctgcaacgcgaggccgctcaggcaatgtacatcgacagctacaacagccgcggcttcatgataaacggaaaccgcgtgctcggcccctgcgctctgctcccgcactcggtggtgcagtggaacgtgagtcctggcccgcagtgtggaaactgaggcccagagtcacaggccctcaccctgcttggtccctgcaaacttggctttcctctgtctcctcctgcagtggatggagatggggagaggctgcgtggatttgtcgtattaaatgtgcctcctccctgcacaggtgggatcccaccaggacatcaccgaagacagcttttccctcttctggttgctggagccccggataggtactggggaaggggagggagaacagaggtgttctgggccccagaaggcgacccccactgcagcctctcaacagaactgtagactagccacacccacccttccctagagatcgtggtggtggggactggagaccggaccgagaggctgcagtcccaggtgcttcaagccatgaggcagcggggcattgctgtggaagtgcaggacacggtgagtcccgggactggggcatgctgcggggagcacaggcctggcgctagacaggctgatgctggccttttctttgcagcccaatgcctgtgccaccttcaacttcctgtgtcatgaaggccgagtaactggagctgctctcatccctccaccaggagggacttcacttacatctttgggccaagctgctcaatgaaccgccaggaactgacctgctgactgcactctgccaggcttcccaatgctttcactcttatctaccctttggcacttatcttgcttatcaacataataatttatacacttctcccattttgtatcaggtgtgttgctggccaggagctgatggctcactgggctcttggaggggaatgtgaagaaaccaaggagtcactttttcatctagattacttaggattccttgacttttcagaagtcgggaagcagtatgtttgcctgttgtagacctacttgctcacatgcagatttgagaggacctcaacggcttttctcacaaaatcgctgattgtttttctttttttgagatggagtctcgctgtcgcccgggctgcagtgcagtggcgtgatcttggcccactacaacctccacctcctggattcaagcgattctcgtgcctcagcctcctgagtagctggaattagaggcccctaccactacactgggcttttttttttttttttttttctggagatgagtcttgctctttcgccagggtggagtgcagtggcgcagtctcagctcactgcaacctccgcctcctgggtttcagtgattctcctgcctcagcctcctgagtagctgggactagaggtatgcatcaccacgcccagctaatttttgtatttttagtagagaaagggttcaccatgttggccaggatggtctcgaactcctgacctcaagtgatccacctgcctcccaaagtgctgggattacagacgtgagccaatgtgcctggccgagagagattcaagttagggaatatatatgtgtgttgacctggtcctatatggccaagctatgggctagcaggatgccctgtgtatgccagtcccagggcttgttctttgaccccttgggagccagagtcagatgctcagtgtgagactgaaaccccaagagccatagctatagctatagtcagctgttttgtgagcagcctcaggaggaactttttggacctggaactacccgcttccaggtccatggagcacatttatctcggggcctgaggctccccctggaaatgagggtgctgtttttgtgtgcatctgtggtagtggcagctacagagccccacctgtctgttgaaagatcaggcatcacttttttctttctaaacttttattgaaaaaaaaaccgaggaggtgtgctggatcccttttcagaaaagccgcttctcatacctgcaggcagaaggaccacctgtgaggtgagggcaggagaaaggaggcatgaggtatggcagaggccccaccaaggacagggtgacttacgaatggaggctatggacgccaccttccacctgggctgaggacgttctcttctcaaacttaagctccccagagtacatcatggctctgaagaagggcagaggtcaaatgtgggtagctggccctggaccagcccctctacccatgtcccagctccccaagctcaccggacttgggtcaagctcttggcaccaatgtcctggcatgagtgttggatgccagcaatcaggtaagggacaaatttgtggattgaccctttgtcctgcacagcaccagacactccctgggccactttgattttgtcagcttcactgcagggagaggcagagacacgggcaaggtcacagcagagatgagactgtcagtgcaggattagggtggggtaactggcttgcctgtcccacctgaaatatctgttctggctgctgaggtgcttgtccatggcatcgagagaacccataccgcgatatttctttagccggatcccatcggaaaagaagtattcaccaggggcctcagtggtggcagccaggagagagcccatcatgactgcggacagatggagtgcttgggttagagcctaagcagcactagggagggggtcccactggccttcacgggtactgggcctcacctgtggaggccccaagggccaaggctttcgcaatatgacccacattttggattcctccatcagcaatgaccggaacaccaaagcgccgtgcatactctgacaccttgtacactgctgttgcttggggccgcccacaggccagcactgttgagatggaggaacacatgggtggatagggttaatggggacgggcagtggaccctgtggccatatttaggacccaggagcttttggctacatctgcatcaggactgcagcttggctgaggaacagacgtgtctgggatggctgctgccacatctgccttaaatagtacaaacagctgtgctgacctctactcacccccacatgtgcacgtgcatgtgtgcagtgcccagggcagcctcaggcacatgcagtcttagcagccgggaaagcccccgtccagctggtatcagatggggcaggagtcaccgtgcagttagtccccagaggcactgaggtcaggcccagcccttcctccctgaatggtgggcagctcaggcaagataagggcagtggttgtgtaggagagcaggctgtggttgtgtggagcaggcagtggttgtgtgggagagcaaggaccacacaaaggagttggtccctgaactatgcctactgcagaagatgtgggcagaaaaggtcctgcctagggaagaaggtcctgccctatcagcaccccagaaggaagagggagctatgttcttgagcaccacccccaaaccatggtctgtgtatcagttggccttgcccacccatcagcaccacaaaccccgggagctacagctacgtcaaccaagcagccgggcagtgggcagctgggccgggccagtgggccgggctggacttactatagcaacccgtgacagtagaagggcatttggggctgtgggactttatgtctggagggatcttgggagccactaaataaaacaaacagaccagagtttagagaaggtgcagagcaggagcaagaaggccaggctaggcaagggagtggcaggtgatggatgacaagaccttgtcttgcttccagccatgtcacccatccaagaggccaatttggccccagggttgcccctattggagggctctattgtccccataagagtgcttggttccaaggtatgtggggcctgaaactggggtctctgtgggccctatcaaagtatattcttaccttcctgcgtaatgcagatggagccacttcccatgcccacccgcagggcatccacacctgcatcaatgaggttcttggcctgggcagcagtgaccactatggtgaaggaaaggaaaatgctcatgtgaaggttaaggtgggagcccagcttacccactcccaccacacatccttcagggcacaatcttgccttaccattgcctccaatgacttggagattagggtatttgtctttgatgtacttgatcatattgatctggaagatggaatttccctgggaagagtcctaggacaagaagtaagtctcagactgtgatgtggcagctgcccctattgccccaacccacctgtgtagcagctcaccaaaaccactacatccacaccagcctgggcgagcaagtccagcctatacttgtcatcctcatgagtgccaatggctgccccacacagcagctgtttcttggcatctttggaggctagtgggtagtcccgattcttcttcaggtctgtccgggcaatgatggccacaagctcatcatcttcatttacaatgggcaactttcctgtggtcagggcaggacatgaatcaggaccctaggcattagttccaggccctttcccagctctaggacttacccttcttgctgcgctgcagaatttcatttgcctccttcagtgtgatgcctgcaggggctaccaccaagtcttccctctttgtcattatctacgtgggaggtgagatgtgaagaagggccagtcatcgactatgaccagttaactcttttctttccttcccaagtagctgagctcagaggcacgcgccaccacacccaactaattttttgtatttttagtagagacggggtttcaccatgttggccaggctggtctcaaactcctaacctcatgatttgcctgcctcagtctcccaaagtactgagattacaggggtgaagttctatggaccaccacgttcatacattcacacccaaaacacccttcctcaagggatcccaataattcttagcagtatggtattgagtgagggatgagtagaaaggacaacatggcacagggagcaccctcttacactatggaataaggaggacaacacaggaacaatggcaagaaaatcagggcagacctcaagcactgcccctaccttaggggtttaaaagaacaaagcatgaatactagcaagcatttgggcagtttgaaagcctctggtggggaaaggatgcaggaacccaataaaggagtcagaaacttggtttgacactcctttcccagagagaagaggctatcagagatgtcttagacaacagaagccccttgtcttcaacctgggctgctagagcttggatctactctgccagtggcacccacctcttccaagaaacagtcatgttcctcctctttgagaaaatcaatgtccctggaggagatgatgcccaccaagcggctccccatccggcctgtgtctgtgattgggataccgcagaaaccatgccgggccttggcctcaaaaacatcccgcacgcgatccttggggctgaggaccacagggtctgtgatgaatccctgttcatatttctggaaagggatggtgagaaagggcatcgcatctttgaactactttcatcaggctcttgatctgaagcatggggtctctgcttatcgatccctttggcagtgccacaagaccaaatcacaccaacacatcttagagacatgggtaggctggaggcactgtacacctggtctattgctgctgctttaagaaacagaatctcagggtcttctcagtaactgaaccccatggtgggaagaaagaatactaaattagaataaacccctactcccaccccaccccacctcagtgcaattcccaggagcgcttgctaatgatcgttgcccttctgaccttcactttccgaacttcattggcctggaattcaggtgtacagttgtggtggatgaagccaataccgcctgtaagctacaggataaaaagagactactactaagtgacaagaagcaggactgaatgcctttggggaaaggcgatggagtccttgctccttcccccacaccccatggggctcaccgccattgctatggccatcccagcctctgtgactgtgtccatgggagaggaaaccagtggggtcttaagagtgattttcttggtcagagcagaagtcaggtcctgaggagacaaacgtcaaccagtgtgggaaagcatcccttacacctcaaggtgttactgagtcccccacaaaaaggcacttttgtatgacctgcatgctaacaagcaacatgatcctataaaatccacccccaagcccaatctggtgagttagcccagagaccaggtgatagtagcaccttagctcaccttgatgttcaggacccaattcctgatcatactcaccacctggtctgcagtgaagtcgatgtacccagggagaatgagaaagtcactgcgagggaagggagtgaattgggagtaaagctctcagcttagggcagcatgagactccatccccatgtaccaatcaacccgtaacgcatgtgagcagagagtggcactgacagagtctgtgtgtcacaggcacagcacaaggtggaaatgggtacaggggaccttttctgccaccgagctgtcatcagtgctcctggcaccctgacaattccatgtgtctggagcatggaatctccggcctgagattccaagcactactgagatgcttctccgtaccccaagcaccgctccagatgtctcaaagtgagccccggaggtgggtggccaattcccgaaacctgtcccccacgcccacgcccaaggcggctctcggaagcccccatctggccttttccccagggtgccgcccctctcttcgcccaggtgagccccataggcccgcacttgtaggtgaggccgtctccgcagttgaagagctgctgtgctgtgagtccgtcgtctggcacgtaggacgtgcccccactaatcaggtagtcggccatggccaacacaggacaccgccgcgtgtctccgaggaccgcgccgcagagacctctgccgtctgggccgcgccaatataaaccagccgatttcgtcactgcgctgcgcgcgacgctgacgtcagggcgtagtgcgcgcgggcggaacc

SEQ ID NO: 98278 - DNA, 12578 bp, Homo sapiens
  misc_feature (1)...(12578): n = A,T,C or G
gcccttcttcagagccatgatgtactctggggagcttaagtttgagaagagaacgtcctcagcccaggtggaaggtggcgtccatagcctccattcgtaagtcaccctgtccttggtggggcctctgccatacctcatgcctcctttctcctgccctcacctcacaggtggtccttctgcctgcaggtatgagaagcggcttttctgaaaagggatccagcacacctcctcggtttttttttcaataaaagtttagaaagaaaaaagtgatgcctgatctttcaacagacaggtggggctctgtagctgccactaccacagatgcacacaaaaacagcaccctcatttccagggggagcctcaggccccgagataaatgtgctccatggacctggaagcgggtagttccaggtccaaaaagttcctcctgaggctgctcacaaaacagctgactatagctatagctatggctcttggggtttcagtctcacactgagcatctgactctggctcccaaggggtcaaagaacaagccctgggactggcatacacagggcatcctgctagcccatagcttggccatataggaccaggtcaacacacatatatattccctaacttgaatctctctcggccaggcacattggctcacgtctgtaatcccagcactttgggaggcaggtggatcacttgaggtcaggagttcgagaccatcctggccaacatggtgaaccctttctctactaaaaatacaaaaattagctgggcgtggtgatgcatacctctagtcccagctactcaggaggctgaggcaggagaatcactgaaacccaggaggcggaggttgcagtgagctgagactgcgccactgcactccaccctggcgaaagagcaagactcatctccagaaaaaaaaaaaaaaaaaaaagcccagtgtagtggtaggggcctctaattccagctactcaggaggctgaggcacgagaatcgcttgaatccaggaggtggaggttgtagtgggccaagatcacgccactgcactgcagcccgggcgacagcgagactccatctcaaaaaaagaaaaacaatcagcgattttgtgagaaaagccgttgaggtcctctcaaatctgcatgtgagcaagtaggtctacaacaggcaaacatactgcttcccgacttctgaaaagtcaaggaatcctaagtaatctagatgaaaaagtgactccttggtttcttcacattcccctccaagagcccagtgagccatcagctcctggccagcaacacacctgatacaaaatgggagaagtgtataaattattatgttgataagcaagataagtgccaaagggtagataagagtgaaagcattgggaagcctggcagagtgcagtcagcaggtcagttcctggcggttcattgagcagcttggcccaaagatgtaagtgaagtccctcctggtggagggatgagagcagctccagttactcggccttcatgacacaggaagttgaaggtggcacaggcattgggctgcaaagaaaaggccagcatcagcctgtctagcgccaggcctgtgctccccgcagcatgccccagtcccgggactcaccgtgtcctgcacttccacagcaatgccccgctgcctcatggcttgaagcacctgggactgcagcctctcggtccggtctccagtccccaccaccacgatctctagggaagggtgggtgtggctagtctacagttctgttgagaggctgcagtgggggtcgccttctggggcccagaacacctctgttctccctccccttccccagtacctatccggggctccagcaaccagaagagggaaaagctgtcttcggtgatgtcctggtgggatcccacctgtgcagggaggaggcacatttaatacgacaaatccacgcagcctctccccatctccatccactgcaggaggagacagaggaaagccaagtttgcagggaccaagcagggtgagggcctgtgactctgggcctcagtttccacactgcgggccaggactcacgttccactgcaccaccgagtgcgggagcagagcgcaggggccgagcacgcggtttccgtttatcatgaagccgcggctgttgtagctgtcgatgtacattgcctgagcggcctcgcgttgcagcagagagatgcgcgtccgctgatacagctcgtcatccgccggcgagagccgatgccctcgccgcggggccctgcggagggaaagggtcaggggcgcggggccgggccgggcagcccgagaggccggaaggtgctgggctggcagtcgccggcctagggggctggatggtcgagggcgcggggtccaagctcaccagggaagctcaacgggcggacagcgcagcgagggtcgcgctcggtacaagctacgtagcgcgagagcggtggccatggctgaccaacgcgcggcgaagtcgtcaccggcgccgttagtccccgggttgggagggccctgcggagcctgacccagcgtggctgcagcgccccctgcgtcccggagggcaccgcacagctcgaccggcccagcaggcgagtgtcctcagtcttaggaggccgagttccccgacctccggcgcagctccagtgtcagcacctgccgccctccccgccccgggcccttgcccatagtcccgggggagtggaacacctggcagcgtggccaccctcagggcgttgcctgggccgcagccgcggcctggcccccgggctctcagctattaagccgcgctcccggggcggggcgaccgcccacctggtcgcgtcccgaacacctggccaggcggtgggtgccagacttctagcccctaattccagcctttggggcttcgggcaccgtgggcggggcagccggctcaagtttctccggctagacgcggaagcacgccccgccctaaccgtcacccgcgcgaccgttggcctctccgcagcgcgcggagaggggcgtggccgagcgtggattggcttctcgggttctctagggggcgtggccaggtggtttctccttaaaatggctccaagtctgcaggcagccagagcaagcggaagggcaagctgtgatagtgtttgggtggctgttcggctggcccagaccaggccgaaccggaccagacttgaagtagaagcgcgtggagcatcaccttgtcctcgttcactctgctcgcgtcctgggagtcccccgtcccccgtcttgatccaagtcaagggcctactggcgcgagagtcgctggcccccgcgcggggtttgggcatctcggcacgccggctctgtcgtggcctcaggggaacattgtcgctttcgctacccgcggggccgggcgagcgggaagctcggcacagtgggagcctggtggtgggtctcctggggccggtcgcaatgggtttccgggggtcccgcggctgctctgtggaccccttcggcccctggtgctccgggcgctggcagcgtcaccggacaaaggccaccgagcgcgggggtgtccccgaggtggacgcgcgggtttacttcctctccggccccacgggcgcgcttccctcctgacggattccgaagcccgccccaccaccgtcaccgcaccagtggcccaggcttcgtgggaccaacagggctaatcctgccccacggatctaatccggatcgggacccggtcccaggggaggcccccacctccccttctattgttctgtggcccaggtgagcgtcttgttccctctagactccgtttcacaacctactcccgggtcttcctcctgggactggggatgggcgggttctgatgtggccccagggcgagtgacctgggggcaggagctcccccgccccccgccaacggctggacagcgggcaacggaatcccaaaagcagctgttgtctccagagcattccagctgcgcttggatttcgtcccctgctctcctgcctgagcagcgccctggcccagatggggtgcccctgacccccagacatactttactgagctgcttgggtctcagttcctctcagttgcgccctcaggctggaggtgatgggtgtagacgtgggagagccgaggctggtggccatctctggaaccctggggaggattggcgagggagggtggacccaggacctctgggtagggctgcaatggtagtgactcccccagggctgcctcagcccgcatctcgctaaagatagccctcttacttcctggggaaaaaccaccccaaccgtcttcgtggatgagagtatctgaagtcctcagtttgactgagggttcccaaccctgctaagcagttgtctccaggtcatgcaccttcagaatggaaagcgctttggaatgacacgatcactcccgttgagtgggcacccgagaagccatcgggaatgtcgtgtccgcccagtgctctttcggcgcctcccagcagggcctcagccctggcccagaaaggggccttgccaagcttttcctgcccctgggtttccctgctctccggatttcccaactctctctactgagttagcttctctattaaaaggaatgggggtggggtggggggtgagtaagttacagtgaaatgaagacatttgggaacctttgtgggagaaagaaaaagacctttcctattggtagaggagcaagatactccaactgaggcctattttctattatggtcgcattatttggttggcccgtaaatggctgttgcctaaaacaggaagctttaaggatcgttgttaaagcacaccaggttaaaggagtcacattaaaagctggtcattctgagccgggcgcggtggctcacgcctgtaatcccagcactttgggaggccgaggcaggcggatcacctgaggtcgggagttcgaggcttgacaaacatggagaaaccccgtctctattaaaaatacaaaagtagccgggcgtggtggcgcgtgcctgtaatcccagctacttgggagactgaggcaggataatcacttgaacccgggagggggaggttgcggtgagccaagatcacaccactgtactccagcctgggcaacaggagcgaaactccgtctcaaaaaaaaaaaaaaaaagtctggtaattctggaagccatcatgatggttgtgatttctcaggtatcaagagaagaaaaccgccaactgtatcagagtgcttatttattgggcataaagaccacccgggctgggtgcagtggctgatgcctgtaatcccagcactttcggaggccgaggcgggcaggtcacgaggtcaggagttcgagaccagcctggccaacatggcgaaaccccgtctctactaaaaatacaaaaattagccgggcgtggtggcgggcgcccgtaatcccagctactcgggaggctgaggaggagaatcctgtgaatccgggaggtggaggctgcagtgagccgagatcgtgccactgcactccagcctgggagacaagagcaagactccgtctcaaacaaacaaaaaaacacccatatctcaaacgagaaaatgcttgcaaataacctgaaaccgcggaacactattctttttaaaacgagatattttaagtaggtcgtgaaagtggccttaatgttatactgccttattccagtgacgaatattcatcatgtgtaaaatgggagaaatgaaatgttattaaaacaaacatgtgagacttcgatgagaagagacggtacccggtctaagcgcccaccgggtcgcgaggatccttttcctggttaaggcctgggtcacagcgaaagaaccctaggcccagggagggccccgagatttcagatccggggcccggctgtgcaggtggaccacgcggaaggggcgctgggggcggtaggtcgaaagcagccgacagggctaccactggcgcacctgtccacttacggggaccaccgccgcatccccgccccagctagtcggtcctttccggaagttccacctccctaaatttttttccggttccgcttactccttccggtcaccatggcgaccaggcgccttggggtcggggagacgctgggggccctcaacgcggccctggggccaggcggtccggtgtggatcaaggagacgcgcacccgccacctgcgttcccgagactttctggcaccgcaccgcgcgctgcaggcgcgcttcgatgacggccaggtgggcgtgagccgggcggggccgtgcggccgggagatgggcccmgtgccgtggctcttttacacgcccgttctcccgcaggttccggagcatttgctccatgccctcgcctgcctgcagggccccggtgtggccccggtgctgcgctgcgcgccgacccccgcgggtctgtctctccaactgcagcggtccgccgtcttcgagcgcgtcctcagcgccgtggccgcctatgccacgcccgcctcgcctgcctcgctgggccagcgcgtcttactacactgcccagcactgcgcagctccccctgcgcactccgcttgagccagctgcgtacggtgctcgtggccgatcacctggcgcgagccctgcgcgctcacgggtgagcggggccgcggggccggaatggagaaagtgggactgccgggtacctagaaagcgagcggcgccgcccgtggggactgcggctggaggtgggaagtcgtggcgagctggaccaggtgctcagactgaggcggccgccctcccttcgcaggagtgtgcgtgnnnnnnnnnnnnnnnnnnnnnnnnnnnnnnnnnnnnnnnnnnnnnnnnnnnnnnnnnnnnnnnnnnnnnnnnnnnnnnnnnnnnnnnnnnnnnnnnnnnnnnnnnnnnnnnnnnnnnnnnnnnnnnnnnnnnnnnnnnnnnnnnnnnnnnnnnnnnnnnnnnnnnnnnnnnnnnnnnnnnnnnnnnnnnnnnnnnnnnnnnnnnnnnnnnnnnnnnnnnnnnnnnnnnnnnnnnnnnnnnnnnnnnnnnnnnnnnnnnnnnnnnnnnnnnnnnnnnnnnnnnnnnnnnnnnnnnnnnnnnnnnnnnnnnnnnnnnnnnnnnnnnnnnnnnnnnnnnnnnnnnnnnnnnnnnnnnnnnnnnnnnnnnnnnnnnnnnnnnnnnnnnnnnnnnnnnnnnnnnnnnnnnnnnnnnnnnnnnnnnnnnnnnnnnnnnnnnnnnnnnnnnnnnnnnnnnnnnnnnnnnnnnnnnnnnnnnnnnnnnnnnnnnnnnnnnnnnnnnnnnnnnnnnnnnnnnnnnnnnnnnnnnnnnnnnnnnnnnnnnnnnnnnnnnnnnnnnnnnnnnnnnnnnnnnnnnnnnnnnnnnnnnnnnnnnnnnnnnnnnnnnnnnnnnnnnnnnnnnnnnnnnnnnnnnnnnnnnnnnnnnnnnnnnnnnnnnnnnnnnnnnnnnnnnnnnnnnnnnnnnnnnnnnnnnnnnnnnnnnnnnnnnnnnnnnnnnnnnnnnnnnnnnnnnnnnnnnnnnnnnnnnnnnnnnnnnnnnnnnnnnnnnnnnnnnnnnnnnnnnnnnnnnnnnnnnnnnnnnnnnnnnnnnnnnnnnnnnnnnnnnnnnnnnnnnnnnnnnnnnnnnnnnnnnnnnnnnnnnnnnnnnnnnnnnnnnnnnnnnnnnnnnnnnnnnnnnnnnnnnnnnnnnnnnnnnnnnnnnnnnnnnnnnnnnnnnnnnnnnnnnnnnnnnnnnnnnnnnnnnnnnnnnnnnnnnnnnnnnnnnnnnnnnnnnnnnnnnnnnnnnnnnnnnnnnnnnnnnnnnnnnnnnnnnnnnnnnnnnnnnnnnnnnnnnnnnnnnnnnnnnnnnnnnnnnnnnnnnnnnnnnnnnnnnnnnnnnnnnnnnnnnnnnnnnnnnnnnnnnnnnnnnnnnnnnnnnnnnnnnnnnnnnnnnnnnnnnnnnnnnnnnnnnnnnnnnnnnnnnnnnnnnnnnnnnnnnnnnnnnnnnnnnnnnnnnnnnnnnnnnnnnnnnnnnnnnnnnnnnnnnnnnnnnnnnnnnnnnnnnnnnnnnnnnnnnnnnnnnnnnnnnnnnnnnnnnnnnnnnnnnnnnnnnnnnnnnnnnnnnnnnnnnnnnnnnnnnnnnnnnnnnnnnnnnnnnnnnnnnnnnnnnnnnnnnnnnnnnnnnnnnnnnnnnnnnnnnnnnnnnnnnnnnnnnnnnnnnnnnnnnnnnnnnnnnnnnnnnnnnnnnnnnnnnnnnnnnnnnnnnnnnnnnnnnnnnnnnnnnnnnnnnnnnnnnnnnnnnnnnnnnnnnnnnnnnnnnnnnnnnnnnnnnnnnnnnnnnnnnnnnnnnnnnnnnnnnnnnnnnnnnnnnnnnnnnnnnnnnnnnnnnnnnnnnnnnnnnnnnnnnnnnnnnnnnnnnnnnnnnnnnnnnnnnnnnnnnnnnnnnnnnnnnnnnnnnnnnnnnnnnnnnnnnnnnnnnnnnnnnnnnnnnnnnnnnnnnnnnnnnnnnnnnnnnnnnnnnnnnnnnnnnnnnnnnnnnnnnnnnnnnnnnnnnnnnnnnnnnnnnnnnnnnnnnnnnnnnnnnnnnnnnnnnnnnnnnnnnnnnnnnnnnnnnnnnnnnnnnnnnnnnnnnnnnnnnnnnnnnnnnnnnnnnnnnnnnnnnnnnnnnnnnnnnnnnnnnnnnnnnnnnnnnnnnnnnnnnnnnnnnnnnnnnnnnnnnnnnnnnnnnnnnnnnnnnnnnnnnnnnnnnnnnnnnnnnnnnnnnnnnnnnnnnnnnnnnnnnnnnnnnnnnnnnnnnnnnnnnnnnnnnnnnnnnnnnnnnnnnnnnnnnnnnnnnnnnnnnnnnnnnnnnnnnnnnnnnnnnnnnnnnnnnnnnnnnnnnnnnnnnnnnnnnnnnnnnnnnnnnnnnnnnnnnnnnnnnnnnnnnnnnnnnnnnnnnnnnnnnnnnnnnnnnnnnnnnnnnnnnnnnnnnnnnnnnnnnnnnnnnnnnnnnnnnnnnnnnnnnnnnnnnnnnnnnnnnnnnnnnnnnnnnnnnnnnnnnnnnnnnnnnnnnnnnnnnnnnnnnnnnnnnnnnnnnnnnnnnnnnnnnnnnnnnnnnnnnnnnnnnnnnnnnnnnnnnnnnnnnnnnnnnnnnnnnnnnnnnnnnnnnnnnnnnnnnnnnnnnnnnnnnnnnnnnnnnnnnnnnnnnnnnnnnnnnnnnnnnnnnnnnnnnnnnnnnnnnnnnnnnnnnnnnnnnnnnnnnnnnnnnnnnnnnnnnnnnnnnnnnnnnnnnnnnnnnnnnnnnnnnnnnnnnnnnnnnnnnnnnnnnnnnnnnnnnnnnnnnnnnnnnnnnnnnnnnnnnnnnnnnnnnnnnnnnnnnnnnnnnnnnnnnnnnnnnnnnnnnnnnnnnnnnnnnnnnnnnnnnnnnnnnnnnnnnnnnnnnnnnnnnnnnnnnnnnnnnnnnnnnnnnnnnnnnnnnnnnnnnnnnnnnnnnnnnnnnnnnnnnnnnnnnnnnnnnnnnnnnnnnnnnnnnnnnnnnnnnnnnnnnnnnnnnnnnnnnnnnnnnnnnnnnnnnnnnnnnnnnnnnnnnnnnnnnnnnnnnnnnnnnnnnnnnnnnnnnnnnnnnnnnnnnnnnnnnnnnnnnnnnnnnnnnnnnnnnnnnnnnnnnnnnnnnnnnnnnnnnnnnnnnnnnnnnnnnnnnnnnnnnnnnnnnnnnnnnnnnnnnnnnnnnnnnnnnnnnnnnnnnnnnnnnnnnnnnnnnnnnnnnnnnnnnnnnnnnnnnnnnnnnnnnnnnnnnnnnnnnnnnnnnnnnnnnnnnnnnnnnnnnnnnnnnnnnnnnnnnnnnnnnnnnnnnnnnnnnnnnnnnnnnnnnnnnnnnnnnnnnnnnnnnnnnnnnnnnnnnnnnnnnnnnnnnnnnnnnnnnnnnnnnnnnnnnnnnnnnnnnnnnnnnnnnnnnnnnnnnnnnnnnnnnnnnnnnnnnnnnnnnnnnnnnnnnnnnnnnnnnnnnnnnnnnnnnnnnnnnnnnnnnnnnnnnnnnnnnnnnnnnnnnnnnnnnnnnnnnnnnnnnnnnnnnnnnnnnnnnnnnnnnnnnnnnnnnnnnnnnnnnnnnnnnnnnnnnnnnnnnnnnnnnnnnnnnnnnnnnnnnnnnnnnnnnnnnnnnnnnnnnnnnnnnnnnnnnnnnnnnnnnnnnnnnnnnnnnnnnnnnnnnnnnnnnnnnnnnnnnnnnnnnnnnnnnnnnnnnnnnnnnnnnnnnnnnnnnnnnnnnnnnnnnnnnnnnnnnnnnnnnnnnnnnnnnnnnnnnnnnnnnnnnnnnnnnnnnnnnnnnnnnnnnnnnnnnnnnnnnnnnnnnnnnnnnnnnnnnnnnnnnnnnnnnnnnnnnnnnnnnnnnnnnnnnnnnnnnnnnnnnnnnnnnnnnnnnnnnnnnnnnnnnnnnnnnnnnnnnnnnnnnnnnnnnnnnnnnnnnnnnnnnnnnnnnnnnnnnnnnnnnnnnnnnnnnnnnnnnnnnnnnnnnnnnnnnnnnnnnnnnnnnnnnnnnnnnnnnnnnnnnnnnnnnnnnnnnnnnnnnnnnnnnnnnnnnnnnnnnnnnnnnnnnnnnnnnnnnnnnnnnnnnnnnnnnnnnnnnnnnnnnnnnnnnnnnnnnnnnnnnnnnnnnnnnnnnnnnnnnnnnnnnnnnnnnnnnnnnnnnnnnnnnnnnnnnnnnnnnnnnnnnnnnnnnnnnnnnnnnnnnnnnnnnnnnnnnnnnnnnnnnnnnnnnnnnnnnnnnnnnnnnnnnnnnnnnnnnnnnnnnnnnnnnnnnnnnnnnnnnnnnnnnnnnnnnnnnnnnnnnnnnnnnnnnnnnnnnnnnnnnnnnnnnnnnnnnnnnnnnnnnnnnnnnnnnnnnnnnnnnnnnnnnnnnnnnnnnnnnnnnnnnnnnnnnnnnnnnnnnnnnnnnnnnnnnnnnnnnnnnnnnnnnnnnnnnnnnnnnnnnnnnnnnnnnnnnnnnnnnnnnnnnnnnnnnnnnnnnnnnnnnnnnnnnnnnnnnnnnnnnnnnnnnnnnnnnnnnnnnnnnnnnnnnnnnnnnnnnnnnnnnnnnnnnnnnnnnnnnnnnnnnnnnnnnnnnnnnnnnnnnnnnnnnnnnnnnnnnnnnnnnnnnnnnnnnnnnnnnnnnnnnnnnnnnnnnnnnnnnnnnnnnnnnnnnnnnnnnnnnnnnnnnnnnnnnnnnnnnnnnnnnnnnnnnnnnnnnnnnnnnnnnnnnnnnnnnnnnnnnnnnnnnnnnnnnnnnnnnnnnnnnnnnnnnnnnnnnnnnnnnnnnnnnnnnnnnnnnnnnnnnnnnnnnnnnnnnnnnnnnnnnnnnnnnnnnnnnnnnnnnnnnnnnnnnnnnnnnnnnnnnnnnnnnnnnnnnnnnnnnnnnnnnnnnnnnnnnnnnnnnnnnnnnnnnnnnnnnnnnnnnnnnnnnnnnnnnnnnnnnnnnnnnnnnnnnnnnnnnnnnnnnnnnnnnnnnnnnnnnnnnnnnnnnnnnnnnnnnnnnnnnnnnnnnnnnnnnnnnnnnnnnnnnnnnnnnnnnnnnnnnnnnnnnnnnnnnnnnnnnnnnnnnnnnnnnnnnnnnnnnnnnnnnnnnnnnnnnnnnnnnnnnnnnnnnnnnnnnnnnnnnnnnnnnnnnnnnnnnnnnnnnnnnnnnnnnnnnnnnnnnnnnnnnnnnnnnnnnnnnnnnnnnnnnnnnnnnnnnnnnnnnnnnnnnnnnnnnnnnnnnnnnnnnnnnnnnnnnnnnnnnnnnnnnnnnnnnnnnnnnnnnnnnnnnnnnnnnnnnnnnnnnnnnnnnnnnnnnnnnnnnnnnnnnnnnnnnnnnnnnnnnnnnnnnnnnnnnnnnnnnnnnnnnnnnnnnnnnnnnnnnnnnnnnnnnnnnnnnnnnnnnnnnnnnnnnnnnnnnnnnnnnnnnnnnnnnnnnnnnnnnnnnnnnnnnnnnnnnnnnnnnnnnnnnnnnnnnnnnnnnnnnnnnnnnnnnnnnnnnnnnnnnnnnnnnnnnnnnnnnnnnnnnnnnnnnnnnnnnnnnnnnnnnnnnnnnnnnnnnnnnnnnnnnnnnnnnnnnnnnnnnnnnnnnnnnnnnnnnnnnnnnnnnnnnnnnnnnnnnnnnnnnnnnnnnnnnnnnnnnnnnnnnnnnnnnnnnnnnnnnnnnnnnnnnnnnnnnnnnnnnnnnnnnnnnnnnnnnnnnnnnnnnnnnnnnnnnnnnnnnnnnnnnnnnnnnnnnnnnnnnnnnnnnnnnnnnnnnnnnnnnnnnnnnnnnnnnnnnnnnnnnnnnnnnnnnnnnnnnnnnnnnnnnnnnnnnnnnnnnnnnnnnnnnnnnnnnnnnnnnnnnnnnnnnnnnnnnnnnnnnnnnnnnnnnnnnnnnnnnnnnnnnnnnnnnnnnnnnnnnnnnnnnnnnnnnnnnnnnnnnnnnnnnnnnnnnnnnnnnnnnnnnnnnnnnnnnnnnnnnnnnnnnnnnnnnnnnnnnnnnnnnnnnnnnnnnnnnnnnnnnnnnnnnnnnnnnnnnnnnnnnnnnnnnnnnnnnnnnnnnnnnnnnnnnnnnnnnnnnnnnnnnnnnnnnnnnnnnnnnnnnnnnnnnnnnnnnnnnnnnnnnnnnnnnnnnnnnnnnnnnnnnnnnnnnnnnnnnnnnnnnnnnnnnnnnnnnnnnnnnnnnnnnnnnnnnnnnnnnnnnnnn

SEQ ID NO: 98279 - DNA, 19874 bp, Homo sapiens
  misc_feature (1)...(19874): n = A,T,C or G
agtagctgggactataggtgcccgccaccacgcccggctagttgttttttttttttttttgtatttttagtagagacggggtttcaccatgttagcaatgatggtctctatctcctgaccttgtgatccacctgcctcggcctcccaaagtgctgggattacaggcatttgccaccgcgcccggcaatttttttttttgagacggagttttgctcttgttgcccaggctggagtgcagtggcgcaatctcagctcactgcaacctccacctcccgggttcaagccattttcctgcctcagcctcccaagtagctggattacaggcatgcaccaccacgcctggctaattttgtatttttagtagagacagggtttctccatgttggtcaggctggtctcgaactcgtgacctcaggtgatccacccgccttggcctcccaaagtgctggaattacaggcatgagccaccatgcctggccaagagcttgatttttaacattagctcaaggttaatgcccccaactctcagcaaaagcatgacgggtgcccgcgtccgtctgggagtacttttcaccgttttactaaggcttcattgcccgcagccatcctgacctccacactctgaaagtgacaagccctgaagtctccagtcggggcaggtgcttgagctctgacgcccgggctgcctggcgcagagaccacgtgcttggggaggaaggctgtgtccactgggggattcctttcctcacatacaggatccagtgatcagcactgctctggaaggagggtcagggtggtgagcgttcagtccctccggccctctgagccccagcctaggccgccctctgcttgcgctcttcctgtggaggaaaggggagggctcagcaccacacactctgtcccctcatcgtctgtggggccccgggctctgcccctggaaccctgaggacaggaagccctgtgcatgcagaaaccaggccctggccccgctgacagccctccctggtgccacgtgtttccaccactggtgcccaggggctccccgcccttgggccagaagctcgaggacaacctgtgtgaccctctgttgccttctcgctttcctctttttccctcttttctccacgtgtggtgacgacgccctctctgcaaacgccctccccagagggtttcatgccggactctggtgcccttaccttgacagactcctccagctgggacagggcctcctcgtaccgaggaaccagcggctgcagcagcttgctggagagctcgtgccgctgcaactcaggtgccccagcttcagttagcattcggaggaatctcctctcctggagagaagctcatggtggaagggggttcttgggccagccccttaacacccaccaacagcagaaactcccaagaccctcgcagcctcacctgcactttcaggagcagtgtgaaggcctgtccagttttcccagcgcgagctgtcctcccaaccctggaatcaaacgcagctatctccagactggcccctgagccttcaagagtctgacggaacgacagcttctctccacaccaaccccaccccacgccagtcaagacggtcccacatcaacgcccaggagctcacaaagccccagaccccccagtggccgctgcgccagcgctcaccggtgcacgtaggttctcaggtactggggggcgtcgtagttcaccaccagctccacaccctgcacgtcgatgcctcgcgcggtggcgtccgtgctgatgagcctgccgggacacgcagcattgtgggcccgacgtgccaggagcaggggccgtggcagcaccggccctgcggggggcagctcaggcctttctgggaactggctgccatggggctggggcacaggaagccaatttgcagaaggaagcaccttttagagagccccaggctgaccctggagtgggcacccccaccccacagaggccttgcccctgcccaggaactcacagctggatcttcccctgttcaaactgcttcaggatcatcctcctctggccaggcccgtagcgcgaggagaactcagccacgtccacacccccaaaagcttgcaccagcaggaagagcctaggcagagagaaggctgcggccaagtgatgctgggaccagaggccacctctgccacccccgcccagccggggcctcacctgtgggagttctctcgggagttagtgaagcagagaaccctcgagaagcccatctccaggaccaggtgcaggacgaccagcggcttagagctgaggctgcagggcacgtagtggtgctacagggacggcagggggtcggggtggaggtgagggttggttaggggccccaggttcccagtgcaaccctctgcccacacggtatcccactcaccgtgagcccaacaggaaaggcatacttccccgaatccccgtccccatctgtatcttccaggcccctgtgtgctagccctgtggagaaaagccggggctggtggaggcccagctgctgcagcttttcagggttctgggtcagagtagctgagaagagcagcttctgcaggggcatctggggacagcaggtgctggaagagaagggggtgttgctggcaccctaccagtggctgccccgaacctccagggaacaggattcctcatgctacgcactgtagagactgccgcagaccaggagcaaggtgggtccagctcacgtgacagtacgatgcggttctgtgcaccagagctcaagccacccttatctctgggcattaaggaaggagagctgtgtgcagaggactctgctcaggggaggccagcacctgggcgtgctgctggatacctggcggctgtcacagcctgggcctgccttcgctggagcagggcacaggggtccgcggggtcctcgctctggaaggcggccgccaccacccgcggcagccaggactgatgcatgctgtcaatcatccggtcagcctcgtcgataatctgcaggagacagggagcccgggactgggtggcgcggccctgagctcaaagcccaggcccctggggcggggacctaccaggaagcggagctgctggaggctgaatcctggggtctggtcgatgtggtccaccaggcggccgggggtggctaccacgatgtcagccaagcagcggtacccatcagctctacagaccagagagcagctcgagagaaggaagctttctcaagggcttccggatagcaagacgctgcctcaccccacagccccgactccaccccacatgggaagggggccggtgggagctcctcctcttcacgggaacaggtggttaaagatggtggcccctcctctgctcccacggtgcctcaggccacctgcagggctgagcagggaccccctgaaaaacccgcaccctgacacaacctacgttttctggacgaggctctcctgctccttggccagagacttctgtcccgtaaccagggagactctcagaggtgtggcatctgtgtagatgttgaaaactttgctcacctgcaggagaagtctgtcactggcctggaggtagctggtgtccacctactgcagcaaaaaggaccccagatctaatctgggtcccccaggggctgatcgctgtgcactcagcagggaagctgaggcgggcggtgccacgctccaggtctagggtccacatacctgccgggccagctccttggtgggcagcacaaccagggcacggatgtggcagaccactctcgaaagcagggcctgagggggaaggagcgcctgcgtcagcaaggctgttacctgtcctctgcacacccgctgtagagaaaggggaccctcacacagacctgcaccacagggatgacgaaggccagtgtcttcccactgcctgttggggcagaaacacagaggtcgctaggccggtagccacctctgcccaccagaaacccacaggctgcgctctccaggagggcaggaatcacagctgcctggactggatgaggaaaggcgagagagaagtcgtgtttacgcctaggcctaggcctgccgcttccctgcctgtgacctctgggctgggctgctctgctggaggcctgggaaccgctccccagagggatggcaccaaggcccagaggaacgccagcctcaggagacccaagtgggaaccatgagcttgagagtgctgagaccacacttggcaccgatgtggcagggacgcctgacccacggccactcacagccttgtgtgtgggtgcccagggaggtgttccctcagctgcctgcccggggctggggcacctggaaagtaggacgagatgccgtgtgcccgcagctgcttctgcaggtcaggatggacgtcagggatgtcctcgataggaaccaggtcttcggtgacattccttctgacacagttaggctcagccagccaccttggcaggaaaggctggacctgccatcaaaaagaaagagaggccaggtgagcgctttccaggctctcgcgcagaagcccacggtggaaaaagctaggggagggaggctggggaaacctctgtcgtcttcagctccttctcagccccaggatgcgctttccatacagccttcagaagttaaacagtaaaagcagatgccactccctgagcaaactcactctgtagcctcccatcaacccacagtggcacccaccctcccgcagccaggaggtcctgtgacctggcgctcgcctgccccagccacgccggcgtccctgcctcgaggcctctgcctggcacccccaacccccaaccttgacctggcttcaagtctttgcatcccaactcaaagagaacctcctccacctgccctacctaaggtgcccgagcactctgtcaaacttctcgctttcttcacctgtctcgccggaaatctctttaccgaaaaccacacgtgctaagcaaaaacaccaacggtcaggagcttgcagaacggcctctgacttactcctgaggcggtgagcgcacagcaggaaaccccgcacgttcacgcaaacacatcttgcagaactggcgcggcgcggcgggaggacaggggcaagcctagcagaggaaacgggagctctgcacgtgcaggatccagacccctaggcgatgaaactgcagacctggcagcgaggcgcggctgtgacccgggaacattcgctgaacgaaatcttccggggcgaccgccgcacttaagaatccgcgcagcctaccctctcacgccgaccaccctcccgcccgccgaggctcaccttcggcgccttcctcttcccgaacccccccagcaccaggccggggaccaggggtccggccgcctcctccagggccggtccatctggggccgcctcggcgctggcgctggtgctgcgctcccccggcgcctcctcgctgctccctgcgctgggctcccctggcgcctcctcgctgctccctgcgctgggctcccctggcgcctcctcgttgctttctgcgaggcagacacccacccggcagcgcgtcagcaccgagtcgccggcgccccagagggagcccgctcgccccgcggcccacctgcgcccgcgtcctcgccgtccgccttccgtcgctttccctgcggcgcctccgggctccccggctccgcgtcgttcacccgccgccgccgccggggccgccgtcgcctcctggtcgccggctcggtcgatgcagccgcctcggtctgcgcgggctcccgctgctgctgccgttcgcgggcccggctctgcagccgctcgagcagcgcgcgggccctgccgtgcgccccggcctccgcgccctccggccccgccgcagctgccgcatcggggcccgggtaccgcgcgacgtagaacagcgccatggccagccgcacgcctgggactcgggcgtggcgcgctgcgatgacgtcggcggcacgcctgcgactcgggctccgcgcaaaagatggggttggggtacggcgcgtagagatgacgtcgggttctacgcgcagtggtgacgtcacgggagcgccggcggctgagaatccgcgttgttccgtgttgggggcggcatggagcgggagccgggcgccgcgggagttcgccgggctctgggccgccggctggaggcggtgctggcgagccgcagtgaggccaacgccgtgttcgacatcctggccgtgctgcaggtgggcctggcggcgtcgcagggccggagtcgcggcacgggagcgggacttgaatggggggctgcggcggcaggtccccaggaggttccgagacggcgttggggggtcagggtgggaggcgtgtgggtcacgggtcgggggtgacggggctggcgtcccgagggggaagggaacgggttgggggcagcctaggcaggggcgaaggtgacagttggcggccgggcaccctgccgccgcctctcctgcagtctgaggaccaggaggagatccaggaagcagtccgcacgtgcagccgtcttttcggggccttgctggagcggggagagctgtttgtgggccagctgccctctgaggagatggtcatgacaggtgagccctggagggccccggggctgctcttctctttccgtgggtcggagggaggctttgtcaccatgggatgagcgcccccaaccctggcacaggccgtgcaggctggtgggaggacgcaccaagcccaccgtggaagatggatggtggcgttggggcaggggtgacatgggtgccctgcagctgagtgtagatgaacactggacaaggtacgactttttgtgtgctttgcaccccttttgtaatttgatgttgactgatcctgacacggtcgcttaaactcggagcttcctttatgtccccatcctggggacgtcaggtcttggagtaaagagaggggatgtggatcctgctcctggcagcttggctggggcagtcctggggtaggaggtgctcttcctgtttgcagggctcagggaatgtgctggtctcagcacaggtctgggggccttagcgacctgtttccacctgcggaggctgagtagaagacaatgggagggtggagccaggcctgagattttgggctgggcccagggtggcgtatgtgggcctcacgtgggctgaccaccctaacctgtctgcagggtcccagggagccacacggaagtacaaggtgtggatgagacaccgctatcacagctgctgcaatcgcttgggagagctcctgggccacccctcctttcaggtcaaggtgggtcattgggctggcctcatccttgtccatcccctgcaccccaactcccaggttatccacaaagcagaggtctggggctcccacaattgtccaggcaaagctgcttccttcatgggagcatcaccctgtgggtgttcagtyccattcagaaacatggctatcgagtcctgtagtgaatattgaagacgcagaatccgtgttcatttccagtggcatccacggggatctctgtgtttgcatagagcacgcacaccaagcctcgtgccagtccacagatgtgtttgctcagatcacactgtggtctgcagccatgggaatgcattatgagctttcttaaaatctgtagtgaggaataactgaggcacagtttaccgtttaaagctgagaagttagcatctgttactgtgttgtgcagtggttgccgctatcccagaacatctttatcgccccgaaaagaaatcctgtaccagttaccatcgcttccatatcccgcccctttccacccccagccccaggcagccactcctggatcagtggttacttcctggatcaatgggtttgctttttttagacgctcctcataagggggatcatacggtatgtggctttttccactcatcggcgtgttcgaagttcgttctctttgtggctgagtagcagcgcgtcgtatagcacagcacgtatcgttcagccgctcgtaggttgctgggcatttgcgtcgtttccacctttggctgttacgaacagcggactgtgaacgttcgcgtacaaactcttgtgtgatgtttcttttgcttgaatatgccttatcagtggaattacaaggccacacagcagctgtgtttttaatgttctgaggaactacaagactgttttccatagtagctgcgctatcttaccctccccctggcagcatttgagagttccatactccacatcctcgccaacacgtctgtctataattatagccgagctgcagacttttaaatgttggggagataccacgtgaaaataaccagtttccaccttctcagaaagaaataatcagttctgtcaacacggggtctaagtttgttcatggctgcgattggctggagggagagtcagagacagctctgagacagccgtgtgctcctgtcatcccgcacgaggctcttttgctttgtggtgtcatttgcctgggccctgaaagcactgagtttgccaccccgagatgagagcttccaagcctgggtctgagttgggcaccatgctggcatcacacgcctgtgttttcacagctgttcccaagggttatggtggcattcccgtgacacaggtgacgagagagcagtcaggtggcccataaagcagacctgggctgtgtacccttcccccgccagactctgtcgtgagcactggatctctttaactagagatcttgtcatctctacgtcatgggtgggacacggaagcccagagtggcatctggtggcgtgtggagcaagagaaggcccggccgcccttttctcagctctgggcctagatgggaggggctccctgactgggctgagctctgggcccatccgtggggtgagggcatcacagccaccctgcactgcccccttcccaggagctggccctcagcgcactcctgaagttygtgcagctggaaggagcgcaccccctggagaagtccaagtgggaaggcaactacctgttcccccgagagctcttcaaggtgagggccttgctggggactcccagagggcctggctggctgrccagatcccaggatggccccgtagtgggggcggggcctgctgagctgagcctggctgttggctgggacactcctgtggctcctgtggcccacccaaccaggaggagtctgcctggggggctcgatggggcagggctgcctgcctggaccttgctggcgtatgctgggcygggcagggctgctcactggtccttgcccctagttggtggtgggaggcctgctgtctcctgaggaggaccagagcctgctcctgtcccagttccgggagtacctggactacgacgacacccgctaccacaccatgcaggcagccgtggatgccgtggcccgggtcactggccagcaccccgaggtgggtgatggggtcctgtcgccagcatcatgctgttgcctcccagggaggcagggactggggggcggcgtccaggcactcaggccaggctccgcaggtgccccccgccttttggaacaatgccttcacgctgctgtctgccgtgagcctgccccgccgggagcccaccgtctccagcttctatgtgaagcgggcgggtgagtgtgctgagagtcaggggcggacagggctgagccttggtctgcctcccctgcgggtcaggtgacctttgccctcgctttccctgcagagctgtgggacacctggaaggttgctcacctgaaggtgagttgcttctggagagccgggcaccctcccgggtttgggggtgtgtgtggggtgcatgtgagaccccatggaggctgccgccttcctcaccagaggaaactcccagggtacaggtggcagcttgcacggccaccaggtcactcgaagtgtgggaggtgacgagacctgtgaactcgggaccctcccttgggtcagaggccaccgccgcctcttggagtcaagcctctggtgccacctgtgggccccgtgggctgttttgggcgcagcccccctcttggccatggtcttgccaaagctgctttcttggctgttctgagactccagcctcgagggcaaggcgtacctgacttgaatggggacaggaagaaggaaggcagggtcagaaaagtggagagcaggcttgtgttggctcaggctgggcttcggggtgccctggcagctgctcgggctctggtctggggtggggagggcggcgagtgcagtctggaccccgttgcaggagcacaggagggttttccaggccatgtggctcagcttcctcaagcacaaggtaggggccaggccggggagggggcgggggcggcatccgggtctcccccagggcggaggcctcannnnnnnnnnnnnnnnnnnnnnnnnnnnnnnnnnnnnnnnnnnnnnnnnnnnnnnnnnnnnnnnnnnnnnnnnnnnnnnnnnnnnnnnnnnnnnnnnnnnnnnnnnnnnnnnnnnnnnnnnnnnnnnnnnnnnnnnnnnnnnnnnnnnnnnnnnnnnnnnnnnnnnnnnnnnnnnnnnnnnnnnnnnnnnnnnnnnnnnnnnnnnnnnnnnnnnnnnnnnnnnnnnnnnnnnnnnnnnnnnnnnnnnnnnnnnnnnnnnnnnnnnnnnnnnnnnnnnnnnnnnnnnnnnnnnnnnnnnnnnnnnnnnnnnnnnnnnnnnnnnnnnnnnnnnnnnnnnnnnnnnnnnnnnnnnnnnnnnnnnnnnnnnnnnnnnnnnnnnnnnnnnnnnnnnnnnnnnnnnnnnnnnnnnnnnnnnnnnnnnnnnnnnnnnnnnnnnnnnnnnnnnnnnnnnnnnnnnnnnnnnnnnnnnnnnnnnnnnnnnnnnnnnnnnnnnnnnnnnnnnnnnnnnnnnnnnnnnnnnnnnnnnnnnnnnnnnnnnnnnnnnnnnnnnnnnnnnnnnnnnnnnnnnnnnnnnnnnnnnnnnnnnnnnnnnnnnnnnnnnnnnnnnnnnnnnnnnnnnnnnnnnnnnnnnnnnnnnnnnnnnnnnnnnnnnnnnnnnnnnnnnnnnnnnnnnnnnnnnnnnnnnnnnnnnnnnnnnnnnnnnnnnnnnnnnnnnnnnnnnnnnnnnnnnnnnnnnnnnnnnnnnnnnnnnnnnnnnnnnnnnnnnnnnnnnnnnnnnnnnnnnnnnnnnnnnnnnnnnnnnnnnnnnnnnnnnnnnnnnnnnnnnnnnnnnnnnnnnnnnnnnnnnnnnnnnnnnnnnnnnnnnnnnnnnnnnnnnnnnnnnnnnnnnnnnnnnnnnnnnnnnnnnnnnnnnnnnnnnnnnnnnnnnnnnnnnnnnnnnnnnnnnnnnnnnnnnnnnnnnnnnnnnnnnnnnnnnnnnnnnnnnnnnnnnnnnnnnnnnnnnnnnnnnnnnnnnnnnnnnnnnnnnnnnnnnnnnnnnnnnnnnnnnnnnnnnnnnnnnnnnnnnnnnnnnnnnnnnnnnnnnnnnnnnnnnnnnnnnnnnnnnnnnnnnnnnnnnnnnnnnnnnnnnnnnnnnnnnnnnnnnnnnnnnnnnnnnnnnnnnnnnnnnnnnnnnnnnnnnnnnnnnnnnnnnnnnnnnnnnnnnnnnnnnnnnnnnnnnnnnnnnnnnnnnnnnnnnnnnnnnnnnnnnnnnnnnnnnnnnnnnnnnnnnnnnntgccctcggtgagtgcggccgcctcgctcacaccacacccctaatcccctcggtgagtgccgccgcctcgctcctaccacacccctaatcccctcggtgagtgccgccgcctcgctcacaccacacccctaatcccctcggtgagtgccgccgcctcgctcacaccacacccctaatcccctcggtgagtgccgccgcctcgctcacaccacacccctaatcccctcggtgagtgccgccgcctcgctcacaccacacccctaatcccctcggtgagtgccgccgcctcgctcacaccacacccctaatcccctcggtgagtgccgccgcctcgctcacaccacacccctaatcccctcggtgagtgccgccgcctcgctcacaccacacccctaatcccctcggtgagtgccgccgcctcgctcacaccacacccctaatcccctcggtgagtgccgccgcctcgctcacaccacacccctaatcccctcggtgagtgccgccgcctcactcacaccacacccctaatcccctcggtgagtgccgccgcctcactcacaccacacccctaatcccctcggtgagtgcggccgcctcgctcacacccccaacccccaccccgcagcacctcttccccgatcccactgcctccaccccccactcccctgccctgcatgtggtctccagctttgtgtccgtgggggctgtgggaggggacagcaggggcagaggccacactccacagacttacactcagtgtgggcagggggtagggtgggagcgaggtcactgcagctccagcctgtgtctgtctgtctgcagggggggccctcagcctcttggccttgaacgggctgttcatcttgattcacaaacacaacctgtgagtgtcaccaggggtgcaggtcttcttcccagtctgcccagccctgctcctctgtccccttcccaccctgccccacggggtccccgctttcctcacaggccatggtgttggagtccctgggcgggaggaaggggcgccgagtgagaccctggccttggaggcctcagttcccgggccctgctccatccgttgctccttccccccggcccgcagggagtaccctgacttctaccggaagctctacggcctcttggacccctctgtctttcacgtcaagtaccgcgcccgcttcttccacctggctgacctcttcctgtcctcctcgtgagtaccagggcacctggctctgccctgctctgtgcggctgcagcctggggccaggggagggtggtgggggctagcagtccgggccctgtctcacaaccactgccctgcccagccacctccccgcctacctggtggccgccttcgccaagcggctggcccgcctggccctgacggctccccctgaggccctgctcatggtcctgcctttcatctgtaacctgctgcgccggcaccctgcctgccgggtcctcgtgcaccgtccacacggccctggtgagttgcggggccctcggaggctgggctggagctggggcgggggtgcctggtgctgtggacggcagacaagggcccacgtctcattcctagagttggacgccgacccctacgaccctggagaggaggacccagcccagagccgggccttggagagctccctgtgggagcttcaggtgagggcgctgctgccacaccctggggcctcccgagccatccttcggcccctcagaaagcccagctccccgtgccacctcccgcatagcctcatgttgcgtccccagctggccacctgggtttgtgggtgctgggtgcttggccttctcacgtggctccgtcccgaccccgcccactctggttgggagcacagggaggccatggctgggggcacagggcgggggcctggggcagctgcctcttaacggccctactgccccaggccctccagcgccactaccaccctgaggtgtccaaagccgccagcgtcatcaaccaggccctgtccatgcctgaggtcagcatcgcgccactgctggagctcacggcctacgaggtgcggaactgggccagggtgcgagggtctgggccacggggcgctgagccaagcctgagagccgccgtgctttgtgctttgcagatctttgagcgggacctgaagaagaaggggcccgagccggtgccactggagtttatcccagcccagggcctgctgggacggccgggtgaactctgtgcccagcacttcacgctcagctgaccctggcccacctgtgaataaatctcagctgaccccagcccacctgtgaataaatgtttttgcaggagaaaggctcagggagtgtggactggggcggctggatgcctctgccaggccgggggcctcacatctgcctgagcccaccaggcacatggcaaagcgaggcccctgccgactccacagcctgggaggggatggtggggaacctgaggcgtggtctttcccagggcctccggcccaccagtgtcaccggtcacccagcctccctcatcccctggccccagtgacctccctgttggcagagctcggggcctctgctgaggttacactccagacacctgggagggagcagggttgggggggttctctctgcctgggtcagttgtggtgggaggtgtatggtggtgtagacgggtatggtgtgtgtgggagnnnnnnnnnnnnnnnnnnnnnnnnnnnnnnnnnnnnnnnnnnnnnnnnnnnnnnnnnnnnnnnnttagtgtgaatgggaggttggtttgagtggggggtgttggtgtcagtggggggttggtgttgagtcgggggttcctggtgagtgtcagcatcccacgctggctgtgtcctgccgatctggccttcgttctgggagccccgcgaggccccgggtggatgccgcgtggagttctgggtggatggtgcgtagaattccgggtgggtgctgtgtagaggccccgggtggatactgcgtagagttccgggtagatgctgcgtagagttacaggcagtgcctgggcccctctggagttccctgcccccacccccgtgggaggccctggtccagctgcagtggagtttcccccgctgtgggaggcgctggtccggctgcagcacagccttgttatcggggtgtttatttttagggaaccaaatttataccaaacaaactaggttttctgtctacacagtgacccccagtttccttttgacagtctgcttattcgaggacagggtgggatggggcactggaacagagcttggtgcgcgtgggtgtggctggggagggcggggagtgccttggccgtggcttgggggtgtcaccctgccggcccagcattggccgggaccctccgtgtgcccagcggggttttggggggcagagtgatggtggagatgttgcctctgctcccagcatccccctggctgcttccctctgccccagcgggctcctcaagtgaactggctcctgccccagggcctttgcaccagccacagctgtggcctctgccgcttttccctgtgttgccctggtttgaacgtcccgtccccgtccccccgggaggccttccctggtaccccgtgcgtggtagtcctgcacaggcgcccctccttccccactcttcatgctgtcccgcccgagccctctcagcactcccgctgcagcagggcagacagggcccgtcctcttgctgtgtcccaggcagcctgtcacaccgggtacgctccagagccctggcccccctccccgccctccttgggctcctggggcagggctgggcctaggtgctggcatcctgagctcatgcggccaccagaggccgctgcagccttgcccaggcctgcagcgcccgagctgccctgctaggtttcacctcgccggggtctgcagtatttcctgctcggattcagccagggcctccctcctgacatcacggagggtttgtgctgggctgttaggcggatctcggatgatgggcgaggccaggaggagagtgaaagcgcctccgagtcagccaggcttggattctgtcgtcagaggggctctgtgtctagcaacctccacgtaaccgtgttcggtcctctgctccctgtgttccccgcatgagccgggcatgaacagggacctccttcaccgcctgaggtcccctctccctggctggtgacccccatctctgagagcacggggacgtcccctgtgctgtggaggagcgtgtgctctccgagatccaggtgctgcccccgaggagcgcatgccctctgaaatacaggtgttgccgccatccccgagagcacggggacgtcccctgtgctgtggaggagcgnnnnnnnnnnnnnnnnnnnnnnnnnnnnnnnnnnnnnnnnnnnnnnnnnnnnnnnnnnnnnnnnnnnnnnnnnnnnnnnnnnnnnnnnnnnnnnnnnnnnnnnnnnnnnnnnnnnnnnnnnnnnnnnnnnnnnnnnnnnnnnnnnnnnnnnnnnnnnnnnnnnnnnnnnnnnnnnnnnnnnnnnnnnnnttcaggcctttgtaaaagtggattcttcacgtggtgctgagccggctgctctctggcctttggcctcctgtcaggttgggcgcagccaggaggccctcgctagaggctggtgccttcatcctggacttcccggcctgcggaactggagagaagacagtgtcactttttagaagttacctgctctcaggtaacctgtaacagtggtgcagacggactgagacaccgtcagttccagaatcttagagaagttccaggggccccttcaatcacctatgaggccaatacccagccggcacctgcgtgtacccggcggtgtcctcactgcacacggagaacagcgccgcaccagtggggcctctctccccctgtgcttcccccgctccctctctgtcttgtctctccctctcctcccgtcccccgattccgggtctcccttcaggaaatgaacgcggctgccggacagtgaagtcacagctacatccgtaatgagggatagctgaagagctgtggagcgcgcgttccggcgataagggacgctggagcgtttaattggcgttgaggaaatcagctgcggagaatcagcagtcgtttcccgagcgtcggtcgtgctgggagctgtggcgaaggccccggcggtaagcgattcccgctggacagcgaggagcgtgtccgttccctgcggtgtctgggtcttcccccactggggccagcagcccacggtgaaggccatgccggtctccaacggcgcgggctccactcccggctgggagggtggcacggccccaggcctcagttgtcccatctgcagagtgtgctgccagggtctatgctcagaaagtgacttcagaacgtagcggtgtggaactgcagcagcactgatttcgctcgtgaacctgcagtgtggacttggtggggacggctcgcctgcactccgggtggcaggaggtagagttgggtgttgggggctggggtcgttagagctcaccgtgcaacatgacacacaccgctacatacacaccactacacacactagatacaccactacacacaccactacacacactacacacaccactacacacacacactacacacactacaccactacacacaccactacacacactacacgcacacagtacacacaccactacacacactacacgcacacagtacacacaccactacacacactacacacaccactacacacacacaccactacacacactagatacaccactacacacaccactacacgcacactgtacacacaccactacacacactacacacaccactacacacacactacacacacaccactacacgcacacactacacannnnnnnnnnnnnnnnnnnnnnnnnnnnnnnnnnnnnnnnnnnnnnnnnnnnnnnnnnnnnnnnnnnnnnnnnnnnnnnnnnnnnnnnnnnnnnnnnnnnnnnnnnnnnnnnnnnnnnnnnnnnnnnnnnnnnnnnnnnnnnnnnnnnnnnnnnnnnnnnnnnnnnnnnnnnnnnnnnnnnnnnnnnnnnnnnnnnnnnnnnnnnnnnnnnnnnnnnnnnnnnnnnnnnnnnnnnnnnnnnnnnnnnnnnnnnnnnnnnnnnnnnnnnnnnnnnnnnnnnnnnnnnnnnnnnnnnnnnnnnnnnnnnnnnnnnnnnnnnnnnnnnnnnnnnnnnnnnnnnnnnnnnnnnnnnnnnnnnnnnnnnnnnnnnnnnnnnnnnnnnnnnnnnnnnnnnnnnnnnnnnnnnnnnnnnnnnnnnnnnnnnnnnnnnnnnnnnnnnnnnnnnnnnnnnnnnnnnnnnnnnnnnnnnnnnnnnnnnnnnnnnnnnnnnnnnnnnnnnnnnnnnnnnnnnnnnnnnnnnnnnnnnnnnnnnnnnnnnnnnnnnnnnnnnnnnnnnnnnnnnnnnnnnnnnnnnnnnnnnnnnnnnnnnnnnnnnnnnnnnnnnnnnnnnnnnnnnnnnnnnnnnnnnnnnnnnnnnnnnnnnnnnnnnnnnnnnnnnnnnnnnnnnnnnnnnnnnnnnnnnnnnnnnnnnnnnnnnnnnnnnnnnnnnnnnnnnnnnnnnnnnnnnnnnnnnnnnnnnnnnnnnnnnnnnnnnnnnnnnnnnnnnnnnnnnnnnnnnnnnnnnnnnnnnnnnnnnnnnnnnnnnnnnnnnnnnnnnnnnnnnnnnnnnnnnnnnnnnnnnnnnnnnnnnnnnnnnnnnnnnnnnnnnnnnnnnnnnnnnnnnnnnnnnnnnnnnnnnnnnnnnnnnnnnnnnnnnnnnnnnnnnnnnnnnnnnnnnnnnnnnnnnnnnnnnnnnnnnnnnnnnnnnnnnnnnnnnnnnnnnnnnnnnnnnnnnnnnnnnnnnnnnnnnnnnnnnnnnnnnnnnnnnnnnnnnnnnnnnnnnnnnnnnnnnnnnnnnnnnnnnnnnnnnnnnnnnnnnnnnnnnnnnnnnnnnnnnnnnnnnnnnnnnnnnnnnnnnnnnnnnnnnnnnnnnnnnnnnnnnnnnnnnnnnnnnnnnnnnnnnnnnnnnnnnnnnnnnnnnnnnnnnnnnnnnnnnnnnnnnnnnnnnnnnnnnnnnnnnnnnnnnnnnnnnnnnnnnnnnnnnnnnnnnnnnnnnnnnnnnnnnnnnnnnnnnnnnnnnnnnnnnnnnnnnnnnnnnnnnnnnnnnnnnnnnnnnnnnnnnnnnnnnnnnnnnnnnnnnnnnnnnnnnnnnnnnnnnnnnnnnnnnnnnnnnnnnnnnnnnnnnnnnnnnnnnnnnnnnnnnnnnnnnnnnnnnnnnnnnnnnnnnnnnnnnnnnnnnnnnnnnnnnnnnnnnnnnnnnnnnnnnnnnnnnnnnnnnnnnnnnnnnnnnnnnnnnnnnnnnnnnnnnnnnnnnnnnnnnnnnnnnnnnnnnnnnnnnnnnnnnnnnnnnnnnnnnnnnnnnnnnnnnnnnnnnnnnnnnnnnnnnnnnnnnnnnnnnnnnnnnnnnnnnnnnnnnnnnnnnnnnnnnnnnnnnnnnnnnnnnnnnnnnnnnnnnnnnnnnnnnnnnnnnnnnnnnnnnnnnnnnnnnnnnnnnnnnnnnnnnnnnnnnnnnnnnnnnnnnnnnnnnnnnnnnnnnnnnnnnnnnnnnnnnnnnnnnnnnnnnnnnnnnnnnnnnnnnnnnnnnnnnnnnnnnnnnnnnnnnnnnnnnnnnnnnnnnnnnnnnnnnnnnnnnnnnnnnnnnnnnnnnnnnnnnnnnnnnnnnnnnnnnnnnnnnnnnnnnnnnnnnnnnnnnnnnnnnnnnnnnnnnnnnnnnnnnnnnnnnnnnnnnnnnnnnnnnnnnnnnnnnnnnnnnnnnnnnnnnnnnnnnnnnnnnnnnnnnnnnnnnnnnnnnnnnnnnnnnnnnnnnnnnnnnnnnnnnnnnnnnnnnnnnnnnnnnnnnnnnnnnnnnnnnnnnnnnnnnnnnnnnnnnnnnnnnnnnnnnnnnnnnnnnnnnnnnnnnnnnnnnnnnnnnnnnnnnnnnnnnnnnnnnnnnnnnnnnnnnnnnnnnnnnnnnnnnnnnnnnnnnnnnnnnnnnnnnnnnnnnnnnnnnnnnnnnnnnnnnnnnnnnnnnnnnnnnnnnnnnnnnnnnnnnnnnnnnnnnnnnnnnnnnnnnnnnnnnnnnnnnnnnnnnnnnnnnnnnnnnnnnnnnnnnnnnnnnnnnnnnnnnnnnnnnnnnnnnnnnnnnnnnnnnnnnnnnnnnnnnnnnnnnnnnnnnnnnnnnnnnnnnnnnnnnnnnnnnnnnnnnnnnnnnnnnnnnnnnnnnnnnnnnnnnnnnnnnnnnnnnnnnnnnnnnnnnnnnnnnnnnnnnnnnnnnnnnnn

SEQ ID NO: 98280 - DNA, 28421 bp, Homo sapiens
  misc_feature (1)...(28421): n = A,T,C or G
ctgggcaacacagcaagactccatctcaaaaaaaaaaaagaaaagaaaagaaaagaaaagctttacactaacatggggaaacatgttttacataatgttaagcaaaaagagcagaagaaaacataataaacaccacagtctccaagaaaaaaacagaacaccaggatatgcaaaaaagtctatgtaaaaggttctctctggatatggaattacaggtgacttttttttccttcttcacattactcttctgcatttcaaattacttacaaaaagcacatattgttttaataagactttaaagaaaagaaaaaatagctggacaggaaaaccaaggaactagggattgggttacagagtagccacacacacacacacacacacacacagccttttacagagtagcaaaacacacacacacacacacacacacacacacacaaagcctaacagtctaatcacttaatgctgcatttattcctggggaagcaagtctcctttgcactttacacagtgagataatcagtttctcatgtggaccactgggccaggagggcctgacaaagggcagtctacatttcagactggaaactgctcccagaactatttctttctagttcccacctcggtctgaggtgcctgaggagagggactcaacagaggaagcaggagcatagctcaaagtctcagaacatggaagaggaaaagaatcctcacaagattacgtaacttacaggcgtgttgctgcttcagtagaagtttcatctccctcaatcctgtacacttttccatacattacatactcaaactggtcagccctatggagcaatagcagcaaagttattcttaacagtaattaacaatataaaagatcccatttaaaaatggttactggtcagccgggcgtggtggctcaagcctgtaaccccagcactttgggaggccaaggcgggcagatcacgaggtcaggagatcgagaccatcctggctaacacagtgaaaccccatctctactaaaaatacaaaaaaattagccgggcgtggtagtgggctcctgtagtcccagctactcaggaggctgaggtaggagaatggcgtgaacccgggaggcggagcttgcagtgaactgagatcgcgccactgcactccagcctgggccacagagcaagactccgtctcaaaaaaaaaaaaaaaaatggttactggtaactaaatgccagcattataacaacaggcacattacaaacatgatgtcatttagtcctcatggcaaccccatgagctaggcatgaccatctctattttattgatgaggaaacaggctgaaggagattaaggttactcaacaaataagtggtagagctgagaaatgaactcaagtggggtgccaaagtctttccatcacaccaagctccctcccaagacacaagacccacatggcctaggtcactcagcagttacctcctcagccttcaaaaggctgcaactcacaagcatgtaatcactgttatagataaatacctggttgtttgaatttttttctttttttttttttttttgagacggagtctcgctctgtcgcccaggctggagtgcagtggcgggatctcggctcactgcaagctccgcctcccgggttcacgccattctcctgcctcagcctcccaagtagctgggactacaggcgcccgccactacgcccggctaatttttttttgtatttttagtagagacggggtttcaccgttttagccaggatggtctcgatctcctgacctcgtgatccgcccgcctcggcctcccaaagtgctgggattacaggcgtgagccaccgcgcccggcccgaatttttttctttttttttgagacacggtcttgctctgtcacccaggctggagtgcagtggtgcaatcatggctcactgcagcctcaacctccctggctcaggcaatcctcccacctcagcctcccaggcagctgggactacaggcacatgacaccatgcccagccttttttttttttctctcttcttttttgtagcagtgaggtttcgctatgttgctcaggctggtcttgaactcctggactcaagcaatcctcctgcctcggcctcccaaagtgcttgggttacaggtgtgagccacggtgcctggcctgtttgaattcttaagtgcagaaatttccttaaggttactcagattctgctgatcatcatttattccaggaattttagaagagtctttctatatcacttatctacttagtcctcaaggcatatttcaagtattaccttctccactccctcacctggaaggcctatcatcagtggggttgtattcaccatcatccagggtaccatcttcatacaaggtactagctatgaccaaccgaaacttgtcacctgaaaataacagcaatatcagagagtaaagaatagcagaagcagcaaaaagtctcttattattgtctgtattcaatacttacccaagtctacagggtaaatttgaatgtttacatctaagattagatccatcttgaaagattcactctcacaatgcagtcgagacactggggagaagcaggaaaagagtgacagaggtattgccaaggcagatcctacagtgtgggattgtatgcaacaggatactcaatctaacccagtctacatccagtggtctctcatctgctctcatagaaattcaggctcaatcagaaccagatatgcaagaaggaaaaggggagaaaaactgtggcaagcgaacgtaatccccagaaaacaaccaaagatactccagcagcaaagcctgcctggatgactgagaacctgactctgggcaagttattcaatcatccaaaggttttctctttctatgctaggcactgtgctgaggggagtgaccaagatgtataagaactggtatccgtcttgaaaaacatcttagtctccaggcaaagaaagagacatcaaagagaaaattattgatagatgacaaaataaagaggtgtaggccggtgcagtggctcatgcctgtaatcccgacattttgggaggccgaggcaggtggatcatttgnnnnnnnnnnnnnnnnnnnnnnnnnnnnnnnnnnnnnnnnnnnnnnnnnnnnnnnnnnnnnnnnnnnnnnnnnnnnnnnnnnnnnnnnnnnnnnnnnnnnnnnnnnnnnnnnnnnnnnnnnnnnnnnnnnnnnnnnnnnnnnnnnnnnnnnnnnnnnnnnnnnnnnnnnnnnnnnnnnnnnnnnnnnnnnnnnnnnnnnnnnnnnnnnnnnnnnnnnnnnnnnnnnnnnnnnnnnnnnnnnnnnnnnnnnnnnnnnnnnnnnnnnnnnnnnnnnnnnnnnnnnnnnnnnnnnnnnnnnnnnnnnnnnnnnnnnnnnnnnnnnnnnnnnnnnnnnnnnnnnnnnnnnnnnnnnnnnnnnnnnnnnnnnnnnnnnnnnnnnnnnnnnnnnnnnnnnnnnnnnnnaagccttgggtggtttactcaacctctcagagaaaaatgggaaaggcaccacccacctcatgaggactgtcatttttttgagacggagtctcgctctgccgcccaggctggcgtgcagtggcgcgatcttggctcactgcaacctccgcctcccaggttcaggcaattctcctgccttagcctcccaagtagctgggattacaggcgcccgccaccacgccaggctaatttttgtatttttggtagagacggggtttcaccatgttggccaggctggtctcacaagacagtgtctagcacagagcaggtagcgattataaatatgcctaggagtttgccagcaccatgacaaaaggccacccaggcaccgggcacggcatgcgtgaagccagagagagctcgggagtctccgttttctcatccataaaatgtttactgagggaggtccctacaccaggacctgctggtaggggcaggccacaagagctgggtggacacggggcccaggggcatgtccgcgaggttagcctcttcctccaaaccgcccctacataccttacttacctcggtcaaacttcttgccctccgggtcaatatccttcacatcgaaaatatcctcaaacaggatgcccgccatcgcgagggggccacgagagcagcagaaggggtgagagcgcgaccacagttgggagtacgtgcaccccctagcgtggacaagaccggagagaaccaaaagcacctcctgaaagcgcggcggccagacgagagtggcgcatgcgcacaaacaagcggtaacgcgaccacttccgccacagcctcccgctcggggctacttaacttccgtcccgaaagattgcttccgagaggcttcggcattgagggcgggtctcatgtccaggtggctctgcccagggcggggaagcaataggctgtagagcgggttctcgcgctccgctggggccctactgcgccctcttcagaggccgggttccgaagactggaatgcgtgggggcctaacccaggcagggaccttgatccttggcccagagaagccgggccctagccctaccccgccggtccgcgtgcccgccgagggcacagtccgcgccgagggcaggtggagcagaaccccgccccagaggtgcccagcccctccagccggcaccgaggaccccggggccggcctgggccggctcggccctgctggacgtaacccgagccggatccgtccagtttgggaatttgccatgacgtcgctatggagaagaggaaagcctgcattgtcccctcctctcgtactgcaccctcccaccactgccctccctcttccccccaggccctgctctcttcccctacaccgccccttcagccgggctcccgccacccccctcccccgggcattacccctccagcttagtgctgcgcgttccccctccactgccttctcctggacacggatcccctccgtgccccttcagcctggcactgccctgtcccttggataccagctcttccctcacactggcccttcctcctgagtgctggcttctatcacaaggcccccccttcccgggcactgctcccgccccctgagccccgcctctgcctcccaaatgccccttactcctggtgctggctctcccgcacacttgtgcgtttcctgggcgctgccctcgctcctctcacactatctctacgctgcccatccaccctgcgcgcgctccgccctctgttctatccttccccagcccctgatagagaacccagaacaccagcaggcagttcccccaaagcggagggatggaagcagcgacttgggttcctccttgggcccagccagggagaagcgacccacgcccgcgtcccaggagtagacttcccggcacctggagctcccttccctccggcctaccccttccggtgccctccccaacctccacccccgcacaccccgcaggcccggttgctccaagtgcacctacccacgggagccccgagaaaaggaaggatgaggaagacggccccaaccctctccgaatccttccagctttgcttttcacccctgacggggcagaggggccttcccaggcctgtctgggccgctcgtctcttcggaggggcagaggggaggcggctcctaacgggctgacccggaggagtccgatgtagacagctccgcagcccccagccccaacccctacggagctcaggcgtctgcagcccctcctgcctgggcacggggaaccgcgaacccgggccggcccctccacgtgccagtagacccgcccctcccgggcgcccctctccgacccgggcatccgcagggagccggcgcgggcttgcgccttcccagcgccccttgccgcctctcgggaggccccgcgcggaccccagcctggctgggccgtcccctccggatgggccggcgggcggagcagcgcagagggcaccgccctcggcccgcccgccggggaggggacgcgagcgggaggctgcgccagcggcgcccgccgggggcccgccgcactctgctctcggcctcccgggctgcggggacgggacggctgccggcgcggactttgcgggccgggagccgagtccaggacagagccggaaccgccgagggaggcgagagggcagtgcgcggagatggcggccgcggcggcggaggaagggatggagccacgggcgctgcagtacgagcagaccctggtaagtgaagctgagctgagccccaggagtgcgctccgggacccctgctccaggttaccctgggaagcgcgaggaccaggggcctaccctaatcctgtcctagcattttgagctggggaaactgaggcttggaagtctgaggctgcagggccgaagggatggaaaactgcatgctggtttctggctgaggctgagggcctgcagaggacaaggacaccaggtacttgtctcaggtgtccttcccctcaccccacaacatgcacgttttctttgcacctccccttcaccacctgggcccaagtctcagcaccccactgccccttccgcggcaccattcacaccattgaactttctctacgccactatctccaccacccaagacattctctgtgtccctgccatgtgcatggcaccatgctaagcatagaatcgagtgtgtagaaagatggtcagccccagaccctacctctggaggctccacacccagcgttggctccaggagcccctcagttgactctggaaaaaggtggcttgccactctgggggacaggagctttagggagggtgggtgaagcaggaatgggtgtgggaattgggacctttgtctatgctgatgcggggtatccagcccccacccaccccagggtgtgtcccctgacctcattagaagcaggggtcctgggctctgagctgacttatcgcccccattgttacttggtgtttgagaagccacgtgaccctcctcatgtcactggggtggaagacccaagccctagggaaaggaaggggcccgtggttcctttttaccagcttgggctggaatttgcccaggaaggtggcagggagggaacgtcttggagaggagaggctataagtctgggaggtgcccagttaggagaaagtagctggatgaatcaggatgtcagggagaggtgggagtagagcaagggtagaggggccaacccttgggatggggtaggagacacttgccaatctgcccagaccaggataggagcatggtcaaggaagccaggcacctggcctctgaaatggtgcctcttaacaccagccacctctccatctccgtcccttccagctgtctctggaatgagctctcagggtcgagctctgtcccgggcactctgtgctccagcctgctcccgccccccttcaccatcctatccctttgtctttctctcccactctsacctccctcctcctacaccgtgcttgcctcttaatactctccattctcttcctcctccgtacttcttcctctctcatccccttctttctcttctccatcccttcgccttccctctcttttctcttctactttctcctctctagttccctctcttctctttgctttccctttcctatctctcaccctctctctgtctctatctttccctccctccctcccccccatcccagccccaacaggagccctttgtgtcccgaagctctgcgggtggcagccagaatctactcctccccgccccccaacacacgcccagcttggcaggtctagccatggttcaggcgactctcccgtcccatcaccccagcatccacagtcacagcccagccatcctcagcctccgctgtcccccaacccaccgctgggctcagtgcagctccagartggggctgaggccaccaagccctctccacccaccctaagtgagaggctttccactcccagctgggctggcaggctggtgggggtggcagtggagaatggggacaaggggattagggtgggtgggagaggtgcagctgagttggtcacaggccggaggcccagcaggaacgtgataaggattggggctgcgcctgctcctgggcccaactcagcygccccgagctccacgaggctcttattgttgcccatgtgcccctgatcatcccttactccctggccttcscgcctcccacttttagactgtgccacaggtttttccaccttttcctcttctggggcttccctctcactcctcttcagtgccccagccccaggcctgtgagaagaggaccgattattctgccacccccagagctgtgtccctgtaccttggctgtccccatcactctggccaggacagcctccacagtctgcaatgtgcattgttcccacacctcgggccagagtgggaactgtgcgttcaagagggatatccagtgtgggggctgggagaagaggagtggaggctctaagaactctccctgcgttcccactcagcccatgacctcgaatgcccccatcccctctgttgctccagatgtatggccggtacactcaggaccttggggcctttgccaaagaggaagctgctcggattcgcctgggagggcctgaaccctggaaaggtcccccttcctctcgggctgccccagagctcttggaatatggacggagccrttgcgcccgatgccgcggtgagaactggggtgggggcaggggacctggctgtgctgtgctgagggaagcagaggccattagagctgctgatgggggagaggggacagttgagggggcagtaaaaggggtaggagcactttggtgccatcctcccccttcttcccttccctgcacccagtctgttctgtccgctgccacaagttcctagtatccagggttggtgaagattggatcttcctggtcctgctggggcttctcatggcattggtcagctgggtcatggactatgccattgctgcctgtctgcaaggtgagggtgacagctggcagggggaggactgggaataaacctcctgcgtccatgccacactcgtctagacatggaggaaggcgtcttggcttcttggccactgaccactttccccagccagtctgactgcccagattcaggcatcatctcggccactcccacagggcacagcttcttgcatcccctctccaagtgatcctcttgcctagattgcgctttgtcccagtgaataccctcagggaccctttccttcacccatgccctgactctgtgtggtactccctgggacagcctgtcgtatcagcgtggtccactggccaggcaggcagtgggtgtgtgcactgggggtccagcaggtcctcttcccacagcccagcagtggatgtcccggggcttgaacaccagcatcttgctccagtacctggcctgggtcacctaccctgttgtcctcatcactttctcagccggattcacacagatcctggcccctcaggctgtcggtatgttagaaragaaggggagggcagaggcgggacccctgaaatgggtgcatcgaatgcctctcctgagactgttccctctccaggctctggcatccctgagatgaagaccatcttgcggggagtggtgctgaaagaatacctcacactcaagacctttatagctaaggtcattgggctgacctgcgccctaggcagcgggatgccgcttggcaaagaggtaactgcaggctggggaatgaaggagtccctcctggtggaagaggaggccaggccaaggtcagggcgggccccctcccgactcaccgcctgccccaccccgcagggcccttttgtgcatatcgcaagcatgtgtgctgcccttctcagcaagttcctctccctctttgggggtatctatgaggtaaggggaaccctggggcaagtagggggcagaggctgctgagcccacagctgaccccctcttgccaccactctcgccagaatgaatcccggaacacagagatgctggctgccgcctgtgccgtgggggtgggctgctgcttcgcggcacctattggaggtaggcagggctcctaggtcagtccagccccacaaccctgcccttggcctctcctccttggcccctcttatctgggtctgaggccttaggccaggcccaggcctcaagtgctggtctccctccccctcacaggcgtcctcttcagcatcgaggtcacctccaccttctttgcagtgcggaactactggcggggcttcttcgctgccaccttcagtgccttcatcttccgggtcttggcagtctggaaccgggatgaaggtgggggcacccaggggatgagggcagcccgagatggtgccaggtagggggcccacgaggctaggcctgcctccctctgctgttcttycctttagagactatyacagccctcttcaaaacccgattccggctcgacttcccctttgacctgcaggagctgccagcctttgctgtcattgggtgaggagctgagggggctgggggtatcagagaggaggggggtttctagaaggctccttttcactcaggtgcctcttccctttccagtattgctagtggcttcggtggagccctctttgtctacctgaaccggaagattgtccaggtgatgcggaagcagaaaaccatcaatcgcttcctcatgaggaagtgagtggctctcggctcctctccaggctgctttgagttgtataagggccacagtaggtcaggggacagtgatggggagagaatggcccagtcaaaacaggcacttcactgagaaatcagccagcagtgttttccaggctgactgagcatttttatattcatatgaattacctgaaaattggcatttttaagtttatagtcagcggtagaggacatttgggaatcaaagactaaggcctcctcaggtcctctgggctggcccatataggaatgctccctggagagtgtttgagcctcaggttccccccatgacccatggggatagatgagatctcttttttttttttttttttgagacggagtttcactcttgttgtccaggctggagtgcaatggtgcgatctcggctcaccgcaacctccgcctcctgggttcaagcgattctcctgcctcagcctcccaagtagctgggattacaggcatgcaccaccacgcccggctaattttgtattttttagtagagacagtttcgccacgttggtcaggctggtctcgaactcccgacctcaggtctgcccaccttggcctcccaaagtgctgggattacaggcgtgagccactgtgcccggccgagatttttttttttttaatctccagaacacagctctctcagtgtgaccctgaggattgggagtggggagggcgagacatgacttcccttgggactgacatccttcagagagagggcagccagctgaacctgctccctacgcacctctggtcaactttacaagtgaccccagcttcccccaacattgaccttcactctaagtcactgcagagagacaaagagaggcagaaacttctccaccccatcacacaatatgccctgatgggcttctgagggtggagggtggaataacaactcggagggccccaagggagggcttggaggatggactttctgctgctgctacccacctacagagtcaggggctgacagaaaggtctttgggtcagacccctgctcttagaataaccccagtccaccatcagccttggggctatcgtatcataaacagcaaaggagaccttctgtcaggactgagtgttttcatgaaagagccaaggctctgctctgacctcagccctgagatatgcgaggccacccagcccttggccacccacgactgatgtgaaacctacgactctagacgcctgctcttcccrgctctggtgaccctgctcatctccacgctgaccttcccccctggctttggacagttcatggctggacaggtaaccacaggcagaacaggagttttgtgctttcccttggaaggcattcctccaaagccaacagccccagtgtgactgtgggaccccttgttccccgtgggatcccatggcctcttcccttcatcctgtcggtttcccagcctgaggcaccctgttcactctagctctcacagaaagagacgctggtcaccctgtttgacaatcggacgtgggtccgccagggcctggtggaggagctagaaccacccagcacctcacaggcctggaacccaccacgtgccaacgtcttcctcaccctggtcatcttcattctcatgaaggtgggctcctcacgtgtacactgctaacctttacatagcttgcccttctaagcacctgccacgcagtgctcactcctcgaagcctctccacagtgccatgggaaaggcactattatcacccccgtttgaaagatgggggagtcgaaacacaagtagctggcccaaagtcacacagctagagggcagagcgatgatctgaacccaagccatctgcttccagagtccttccccttgccatcacctgggaggcctgggggtcccagggtagctaggagggttacggggtggctgggagggttacgcccacctgatcagcgaggtagacttctcctgggtggcgctgtgggctgcctggggccaggtggagcctcttcgcctttgaaccaccccctgcctgcagttctggatgtctgcactggccaccaccatcccagttccctgtggggccttcatgcctgtctttgtcattggtgagttctcagctgcctgctcacccagcctgcaccttcctcagcctctggccacccccccagccaaccctctgcccaagagcgggtttttggtccagccctagcccgaaccctgaccccacagggctgtgccctacactgaatgacccgttggcccctccctcaccctctgaccctctctcttcctagtgccccctgccctccccctccactgcctctttctcttcccacccccctccctgaaggagcagcatttgggcgtctggtgggtgaaagcatggctgcctggttcccagatggaattcatacggacagcagcacctaccggattgtgcctgggggctacgctgtggtcggtgagtgcctcaggtcccatcggccttgggagacccccccacccacgccccagccacagggtccgagactctggtgccccctgctggcagaaaccaggcttccctcagatgcacaggtccaatcccaggactgtattgggcagccctgagggacccactcaggacctgccctggttgtggagggtcttctgggacctgggcaccctgaggagactgagtgtgactgtccccaggggcagctgcgctggcaggagcggtgacacacacagtgtccacggctgtgatcgtgttcgagctcacaggccagattgcccacatcctgcctgtcatgatcgccgtcatcctggccaacgctgtcgcccagagtctgcagccctccctctatgacagcatcatccgaatcaagaaactgccctacctgcctgagctcggctggggccgccaccagtacggagggctgggtgccaagggggctgtgggtgaagggcagagggcatcctakatccccctacagccacctctagcaaggtcctggagcctacgaagctgggagatgagccaccttcgtccacactctggaggggctgtagctggcccctgctgttcagaaagaagggtgggagcaccccttggtccttagctcccgtccccatggatgggctctggagccctccttgtggccctgggatggcaatgctctgggcacctctccccatgctgaccacaaaccaagcgcctctctcggcccccaggcagtaccgggtgcgtgtggaggacatcatggtgcgggatgttccccatgtggccctcagctgcaccttccgggacctgcgtttggcactgcacaggaccaagggccgaatgctggccctagtggagtcccctggtgaggccaggaggggtcccaggtgctaggggcattgcccagggtcgaagcttcgggaaggggcagggagctcaggaccagtctccttggttccaaaggraatggaccagcacttgccaggtgggggcttccctctggtgtgtggcctgcatgcaaggccccccactctgagtgtgagagaaggacggggctggagggctccctctcagctcytgagtccttccacctgttctgtccagagtccatgattctgctgggctccatcgagcgttcacaggtggtggcattgttgggggcccagctgagcccagcccgccggcggcagcacatgcaggagcgcagagccacccagacctctccactatctgatcaggagggtccccctabccctgaggcttctgtctgcttccaggtgaggggaaaagccacaraygcttcctaaatgtcattgtgtagactgattgggagggtggtctggggccgtggcctcaccagccccttcctgcctatgcaggtgaayacagaagactcagccttcccagcagcccggggggagacccacaagcccctaaagcctgcactcaagagggggcccagtgtcaccaggaacctcggagagagtcccacaggtaagcccatgtctcctgtgtccacagagcctcagccaagctactgagatccattagagtccctgcccagccctgttgctggggtacatcccagctggaagaggctgcccacatgggccagggctggaactgggatacctctcccygtgtcttccttacctttcctggtcctctccccaaaagatgacattgccccctggggccttatgtttgggaacacagggagcgcagagtcggcaggcatcgccctccggagcctcttctgtggcagtccaccccctgaggctgcttcggaggtgagtggctggagcctgtcctcctagcttgctttttccccagctccctctccaatgctgagaccacgtcattaaccctgcagtgcctgcctctattctccctgcccttcggccctccctgctgtcagctcaggtcctgtggcgtgcyctttcccctgggctccaccacttcccctcacctcccctctccctataacctcaactcctcatctttctggtttggctctaacaaaactgaagaagttggaatcctgtgagaagcgcaagctgaagcgtgtccgaatctccctggcagtaagtatgcctgctcttctagcatctcggcggcaccgggcagggagggcagggtctaggctggataaactccagagcccctagctgccagcctccctccctctctactagagtgacgcggacctggaaggcgagatgagccctgaagaggtaaggtgccactggactctggaccctgtttcttcctggttgtgttcaatcatcatgttggctgctgtccccatgggagggaccayggggttggaaaaagggcaggccagctttcagggaggtgaggtcagctacaggcaccttctccctaaacctcatagtctcttcccctcagattctggagtgggaggagcagcaactagatgaacctgtcaacttcagtgactgcaaaattgatcctgctcccttccagctggtggagcggacctctttgcacaaggtagggccagcagcctggcccagggctggtctaggctctcaggacacagtggggatcttggtccccctacaagtttggactcaggccagtggggaaggagggaggagaagggagttggctcagtgcggagatgttttttagacataytgcttggatgatgggaggtgggagcagcctcctcctgctctgtggtggagccaggcatcgtttttcctctgctcagccttgccctcgagggaactctggaccaacgaagcaacaaagacagggattgagctgggtggaagccagaaggccaggccagggtcagagctaggcgggaggccaccacagcccagcaaggttgatacgcccatgcggaaaaaaacgggtgagaaacaggcaggataagaaaatgcaataaacaagccaacaaacatccaagtaggggtggggagactgcagagtagagataaacaaagatgagaaacacccagtggggggcttggaatgccagaccccagaaagtctgccttaatgtgggccgaaggaaaactggtacggacgcgggaagatggctcagcagaactgcaaagcagcctgcagaaatgcggcgaggaactgagcagactgcctggggtgggcgaggcagaccccagaggaggccaggagctctctgcgtccaggactcctaaggggggcagcctgcattggtaaaatggctcctgggaccagcagaagccaaggggtgttttagctaaacttttgacaggcataatgtacaagccttgaagcgttggggggtttgggggaggggataagcagcaggtagatgtacccaaaacctgcagcttgggcattcagcttacacacaagctctgcctaagagccagtatagcatggacaagcggagactgaggcaggaagcataggggacaaaagagaaacaaaaaggcaaaaataaaggaacttagaagtccttggatgagtggcaaactgcagtgcagttgcaagaaaaaaggtaataggcctgagagggcttttatctaaagcccttcttcccaaaacctctgaggcctttccacaatgatcttactcctcaaacatccatgatgatgatcatgctgacatttttcgagtgcttgctatgtgcgagacactgtgctaagctcttcaactgtttaatcatcacaagcacgcacttagatattgcgatcctccagtttttatagataagaaaactgagattcagagaggttgagcaagttgcacaaggacacacagctaataagtagcagaactggcgcagtggcttacacctgtaatcccagcactttgggaggctgcagcaggtggatcacttgaggtcagcagttcgagaccagcctggccaacatggtgaaactccatctctactaaaaatacaaaaaattagccaggcgtggtggcaggcacctgtaatcccagctacatgggaggctgaggcaggagaattgcttgaacatgggaggtggacgttgcagtgagccgagatcatgacactgcactccagcatgggtgacaaaagcgaaactccatctcaaaaaaataataataagtagcagaactgggcctggaatctaggatggtctgactcaaaagcctgtggccttaaccatattaatacacagggaaactgaggcatgcagcgaggaggtcacgtgcctgagtcagcacagcagagtcaggcccagagcccagatttcctggccctgctcccaggattctttcagaaggccatgttgtccctctccatgtcagttcactgttcccaggcccaagaagtatgggccctccaatgggttccatgatgtctaattgaattaaatgaaaaagaacaaagtagatatttgttacaaacttaaaaatcagaagagaagaagtctttgaggaaccaactaacaaaagtacaaagaactagaagtgataagaacataaaagattagaattcaaaatgtccttacaggcctgaggaatcaataggtagtcgcccaattaagttcaggaggggaacattcagataagagagagaaaacactggagactacttaggaacccgtgcaactggagatcgctgtgccggctaataagtaattcattcagaggccacccacggagaagcaatggtaaaggccagagtggcggccacagctagggccagaccaactgaacccaaatccttactctgccacatgctggcttgctgtgtaccttggtaagtttcttagcctctctgtgcttcactttcccgatctgtaaaatggggatcacacctcactgggttttctaagaattaaaggacttgaaacatgtgaagcacttacaatagggcctagcacacagtaaatactcaatatatgttaggaattactgttactactcctactacttatactgagagatgaattttaaaagatagcatatgctgggcatggtggtgggcacctgtagtccmagctactcaggaggctgaggtgggaggactgcacgagcccaggagttcaagtccaacctgggcaacatagtgagactgtcttctaacacaaaaattttatttatttatttatttttagacggagtctcactctgtcaccaggctggagtgcaatggtgcgatcttggctcactgcaacctccacctcccaggttcaagtgattctcctgcctcagccctcccgagtagccgggattacaggagcgtgccaccacgtctgactaattttttatatttttagtagagacagggttttaccatgttggccaggcatgagccactgcgcccggcccagaaaatttttttaactaaaaaaaattgtttaaaaaaaatactgtaatgagagaagagctgaagtgtggaagaaatgaatgttttcagaaaaagaagagtgattatgtgaagctgcaggctggaagctggagtacacagtagaatgtgaggctataaagacaggctggggttggcttgggaagggtctcatgggccttctagggagtctgggctgtactcaagtttgacaaagggcataggataagcagggccagactggagggaagggaggcagaaagaacccatcaggctgttgcagccccagtcttagtgaggatagtgaggctacagtcagtaatggccaggatgtttaggaagtgaattggtaaggcttggtgactgtcaggggcaagtggtttgcaaacctgaaaggcatatcgcccgccagaagctcacctgrttaggattgtggagaaaaagaaaattcaagggaactatttaataggctccttgggagaagatgagaggggttatttgaccataagaagacaaggctaagggattagtaacataggaagccttataataaaagcgtttccctctgaagtcagacaaggaaattaaagctaacttgtagcacgtaggactccagttagccagaaggaatcgctaaccacatgacaactgtgttataggtattcaagaaacacagaagaacttttttttttttttttttttgagacgacagcgtctcacyctgtcacccaggctggagtgcagtggcacgatcatggctcactatagcctctgcctcctgggctcaggtgatcctcacaactcagcgcccccaagtagctgggactgcaggcatgcaccactatgtctggctttttgtggagacagggtttcgcatattgcaggctagtctcaaactcctgggctcaagcattctacccgccttggcctcccagagtgctaggattacaggcatgagccatcgcgcccagaagagcttattctaaaattgaacttcttgcccctctaagtactgtcatgccatgggtggagaaatttaggaaagttctggaaatccctccctaaagaatttcaaatgtgtaagaacatttaaaaagtgttaaggcaatttaagtgagttctgagtaattggtacacaagaagctgttattactgctcatcttgattcaaacattaagcsaagaggcttacaagtaaactcagaacagtgagataaatgataggccaaaaattccaggaactgctgagtcaggagagcgtttttcaagacatctggccccaagaaaatctacttaaagcataaggagaactggctgacaatttctgaacccctggtgattatatgtgaaagcttaggggagggcttaaagcaagaaaaacatgggaagatgggggtgaccgttgtcctcctggactgcaagctgcatctcaacagaacttgggatgctgcttggaccctagaaaaggcagactgtatgagaggcatagcgtgcttcaggccaagactggaatgccagagcaggggagagagactccaaacctggccagccaggtaggagggcaactgagaagcagtggaacgagaggcataggattcagggcccaagtgcccttaaggtcggtgtgggctctcccttctcggtatatctgcaactaaacaggactggggttgtgcgtccctctccggtgtgatgaaaagtgactggggctgcacagccactcctgaggacccgcctggaacaagtcacttcactgttgagccccatgctgcttctcctaatgcttagttctcaggacagtactggaattaaatgataatgtaagacctagcacggagcctggccaatcactagatttcacgtgtgaacagttgttctgtcccacgtccccctttctaacatgggactaagaattaytcccccatcctatttctccgtcagtgtaagcaatataaggattttgagtatcaagttcctgaggcctggacacagaaacattctcattattattacgattgttattattttccctccagcagtcctgtctccttccctcccaatctgkggcacccctcctattccacaccaaccttgtcctgggcccctgtggcctgtcatttagagctgcccctcgtccatcaagtccaatcgcttttctccccacactgcagactcacactatcttctcactgctgggagtggaccatgcttatgtcaccagtattggcagactcattggaatcgttacyctaaaggaggtgaggtgatggtggcctccaaagctgctccacttccaaaaagtcatggaggcttatgtccagctcacctggggaggaaggcrgggaggagtctgacatctgggtccagacatctgtccctctcacctttccagctccggaaggccatcgagggctctgtcacagcacagggtgtgaaagtccggccgcccctcgccagcttccgagacagtgccaccagcagcagtgacacggagaccactgaggtgcatgcactctgggggccccactcccgtcatggcctcccccgggagggcagcccttccgacagcgacgacaaatgccaatgagcccctcgtrggtggcctaggatggtgctagccatgcccgtcagcccagaatgtgcatctttcattccttctgccttcggaaggcaggaggcagctacagctggaggctgcaccccagccccctccagacctggggtgccagcttctcccagttcatcctacctggaatctgacccactacccacctgcaacaagtcttccagaggcaggaagataggccctgccctggcaggatgggttggggtcacttgacccctgctccccctttgaggggaaaggggtggaactaagatgggtttataactggaacctccaatgaccagatgtatatagagatttacaaagatttttatattaatttaataaaacaaattcttaaatagaacaaaataaacacctaatgagccacttatatatagaatgcttgtgcccgttggctctcgttcttaccttgggccctcttacctgccaaagcctacaaggcccttaattctaaagccacccacccttcccacaaccataaaaacgtacagtccagtgaccttggaatgcaggatctgccagaggcctccactacgtgggcattaacaccctggctggggyggggccctgtactgtagccttggcctttcattcagacagaaaggctctaccttctttcctccccaagaagagacactccctcatgactgtcactcactggcacaattcctgcctctcagcaggcatcagctgacaactcccggccacccctgtggccctcttgtggccctctctagaagaacatgaagtcccagctctgtggcaaccagagccatcctttcttccacctcccgctcagagagctctgcgtgaatgggcagcccggctggctgtgaggcgccagcacactgcccgcacatcctaggaggggttgggaaagggcccaggccccattagggggccaggaaaagggtggagggtacatgctttcatcattccaaagcctcccagagaagagaagatccgactgaaaaaacagaccaaaaaccttctgtctttaggaaaaaagaggaagatttagagacgatggagaggtgaatgaagcacagcacgagcccagctgggcaggggcccttgagggacggctcaacccataggctccgggagggcaggagccagcccctccaggtgggggtgattctatcaagcactgcacatggactcggaagtgagaagaaaagcagagaagagagaggcatggggagggtggggggttgctggccccctcccaccccaccctcacacagcccagtcacaacccccttagtggttcacattatccgaggaggaaatgtgtgtgtggcattttaagaacatgaacatcactgtctgccacagctgtagccatgccccagaggccccgggcaacccccggcaagccccgggagtgggggcaggacatgcgcccccagcccagcccctgcctcctctccaaacactttcatgcaaaacacacaacggagaagcgagcgctcccaggagccctctaggctgtggagctctgctgggagccttgagcccacacttgggcacagaggctctgcccctggcagcagccgggggatgcatgccactgccaggcatgatgtgggtcactgttcctctggctctgcctcatcctcatctaaggacaccaccccagaagaggccaggtcagaggcttgccgctgccgttcccagctgcccgttagtggtgggcagagtggctggcagtccttgcagggggctggctcctcctccgcgggggaaaggcaggactctgtgaggggcgagttgtagagtgagtcctgggcctccagtgggcccaggctgcggaaggcactttcccggctggggggcagtttggcgagaagcagctcatcgcccagcagctgggaggccagccgggccggggagcccaacaacccatcctccaggctgcacagactagagcacagggtgtctggggacacggtctgtgagcagtcgctctcaggctccacggagccctggcgcacaggccgggagaaccggtggccggtgaacaggtcctggaggtgcggccccaggggcagctgcccagccatgtctgtgaggagaagagaaaagaagacagtcctgctggctccatttcaactggacaacctggaagccacattcaccccactccacccctggcatagctctaggggtggataggtgctgggtaaccttgaaccagtcacaactttttgagacctcagtgtccttaatggtgagttggagattctaacaatacaagaacaagagtctcgcacacaggtgggtgcggtggctcacgcctgtaatcccagcactttgggaggccgaggcaggtggatcacctgaggtcaggagttcgagaccagcctgaccaacatggagaaaccctgtctctactaaaaacacaaaattagccgggcgtggtggcacatccctataatcccagctactcgggaggctgaggcaggagaatcacttgaacctgggaggcggaggttgcagtgagccgagatcgtgccattgcactccagcttgggcaacaagagtgaaactccgtctcaaaaaaaaaaagtctggcacacagttaacaagcagtaaatgcagggtcaccgcctatggccatacaggttgctcatcgcacaacagggcctgtccaaggcagtgagaaatagcaaaatctaacccatactctgctcaccaagcagcatgccctggcctgccagagaaaggctgtgcctgccagagaaaggggtgcctttttctaatttgcacaaagattccacacaggctagtagcagccttggataaatgttagttattatcattaccccaggggtcaaagtaggcctggaactcaatcaaacaaaaatgcttgtggtttaaggttccatcttggcttcagacaaccaaatcagccctccagaccacagcagcagtctccaacctgctctcatgtattgcctgctttggagaacttgttaattcactggaggggtatgggatggtagaggtaatcttcaaaggcaaagaggttgtggggaatggtggcctgtgagacttgagcccagaagctacagagaaagtcagccatgtggtctagggaatgaaagatgaaaggagggccgaacacagctgcagagccctgcagggtcccctctgcaagcactggcccagagaaaggcccacgggctggaatgcaaggatgctgagttggagccagcatggccccgtgggtgttccaggcccagcatgccttcctgttgacctgggctgcagccctgcgaggtgctgggctgtgcactgcagctcatctgccctgccacagccagccagaaggctgcctcggagaggaagaggcaaaggcactgcagaccctcccagagacatggctgcacagaaggtgtccttgaggtctttcggcttttttttttttttttttttttgaggactgcaaggcacaactgtgcagacaggcagagaagcctcagcacctgtgggaaaggaacgaatccatttctgtctgctcatttcccacccatgagtgtggacagccttcctgtccctggagtgtccaggcctgcctggactgagtctgtccctctccctccccttgcaaaggctgagagtgttctggatgtggctctgaaagaatgccaaggtctatcaggtgggtccaccacagccctagcccaggatgtccctcacctgtgtccattcccccagcaaagtcctcatcataggagtcatcagtggagtcctcgccatccaccgaagaccatgctcggagcttggcttccgcgatggcaaactgctcagccactcctgtcgcagggacagaatgcataagcagagaaggtgagctaagtctagggctcagcttgaagacaggagagaggagaaacagggtatgggaagactccaacccccatgtcagacccgaggagataagaaagcagccctggccgggtgtggtggcttatgcctgtaatcccagcactttgggaggccgaggcaggtggatcactaggtcaggagttcaagaccagcctggcctagacggtgaaaccccatctctactaaaactacaaaaattagccaggcacggtggcaggcaactgtaatcccagctacttgggaggctgaggcaggagaatcgcttgaactggggtggcagaggttgcagtgagctgagattgcatcactgcactccagcctgggcgacagagtgagactccgtctcaaaaaaaaattaaataaaataaagaaagaaagcagccctgtgccaagagtgtagcttatcccctttctgccatccacctgctgcaaagcgagcctcttgttcgccctcgctgaggtctgaataggaggaaaaggctgattccagggcagcaggtgagtcactcggcttgctccagcccttccactcaatgaggtgagccactcggccctgggccatggcggtaggcttggtcacgtggtccttcaccacctgggaaatacctggagataggggagggtggagaagcctggtaaaggaccaggccagggagcacaggtgcagggaggtggaagggtggcagtagttaggatccatgtgaacctttgggtgggagaaggggctgagattcacctgagcaagggaagaaaggggagaccccagcatgtactcacaggaaacagttccaaagggatgtgcaaacgggaggagaaaggacaaagtggccagaaacatgggaggggctgcataccatgcagggaggacctggccagcgcagcgatctcctggatagttagggctcgccgggacttgggcagcatcgcgactgtgtctccaacattcaccttgggtaacaccattagaaagtcagtgcccctctgacagcaatgaccttccccctaacatgcccatacccagcaaaggcatgaggaggagacaggagctaggaaggaacaccacatatgtcccagtggctacagggaaatgtaagatgataagaagctaggacaggtgaattatgtcctcccagaaagcaatggagattcagacaggccccgagaagcaaaacttcagctaatcctccactttcccagcacccagaggagatggaggcagggcaggaaatgaagaaccacgagtgagacctctgaggagagggaagaggaggaaggaagaagagtgtggcatccaggacttctttaagattcccttcccctctgccccttgctcctcctcttggtcttcccatccacattccggcagactcggcaagatggaaaccaaacccccacaccttctccccacgtctggccctgcttcctgacctctttcctttgcatcacccaccactgtcccatctagcctggctccaaacctcagcattaccatcaattctcccctggctttgcttgcccatatctgttgataagacctaatgattccacctgcaaagtccctgctcctaccctgtcctttctactgctactgccattgccctttctcaagccctcaatgcctcctgcccaggtcggcagaagtggtgttcccccagcctcctccaatcccatgctattttctcaggccaaagtgtagtgagtgtagtgctccccatctcttctggactattctgatggctggctagctctttctcattcttccagtttgggctgaaataccacctcgtcagaggagctttcctggcccccctcttggtagtctgtcctccctctgtagtctcttaacaaatcactctccatcaacgtaccccatttgtggcccttagtcatagtgagtaataatggtctcttttgcatttcctgtttcttgttggtctccctcactggtctttggctcttggggaattcagtctgttttggtcactgtagtgcccaatgtttagcacagcacctaatacagaataatttcttaaaaatgcataggctggccaggcgtcagtggctcatgcctgtaatcccagcactttgggaggccgaggtgagcggatcatgaggtcacgagttcaagaccagcctggccaacatggtgaaaccccgtctctactaaaaatacaaaaattagctgggcatggtggcacgttcctgtaatcccagctactcaggaggctgaggcaagaaaattgcttgaaccaggacccgggaggcggaggttgcggtgagccgagatcgcaccactgcactccagcttaggctacggtgcaagactccatctcaaaaaaaaaaaaaaaaaaaaaaaaatgcataggctgggccaggcgtggtggctcacgcctgtaattccagcactttgggaggccaaggggccaaggtgggtagatcatctgaggtcaggagtttgagaccagccaggccaacatggtgaaaccccatctccactaaaaataatttaaaaaatgggcagggcatggtggcgggtgcctgttatcccagctactcaggaggctgaggcaggagaattgcttgaacccaggaggcggagattgcagtgagccaagattgtgccactgcactccagcctgggcgacagaaaaagactctgtctcaaaaacaagcaaacaaaaatgcaaaggctggatgaatgaggtaagatataatgtaaacagttttcctggagtgcagctggtcacaacacatctctaaaatcttgtctagcctacgctactgtccagtgaggttagtgcaggcatcatacccaggccctgaaggatcccactctgtgacacccttgcctccttccaagcctcctttgaatccactgctgatctcctctgcccaataaaaccccccttctcaggccgggcgcagtggctcacgcctgtaatcccagcattttgggaggccgaagcaggcggatcacctgaggtcgggagttggagaccagcctggccaacatggtgaaaccccgcctctactaaaaatacaaaatcagccgggcgtggcagcgcatgcctgtaatcccagctactctggaggctgaggcaggataatcgcttgaaccccagaggcagaggctgcggtgagccgagatcgcaccattgcattccagcctgggcaacaagagcgaaactccgtctcaaataaataaatacataaaaataaataacaaaaaacaaaaacccttctccaccaatccctgtcagcaagcagcccgcctgcctccaggaaaaggaactcagctttcctctgggccaagaatgccatccttacgtgaaaaaatgcttgccatcacttaaggcccatctcaagtgtcacctgcaaataatgctttcagccgacagcctcttcttttctctgacacaccccgcccccatcattgcccttgtctgtctcccgagggagctcaggatggcaaggcctaagtctgatgc

SEQ ID NO: 98281 - DNA, 15193 bp, Homo sapiens
  misc_feature (1)...(15193): n = A,T,C or G
actcatcacagtgcctgacacataggaatcatagtgacatagagctgacacatagtgaatgtcagctgttgtgatgaaccctaactgcccattcctgtagcagcaacacagtagaatgaaagtgctaagaatatagttttgggtccaatgaaacagctttgctgtttactatctgcacaaccttgagctagttacttaccttttgccctctctgtgtcatggtttcctcattcatacatgggaatagaaaagtacctacttcattcggctgggtgcggtggctcacgcctgtaatcccagcactttgggaggccgaggcgggcgaattgcctgaggtcaggagtttgagaccagcctggccagagtggtgaaaccccatctctattaaaaatacaaaaattagctgagcatggtggcaggtgcctataatcccagctactcgggaaactgaggcaggagaatcgcttgaacccgggaggcagaggttgcagcgagctgagattgtaccactgcactccagcctgggcgacagagcaaggctctgtctcaaaaaaaaaaacaaaacccaaaaaacagaaatactttataatttattatctatccttatatgtggtggtgtaagcccctaaaatgttctggggagtttcagggccaagtctactgtgtatgaataaaatggactttctggatctgcatctgcaatgctcgtgtccagcccctgtaagtataccaatatttgaaagtcattgtgaccagtgagtccttgattgagaaaccagaaagatttggtgtggaaatggaaatgtggctagggctttgaaggtcgtatagcaggtttaaaannnnnnnnnnnnnnnnnnnnnnnnnnnnnnnnnnnnnnnnnacccgagggggcgaatcacctgaggtctggagtttgagaccagcccggccaacaaggtgaaaccccaactctactaaaaatacaaaaattagccaggcatggtggcaggtgcctgtaatcccagctactcgggaggctgaggcaggagaattgcttgaacccgggaggcggaggttgcagtgagccaagaccgtgtcatttcaccccaacctcggcgacaagagcaaaactccggctcaaaaaaaaaaaaaaaaaaagtttgggctgagcgcggtggctcacgcctgtaatcccagcactttgggagtccgaggtgggaggatcacaagctcaggagttcgagaccagcctgaccaacatggtgaaaccctgtctttaataaaaatacaaagatttgctgggtgtggtggtgcgtgcctgtagtcccagctacttgggatgttgaggcaggctaatcgcttgaacatgggaggcagaggttgcagtgagctgagatcatgccactgtactctagcctgggccacagaacgagactctgtctcaaaaaaaaaaagaaaagtttttatttgttttaatttttactttaacaaaggaatttgtatagttttaaaagccaactagttcaacaaatatttttcggggtggcggggcattttcaagtgaaaaccgggaaacctgctcaacaaattctgaaagctgtaacttcggtgggcgccgtggcttacgactgcaatagcagcactttgtgggggctgagatgaattgcttgagcccaggattttgagaccagcctgggcaacatagggagaccccgtctacacacacacacacacacacacacacacacacacacacacacacactagatgggcgtggtggtggtggcccacttctgtagtccctgctactccagagtctgaggtgggaggatagcttgagtccaggaggtcgaggctgcagtaagccatgtttgcaccgctgctctccaccctgggcaacagagcaagaccttgtctgaaaaaaagaaaaagaatagaaaaaaaaagagctgtaactctacaaggcttttaatgaaaaataaccatcccctgctcctcttctttaacccttacatatacaacctacatatacaactacgctccagtttctaggctgcttcttctggtacttatctgtacatttcttcaagcaacactcccacctaggcctcccaaagttctgggatcacagctccactgtccccagctccaatttttagttaaatcaatacttagtgtttacatcgttacggctgtgaaaattttcttcacagctgagccatttgtgtttgtgctaagactgtgaatctgtaaaaactgcttttgttaattaacatccaggacatacggctgagaaacttcattttctaaaatcatagtcacaaactttgctatttgaaatcagtcagtgcgaatggaacatcctactcttgccagaagttctgagccacgtggattactttggcctcccaaagtgttgggattacaggcacgagccactgtgcccagcctagatagtgggtttttggacactatattctatatttatcttgactttgtaatttccaagtggtccctcagcttggacttcttgatcccttcacttaaagttatgcttacctcgaaccgatcaaaacactgcttcatttaaattttagctagcctatagtatcagccacttgggaggctgaggcaggaggatcacttgagcccagaagtttgagcttcgcctgggcaacataccgagacttcaactctaaataaataagtaaataaattttaaaatataaattttaaagtcaagcctttcccatatcctgttgtattagttcattttcacattactgataaagacatacccgaaactgcaaacaaaaagaggtttaattggacttacagttccacattgctggggaggcctcagaatcatggcgggagacaaaggcacttcttacatggcggtggcaagagaaaaatgaggaagaagcaaaagcagaaacccctgatgaactcatcagatcttgtgagacttattcactatcatgaaaatagcacgggaaagtctggcccccgtgattcaattacctccccttaggtccctcgcacgtgggaattctgggagatacacatcaacttgaaatttgggtggggacacagccaaaccatatcatctgaatgaccatatttcttcctttttaatgagttgccccacagttcttctagtgtgtgatctctctgttgtggcaagttaataaacctaactgtcaaactacagatgtggtctttataagacaggcttatcaattgtctttcctttcttatataactctttgtttcctctgaagttgataattgcctaaccttttctcttactttgttctctctctctctttctctctatacataataaattcatccccaaaactgttctaaagaattatactctttctttcaatgccttcaccacttcaggtaattcttctggtctttcttttcttttctttttttttgaaacccagactcctggagcccttcttcctctggctccaagttatattggttgttgtccttgtaaaaatatgactacctctgttctaacaataatctcaagccttcatggttagttgtcaatgcaactgcttcactgactcctgctttccccctccacctgaaaggggtcgagtctcttgacatctctgtatctccaaagtctatcatggtaatcaagaaatgttctggccgggcgctgtggctcatgcctgtaatcctagcactttggaaggctgaggtgggccagtcacttgaggtcaggagtttgagaccagcctggccaacatagtgaaatccccgttctctgctaaaaataaaaaaattagcccggcgtggtggcgcgcgcctgtaatcccagctgctcgggagacagaggttgcagtgagctgagatcgagccactgtactccagcatgggcaacagagcgagactttgtctcaaaaaaaaaaaaaaaaaaaaaaaaaaaggagttctgtcccgcctaggcactatagagagaccctgtcaagaatggaaagaaagaaatcttcgaatgaatgaactagtgaatgaaggaatggatttcagcgctggagaattgagtttaaggggaatggtattatattcccatcttgttgcaacatttaaggatgtcctcaagccccacgccagcctggagcgtagcccaaggtgggaaagcagcgccgaggcctctccagacccggcctgctccccgtttgcggagcacagcccactgtacccccgcctagattgaggcgctggccaggagtacaccaggcgccgccaggtgaactacaactcccagaaggccgcgcggaagcggaacgtgaaccagggaggacttccggacgccaacatccgggccgcgcggggaaggggagacgtggggtagaggtaagtgtaggttgaaggctgaatggggagggcgagagatggggagtgggtctcaaatatagagggggtagcaaggtggaaggggcccttccaccttttgtgggcactcaagttcggacctctgggatcggcgattcccctctggccagggctggttttaatgctctccgtgggcgggcttcggttgagtttggtccgcttttcctttctgctcctcaggggagcattgcttccttctctcgcagtgaccatgacgaaattagcgcagtggctttggggactagcgatcctgggctccacctgggtggccctgaccacgggagccttgggcctggagctgcccttgtcctgccaggaagtcctgtggccactgcccgcctacttgctggtgtccgccggctgctatgccctgggcactgtgggctatcgtgtggccacttttcatgactgcgaggacgccgcacgcgagctgcagagccagatacaggaggcccgagccgacttagcccgcagggggctgcgcttctgacagcctaaccccattcctgtgcggacagcccttcctcccatttcccattaaagagccagtttattttctaacttcgtttagtttgagtatggaaaacgggtattggggattctatgtactaacggtcgagaagtgaatgtgaaagaaccaccttcttgaggccatctcagcctttatctttgcatcttgctggtgttcccatttttgctcccaaggaggcaaagaccccttctcaatatttctcaggatggaaatgacatttcactttcctggtcctttcaaccctgtaggaagtacttctttttttttttttttgagacggagccttgctctgtcgtccaggctggagtgcagtggcgtgatctcggctcactgcaagctccgcctcccgggttcacgccattctcctgcctcagcctcctgagtagctgggactacaggcgcctgccaccacgcctggctaattttttgtatttttagtagagtcggggtttcaccgtgttggccaggatggtctgatctcctgacctcgtaatccgcccgcctcggcctcccaaagtgctgggattacaggtgtgagtcaccgcgcccggcgtactacttctttttttttttttttttgagacagggtctcactctgttgcccaggctggagtgcagtggtgcaatcatggctcactgcagcctcaccctcccaggctcaaacagttctcccacctcagcctccagagtagctgggactacaggcatatgccaccacgccaccaggctaatgtttaattttttgtagtgacagggtctcgctgtgttgctcaggctgttctcaaactcctgggctcaagtgatcctcctgcctgggcctcccaaagtgctgtgattacagacataagccaccttacccggccagaagtactttcttgaagcctaagttccattcttcataacatccaagttttgttatttttaaggccttcctgggtctttccaaccttttggttctttgagataccttttctgagcctaccctaccaacctgagaataactgtggatctatccttcaccaaaccaggcaggtttagaattatgagtagagaatgaaccatcgtgggcaggggtggggaacactttattttaaggcatattcatatcagcatataaggcatattcatatcacaatggcacgatctcagctcactgcaacctccacctcctgggttcaagcaattctcctgcctcagcctcccaagtatctgggattacaggcatgtgccatcatgcctggcyaattttgtatttttagtagagatggggtttcaccatgttagtcaggttggtcttgaactcctgacctcaggcgatccgcccaccttggcctcccaaagtgctgggattacaggcgtgagccaccgcgcccggccttttaaggcatattctaaagattgcaccccaacctccaaaattaaaaaaaaaaatctctaaaaaataaaaagtgatttcatctcctaggccccaatcaatcatctaagtaaagctttttctttggtccttttatcctcaaagtcatctcttgttcccacaacccactgcacctgggaagctggacagcaggcccagctgaaacaaggaggtctctttggttcaggttggcactaaggtgcccagtggtcagatgagcagcctcaggtttgcaggagccagtagttcctgtcttgctcctgggggtacttccagaaaagccagaagcggataaagctggtgacgattcctggaaagttggacacctgaaatcacaagaactgctatgaggagaggagccagttttccatcttgcacccctgtcaccccatcccagttgtgcttaccatgatatagggatctctgagtcgaaacccatagaggcaccaggaggcagaggtgagaagggtagcaatggtgagtgggtaggagagacattgggttgatttagtttgaatcaccttagcctgtgggaaagaatggaagactctcttggcccaagcacatcgtaaagcttcacttgcctaagaatttcctcaagaaaaaggtcagacaccctccctgatctgtcacccaacctttcctgcctcccactcgcccacttctactgccttgtcttcttccagggtttggatctccccttcctcgggactgtaagccatagtatttggctatgagagcctgactcttatctctcctacctccttggacacccccactcaccaagtcagccagtggtgagaggtacatgctgatggtgaagacactgcagaagaggcccaactgctgaagccgggcctcagggttgggtaccaggagccaaaagtagccataacccaggagaaggacccctagcagggttgcagtctgtaggagcacaacacgctgcaggggagagagtacccttacttccagatgtgcactctgacttccctgctagagttaattmatcctgccttctccagtgctccaatggggaagccaagctgtctaggcctccagcactgcactgtcacagcttctttcccaccaccaacttgataggaaagtcttatccacccacaacactggagacttctgggggagataaatatgtgtttttttctgtgtgcttggcacacacagtaggagcttcataaatgcttgtgtgatttagcagggacgcagagctaatcatctcattctcacccacaggccctggctctgaaagaaatatcagagacaaaagccctttccccttagcttgttggctgaagcccagggcaggcagcataggcatctcaggctaggcagagctaccagccttgcctaaatgggggcaatgtgttcatctcagaaggctggcttcatagaggaaggggacctgcaaggctggagaggccttcctggaaaaggtggcagtgccagctgttacagtcttctaggaaatagtgtttgccctgccagcaaggcagggcgtgcagcagataggtgggtccaagggagggcctctaccttccgagggcagtaatgcagatatgccaagatatacagggtctgaagcgcagcacccactgtgttgacgacgatgaggatcccgtctcccttcaaagccccataactcagccagcccaggttgctgcagggtggaggggatggacatggctcaaagggttcagtgtgagaggaggacccaaagggtctttcactctttttttttttttgagacgtagtctcgctctgtcgcccaggctggagtgcggtggcacgatctcggctcactgcaagctccgcctcctgggttcacgccattctcctgcctcagcctcccgagtagctgggactacaggcgcccggcaccacgcccggctaattttttgtatttttagtagagacggggtttcaccgtgttagccaggatggtctggatctcctgacctcgtgatccgcccgtctcggcctcccaaagtgcagggattacaggcgtgagccaccgcgcccggccaaacctctttcactnnnnnnnnnnnnnnnnnnnnnnnnnnnnnnnnnnnnnnnnnnnnnnnnnnnnnnnnnnnnnnnnnnnnnnnnnnnnnnnnnnnnnnnnnnnnnnnnnnnnnnnnnnnnnnnnnnnnnnnnnnnnnnnnnnnnnnnnnnnnnnnnnnnnnnnnnnnnnnnnnnnnnnnnnnnnnnnnnnnnnnnnnnnnnnnnnnnnnnnnnnnnnnnnnnnnnnnnnnnnnnnnnnnnnnnnnnnnnnnnnnnnnnnnnnngaactggacgttgtccacactccgggtcattcgcatgtgcctgaggtccgagctgtaatggggccccgaagggaggggtgggggtgggaagggagaagcagagtgctagagggggatgcccaatgcctgtcatcctttccggaccaccgcagaccccgcccccctctcccccccgccagctatcctgccttctccttcaggcctagtgaccagcctcgcccttgtaccccggtcccctcgacccgatcccactttgatcccggttccggacgagccaggtgctgtggccacgtctctgtcccctctctctcctttcctgactgcctagtcctccccaacccagcccggccgcactctcacaggccggcggagaacatgccaagggtgaagaccacgcatgctccgtaaatgagcgagtccagaaagccgcccgcctccattacgactagagtcggatcccgcgcccagcgcccgccgckagcctgcggttgcygggacctactgcagcccagacctgcggctctggagccccgccccgcgcactcggctccgcccccgcacgctcgggccgtccctccggaaactgcgccgaagccccaccctccctccgacgccgaaccggaactcgcgcccctctcctccgagcgccttcccagtaccttggtccagacctcttccatgtcccggtcagtccccttcctagggctccgcgggtgtgtccccgatacctgccgctgctcacactctgcctaccccttggatcatctagacgcccccagtctcaacgctcgtgttcccacaggcctgtgcgccttcggcggtggacctccaaacaaaagcttgctagtttaacaagacttcagcacgctttccatccagagctccacatcagaacctcagttgcccagggtttgggaagtttttttctggagtgtgctgccgaagctttttctcaaaataacacattaccaggaatcaccaagccttcctcttttgccctccctctcgggtcaactttacatgacgtggccaatccactgacgcctctatcactgacccccggtccaacccacttgttactgggaactttccctcccagcctcccacacgtctctgctagtgtggctgtggggcggggccgcatgcctcagctggcgttcccagcttccctgactcaccgaaacagcgtgagtacctgaatggtagtatgccaaagccctgcggtgacggagtgggagtggggtagaggtcggataggaagaacttccagagtggagtgcagctcagaacccgagagacagctgtcaggagcactccggtcctggacagccctcagaggaggaaacatcccacccttttggcctcgtgaggggcacacattctttggagagaaagaaattcaaacccagttgctactgttgtagcacagagagcctcgcacttagcagggactcaatggtcatatgttttaatatggagtggcagaaaagcatgtccgaaaaaacacattgctttattttgagacaaagaacattgtataaaaaaactccagttgtagaaatcaggacagacacacagcaacttatatacagatactatacacgtgggccctgccctttaggctacactctaggcagaatgtacacatgggcactgcccttacagctacactctaagaacaggttggcacagcccccctgctggcacagctctggggagtgctgccccaggatgggagagaatgcagtacctggctacaaacttctctgtggcagctccacagatgaggtcttgctgggagatgctgggtcagcccaagcatgctgcctctcctgtacctggcttccaagcaagaaactgtttcttgcttttccttcagtcagttcatctgggcatcctggctctctcctggagggggcatctttgacaagctttgcccatccacgtggccccttccagctcagctcccactgtgccttaagggaccatgcctgcacagcttgtttctttggcttaaaggcaggaatggtgggaaaggactgtctccacttctttctccatccctccgaggtgaaggtggggatggcactgtcgggctggttggcctccttccggttgaaaaccttaatactgacccgttttgaggctgctaggtgatagcttatgcctgtggtgggagtggttcccagggctgggggctctgaaagtggccccaagacaggtttggagtgcctgtccctctcttcagcctgtccctctttaaggccaggtgtggcatacaccttcacggggtttgcagcagcagaagtggaaggagcagcacagtccaggcaagtgggaagaggcgtggggcagcactgtgaccgatgctatgtagaacccgcacctctgggtcatctgcaaggtgagagggcaaaggccaccagtgtgagtggctccactatttgtactggctctcagcccaacaggattccctcagcctcagcctggtaaaggagccacctcctgtacccaacctcttcaagcagaccccttcctgtgccccaggcccagtttgctccagctacccacctgctgcaagtctcttctcctgtggattgacatgggcctgaggactgtgagctgaaagacaagagtggtagtagatcaggtactgtatcaaagaggcagagggctgtaagtatgagtgggctgggctgcaagacttctataccatcctagatcactagaccgcacccagcatagagatggaggaaggaggcccacagggctccgacactcactgattttgccactgacagtcaccttcaacctcaagcagcggtcttcatgctggtggatgggtttggctgcaagataagcccacaggggttaaataagaaacctttgctggaagaaaatgtaagtccaaatgcccctcgccctgctttctcagctccctactcaatttcattcttctcttccctctaaccttgattcctaccctccttagtttttgctaacttcctgcccaatgttcagcccagcctctcattctttggaaataaccctcagcatagacactgcccctccccacatttcatccttcattcctccgagtctgaatatgttcctcttgcctgggccacttaatactactcctaggccaggcgcggtggctcacacatgtaatcccagcactttgagaggccgaggtgggcggatcacgaggtcaggagttcgagaccagcctggccaatatggtgaaaccccgtctctactaaaaatacaaaaattagccgggcatggtggcacatgcctgtagtcccagctactcgggaggctgaggcagaagaatcaattgaacccgggaggtggaggttgcagcannnnnnnnnnnnnnnnnnnnnnnnnnnnnnnnnnnnnnnnnnnnnnnnnnnnnnnnnnnnnnnnnnnnnnnnnnnnnnnnnnnnnnnnnnnnnnnnnnnnnnnnnnnnnnnnnnnnnnnnnnnnnnnnnnnnnnnnnnnnnnnnnnnnnnnnnnnnnnnnnnnnnnnnnnnnnnnnnnnnnnnnnnnnnnnnnnnnnnnnnnnnnnnnnnnnnnnnnnnnnnnnnnnnnnnnnnnnnnnnnnnnnnnnnnnnnnnnnnnnnnnnnnnnnnnnnnnnnnnnnnnnnnnnnnnnnnnnnnnnnnnnnnnnnnnnnnnnnnnnnnnnnnnnnnnnnnnnnnnnnnnnnnnnnnnnnnnnnnnnnnnnnnnnnnnnnnnnnnnnnnnnnnnnnnnnnnnnnnnnnnnnnnnnnnnnnnnnnnnnnnnnnnnnnnnnnnnngtcttgaactcctgaccctagtgatccacccacctcggcctcccaaagtgctggatgatctcataacttttaaaatccatcaggccatgcgcggtggttcatgcctataatcccagcactttgggaggctgaggcgggcagatcacttgaggtcaggagttcgagaccagtctgaccaacatggtgaaaccccatctctactaaaaatacaaaattagctgggcgtggtggcaggtgcctgtaatcccagctatttgggaggttgaggcaggagaattgcttgaatccgagaggtagaggttgcagtgagcagagatcacaccactgcactccagcctgggcgacaagagtgaaactccatctcaagagtaataataataataaaataaaataaaataaaacccatcagtggcgagagccctcaggataaagtccaaactccttatcaccttttagttcccccatggtctgttctgtccacctctccaggctcacatctcctcacttcctgtgtccctccaactccagccaggctgagccacaggaagttccctgaagatgtcatgctccctttgtacgtgtgccttcatgcctggccagctcctctgcttgtcctgagctctgggaccatcttccccactgagccttctctgagccccatagcctggcaggtgcccaggtcattttcccaaggcccctgtgttcatgtctactgtagcacactgttctaagggtctcttaacctatgtgtgtttcttcccagcttccttgaggacaggggctctgtagtgttttatttatctttgtgctcatagcgctaaacagagtgcccagcacatagtagaagctcactcacattgggatgtagatgaatgaaaatagaattcaagatcggaaggggccctctgctgctggactctacaccaagcatgtacccaagcatgtatgtaatggcaaaaaagaaacacagacactgtcccctcacaggcactcacagatgtagtagtagctgtgtccttctttgaactccttgcccagggtgaaaggtgtgaagcgctggaacttctcagacagcttctccgggccatgcttggcactgggccggttgcactgccagcggacttggtccttggactggggctggcacagctggtactcctcatgctccaccaggtacagtatgtactgctccatggcagcgtctgccacagagtgatcttcatagtgcggacagatgatgtccacgtagtcattcagctgcacatgtatggtgtagtcctcattccggaacctggggacacacacagggggaagaagcaggtggtcattcagaagccaggccagatccttgggcctctgaatgtttacatgacctctcacatttcacactggaccccaagagatttttccgaagtttcaactcccaatatgtactgatcttgatgtcttacatttctctctgccatctctaaacattcccctgcaccatcactgtctcctgttggtccttcaaatagcattcactcagtatctttcgggtaccaaagcattttccataacccccctgatacttacctgatatttagatgggcttctacctatttctgtagctcacttatcattctcttctacccataaatatttccccaaatctgttctaccagttgctccttttaaatgctgttaggcctcaatctgagacccccacaggtccattctgtaatcagaatccaggaaaccctttctctttaccatgctagcctggagcctccaacacatctgtgtcttcactttccttactcctctcacatttccccggacccactgagtagatctcacatttcccagcttcacttttcctcaaaagtgaagctagtatacccgggcccacagataatgccccagtcctttaagttaaatcactctcatcaattcattcagccccctcaaatcttccctttctagctactcaaagttatacactggtctccttttccccttctcagagcaccccaaaacaaccctgtccttttatctctaaaagccacacttccacctccccctagatgaaatgctggagctctgagcttgagcttgagacagcctctcccctctcccctctctcccctctctcctcctctnnnnnnnnnnnnnnnnnnnnnnnnnnnnnnnnnnnnnnnnnnnnnnnnnnnnnnnnncccctctctcctcctctccccctctcccctcctctcccctcctcccaaggtggagccagcacccctcccctagttcattccccctggccccaccggctccagcctgactgcccaccagcccctccccaccagctccagacacctggctccagcctgggtggggtcccagtagggggaaaagtgcttcccccgaccccgcaagctggtcagtttctctaattcccccaggcactgccagctagagacccagcagaattagcgctaagttgcttcgaactgaaagccctggccacggctgggagggcgaggaaggagtcaggcagagaggactcggaggtgggcacccactgcccaatcagcatgacccctgagaggccaggctttgcagcagcgtgccagcgcccaaactgggcttaccaggcccctcccccaccctggggaaaagagaggagcagagagaggcttttaaaattcctctctggagagataaacatagaagccatttcagaacaggtatttcagctctgggcct

SEQ ID NO: 98282 - DNA, 201 bp, Homo sapiens; identical to SEQ ID NO: 14997

SEQ ID NO: 98283 - DNA, 201 bp, Homo sapiens; identical to SEQ ID NO: 15000

SEQ ID NO: 98284 - DNA, 201 bp, Homo sapiens
ttttagagtgttgtgtagtaaattcagatctttatattttgattttccaacctaaggcatttctatattttgtaccattttaactacttttattaaaatawatacctttttctgtgttagtgaattggttcaatgcattttagtgtctgttgagatctctctgtagtggcgaaccttttaatctaatttaagataaggtat

SEQ ID NO: 98285 - DNA, 201 bp, Homo sapiens
acgctatataatttagaatgtaaagaggttttagatgtctagaccaactcccttttttacagatgggaaaactaagagctagtgctgttaaatgacttgcytacataactgtttatctttgttactaagaagttgtttgtaagttgaatttcattttacatgtattaaatgttttagagtgttgtgtagtaaattcagatc

SEQ ID NO: 98286 - DNA, 201 bp, Homo sapiens
tcagacttgttttccatcggtgacatgtggcatggattttacctcctaccgttagctggccaccctctgcattcaggcttgtgaagcattctggaggcccmcccgccccatcctccactcccggctcttcctttggcatccccactggccatatttctttcccagtctgttctgacagcctcctaactggccacttgtccc

SEQ ID NO: 98287 - DNA, 201 bp, Homo sapiens; identical to SEQ ID NO: 15003

SEQ ID NO: 98288 - DNA, 201 bp, Homo sapiens
tatccaaggaagtgttagctgaatcttttaagtatggagagaggaggtatttgaaatccgcttaatcctactaaatatttgaagtttaaaaagaacttaaygctatataatttagaatgtaaagaggttttagatgtctagaccaactcccttttttacagatgggaaaactaagagctagtgctgttaaatgacttgcct

SEQ ID NO: 98289 - DNA, 201 bp, Homo sapiens
cagagatttggagtactagaaaatgatgcctccatggaatttacagtggctacagtagtatctcaattctgcatttttttcccctttattgcagtatgctrgaaaaaattttggatttttctttgcacagggagaaggccttaaatctaaggatttcactccagaaattttattttgtgttctagttacataactcccgtc

SEQ ID NO: 98290 - DNA, 201 bp, Homo sapiens
ggatagaatttttacattcaaagaggaagcagttatttttactttttatatgtatggtgttagtgatttctagggtaggatgtggcaactttttaactgartggattgtggtaaatgtttcgcacagatcaattctgttaaaagttgatgtgcacatttggaaggctatgtgatatttcactgatagctgaggtatgcctt

SEQ ID NO: 98291 - DNA, 201 bp, Homo sapiens
aaaaaaatgcctttaggctcatttcgtgatggcagataaaagcctctggaattctgataagtttctgaagccatgttatagaactggttattgtaattgcrtgaacttcatccaaaactggtgaaagcgtcaggttggggatagtctggtggttgttactttctgtccaacctaatactgaggctctgagaaattctgtgg

SEQ ID NO: 98292 - DNA, 201 bp, Homo sapiens
ggccactaattttgacaatttgtttccttgcagctgagagaaaaagggaaatatgtttagcaatatggattccattttccgatgaataaagacatacataytcatctgcaaagataaattttgtttgaaactaaacttaaattgttcttaaatttcaaggataatttttttttttttttttgagatgaagtcttggtctgt

SEQ ID NO: 98293 - DNA, 201 bp, Homo sapiens; identical to SEQ ID NO: 15004

SEQ ID NO: 98294 - DNA, 201 bp, Homo sapiens
agtttatttgaaagacagatactagtaaaaagtgctcccccacccccagagaaatactacaaagaaggttctatgagagcatataatacattcatccttarcatataatatatgctgtcatatgatatataatgagacacatactacataatataccttgtataatatataagatgctttatgtgccctggtttctttgta

SEQ ID NO: 98295 - DNA, 201 bp, Homo sapiens
tggaaacaatcatcacatggttttaacagacaagtttattttcagtttgtttgggtaagttatcaaagaaagaacatacttttatgaaattctacttattgaggagataatttgaagtagtttcttaatctttatgtctcctacatatgaggcatattaggaatatgtacatatttcatttttaaagtaatcaaattagaa

SEQ ID NO: 98296 - DNA, 201 bp, Homo sapiens
ggaaacaatcatcacatggttttaacagacaagtttattttcagtttgtttgggtaagttatcaaagaaagaacatacttttatgaaattctacttattgaggagataatttgaagtagtttcttaatctttatgtctcctacatatgaggcatattaggaatatgtacatatttcatttttaaagtaatcaaattagaag

SEQ ID NO: 98297 - DNA, 201 bp, Homo sapiens
gaaacaatcatcacatggttttaacagacaagtttattttcagtttgtttgggtaagttatcaaagaaagaacatacttttatgaaattctacttattgaggagataatttgaagtagtttcttaatctttatgtctcctacatatgaggcatattaggaatatgtacatatttcatttttaaagtaatcaaattagaagg

SEQ ID NO: 98298 - DNA, 201 bp, Homo sapiens
agatatcaaagacttgctgagcaaaagccaggtacaaaagagtatctaatgcatgcttccatttacaaggaaattctagatcaggcaaaactaatctatartaacagaaagcagaccaacatttgcccagggctggcagtgagatagggattgactggactgagtgtgagggaaggtttggggatgatagaagtgtcctta

SEQ ID NO: 98299 - DNA, 201 bp, Homo sapiens
tctgattggttgcagaaggcaactaatcagaggctagggtgaagttacaaagttatacttctatgcgaatgaagactcggcctcccaatcagtctgatttrttgcagacagccaatttcccatctgccatgcaggaaaggtcaaaaggagtagcctctggtccttttgttacttaggcgtggaaagttagggttttccttt

SEQ ID NO: 98300 - DNA, 201 bp, Homo sapiens
taccttgtaattgaaacataggacctaggacatcttacatgatgaattattctctattctggcctatacacactataattctttgttttcaatctcaaacrtagttgtctctccccacacccctggaagccagtggcctctagagaaggttgttgcacaatgttttgtggcaacatagtttactgtcacttcatttactta

SEQ ID NO: 98301 - DNA, 201 bp, Homo sapiens
aactaatctatagtaacagaaagcagaccaacatttgcccagggctggcagtgagatagggattgactggactgagtgtgagggaaggtttggggatgatrgaagtgtccttaatcttggttttgacagtgctcacacaggtgtatacatttgtcaaaaactcatcaaactcttacaatgggtgcatttaattctatataa

SEQ ID NO: 98302 - DNA, 201 bp, Homo sapiens
ttaagcactttttaaatttatagatttaacatgcattgtctaatttgaaatttacaacaagtctgtgaagaagtatggacagttatcattcttattctcawggaagaagaagttaaaatgcttaaatagttgcctgaggcatatggctgtgtaaagtgtccaatggcagagttagggctagaactcacatcttttagctcc

SEQ ID NO: 98303 - DNA, 201 bp, Homo sapiens
taaaaacaagcagtggagaaggtggtgtcaggttcttggcaagttgataacaaatggccactaattttgacaatttgtttccttgcagctgagagaaaaagggaaatatgtttagcaatatggattccattttccgatgaataaagacatacatattcatctgcaaagataaattttgtttgaaactaaacttaaattgtt

SEQ ID NO: 98304 - DNA, 201 bp, Homo sapiens
gtgtttttttgttgttgctgtttaaaattgtagtgggccgctgggcgtggtggctcacgcctgtaatcccagcactttgggaggccgaggcggggggatcmccttaagtcaggagtttgagaccggcctggccaacatggtgaaaccccgtctctactagaaatacaataattagctgggcgtggcagcggtcacctataa

SEQ ID NO: 98305 - DNA, 201 bp, Homo sapiens
atggattccattttccgatgaataaagacatacatattcatctgcaaagataaattttgtttgaaactaaacttaaattgttcttaaatttcaaggataatttttttttttttttttgagatgaagtcttggtctgtcacccaggctagggtgcagtggctccatcttggctcactgcaacctttgcctccagggttcaag

SEQ ID NO: 98306 - DNA, 201 bp, Homo sapiens
agattgctttgtatttagtaatttatatatttttggatctttccaatgagattttaagcaatgtgtgaaggtagtgattttgtcttgtatgattttgaatyccacccagggcctagaggcagacatggaataaggaagagaacgctggactccaaagtcaggacaacatgtttctagtcacagctctgccgttaactggtc

SEQ ID NO: 98307 - DNA, 201 bp, Homo sapiens
ctaaagtaatggccagaaccacagttacttttgcaccaacctaatagttttggcattatggcttcctctatagcatagctccttgtaaatagtagatgctyaataaacagttaatgaattaataatgtaggacttagtttttcatcatgactattgcttacgttctcttgcctgtcaggtccctttcttcctaagggaaag

SEQ ID NO: 98308 - DNA, 201 bp, Homo sapiens
gagctgggcatggtggctcatgcctgtaatcccagcacattgggaggctgtggcaggaggatctcttgagtgcaggagttcaagacaagcctggacaacayagggagaccctgtctctaaaaaacccaaacaaaaataaagaaaaagaaaaaagttacctggaagtagtggcatatgcctgtagtctcagctagtcaggag

SEQ ID NO: 98309 - DNA, 201 bp, Homo sapiens
acaaaggcttacttaggaacctgcaactctaccaatttttaatttttactgtaaaataagggttttctggaagactaaaaaacacttttaaaaaacatgattttttttgcgtttatctctaaatcagacgttttgattggttccatcattgttgtatttgaatttgaattttatttattaattcaacaggcatttattaag

SEQ ID NO: 98310 - DNA, 201 bp, Homo sapiens
ttcagagtatcattgtgtgaagacttccttgctgtgctctgcatttttatctggttcagagatttggagtactagaaaatgatgcctccatggaatttacrgtggctacagtagtatctcaattctgcatttttttcccctttattgcagtatgctagaaaaaattttggatttttctttgcacagggagaaggccttaaa

SEQ ID NO: 98311 - DNA, 201 bp, Homo sapiens
aatgaaacctttgggtacttgtaggaagacctggactttgtgtgtgtctgtgtagcactattaatggtttcacttttgacttacactgagtcttgctatcrgggaatgtttgggggatccaaactcaggtgggagatttgggtctttttcagagtatcattgtgtgaagacttccttgctgtgctctgcatttttatctgg

SEQ ID NO: 98312 - DNA, 201 bp, Homo sapiens
aagttaattgccaaacttggaactgaagagttcatagattccttacattggacctctttattataacacagtccagcaataggaaattgatttggagaaaycaaagggccaatcatgagacagagattatcagtatcatcatacagcttataaaatgcatattagtcttgttctttagcaccaggtttagaaaaagagatt

SEQ ID NO: 98313 - DNA, 201 bp, Homo sapiens
tgaaaatgtttgatgtgttacattcacaaatatgattttcagaaattaaaactcttagtaatatatattcttaaatatcatagtgaagtttttgttagtamatttatattatgctgattcttacattgtaaatgtgttaccatggcacctacttaatcacacttggcaaatctaacccagttatttaatccggttaatcta

SEQ ID NO: 98314 - DNA, 201 bp, Homo sapiens
tgatgtaagtacttattagcccagtagagtaagaattgaagtgaatttcagaaaaaaaatgattgaaagaagatagacagaaaagggagggtaagtatgawacttaatcattttttattactttgaggttctcaatttgttatgtaaacatagtaatttacattgtttaccctgttttatactaattatatctgtgttttg

SEQ ID NO: 98315 - DNA, 201 bp, Homo sapiens
ttcctgacttaaaggtgaagctgcactgtgcaaaattatatatgagttcatcatccaggggagggccagttctctcttttagtggaaatgagatacccagkttccttccaaagaaaacctcctctccagccattggcatgatttaaaatgtgtcttctttgaaattttagaagtaaactaccaaattgaaataatgtctct

SEQ ID NO: 98316 - DNA, 201 bp, Homo sapiens
taggctgttgatactgacagatctttagggcattagagccgtagaggttgactctgtgtctaggaggcaggtagaggaggagagtgaggacgtggtgcacmcagaatgtcctccagagatggacatacgccaacccagatgtccagggggatggtctgtaggctcattaagtaagctcagatttactctgatagaaagact

SEQ ID NO: 98317 - DNA, 201 bp, Homo sapiens
gttgtgtcttgatattggtggctcacttaggctgttgatactgacagatctttagggcattagagccgtagaggttgactctgtgtctaggaggcaggtakaggaggagagtgaggacgtggtgcacacagaatgtcctccagagatggacatacgccaacccagatgtccagggggatggtctgtaggctcattaagtaa

SEQ ID NO: 98318 - DNA, 201 bp, Homo sapiens
tggctcactgcagtctctgcctcctgggttcaggcagttctcctgcctcagcctcctgagtagctgggattatgcctggctaatttttgtatttttagtaragctgcggtttcaccatgttggccaggctggtcttgaactcctgacctcaggtgatccgcccacctcggcctcccaaagtgctaagattacaggcgtgag

SEQ ID NO: 98319 - DNA, 201 bp, Homo sapiens
gtgatacgtttttataacaggaaataatgagctgggcatggtggctcatgcctgtaatcccagcacattgggaggctgtggcaggaggatctcttgagtgyaggagttcaagacaagcctggacaacacagggagaccctgtctctaaaaaacccaaacaaaaataaagaaaaagaaaaaagttacctggaagtagtggca

SEQ ID NO: 98320 - DNA, 201 bp, Homo sapiens
gctcatcatgaatgttttttttttcatttggaggaatatctttccttcataccagctcttcacatggtaaactgaagactacagttgtgtcttgatattgrtggctcacttaggctgttgatactgacagatctttagggcattagagccgtagaggttgactctgtgtctaggaggcaggtagaggaggagagtgaggac

SEQ ID NO: 98321 - DNA, 201 bp, Homo sapiens
gggaaagcaagtggcttttatttgtttttcataataaggtggcatagtaggatttagttataagataagatggaggttttatcttggcttttttcaccatyaggattttgagtaagccataggaatttgctgtgtcccagatctctgcacaatagctaggaacctgcttaataggtaacctgttcattgacacagggccat

SEQ ID NO: 98322 - DNA, 201 bp, Homo sapiens
agactacagttgtgtcttgatattggtggctcacttaggctgttgatactgacagatctttagggcattagagccgtagaggttgactctgtgtctaggasgcaggtagaggaggagagtgaggacgtggtgcacacagaatgtcctccagagatggacatacgccaacccagatgtccagggggatggtctgtaggctca

SEQ ID NO: 98323 - DNA, 201 bp, Homo sapiens
gcctgcagtgagcctcattggttgcagaaagcagccaaccagaggctgaagtgaagttacaaaggtcacactcctgtgcaaatatctgattggttgcagarggcaactaatcagaggctagggtgaagttacaaagttatacttctatgcgaatgaagactcggcctcccaatcagtctgatttgttgcagacagccaatt

SEQ ID NO: 98324 - DNA, 201 bp, Homo sapiens
tgagcagtggctcaagggcctggatacagaatcttcttgggtccaaataactcctacaagtttcccattggccacttcatgctcacctcatgtaaatgacrtggtagcctgcagtgagcctcattggttgcagaaagcagccaaccagaggctgaagtgaagttacaaaggtcacactcctgtgcaaatatctgattggtt

SEQ ID NO: 98325 - DNA, 201 bp, Homo sapiens
ttttctgttaaatgttaaaacatggggctgagagaggctgtgaggttgtggctgaatccctgcatagaaacaatcagaacaattagaaaaaccgaacactygtgaataatacatacaacaaaaccagatgagacttcagtttttgtctgcgatggagtaactggtaccatatttgctttcccaccataaacaattacaaat

SEQ ID NO: 98326 - DNA, 201 bp, Homo sapiens
tctatgcatcaaagatttgaggagatttctctaggttgactatggattagaattaaccaccaaatttactagccatgtaggatttgctaagccaatgtgasaaatttatttggtgacttctgtttataaatgcattgattcaattaaattctttctccaagataaaagttatgctttttttttctttttttaaatttccta

SEQ ID NO: 98327 - DNA, 201 bp, Homo sapiens
caaggcaagaggatcgcttgagcccagatgttcaaagctgcaatgcactgtgattgcaccactgcattccaacatgggcagtagagtgagactctctcttaaaaaaaaaaaaaaatgcgcgcacacacacacacacacacacacacacacacacattttttttttaaggaaaaaaaaccattacaggaatttcttaatttg

SEQ ID NO: 98328 - DNA, 201 bp, Homo sapiens
gaaaccacgatcgcttagatctggattacaaaaagaggtttaaagatgctattagattttctaataactgaaaatgttaaagttcgagacagtttgtgctaaaaaagctagattcgctaagtgcgagagtattaactggaagcaaccggcgataggtggtgatgtgatccaggtgttgtgaagaacagagacaggatgaca

SEQ ID NO: 98329 - DNA, 201 bp, Homo sapiens; identical to SEQ ID NO: 15005

SEQ ID NO: 98330 - DNA, 201 bp, Homo sapiens
ttttttcccccaaatttagattcattgttcgtgacttccagtataatgaagaggagatgaaagcagataaagaagaaatgaacaggctttctactgataaraaaaaacaatttgtatgtgtttttaatatttagtattatcagtactaagcagaagaaaaagtggtattgctttcctttgatttaaaagaaagtaaaaatc

SEQ ID NO: 98331 - DNA, 201 bp, Homo sapiens
cttttatatggtagatcctctataaacagtagttagaaaaattaacaagtatataggatggcatctatgttaagttcactttcaatggtattgtagtgagwaggtagcattgattacctactcataggtactttaagtaggtactttaattaaattttaggactactgtaattatgaaagtccattattaactataatact

SEQ ID NO: 98332 - DNA, 201 bp, Homo sapiens
gaatcatcttgttttttttttttaaaaaagcatgccacctaaataacaatatattttccttttaggttggcacgttggatgtcttggttggcttgtcagaygaactggctaaactggatgcatttgtagaagggtaatgtacttatatgcatggagtagagcaaaatgggagacactattatcaggcttcatggacactgg

SEQ ID NO: 98333 - DNA, 201 bp, Homo sapiens
agtagaggcagatttaggaaaattttatctatttttcttctttttctttttcaaagggagtaactcagattgataatgacctgaaatctcgagcatctgcmtacaataacctgaaaggaaatcttcagaatttggaacgaaagaatgcgtaagcagatcaagtatatttgagtactaagaactggggaagcatactagcat

SEQ ID NO: 98334 - DNA, 201 bp, Homo sapiens
ggatcacagtgtcaaatttctgcaaataagtcagctggaattttgatgaggatagtgttgaatctatgtatcagttggggagtagtatcatcctaatattmttgtctttatccatgaacatcggatgttactccatttatttgaagatggttatgcttttgtcttcaaaattcagttggaagagtttttctaaattgcagt

SEQ ID NO: 98335 - DNA, 201 bp, Homo sapiens
atttccatggtttaagaagtaatataattaaaatacatgtggactaaaacattatttttagttgaaaagatttatgtggaaattatatttaaaatgaagtyggctgttttttaaatgacctcctaaagtcgtgcttttaaaataatagaatattcttacactagaaactagtgggtttttttgtagaagttaaagtttagc

SEQ ID NO: 98336 - DNA, 201 bp, Homo sapiens
ggggaggacagacatccaaactatatcactatccaaagtaaaacacagtgagaaaaacaactgagaaaaatgaatgaaagctcagtgacctgtggagcagyatcaagtggtttaacatacatgtgatcttgtttcaaaagaaggaagtgaaggcaaaaaaaattgaggaaaaataatggctgaaaacatttcaaatttgat

SEQ ID NO: 98337 - DNA, 201 bp, Homo sapiens
agtctcttggttccttgcttatacatttttaattaagaaaaaaatgggccgggcatggtggctcacgcctgtaatcccagcactttgggaggccaaggtgrgcggatcatgaggtcaggaaattgagaccatcctggctaacacgatgaaaccccgtctctactaaaaatacaaaaaattatccaggtgtggtggcgggcg

SEQ ID NO: 98338 - DNA, 201 bp, Homo sapiens; identical to SEQ ID NO: 14999

SEQ ID NO: 98339 - DNA, 201 bp, Homo sapiens
tgtgattatttccacaactcacgagataataccattggccaactggaatgccaaagtaaacctttgccaaaggtctccatgtagtttacccgtccctaagyagcaagtcttcttttgaacttggttctgcttaggagtactacagttttgactgagtacctcctacttaaaattttgctcttgtacatatttaaatctgtc

SEQ ID NO: 98340 - DNA, 201 bp, Homo sapiens
tatgttggttctcatgaaggcagattaaaatggaaataatgataccataatactttgatttttatcatttgtgtttatgtgctttacctacctagattctraatagatttgtctctgtacttttttcccccttctgtgtgtgtgggaaggggaaggaggaggaggaggaaaagagattatagaagagggttaggtgaatct

SEQ ID NO: 98341 - DNA, 201 bp, Homo sapiens
ttttttgtagcgatagagtctcactatgttgcccagactggtcttgaactcctgggctcaaggccttggcctctcaaagtgctgatattacagaataagtrttacttataaatcatacttgctttatttttactccatattttgtaagtcttgtatcccatcaactcagtattctaagtccaagatttaaaaagttaattt

SEQ ID NO: 98342 - DNA, 201 bp, Homo sapiens
tttgatcacatcttcagaagtagctacaattaaccagctttgcccttctcttttgtatgaactccagggctctttgttatgatgccatttaatggtctctraacttttcagtgttttcaaatatgaggatactgccctaataaggatgcggtgggacatttttttgtttgtgtttacatgtaataatttattatttaaaaa

SEQ ID NO: 98343 - DNA, 201 bp, Homo sapiens
tgtttgaaactaaacttaaattgttcttaaatttcaaggataatttttttttttttttttgagatgaagtcttggtctgtcacccaggctagggtgcagtrgctccatcttggctcactgcaacctttgcctccagggttcaagtgattctcttgcctcagcctcccgagtagctgggattacaggcgcatgccaccatgc

SEQ ID NO: 98344 - DNA, 201 bp, Homo sapiens
aataatttattatttaaaaattaggaaaaaaatatacagaaaggatgaaaacaaacattcataatcactcccaagagataattgttgacagtttttttttwtataatttaatgtttatacctatgcatatccttattttctttcttaagatcggcatagctaggccaaaggatatgcacattttgtgggttttgataaata

SEQ ID NO: 98345 - DNA, 201 bp, Homo sapiens
tatgcaagagataaatcccctatcagatataacttgcaaatattttctcctgttctgtgagttgtcttcattttctttttttcttcttgagacagagtctygctctgttgcccaggctggaatgcagtggccagatgttggctcactgcagcctccgcctcctgggttcaaatgattctcctgcctcagcctcccgagtag

SEQ ID NO: 98346 - DNA, 201 bp, Homo sapiens
gcagctattattgatgtaagtacttattagcccagtagagtaagaattgaagtgaatttcagaaaaaaaatgattgaaagaagatagacagaaaagggagrgtaagtatgaaacttaatcattttttattactttgaggttctcaatttgttatgtaaacatagtaatttacattgtttaccctgttttatactaattata

SEQ ID NO: 98347 - DNA, 201 bp, Homo sapiens
tgaacttgtaaaggtaaagggagatattctctccccgttaaccatgattaaagagtatgagaatatttgctttgaaaagaaaatctctttacatgtttgcytgtattgcgtactgtatttctgcttttttgtaaggtatggcttgccagtgaacttccaagcaatgctacttcagcccaataagaaaactttgaagaaact

SEQ ID NO: 98348 - DNA, 201 bp, Homo sapiens
ttttgtgtatattagtttcagtttctatatatattagttgaacttgtaaaggtaaagggagatattctctccccgttaaccatgattaaagagtatgagartatttgctttgaaaagaaaatctctttacatgtttgcttgtattgcgtactgtatttctgcttttttgtaaggtatggcttgccagtgaacttccaagca

SEQ ID NO: 98349 - DNA, 201 bp, Homo sapiens
tgagaggcgtgatcttggctcactgcaacctctgcctcctgggttcaagcgattctcttgcctcagcctcccaagtagctgagattacagatgcgtgccaycgtgtcttgctaatttttgtatttagtagagaaggggtttcaccctgttgcccaggctggtcttgaattcctgacctcaggtgatccacccgcctcagcc

SEQ ID NO: 98350 - DNA, 201 bp, Homo sapiens
aatttagaatctatactgtgctttacttcctttccgaacatagttctaggatgtgcctcttttgcaatggttactggaggtagggtggtgatctgtttttyctgcattactcagtgtatttgaaattcattctcagtaggaaacccgaattttttttgttaaatagagttgaagtatacttactatagccagatttcctat

SEQ ID NO: 98351 - DNA, 201 bp, Homo sapiens
gtttgccagcatttgacctggctggggcaagaagtgtagtttaaattattggacagactttccttggctcccagtaactttagttatgcggtgtgctgtayagttaaatgtaaataaatagactatcaaagattttaactaaagtcatcatgtaatttgatgactatagtttaagaaactattatttacattacttgataa

SEQ ID NO: 98352 - DNA, 201 bp, Homo sapiens
gcctcggtacctgttactgctgctacttcctcgtttgacaccttcctgggtcagtgagcgatggctctccccggatggggagtcctggtcaggccgaagcwtgagctccggtcgctgcctgggagggacgcgggtgggtgcgggggcagagaccgtggcgttggagctggagctggctgggtggctgtgtctggtttctcg

SEQ ID NO: 98353 - DNA, 201 bp, Homo sapiens
tattggacagactttccttggctcccagtaactttagttatgcggtgtgctgtatagttaaatgtaaataaatagactatcaaagattttaactaaagtcrtcatgtaatttgatgactatagtttaagaaactattatttacattacttgataatataaagtggtgttcttactatgactgagcctttttttctgtatcc

SEQ ID NO: 98354 - DNA, 201 bp, Homo sapiens
tagatttgtctctgtacttttttcccccttctgtgtgtgtgggaaggggaaggaggaggaggaggaaaagagattatagaagagggttaggtgaatcttartgggactctttggaaagggagaactgcagcctgcctctcagatccaaaaatgttatattaacgccaccctctcagctccctatattttaaaatagccaag

SEQ ID NO: 98355 - DNA, 201 bp, Homo sapiens
tacctgttactgctgctacttcctcgtttgacaccttcctgggtcagtgagcgatggctctccccggatggggagtcctggtcaggccgaagcatgagctscggtcgctgcctgggagggacgcgggtgggtgcgggggcagagaccgtggcgttggagctggagctggctgggtggctgtgtctggtttctcggcgccaa

SEQ ID NO: 98356 - DNA, 201 bp, Homo sapiens
ggaagtgttagctgaatcttttaagtatggagagaggaggtatttgaaatccgcttaatcctactaaatatttgaagtttaaaaagaacttaacgctatayaatttagaatgtaaagaggttttagatgtctagaccaactcccttttttacagatgggaaaactaagagctagtgctgttaaatgacttgcctacataac

SEQ ID NO: 98357 - DNA, 201 bp, Homo sapiens
gaaagatatttttatatgaattacttccgtcagttggcgctgccataattaccatttggtttcaccgttcttgatccctttaggggtgaagtcactttgaytactaaacttccaaggaataagttgttgagtatttttttagctctacatgttttattctttccatttgaaagtgaaagggtccatgttttgaaaattgtt

SEQ ID NO: 98358 - DNA, 201 bp, Homo sapiens
gctagattcgctaagtgcgagagtattaactggaagcaaccggcgataggtggtgatgtgatccaggtgttgtgaagaacagagacaggatgacaagaagrcaggatataggtccacgagatttcagcagggatttatttttaaaagcaacttcttgagataggttctggagttagtacaggtgtagcctgaactcccaca

SEQ ID NO: 98359 - DNA, 201 bp, Homo sapiens
agaagtggaattagtaaggtcaggcccatgaaatattttcttttccagtttcattgtgtcatgtgggaagtagcttagtatgatggaaagagtcctggacycagggatctgagttctattgctggttctgtcaccagtagagtctgtcactggtagggtccgtcactggtagggttgtgacttcgagttgtccaggttctt

SEQ ID NO: 98360 - DNA, 201 bp, Homo sapiens
tttgagatatttaaaaaatcatattctggtccaatgtatgggttgctcatattagaaatagttttaaaaaacccaaaacttggccgggtgcagtggctcaygcctgtaatcccagcactttgggaggctgaggcaggcagatcacgaggtccgattgagaccatcctggctaacagggtgaaatcctgtctctactaaaaa

SEQ ID NO: 98361 - DNA, 201 bp, Homo sapiens
ccactgcactccagcctgggcaacagagcgagactccgcctgaaaaaacaaaacacaaaacaaacaaaaaaacaccccaaaacttacatgtaaccatgctsactatttttaaattttttcaaattttcaaactatatgtgggtaacctcatgctattaccataaaagtatctgctgaccttacttcttcttatttcctgag

SEQ ID NO: 98362 - DNA, 201 bp, Homo sapiens; identical to SEQ ID NO: 15014

SEQ ID NO: 98363 - DNA, 201 bp, Homo sapiens; identical to SEQ ID NO: 14998

SEQ ID NO: 98364 - DNA, 201 bp, Homo sapiens; identical to SEQ ID NO: 15001

SEQ ID NO: 98365 - DNA, 201 bp, Homo sapiens; identical to SEQ ID NO: 15002

SEQ ID NO: 98366 - DNA, 201 bp, Homo sapiens
acagaatctcaagcttacttagggtcatgagttggagaaaactaatcttaaagtctttaagttggtgaatttcaggccaaaatacattgtattggagataycagcaccttctagcagaatgtggtaccgtggtccagtcactattataaattgccagccatgaagaaaagggaagtcatgttttgggagccatgagtgtag

SEQ ID NO: 98367 - DNA, 201 bp, Homo sapiens
acagagtctcagtacatgttaaatgactacaagtctgttatagtaaggactcgtggtttattttttaaacagttttaagaaatacctttccttaggggaargagggaaagcaagtggcttttatttgtttttcataataaggtggcatagtaggatttagttataagataagatggaggttttatcttggcttttttcacc

SEQ ID NO: 98368 - DNA, 201 bp, Homo sapiens
cacaatacatatgaactatgcagcttgaaaacaatttagaatctatactgtgctttacttcctttccgaacatagttctaggatgtgcctcttttgcaatrgttactggaggtagggtggtgatctgtttttcctgcattactcagtgtatttgaaattcattctcagtaggaaacccgaattttttttgttaaatagagt

SEQ ID NO: 98369 - DNA, 201 bp, Homo sapiens
tattctggcctatacacactataattctttgttttcaatctcaaacatagttgtctctccccacacccctggaagccagtggcctctagagaaggttgttscacaatgttttgtggcaacatagtttactgtcacttcatttacttactacctcatggtactctgtgctttccataaatatagttttttttcagtccttca

SEQ ID NO: 98370 - DNA, 201 bp, Homo sapiens
acattttgtgggttttgataaatattgccaaattgtgttccagaaattgtctatcttttgttctttcttccttccttccttcttttctctctctctctcttctttttttttttcaagaccctctgtcacccaggctggagtgagaggcgtgatcttggctcactgcaacctctgcctcctgggttcaagcgattctcttgc

SEQ ID NO: 98371 - DNA, 201 bp, Homo sapiens
cctgctgattacctacacagtactaaccacagtcacatctagagaaaagggcgagttttttgaagtgcacagtagtctttgattcagcatttttttttggkgggggggaacttctccctgaagagtcagcacttttgatgaactttttctagtagaacagcttcaaaggaattggcagtggtgggctatgtcttatctata

SEQ ID NO: 98372 - DNA, 201 bp, Homo sapiens
ccaatcctctcattttacaagtgaagacatttatgcagacaattatatgcagaactgggattagattccaagtcttcatatcctcagcgcagtgctctggygattacattgtgcttcctgaaattgacatttgggttttctttgactatgattcccagtgaggtaaaagggccgtttaccaactttgatcacatcttcaga

SEQ ID NO: 98373 - DNA, 201 bp, Homo sapiens
acatcttttaactgtacttacacattatgaaataaaatagggagaatttaagatttgtgagaactttaggtcaagatgaatcatcttgttttttttttttwaaaaagcatgccacctaaataacaatatattttccttttaggttggcacgttggatgtcttggttggcttgtcagatgaactggctaaactggatgcatt

SEQ ID NO: 98374 - DNA, 201 bp, Homo sapiens
cattttgtgggttttgataaatattgccaaattgtgttccagaaattgtctatcttttgttctttcttccttccttccttcttttctctctctctctcttctttttttttttcaagaccctctgtcacccaggctggagtgagaggcgtgatcttggctcactgcaacctctgcctcctgggttcaagcgattctcttgcc

SEQ ID NO: 98375 - DNA, 201 bp, Homo sapiens
tttggatctagggttttttttttttctcctttcctcccacttttttcccttccatgttgaaaaataattgttacttttttttttaagcagcacacttattrcagtcagacaaaatagaagtgcctacagaattgactagtgtttcccttgtgcctccctatgttcttcagtgtttttttctgtcttgacatctacatgaag

SEQ ID NO: 98376 - DNA, 201 bp, Homo sapiens
cgtttatctctaaatcagacgttttgattggttccatcattgttgtatttgaatttgaattttatttattaattcaacaggcatttattaagtccctgctrttgccaggaatttagtgtattctggctctcagggtttcacagagaagaagatatgattctagctcttcaggatttctcagtaaggtggagaggaaaatat

SEQ ID NO: 98377 - DNA, 201 bp, Homo sapiens
gggtttcacagagaagaagatatgattctagctcttcaggatttctcagtaaggtggagaggaaaatatgttataaaaatgagggagaatacgatgagtgsgtagtaggggcatttataaagtataagtaagcaaaggatatttctcatctgggatacgggggagagtcttgggaggtaggatggggtggggcagcagcta

SEQ ID NO: 98378 - DNA, 201 bp, Homo sapiens
ccagagtggttaagaaagtagctcaatacatggctgatgtattggaagatagcaaagacaaagttcaagagaatctgttggctaatggaggtaagctaatsctcatgattgatcattattaactcatacaaagcaaataactaagctacagaaacaaaaagtaatgtaaaaaagtctacagaaaaggacactaaatacaat

SEQ ID NO: 98379 - DNA, 201 bp, Homo sapiens
tttatagatgagaaatggggtcctctttcctattccttgaaatcctttggaagcctgttagaagaaaagattttctggaactctaagtagtatgatagtgwcatctactgtaatagcttgtattattacaatctttgaggaagctgcagtttagataatttagcacaatcatcaggaagaatttaacagttgattttatta

SEQ ID NO: 98380 - DNA, 201 bp, Homo sapiens
tagagggttcaggacttggggaagggaaagaatgattcgattctatttgtacccttcacagggtagtcgtaactaccctcgaggcagtcctgaagtacatrgcagaggctcttttgcaaaaatttgttttggcttttcaaatttatccttttgtaaggtcatctatttcagaatatcttttattgaaatatagttacaggg

SEQ ID NO: 98381 - DNA, 201 bp, Homo sapiens
ggcctcattttctttgtctgtaaatggagcatagcaccttccttgtatatattatgaagttattttaagacttaatggagtattcaaaatacaagataatrttactgtattttcacaaatgttgatcttttaggaacttaacaacaaacttgtgctcatcatgaatgttttttttttcatttggaggaatatctttccttc

SEQ ID NO: 98382 - DNA, 201 bp, Homo sapiens
agataaagaagaaatgaacaggctttctactgataagaaaaaacaatttgtatgtgtttttaatatttagtattatcagtactaagcagaagaaaaagtgrtattgctttcctttgatttaaaagaaagtaaaaatctgctttggttttaagacatttgattttagtttttttttttaattgaataatcagaatgaatttc

SEQ ID NO: 98383 - DNA, 201 bp, Homo sapiens
aggctggagtgcagtggcatgatctcgtctcactgcaacctccacctcctgggttcaagcaattctcctccctcagcctcctgagtagctgggattacagkcacccgccaccacgcccagctaatttttttttttttttgtatttttagtagagacggggtttcaccatgttggtcaggctgatctcaaacccctgacctc

SEQ ID NO: 98384 - DNA, 201 bp, Homo sapiens
aaccacagtcacatctagagaaaagggcgagttttttgaagtgcacagtagtctttgattcagcatttttttttggggggggggaacttctccctgaagaktcagcacttttgatgaactttttctagtagaacagcttcaaaggaattggcagtggtgggctatgtcttatctataatcttggatagagctgttcaattt

SEQ ID NO: 98385 - DNA, 201 bp, Homo sapiens
ctcctttcctcccacttttttcccttccatgttgaaaaataattgttacttttttttttaagcagcacacttattgcagtcagacaaaatagaagtgcctwcagaattgactagtgtttcccttgtgcctccctatgttcttcagtgtttttttctgtcttgacatctacatgaagtcttcctcccaccctccctgcacac

SEQ ID NO: 98386 - DNA, 201 bp, Homo sapiens
agttctgggttatgcaacattacgtttataaatttgacaccaggtgattctacactctgaagtacttctatgggtaaacatgcaacattttagaatgttcrtagcaaatggttctgtttacaagatgcttgccaaattttatgagaatgatttgtcccttttgaaggaatgggtgaattttggagacataggcaagtatat

SEQ ID NO: 98387 - DNA, 201 bp, Homo sapiens
cctttgagacaagatgtttcctccaaaacgtactcacttatgcacagttttgcatgcaaatttaattacagaccctctagcgcacatccgtggacctcctrcttaagagcctgtgttgtaaactaagacttcaaatgatccagtgtcattgaatagtacaagcacagacctgtctttgaggagtcttcaagtcttaagtgg

SEQ ID NO: 98388 - DNA, 201 bp, Homo sapiens
gagtgcagtggcatgatctcgtctcactgcaacctccacctcctgggttcaagcaattctcctccctcagcctcctgagtagctgggattacaggcacccrccaccacgcccagctaatttttttttttttttgtatttttagtagagacggggtttcaccatgttggtcaggctgatctcaaacccctgacctcgtgatc

SEQ ID NO: 98389 - DNA, 201 bp, Homo sapiens
ggtttgagaccactcagcataggattgtcatttaaatttagctcttctgtcacctttcctggctcatattggctcttgtttaaactgttaacaagccaggyttgtggctcacacctgtaatccctcctgcttgaggggccaaggcaagaggatcgcttgagcccagatgttcaaagctgcaatgcactgtgattgcaccac

SEQ ID NO: 98390 - DNA, 201 bp, Homo sapiens
caagcaattctcctccctcagcctcctgagtagctgggattacaggcacccgccaccacgcccagctaatttttttttttttttgtatttttagtagagayggggtttcaccatgttggtcaggctgatctcaaacccctgacctcgtgatccacccaccttggcctcccaaagtgctgggattacaggcgtgagccaccg

SEQ ID NO: 98391 - DNA, 201 bp, Homo sapiens
ttgccagccatgaagaaaagggaagtcatgttttgggagccatgagtgtagattcagggaatcccctggcatggaaggaattatttgcccactgggtcacygctgagttgcctgtgcagaggaggagtctctagaagctgagaaggttttggtgattacttgcagtaatgggtgtacgacagggccctcctggccatgtct

SEQ ID NO: 98392 - DNA, 201 bp, Homo sapiens
atacatttccagactcctcctggaggagagaggcaccatttggtgcaaaacatgcatgtggtgtcagtttatttgttggacaaatattaagatgttgaggwtacagaggttaaaagtaatattttaataaactgcatataatggaattcaagtaatttaaaatctagtgtttgatgttttaatgtaactcctttagtgtaa

SEQ ID NO: 98393 - DNA, 201 bp, Homo sapiens
tcttttgtatgaactccagggctctttgttatgatgccatttaatggtctctaaacttttcagtgttttcaaatatgaggatactgccctaataaggatgyggtgggacatttttttgtttgtgtttacatgtaataatttattatttaaaaattaggaaaaaaatatacagaaaggatgaaaacaaacattcataatcac

SEQ ID NO: 98394 - DNA, 201 bp, Homo sapiens
tatttttagtagagacggggtttcaccatgttggtcaggctgatctcaaacccctgacctcgtgatccacccaccttggcctcccaaagtgctgggattayaggcgtgagccaccgcgcccggctgataatatctcatttttaaaaatttgtgtttccctgttggctgatgtgatgtgatgtgttgagtatcttttcatgt

SEQ ID NO: 98395 - DNA, 201 bp, Homo sapiens
ttgaatcagcccatagtttagtgtttctatgtgggtgctattggcagtttggaggtctgtttcgcccctacccactaaatgctgattagcgatctccacaytgggacaacccaaaatgctcccatacatttccagactcctcctggaggagagaggcaccatttggtgcaaaacatgcatgtggtgtcagtttatttgttg

SEQ ID NO: 98396 - DNA, 201 bp, Homo sapiens
acagttactctgttgatttttgcatgtaacaaagtcttggtccattttatccttaaaacattataaggtaagatccatttattgtgtattatatggatagrtataatgggaacatatagtcaaattcatgtctttatgtaatatgttcattgtatagaatggaatttagatctttttcctgagaatggttgttgatatttt

SEQ ID NO: 98397 - DNA, 201 bp, Homo sapiens
cacattgctgctgttttcatctttgtgacatacaaatgtgttgctttcccgtctaaaaccctgcttgtccctccccattttgactgcctgcccccagcacmgcacacacacacacacacacccacacaccctcttcttgtaccctatgtcccagccatatatgtatatatatattgtttttctttctttcttttttttttt

SEQ ID NO: 98398 - DNA, 201 bp, Homo sapiens
atcatcctaatattattgtctttatccatgaacatcggatgttactccatttatttgaagatggttatgcttttgtcttcaaaattcagttggaagagttyttctaaattgcagtttttattacttttgaaattcaggtacatgtgtatttgagctgaaaatggttataggctctttgataactgcattttgattagttgg

SEQ ID NO: 98399 - DNA, 201 bp, Homo sapiens
tatgaatggatccaagaaactcaacaaactcgaagcagagtaaatacttgtgaccttgggataggcaggtttttcacatgctacagaaagcatatattgtaaaaaaaaacaaaaaacaaaaaacaaaaaaaacccaaaaactgataaatcggacattggcagaattgcaaacttcttttcaaaagcatcattaagtcaagc

SEQ ID NO: 98400 - DNA, 201 bp, Homo sapiens
cctttttcctttctctctctctgtctgcaacctggcaatctcagctggcactgacctcagattgctttgtatttagtaatttatatatttttggatctttmcaatgagattttaagcaatgtgtgaaggtagtgattttgtcttgtatgattttgaatcccacccagggcctagaggcagacatggaataaggaagagaac

SEQ ID NO: 98401 - DNA, 201 bp, Homo sapiens
ctagtaattatcttgctgtgtatcagatgtttatagctgcagaaatacagaaaccagtgatactagttatttacaaaaactataaattgcagagaggaagraaataagcagttattttaattttatttggtagaagcgatagagtcaatagatgagtattttcaaggtaggttcatttttctaaaatggcgtagctgggcg

SEQ ID NO: 98402 - DNA, 201 bp, Homo sapiens; identical to SEQ ID NO: 15009

SEQ ID NO: 98403 - DNA, 201 bp, Homo sapiens; identical to SEQ ID NO: 15010

SEQ ID NO: 98404 - DNA, 201 bp, Homo sapiens; identical to SEQ ID NO: 15011

SEQ ID NO: 98405 - DNA, 201 bp, Homo sapiens; identical to SEQ ID NO: 15012

SEQ ID NO: 98406 - DNA, 201 bp, Homo sapiens; identical to SEQ ID NO: 15013

SEQ ID NO: 98407 - DNA, 201 bp, Homo sapiens; identical to SEQ ID NO: 15015

SEQ ID NO: 98408 - DNA, 201 bp, Homo sapiens; identical to SEQ ID NO: 15036

SEQ ID NO: 98409 - DNA, 201 bp, Homo sapiens; identical to SEQ ID NO: 15037

SEQ ID NO: 98410 - DNA, 201 bp, Homo sapiens
cgccattctcctgcttcagcctcccaagtagctgggactacaggtgcccgccacctcgcccggctaattttttgtatttttcgtagagacggggtttcacygtgttagccaggatggtctcgatctcctgacctcgtgatccgcccgccttggcctcccaaagtgctgggattacaggcgtgagccaccgcgcccggccag

SEQ ID NO: 98411 - DNA, 201 bp, Homo sapiens
agcagggtccttgttagcctgctgcagagtccctgagacagggagtgctggtgtggttgggggctgttggcaaagccatgtgggcttggggactgtcaccyagctgtgtcccccaagcaggctgcagcatggagtcggccctggaggctgcatccctgcaccccgcccagttgctggggctggagaagagtaaggggaccc

SEQ ID NO: 98412 - DNA, 201 bp, Homo sapiens
aggtgcaaagtctgaatccaggtcccgcagggcactcagtggctgacctgcgggcggcagaggatgctgtgtggagcggagccaccttcatcacccacctsttcaacgccatgctgcctgtgagtgctatggggccccaggggcggggctggggtcccagcagcccctgctgtcgctcagccatcccttccctcgcccctg

SEQ ID NO: 98413 - DNA, 201 bp, Homo sapiens
gtgtccggcacttcctgcaggccacaggtcagtgagcagcacgggtgcgggtttaggtggtctgtgagtggtgggtccccaaggggctggaccgggtgccyggactgtagcccaagctctgcccacaggagctcctgggcattgggtacttggtgactcaggcccagggtgacaggcagaccagcagggtccttgttagcc

SEQ ID NO: 98414 - DNA, 201 bp, Homo sapiens
cctgacctcaggtgatccaactgccttggccttccaaagtgctgggattacatgtgtgagtcactgtgcccagccaaatgttgctttttttttttttttttgagatggagtttcgctcttgttgcccgggctggagcgcaatggcacaatctcggcttactgcaacctctgcctcctgggttcaagcaattctcctacctc

SEQ ID NO: 98415 - DNA, 201 bp, Homo sapiens
tcaggtgggcgcgggccggggactgcggggctggggaccgggcggggtgcagggtgcggggccggggaccgggcggggtgcagggtgcggggccggggacmgggcggggtgcagggtgcggggccggggaccgggcggggtgcagggtgcggggccggggaccgggcggggtgcagggtgcggggccgaggtcaggcccgc

SEQ ID NO: 98416 - DNA, 201 bp, Homo sapiens; identical to SEQ ID NO: 28051

SEQ ID NO: 98417 - DNA, 201 bp, Homo sapiens
cgtgggaatgaaccttttaggaagtgaatctttcggccctgctctagcctttagatgactcagtcctggcagcatcttgatggcaacttcacaagagagcytgagccagaccacccagcctggcctctcctggattccagacccgcaggagccatgagtttctttgttgttttacacatcaaagttttgaggcaatttgtt

SEQ ID NO: 98418 - DNA, 201 bp, Homo sapiens; identical to SEQ ID NO: 15045

SEQ ID NO: 98419 - DNA, 201 bp, Homo sapiens
gggagcgggagttagtggtagattgtcactgtgtttaagatttccccaaggcgaaaaaggcgaaagatatcttgctagatccctagaattcgaaggcattrggagagggcggggatagcaaacatcgcgcgaattttgagaggcgctgggactacgtaatcccgcgatcttatgactaaacgaacgcgatttagggagaag

SEQ ID NO: 98420 - DNA, 201 bp, Homo sapiens
aaactttttttaaaaatggagtgtttatcagagcttaatgttaatgtcttactggacttgttaattttaaatttacatttttttctttacaacttgactakatgaaaatatgagatattttggtgtgtctgggtaataaaatacactgtttacctatgtctgctgaaaatacaaaaaattatcctggcgctgtggtacgtg

SEQ ID NO: 98421 - DNA, 201 bp, Homo sapiens
acagtttagttggttacttccattaatatgttagtataaaacagaaattgcgacagatacagcattttatatctgctatgtttacttctgtatttacttgyatttgattaacctggttaaatttcttggcagtttagcgatattgacatgggagaaattatcatggggaacattgaacttactcgctatactcgtcctact

SEQ ID NO: 98422 - DNA, 201 bp, Homo sapiens
agtactcactttaggtttgccatataaatttactgtaacttcctagaaaattggaaataaagtaagaaaaattttcttacaattcaagggcatttagaacmctttgtcatctgttaatattcagaaatgataagccagtgttttgttttcaggatctgggaaaactgcagcatttcttttacccatactgagtcagatata

SEQ ID NO: 98423 - DNA, 201 bp, Homo sapiens
tgcaatagttactacttgagttactatattagtgcaattaattacacaactatatatagtaattagtttctcagatctaataatccagtatcaactgaggkttttcgtaataggtacttagtgttggatgaagctgataggatgctggatatgggatttgaacctcagatacgtcgtatagttgaacaagatactatgcca

SEQ ID NO: 98424 - DNA, 201 bp, Homo sapiens
ttctcctgcctcagcctcctgagtagctgggactgcaggtgccggccaccatgcccggctaattttttctatttttttttagtagagacagggtttcaccktgttagccaggatggtctcgatctcctgacctcgtgatctgcccgccttggcctcccaaagtgctgggattacaggcgtgagccaccgtgaccagcccag

SEQ ID NO: 98425 - DNA, 201 bp, Homo sapiens
gtcgcggaagcagcagccgcagtggtggaggtggttacggcaacagcagaggatttggtggaggtaatgttaatttttcttttaggaagggctttttgttkttcttttttttttttttttgagatggagtcccactctgtcactcaagctggagtgcagtggcctgatctcggctcactggaagtgactctcctgcctcag

SEQ ID NO: 98426 - DNA, 201 bp, Homo sapiens
agctgggactgcaggtgccggccaccatgcccggctaattttttctatttttttttagtagagacagggtttcaccttgttagccaggatggtctcgatckcctgacctcgtgatctgcccgccttggcctcccaaagtgctgggattacaggcgtgagccaccgtgaccagcccagtacagattttttaaaagcctctta

SEQ ID NO: 98427 - DNA, 201 bp, Homo sapiens; identical to SEQ ID NO: 15046

SEQ ID NO: 98428 - DNA, 201 bp, Homo sapiens
agctccacctcttgggttcatgccattctcctgcctcaggctcctgagtagctgggactacataggtgcccgccaccatgcccagctaatttttttgtatytttagtagagacggggtttcaccgtgttagccaggatggtcttgatctcctgaccttgtgatctgcctgccttagcctcccaaagtgctgggattacagg

SEQ ID NO: 98429 - DNA, 201 bp, Homo sapiens
gcccaggctggagtgcagtggcgcgatctcggctcaccccaagctccccctcccaggttcatgccattctcctgcctcagcctcctgagtagctgggactrcaggtgccggccaccatgcccggctaattttttctatttttttttagtagagacagggtttcaccttgttagccaggatggtctcgatctcctgacctcg

SEQ ID NO: 98430 - DNA, 201 bp, Homo sapiens; identical to SEQ ID NO: 15047

SEQ ID NO: 98431 - DNA, 201 bp, Homo sapiens; identical to SEQ ID NO: 15048

SEQ ID NO: 98432 - DNA, 201 bp, Homo sapiens; identical to SEQ ID NO: 15044

SEQ ID NO: 98433 - DNA, 201 bp, Homo sapiens
gctggagtgcagtggcatgatctgagctcactgcatcctccttcctgggttcaggccattctcccacctcaacctcttaagtagctgggactacaggtgcrcaccaccacacccagctcatttttgtacttttagtagagacagggtttcgccatgttggccaggctggtctcaaattcctgatctcaagtgatcttcatg

SEQ ID NO: 98434 - DNA, 201 bp, Homo sapiens
cttgcggctggccagtgtgctagcacccaaccaaacacaactgcagctttgcctctcctctgctttcctctttgcctctaagaatgtagagctctgtgacyagttacccacaggcttaaactaggtcctcgaagctggggtgtagagcaagagggagtacactcggcttcattctctgggaccccttcttacaggacccct

SEQ ID NO: 98435 - DNA, 201 bp, Homo sapiens
ccctcttcctctcctttctctgtccccacaggctgcctggggaggtgggctgctcatgtccaggaagcaccgccataaactcaacggcatagaaaggtaayggccagaactcgccaggcctccttccacccagcacatcaaacagaccatgctctgatgtcagcctgcaccaccctgccctgatccccagcatcatatttc

SEQ ID NO: 98436 - DNA, 201 bp, Homo sapiens
ctccattcctagacccagccattttccaccgaaagcccagccctgccgccgggcggcctgggagtttggccttctccccagcgcaggacgcccgtggggcraggccagggctgcatccctgtgctggggcagccggcggccgcggatctttgttctataaatagccccgtcccactcccacccccacctccacccccaccc

SEQ ID NO: 98437 - DNA, 201 bp, Homo sapiens
tccagttcttgtctggaccctagccagccattcacaactggtacacaccacagacctggaacatcctctgggactcatccacttccttactagtcgattgytgtcttctgtggttcatcctagaatatggtctcattgccttcccaggtagctttgttgggacaagtggctacagaataaaatataactgatttcagaggg

SEQ ID NO: 98438 - DNA, 201 bp, Homo sapiens
aacggattcaagtttctttctttggggcttcggaggctaaagaaaaggattgcctggagccctccatggcctgcctgagggaggcacgagggtttgcctgscgcatccttgaaggcgaggagggaagggaaaggggacgagcagggacgaggagccgcaggcggcgaaagaaccgggaaggaagaaaatagatcagggagc

SEQ ID NO: 98439 - DNA, 201 bp, Homo sapiens
cattgtcctccacccatttccccgcggtcggaacctccctaaccgaacctctctccctctctctcgtcctagcgtacgatacctggtgcggcgtggcccayggatgcaccagaaaactggggctcaagatctgcggtaagtgacaggacccactggggcccggctgggtggcgcggcgggcggacctttggggcttgggag

SEQ ID NO: 98440 - DNA, 201 bp, Homo sapiens
gctcagactgtggactaagcccaggagtgacacagtggtttcttctccctataactctctccacactacagtctggctttcctgagctctcaggcagacasatctagaataattgacagtccctagcttagttgccaccacaggggaagccccaaggccacaactggcaatcctgtgttctttcttcttctttgtctctcc

SEQ ID NO: 98441 - DNA, 201 bp, Homo sapiens
accaaattctatttccagtgggagtccttgaggatgtcctcttgcctccttttcttgttccaggagctctctctaatcagcaatcctcatcaaagcagttrctttccaattgcctccagttcaaggactttggggcctctgtctgagatgcttagaaacagctcagactgtggactaagcccaggagtgacacagtggttt

SEQ ID NO: 98442 - DNA, 201 bp, Homo sapiens
acagccaggacagccagcgaccacgctcccctacaggccctgaccctcctctgcccgccccagacctggtccccaggggtcttttcctctggagtccccartccccaacacccagtggagcgaacgccgggtgccctgcctgggcgcagaagcgggaggaaagcgcccccgcgcggcaaccccgccttcctagccctgcgc

SEQ ID NO: 98443 - DNA, 201 bp, Homo sapiens
catttgatcgctccaccaaggtgctggactttcatcacccacaccagttgctggaaggcatggagggcttcaacttggagctctctgaccaccccgagtcyctggagcagatcctggttgactgcagagacaccttgaagtatggggttcgcacaggtaaggaggagagttgggtagacaggtagtggcaactttgccctc

SEQ ID NO: 98444 - DNA, 201 bp, Homo sapiens
ttgaacttgggagctggaggttgtggtgagccgagatcatgccactgcactccagcctgggtgacagagcaagactccgtctcaaaaaaaaaaaaaaaaaagctgtggcataatgatcgtttctcagcctcatgagcgcatctctgggagagcctgtgtcaaaacctcaagccgagtttctgcttcctgcagctgcccaga

SEQ ID NO: 98445 - DNA, 201 bp, Homo sapiens
acacatacacatacacactctctcactgggccccataagcctttgagtttggcagcaggggtgaggaacctgcagcaggagctcccctcagctcagaggtrgagtcatgatttttctccccttgcggctggccagtgtgctagcacccaaccaaacacaactgcagctttgcctctcctctgctttcctctttgcctctaa

SEQ ID NO: 98446 - DNA, 201 bp, Homo sapiens
gaggaacacaattcaacccatgacaccttttaccagctaggccaaaaagacacatgcacacacaggccaaaaagacacaggcacacatgcgcgcgcgcgcrcacacacacacacacacacacacacacacatacacacatgccttctcattctactgcaacttctggaacttaggacactctgagtcaccaaattctattt

SEQ ID NO: 98447 - DNA, 201 bp, Homo sapiens
agctggagaatggctgacatcaacggccaataccaacatgtaagtctcatatgttttcatataagcaaccctgatgtatgactatggcttgttgctttaamagttcagtcccagtggttctattttattaaagtttccctggtcattttttctcttaaaatctttaggtttatcacagttctgatttaatggtaaatactt

SEQ ID NO: 98448 - DNA, 201 bp, Homo sapiens
tccccccgctggcccacacgccggctgctgagtgcccaatggggcttgtagcggctcggctggaaaatcgctcactgagcgctcccctgtgctcctagccyagtcccccacacccttgcgtcttgtactggccttggacccccaccccgaccccgaccccgcctcgtctcggcgcttcactccaggtcgcgccgatgcacc

SEQ ID NO: 98449 - DNA, 201 bp, Homo sapiens
ctaggagtgaggtcggagggagggtgtggaggcgatggccggtgggcccttctctgtggggtcctcgatctacccagattagcccgcaatctctctgtccsggggccttcgggcgccatcgcgccagcgccgagagtcgagcaggggcgccgcgcaagatctttgtccgccgcctcctgcgcgctgcgcgcaagttcgttt

SEQ ID NO: 98450 - DNA, 201 bp, Homo sapiens
gcagccgcctctccgaatctctctcttctcctggcgctcgcgtgcgagagggaactagcgagaacgaggaagcagctggaggtgacgccgggcagattacrcctgtcagggccgagccgagcggatcgctgggcgctgtgcagaggaaaggcgggagtgcccggctcgctgtcgcagagccgaggtgggtaagctagcgac

SEQ ID NO: 98451 - DNA, 201 bp, Homo sapiens
ggttcttttaactacgcctaaatattgcaaagggagaatccttaaagcgcgtgaaatcgaagggggagcgggccagggcaaggggggctggtccgcccctyccggggcacctctgtgctcgggtgccccatgcgcgtgcagcggcgctcgtgcgtgtcatcaaccttcagacgtgattaatcaggaggccttcttttccca

SEQ ID NO: 98452 - DNA, 201 bp, Homo sapiens
tttgccgcctgggggtgggggtggggggttagcgggcagttgtgttaatttgccctccactcccggcgcccttacggaattcccggtggccgccagtcgcyggcgcaaatgccaagtcaccggtaggagacacaacagaggcgatgacctgaatccgcacgtggcctggttcgcctggaagctgccaaagcgaaggcaaga

SEQ ID NO: 98453 - DNA, 201 bp, Homo sapiens
agccttcccaaatgctcatcacagggaaatgcaaccacaaacatgacttttctctttaaaacagggcacagtgggatttgaaaaccagatcaacaaatgcytggaactggctgaatacctctatgccaagattaaaaacagagaagaatttgagatggttttcaatggcgaggtaggtaatcatcatggaccaggtacaca

SEQ ID NO: 98454 - DNA, 201 bp, Homo sapiens
gcatctaacctgcttcttctgaattcatatttgacctttgatctcttgacttcatttgctttcctcagtcatttaggaaaacagtacccaacctggaatcyaggttgcaagagaagaatctcctatagttctatacaaaatgatgtgcctatcttcattttttacttggagagaaggactacagatttcctaggattccca

SEQ ID NO: 98455 - DNA, 201 bp, Homo sapiens
tctatgccaagattaaaaacagagaagaatttgagatggttttcaatggcgaggtaggtaatcatcatggaccaggtacacagtatttccagaaaaactgmtgagggaagctcctgaagcttctggcaacatgggaaaatcaatcccatgttgccagaaactgcttcaaaatttttattcttatacactcttaattcctct

SEQ ID NO: 98456 - DNA, 201 bp, Homo sapiens
aactacagcttgttgacagtcaatttgccttcgctctgagtgaactcctccgggaaggtgagttgaaccactgcaaaagggctgactcacttccctactcrgaatatagacatgctcagaatgctcctctagtgtcactccatgaatgccaccatcctactgttttaaatctttacttccaatcccatgttcttatgcttc

SEQ ID NO: 98457 - DNA, 201 bp, Homo sapiens
tttgtttgtcttttaaaatctctgcagcctgagcacacaaacgtctgtttttggtatattccacaaagcctcaggggtgtgccagacagccctcaacgacrggaaaagctacacaaggtatggacttgctttttgtctcatctaatcctctgcaatttctctggctggtcaggacatcctcattccaatgtgcctttctag

SEQ ID NO: 98458 - DNA, 201 bp, Homo sapiens
cacaaacgtctgtttttggtatattccacaaagcctcaggggtgtgccagacagccctcaacgacgggaaaagctacacaaggtatggacttgctttttgkctcatctaatcctctgcaatttctctggctggtcaggacatcctcattccaatgtgcctttctagtgggggaaatataaaaaataaagccttggggtggg

SEQ ID NO: 98459 - DNA, 201 bp, Homo sapiens
cggagataatggaggctgggaaataaatggggctctgaccccgtccctgccagaggtcattcggctgtcagggacgctaggtgactcccagggcaccggaragcgaggaccacgcaaggtccgagcagcggcgatcgttgagggcttcgcggaggaggaggggcgcgcagccagggtgttgtttttattctgttgtgtgtg

SEQ ID NO: 98460 - DNA, 201 bp, Homo sapiens
tgacatcaacggccaataccaacatgtaagtctcatatgttttcatataagcaaccctgatgtatgactatggcttgttgctttaaaagttcagtcccaghggttctattttattaaagtttccctggtcattttttctcttaaaatctttaggtttatcacagttctgatttaatggtaaatacttgataaactattgtt

SEQ ID NO: 98461 - DNA, 201 bp, Homo sapiens
ccttctattcctctgggtggaccatgcctaagacattccattcagataagaatctattttgttggtgaagtatcacagggctggcacttccaccacctctytcagtaacccaggctggtttctgacattttatgatcggcgacttaatgcatttccaggaaatgaatcatgttagtggtttggaacagcttttttttagaa

SEQ ID NO: 98462 - DNA, 201 bp, Homo sapiens
agaatggctgacatcaacggccaataccaacatgtaagtctcatatgttttcatataagcaaccctgatgtatgactatggcttgttgctttaaaagttcmgtcccagtggttctattttattaaagtttccctggtcattttttctcttaaaatctttaggtttatcacagttctgatttaatggtaaatacttgataaa

SEQ ID NO: 98463 - DNA, 201 bp, Homo sapiens
aatggctgacatcaacggccaataccaacatgtaagtctcatatgttttcatataagcaaccctgatgtatgactatggcttgttgctttaaaagttcagkcccagtggttctattttattaaagtttccctggtcattttttctcttaaaatctttaggtttatcacagttctgatttaatggtaaatacttgataaact

SEQ ID NO: 98464 - DNA, 201 bp, Homo sapiens
gctgacatcaacggccaataccaacatgtaagtctcatatgttttcatataagcaaccctgatgtatgactatggcttgttgctttaaaagttcagtcccmgtggttctattttattaaagtttccctggtcattttttctcttaaaatctttaggtttatcacagttctgatttaatggtaaatacttgataaactattg

SEQ ID NO: 98465 - DNA, 201 bp, Homo sapiens
cagcgccgagagtcgagcaggggcgccgcgcaagatctttgtccgccgcctcctgcgcgctgcgcgcaagttcgtttccccggtgacgttccccatgcttrcttaccccaccctctctggatctgtaccgcgagaaatctggggtcctcagggggctaggtagaggagaaacgctgaaaccggaccgaaacctcgccctag

SEQ ID NO: 98466 - DNA, 201 bp, Homo sapiens
accggaaagcccctttagacgctggcattggctcccgggcaggaggtctcgtgttaagtcctcaggtctcattccaatttcctttgcagctccctcttcccgccacccaggagggatacaattacccacacaacaaagagggcctcgggagagtcgccagccctggtagcatatgaaccaggcaccggcgttggagctggc

SEQ ID NO: 98467 - DNA, 201 bp, Homo sapiens
gaaaatccacttataagccagtataatataacactgcttacagtcaacattattctatttatcaggcaacctaaactactaggaacacatgtgaatcaccaaatgaacaaaaaagagccctgggcagtttaaaatcagtgacactgctctgatcatttacacactactttaaacactcttaatagcagattaaaaacaaca

SEQ ID NO: 98468 - DNA, 201 bp, Homo sapiens
aatgatgctggccaaagatgctttttaaaatgaggaatcccagagagctgctgaggtctgccaacaccactggaataagtgcagcttcattaaatgactgmtggatacacaagactcagttatatgtacaaaatttatgttgtttgatttttaaagaaaagcactctatcaatttacatttagttacttctcatcttggtc

SEQ ID NO: 98469 - DNA, 201 bp, Homo sapiens
agaaaatccacttataagccagtataatataacactgcttacagtcaacattattctatttatcaggcaacctaaactactaggaacacatgtgaatcaccaaatgaacaaaaaagagccctgggcagtttaaaatcagtgacactgctctgatcatttacacactactttaaacactcttaatagcagattaaaaacaac

SEQ ID NO: 98470 - DNA, 201 bp, Homo sapiens
ccttgaaacagagtgcactaaattattttgttaggtcctttaactaaaggacctaagcacgatgaagaggttgaaagttcacaacaagggtttagctctarggagagcagaggcaggatgattctgagccaattgctctatctaggggaaaagatccttcacaggtattaaaatgcagcacctagctataggccaggcctt

SEQ ID NO: 98471 - DNA, 201 bp, Homo sapiens
tgacagtccctagcttagttgccaccacaggggaagccccaaggccacaactggcaatcctgtgttctttcttcttctttgtctctccttctttattttcsctctcattcttcctcgtcatttgaagatagatttaagactgagactaggaggctggtggtgatagagctgagtaagactattggatgtcaaaaacaaagt

SEQ ID NO: 98472 - DNA, 201 bp, Homo sapiens
tcccaaatgctcatcacagggaaatgcaaccacaaacatgacttttctctttaaaacagggcacagtgggatttgaaaaccagatcaacaaatgcctggarctggctgaatacctctatgccaagattaaaaacagagaagaatttgagatggttttcaatggcgaggtaggtaatcatcatggaccaggtacacagtatt

SEQ ID NO: 98473 - DNA, 201 bp, Homo sapiens
aactttgggaggcaaaggcgggaggatcgcttgaggccaagaattgaagaccatcctgggcaatatagtgagacctccatctctacacaaaataaaataawgttaaaaataagaaatttttaaaaactgctttggtgaactacaaggccttctttaagagtgcagctgcacagattgtaaacatggcccaggatggggcag

SEQ ID NO: 98474 - DNA, 201 bp, Homo sapiens
ggggtgtagagcaagagggagtacactcggcttcattctctgggaccccttcttacaggaccccttgctagccagggaaattgtcaaggcactgacctccrtgtcatccaccacctcttcatccttggagaagcagttccttccagggcctctcagagccaagggaggcctggttcacctacctttctgaggatcccagta

SEQ ID NO: 98475 - DNA, 201 bp, Homo sapiens
gaataaagggcattgtgggcggagggtcgtgttcccaagtcccagcggtggttgacctaaggaaacgttatcctcggcagacagggtggagtagccggggmtgcaagctcgcaaatccctaatgccggagagagactggaggggtcgcatatcgccccctccttcttctgcctttgagcgccgcgttcccatttcttcaaa

SEQ ID NO: 98476 - DNA, 201 bp, Homo sapiens
gccggaccagtcgaggactctggacagtagaggccccgggacgaccgagctgatggcgtcttcgaccccatcttcgtccgcaacctcctcgaacgcgggascggaccccaataccactaacctgcgccccacaagtaggtcccgccccaattttctatcaaatgaactgcagggaagatgggggcgctgggacgtcgggag

SEQ ID NO: 98477 - DNA, 201 bp, Homo sapiens
taagtttcttacatgcagttgtttgccttgtctcctaatcaagagatctccccctccaactcttcttttttttcttgtagtttatttgtaggaaaactttrctttaaaaaataattctttccttctccccctacctgaatttaggccatgagcggcccagcaccatatctatcatctgctactttcatccaatatagagaa

SEQ ID NO: 98478 - DNA, 201 bp, Homo sapiens
tgtcatacctgaaaagaaaaatttatagctccttaatgaaatatttagtcagttttcaaatttccaattgtatcatgaacgtcataaatgcttttagttarttaaactcatttgaatcaggatccaaataagtttcttacatgcagttgtttgccttgtctcctaatcaagagatctccccctccaactcttctttttttt

SEQ ID NO: 98479 - DNA, 201 bp, Homo sapiens
catcgcccccttactgtggttaccacgggaacttctaaaggatgcatcttgtctccttgtccttggttgatgttcttcattaaaggagccctatgcagggkaagggaataatgtgcatattcctagggacattctagattaaactgtgtctgttacaataacattttaagttcaggcccactgtaatgctgattcattcta

SEQ ID NO: 98480 - DNA, 201 bp, Homo sapiens
tgtcattgtcatacctgaaaagaaaaatttatagctccttaatgaaatatttagtcagttttcaaatttccaattgtatcatgaacgtcataaatgctttwagttaattaaactcatttgaatcaggatccaaataagtttcttacatgcagttgtttgccttgtctcctaatcaagagatctccccctccaactcttctt

SEQ ID NO: 98481 - DNA, 201 bp, Homo sapiens
gtgttttccatcacaaggtggctccaaaaatcaaagccctgatgatggagtcaggtacgaccatggttggctaccagccccaaggggacaaggccaacttmttccggatggtcatctccaacccagccgctacccagtctgacattgacttcctcattgaggagatagaaagactgggccaggatctgtaatcatccttcg

SEQ ID NO: 98482 - DNA, 201 bp, Homo sapiens; identical to SEQ ID NO: 15069

SEQ ID NO: 98483 - DNA, 201 bp, Homo sapiens
ttcttaagaactttttttaaaaaagtccacaatgtcattgtcatacctgaaaagaaaaatttatagctccttaatgaaatatttagtcagttttcaaattwccaattgtatcatgaacgtcataaatgcttttagttaattaaactcatttgaatcaggatccaaataagtttcttacatgcagttgtttgccttgtctcc

SEQ ID NO: 98484 - DNA, 201 bp, Homo sapiens
ttgctgccgtgtcaaaacagctcctggttgctgatgtggaatttaagcatagataaggagcaatagggtaaaccccacaggtagctacacacagtagaaartattttttcaaggatattaatgcattaataggctcagccaaaataatgaattgggttttaatagtgaaaacatactgatccgggtatagtctgtgaagag

SEQ ID NO: 98485 - DNA, 201 bp, Homo sapiens
aatatagttgttgtttttaactcaaccatttggaaaataagtgaggaaaacagagtaaaagatacatatctattaaagtccaagtacccatattaatacargcactgaatttactcagcacctttaagtgtgtgttctgcagggcactcagctgctttttccatgtatatatatgtctccaatctcaaggtaaataacgga

SEQ ID NO: 98486 - DNA, 201 bp, Homo sapiens
tatatgtacaaaatttatgttgtttgatttttaaagaaaagcactctatcaatttacatttagttacttctcatcttggtcagatggctaatatattcctratggaaaacaaatagtgttattcggctgcattttaaaaagagtcagaattccccatgtatgtttagcttgacttgctttggtgtgatattttgaactttg

SEQ ID NO: 98487 - DNA, 201 bp, Homo sapiens
tttaatggtaaatacttgataaactattgttgaatttaataatggaatttaaggaaagcatggtcatgagaaataataactctaacttccaaaatgtagtsttgaaatttcatgttaaaagacccatttctgttaatggtgtatctaaagaggttatgttttgaggtatgatcttggttttacctttttccacccaagcac

SEQ ID NO: 98488 - DNA, 201 bp, Homo sapiens
tccaggagctctctctaatcagcaatcctcatcaaagcagttgctttccaattgcctccagttcaaggactttggggcctctgtctgagatgcttagaaasagctcagactgtggactaagcccaggagtgacacagtggtttcttctccctataactctctccacactacagtctggctttcctgagctctcaggcagac

SEQ ID NO: 98489 - DNA, 201 bp, Homo sapiens
gaaataataactctaacttccaaaatgtagtcttgaaatttcatgttaaaagacccatttctgttaatggtgtatctaaagaggttatgttttgaggtatsatcttggttttacctttttccacccaagcacattggtccttatcatttaggtcatgtttcttccataattaaagcagccataaacccacaaaccaatttg

SEQ ID NO: 98490 - DNA, 201 bp, Homo sapiens
gctcagtacattgtgccaagctgctaatggtctgttgaaaatatccgattaaattgctttttgctgctgctaaagtttttttcatgtgcaatctcattgaytcttcattttaatttccctccttttccaataattatagggggaaaataattccagctgattttgaggcaaaaattcttgaagccaaacagaaggtatgta

SEQ ID NO: 98491 - DNA, 201 bp, Homo sapiens
cctccatgtgattaatttgactgcttttttcatccacaattaaaacttagtagcttcacctgtgtcttatgtaaaacaatagttatctcatccttacaaayagctttgccttacattaagcaagcaagaattcccattagtcttcaacattagcacttggctcaaacaccctaaccagtgataaagcttccccatgtcact

SEQ ID NO: 98492 - DNA, 201 bp, Homo sapiens
cattttaatttccctccttttccaataattatagggggaaaataattccagctgattttgaggcaaaaattcttgaagccaaacagaaggtatgtactccrtggtgcatctgaactccagttttaaaataccttctttctgtcctagacaaaaacagtccttgataatatgagacaattttcttgtgcttctaaaattcta

SEQ ID NO: 98493 - DNA, 201 bp, Homo sapiens
aatataacctttggttgcatgtcgatgtaagtgctatataactcaggccagtccatgtggggggtggaggcacctcttttttatgacttgcctcaagcttmtccccacgccccagccagccctctctccacaccacattagttccagttcttgtctggaccctagccagccattcacaactggtacacaccacagacctgg

SEQ ID NO: 98494 - DNA, 201 bp, Homo sapiens
tgtcgatgtaagtgctatataactcaggccagtccatgtggggggtggaggcacctcttttttatgacttgcctcaagcttctccccacgccccagccagscctctctccacaccacattagttccagttcttgtctggaccctagccagccattcacaactggtacacaccacagacctggaacatcctctgggactcat

SEQ ID NO: 98495 - DNA, 201 bp, Homo sapiens
ccaagagttcgagaccagcctgggcaacacagtgagaccctgtctctaatagctatcaatcaatcaatcaatcaatgagaaagacaataaacaagtagttwgaacacaatgtgataagtgtaacaggagacaattgcaggtacccaggtaggagataagagagactaaccagtgaggggaattggaggccatcagagtttg

SEQ ID NO: 98496 - DNA, 201 bp, Homo sapiens
ggggcttggagccctccttgtccccaaccactaggtcttcccgacccttgctacatcaaaggggctctctcgcttgctctccccgtctccctttccctttmtttcattgcaacccccaattttgaaaggcagtgcaatgtgtctgaactccaacttccctgttgattgaccttggaaaactcatgtaacctctctgagcct

SEQ ID NO: 98497 - DNA, 201 bp, Homo sapiens
agctcatgataaactctctagactcttcctcctaatcctgagagtaatggccatgttcctggtccttggggaggctaattcatgcaaaccttgggcctaaytggttttaaatctgaagcatggagtgggacctatgcctgatattcagtcccattccctctcccttgtccatgtggttcctgcctggccaacactgacttg

SEQ ID NO: 98498 - DNA, 201 bp, Homo sapiens
tggaattccgagcttcacctggttgtatgccgcccacttcaagcagcgcagagcagctgccggttgagtggtttggggggacgtttcctacgtggagcagrcacccccagcctgtccagccccaagcctcagtgcccggggctgcagtcaccgcgcgccccgccgtttaggatgttttttgtgtccttaaaaagtgccggg

SEQ ID NO: 98499 - DNA, 201 bp, Homo sapiens
aatcccatgttcttatgcttcaacccagagcttctggcaggtttagtttctggttctgactctgaaatgtaatcttgtactttgactttagcatctaaccwgcttcttctgaattcatatttgacctttgatctcttgacttcatttgctttcctcagtcatttaggaaaacagtacccaacctggaatctaggttgcaag

SEQ ID NO: 98500 - DNA, 201 bp, Homo sapiens
ccccatgtatgtttagcttgacttgctttggtgtgatattttgaactttgccagtttgctctacatgcgctttctcagagagatgagaactacatcatttyattatgaaagcccagaatggcgttgtccctcaaataaaaatacatgattttgtcataatatcaactaatattatctacaaaaccaaagcatcttgtggtc

SEQ ID NO: 98501 - DNA, 201 bp, Homo sapiens
ttcttggatttaggctattcacaacctaaagagagcagaatgacccatcctctgcttcttttcttgcctccattttcaggtctatttcattctgataaatsctgcccttgcctgtccctgacactggggagaattgggctatttcctctccctttctgtattagtttcctaggaatgccattataaatgaccacaaattgg

SEQ ID NO: 98502 - DNA, 201 bp, Homo sapiens
catggctctaaattacgtttcctggaggctaaaaattctaattgcgtcaaaaaaaattgacgtgtcctgtctactcaccttgactgaccacgttttaggcrtgaagatctccccgcagcccgtttgggcgctccttcaacgcctcacgctcctcctactcacccgtttttccctttgcagaaaaggcttggccccaaatcc

SEQ ID NO: 98503 - DNA, 201 bp, Homo sapiens
ccagggtgtccttgggcttccatcacttatctcttgctgccaactacagcccctgagctgttttatttagcctacactcgtgtgtgtgtgtgtgtgtgtgktatgtatgtgtgtgtaattttgtatcaagtgccaaaccttaaaaatagagagatttcaagtgctctctttttctggtttctcttgaaaaaacttgggggt

SEQ ID NO: 98504 - DNA, 201 bp, Homo sapiens
ttgtgtgggaggattctaatcaccgcagccctcccatgcatccccccttctcccacccatcacagttgaattgtagtcctgggaagcaaagctgaattctmcagattaacttgcctttttgcacctcttgggactttcttccaagtctgccttgtgacacgtgtgactccgcaagtttcttggtatttacagaaacagctt

SEQ ID NO: 98505 - DNA, 201 bp, Homo sapiens
gcaggggagggtgaatattaggttcttgatgtattaaatgtgttcatctgttaaatttgttttattgtgcttaaggactggctcagtacattgtgccaagytgctaatggtctgttgaaaatatccgattaaattgctttttgctgctgctaaagtttttttcatgtgcaatctcattgactcttcattttaatttccctc

SEQ ID NO: 98506 - DNA, 201 bp, Homo sapiens
aggtctaagtgcttcttatggggacatacccgacgagttcagaaaggctaaagaggcgggaaagagtggggcttcgctgggtccggaaatagggaagccgkagttggcctccactccccctcccccactgtcagccgaagctaggagggagagctcctgggggctacagtcctcagagagtttcctccctgtgtctgctcc

SEQ ID NO: 98507 - DNA, 201 bp, Homo sapiens
ctggaggttgtggtgagccgagatcatgccactgcactccagcctgggtgacagagcaagactccgtctcaaaaaaaaaaaaaaaaaagctgtggcataaygatcgtttctcagcctcatgagcgcatctctgggagagcctgtgtcaaaacctcaagccgagtttctgcttcctgcagctgcccagagggaaggggcttc

SEQ ID NO: 98508 - DNA, 201 bp, Homo sapiens
tgactcttcattttaatttccctccttttccaataattatagggggaaaataattccagctgattttgaggcaaaaattcttgaagccaaacagaaggtakgtactccgtggtgcatctgaactccagttttaaaataccttctttctgtcctagacaaaaacagtccttgataatatgagacaattttcttgtgcttcta

SEQ ID NO: 98509 - DNA, 201 bp, Homo sapiens
aaggtctaagtgcttcttatggggacatacccgacgagttcagaaaggctaaagaggcgggaaagagtggggcttcgctgggtccggaaatagggaagccsgagttggcctccactccccctcccccactgtcagccgaagctaggagggagagctcctgggggctacagtcctcagagagtttcctccctgtgtctgctc

SEQ ID NO: 98510 - DNA, 201 bp, Homo sapiens
agaagtcaggggcgggaaaggtgcataaaactgagactgagccttgacatttcatacaattaattacatctcagagaaataaataaataaataaataaataggggagcgggcggcatcctgagtggcaagagatggggaactgggagggggcaagaagctttatcatagagaggagagagcacctctctccttatcccagg

SEQ ID NO: 98511 - DNA, 201 bp, Homo sapiens
aatcaaagagccccaacacctcccaatatgtccgcttgctgacagggggcgccatatccaacatgtacagcatcatggctgctcgctacaagtacttcccrgaagttaagacaaagggcatggcggctgtgcctaaactggtcctcttcacctcagaacaggtgagtcggggatgctttctcatggatagtggtgtttttt

SEQ ID NO: 98512 - DNA, 201 bp, Homo sapiens
gagaagtcaggggcgggaaaggtgcataaaactgagactgagccttgacatttcatacaattaattacatctcagagaaataaataaataaataaataaataggggagcgggcggcatcctgagtggcaagagatggggaactgggagggggcaagaagctttatcatagagaggagagagcacctctctccttatcccag

SEQ ID NO: 98513 - DNA, 201 bp, Homo sapiens
gtcccattccctctcccttgtccatgtggttcctgcctggccaacactgacttgatcctaagccaactttcatccagtctttgatatggttctgatattayggtatgtgatttcatttgttccttgccttaccccagagagctttcttatatagtactgggagattctagcacagacactgccaccagtatctcctcgcca

SEQ ID NO: 98514 - DNA, 201 bp, Homo sapiens
ggagaagtcaggggcgggaaaggtgcataaaactgagactgagccttgacatttcatacaattaattacatctcagagaaataaataaataaataaataaataggggagcgggcggcatcctgagtggcaagagatggggaactgggagggggcaagaagctttatcatagagaggagagagcacctctctccttatccca

SEQ ID NO: 98515 - DNA, 201 bp, Homo sapiens; identical to SEQ ID NO: 15087

SEQ ID NO: 98516 - DNA, 201 bp, Homo sapiens
tagtcatttgatattagcccctgaagattcctggatatgaaatatttctttgcttttatgtcaatgtaaacacaaatagtaaaatgcaagttgggttgaaytgttaaaaagagagggtgttcatatcaatcttgagttttgttttgtgttttccatcacaaggtggctccaaaaatcaaagccctgatgatggagtcaggt

SEQ ID NO: 98517 - DNA, 201 bp, Homo sapiens
gcagatatttgtctttacagagttcacagtcttccaagcaatatgaaacctcctgctatatctcaggattttggccctgataaaagcatgctgttgctgcygtgtcaaaacagctcctggttgctgatgtggaatttaagcatagataaggagcaatagggtaaaccccacaggtagctacacacagtagaaagtattttt

SEQ ID NO: 98518 - DNA, 201 bp, Homo sapiens
gggagaagtcaggggcgggaaaggtgcataaaactgagactgagccttgacatttcatacaattaattacatctcagagaaataaataaataaataaataaataggggagcgggcggcatcctgagtggcaagagatggggaactgggagggggcaagaagctttatcatagagaggagagagcacctctctccttatccc

SEQ ID NO: 98519 - DNA, 201 bp, Homo sapiens; identical to SEQ ID NO: 15068

SEQ ID NO: 98520 - DNA, 201 bp, Homo sapiens
ggttgcacagtactttctgagggaacttgtgaccaggtagtcatttgatattagcccctgaagattcctggatatgaaatatttctttgcttttatgtcartgtaaacacaaatagtaaaatgcaagttgggttgaattgttaaaaagagagggtgttcatatcaatcttgagttttgttttgtgttttccatcacaaggt

SEQ ID NO: 98521 - DNA, 201 bp, Homo sapiens
aaaaatcccacaaattctccttttttggcatgtgttcataaaaccaaagtcccttactcttctcttagctcagctgcaaaacactaaaatgtgtcccagcyatctgaggtcaaggccaatccaactaaatgacatgtagtaattgcagctgtacttgaatgggagatatttataaaatatgaccgattccaacagatcgat

SEQ ID NO: 98522 - DNA, 201 bp, Homo sapiens
ctcctgggggctacagtcctcagagagtttcctccctgtgtctgctccccacaacccatggtagtctgttgaggagaaattgccttgggctaaaatgcccygcttttggggccacaggttaggaggcttcccattaggtttgattgtgaaagaaaacaaaacaccaagatttattttccacaccttgagacaactttggct

SEQ ID NO: 98523 - DNA, 201 bp, Homo sapiens
agggagaagtcaggggcgggaaaggtgcataaaactgagactgagccttgacatttcatacaattaattacatctcagagaaataaataaataaataaatwaataggggagcgggcggcatcctgagtggcaagagatggggaactgggagggggcaagaagctttatcatagagaggagagagcacctctctccttatcc

SEQ ID NO: 98524 - DNA, 201 bp, Homo sapiens
ttaataacgtttatcctggaagattggccacacacatacacacaaaatcacactatgggaagttgcatgctgagcctcataaccaacgagtgtcctggaayttgttttcctttcagagatgttttactaacccctgctgccccacaacactcatctcaggaggtgctttaccagtctctcccaaacagctcataggtagat

SEQ ID NO: 98525 - DNA, 201 bp, Homo sapiens
atacccgacgagttcagaaaggctaaagaggcgggaaagagtggggcttcgctgggtccggaaatagggaagccggagttggcctccactccccctccccsactgtcagccgaagctaggagggagagctcctgggggctacagtcctcagagagtttcctccctgtgtctgctccccacaacccatggtagtctgttgag

SEQ ID NO: 98526 - DNA, 201 bp, Homo sapiens; identical to SEQ ID NO: 15070

SEQ ID NO: 98527 - DNA, 201 bp, Homo sapiens; identical to SEQ ID NO: 15071

SEQ ID NO: 98528 - DNA, 201 bp, Homo sapiens
gcgggcagttgtgttaatttgccctccactcccggcgcccttacggaattcccggtggccgccagtcgccggcgcaaatgccaagtcaccggtaggagacmcaacagaggcgatgacctgaatccgcacgtggcctggttcgcctggaagctgccaaagcgaaggcaagagagcccgggaccctgctgtaaaacagcaagc

SEQ ID NO: 98529 - DNA, 201 bp, Homo sapiens
aacacagacactcacttcttttctcaggagaaacaagagccctgcttggagagttgattcactctgcagctgaccctcaggggctgggcagtttgcagcaytctctctgaccagcttcttgtgccataggcttcttgcaaaggaccaacagcctggaagagaagagtcgccttgtgagtgccttcaaggagaggcaatcct

SEQ ID NO: 98530 - DNA, 201 bp, Homo sapiens
agaggagagagcacctctctccttatcccaggcaagagatctgtcaggaggtgacatgtcccgaaaagagagaaagaaaagagacaccagataaaagaggrgggaggatttatgcttccctgtcttaagtgcgacaggctcctcaacccatttccagaatctatctttaattttatttcctacctctgtaaaggcttgaga

SEQ ID NO: 98531 - DNA, 201 bp, Homo sapiens
gcccccggctgctcagtccctccggtgtgcaggaccccggaagtcctccccgcacagctctcgcttctctttgcagcctgtttctgcgccggaccagtcgmggactctggacagtagaggccccgggacgaccgagctgatggcgtcttcgaccccatcttcgtccgcaacctcctcgaacgcgggagcggaccccaatac

SEQ ID NO: 98532 - DNA, 201 bp, Homo sapiens
tcttttacctccatgtgattaatttgactgcttttttcatccacaattaaaacttagtagcttcacctgtgtcttatgtaaaacaatagttatctcatccwtacaaatagctttgccttacattaagcaagcaagaattcccattagtcttcaacattagcacttggctcaaacaccctaaccagtgataaagcttcccca

SEQ ID NO: 98533 - DNA, 201 bp, Homo sapiens
ctagaccctgggactcggcgtttagggaggaacaggcgctccattcctagacccagccattttccaccgaaagcccagccctgccgccgggcggcctgggrgtttggccttctccccagcgcaggacgcccgtggggcaaggccagggctgcatccctgtgctggggcagccggcggccgcggatctttgttctataaata

SEQ ID NO: 98534 - DNA, 201 bp, Homo sapiens
gaacaatgaggcctcactttcctggctacatttcaccgactaaaattctctagccttatcgggccagaaaatacggatgtccccgggcagaggttggagargcgggggaagattaacgggcggcttattaaagagccatccgtcagctcctgcgcgcgggagatagcggcagagcaggcacgggacacgcccgcccgccct

SEQ ID NO: 98535 - DNA, 201 bp, Homo sapiens; identical to SEQ ID NO: 15073

SEQ ID NO: 98536 - DNA, 201 bp, Homo sapiens
caataacctcttgaaccatctgctgcaggttttgaccatagtgattggttgctgaaatgggaccctggtacaggcttcattcctaagtggactgactaggktgtacagtcagcagtgacactacctggggaggctgatgctttctcagtgctggactttgctcaggcccattagcaatccacagccagccttgtgcatctg

SEQ ID NO: 98537 - DNA, 201 bp, Homo sapiens
tagtgataaatgtaaaaggtgctgggagcaacaaaaagcttggtggctctgctttccccttcttccctccagaaatagcccctggctcccttgtgtgggargattctaatcaccgcagccctcccatgcatccccccttctcccacccatcacagttgaattgtagtcctgggaagcaaagctgaattctccagattaact

SEQ ID NO: 98538 - DNA, 201 bp, Homo sapiens
gtatacggaaggcattatcaactaagagacttaatcccaaatcttcccaggaacacaaaagatgcattttcacatgtgtgactgggtgtatttttttttttctttctctctgcccattttcttagggatttaacttctcacaattggccaataggatcatctgccttgctactgaactaatgactaacaaaggctgtgtca

SEQ ID NO: 98539 - DNA, 201 bp, Homo sapiens
gggccagggcaaggggggctggtccgccccttccggggcacctctgtgctcgggtgccccatgcgcgtgcagcggcgctcgtgcgtgtcatcaaccttcaracgtgattaatcaggaggccttcttttcccatcaccaagggggccaaagcgaggagcgagcgcatagcaaaagggacgcggggtccttttctctgccggt

SEQ ID NO: 98540 - DNA, 201 bp, Homo sapiens
ctctcttctcctggcgctcgcgtgcgagagggaactagcgagaacgaggaagcagctggaggtgacgccgggcagattacgcctgtcagggccgagccgarcggatcgctgggcgctgtgcagaggaaaggcgggagtgcccggctcgctgtcgcagagccgaggtgggtaagctagcgaccacctggacttcccagcgcc

SEQ ID NO: 98541 - DNA, 201 bp, Homo sapiens
gggcccgtacgttctttagaaagcacaaaaagacacacgtggggtctctttgcagtacttgttggctgactcacgagattggcagccccactgagagactrctgctgctgtcctttcctgcccttgcagctaacctggtttcttctcttggctcttgctggctactgtgcttcttctttgatcagtactcagggtctgtca

SEQ ID NO: 98542 - DNA, 201 bp, Homo sapiens
ctccttctttattttccctctcattcttcctcgtcatttgaagatagatttaagactgagactaggaggctggtggtgatagagctgagtaagactattgkatgtcaaaaacaaagtgttataatgaaataatgatgctggccaaagatgctttttaaaatgaggaatcccagagagctgctgaggtctgccaacaccact

SEQ ID NO: 98543 - DNA, 201 bp, Homo sapiens
tgagagactactgctgctgtcctttcctgcccttgcagctaacctggtttcttctcttggctcttgctggctactgtgcttcttctttgatcagtactcarggtctgtcagcaactgaacctttaaggaaattatttaattgagtattccttcatgtttgcacaaaaaaagtgggagcaagtaggtgaggcatccaatcag

SEQ ID NO: 98544 - DNA, 201 bp, Homo sapiens
ttaaagccacccacatctctgatgtgtaaatgcagatgcacccatcttaatttccatgatagggtatactccaaggatgcaaccagatgtgtgcaggatayctcttccagccagacaagcagtatgatgtctcctacgacaccggggacaaggcaattcagtgtggccgccacgtggatatcttcaagttctggctgatgt

SEQ ID NO: 98545 - DNA, 201 bp, Homo sapiens
tccaaggatgcaaccagatgtgtgcaggatacctcttccagccagacaagcagtatgatgtctcctacgacaccggggacaaggcaattcagtgtggccgycacgtggatatcttcaagttctggctgatgtggaaagcaaaggtatgaagggaatagttcaggaaatagagcagaaatgtaatttgcacagactggctgg

SEQ ID NO: 98546 - DNA, 201 bp, Homo sapiens
tgtttatttcccatagacagggacagcatagccttcccaaatgctcatcacagggaaatgcaaccacaaacatgacttttctctttaaaacagggcacagkgggatttgaaaaccagatcaacaaatgcctggaactggctgaatacctctatgccaagattaaaaacagagaagaatttgagatggttttcaatggcgag

SEQ ID NO: 98547 - DNA, 201 bp, Homo sapiens
gtgaactcctccgggaaggtgagttgaaccactgcaaaagggctgactcacttccctactcggaatatagacatgctcagaatgctcctctagtgtcactycatgaatgccaccatcctactgttttaaatctttacttccaatcccatgttcttatgcttcaacccagagcttctggcaggtttagtttctggttctgac

SEQ ID NO: 98548 - DNA, 201 bp, Homo sapiens
aaaataattacaggatttagagaggattctgattcctagtacattactggaagtgcagcccaaggaatgggatgcaggtttaaagccgtgtcgtagggccrggcgcagtggctcgcacctgtaatcccagcactttgggaggccgagacaggtggatcacctgaggtcaggagtttgagaccagcctgaccaacatggcga

SEQ ID NO: 98549 - DNA, 201 bp, Homo sapiens
atattagcaaattaattgttttaacataaattataatgcagtgtaagtgtgctattcataaaataattacaggatttagagaggattctgattcctagtayattactggaagtgcagcccaaggaatgggatgcaggtttaaagccgtgtcgtagggccgggcgcagtggctcgcacctgtaatcccagcactttgggagg

SEQ ID NO: 98550 - DNA, 201 bp, Homo sapiens
tctagctacacatacctgtgcgcacatgcacgcacacatacacatacacactctctcactgggccccataagcctttgagtttggcagcaggggtgaggarcctgcagcaggagctcccctcagctcagaggtggagtcatgatttttctccccttgcggctggccagtgtgctagcacccaaccaaacacaactgcagct

SEQ ID NO: 98551 - DNA, 201 bp, Homo sapiens
caatacagtatgaccctgtctcaaaaacaaacaaacaaatgaaaaagagcccctccgtctatgcatatgcaattccatgccatagcttggtgaacagagartgtgctgggcttcagctcccacgtgccctgttggccataggtgtttatgccatacacagctcaaagccccacttggcaacaactggctggagccaggtgc

SEQ ID NO: 98552 - DNA, 201 bp, Homo sapiens
tgcaccttctcgaagtctcatgtgcttctttcagggccaactcagtcacctggaaccctcacaagatgatgggcgtgctgttgcagtgctctgccattctygtcaaggaaaaggtctgtactccctccaaagctacactggggcccgtacgttctttagaaagcacaaaaagacacacgtggggtctctttgcagtacttg

SEQ ID NO: 98553 - DNA, 201 bp, Homo sapiens
gccttcacccaactccgaccccacctccggagctgccgggcgggggtcgcttacgggcccggaggggcgccgggtgccccgcctctcagagacaccgttcyatatttgaagccaggagcaggaagggagtatgatgggggcttagagtatatgcctgtcggctcacagatttggctcctagctcctttcaggaagtagctt

SEQ ID NO: 98554 - DNA, 201 bp, Homo sapiens
ttaaatgtcactgctcccctcttcctctcctttctctgtccccacaggctgcctggggaggtgggctgctcatgtccaggaagcaccgccataaactcaayggcatagaaaggtaacggccagaactcgccaggcctccttccacccagcacatcaaacagaccatgctctgatgtcagcctgcaccaccctgccctgatc

SEQ ID NO: 98555 - DNA, 201 bp, Homo sapiens
ctggccagtgtgctagcacccaaccaaacacaactgcagctttgcctctcctctgctttcctctttgcctctaagaatgtagagctctgtgaccagttacycacaggcttaaactaggtcctcgaagctggggtgtagagcaagagggagtacactcggcttcattctctgggaccccttcttacaggaccccttgctagc

SEQ ID NO: 98556 - DNA, 201 bp, Homo sapiens
tacagggagtgcttattgatgcgcttttatggcactttatatttgagaaaataagtatcctcatcaatgaagtggggattattaccggaaagcccctttakacgctggcattggctcccgggcaggaggtctcgtgttaagtcctcaggtctcattccaatttcctttgcagctccctcttcccgccacccaggagggata

SEQ ID NO: 98557 - DNA, 201 bp, Homo sapiens
gctgggcttcagctcccacgtgccctgttggccataggtgtttatgccatacacagctcaaagccccacttggcaacaactggctggagccaggtgctttstagctacacatacctgtgcgcacatgcacgcacacatacacatacacactctctcactgggccccataagcctttgagtttggcagcaggggtgaggaac

SEQ ID NO: 98558 - DNA, 201 bp, Homo sapiens; identical to SEQ ID NO: 15111

SEQ ID NO: 98559 - DNA, 201 bp, Homo sapiens
ggtggcagtgagccgagatcgcgccactgcactctagcactccagcctaggtgacagagcaagacaccatctcaaaaaaaaaaacaaacaacaacaacaamaacaaaaaaaaacacagtcacagtaaatgtgagccatggaatatctggcaaaaacacaagacggttctgggtgtcaacaagagtagagacataggggagt

SEQ ID NO: 98560 - DNA, 201 bp, Homo sapiens
caagtgtgtctcacaccccttcctcttccagcagcagctacctggcaactgaacccatcatcaccacagccactcctgcagctgccacggtttctgccacytctaagatgtgccctggtaactggctttgggcttctatgacttttatggcccgcttctcccggagtagctcaaggtctcctgttcgaactcgagggaccc

SEQ ID NO: 98561 - DNA, 201 bp, Homo sapiens
tggctctccacgctggggagaggcgcccagctaggggcgacgggggagggaggggaccgggaagcgggcacccgagcccagcgagccagcctctctctccmgggcgccctccctccgcgcgcggggcccggctgccaggctggcgaggactggggcgacagccatggacctgttacaaaggcgaccgcaggcggagggagg

SEQ ID NO: 98562 - DNA, 201 bp, Homo sapiens
atctgcctgacattcatttcccctctgcagcatccatggctacatggccatctcctctttctgcctgaataccccagggacaggaaaaccactctctctcsaggttctccaccctttcctcagctagactccaccattagaatgtacttccttgtatgaaattgaaatcagctggccaggcacagtggctcacgcctataa

SEQ ID NO: 98563 - DNA, 201 bp, Homo sapiens
tggccaggctgattttgaactcctggcctcaagtgatccacctgcttcagcctcccaaagtgctgggattacaagcatgagccaccgtgcctggcctacarggatttttttcacacacattatctctcttaatcttcacaacagccctgtgagataggtatcactctccctgggttacagatgaggagactgaagctcaga

SEQ ID NO: 98564 - DNA, 201 bp, Homo sapiens
ctgtaaccatgccgacgaggtctggccaggcctctatctcggagaccagtatgtatcgggcagactgggcccacggtagagcgtgtgtgtgtttgtgtgtrtaagaaaggagaagggtggcagacaggtatgcagtggtgtcattggttcctggttgaagattgaggggatagggcacatgggccaagagtagaggctgca

SEQ ID NO: 98565 - DNA, 201 bp, Homo sapiens
ctggagtgcagtgacgtgatctcagctcactgtaacctccgcctcccaggttcaagcgattctcctgcctcagcctcccaagtagctgagattacaggtgyccgccaccacatccagctaatttttgtatttttaatagagacatggtttcaccatgttggccaggctggtcctgaactcctgacctcaggtgatccaccc

SEQ ID NO: 98566 - DNA, 201 bp, Homo sapiens
tcctggcctcaagtgatccacctgcttcagcctcccaaagtgctgggattacaagcatgagccaccgtgcctggcctacaaggatttttttcacacacatyatctctcttaatcttcacaacagccctgtgagataggtatcactctccctgggttacagatgaggagactgaagctcagagaagttgtgcctggccaagg

SEQ ID NO: 98567 - DNA, 201 bp, Homo sapiens
ttttagtagagatggggtttcaccatgttggccaggctggtctcgaactcctgacctcaggcaatcttcccccttcggcctccaaaagtgctggaattacygccgtgagccaccatgcccggccccatgtcaccctttccccagcctcctccaagctgccacaagcagtctcaaagctctctctgtgtctctcctctcagg

SEQ ID NO: 98568 - DNA, 201 bp, Homo sapiens
tcgccagcctttgacatgagcatccacttccagacggctgccgacttcatccaccgggcgctgagccagccaggaggtaggaggggaatgctgggagcagraaagaacagggtgcctggaatttggggaagtccaagggtctgagagtggagtgagattttagtgacatgacaaaatgctcaggatcttgttaagaaagaa

SEQ ID NO: 98569 - DNA, 201 bp, Homo sapiens
tgggcatcacgcacgtcctcaatgcctcacacagccggtggcgaggcacgcccgaggcctatgaggggctgggcatccgctacctgggtgttgaggcccaygactcgccagcctttgacatgagcatccacttccagacggctgccgacttcatccaccgggcgctgagccagccaggaggtaggaggggaatgctgggag

SEQ ID NO: 98570 - DNA, 201 bp, Homo sapiens
atgcgtgctggcagtgggggtggggtgatgaagctgaaacctagcagctgggcagctccctctccccgtaaacaaggacatgtgactctcccacctcgttkcgtggcagagccaaagagctgagcaaaaggagctgctgcagcttgaagaaaaagccacccctgaaggctcctgccagagccaggcttaccttctctccct

SEQ ID NO: 98571 - DNA, 201 bp, Homo sapiens
cgggccttcgccttttcagctggctctccacgctggggagaggcgcccagctaggggcgacgggggagggaggggaccgggaagcgggcacccgagcccakcgagccagcctctctctcccgggcgccctccctccgcgcgcggggcccggctgccaggctggcgaggactggggcgacagccatggacctgttacaaagg

SEQ ID NO: 98572 - DNA, 201 bp, Homo sapiens
tagggcacatgggccaagagtagaggctgcaggtttgggagagtttggccaggattattgaaatgcccaactctggccagtcacagtgtctcttgcctgtratcccagcagtttgaaaggctgaggcaggagtatctagagtacaggagttctagaccagcctgagcaacaaaaccagaccccatctctacttattatttt

SEQ ID NO: 98573 - DNA, 201 bp, Homo sapiens
acatgtgtcatggcctcagctgctgttgtctccctgctaattctctttggatgggtctaaaggtacccccaaccccatcccagctccctaggctctctgcygatagccccaggcagatgagactcagattccagctggcaagatccccagcagtggggacaaccacccaagtgccgtgtgtgtgtgtgtgtgtgtgtgtgt

SEQ ID NO: 98574 - DNA, 201 bp, Homo sapiens
ggcagtgagccgagatcgcgccactgcactctagcactccagcctaggtgacagagcaagacaccatctcaaaaaaaaaaacaaacaacaacaacaacaamaaaaaaaaacacagtcacagtaaatgtgagccatggaatatctggcaaaaacacaagacggttctgggtgtcaacaagagtagagacataggggagttag

SEQ ID NO: 98575 - DNA, 201 bp, Homo sapiens
agtaaatgtgagccatggaatatctggcaaaaacacaagacggttctgggtgtcaacaagagtagagacataggggagttaggtgtggaagtggatgtcasaaccatactatctcagagtgagcaggaccgatgaaatgagcagaacaatctgcctgacattcatttcccctctgcagcatccatggctacatggccatct

SEQ ID NO: 98576 - DNA, 201 bp, Homo sapiens
aatgcccagggctgtatccctggacagaaaggggcttctgcatcccccgggaaaaacagccccacggagatccttcttagacctgggctccttcacgcttyccccatcccattcatcatctcgtagacagcagactctctaagaggaaaggttgtattgcaatacagtaatggggtctttaggcctgggtgcaaaggtaga

SEQ ID NO: 98577 - DNA, 201 bp, Homo sapiens
atgtcaccagcgcacacgctgatttgaaccctgcttcgacgtgtgtgtcatggcttaaaaatagctgctaatctgtcaacctgtcttgggcagaaacagcsgcggcgacagcagcaggagcgtcatggccgtggcgctgtctgcgccggcgatccgcctttcggactgaggcccagcgcagcgcttgcaaagaggtagagg

SEQ ID NO: 98578 - DNA, 201 bp, Homo sapiens
ggtttcacttttgttgcctgggtggagtgcaatgacacgatcttggctcactgcagcctcagcctcctgagtagctgagattacaggcatgggccaccacrcccagttgatttttgtatttttagtagagatggggtttcaccatgttggccaggctggtctcgaactcctgacctcaggcaatcttcccccttcggcctc

SEQ ID NO: 98579 - DNA, 201 bp, Homo sapiens
atatgtgatcgactttttcttttttgtttttttgagatggagtctttctctgtcacccaggctggagtgcagtgacgtgatctcagctcactgtaacctcygcctcccaggttcaagcgattctcctgcctcagcctcccaagtagctgagattacaggtgtccgccaccacatccagctaatttttgtatttttaataga

SEQ ID NO: 98580 - DNA, 201 bp, Homo sapiens; identical to SEQ ID NO: 15120

SEQ ID NO: 98581 - DNA, 201 bp, Homo sapiens
cacatatactatttaacaatagttaaatagtatattaactatatactatttaacaatagttaaatagtatattaactatatactattctttttcttcttayatgatttttgcttcttaaaaatctcacattttaatcagaactctcatttttgttttctaggagcacagggatcagttgtccttgtttttttttggtcttt

SEQ ID NO: 98582 - DNA, 201 bp, Homo sapiens
gtaagaataagactgaaaattcaggtttatcacatcatggaacttatattctagtgagagaagatggatataaaaattgaatatcaattagcaataaatgsttggaagaaaaataaagcagaataagaggatgtaaagtgttaggaggatgagagctcctttcttgaatacagtagactaggaatgggcctctataagaag

SEQ ID NO: 98583 - DNA, 201 bp, Homo sapiens
tacaggtatacagtggtatacctgatttatatttattaaattattttgtattatatatcaaattatatatacatttatcaaagtattataaatatttatayttatataaatacaggtaaatatttatatgtatataaatacaggtaaatatatttatataaatacaggtaaatatatttatgtaaatataggtaaatattt

SEQ ID NO: 98584 - DNA, 201 bp, Homo sapiens
ttacccttttcttaatttttaatttttgtgggtacatagtaggtatatttatgggttacgtgagatattttgatacaggcatgcaatgcataatgatcacrttagactgaatgaagtatccgtcttctcaagcatttatcctttttgttacaaacaatccagttatactctttatttttaaatatacaattaaattttttt

SEQ ID NO: 98585 - DNA, 201 bp, Homo sapiens
gatattgtaaatagtgctgcaataaacataggagtgaagatatctccttgatatatgatttcctttcttttgagtgtatacctaggagtgggatatgttayaataatttttaatagataatatattcatgtggtataaaattgaaaatatgaggttataaagtgaaaaatcttagccctcttttccagttacccattttct

SEQ ID NO: 98586 - DNA, 201 bp, Homo sapiens
acgggaatcagtgaggagaatcctaagggtcagagacttgcttggcatcttaatcgttaaaaataatttactcagactaggcaatatatccacaaaaaaawttttaaaaattagctggaggtggtggctcacgcctttagtcccagctactcgggaggctgaggtaggaggattgcttgagccactgcgttccaggctgcg

SEQ ID NO: 98587 - DNA, 201 bp, Homo sapiens
gggtggctcacgaggtcaggagttccagacgagcctggccaagatggtgaaaccccatctctactaaaaatacaaaaattagccaaatgtggtggcgcacrcctgtagtcccagctatttgggaggctgaggaaggagaatcacttgaacccgagaggcagaggttgcggtgagccgagatcgtgccattgcactccagcc

SEQ ID NO: 98588 - DNA, 201 bp, Homo sapiens
gcactggattataatagagtctagttctgttcatgcctcaattaacattctttttatttgataacgtcactgtgtttggtgttgaagatacaaaggtttcraattgttggagtttatgataaaagagtaacatttaacaagggaggatcatttaaaccttagaaagtcagggcctggagcagtggctcaagcctgtaacgc

SEQ ID NO: 98589 - DNA, 201 bp, Homo sapiens
gaaactgttaaaatagtgagaaatatagcatggagcgtaggacttttgatattccacagtctatagattaaattttgggtacgttcattttcttttgaaasaaaacctatcagttcatttttttgtgtactcaatgaaataatacagctttggtgttacagatttgtgtgttttataggaggattatgggatttatgaaaa

SEQ ID NO: 98590 - DNA, 201 bp, Homo sapiens
attttgttttactgtgcagatacattttaaacttttatgaattttaagttgaaaaactaatacatgaacatattcttattgcaaaaattcaaaccttataygtaaagctgaaggcccccaatgacttccattcctagactcagtcccttttgcagagattctgtgaggagtttggtatatatagtattttcaagatctctc

SEQ ID NO: 98591 - DNA, 201 bp, Homo sapiens
tttaggcaattcatgatttttttttttttttttttttttgaacagagtctcactctgttggccaggctggagtgtagtggcatgatgactgctcgctgcarcctcaacttcctgggctcaaatgatcctcccaccgcagcctcccaagtagctgggaccacaggcctgggtcatcacacccagctaattgtcatttttttt

SEQ ID NO: 98592 - DNA, 201 bp, Homo sapiens
tgctataaaatccagaaaagatacatttagaatggctgcttctctcctgtttttaatatatcctgaaaatttacccgttttagcactccccttttttttaygttaacgagttgggacagaattatttctgtaacaaattacatggttctgtgtcttaaacaagagttcattgtacattgtttgactatttctttatgattc

SEQ ID NO: 98593 - DNA, 201 bp, Homo sapiens
ttccaaataactttaaaatataataaagttaccatatgcctacttataaatgccatgtccgctactatatattttaataattagttgcctatatttttgtyctgtttttcatttagtcatgttattttaggattaatatggaaaatagtttatgtatgaaactacaaggataaatttttttacacatgaactggttacctc

SEQ ID NO: 98594 - DNA, 201 bp, Homo sapiens
aaatgcaaaaactaaaataaaaatcacctataactcatttacttagagatagactcaatattttcatttatttcctattttgttttactgtgcagatacaktttaaacttttatgaattttaagttgaaaaactaatacatgaacatattcttattgcaaaaattcaaaccttatacgtaaagctgaaggcccccaatgac

SEQ ID NO: 98595 - DNA, 201 bp, Homo sapiens
cgttccaggctgcggtgagctgtgatcttaccactgtgctccagcctgagcggcatagcgagaccctgtctctaaaaatagaaataatttactttgtattytttctagattagaaactcggtgctatgctgacttcctcataatgtgtgaaacttccaaataactttaaaatataataaagttaccatatgcctacttata

SEQ ID NO: 98596 - DNA, 201 bp, Homo sapiens
gccttttattttctttttcttttttttggagaggtagtcttgctctgtcgcccaggctggagtgcagtggcgcgatcttggcccactgcaagctctgcctyccgggttcacacctttctcctgcctcagcctcctgagtagctgggactacaggcgcctgccaccacacccggctaatttttttgtatttttaggggagac

SEQ ID NO: 98597 - DNA, 201 bp, Homo sapiens
tctaatttttgtattttttgtggagacagggttttgccatgttgcccaggctggtctcgaacagctggacttaagcaatctgcctgcttcagccccccaargggccgggattacaggtgtgagccactgctcccagcctcctaagctctttacatgttaaacagcagcactagttgagtacctcttacccaaaatgctttg

SEQ ID NO: 98598 - DNA, 201 bp, Homo sapiens
atatgtatatatctttgaaaactgggggtaaatcttttttcttttttgtttttggttttggtaaatttattattataagaacttagatcaggcggagtgcrgtggctcacgcctgtaatcccgacactttgggaggccgaggtgggtggatcacctgaggtcggagcttgagaccagcctgaggaacatgaagaaaccctg

SEQ ID NO: 98599 - DNA, 201 bp, Homo sapiens
cattaaccatcctcacttccagtccccattaccctctcaagtgtctagtaacagtctctctactctcttatctccaagagttcaattgtttaaatttttakctcccacaaataagtgagaacatgtgaagtttgtccttctgtgcctggcttattttacttactataatgaccttccagttccatccatgttgttacaaat

SEQ ID NO: 98600 - DNA, 201 bp, Homo sapiens
gagcgaaactccatctcaaaaaattaaaaataaaaataaaaatatgaatgattccttaactcgttttaaaaatgaacgaagcatattcgtgtgtgtgtgtrtatatactaagctcttgttaattattgtatacattttagcttataattaaaccattgaatcatggttatatggtgaaaagtaatattaagccattatgtg

SEQ ID NO: 98601 - DNA, 201 bp, Homo sapiens
gcctgggctacagagcaagactccatctcagaaacaaacaaataaaacaacttataattacctcttcattgtaaaaaaagaaaaagaaaaaaagaaagaaracacagataagacacacacacaaaaatcccattcccagagcatctttctgtgcattaaaaatgtttgtagagtgtcgttctatagtcaacttttggctat

SEQ ID NO: 98602 - DNA, 201 bp, Homo sapiens
atgagggacggaattgttgaaggaaggggaacaaataattgatttttttgttgttgtttttgagacaaggtcttgctctgtcacccaggcgagtgcagtgktgcaatcatggctcaccacagcctcgacctccctggctcaagcaatcctctacacctcagcctttcaagtagatgggactacaggtgtgtgccaccacac

SEQ ID NO: 98603 - DNA, 201 bp, Homo sapiens
gttgaagatacaaaggtttcgaattgttggagtttatgataaaagagtaacatttaacaagggaggatcatttaaaccttagaaagtcagggcctggagcrgtggctcaagcctgtaacgccagcactttgggaggccgaggcaggcggatcaccaggtcaggagatcgagaccatcctagctaacacggtgaaaccccat

SEQ ID NO: 98604 - DNA, 201 bp, Homo sapiens
gcttactgaaatttgattatataacacttataaacaccaatcttttatattaaaatgattattttaaaaacatgaatgatggccgggggtggtggctcacrcctgaaatcccagcactttgggaggccgaggcgggtggatcacctgaggtcgggagttccagaccagcctgaccaacatggagaaaccccgtctctccgt

SEQ ID NO: 98605 - DNA, 201 bp, Homo sapiens
tatgagggacggaattgttgaaggaaggggaacaaataattgatttttttgttgttgtttttgagacaaggtcttgctctgtcacccaggcgagtgcagtkttgcaatcatggctcaccacagcctcgacctccctggctcaagcaatcctctacacctcagcctttcaagtagatgggactacaggtgtgtgccaccaca

SEQ ID NO: 98606 - DNA, 201 bp, Homo sapiens
ttctttatgattcagaattattgatgctctgagatcctatagggtcttgtagtaggattctgcgcatttgaattgttggtttcctttttaaggcttttctmggcagtcagttgtcaggagtgctcctgctgtcaggagtgtataagtatgtaaacttcttaggttagaaaaatttggactttctggcccaattatctttct

SEQ ID NO: 98607 - DNA, 201 bp, Homo sapiens
aaatttatttgtaacctccaaatgctaaggatttccaattccaactacaaaaaaaattatgaccaggcctgttgtcagtaatgcctgtttttaaaatcctrtcttatgggtataggtttgttctgttcggtagccttgaaatctcttgttctgtgaggaatttaatctgtcagtaccatgtggattattctgtcatttccc

SEQ ID NO: 98608 - DNA, 201 bp, Homo sapiens
tttgttgatgtgaagaccatttggaaaatggtctataagcatatttaatgtggaaataatttaatatttttcatccttcacttttgacatttagtgaaatkttgtttaaaattctacatgatttgttcttaatattctaacccaagattggaaaacaaattcctccttttgcggtaagtgatgctatggcagaggttaagt

SEQ ID NO: 98609 - DNA, 201 bp, Homo sapiens
gatttcagtgagaaactagatgtttacagagtatttctccgtaaattacttaattacaaagaataaaatgcagtcagttctcactattcatagattctgtmtttgtgaattcaccttctcactaaaatttatttgtaacctccaaatgctaaggatttccaattccaactacaaaaaaaattatgaccaggcctgttgtca

SEQ ID NO: 98610 - DNA, 201 bp, Homo sapiens
tactctttaggaggaagatgatgatttcggggctcagtatgcctgaaggggaagtatgctaatttggttcttggttagtctttttttttttttttttttttgagacggagtctcgctctgtcgcctaggctggaatgcagtggcgcgatcttggctcactgcaacctccgcctcctgggttcaagtgattcttctgcctca

SEQ ID NO: 98611 - DNA, 201 bp, Homo sapiens
ctgtctaatttttgtattttttgtggagacagggttttgccatgttgcccaggctggtctcgaacagctggacttaagcaatctgcctgcttcagcccccmaaagggccgggattacaggtgtgagccactgctcccagcctcctaagctctttacatgttaaacagcagcactagttgagtacctcttacccaaaatgct

SEQ ID NO: 98612 - DNA, 201 bp, Homo sapiens
attattcttcccaagtcatctagaaaatcttcatcatttattctctacttgacaactaattttttttttttttaatattttagtctttaaggacacttgtrttaggatctgttgcctccttataaaagttaagtggccaggcacggtggctgacacctgtaatcccagcactttgtgagactgaagcaggaggatcgcttg

SEQ ID NO: 98613 - DNA, 201 bp, Homo sapiens
ttacatggtttaccatagaacttttctttttaaaaagttatttattttaaacaagatttaattggtgaccttgtcccaagattgaaatcttttttataaamtgttcttccgcaaagttcttttttgccaaccacataactagaaagggaaattgacttacattacaagtaggttctgaagtaaagttacacataataaaca

SEQ ID NO: 98614 - DNA, 201 bp, Homo sapiens
tgtctaaaaattgttgatcaaaacctttttgtttttattaaagttaagaaagaagaaaagaaaaggcataaatcatcatcatcttcctcctcctcatctaktgactcagatagctcaagtgattctcagtcctcttctgattcctctgattccgaaagtgctactgaagagaaatcaaagaaaagaaaaaagaaacatcgg

SEQ ID NO: 98615 - DNA, 201 bp, Homo sapiens
ccttggtcaagtacaagtaacttcagccagattttcatgtatcttgggtttagtatattcctgtaaattatcagttacaaatttcaaggatgattcaggcrcagcagcacatgtgcctgtagtcctagctactcaggagactgagagaaagaggattactagagcccaggagtttgaggccagcctgtgcaacatagcaag

SEQ ID NO: 98616 - DNA, 201 bp, Homo sapiens
cccaggctggattgcagtggtgcaatcttggcttactgcaatctccacctttggggttcaagcgattctcgtacctcagcctccctagtagctgggattaygcgtgtgcaccaccacacttggctaatttttgtatttttagtagagacagttttgccatgttggccaggctggtctcgaactcctgacctcaaccgatcc

SEQ ID NO: 98617 - DNA, 201 bp, Homo sapiens
cctcccagttcaagagattctctgcctcagcctcccgagtagctgggattacaggtaccctctaccatactcagctaatttttgtatttttagtagagackggttcaccatgtgggccaggctggtctcgaactcctgacttcaggtgttctgcctgctttggccttccaaagtgctgggattataggcgtgagccaccac

SEQ ID NO: 98618 - DNA, 201 bp, Homo sapiens
tattttacatttattttgctttcatactactttgatttcctttctattaaatgtcctatttttttatctctataggtgaaaaggggaccgggaaatcaacwcagaaaccattacattataagagttgtctctttcacagagttgtcaaggattttatggttcaaggtggtgacttcagtgaaggtgagacttggaaaaatc

SEQ ID NO: 98619 - DNA, 201 bp, Homo sapiens
agaaagaaaagaaaaagcgaaagaaaagcaagaagaggtcttaattttacttttctaatgctagctttatattctgatttcctttctgtaaatctgttagrattttgggtcaattatatgaaactgttaaaatagtgagaaatatagcatggagcgtaggacttttgatattccacagtctatagattaaattttgggtac

SEQ ID NO: 98620 - DNA, 201 bp, Homo sapiens
ttaattgggaacagtcaaaaagcattgtaacactgtggtatttatcatcattatatttaaaaccttgtatgagagatttacacctgttttttttaacttcytgaaagaaaacaaaaagacttctgaagaaatctgacagtcttggtccatctatatgtgttcttggggagtctgggcaatcaatcttcctgggcctttctc

SEQ ID NO: 98621 - DNA, 201 bp, Homo sapiens
ctttggattaatagataaaactttgaccagtgaattctggagatctggactctaatcctgagtcttgactcctttcctgtacttcccagttcacatagctkgatgatctaagtgctaaatactgaacttagtgagaatctgcagaaaatttaaatctccttccacaaagtttgtctaaaaattgttgatcaaaaccttttt

SEQ ID NO: 98622 - DNA, 201 bp, Homo sapiens
ttatgactattcagtaagaactcaagtgcaagaaacatgaatggttagaaataacactgaaatgtctattttagttacataaaagttttcagcagtaagtrgatattgcttttataattagaacaagtttgataaatacattatgtggaaagcattttgccttctgttctacttaagattgaggtaatatgattatattaa

SEQ ID NO: 98623 - DNA, 201 bp, Homo sapiens
aattggtgaccttgtcccaagattgaaatcttttttataaaatgttcttccgcaaagttcttttttgccaaccacataactagaaagggaaattgacttamattacaagtaggttctgaagtaaagttacacataataaacactaatacaaaaaagagatgttaagcagcattccaagccaataacaagatactctttaac

SEQ ID NO: 98624 - DNA, 201 bp, Homo sapiens
tctttatgattcagaattattgatgctctgagatcctatagggtcttgtagtaggattctgcgcatttgaattgttggtttcctttttaaggcttttctakgcagtcagttgtcaggagtgctcctgctgtcaggagtgtataagtatgtaaacttcttaggttagaaaaatttggactttctggcccaattatctttctg

SEQ ID NO: 98625 - DNA, 201 bp, Homo sapiens
cctattttttaaagttctttggattaatagataaaactttgaccagtgaattctggagatctggactctaatcctgagtcttgactcctttcctgtacttsccagttcacatagctggatgatctaagtgctaaatactgaacttagtgagaatctgcagaaaatttaaatctccttccacaaagtttgtctaaaaattgt

SEQ ID NO: 98626 - DNA, 201 bp, Homo sapiens
cctgcactagttctgccaatcttgataataagagggaaagtggaaaactacaagattagaacatgggactcttcattgttattctgtgcttttaaaaaaawttcttattcagatgtttgttaacattagtttagcattttagactcacctattttttaaagttctttggattaatagataaaactttgaccagtgaattct

SEQ ID NO: 98627 - DNA, 201 bp, Homo sapiens
gggcaggaaacggcatggctggtacatcaacagcatagaggcgctgtcatgatttccaggcacagcttgcgtatatcccaaacatctcacacttgataatrtacctgttccttagaaacataactgggtaaggaaggattatcttagttcagtgaagccattacatctacggtctcttcagcttttataccttgttcccat

SEQ ID NO: 98628 - DNA, 201 bp, Homo sapiens
ctatatttctaatattgtttcacagaattttttttccagaaatttgtgaaagatctttgctattttagtctgcttgtctgaaactgtattttactcacagmttaagtattggagccatgggaataaaggttcaacgtcctcgatgtttttttgacattgccattaacaatcaacctggtaagaatattagttgacatttat

SEQ ID NO: 98629 - DNA, 201 bp, Homo sapiens
tctctacgaaaaaaaaaattagccgggtgtggtgacaggtgcctgtaatcccagccactcaggaggctgaggcaggagaatcacttgaacccaggaggcgsaggttgcagtgagccaagatcgtgccaccgcactgtagcctgggtgacagagctagactctgtctcaaaaaaaaacctaaaaccaaacattagttgtaaa

SEQ ID NO: 98630 - DNA, 201 bp, Homo sapiens
tatttcatcacctaggtattaagtctaggacccattagttatttttcctgatcctctccctcctcccactgtctacactctgataggccccagtgtgtatygtgcccctctatgtcttcatgtgttctcatcatttagctcccacttataagtgagaacatgtggtacttggttttctgtttctgcattagtttgctaagg

SEQ ID NO: 98631 - DNA, 201 bp, Homo sapiens; identical to SEQ ID NO: 15124

SEQ ID NO: 98632 - DNA, 201 bp, Homo sapiens
gaccttgtcgttattgacattaatatcttttatgatttgctgcaatcttcgaatattgttaattcaaaattattcaaaaatctactttacaagaagtattktgtttaggtatcacctttgaggagcttactgagagttataagagtatgtttttcatttttaggaaatggacgaggaggggaatctatctatggaggattt

SEQ ID NO: 98633 - DNA, 201 bp, Homo sapiens
gcatgtaatcccagccactcgggaggctgaggcaggaaggtggaggttgcagtgagccagggtcgtgccactacactccagcctgggctacagagcaagaytccatctcagaaacaaacaaataaaacaacttataattacctcttcattgtaaaaaaagaaaaagaaaaaaagaaagaaaacacagataagacacacaca

SEQ ID NO: 98634 - DNA, 201 bp, Homo sapiens
aattacacatacaattcaggctgtatgcataaggtatgtttgaaatataaatgaattttgtgtttaaactgtgtcccatccccaggatatctcgtgtatgmtaatattccaaaattcaaaaaaaaaatctgaaacacttctggtcccaagcatttcctataaaggatattcaatctgtacatactgagttaaatagaatat

SEQ ID NO: 98635 - DNA, 201 bp, Homo sapiens
tcaaggataaaatatacactggatttccaaagacttgtacaaaaaaaaaaaactcagtaacatttttgtttagtatattttgaagtggtaatagtttggtygtacaagttgaacatcactaatctgaaaatctgaggtccaaaatgtaaactttctgagcatcacaattgaaaatttcacacataagtacttaatacaaac

SEQ ID NO: 98636 - DNA, 201 bp, Homo sapiens
gagctaaaatatttagagccgtataattgaaattacagtagccacaagccacatgtgctttttgagcacttgaaatgtggctagtctacattgagatatgyttcaaggataaaatatacactggatttccaaagacttgtacaaaaaaaaaaaactcagtaacatttttgtttagtatattttgaagtggtaatagtttgg

SEQ ID NO: 98637 - DNA, 201 bp, Homo sapiens
ggcttaattttcccctgaatcatgtttttggtatctcctagcattattttttctctttacttttacttgaaaaaaaatgaaaaattgaccagatgtttgtyttactgcatctggtttcagatgtcttttttctttttttttttttttttttgagatggagtctcgctctgtcacccaggctggagtgcagtggcgcgaact

SEQ ID NO: 98638 - DNA, 201 bp, Homo sapiens; identical to SEQ ID NO: 15132

SEQ ID NO: 98639 - DNA, 201 bp, Homo sapiens; identical to SEQ ID NO: 15128

SEQ ID NO: 98640 - DNA, 201 bp, Homo sapiens
gtaagggcttaattttcccctgaatcatgtttttggtatctcctagcattattttttctctttacttttacttgaaaaaaaatgaaaaattgaccagatgyttgtcttactgcatctggtttcagatgtcttttttctttttttttttttttttttgagatggagtctcgctctgtcacccaggctggagtgcagtggcgc

SEQ ID NO: 98641 - DNA, 201 bp, Homo sapiens
tacacacttctgtaccttgcttgtttgtttgtttgtttgtttgtttgtttgtttgaaatagaaacaaagttctccctatgtttcccagcctggtgtttcartccttctgcctcagccttcctaagtgctgggattataagcatgagccaccatgcctgggcaaccttttttttttttttgatacagggtcccactctgtcg

SEQ ID NO: 98642 - DNA, 201 bp, Homo sapiens
ggttgataaatagaaagttgattacataataatggttaaggcttaactttcaagtcttttctaattgcttcacaaaatgcaatctaatctctaaaaagaargcactaataatccatgtgatttacctcatagaaataaatatcaaaataaattcaaactatatttctaatattgtttcacagaattttttttccagaaatt

SEQ ID NO: 98643 - DNA, 201 bp, Homo sapiens
taagcattgctttaattattgttgaaccagagacaatttcacttttttgtgatattatgataggttgcttttgattatatgttgctaaaaagagcaccagsgtagccaactttatacctgaaggctttctgaatttagagtagttcctcataatagatttccaacagttgaattttactggttcaaagtataaacacttat

SEQ ID NO: 98644 - DNA, 201 bp, Homo sapiens
ctaatttatactcccaccaacagtataacagtgttcctatttctccacatcctctccagcatctgttgtttcctgactttttaatcaccattctaactggmgtgagatggtatctcattgtggttttgatttgcttttctctaatgaccagtgatgatgagcttttttcttttcatgtttgttggccacataaatgtcttc

SEQ ID NO: 98645 - DNA, 201 bp, Homo sapiens
gggaggcggttagcgggctttagcgccttttctggcggcggtagatttgaagcgcttcaaaggaccggacccagagaagaggaaaactctaccggtgcagrtaagtggtatgaggctcaagttgttctggcggcgtcatttcagcagtccctgcgtacgaaagcgggaagggcctgggaagaggggcggagccggcgcggc

SEQ ID NO: 98646 - DNA, 201 bp, Homo sapiens; identical to SEQ ID NO: 15127

SEQ ID NO: 98647 - DNA, 201 bp, Homo sapiens
ccaggctggagtgcagtgacgcaatctcagctcactgcaacctccgcctcccagttcaagagattctctgcctcagcctcccgagtagctgggattacagrtaccctctaccatactcagctaatttttgtatttttagtagagactggttcaccatgtgggccaggctggtctcgaactcctgacttcaggtgttctgcc

SEQ ID NO: 98648 - DNA, 201 bp, Homo sapiens
tttggtggagacaaggtctcgctatgttgcccaggcaggtctcaaattcctggttcaagcgatccttctaacttgacctcccaaagtgctgggattacagrtatgagctatggaatttggtttttaaccttaatattatactagtaagttaaatgactaattgataaggttacatcacaccatacccccaagtaaaggtca

SEQ ID NO: 98649 - DNA, 201 bp, Homo sapiens
cacctggctaatttttgtatttttggtggagacaaggtctcgctatgttgcccaggcaggtctcaaattcctggttcaagcgatccttctaacttgacctmccaaagtgctgggattacaggtatgagctatggaatttggtttttaaccttaatattatactagtaagttaaatgactaattgataaggttacatcacac

SEQ ID NO: 98650 - DNA, 201 bp, Homo sapiens
ctatccttatttacaaacaacaggtgtaatgtatgccttttttcttgaagattcagtaaaaaacaagatgttgagaatctttgagtaatattctacaaatscaattatttacattaaaaaatactaaaaataaaaaaaatctgtaatgatgtttgttactctaaaccctgaacctactgatgtttaaactttagagtgttt

SEQ ID NO: 98651 - DNA, 201 bp, Homo sapiens
attttgtaccccttactacctcctgaccctcaccccagtacttccctccctcccagcacccatgcgagtccctctatacttctgtacattaatttttcccyattttaattttctttagcgttatcgaactccttccagatccagatcaagggatcgtttcagacgtagtgagactcctccacattggaggcaagagatgca

SEQ ID NO: 98652 - DNA, 201 bp, Homo sapiens
ctctcttatttccttgagcagtggtttgtagttctccttgaagaggtccttcacatcccgtgtaagttgtgttcctaggttttttattctctttgtagcarttgagaatgggagttcactcatgatttgactctctgtctgttattggtgtataggaatgcttgtgatttttgcacattgattttgtatccggagactttg

SEQ ID NO: 98653 - DNA, 201 bp, Homo sapiens
ctttttatattttttttattttgtaccccttactacctcctgaccctcaccccagtacttccctccctcccagcacccatgcgagtccctctatacttctrtacattaatttttccccattttaattttctttagcgttatcgaactccttccagatccagatcaagggatcgtttcagacgtagtgagactcctccacat

SEQ ID NO: 98654 - DNA, 201 bp, Homo sapiens
gtgatgatgagcttttttcttttcatgtttgttggccacataaatgtcttcttttgagaagtgtctgttcgtatcctttgcccgctttttgatggggtggkttgtttttttcttgtaaatttgtttaagttctttatagattctggatattagccctttgtcagatggatagatagcaaaaatgttctcccattctatagg

SEQ ID NO: 98655 - DNA, 201 bp, Homo sapiens
ggatatatacccagtagtgggatttctggatcatatagaagttctatttttaattttattattatactttaagttctgggatacatgtgcagaacatgccrgtttattacataggtatacacatgccatggtgatttgctgaacccatcagcccgtcatctacattaggtatttctgctaatgctatccctcccctagacc

SEQ ID NO: 98656 - DNA, 201 bp, Homo sapiens
ttcatgttgctccagatgacaggctgaatagtattccattgtgtatataaaccacatttttaaaaaatccgttcatctgttggtggaaacaggttgattcagtatcttagctattgtgaataatgcagcagtgaacatgagagtgagatatctcttcaacacactgatctcatttcctttggatatatacccagtagtggg

SEQ ID NO: 98657 - DNA, 201 bp, Homo sapiens
ttcaaggataaaatatacactggatttccaaagacttgtacaaaaaaaaaaaactcagtaacatttttgtttagtatattttgaagtggtaatagtttggwtgtacaagttgaacatcactaatctgaaaatctgaggtccaaaatgtaaactttctgagcatcacaattgaaaatttcacacataagtacttaatacaaa

SEQ ID NO: 98658 - DNA, 201 bp, Homo sapiens
gctcactgcaacctccgtctcccgggttgaagcaattctcctgccttagcctcccaagtagctgggactacaagcgcccaccaccacacccagctaacttytgtatttttagtggagatggggtttcaccatattggccaggctggtctcgaactcctgactttgtgatccgcctgccttggccccccaaagtgctgggat

SEQ ID NO: 98659 - DNA, 201 bp, Homo sapiens
ccatagctgatttgttataaagaaacaaaatgggtgttcttctgtttccttttgattatgtttactgtaattatttcattttggatttatacatttacaaytgaataaggattataggttgataagctgtttattgtgaaaagatgtgttttgttacaaatacttgttttaaaaattaataagcccccaggaagtacagca

SEQ ID NO: 98660 - DNA, 201 bp, Homo sapiens
atttattgcctcacataattacccctttttgtggtgagaagaacacttaaaatcttagtggttttgggttttttttttgttgtttgtttgtttgttttgaracagagtctcactctgtcacccaggctggagtgcagtggcatgatcttggctcactgcaacctccgtctcccgggttgaagcaattctcctgccttagcc

SEQ ID NO: 98661 - DNA, 201 bp, Homo sapiens
aaaaaatatataattgaagatttaaattacatgcttacctgagtttctttcataagtctgctgtatacaacctaggaaatgcaaaaactaaaataaaaatyacctataactcatttacttagagatagactcaatattttcatttatttcctattttgttttactgtgcagatacattttaaacttttatgaattttaagt

SEQ ID NO: 98662 - DNA, 201 bp, Homo sapiens
acctgaaaatagattcctaatgagaaaaagtcctcctaaagctgatgagaaggaaaggaaaaacagagagagagaaagggaaagagagtggtatgtgaatrtgtatattttgccttacatggtttaccatagaacttttctttttaaaaagttatttattttaaacaagatttaattggtgaccttgtcccaagattgaaa

SEQ ID NO: 98663 - DNA, 201 bp, Homo sapiens
atatatgtttaacatatgtgattatatgttcattcacatgctctccaagtcctgtagaatatgagttccaggaaagcacactcatatatcttggctcactratgttctctcagtatgtaataagagtgtttggtcatcctaagggttgaataagtgaacatctacacatttactctgttttccccataatatgagaaatat

SEQ ID NO: 98664 - DNA, 201 bp, Homo sapiens
ggtctcaaaactcctgacctcaggtgatccacctgcctgagacagggtctcattttcacccaggctggagtgcagtggtacaatcaaggatcactgcagcytcaaccttccagtctcaagcaatcctcccacctcaccctcccaagtagctgggactacaggtgtgcatcaccacatctggctaatttttgtatttttttg

SEQ ID NO: 98665 - DNA, 201 bp, Homo sapiens
aatcatcatcatcttcctcctcctcatctagtgactcagatagctcaagtgattctcagtcctcttctgattcctctgattccgaaagtgctactgaagaraaatcaaagaaaagaaaaaagaaacatcggaaaaattcccgaaaacacaagaaagaaaagaaaaagcgaaagaaaagcaagaagaggtcttaattttact

SEQ ID NO: 98666 - DNA, 201 bp, Homo sapiens
accatgctatgaaaatagatctcaacaaacttattcttcctgtcttaactgaaactttgtaccctagttttaaaaatttaatacatttatttggttcgaarttcagaaagtataaaatgataatctgtgaaaatctctttccatgagtttccattctcacattttgtacattattccacgtgtgtgtgaatgttgatcttg

SEQ ID NO: 98667 - DNA, 201 bp, Homo sapiens
taacccatttatgccggaggttgcaagttttttgtgtgaaaaatcagatcttggcaatgaccttgagaagtaggatatacataactcccacaagcttagcrtaccaataatgaaactaagagatgagaggattgctatgttacatagtacacagaaacacaagaacagagttgtggcaacatggcggtaagtagttgtatg

SEQ ID NO: 98668 - DNA, 201 bp, Homo sapiens
cttggttttttttttttttttttttttttttgagacaggatcttgcaacgttgtccaactggactagaactcctgggctcatcaatccttacacataagcrtcctcagctgggatacaggtgtgagctaccacacctggcatagcttgctttaattttttatttactctattttagatttctccatgcatattacttttct

SEQ ID NO: 98669 - DNA, 201 bp, Homo sapiens
gtatgagagatttacacctgttttttttaacttcctgaaagaaaacaaaaagacttctgaagaaatctgacagtcttggtccatctatatgtgttcttggkgagtctgggcaatcaatcttcctgggcctttctctctttgcaattttgagattggagatccttctttttgtgactatttgagtgtgccagagaaaattca

SEQ ID NO: 98670 - DNA, 201 bp, Homo sapiens
aaagcagaataagaggatgtaaagtgttaggaggatgagagctcctttcttgaatacagtagactaggaatgggcctctataagaaggtgatacttgagcracaaagggatgaaccatgtgaagatggtttgagagcattccaggtggagagaacagcaaatgtaaaggacctgatgaaagagtaggctgttgggtggcag

SEQ ID NO: 98671 - DNA, 201 bp, Homo sapiens
gatctttagtttgaaaacacacacttgggcccctgttattccataatccttcagttaccattcagaacattggtcagagtagattttgtcatgcatcttayatataagcagagctatatcttacatccacttagtaagtttgatggccttcttaattaattgggaacagtcaaaaagcattgtaacactgtggtatttatc

SEQ ID NO: 98672 - DNA, 201 bp, Homo sapiens
tcaagattcttggcctgtaatgccaagttgcttatcaaaactgctggtgccttttatgtttttttttgttatttcactttttgtgaattctctgctcatayacccttaggtgtcctttgagctttaatttgatagacggacagtgaaaggttttggttgtcacagtgactgatatttaatagggcaagggttgcttaaggt

SEQ ID NO: 98673 - DNA, 201 bp, Homo sapiens
acaggtatacagtggtatacctgatttatatttattaaattattttgtattatatatcaaattatatatacatttatcaaagtattataaatatttatatktatataaatacaggtaaatatttatatgtatataaatacaggtaaatatatttatataaatacaggtaaatatatttatgtaaatataggtaaatattta

SEQ ID NO: 98674 - DNA, 201 bp, Homo sapiens
aattatgactattcagtaagaactcaagtgcaagaaacatgaatggttagaaataacactgaaatgtctattttagttacataaaagttttcagcagtaartagatattgcttttataattagaacaagtttgataaatacattatgtggaaagcattttgccttctgttctacttaagattgaggtaatatgattatatt

SEQ ID NO: 98675 - DNA, 201 bp, Homo sapiens
gtgagacaaaattagcttcaccaggcactaaggttacttacccttaagaaaggatatagggcaggaaacggcatggctggtacatcaacagcatagaggcrctgtcatgatttccaggcacagcttgcgtatatcccaaacatctcacacttgataatatacctgttccttagaaacataactgggtaaggaaggattatc

SEQ ID NO: 98676 - DNA, 201 bp, Homo sapiens
ttggccagggtggtcttgaactcctgacctcaggtaatctgcccaccttcgcctcccaaagtgctgagattacaggcgggagccaccacacccagcccacrtattctttatctggtaatctgttgatagatacttaagttacttccaaatcttggatattgtaaatagtgctgcaataaacataggagtgaagatatctcc

SEQ ID NO: 98677 - DNA, 201 bp, Homo sapiens
agatttgtgtgttttataggaggattatgggatttatgaaaattgcagaaaaccaccagttgtttttcctattttcagtagcagtcccctttgctcttacratagcataaggatagaaagcagataatgtcagtgtattttactttcttttccattttgcttgaaataatctgtgtttgtactaaaacttgtcttcatctg

SEQ ID NO: 98678 - DNA, 201 bp, Homo sapiens
aaagaaaaaaagaaagaaaacacagataagacacacacacaaaaatcccattcccagagcatctttctgtgcattaaaaatgtttgtagagtgtcgttctrtagtcaacttttggctataatataaatctctgcacatcactaaatattagctttttaatggctacatgttaatctcttgcttgaaagtactgtgcattat

SEQ ID NO: 98679 - DNA, 201 bp, Homo sapiens
ggcctcactccccatgaaacctaaagaaaattgaagacttgaaggctccaggagtcacctaatgcagcagtcccccaacagtgtctgcctttggagccacscaaccagcactaatatctctcctggtccatttttttttctgagacggagtcttactctgttgcctgggctggagtgttgtggcgcaatctcagctcactg

SEQ ID NO: 98680 - DNA, 201 bp, Homo sapiens
tcacccaggctggagtgcagtggcacaatctcggctcactgcaatctccacctcctgggtttaagagattctcctgtcccagcctcccaagtagctgggaktacaggtgcacatcactacgctcagctaatttttttgtattttttagtggagacggaatttcaccatgttgggctggctagtcttgaactcctgacctca

SEQ ID NO: 98681 - DNA, 201 bp, Homo sapiens
cattatacttaataataagcaaactgcgtaatctaaactaattaaccagaaatggcccaagttgaaagtgttattactctttgtaattctttttcatccaytatgattcttaacttgcattgtggtttttgcttttagtgctatttcattttaccttaacgatacttacatgccattaaaagaaacgctgaaatcaatttt

SEQ ID NO: 98682 - DNA, 201 bp, Homo sapiens
gtgttcgagaccagcctggccaacatggtgaaacccagtctctactaaaatacaaaaattagctgggtgtgcttgcgggcgcatgtaatcccagccactcrggaggctgaggcaggaaggtggaggttgcagtgagccagggtcgtgccactacactccagcctgggctacagagcaagactccatctcagaaacaaacaa

SEQ ID NO: 98683 - DNA, 201 bp, Homo sapiens
tttttttttttttttttttttgagacagagtctctgtcacccaggctggagtgcagtggcacaatctcggctcactgcaatctccacctcctgggtttaaragattctcctgtcccagcctcccaagtagctgggattacaggtgcacatcactacgctcagctaatttttttgtattttttagtggagacggaatttcac

SEQ ID NO: 98684 - DNA, 201 bp, Homo sapiens
aaactgctggtgccttttatgtttttttttgttatttcactttttgtgaattctctgctcatatacccttaggtgtcctttgagctttaatttgatagacrgacagtgaaaggttttggttgtcacagtgactgatatttaatagggcaagggttgcttaaggttctgcagtgagttggataaccctactcaatgaattgc

SEQ ID NO: 98685 - DNA, 201 bp, Homo sapiens
tgttttccatagtggttgcaccattctacattcccgttagcaatgtacaggagttatttatttttccacatccttgcccagcacacttatttgccacactrtgtgtatctgtaaattaccatgaaagcaccacaagctgtaattttttaattttgggattacaaataagttttagtgagcaggcagacttgcaaataaagt

SEQ ID NO: 98686 - DNA, 201 bp, Homo sapiens
agggtggagtgcaatggcacaatctcagctcactgcaacctctgcctcctgggctcaagtgattctcctgcctcagcctcccaagtaactggaattacagrcacccaccaccatgcccggctatttttttgtatttttagtagagatggggtttcaccacattggtcaggctggtcatgaactcctgacctcaggtgatct

SEQ ID NO: 98687 - DNA, 201 bp, Homo sapiens
caactaattttttgtatttttaggggagacggggtttcaccatgttagccaggatggtctcaatctcctggccttgtgatccgcacgcctcggcctcccaragtgctgggattataggcgtgagccaccgtgcctggctcagatttcttttttctaatagagatgcgttctcattatgttgaccaggctggtcttgaactc

SEQ ID NO: 98688 - DNA, 201 bp, Homo sapiens
agattttaatttttctggttaacaatttttctggttaacaattggttgagtttgtctgaagacctgggatcaatagaaatgtttaggttaagataaagggkttttttttgagacggagcttgactccatcacccaggctagagtgtggtggtgcgatcagctcactgcaacctccgcctcccaggttcaagcgattcttcc

SEQ ID NO: 98689 - DNA, 201 bp, Homo sapiens
tggtggtgcgatcagctcactgcaacctccgcctcccaggttcaagcgattcttccacctcagcttcccgagtagctggaattacaggcgcctacaaccaygcccagctgatttttgtatttttagtagagacagggttttaccatgttgcccaggctggtctcaaactcctgacctcaagtgatccacccacctgggcct

SEQ ID NO: 98690 - DNA, 201 bp, Homo sapiens
tagcctactacacacttaggcaatatgataatgccctatcactcctaggctacaaacctgcacagaatgttgctacactgaatactgtagatacttgtaaygcagtggtgtttgtgtatctaaacatagaaaacatacagcaaaaatactgtattctaatcttacaggactaccattgtatatgcatatatgtggtctgac

SEQ ID NO: 98691 - DNA, 201 bp, Homo sapiens; identical to SEQ ID NO: 15144

SEQ ID NO: 98692 - DNA, 201 bp, Homo sapiens
taacagagtacattttctagccatttcctgaaaccattctcagcttctacccagggtgtatcagtcaggactcatttgtttgcaagaaacataacacaaastggctccaacaaaaaagggaaggaattgcctcaaatcagaaaagtccaagtggtaactataggcatgtctggacccagtaattctaaaagtattgtcaga

SEQ ID NO: 98693 - DNA, 201 bp, Homo sapiens; identical to SEQ ID NO: 15149

SEQ ID NO: 98694 - DNA, 201 bp, Homo sapiens
aatgtaaatttcaagttttaagacctgaagggtcaatttccatgtgtgttccaaaacttttaaatgtcatttctatgggacagttggaacagtttcacttytaggtatttactgatttgaaaacttgtccacataaaaacagcacacacgtgttcataacaaggttataattggttaaaacttgaagcaacacacatttct

SEQ ID NO: 98695 - DNA, 201 bp, Homo sapiens; identical to SEQ ID NO: 15146

SEQ ID NO: 98696 - DNA, 201 bp, Homo sapiens
ttatatatgttagaattagaatgggtcccagtcagaagctacttggaatatataggaaatatatgacatgccgtgctgacttacagtgtgtatattttttrcagtacactcctgatcatgtagttggacctggagcagacattgatcccactcaaataacctttcccggatgcatttgtgtcaaaactccctgcctccctg

SEQ ID NO: 98697 - DNA, 201 bp, Homo sapiens
cactcctgagaagaaacgaactacaattcccatgaggcggtggggccacgggaccacaagtcccagcatccaccgcgcggcccaggactgtcagggtagtrggcgttgcgtgaggcgggtaaatgttcgcggaagcggcaaagacgacacggccttgtgggatggcggagtttaaggagaagcctgaggccccgactgagc

SEQ ID NO: 98698 - DNA, 201 bp, Homo sapiens
cagctcagagttttttttagtgtagggttttgcacttaactacatagctccacccgaggcctccacagggagtataactatctgctgttcaatacctttcyaaagcctggcctggagacaaaataataatggaggattgactggaagacgtggtgcaaacattccttcaggtgctttaaaatctatccccaatgaaaggcc

SEQ ID NO: 98699 - DNA, 201 bp, Homo sapiens
taccttacatggttttgtaattatctgtggtgcctctggctgaaatcaaaacgggagccagacccaaaaagtcaaggaagggaagcgccttccaggccackcctgagaagaaacgaactacaattcccatgaggcggtggggccacgggaccacaagtcccagcatccaccgcgcggcccaggactgtcagggtagtgggc

SEQ ID NO: 98700 - DNA, 201 bp, Homo sapiens; identical to SEQ ID NO: 15143

SEQ ID NO: 98701 - DNA, 201 bp, Homo sapiens
tagaaggaaaatgattggctcaccatttgattctgcagatacccttttctatgtccttttgcctttctatattgaacagcagagatattcccagaggacartcttccattcagagacaaggacacaaacagccccctccaactcagtgcctctgccagagacaactgactgaatatggacccctggaaattttttgtcctc

SEQ ID NO: 98702 - DNA, 201 bp, Homo sapiens; identical to SEQ ID NO: 15147

SEQ ID NO: 98703 - DNA, 201 bp, Homo sapiens
tatggcttagttttatacattttagggagacatgagacaacagtcaaatacatgtaaaacgtacattggttcagtccagaaagacaggacagttggaagcrgaggcttccagtttctgattaacagtttgcttgaaggaattgttattgtctaaaaacttaggaatgccttgggtaagataaagggttgtggagaccaggg

SEQ ID NO: 98704 - DNA, 201 bp, Homo sapiens
ttaggatattcctgctaagctaaagctgtaagaaacaacacaaacaaaagctatttcctctctccacccccaaatgactttttaagcagaatgttagcctwctcccacaggtcctcccactggttgtcctcctcatctttcacaagaggatgtcaatcctccccagctcagagttttttttagtgtagggttttgcactta

SEQ ID NO: 98705 - DNA, 201 bp, Homo sapiens
atacttgataactgaaagaagtctagtctggatcagctcttagcttttctccactcaaatggagaagtaatggaggaaaggtatacagtccgatggcttcstagacacaattttggtttgaatatgtttgaacctggaaagtttaactccagaacttattttcttcactaccctactatgcactacctgcaaaatttttat

SEQ ID NO: 98706 - DNA, 201 bp, Homo sapiens; identical to SEQ ID NO: 15148

SEQ ID NO: 98707 - DNA, 201 bp, Homo sapiens
gaacctgaaatgaccctgtggtagatgtttcaagtaccatattatgggtattaatgaatttatacatatcaaatgtttaaacaatatctgggccagatgtsgtcgcttatgcctgtaatctcagcactttgggaggtggagatgggtggatcacttgaggtcaggagtttgagaccagtatggtcaattcggtgaaacccc

SEQ ID NO: 98708 - DNA, 201 bp, Homo sapiens
cttgcatttgagccaccctctgggagaacaaacagctcccaggcagctctgtgacctgctgtgtggactgcaagcactattcccacagaaggggtacaccygaggcctctctgctggtaggctttggctcttgtcctataatctcaagtgaagctaatgccaagtgtggccagtgacagtcctgtgaacccgaatgtttag

SEQ ID NO: 98709 - DNA, 201 bp, Homo sapiens; identical to SEQ ID NO: 15145

SEQ ID NO: 98710 - DNA, 201 bp, Homo sapiens
tactattatatacattaagtattataatgcccaactcatccttatacatacctaaaataaaaccacaaattctaaaaattaatcttagctggacatggtgkttcccacttgtagctgtagcagctaaggaagctgaggcaggagaatcgcttgagcccaggttacagtgaactgtgatcacagcactgcactccagcctgt

SEQ ID NO: 98711 - DNA, 201 bp, Homo sapiens
ctgttttgcctttggctactgtgtgaaaaggcaaaaagaaattcaaatgttcatattggaaacaagcatatcataatgtcatcagtgttgaaagccaagtmgaaaataaactaattgattttattgagctaacagttggatctaaccatttttcaggtctctgaaaccagcttcaaacattatttttagatctcaacaggc

SEQ ID NO: 98712 - DNA, 201 bp, Homo sapiens
tgcagtggcgtaatcacagctcagcggagccttgacctcccaggctcaagcaatcctcccacctcagcctcctgagtaactgggactataggtgcgcaccmccatgccttattttttatggagacgggcctcgctgtgttgcccagactggtctcaaactcctggactcaagtgatcctcccgcctcagcctctcaaagtg

SEQ ID NO: 98713 - DNA, 201 bp, Homo sapiens
atcacttttttaatcagataaaagaaaacatttattttacaaaaagatctgtaggtgggtagagattttaattctaaatctttgaggcctagcatgtctcrtagggggaattctttagtttacagagggcctcatgaactctccatattaaaaataggatttacatcttgcttatacaatgatgaggctcagacagtagac

SEQ ID NO: 98714 - DNA, 201 bp, Homo sapiens
gatacctttagtacatatttaattcttacatatacttgtgtctgacttatatcaaaatatttcctttaattcaacactttggtaaatagaagtataatggmaattagaagccttagtgagacgtcagtatgcttccaggcttttaaggtaagcacctaataagtgctttctaaagtgtgggaggggcctccagagaaaggg

SEQ ID NO: 98715 - DNA, 201 bp, Homo sapiens
taagctcagcagtttgagaccagcctggccaacatggtgaaacctgtctctacaaaaaaatgcaatgattagcgggtcgtggtggtgcgtgcctgttaagkcccagctactccggaggctgaagctggaagattgcttgagcctgggaggtggaggttgcagtgagctgagatagtgccactgcactccagcctgggcgac

SEQ ID NO: 98716 - DNA, 201 bp, Homo sapiens
tctaaacccttgtagcgtgaacttttagaagacttattaccggtgtccatttcagaagtggaaatgcttgatggcacctgtaataaaaacacaatgcttgsgttcatttttctctggtgctgaagtggactgtgttggcacacacagtctctgaacaccccgcttagaccaactagaggagggatttttgcctcagcttct

SEQ ID NO: 98717 - DNA, 201 bp, Homo sapiens
caatgattagcgggtcgtggtggtgcgtgcctgttaaggcccagctactccggaggctgaagctggaagattgcttgagcctgggaggtggaggttgcagkgagctgagatagtgccactgcactccagcctgggcgacagacccagacccagacccagaccctgtctgaaaaaaaaaatagtaataacaacattctgggc

SEQ ID NO: 98718 - DNA, 201 bp, Homo sapiens
ccttatgagctctcaatatgtgcagcaggtaacaggctggccctgaccagcaggagggtttgccattcactgtgttggaccttctctgcatgtaggttttmtctgccacctgggtgagtctgtctcattcaccatgatacctaagtcgggggctttcttttgctcctccaggccaaggtggaaatgcttgacaacctgctg

SEQ ID NO: 98719 - DNA, 201 bp, Homo sapiens
cccattgctactaacaatacaaaaattagccaggcatgggtggcacgtgcctgtagtcccagctactcaggaggccgaggcaggagaatcgcttgaacccrggagacagaggttgcagtgagctgagatcgcaccactgcactcagtgcaagactcggtctcaaaaacaaagccagacagtgctcgaggcctgggagcaga

SEQ ID NO: 98720 - DNA, 201 bp, Homo sapiens
aatgtttactctatttgagagttatcccggtgtgtgctgatgtgtggtgtgaggcgtgactccagttttatttttttccagatgatgatctagtttccctrctttgtttttttgttgttgtttttgtttttgttttgttttcgagatggagtctcactctgttgcccaggctggagtgctgtggcatggtcttggctcact

SEQ ID NO: 98721 - DNA, 201 bp, Homo sapiens
gagtctcactctgttgcccaggctggagtgctgtggcatggtcttggctcactgccacctccgcctcccgggttcaggcgattctcctgcctcagcctccsgagtagcgtggtgcctgccaccatgcccagctaattttttgtactttgtttattggcttattcatctcccccattgagaggtgtcttgtatcatgcacaa

SEQ ID NO: 98722 - DNA, 201 bp, Homo sapiens
atcttagctcactgcagtttctaactcctgggctcaagcaatcctcccacgtcagcctctggagaagctaggactacagttgcccaactaattttttaactttttttttttttttttttttaagatagagacagagtctcactgtgttgcccaagggatcttgcttggcaagaccccaggctggtctcaaactcttggctt

SEQ ID NO: 98723 - DNA, 201 bp, Homo sapiens
tcttagctcactgcagtttctaactcctgggctcaagcaatcctcccacgtcagcctctggagaagctaggactacagttgcccaactaattttttaactttttttttttttttttttttaagatagagacagagtctcactgtgttgcccaagggatcttgcttggcaagaccccaggctggtctcaaactcttggcttc

SEQ ID NO: 98724 - DNA, 201 bp, Homo sapiens
ggaggagatggaatgtcagacagctgaccaccccctgatatgctgctctttcaaggagctcagtctgagaagggtcatttatctccagaaaagaagctctrttagctgaccacggttgttacaaacagacagatgagatggaccaatcgtagtctcccaaggcataaggtgtcctagtggaaggatcctggggaggtagaa

SEQ ID NO: 98725 - DNA, 201 bp, Homo sapiens
cgaggtaggagggtcacttaagcctgggaggcagaagttgcagtgagctcagatcaagtcactgcactccagcctaggcaacaaagcaagaccctgtctcaaaaaaaaaaaaaaaaaagtgctgcattggaagcccacgcaggtgtgcaaggctctagctctgcccagcacaccataccatgtgtttttatgcctgcccca

SEQ ID NO: 98726 - DNA, 201 bp, Homo sapiens
cagcctacactccagccttggcctcctgggcttaagcaatcctccagtctgctgagcagctgggactacaagcgtgagctaccgcacccagccctgtcttyctttgagactagaattttaaccttttagttatattacacgtagagctgctgcaaacttcttgtacatcccacgcacctgtacagttatttctttaattct

SEQ ID NO: 98727 - DNA, 201 bp, Homo sapiens
tgcgagcctttttattacgcatttttaaatgttattctgagaaagggacatccaggcgccttaacaggtgggcagagtaccgtgttctggtggaaagacamacaaaacccaagtccagactgtgttgaggctagaacaacaccgctgtggaggaagttagaggaggcttagctgtgggggaggccggatggaggaaactga

SEQ ID NO: 98728 - DNA, 201 bp, Homo sapiens
ggcagcctgttatgaagttctcactcctggtgcaggagctcttaccccagggtctgtgggatggtaggtagaaggcaagaggtccatgagtttagataagmaaaaattgatatctccatctccactaacctctagataaaattatttcctctaatcataaatgtaagcagcaaagcaaaggcatattagcagtccctattt

SEQ ID NO: 98729 - DNA, 201 bp, Homo sapiens
gaagtagacagggcctacaatttgaagagccttgttgcccactaaggaacctagaacttactttgaatatacaaggcagcctgttatgaagttctcactcstggtgcaggagctcttaccccagggtctgtgggatggtaggtagaaggcaagaggtccatgagtttagataagaaaaaattgatatctccatctccacta

SEQ ID NO: 98730 - DNA, 201 bp, Homo sapiens
gatgcatctcttcatttatttaggtcttctttgatttcagcaaagtcttacagcttttagtgtagagatcttgcacatcttttgttaaatttatctaagtsttttatgtatcttaacgctgtttaaataccagtgtccttgccttttccagtatgtttattgctagtattagacatttttgtatgtttgtatattgacagt

SEQ ID NO: 98731 - DNA, 201 bp, Homo sapiens
gtggaagcttgattaggagtcgttaattcacagaagtggagcagaaagatgagaatagggaagtagacagggcctacaatttgaagagccttgttgcccastaaggaacctagaacttactttgaatatacaaggcagcctgttatgaagttctcactcctggtgcaggagctcttaccccagggtctgtgggatggtagg

SEQ ID NO: 98732 - DNA, 201 bp, Homo sapiens
gtaagagaggatggatgccacctgatggagctgtgctctaggcattgtgtgcctaggagtccgagatgacccagctaagggtggaagcttgattaggagtsgttaattcacagaagtggagcagaaagatgagaatagggaagtagacagggcctacaatttgaagagccttgttgcccactaaggaacctagaacttact

SEQ ID NO: 98733 - DNA, 201 bp, Homo sapiens
tacctttgtattaataattctggttctcatctgccctgttcctcctcgcttccaacatattacccaagcttagtgctcatggtcaaggtagcttgattttyctcccttccatgagctgtaatgtgttttaggaatgaccagatatccctcagtggattttcagtacttagtacaagggagggcgacatttaccgagtggat

SEQ ID NO: 98734 - DNA, 201 bp, Homo sapiens
actgtagcagcaataatactgtctttcatccttaaagcctcacatttttctattttttgttactctttattgtaagaagaaaaaaagagattatttgattkggacaagccaaatcctctttggtctatggggtggttacctcaagggagagctggcttcttaactaaaacttaatattttttaggaattccgagaaatctc

SEQ ID NO: 98735 - DNA, 201 bp, Homo sapiens
aggctgcactgagctatgatcacgctaatgcacaccagcttgggcgatggagtgataccctatctctaaaaataaaataaacattgtagaagaacaagcarctcttactctgggaggctaggagaggggctcctaagaaaggctaggtcgacagccttacctggagttgggcgcagggtctcctgcctgactgcactgcag

SEQ ID NO: 98736 - DNA, 201 bp, Homo sapiens
ggtttgggtggtctttggggaatctgtttgtcagttgagctgctttcagcttaaaaaataaaaaggaaagccacatttcaagaagtgggagccagacactrtggctcacacccgtaatcccaactctcgggaaggccaaggcaggaggatctccagaggccaggagttttaagaccagcccagcagcataatgaaaccctg

SEQ ID NO: 98737 - DNA, 201 bp, Homo sapiens
gttggccaggctggtcttgaactcctgacctcagatgatccgcctgcgttggcctcccaaagtgctgggattataaaattagcagtcttatacagtagttkggggatggctttttattctgttttaaaggacatttcctgtccccaaacctggtctcagaacatagattatcagatgtccaagataaagttcctcaagtgc

SEQ ID NO: 98738 - DNA, 201 bp, Homo sapiens
caggaggttcatttttaaaaacagttcactctctgtggctgcagctggtatcacagatgccacaggagaatcttggtgcaggcaccagtaaccaggtgcaygggtttcggctttaacctaacttgtagctacagcagtgagggacctctcgtgacatagtagtgcctggagcatcttggattgctagaatttgcagcatat

SEQ ID NO: 98739 - DNA, 201 bp, Homo sapiens
attccacttccagattctccatagagaaagatctgattagtccagcttgatttggacatcgaccctagtcctgtgaactgtaaccaaaagcacaaggtcaygtaaaaggccaggggtctggggactgtggaatgtggacggaaacctagagctgctgaccaccactccaaatagggccttgccttgaaaatggccccatag

SEQ ID NO: 98740 - DNA, 201 bp, Homo sapiens
cctttgtgaacctcgtgtttcatttacaaaagggaataaaaataccagcctgcattccttgggtgttgacaggcgctagtttaagtaacactgatgagctyattccgtcctcatggcagctccatgagactgtgttccccatttgagaaaagaggcaagtagagtccagagaggttacgtagcttcttgcagctccttggc

SEQ ID NO: 98741 - DNA, 201 bp, Homo sapiens
ggttactaaaattcactcatgctcaagtcctagagtgccctgcagaacccatggaggagaaaagttggccctgcacatctgtgggtctcgcatcctgagattttttttttttttttttggtgggatttttcttttctttttcttttttgagacagagtcttgctctgtcccccaggctggagtgcagtgtcacaatctcag

SEQ ID NO: 98742 - DNA, 201 bp, Homo sapiens
accttctctgcatgtaggttttctctgccacctgggtgagtctgtctcattcaccatgatacctaagtcgggggctttcttttgctcctccaggccaaggyggaaatgcttgacaacctgctggacatcgaggtggcctacagtctgctcaggggagggtctgatgatagcagcaaggatcccatcgatgtcaactatgag

SEQ ID NO: 98743 - DNA, 201 bp, Homo sapiens
agtgtaaggattgcttagcctttctgtgcctggccacctcaacctccaggtacagtaaaaactaattccaatgaaggtcagtggaggcagggagcctgacwgaattttatagcgatgggcaacctcctcccaacattttattatgaaaatgtttcaaacatacaaaaagttgaaggaattttacagcaatagtcattagcc

SEQ ID NO: 98744 - DNA, 201 bp, Homo sapiens
gagactgcaggcagaggctccgtgtttcctgtctgttctccttctcatctccgctctccgcccaggagatgagtgcaaaagggcggcccccttgttcttgytgctcctagcatcagagctcttaagtactgaccctgggggccttcagagcagaggtggtcccacctggccagcaaacaccctctcctctctaccctagct

SEQ ID NO: 98745 - DNA, 201 bp, Homo sapiens
tgaccgctggtaccatccaggctgctttgtcaagaacagggaggagctgggtttccggcccgagtacagtgcgagtcagctcaagggcttcagcctccttrctacagaggataaagaagccctgaagaagcagctcccaggagtcaagagtgaagggtgggtggagcgctgcggggttgccctgggggttcagtgaggggt

SEQ ID NO: 98746 - DNA, 201 bp, Homo sapiens
catcacatttgtacccctaaaagtcctgccctttagttcagtggattctggattctgaggatactcttggtcctttccagagatgaaggcaggcaggggtsagggcccacagaagggaatccctatattcttggggttgtctgagccagggctcatgcctgtctggtgctttcaaccaaacctctctcatgggctctgtaa

SEQ ID NO: 98747 - DNA, 201 bp, Homo sapiens
cagtcctgagaacacacatttgtggggagcctcccgagggtggtggtagtgtatccaagaggcgtgaacctcaggcctgcagatcccttctccgtgagagygctagcacctcaaggggagagaaaactgtaggtgcttttcctctgggacaggactggaacactctgcgcatgtcctggagaaaggtgggaaggtcttcag

SEQ ID NO: 98748 - DNA, 201 bp, Homo sapiens
ctggattagtcatgcttctgtccagggcagaatggcagagactgcaggcagaggctccgtgtttcctgtctgttctccttctcatctccgctctccgcccrggagatgagtgcaaaagggcggcccccttgttcttgttgctcctagcatcagagctcttaagtactgaccctgggggccttcagagcagaggtggtccca

SEQ ID NO: 98749 - DNA, 201 bp, Homo sapiens
tcagttctttgttccaagcactgcaggaagtgctggacatgcagaaatggaaaggcgcagtcacggcccccagggagctcagaagggtctattggcaaagccccagagacgatgtctcaggatacagagtgtggggcccattggtacacaggtgtctccacgcaggggctgagccaaataggcagggctgctcgcaaaagg

SEQ ID NO: 98750 - DNA, 201 bp, Homo sapiens
agagtgccctgcagaacccatggaggagaaaagttggccctgcacatctgtgggtctcgcatcctgagattttttttttttttttttggtgggatttttcttttctttttcttttttgagacagagtcttgctctgtcccccaggctggagtgcagtgtcacaatctcagctcactgcaacctccatccccaggttcaagc

SEQ ID NO: 98751 - DNA, 201 bp, Homo sapiens; identical to SEQ ID NO: 15170

SEQ ID NO: 98752 - DNA, 201 bp, Homo sapiens
gatggtgccatttgtgagacagcgtcctgaagggatggggtttcatcttacggatgcagtagaggcttgaaatcagagaccaacctggtgtctcccccccrgccaaagcacatgggtctgggaaccagtgggtgaggtgggagtagttcctcttgctgtcaccacatctgatatcccctcacagggcttgtgtttggaggt

SEQ ID NO: 98753 - DNA, 201 bp, Homo sapiens
ttttttgtttgtttgtttgtttgtttcctctccttaatctagagaggagctctgtttttctaaacccttgtagcgtgaacttttagaagacttattaccgrtgtccatttcagaagtggaaatgcttgatggcacctgtaataaaaacacaatgcttgggttcatttttctctggtgctgaagtggactgtgttggcacac

SEQ ID NO: 98754 - DNA, 201 bp, Homo sapiens
cctttgggaatttccagtttggttaaacgggaaatgactggtaaacaaacgttaccgtaagagaggatggatgccacctgatggagctgtgctctaggcaktgtgtgcctaggagtccgagatgacccagctaagggtggaagcttgattaggagtcgttaattcacagaagtggagcagaaagatgagaatagggaagta

SEQ ID NO: 98755 - DNA, 201 bp, Homo sapiens
ttggtaggcattttttaagttctaagcactctgttaggttttaaggacacagaatccacctttgggaatttccagtttggttaaacgggaaatgactggtwaacaaacgttaccgtaagagaggatggatgccacctgatggagctgtgctctaggcattgtgtgcctaggagtccgagatgacccagctaagggtggaag

SEQ ID NO: 98756 - DNA, 201 bp, Homo sapiens
tttggtaggcattttttaagttctaagcactctgttaggttttaaggacacagaatccacctttgggaatttccagtttggttaaacgggaaatgactggyaaacaaacgttaccgtaagagaggatggatgccacctgatggagctgtgctctaggcattgtgtgcctaggagtccgagatgacccagctaagggtggaa

SEQ ID NO: 98757 - DNA, 201 bp, Homo sapiens
gctcactgcaacctccatccccaggttcaagcggttctcgtgcctcagactcccaagtagctggggttgcaagcatgggccaccacacccggctaattttkttgtatttttagtagaggtggggtttcactatgttggccagactggtctcaaactcctgggttcaagtgatccgcctgcctcagcctcccaaagtgctgg

SEQ ID NO: 98758 - DNA, 201 bp, Homo sapiens
atgacaagtgcctgctacttacaaaagtttatcacaaaactaatgaagagcaacatttttcagttgtcagatacttagtaaactgaccataaacttgaagrcgttggttaccctctctgttaaaagtgaagtcatccctctgtatcctcggggattggttccaggactccctcggggttactaaaattcactcatgctcaa

SEQ ID NO: 98759 - DNA, 201 bp, Homo sapiens
tttattgtaccttgttcttggcttgaaatagattatccaccttcttccccagatgtggctccggctacttaattcttgccagaaatcagatcttcccttargatggagtttgcagtgttgagggtacagggaagcccatgccagggcttgtggatgttattagaagctgttggctcctggtaggtgtctgatgagctgtga

SEQ ID NO: 98760 - DNA, 201 bp, Homo sapiens
agtactgaccctgggggccttcagagcagaggtggtcccacctggccagcaaacaccctctcctctctaccctagctgctgaacccagaagcttcaggctkctctgaaaaacaagcagctgtgatgcatttggttattccctttgttctaggctcctaggaaccagtggaggttaagagtctcagatcagccttaagcatt

SEQ ID NO: 98761 - DNA, 201 bp, Homo sapiens
aagtactgaccctgggggccttcagagcagaggtggtcccacctggccagcaaacaccctctcctctctaccctagctgctgaacccagaagcttcaggcytctctgaaaaacaagcagctgtgatgcatttggttattccctttgttctaggctcctaggaaccagtggaggttaagagtctcagatcagccttaagcat

SEQ ID NO: 98762 - DNA, 201 bp, Homo sapiens
ggcaaggtgtattagccatgcttcctttgtggcccaaccaaaccaaccaactggagttaccatgggaagtgcaagatagcccacttagagtaaaagaaaawtgctgtgacgcttgattcgtaagataaaattcataccagtttttaaaaggttggcagtggggtgggggtggtggttgctggattagtcatgcttctgtcc

SEQ ID NO: 98763 - DNA, 201 bp, Homo sapiens
agtctcaccatgttgttgcccaagctggtctccaactgctgagctcaagtgatccacccacctcagtctccccaaatgctaggaatataggtgtgagccaycgtgcccggcccaccctttgtatttttccccttcttcatgctgtggcaaggtgtattagccatgcttcctttgtggcccaaccaaaccaaccaactggag

SEQ ID NO: 98764 - DNA, 201 bp, Homo sapiens
agagctgtctgcctgttcttgtttctgtttcaaaaacaatacattggctgtcagcttcttgtacctgtccttcaatcttaaattgtgtgagtgttggggcstggagtggttgcacttttgcagagggttgtttgatttgcagtgaagcatgtgttgtgttggagagagttgttcctggtccctagtcccctttgtactttt

SEQ ID NO: 98765 - DNA, 201 bp, Homo sapiens
agaaaaagacaaggatagtaagcttgaaaaagccctaaaggtgagttctcagctctgtgtctcctttcgacattctgctgtctggattctctttctcattytgggaagacaattcaaggagttgtgtcccacttattaagacctttagcaaattgatggcagttattaaatagcatggcttttccccagattctttttcct

SEQ ID NO: 98766 - DNA, 201 bp, Homo sapiens
caagttagctcttgggtaagccagtctgattccaggttcaaagcccagtgccaattcctttcactccaaataccaaattccgttttagttgctagggacastgtgctggacagagcaccgtctataccctcatacagttcaagtctaaagagttaaagcagtttcagtacagtgtgatcttgatataacctgggttcttca

SEQ ID NO: 98767 - DNA, 201 bp, Homo sapiens
ccatgaacactaacaacgcaagttagctcttgggtaagccagtctgattccaggttcaaagcccagtgccaattcctttcactccaaataccaaattccgytttagttgctagggacactgtgctggacagagcaccgtctataccctcatacagttcaagtctaaagagttaaagcagtttcagtacagtgtgatcttga

SEQ ID NO: 98768 - DNA, 201 bp, Homo sapiens
aggtgtcctagtggaaggatcctggggaggtagaagaggacggggctcctctgagctgcattttggggctgttgagatgagcattgctgtctgtttgattmtccaggcaaaggccaggatggaattggtagcaaggcagagaagactctgggtgactttgcagcagagtatgccaagtccaacagaagtacgtgcaagggg

SEQ ID NO: 98769 - DNA, 201 bp, Homo sapiens
tgcctttttaaaaatgaaaatttatcacttttttaatcagataaaagaaaacatttattttacaaaaagatctgtaggtgggtagagattttaattctaartctttgaggcctagcatgtctcatagggggaattctttagtttacagagggcctcatgaactctccatattaaaaataggatttacatcttgcttataca

SEQ ID NO: 98770 - DNA, 201 bp, Homo sapiens
ccaggctgccctgcgcccaccagtcatccgggccctggtgtgatgctcaagtctctgttgtatgcagagggagttactaatcagcactagtgagaaatgcyccaagccaaccaagacagtgagagcaacgtatttttttggcaggagaagtgacccgctgcttgtttactcagagacatgtggcatagtctattggtgaag

SEQ ID NO: 98771 - DNA, 201 bp, Homo sapiens
ggggtggttacctcaagggagagctggcttcttaactaaaacttaatattttttaggaattccgagaaatctcttacctcaagaaattgaaggttaaaaarcaggaccgtatattccccccagaaaccagcgcctccgtggcggccacgcctccgccctccacagcctcggctcctgctgctgtgaactcctctgcttcag

SEQ ID NO: 98772 - DNA, 201 bp, Homo sapiens
ggttttttttcctttcaatttgaacagaggaggtggaaaagatgaataagaagatggaggaagtaaaggaagccaacatccgagttgtgtctgaggacttyctccaggacgtctccgcctccaccaagagccttcaggagttgttcttagcgcacatcttgtccccttggggggcagaggtgaaggcagagcctgttgaag

SEQ ID NO: 98773 - DNA, 201 bp, Homo sapiens
agtgcgagtcagctcaagggcttcagcctccttgctacagaggataaagaagccctgaagaagcagctcccaggagtcaagagtgaagggtgggtggagcrctgcggggttgccctgggggttcagtgaggggttcaagggaggcccaaaggccctacaggttccataccactcctctgtttcccttcgctgactgtcagt

SEQ ID NO: 98774 - DNA, 201 bp, Homo sapiens
tatcaacaaatctgaaaagagaatgaaattaactcttaaaggaggagcagctgtggatcctgattctggtaagcaaacaggactgccagcaaagtgggctrtgccgccccccaacccccagctgactaggagcacacatccaaatgcccgcagcatacctggggcagtgtggtcgtgcctttgtcctcactcaggcctcct

SEQ ID NO: 98775 - DNA, 201 bp, Homo sapiens
agctgatgctcagtcacgaatgagatactttctgaagagcagaaactgtctttttaaccagactatggttggtagcacatattaggtggtctgtgtgtgtyggaagcaatctgtgacctcttgtatctaactgacatcctgaacacaggcatagctggaaagggcagtttcttgattggatgaagacctgggagcacagta

SEQ ID NO: 98776 - DNA, 201 bp, Homo sapiens
ccctgaagaagcagctcccaggagtcaagagtgaagggtgggtggagcgctgcggggttgccctgggggttcagtgaggggttcaagggaggcccaaaggmcctacaggttccataccactcctctgtttcccttcgctgactgtcagtaagccagggagatgcaaactgaggaatggtgacagcagagatgtgggggcaa

SEQ ID NO: 98777 - DNA, 201 bp, Homo sapiens
ttattgttatagcagttgtgtttgttctgtgttaatcaccatccttttggggtgtgtaaaattcttccccacgtgaatgtaatggcaggaaaggggagctmctgaaatgggacagctgacccacacatgtgtatctgacaccctccttcccactgcaggtattggatattcaggtcctggggccgtgtgggtacggtgatc

SEQ ID NO: 98778 - DNA, 201 bp, Homo sapiens
cacacagtacacactcaggaatcgttacctgagtaactatcgacattactcgctctacacctacaactgaactccatttccactggcccctggctcacttsttcactgccatgattgcatgatccctcctaattttctctctgtgcgtttgagtggttcctctaaaataaatctgaccttgtcacttcccccacccttaaa

SEQ ID NO: 98779 - DNA, 201 bp, Homo sapiens
agccagttcaggacctcatcaagatgatctttgatgtggaaagtatgaagaaagccatggtggagtatgaggttattgcgctttatcattttatctgtgarcatttgctgtggatgattatttgctgagctagtgaagagctgtctgcctgttcttgtttctgtttcaaaaacaatacattggctgtcagcttcttgtacc

SEQ ID NO: 98780 - DNA, 201 bp, Homo sapiens
caagaagcctctcttctttgtagtgagtggaatctgtgcaagttcctccatcccacattagtaagtgtccttttttgtagtcccgcatttgccctctgacrtgtttctccactggctgcagatcttggaccgagtagctgatggcatggtgttcggtgccctccttccctgcgaggaatgctcgggtcagctggtcttcaa

SEQ ID NO: 98781 - DNA, 201 bp, Homo sapiens
gctctccccccttggtcacccaggtgacattgttgtacttcttccatttaaccctgtatcactagaccttttcctcatcctctcatgtctccattcctggygtcccagtgtatgctgtgtgtgatggagaggagatgtcgagagaccccttaaaaatgaagctgggaaacaggtgcagacgtgtgtgcctgtacctttgcc

SEQ ID NO: 98782 - DNA, 201 bp, Homo sapiens
gtggtccttgaccagaaagattcatccctgtgttgattatgtacatgttgaagcaaagcaaaaattattaatcagaaaatgctggatgtctgggaaattgrgggagaacagttggtctctcttgagaacatgatttctatgaaccatctgcttgtgtctcttctatgagtattcagtttttactagtggtactaaaattaa

SEQ ID NO: 98783 - DNA, 201 bp, Homo sapiens
actgcaggtattggatattcaggtcctggggccgtgtgggtacggtgatcggtagcaacaaactggaacagatgccgtccaaggaggatgccattgagcasttcatgaaattatatgaagaaaaaaccgggaacgcttggcactccaaaaatttcacgaagtatcccaaaaagttctaccccctggagattgactatggcc

SEQ ID NO: 98784 - DNA, 201 bp, Homo sapiens
caagttcctccatcccacattagtaagtgtccttttttgtagtcccgcatttgccctctgacatgtttctccactggctgcagatcttggaccgagtagcygatggcatggtgttcggtgccctccttccctgcgaggaatgctcgggtcagctggtcttcaagagcgatgcctattactgcactggggacgtcactgcct

SEQ ID NO: 98785 - DNA, 201 bp, Homo sapiens
gtgaaggccaaaaagaaagaagccttttcacttgcttgaatttaaataccttcttttacatttacatgggagtattgttctctgagtatctgatacctgayactttagccctcatgcctggggcatcttgggagggatgagctgggccctccagcattttggtgggaggaggatggcggtagacctttgagttgctctgtc

SEQ ID NO: 98786 - DNA, 201 bp, Homo sapiens
cagctttttttgctggtggcactctagcctgtgtcctttgtctgcagtccagccccacagacgcagataccttgcttgagttgttgatttgggtctcttascaatgtgcttttttcctgaaggatgaagaggcagtgaagaagctgacagtaaatcctggcaccaagtccaagctccccaagccagttcaggacctcatca

SEQ ID NO: 98787 - DNA, 201 bp, Homo sapiens
aggcatgcagtgaggtcagttcattctctctgtggcctaggtggacaggtagcatggcctgttctgcacagaagggaacccagttcaccagctgctggttsggtgaggaccctggtatgttaggtgctcagtttttgcttgggtgcacagccaaagattctgtgccttgcctcagctgtgcagctaacaaatggagtcgat

SEQ ID NO: 98788 - DNA, 201 bp, Homo sapiens
cctggagcagttgtctggccattcccagcagatgctgcaggattgtgactctgcacaagtgtcttctgtgcatttcactaggccatgaggcagctcaccaytaaatgtagcagtgtgtggtcaaaagggacgtggggcagagctcagtggtaaaaggccacctttctcgtggctgtgtttggtgtcctaagagaatgagct

SEQ ID NO: 98789 - DNA, 201 bp, Homo sapiens
actctggatttgggtcactggtgtcctcaggaaatcccagcaggctcctgactgctcctgttgggggcctgagggtgggctgcccggtccagctctcctgygatcacactgcacagtgcccagctttcagagcgaaatcccctgtctcctcagatcgaccttcagaagatgcccttggggaagctgagcaaaaggcagatc

SEQ ID NO: 98790 - DNA, 201 bp, Homo sapiens
aaagaaactctttattattaaaagtaactgtgatttttatgtaatggtgattaagggtggattcagagttttaattcagaatttaaagttggtctggtagrctgagctggtgaaggccaaaaagaaagaagccttttcacttgcttgaatttaaataccttcttttacatttacatgggagtattgttctctgagtatctg

SEQ ID NO: 98791 - DNA, 201 bp, Homo sapiens
tagcctggttgtgcagagacatgggcccgtcctgcattggttagtgctgtgccatcagccttgtgaaacccgttaggcccagtgcctggggaatgaaatckaatcacagagatcaaaaacaaattataaggcctttgcttaaaggggagaaagaagccacttactaaccagtagcgttgctgtccttgtacagttgtccca

SEQ ID NO: 98792 - DNA, 201 bp, Homo sapiens
gtgggtctaagtcaaaagttaactgcttacttacttccctctgtttctcttccttctagtcgcccatgtttgatggaaaagtcccacactggtaccacttstcctgcttctggaaggtgggccactccatccggcaccctgacgttgaggtggatgggttctctgagcttcggtgggatgatcagcagaaagtcaagaaga

SEQ ID NO: 98793 - DNA, 201 bp, Homo sapiens
gcggggcggggacgcggcgccccgggttaactgtgtccgggaaggctgggggagggcgggcccagggagcgagcgggcccgggccctcggagcggcacttsgggcctatggggccgcggccgcccctcctcccgagcggcccggccgacccttccggaaggttttgctgatgttgcaggaaaagcccgggaaataaagtct

SEQ ID NO: 98794 - DNA, 201 bp, Homo sapiens
taagcaaacaggactgccagcaaagtgggctgtgccgccccccaacccccagctgactaggagcacacatccaaatgcccgcagcatacctggggcagtgkggtcgtgcctttgtcctcactcaggcctccttcaccagctcccccagtcctgagaacacacatttgtggggagcctcccgagggtggtggtagtgtatcc

SEQ ID NO: 98795 - DNA, 201 bp, Homo sapiens
tgcgctctccaaaaaaagcaagggccaggtcaaggaggaaggtgagggccccaagctgccccctccagggccaaaagccagggacattggtggccaggttsttgtccacggaacctctccctttgtgtccctgacatggcctgttgagtgctgcagagcaggacacagaatggcaggcgctttggggtggcgggagtagtg

SEQ ID NO: 98796 - DNA, 201 bp, Homo sapiens
agttgaatctgaatttgtgcaacagggacaatgcttctgtatcttatgattgtgatgacgagtaagtgaggaagagtcgaacacagcgctgaaaaactggrtcttaacatcatcatcgctgtggttctttatgaagggaaaccagtatttgctctcagtgttgctgctttgtactgtagattcacatgcattgcgtgttct

SEQ ID NO: 98797 - DNA, 201 bp, Homo sapiens
atagcatggcttttccccagattctttttcctcctccaaaagaaaccatttttatttggaagagaatccacattaggctgtaggtgtctgacctgcagccrggcttgagcaagggctgagtgctctgtttccgctcaccagcctcatactgggatgacagagattcatgctttggccaaattatgcacaactgtacaccct

SEQ ID NO: 98798 - DNA, 201 bp, Homo sapiens
gagcagcggtcccaaacttccatgtgtgttaggatctcctggaaagcttgttaaaacacaggtggctggcgcccaataattcacttttctaacaagttccyggacattgctgctggtggtcctttgagaacctttgggcgtttcacgtgtagataatgcaccttgtttgcaaggcagccttccaagccagcacctcagctt

SEQ ID NO: 98799 - DNA, 201 bp, Homo sapiens
aaaaagccctaaaggtgagttctcagctctgtgtctcctttcgacattctgctgtctggattctctttctcattctgggaagacaattcaaggagttgtgycccacttattaagacctttagcaaattgatggcagttattaaatagcatggcttttccccagattctttttcctcctccaaaagaaaccatttttatttg

SEQ ID NO: 98800 - DNA, 201 bp, Homo sapiens
accttccagacaggctacatgtttggtaaagggatctatttcgctgacatggtctccaagagtgccaactactgccatacgtctcagggagacccaatagscttaatcctgttgggagaagttgcccttggaaacatgtgagtaaacctggctctgggactgatggcatttcatggggacaggtggaatgggctataggca

SEQ ID NO: 98801 - DNA, 201 bp, Homo sapiens
ggctgggagagtagaaattccccactgcagttactggacccaccaattaggattcttttcttataagtagcagaatccaattcaagttaagggaacaaggragatacagggatacttcaggaaatgcaagggcaggaacgcagccaggcctccagagctggcagtgtcttctctccatggactgggaagcagagagattga

SEQ ID NO: 98802 - DNA, 201 bp, Homo sapiens
tacttcactcagcatagttcttctgggttcgtccgtgttgcagcatgtgtctgaatttccttctttttaaagacataataaacattaattgcacgaatatrccatatttcatttgcccatttgtatgtctgtggaaatttaggtggtttctgcactttgttttttgttttttttgagacagagtctcactcttgcccaggc

SEQ ID NO: 98803 - DNA, 201 bp, Homo sapiens
gagatggaccaatcgtagtctcccaaggcataaggtgtcctagtggaaggatcctggggaggtagaagaggacggggctcctctgagctgcattttggggmtgttgagatgagcattgctgtctgtttgattctccaggcaaaggccaggatggaattggtagcaaggcagagaagactctgggtgactttgcagcagagt

SEQ ID NO: 98804 - DNA, 201 bp, Homo sapiens
ggatgagggttccttccttgaacataaacctgttattgacttccttttcatatcctgagaggggaccagtggtcactgcagtgtgtgctggtggtcatccygagtccactgtgctgctggcagcctgggtccaggtgcccacatgaagggccagttgggggctggcattctgacccctccatggagggttccctcctctgc

SEQ ID NO: 98805 - DNA, 201 bp, Homo sapiens
aaaggtaagatcttgggggcccagatccctgaactttatggattgcttgcaatgatgttattggctatctcaagagaaaagaagaaatgggggctttaggrtgctagctcaacgtaagtgattaaaaataaagtgaagacattagtattgaccagatacgtcagtgacttccagacaggtctggtcctccttatcacggtc

SEQ ID NO: 98806 - DNA, 201 bp, Homo sapiens
aagtctaaagagttaaagcagtttcagtacagtgtgatcttgatataacctgggttcttcagacagtggggggtggagtctcaatagtctattaggcagcktaggaagaggacggacagctaatgctacgatgtgctttaacactgtcagcctggctggcagcgcatgggactggttgcttggtactttgggaatttagag

SEQ ID NO: 98807 - DNA, 201 bp, Homo sapiens
tgctgctctcagcacagtgcctgtggggtagccctgctctgcaggagcagtcacagagccataacactgctgcctcaataaagctgctttcttctaccacsagctcgctcttaaatgctttccagagcgaagccaaggacccgcccaggccaatccccaatttagggctggcctgccctgcatcagtttcactgctctaaa

SEQ ID NO: 98808 - DNA, 201 bp, Homo sapiens
tggccactgttttccacacctttttgattaacactcagctttttttgctggtggcactctagcctgtgtcctttgtctgcagtccagccccacagacgcasataccttgcttgagttgttgatttgggtctcttagcaatgtgcttttttcctgaaggatgaagaggcagtgaagaagctgacagtaaatcctggcaccaa

SEQ ID NO: 98809 - DNA, 201 bp, Homo sapiens
gaccgaattggccactggtttctgtttttgttttttttagggaaagatttttctcttaaagcagccacaatattagccctattataaatgtaaaagtaccrgaaataagtactgtagcagcaataatactgtctttcatccttaaagcctcacatttttctattttttgttactctttattgtaagaagaaaaaaagagat

SEQ ID NO: 98810 - DNA, 201 bp, Homo sapiens
cacatgtgcagatcaagcgtatggtgcccatgttatttcagcaacacctcctggactcagcatcatctgttgcatgatatttggtattttgtttttccagrtgcttggaatgtagcctttaaagttgttttgtttttaatatactttatttttgttcatggcaaaagtaagcaaagaacaaagagtttccagtaccccctc

SEQ ID NO: 98811 - DNA, 201 bp, Homo sapiens
atgggagaagcccatcacgtgttgagcagtgcttttagaggatgggggtcctgccctgctctttaacaggaagatggtcttctggtcgtttcccatgtgtyctggcatgtgcacataccacgctacttctggacctgctgcagcacccacctgctagaagagaaagcctggccgggggcttggagctgctccctcagtctt

SEQ ID NO: 98812 - DNA, 201 bp, Homo sapiens
ctcctttcatcccagataagccattatccaacatgaagatcctgactctcgggaagctgtcccggaacaaggatgaagtgaaggccatgattgagaaactyggggggaagttgacggggacggccaacaaggcttccctgtgcatcagcaccaaaagtgagttgaatctgaatttgtgcaacagggacaatgcttctgtat

SEQ ID NO: 98813 - DNA, 201 bp, Homo sapiens
tgctctttaacaggaagatggtcttctggtcgtttcccatgtgtcctggcatgtgcacataccacgctacttctggacctgctgcagcacccacctgctaraagagaaagcctggccgggggcttggagctgctccctcagtcttgcattccttctgtcccctcctctccaggcggtgtctcagggcagcagcgactctca

SEQ ID NO: 98814 - DNA, 201 bp, Homo sapiens
ctgtaatcccagcacttcgggaagccgaggcgggcgggtcacgaggtcagaagttcgagaccagcctggccaacatggtgaagccccattgctactaacartacaaaaattagccaggcatgggtggcacgtgcctgtagtcccagctactcaggaggccgaggcaggagaatcgcttgaacccgggagacagaggttgca

SEQ ID NO: 98815 - DNA, 201 bp, Homo sapiens
cccttcttcccaatcgctgtcaccgtccactctgtaaagccaggactgggtgcagtggttcatgcctgtaatcccagcacttcgggaagccgaggcgggcrggtcacgaggtcagaagttcgagaccagcctggccaacatggtgaagccccattgctactaacaatacaaaaattagccaggcatgggtggcacgtgcct

SEQ ID NO: 98816 - DNA, 201 bp, Homo sapiens
gtgtgtgctggtggtcatcccgagtccactgtgctgctggcagcctgggtccaggtgcccacatgaagggccagttgggggctggcattctgacccctccrtggagggttccctcctctgctttcccctgacttgcagttcagcatgagtcaataattttgttctctggagacctcagcagtttcagttaaactgtcagtg

SEQ ID NO: 98817 - DNA, 201 bp, Homo sapiens
gtgggtgggtgcaggcctggcctgtagaaagaaggaaagcacacaggaagcagaagtgggcccaggcagcgggctttctggctggtgctggagaaaaggcrctgaaccggatctgtcaacttcagttacagctggctctgagcagtgaacctctctccttgttccttactgactgagaacttacaaggctttcctcggccc

SEQ ID NO: 98818 - DNA, 201 bp, Homo sapiens
gctctgtttttctaaacccttgtagcgtgaacttttagaagacttattaccggtgtccatttcagaagtggaaatgcttgatggcacctgtaataaaaacrcaatgcttgggttcatttttctctggtgctgaagtggactgtgttggcacacacagtctctgaacaccccgcttagaccaactagaggagggatttttgc

SEQ ID NO: 98819 - DNA, 201 bp, Homo sapiens
catatacccgctagccctacccaccccacacatacacagacttttgtccacaatcaacatcgccaccagagtggtccatggttatagctgatgagctacaytgacacatcgttatcggagtggtccatggttataactgatgagccacattgacacatcgttatccctcgaggtctgtagtttacatgagggctcactctt

SEQ ID NO: 98820 - DNA, 201 bp, Homo sapiens
caaaaaaagcaagggccaggtcaaggaggaaggtgagggccccaagctgccccctccagggccaaaagccagggacattggtggccaggttgttgtccacrgaacctctccctttgtgtccctgacatggcctgttgagtgctgcagagcaggacacagaatggcaggcgctttggggtggcgggagtagtgtgtatatag

SEQ ID NO: 98821 - DNA, 201 bp, Homo sapiens
agttgtgtttgttctgtgttaatcaccatccttttggggtgtgtaaaattcttccccacgtgaatgtaatggcaggaaaggggagctcctgaaatgggacmgctgacccacacatgtgtatctgacaccctccttcccactgcaggtattggatattcaggtcctggggccgtgtgggtacggtgatcggtagcaacaaac

SEQ ID NO: 98822 - DNA, 201 bp, Homo sapiens
aaaacagttcactctctgtggctgcagctggtatcacagatgccacaggagaatcttggtgcaggcaccagtaaccaggtgcatgggtttcggctttaacmtaacttgtagctacagcagtgagggacctctcgtgacatagtagtgcctggagcatcttggattgctagaatttgcagcatatgatttagaaccttccac

SEQ ID NO: 98823 - DNA, 201 bp, Homo sapiens; identical to SEQ ID NO: 15156

SEQ ID NO: 98824 - DNA, 201 bp, Homo sapiens
cacatatcagcaagttacccaagggcaagcacagtgtcaaaggtaaagtgtttccaaagctgttgctacagcccgaggcaccctggacagcacagaagccrggggcttgctgtcctgagaaggctgccttgtggctggctgtcaaacagctggagattcattttatcttttcgaggggtgtgtgtgcgttgttgttgttgt

SEQ ID NO: 98825 - DNA, 201 bp, Homo sapiens; identical to SEQ ID NO: 15158

SEQ ID NO: 98826 - DNA, 201 bp, Homo sapiens
ggaacagttccagaaactcaggagggagcctgagcagtttagatggtctgggttttgtggacttttatctcatctctgtatctgatcttattctcctaatsaaactgttggtttcgagagcccagtgtgaaggcctcttctgagactgtcctcttttgaataggtatgaactgaagcacgcttcacatatcagcaagttac

SEQ ID NO: 98827 - DNA, 201 bp, Homo sapiens
agaagcctccgctcctgaacaatgcagacagtgtgcaggtagcgcaagggttcagaagggactgcaggtctgctgggctggggtgtgactaccttgcagcygtccctccccatcatgatccctgagggcagcaccaatgctgggagggccaccctcttgcccttgttttgaagttgggtttctacccacattgatggaggc

SEQ ID NO: 98828 - DNA, 201 bp, Homo sapiens
gagtagaaattccccactgcagttactggacccaccaattaggattcttttcttataagtagcagaatccaattcaagttaagggaacaagggagatacarggatacttcaggaaatgcaagggcaggaacgcagccaggcctccagagctggcagtgtcttctctccatggactgggaagcagagagattgagttgcaca

SEQ ID NO: 98829 - DNA, 201 bp, Homo sapiens
ggggacaggtggaatgggctataggcagaactccccttggctgggagagtagaaattccccactgcagttactggacccaccaattaggattcttttcttrtaagtagcagaatccaattcaagttaagggaacaagggagatacagggatacttcaggaaatgcaagggcaggaacgcagccaggcctccagagctggca

SEQ ID NO: 98830 - DNA, 201 bp, Homo sapiens
cattttttaagttctaagcactctgttaggttttaaggacacagaatccacctttgggaatttccagtttggttaaacgggaaatgactggtaaacaaacrttaccgtaagagaggatggatgccacctgatggagctgtgctctaggcattgtgtgcctaggagtccgagatgacccagctaagggtggaagcttgatta

SEQ ID NO: 98831 - DNA, 201 bp, Homo sapiens
ctctgggactgatggcatttcatggggacaggtggaatgggctataggcagaactccccttggctgggagagtagaaattccccactgcagttactggacscaccaattaggattcttttcttataagtagcagaatccaattcaagttaagggaacaagggagatacagggatacttcaggaaatgcaagggcaggaacg

SEQ ID NO: 98832 - DNA, 201 bp, Homo sapiens
tatagcaggaggttcatttttaaaaacagttcactctctgtggctgcagctggtatcacagatgccacaggagaatcttggtgcaggcaccagtaaccagrtgcatgggtttcggctttaacctaacttgtagctacagcagtgagggacctctcgtgacatagtagtgcctggagcatcttggattgctagaatttgcag

SEQ ID NO: 98833 - DNA, 201 bp, Homo sapiens
tcccacactggtaccacttctcctgcttctggaaggtgggccactccatccggcaccctgacgttgaggtggatgggttctctgagcttcggtgggatgaycagcagaaagtcaagaagacagcggaagctggaggagtgacaggtgtgtacatactggggcagcatgggcattcagcccccaccctgaagctcccaggag

SEQ ID NO: 98834 - DNA, 201 bp, Homo sapiens
cctcagtgaggtccagcaggtaagcacagggctaccaggggcctcctggaaccctcctctggccgacttagggggtgagacctgggggtggcaggggtaayatttactcaaggttaagaaactggaagtactgaactgcacttcacgagggtttcgatttttttcagttcaataaatgacaagtgcctgctacttacaaaa

SEQ ID NO: 98835 - DNA, 201 bp, Homo sapiens
cgcggcgccccgggttaactgtgtccgggaaggctgggggagggcgggcccagggagcgagcgggcccgggccctcggagcggcacttggggcctatgggsccgcggccgcccctcctcccgagcggcccggccgacccttccggaaggttttgctgatgttgcaggaaaagcccgggaaataaagtctgcagctggtgtt

SEQ ID NO: 98836 - DNA, 201 bp, Homo sapiens
tggaaccctcctctggccgacttagggggtgagacctgggggtggcaggggtaacatttactcaaggttaagaaactggaagtactgaactgcacttcackagggtttcgatttttttcagttcaataaatgacaagtgcctgctacttacaaaagtttatcacaaaactaatgaagagcaacatttttcagttgtcagat

SEQ ID NO: 98837 - DNA, 201 bp, Homo sapiens
attctagcttccctgatatcccaaaacatagaattttaagacaaaaaggaaccctgagattctctagcagcccaagtagatgaagaggtggaggcttaggkaagtggagccactggcccaggatctgcccagcccacaggcctgggacacaggctctcggtcatgcccggcttcctttgaggagtgtggtgttgagctatg

SEQ ID NO: 98838 - DNA, 201 bp, Homo sapiens
atgggcagtggataattttcctggcttagagttgagaatgataagggttttgcatggtgttaaaatttagaatgggaaggaccatcagtgactgtcttgartccatggacacctcttggtctctccagtttaccctctgctggtccctcagcctcagtctggagaactgcttgttaacaagcacaccaggggtggtgtggc

SEQ ID NO: 98839 - DNA, 201 bp, Homo sapiens
tttccagccccactgtctccatctgtgaatgaaagggctggttcccacccagaggcagattgtgggattacacaggatggcttatgaaaggagcagggacmcacactacatactgtgtcttccccttcttcccaatcgctgtcaccgtccactctgtaaagccaggactgggtgcagtggttcatgcctgtaatcccagca

SEQ ID NO: 98840 - DNA, 201 bp, Homo sapiens
cagtcctgagtttagggcaaagcattgctttggtcaggggtgcttctgctgaggctcttgtcctctaagcttgtgctgtgattgcaccattgggcagcacytccagggtgtccagcactgtgccggtggttgggggagacagcacccagaccaaagggcagcaggtctggggcccctggcagagccaggaagaagtgccat

SEQ ID NO: 98841 - DNA, 201 bp, Homo sapiens
ctaatgaaactgttggtttcgagagcccagtgtgaaggcctcttctgagactgtcctcttttgaataggtatgaactgaagcacgcttcacatatcagcargttacccaagggcaagcacagtgtcaaaggtaaagtgtttccaaagctgttgctacagcccgaggcaccctggacagcacagaagccgggggcttgctgt

SEQ ID NO: 98842 - DNA, 201 bp, Homo sapiens
tgtggacggcaggttagaacgcccgtccaagccaggagggtggacctagcactgcagggtccacctcgggccaatcaactatattcccgaggcgggggccygcgcttcccggacccagctgccctcaggggagagaggacacacttaagagtttggggccggcgtggtagctcatgcccctgatcccagcacttcgggagg

SEQ ID NO: 98843 - DNA, 201 bp, Homo sapiens
ccagcacttccaggttgggcatgagtgggcactagacaggttcccaggcagggaccagcaaccccagggtgggtcagcccatgcagacgctgcagtggcawctagaataagaatctggagcagccaagagaacttcagggcaggcacaggaagagtctgacccatgtgcagcatcaggcacactcatcctggccactgttt

SEQ ID NO: 98844 - DNA, 201 bp, Homo sapiens
tacagctgcccagcacttccaggttgggcatgagtgggcactagacaggttcccaggcagggaccagcaaccccagggtgggtcagcccatgcagacgctscagtggcaactagaataagaatctggagcagccaagagaacttcagggcaggcacaggaagagtctgacccatgtgcagcatcaggcacactcatcctgg

SEQ ID NO: 98845 - DNA, 201 bp, Homo sapiens
gtttgcttctacagctgcccagcacttccaggttgggcatgagtgggcactagacaggttcccaggcagggaccagcaaccccagggtgggtcagcccatscagacgctgcagtggcaactagaataagaatctggagcagccaagagaacttcagggcaggcacaggaagagtctgacccatgtgcagcatcaggcacac

SEQ ID NO: 98846 - DNA, 201 bp, Homo sapiens
cccagtgccaattcctttcactccaaataccaaattccgttttagttgctagggacactgtgctggacagagcaccgtctataccctcatacagttcaagyctaaagagttaaagcagtttcagtacagtgtgatcttgatataacctgggttcttcagacagtggggggtggagtctcaatagtctattaggcagcgtag

SEQ ID NO: 98847 - DNA, 201 bp, Homo sapiens
caattaagtgttgcattacctctgctttgagttaatcaaaaattagctcatccaaagctgagcagcacagcagctgggtgtgtgtgatgtgtaccctcaaytgagatggaatttgaacatgacagcctgcatctctaggtcaccggacctgaggagccattgccactgcccccctcatttcatcatgtcttggccttggat

SEQ ID NO: 98848 - DNA, 201 bp, Homo sapiens
ctttaaaatgtacacaaatcttgtatgtgggtttatgatatatatatatttattatgaaatgacaattaagtgttgcattacctctgctttgagttaatcmaaaattagctcatccaaagctgagcagcacagcagctgggtgtgtgtgatgtgtaccctcaattgagatggaatttgaacatgacagcctgcatctctag

SEQ ID NO: 98849 - DNA, 201 bp, Homo sapiens
tctttaaaatgtacacaaatcttgtatgtgggtttatgatatatatatatttattatgaaatgacaattaagtgttgcattacctctgctttgagttaatmaaaaattagctcatccaaagctgagcagcacagcagctgggtgtgtgtgatgtgtaccctcaattgagatggaatttgaacatgacagcctgcatctcta

SEQ ID NO: 98850 - DNA, 201 bp, Homo sapiens
ttgtggggagcctcccgagggtggtggtagtgtatccaagaggcgtgaacctcaggcctgcagatcccttctccgtgagagtgctagcacctcaaggggasagaaaactgtaggtgcttttcctctgggacaggactggaacactctgcgcatgtcctggagaaaggtgggaaggtcttcagtgccacccttggcctggtg

SEQ ID NO: 98851 - DNA, 201 bp, Homo sapiens; identical to SEQ ID NO: 15169

SEQ ID NO: 98852 - DNA, 201 bp, Homo sapiens
tcattgcagcagcacatggggctctagaatgtggaagaaaactgaaaaatcaggccatgggtcaaaaaggccacagggcattgcagcatgtgatataggtrttggagttcatcagctcccacttatgccatgataactgccagaatgtgttgagcacatttcgtatgccagacactatatgaagccctgtatttggactgt

SEQ ID NO: 98853 - DNA, 201 bp, Homo sapiens
attctctagcagcccaagtagatgaagaggtggaggcttagggaagtggagccactggcccaggatctgcccagcccacaggcctgggacacaggctctcrgtcatgcccggcttcctttgaggagtgtggtgttgagctatgcattgactgagcctgagcattcctcctctgtagctctcctgggtctcttttgtgctaa

SEQ ID NO: 98854 - DNA, 201 bp, Homo sapiens
agatggaatgtcagacagctgaccaccccctgatatgctgctctttcaaggagctcagtctgagaagggtcatttatctccagaaaagaagctctattagstgaccacggttgttacaaacagacagatgagatggaccaatcgtagtctcccaaggcataaggtgtcctagtggaaggatcctggggaggtagaagagga

SEQ ID NO: 98855 - DNA, 201 bp, Homo sapiens
cagattacctggggcagacaaggattagaggctgtcctgtagtgtgtcccatggtgactgtttcccttctgtggtccctccctgtgcatagcctggcttayagggtatgagccttcccccagtttccagaggatgatctcctctcctcagtctgcctgaagaagacttagagtaactttcaggctggcattgagcatcctg

SEQ ID NO: 98856 - DNA, 201 bp, Homo sapiens
gaaaggggaggagatggaatgtcagacagctgaccaccccctgatatgctgctctttcaaggagctcagtctgagaagggtcatttatctccagaaaagargctctattagctgaccacggttgttacaaacagacagatgagatggaccaatcgtagtctcccaaggcataaggtgtcctagtggaaggatcctggggag

SEQ ID NO: 98857 - DNA, 201 bp, Homo sapiens
gaagctggaggagtgacaggtgtgtacatactggggcagcatgggcattcagcccccaccctgaagctcccaggagggcctcgtctcagagagcaaagcaracctcccccagcttgccctctcccacatgtgcagatcaagcgtatggtgcccatgttatttcagcaacacctcctggactcagcatcatctgttgcatga

SEQ ID NO: 98858 - DNA, 201 bp, Homo sapiens
aatttgaagagccttgttgcccactaaggaacctagaacttactttgaatatacaaggcagcctgttatgaagttctcactcctggtgcaggagctcttamcccagggtctgtgggatggtaggtagaaggcaagaggtccatgagtttagataagaaaaaattgatatctccatctccactaacctctagataaaattat

SEQ ID NO: 98859 - DNA, 201 bp, Homo sapiens
tcccgagtagctgggattataggcatgcaccaccacatccacctaaattttttgtatttttagtggagacaaggtttcaccacatgggccaggctgggatyacaggcgtgagccactgcacacggccaggtttctgcattttggctattatgaatggtattcataatattcataataatgataatgaatattattaataat

SEQ ID NO: 98860 - DNA, 201 bp, Homo sapiens
gcattttggctattatgaatggtattcataatattcataataatgataatgaatattattaataatgctataatgaacatcggtatacagatatatgttasagaccttgctttcacttgtctgctgtgtatacccagaagtgaaatcactgaatcatggtaattccatgcttaattttttgagtagcctccatcctgtttt

SEQ ID NO: 98861 - DNA, 201 bp, Homo sapiens
agctctattagctgaccacggttgttacaaacagacagatgagatggaccaatcgtagtctcccaaggcataaggtgtcctagtggaaggatcctggggargtagaagaggacggggctcctctgagctgcattttggggctgttgagatgagcattgctgtctgtttgattctccaggcaaaggccaggatggaattggt

SEQ ID NO: 98862 - DNA, 201 bp, Homo sapiens
taaacctgttattgacttccttttcatatcctgagaggggaccagtggtcactgcagtgtgtgctggtggtcatcccgagtccactgtgctgctggcagcmtgggtccaggtgcccacatgaagggccagttgggggctggcattctgacccctccatggagggttccctcctctgctttcccctgacttgcagttcagca

SEQ ID NO: 98863 - DNA, 201 bp, Homo sapiens
agaatttatagtgaataccatagggctccctgcattcatttttccttcttctaaaaaggaaagcaaatactgtgatttccttttgggtaataatctcccartgtgtatatagtattcggggtcttggagttctggagtaggcatgtgatcccacagaggcctattaactctcgaagggagcaactcaggaatgaggccagg

SEQ ID NO: 98864 - DNA, 201 bp, Homo sapiens
taatcctagggcagcaagagagagggaggaaggggaggcaggagggcaagcacagtgccatacgctgtcaagctggccatggcttcatgagaaacagccartggcttggtcatgcaggatgccctcacgcaagtcctttgccactaagcttcagaaaagcccctcggagcaggaggaagggagcagcattatccattggtt

SEQ ID NO: 98865 - DNA, 201 bp, Homo sapiens
aactatcgacattactcgctctacacctacaactgaactccatttccactggcccctggctcacttgttcactgccatgattgcatgatccctcctaattktctctctgtgcgtttgagtggttcctctaaaataaatctgaccttgtcacttcccccacccttaaaatcttagactgattccccgatttttctgggtatg

SEQ ID NO: 98866 - DNA, 201 bp, Homo sapiens
taaccctgtatcactagaccttttcctcatcctctcatgtctccattcctggcgtcccagtgtatgctgtgtgtgatggagaggagatgtcgagagacccyttaaaaatgaagctgggaaacaggtgcagacgtgtgtgcctgtacctttgccagtggagttaaaatcctcttttgatactaatagcaaccctataggata

SEQ ID NO: 98867 - DNA, 201 bp, Homo sapiens
tcttccatttaaccctgtatcactagaccttttcctcatcctctcatgtctccattcctggcgtcccagtgtatgctgtgtgtgatggagaggagatgtckagagaccccttaaaaatgaagctgggaaacaggtgcagacgtgtgtgcctgtacctttgccagtggagttaaaatcctcttttgatactaatagcaaccc

SEQ ID NO: 98868 - DNA, 201 bp, Homo sapiens
ggcacatctgtgtctgttggctctccccccttggtcacccaggtgacattgttgtacttcttccatttaaccctgtatcactagaccttttcctcatcctytcatgtctccattcctggcgtcccagtgtatgctgtgtgtgatggagaggagatgtcgagagaccccttaaaaatgaagctgggaaacaggtgcagacgt

SEQ ID NO: 98869 - DNA, 201 bp, Homo sapiens
agaagattctcagctctcccttttccgaccttccagacaggctacatgtttggtaaagggatctatttcgctgacatggtctccaagagtgccaactactrccatacgtctcagggagacccaataggcttaatcctgttgggagaagttgcccttggaaacatgtgagtaaacctggctctgggactgatggcatttcat

SEQ ID NO: 98870 - DNA, 201 bp, Homo sapiens
cccactgtggcacatctgtgtctgttggctctccccccttggtcacccaggtgacattgttgtacttcttccatttaaccctgtatcactagaccttttcytcatcctctcatgtctccattcctggcgtcccagtgtatgctgtgtgtgatggagaggagatgtcgagagaccccttaaaaatgaagctgggaaacaggt

SEQ ID NO: 98871 - DNA, 201 bp, Homo sapiens
tgtcttatggtaaaaaagtgtctgtcatgcaccaaaactggctgcaggagaactgtggtgccacttcacattggccatttggtgagattagtgtccttctmtcttccctagtggtatcagagatgtatagagagtcagaaaattaaaatgcccctcagcgttcccactgtggcacatctgtgtctgttggctctcccccct

SEQ ID NO: 98872 - DNA, 201 bp, Homo sapiens
actttggggttgttgccagtttggggctattacaaatacagctgctaggaatttgattggcatctcactggatccatggatcaaattgcagataattgacrtcttaacagtccatgaacatgatgcatctcttcatttatttaggtcttctttgatttcagcaaagtcttacagcttttagtgtagagatcttgcacatct

SEQ ID NO: 98873 - DNA, 201 bp, Homo sapiens
tgattaggagtcgttaattcacagaagtggagcagaaagatgagaatagggaagtagacagggcctacaatttgaagagccttgttgcccactaaggaacstagaacttactttgaatatacaaggcagcctgttatgaagttctcactcctggtgcaggagctcttaccccagggtctgtgggatggtaggtagaaggca

SEQ ID NO: 98874 - DNA, 201 bp, Homo sapiens
aaagtatagacctatgggtccaagcagggtaagacaccacatgtcatttgttttgcccctagagcaccttcctgatgggaaaactgtaggtgtggttcttygtgaagggattcttattctctttttacaattctgaagccttttaattaaaagacagggaggtagaccagcattctaggttttctgaagtttgaatataaa

SEQ ID NO: 98875 - DNA, 201 bp, Homo sapiens
actccttagagtaggggtttccacccattaaattctatccataactataagcagtgtttttagctagtgccagtaggctcacttaaccagattccagatcrtatcaattaaattcaccagagtctttgctggaaaattcacaagtctaaggccatagcacattgcttgaaaataataaaatttgtcaaactgcttctttaa

SEQ ID NO: 98876 - DNA, 201 bp, Homo sapiens
tgtaccacgtaaaatcagtttgaggccaggcgaggtggctcaggcctgtaatcccagcactttgggaggccaaggtgggcggatcacaaggtcaggagatygagaccatcctggctaacacggtgaaaccccatctctactaaaaatacaaaaagccgggcatggtggcgggcacctgtagtcccagctactcgggaggct

SEQ ID NO: 98877 - DNA, 201 bp, Homo sapiens; identical to SEQ ID NO: 15241

SEQ ID NO: 98878 - DNA, 201 bp, Homo sapiens
tcttcttctgaagaaccttgattacccatcagattctattagggcagtatttctcaagcttccatgtgcaaatgaatcacttgggaatcttgtcaaaatgyagattctaattcagcaggtctgatgtgggacctgcgattctgcatgtctaacatactcccaaggatgacaatggcactggtacatggaccacatttgaag

SEQ ID NO: 98879 - DNA, 201 bp, Homo sapiens
atgaaatcctcaatcacatgaagagagcaactcagataccaagctacaaaaaactcatcatgtattctgcggtaagtattttcatcttcatttaacatatrtttgttcaagtgtgtgatctcttgaagcacaggacctcatctttttttaatcttcatttccccatctccttgtacgtggtaggcacttgcacaaagcttt

SEQ ID NO: 98880 - DNA, 201 bp, Homo sapiens
aaaactcatcatgtattctgcggtaagtattttcatcttcatttaacatatgtttgttcaagtgtgtgatctcttgaagcacaggacctcatctttttttwatcttcatttccccatctccttgtacgtggtaggcacttgcacaaagcttttagaattaaatgcatcattctgtcctttaagggatttataatctaaact

SEQ ID NO: 98881 - DNA, 201 bp, Homo sapiens; identical to SEQ ID NO: 15207

SEQ ID NO: 98882 - DNA, 201 bp, Homo sapiens
tggtggaagcgggactcttgatttatttcccccaacctagttatggtggattcaggcacctagtccctcacgactcaaagtgcagtctacttttcagcatsggcatcaactaccacctggctagaaacacaggccccactcccaaacgagttgaatcaggatctgcatttgaataaaatcccaacatgctttataccagac

SEQ ID NO: 98883 - DNA, 201 bp, Homo sapiens; identical to SEQ ID NO: 15211

SEQ ID NO: 98884 - DNA, 201 bp, Homo sapiens
aaagccagtgttaactattttttcctaccatgatttccttccattaatggtagatgaagggccatttaatacatctttcttggcccttataaaacaacgtycatctaagtacttaagccaataaacatcagtttcttatttttattgactaaagagaatatttgactataagtggttaatttatacaaatgagataactct

SEQ ID NO: 98885 - DNA, 201 bp, Homo sapiens; identical to SEQ ID NO: 15215

SEQ ID NO: 98886 - DNA, 201 bp, Homo sapiens; identical to SEQ ID NO: 15218

SEQ ID NO: 98887 - DNA, 201 bp, Homo sapiens; identical to SEQ ID NO: 15231

SEQ ID NO: 98888 - DNA, 201 bp, Homo sapiens; identical to SEQ ID NO: 15233

SEQ ID NO: 98889 - DNA, 201 bp, Homo sapiens; identical to SEQ ID NO: 15200

SEQ ID NO: 98890 - DNA, 201 bp, Homo sapiens; identical to SEQ ID NO: 15199

SEQ ID NO: 98891 - DNA, 201 bp, Homo sapiens
tttgttctgagggataattttctgataaagtcttgctgtatattcaagcacatatgttatatattattcagttccatgtttatagcctagttaaggagagrggagatacattcagaaagaggactgaaagaaatactcaagtaggaaaacagaaaaagaaaaaaaggagcaaatgagaagcctaaaaagaagggaggagga

SEQ ID NO: 98892 - DNA, 201 bp, Homo sapiens
agatttaaaatcatagactatataaaataattcattaagttaatattgctttgtttcacttttacattttataaaatgattttatctaaactctttgtackcatctttggcttgtgtcttcaccactaaagccaattttgagtcttttaaaattgtttcccagatatattcactaataaaagataattttgtcttctatat

SEQ ID NO: 98893 - DNA, 201 bp, Homo sapiens
aagcttttagaattaaatgcatcattctgtcctttaagggatttataatctaaactaacaagaagacaaacataaacactatacaaaatgggatggaaatrccatgcaggcaagtgctatggcacctcagaaaatctagccatcccttctgttccaagagggtggagaagagaagcagaaaggcttcctagacaaggcagc

SEQ ID NO: 98894 - DNA, 201 bp, Homo sapiens; identical to SEQ ID NO: 15209

SEQ ID NO: 98895 - DNA, 201 bp, Homo sapiens
cactgcactccagcctgggcaacagagcgagactctgtctaaataaataaataaataaataaataaatttgttaccttttcccctgaccctactcttgtcyatcttgatgagcagcaatacctggtaacttaggagttattttttaccctaccctctccttcattctccatagtctctcacctcctcttgtaaatctacct

SEQ ID NO: 98896 - DNA, 201 bp, Homo sapiens
taatcccagctactcaggaagactgaagcaggagaattgcttgaacctgggaggcggagtttgcagtgagctgagattgtgccactgtgctccagcctggrtgacagagcaagactctgtctcaaaaaaaaaaaacaaaaaacaaagataaaagtaaactgaaaacaaggatagaaatgtctgctaacatgctctgtgacc

SEQ ID NO: 98897 - DNA, 201 bp, Homo sapiens
cttgtctatcttgatgagcagcaatacctggtaacttaggagttattttttaccctaccctctccttcattctccatagtctctcacctcctcttgtaaayctacctgtggtatgtttgcagaattctttccctcaaaacacaaataacaatatgcaggtagagtgaaatatgattaagcagcaaaaaatgttaatagaaa

SEQ ID NO: 98898 - DNA, 201 bp, Homo sapiens
ttaaaccaaaagctatggactgggtaggaatgggtaaattcatttatataagcttttcttctgaaagtcaataccactacttatcacaatatgaagttctyttagaaagaaatggcaggacaagaaagtctggccctactagttcttgtgaggtgaaaaaggataagtcaacaaagaggacagtcatataaatacacatac

SEQ ID NO: 98899 - DNA, 201 bp, Homo sapiens
cagtctccccatttacacacctaaattggctaaaatctccccataagtttttccattagtccctcaactggcatgtaatagtccaagtggaaagaaattcwgtggcagttcaacaacacagaactaacagagctctctcctctgcctttgtctgccagggagtactttgtggagatgtactatcggaatgagacgcagcac

SEQ ID NO: 98900 - DNA, 201 bp, Homo sapiens
tttaacttcaggggtgacactgttcagtaagacacacacacatacacacacacacacacacacacacacaccaaaaaaatccctggggcaaatttaggatsatatggctggtcatatcagtgaaaagagagctcttcttgctctaggccagaggttggcaaactactgcctgtatgcctaatccagcccactacctggttt

SEQ ID NO: 98901 - DNA, 201 bp, Homo sapiens
ctgtagccttgacctcccaggctcaagcgatcctcccacctcagactcccaagtagctgggactacagtcatgcaccaccatgcccagctaaatttttttwaaattttttgcaaagacagggtctccttatgttgcccaggctagtcttgaactcctgggctcaagcgatcctccaccttggcctcccaaagttctgggat

SEQ ID NO: 98902 - DNA, 201 bp, Homo sapiens
tgtttgtttttgtgtctgtttttgagacagggtctcattctgtcctccaggctggagtgcagcagcatgatcacggctcactgtagccttgacctcccagsctcaagcgatcctcccacctcagactcccaagtagctgggactacagtcatgcaccaccatgcccagctaaattttttttaaattttttgcaaagacagg

SEQ ID NO: 98903 - DNA, 201 bp, Homo sapiens
gttagtttgttttgtttttgtttctttgtattttttgtttgtttttgtgtctgtttttgagacagggtctcattctgtcctccaggctggagtgcagcagyatgatcacggctcactgtagccttgacctcccaggctcaagcgatcctcccacctcagactcccaagtagctgggactacagtcatgcaccaccatgccc

SEQ ID NO: 98904 - DNA, 201 bp, Homo sapiens
aactacatgtttattgaatgatgaaacagctgcacacattcctgcacagaaaacacacattgtctaggtgacaaagagtaatgtggacacatcagggccaycttctgacctttgctagtttttttgttagtttgttttgtttttgtttctttgtattttttgtttgtttttgtgtctgtttttgagacagggtctcattct

SEQ ID NO: 98905 - DNA, 201 bp, Homo sapiens; identical to SEQ ID NO: 15202

SEQ ID NO: 98906 - DNA, 201 bp, Homo sapiens
ctgtgtggttctgccaaaacaaaagctcagactattattcagatctggctgggcaagagagatttgtcaactacatgtttattgaatgatgaaacagctgmacacattcctgcacagaaaacacacattgtctaggtgacaaagagtaatgtggacacatcagggccatcttctgacctttgctagtttttttgttagttt

SEQ ID NO: 98907 - DNA, 201 bp, Homo sapiens
actcagcctcatttctggcccaccaggtgccagcagtgtgactcagttgcaagccccatcaaatggtggaagcgggactcttgatttatttcccccaaccwagttatggtggattcaggcacctagtccctcacgactcaaagtgcagtctacttttcagcatcggcatcaactaccacctggctagaaacacaggcccca

SEQ ID NO: 98908 - DNA, 201 bp, Homo sapiens
cttaagtgcttaacaacaaaagatgtagagggtgccttggaagccacataagcactcagcctcatttctggcccaccaggtgccagcagtgtgactcagtygcaagccccatcaaatggtggaagcgggactcttgatttatttcccccaacctagttatggtggattcaggcacctagtccctcacgactcaaagtgcag

SEQ ID NO: 98909 - DNA, 201 bp, Homo sapiens; identical to SEQ ID NO: 15204

SEQ ID NO: 98910 - DNA, 201 bp, Homo sapiens; identical to SEQ ID NO: 15205

SEQ ID NO: 98911 - DNA, 201 bp, Homo sapiens
ccatgactaagttgagagaattgtcagaattgtccctcctgtccctctatggaattcacaagcagaaagagaaatctaggctccaagggggtaagtattawaaaatgagaggagcatattggatttgtggttgaatgatccaggtctgagtcattccctccactaatcaactgtgtgatctcagacagttcacttaatcac

SEQ ID NO: 98912 - DNA, 201 bp, Homo sapiens
ttattaatttgttcctttaaccataaacatctagaggctaggaataccaaactttctagaaacacagcccagcaagtcccagcttcattttgctagccctyactcaaaatggagttgctctggttcacacgtctctgacagcaggattaaaagataatatgggccaggtgtggtggcttatgcctgtaatcccaacacttt

SEQ ID NO: 98913 - DNA, 201 bp, Homo sapiens
agaaagagaaatctaggctccaagggggtaagtattaaaaaatgagaggagcatattggatttgtggttgaatgatccaggtctgagtcattccctccacyaatcaactgtgtgatctcagacagttcacttaatcactcttgcaccagcttccattctgcaaaatggggatattaatgatacctacttcatagacagtga

SEQ ID NO: 98914 - DNA, 201 bp, Homo sapiens; identical to SEQ ID NO: 15216

SEQ ID NO: 98915 - DNA, 201 bp, Homo sapiens; identical to SEQ ID NO: 15223

SEQ ID NO: 98916 - DNA, 201 bp, Homo sapiens
atatcaaatgcatccggtgtgctcggtattatactgatggctttacatatattacacatttaattttcatgatgctcctggatgagaaataatgcttttgwgttttacacgaaaggaaattgaggaaaggaaagggaaattgaggcatgcagaatgttaagttaaatcattttcccaaggtcacccagcaggaccttgaca

SEQ ID NO: 98917 - DNA, 201 bp, Homo sapiens
cactattcaccacagcatcaggacaagtccatcaaaatcccaagagaatgcatagaggcaaagcatattagggctggaccagactgggaggttgttcactsaggctacttaactagggaaaaaattcaaatcactgaccagaaaaggaatcaattatagctagaaaagcagggctgcacaccaggtataaagagtgaggca

SEQ ID NO: 98918 - DNA, 201 bp, Homo sapiens
ggtgggcggattgcctgagctcaggagttcgagaccagcctggccaacatggcgaaatttcatctctactaaaaatacaaaaattaggcgggtgtggtggygcatgcctgtaatcccagctactcgggaggctgaggcaagagaatcgcttgaacccaggaagtggaggttgcagtgagctgaaatcgtgccactgcactc

SEQ ID NO: 98919 - DNA, 201 bp, Homo sapiens
cacgtgtggccaggtgtagtggctcatgcctataatcccagcactttgggctaaggtgggcggattgcctgagctcaggagttcgagaccagcctggccarcatggcgaaatttcatctctactaaaaatacaaaaattaggcgggtgtggtggcgcatgcctgtaatcccagctactcgggaggctgaggcaagagaatc

SEQ ID NO: 98920 - DNA, 201 bp, Homo sapiens
atattgacttctaactttgaggtcatcgtgagagtctggggggcagcaattacttccgtagttctatcttaataacagatgacacagtttgcctccatccmtcctaaagttaattgacccaatcacatgctactttcccagtattttcacttaatcatcagcaactatttcagtgaaaattcattagcattgtaaaagact

SEQ ID NO: 98921 - DNA, 201 bp, Homo sapiens
tggtgtttctcactcaccatgctccaccttctggccaaaaggagtactctctgttcctgttttcccaactagctcactaaatatggggcaagattctgacsacccacctaattcatattgacttctaactttgaggtcatcgtgagagtctggggggcagcaattacttccgtagttctatcttaataacagatgacacag

SEQ ID NO: 98922 - DNA, 201 bp, Homo sapiens
acatggtgtttctcactcaccatgctccaccttctggccaaaaggagtactctctgttcctgttttcccaactagctcactaaatatggggcaagattctsaccacccacctaattcatattgacttctaactttgaggtcatcgtgagagtctggggggcagcaattacttccgtagttctatcttaataacagatgaca

SEQ ID NO: 98923 - DNA, 201 bp, Homo sapiens
aagcttggtagaattcctctatgacagtcatctggccctggagcttttatgtttgagaagatggcagtaggagctctttaacaataatttctattattttwtgaaaatctattgaggttaatattggcaaattgtagttccctagaaatttcatccatcagacagacaatatcttccaaaaaggcttcccagaaatggctg

SEQ ID NO: 98924 - DNA, 201 bp, Homo sapiens
agtgttggtagcgggtattcttgtcttatttctgattttagaggagttttcctaataagcatacaggcttttgaaccaaaatagacatatttttatgaaaytaaggaaatatccacctttcttattttcttgagtgtatttttttaaatcaatattagttgtttaatctcctgaatgattgttttaacattttttaataca

SEQ ID NO: 98925 - DNA, 201 bp, Homo sapiens
aaatatatatttcacaatatcatagataatgaatggcatttttaaaaaaaagtttgtctattaactgcttaccgtgttcttgccatgtaggttctgtatcratgtattcttatatggcttctatattttgagtcatgtttagaaaagctttccccactcctaggttataaaggaagtctgcaatgctttcttctaattcca

SEQ ID NO: 98926 - DNA, 201 bp, Homo sapiens
gaaagagctgatgggatcagagggatgtttgctctcctattgcctaagccaacaagaaaccctatatttttacaatgaaaagacatacatttagagatggyacaaactggtatttatgatgtgtatactatagtggactagggtgcgtgtataggagagtaactttccagatgaaataatgaattagcatctcattacgaa

SEQ ID NO: 98927 - DNA, 201 bp, Homo sapiens
attcatgaacaaaaaagacaaaagttcctgcctttgcaaagcttgtgttctactagagggagagagggatagataacaaataataagcataataagtgttytggaagatgaggatcacaatggccaatttggggtgaagtgaaggaggatatacaagatgcacttttaaatgggaaggtctcatggagatgagatttaggc

SEQ ID NO: 98928 - DNA, 201 bp, Homo sapiens
agttctaagtcattaagttttttctacaaacatttattagtactcgttatgtgccagatactgttctcagtgcttgagatacattcatgaacaaaaaagayaaaagttcctgcctttgcaaagcttgtgttctactagagggagagagggatagataacaaataataagcataataagtgttttggaagatgaggatcaca

SEQ ID NO: 98929 - DNA, 201 bp, Homo sapiens
agtgtgactcagttgcaagccccatcaaatggtggaagcgggactcttgatttatttcccccaacctagttatggtggattcaggcacctagtccctcacractcaaagtgcagtctacttttcagcatcggcatcaactaccacctggctagaaacacaggccccactcccaaacgagttgaatcaggatctgcatttga

SEQ ID NO: 98930 - DNA, 201 bp, Homo sapiens
ctaagaagcatcctggcatcatcagaaaatactggactaagagttgggaacttataagttctaagtcattaagttttttctacaaacatttattagtactygttatgtgccagatactgttctcagtgcttgagatacattcatgaacaaaaaagacaaaagttcctgcctttgcaaagcttgtgttctactagagggaga

SEQ ID NO: 98931 - DNA, 201 bp, Homo sapiens
aaagaggactgaaagaaatactcaagtaggaaaacagaaaaagaaaaaaaggagcaaatgagaagcctaaaaagaagggaggaggagaaggaaaacccaayacccccacctgcctcccacttcttatccaaaggctcaaagtcccacccagctccctgcaaccatcacttctcaccacctcctctgatttagcatcctggt

SEQ ID NO: 98932 - DNA, 201 bp, Homo sapiens
ttctcagtgtctaggacaatgctctggcaaactcctgaaatattttacagtacaaaggagcatatcatttaaaaataaataaataaataaataaataaatatcacagggagagaaagcatacgcgctcacctgagtcttttctttgttttcaggttcctcattccacattcagtattagccagtatacccaggcctctgtc

SEQ ID NO: 98933 - DNA, 201 bp, Homo sapiens
tcatctaacaaaccagccctcccatttccaccctgcaaatctctcccgcctgccccagtctccccatttacacacctaaattggctaaaatctccccatamgtttttccattagtccctcaactggcatgtaatagtccaagtggaaagaaattcagtggcagttcaacaacacagaactaacagagctctctcctctgcc

SEQ ID NO: 98934 - DNA, 201 bp, Homo sapiens
tttctcagtgtctaggacaatgctctggcaaactcctgaaatattttacagtacaaaggagcatatcatttaaaaataaataaataaataaataaataaatatcacagggagagaaagcatacgcgctcacctgagtcttttctttgttttcaggttcctcattccacattcagtattagccagtatacccaggcctctgt

SEQ ID NO: 98935 - DNA, 201 bp, Homo sapiens
ttttctcagtgtctaggacaatgctctggcaaactcctgaaatattttacagtacaaaggagcatatcatttaaaaataaataaataaataaataaataaatatcacagggagagaaagcatacgcgctcacctgagtcttttctttgttttcaggttcctcattccacattcagtattagccagtatacccaggcctctg

SEQ ID NO: 98936 - DNA, 201 bp, Homo sapiens
cttttctcagtgtctaggacaatgctctggcaaactcctgaaatattttacagtacaaaggagcatatcatttaaaaataaataaataaataaataaataaatatcacagggagagaaagcatacgcgctcacctgagtcttttctttgttttcaggttcctcattccacattcagtattagccagtatacccaggcctct

SEQ ID NO: 98937 - DNA, 201 bp, Homo sapiens
gaaaaagccgatacaggaagcaggacaaaatcattaaatataggatatgtcctatatatgcaagatactttgcaaccctactccttagagtaggggtttccacccattaaattctatccataactataagcagtgtttttagctagtgccagtaggctcacttaaccagattccagatcgtatcaattaaattcaccagag

SEQ ID NO: 98938 - DNA, 201 bp, Homo sapiens
tggagagtatataagaaagagatatagaaaattcttgaatgagtcctataaacatgaacaggcaagttggggagccaagagtgggaactttgatctttgawataattaaaataattctgcatatataaaagtgctttgcctgttttccaaggaacttatacaagtcagaggtcttgtttacaaatatattcctctttatgc

SEQ ID NO: 98939 - DNA, 201 bp, Homo sapiens
tcttttaaatgaaaataatgatacatatctaaatcatactgcctagcacaccgctaatgctcaaccaaaatctttccttctctacttattaagtcattgtkggcgtatgggaaatttaattgaatcagaagccatcatggtgctgtacaagtgcttcatacctattgaatgtgaatctgaacaggcgataaaattgatttc

SEQ ID NO: 98940 - DNA, 201 bp, Homo sapiens
gttcagtttggttattgattcatcttctttaaggtgtcctggtcaatgaaatcctcaatcacatgaagagagcaactcagataccaagctacaaaaaactyatcatgtattctgcggtaagtattttcatcttcatttaacatatgtttgttcaagtgtgtgatctcttgaagcacaggacctcatctttttttaatcttc

SEQ ID NO: 98941 - DNA, 201 bp, Homo sapiens; identical to SEQ ID NO: 15235

SEQ ID NO: 98942 - DNA, 201 bp, Homo sapiens
attgacttctaactttgaggtcatcgtgagagtctggggggcagcaattacttccgtagttctatcttaataacagatgacacagtttgcctccatccatyctaaagttaattgacccaatcacatgctactttcccagtattttcacttaatcatcagcaactatttcagtgaaaattcattagcattgtaaaagactct

SEQ ID NO: 98943 - DNA, 201 bp, Homo sapiens
gctttaagttggggttcccacaacttcctctttgggttcgatcagtttgcaggggcagctcacagaactcagggaaacacagttattggttattacaaagkatattacaaaagatataaggaaaaggtcaaggagcttgcctgccttcttcaggaccaccacattccaggaacctctaagtgttcagctctctgaaggctc

SEQ ID NO: 98944 - DNA, 201 bp, Homo sapiens
atataagtctaaaatcacctgccttattcaggctaaggggctgggattattgtcttcatatacaaaggatagtcttttttttttgtttctattttgcaaartacccattttcagcacaatacaaaaggtagatataatgctgtgtactttttaaaataatcttttgaatattatacattcatactgtccaaaaattagaaa

SEQ ID NO: 98945 - DNA, 201 bp, Homo sapiens
actaatcttccaggtgtgaaacttaaggctatatgaaagaaatagtttgggacaaagaatcccttcctaatttccctgcagtcccatcataggcatgaccrtcgcatctctttatggctgaagcttagcctgactgctggacccagacttttgcccagtgacctctggggtaggttactatcctctttgtcctgccagtac

SEQ ID NO: 98946 - DNA, 201 bp, Homo sapiens
ccttcctgccttcaggggatcattcatgaaagtaatttctcacctgaccaaaatgatcgcttaacatttattgcatcattgcccctgtttctgtagactaytctaccgaagttttaatttgtcactagtttaaagggccaaaagatctgttttcttcagatattagagacacaaaccaagcatctcccactttcttggaat

SEQ ID NO: 98947 - DNA, 201 bp, Homo sapiens
ctatacaaaatgggatggaaataccatgcaggcaagtgctatggcacctcagaaaatctagccatcccttctgttccaagagggtggagaagagaagcagwaaggcttcctagacaaggcagcacatccaacacatcaaaatgaaaggggttagtaagtgctcctcactagtgtgtaggacaaataaagtaaattattagg

SEQ ID NO: 98948 - DNA, 201 bp, Homo sapiens
tggagctagtctgagatccccctgtaaggtttgctggattagcttgactctgaatcagcaggtggttcccttgcttttcctctgtgatccgagaaaaatawatcctccccaattctgaaaagctgttctcagcagaaagaggaggaaactgtccttggttcttgttctcggactaactgaagtgcctgtgacccatgaaat

SEQ ID NO: 98949 - DNA, 201 bp, Homo sapiens
agcaggagggcccatgtgggtaagctgaggacatcaaggtgagaatatcaaggtgggtagggaccagatcaggtaagatcttgtgagcccttgtaaggacytttaatttatgcaaagagcaatagaacatgatataatatctaagagtgatgaggatataaaagaaacaagactagccacatacaagttgataattgttgg

SEQ ID NO: 98950 - DNA, 201 bp, Homo sapiens
ccgagattcacctgttcatcagaacaggccttttttgcatattactatgttccaggcactgttttggggttatagcagtgcttgtgacagcaaggcttctkctttcaaggagtttctagggacagggagggagccagattttttttaattttagtaaaaacaaaaaataagaaaacatcaggaatatttatttgaaataaa

SEQ ID NO: 98951 - DNA, 201 bp, Homo sapiens
ctcatgattatgttccagttctctgctcttcaaaacactctgctaaggtgaccacacttgtttttctctctcaggccattctgtcatttagttgcataacytcagttctattctttcaataatatacatagttcacagtgccttcggggtagtttccgtatcaaggttttggtttcttctgatacaaaacacacacacaca

SEQ ID NO: 98952 - DNA, 201 bp, Homo sapiens
agtttcaatagtcaagttagctttgggaatagaactgggttaaactgtgtttaaaaggtctctttaatgcagtaatcctaagtctttaacatgctaatacrcactgtggctttcaaggaaaggatctagtgttttccaaactctgttttcaaaattttgattacagcattcacctccctctttttttccccaatgtcctgt

SEQ ID NO: 98953 - DNA, 201 bp, Homo sapiens
tgggcacagtggctcacgcctgtaatcccaacactttgggaggccaaggcgagtggatcacctgaggtcgggagttcgagaccagcctggccaacatggcraaaccccgtctctactaaaaatacaaaaattagccaggcgtggtggcaggtgcttgtaatcccagctacttgggagggtgaggcaggaaaatcacttgaa

SEQ ID NO: 98954 - DNA, 201 bp, Homo sapiens; identical to SEQ ID NO: 15210

SEQ ID NO: 98955 - DNA, 201 bp, Homo sapiens; identical to SEQ ID NO: 15212

SEQ ID NO: 98956 - DNA, 201 bp, Homo sapiens; identical to SEQ ID NO: 15213

SEQ ID NO: 98957 - DNA, 201 bp, Homo sapiens; identical to SEQ ID NO: 15214

SEQ ID NO: 98958 - DNA, 201 bp, Homo sapiens; identical to SEQ ID NO: 15217

SEQ ID NO: 98959 - DNA, 201 bp, Homo sapiens; identical to SEQ ID NO: 15219

SEQ ID NO: 98960 - DNA, 201 bp, Homo sapiens; identical to SEQ ID NO: 15220

SEQ ID NO: 98961 - DNA, 201 bp, Homo sapiens
ctgctcagtgtgtgtttgttgagtggactacagaacctgagattatagtcaatctgttaatatcaatgccctgctcattacaactcacacacacacacacmctaacacaccctactggtcattctcagccaagagagcacatgatgcagggtaaagagaccaacagagacaccagatagttacagacatctctgaagcaac

SEQ ID NO: 98962 - DNA, 201 bp, Homo sapiens; identical to SEQ ID NO: 15222

SEQ ID NO: 98963 - DNA, 201 bp, Homo sapiens
gaacccaggaagtggaggttgcagtgagctgaaatcgtgccactgcactccaggctggatgacagagcaagattctgtctcaaaaaaaaaaaaaaaaaaaagtgccacgtgtggtggcatgcacctatagtcccaactactcaggaggctgaggtaggaggattgcttgagtcctggagtttgaggttacagtgagctgtg

SEQ ID NO: 98964 - DNA, 201 bp, Homo sapiens
acaagaacgaaattccgtctcaaaaaaaaaaaaaaaagaccaaatatatatttcacaatatcatagataatgaatggcatttttaaaaaaaagtttgtctmttaactgcttaccgtgttcttgccatgtaggttctgtatcaatgtattcttatatggcttctatattttgagtcatgtttagaaaagctttccccactcc

SEQ ID NO: 98965 - DNA, 201 bp, Homo sapiens
gaaggagaatggcgtgaacctgggaagcagagcttgcaatgagccgagatcgcgccactgcactccagcctgggtgacagagcaagactctgtctcaaaamataataataataataaaaggtattagtgtaactgctgtgtggagaatgaattaggatggctgaaagagtgaacactgatttaccaaataggaagttctca

SEQ ID NO: 98966 - DNA, 201 bp, Homo sapiens
ccccgtctctactaaaagtacaaaaaattagccaggcgtggtggcaggcgcctgtagtcccagctactcaggagagtgaggaaggagaatggcgtgaaccygggaagcagagcttgcaatgagccgagatcgcgccactgcactccagcctgggtgacagagcaagactctgtctcaaaacataataataataataaaagg

SEQ ID NO: 98967 - DNA, 201 bp, Homo sapiens
gtgctcatggaaaggttttaggcagaggacagatgctgtaactggcttcttgttttaggaagacccttttcagtcattacctgtacgagatctctttgtaktaagatacaattaatcatgctctcttttctcagtgtctaggacaatgctctggcaaactcctgaaatattttacagtacaaaggagcatatcatttaaaa

SEQ ID NO: 98968 - DNA, 201 bp, Homo sapiens
tttaatgaacagtcttctgctttttctcttaacaatataatttctcctatggaacaatttgaaagccatgcatgcaaatttagactaaaagcaatggacayaaaagaaacctgtatacattcttcggtattacgcacatgtgatgagtggtgcttttgggcacttgcctgacagtagcttggacagaaaagacactggagc

SEQ ID NO: 98969 - DNA, 201 bp, Homo sapiens
ttattaagtcattgtgggcgtatgggaaatttaattgaatcagaagccatcatggtgctgtacaagtgcttcatacctattgaatgtgaatctgaacaggmgataaaattgatttcaatctctgtagcatgacactactgtgagtggcctacagatggcgctagatgtttacaacggactccttcctccctatgcttcttg

SEQ ID NO: 98970 - DNA, 201 bp, Homo sapiens; identical to SEQ ID NO: 15234

SEQ ID NO: 98971 - DNA, 201 bp, Homo sapiens; identical to SEQ ID NO: 15238

SEQ ID NO: 98972 - DNA, 201 bp, Homo sapiens
tgtctgcctgggaggttcttatttaattggtctagtatgtgtcctgggcattgggatttttagaagctccttggtgatcagttcactctaatgtgtagccraggctgagaatttctgccctgactatatttcatagaggagaaaactcaggcaggctatttgagaccagcatcttctgtctcccaggtcaaagctcttctc

SEQ ID NO: 98973 - DNA, 201 bp, Homo sapiens
ctggcataatatgatattcttgatggaagcagcctccaaattctcagcacataatctatatactggaatgggtaacttccacattatggacatgaaggacytcctagctactagggaaggtggagctagaggatcacttgagcacagcagtgtgaggccacattgagctaggatcacaccattgcactccagcctggacaa

SEQ ID NO: 98974 - DNA, 201 bp, Homo sapiens
tgacaagttgttaacaggtgtacatggggaaaaaatcagtttcaatagtcaagttagctttgggaatagaactgggttaaactgtgtttaaaaggtctctytaatgcagtaatcctaagtctttaacatgctaatacgcactgtggctttcaaggaaaggatctagtgttttccaaactctgttttcaaaattttgattac

SEQ ID NO: 98975 - DNA, 201 bp, Homo sapiens
taaaagtgaatctaaatttggaattttaggatgattttctgatatatagatttagttgacgattaaaatcattggcacatgtgaccagttatgaaaaaagrtggggggtggctgatgcataatatcaagaaaagaaaatatactgttgacattgtttgaaaatagatggaaagagggtttgcaaagtgaaggggattcatc

SEQ ID NO: 98976 - DNA, 201 bp, Homo sapiens
aggaaaagaagtgagccaggttacaagaaaagctgagtgtgcattctcagtgatgaattggaagtgggtggaagacaatgatgtggaaggtgaagccccakatgaagtcaagatttcagttttcagtggcaggaaggaggtggtcttgggccaggcaaatgtactgattaggcaatgggtttgaaatgccacaggggcatc

SEQ ID NO: 98977 - DNA, 201 bp, Homo sapiens
atgatcaaagtggaagtgaggatgatgattgagatagaagtataaaccatttaattcaacttggattaagtttgagttgagatgtattcaattcaagcagsctttttctggttttcaaagaaaactttgttgttgttgcccttctcacttgaagagctaaaaggaccccacaggcggtaccacagaaaaaattagggtcta

SEQ ID NO: 98978 - DNA, 201 bp, Homo sapiens
ttactacttatgagtgtggctcctccttccctttcaatcccttaattaaatagcttcccctctacaggcttttgaagtggtagcagttcctcctaactccygccagaaacagctctcctcaacatgagagctgcacccctcctcctggccagggcagcaagccttagccttggcttcttgtttctgctttttttctggcta

SEQ ID NO: 98979 - DNA, 201 bp, Homo sapiens
gagaatagtccatgatctgtacaaacatccagagagctgctttctcccatggcctcccacaggtctgactgccagagagtagaagcaagaggggtgaaaayagaggagtacctgctgtgctgtcatttcaggtctgctctggagaagaacatgggctaagaattatcttttatgatctgaaaaagctgtctgaagttcctt

SEQ ID NO: 98980 - DNA, 201 bp, Homo sapiens
taaaaaataataataggccgggcgcggtggctcacgcctgtaatcccagcactttgggaggccaaggcaggtggatcacgaggtcaggagatcgagaccawcctggctaacacagtgaaaccccgtctctactaaaagtacaaaaaattagccaggcgtggtggcaggcgcctgtagtcccagctactcaggagagtgagg

SEQ ID NO: 98981 - DNA, 201 bp, Homo sapiens
catggtggtgcacgcctgtaatcccagctactcaggaggctgaggcaggagaatcacttaaacctgggaggtggaggttgcagtgagccgagatcgcaccrttgcactccagcttgggcaacaagagcgaaattccgtctcaaaaataaataaaaaacaaaacaaaacaaagactggatagcagcaccaaaatttagcaaa

SEQ ID NO: 98982 - DNA, 201 bp, Homo sapiens
ctaatccagcccactacctggttttgtaaataaagttttattgaaatacagccacactcattcatttatgcattgtctattgctgctttcatgctaccacygcagagctgagtagttgcaacagattttttaacccacaaagcctaagacatttactctctggacttttacagaaaagtttgccaacctctgctgtagact

SEQ ID NO: 98983 - DNA, 201 bp, Homo sapiens
tattagctgggcatggtggtgcacgcctgtaatcccagctactcaggaggctgaggcaggagaatcacttaaacctgggaggtggaggttgcagtgagccragatcgcaccgttgcactccagcttgggcaacaagagcgaaattccgtctcaaaaataaataaaaaacaaaacaaaacaaagactggatagcagcaccaa

SEQ ID NO: 98984 - DNA, 201 bp, Homo sapiens
cccacaaagcctaagacatttactctctggacttttacagaaaagtttgccaacctctgctgtagactagaaatgaaggaagcaaagtttatgtcttcagrtcaatgatatttttgtctagtttacgaagatttaataaaggatacaacagataactttgaagctagctttccacgatagcatgttctaatgattacaaat

SEQ ID NO: 98985 - DNA, 201 bp, Homo sapiens
gaacctgggaggcagaggttgcagtgagccaagatcatgccattgcactccagcctgggcaacaagagcaggactccatctcaaaaaaaaaaaaaaaaaaactccacttttgtatatctttacattttccactggatatagcctcgactgtactcaccaggttctccacaccctaagccacatgccagatttgtttagcag

SEQ ID NO: 98986 - DNA, 201 bp, Homo sapiens
aggataatcatgatagtcacccctaatcactcctgggataagggtgtaatcataccagaaccaagaactgatatattcatgaccaaaactgcagcctgacyaaaaggcacttgttgacaaagggcaacttgctgatttcaggtggctgtcatggctcccaaaagcttggccacagagtttagcaccaacatggcatgtgaa

SEQ ID NO: 98987 - DNA, 201 bp, Homo sapiens; identical to SEQ ID NO: 15224

SEQ ID NO: 98988 - DNA, 201 bp, Homo sapiens
tggaaagccgaaacagaaggattgcttgaggccaggagtgcaagactccaggctggttaacatagtaagacctcatctctgcaaaaaagaaaaaaaaaaaagatggaccagataaaattccactgaaaagcaaaaatcaggtctcctgcctcagttcacaaacaaccttacatacaatctctctcccttgctgtatggctc

SEQ ID NO: 98989 - DNA, 201 bp, Homo sapiens; identical to SEQ ID NO: 15227

SEQ ID NO: 98990 - DNA, 201 bp, Homo sapiens
acttacaaggtatacactcttctcattcttcatggttgactttcttcatgcagaattcttaatcaagtaatataatattcttgggttttttttttttttttgagacagagtcttactctgtcgcccaggctggagtgcaatggcgtgatcttggctcactgcaacctccgtctcccaggttcaagtgattctccagtctca

SEQ ID NO: 98991 - DNA, 201 bp, Homo sapiens
aagaaaggaatgatgacttacaaggtatacactcttctcattcttcatggttgactttcttcatgcagaattcttaatcaagtaatataatattcttgggktttttttttttttttgagacagagtcttactctgtcgcccaggctggagtgcaatggcgtgatcttggctcactgcaacctccgtctcccaggttcaagt

SEQ ID NO: 98992 - DNA, 201 bp, Homo sapiens
tatctttttttccttctgtttcactctttctctgcctctaagcctctaagctgcttcttgcctttcctctctcgttttctttctcttccctacatttttttatttgagatagtgaaagtgggctgataagtaggtaaattttctttctgtcaagaatactcaaaaattatttttataatttgaaggaaagtcactgtttcc

SEQ ID NO: 98993 - DNA, 201 bp, Homo sapiens
tatataagaaagagatatagaaaattcttgaatgagtcctataaacatgaacaggcaagttggggagccaagagtgggaactttgatctttgaaataattraaataattctgcatatataaaagtgctttgcctgttttccaaggaacttatacaagtcagaggtcttgtttacaaatatattcctctttatgcaaatttt

SEQ ID NO: 98994 - DNA, 201 bp, Homo sapiens
ctcagcagaaagaggaggaaactgtccttggttcttgttctcggactaactgaagtgcctgtgacccatgaaatgctagtttgacaagttgttaacaggtgtacatggggaaaaaatcagtttcaatagtcaagttagctttgggaatagaactgggttaaactgtgtttaaaaggtctctttaatgcagtaatcctaagt

SEQ ID NO: 98995 - DNA, 201 bp, Homo sapiens
ccaagtggaaagaaattcagtggcagttcaacaacacagaactaacagagctctctcctctgcctttgtctgccagggagtactttgtggagatgtactaycggaatgagacgcagcacgagccgtatcccctcatgctacctggctgcagccccagctgtcctctggagaggtttgctgagctggttggccctgtgatcc

SEQ ID NO: 98996 - DNA, 201 bp, Homo sapiens
agccctgatatggagtgtcagaagtttatgctggatggcagctgaagggccatgttgtcctgctgcttctttgtttaattgtagaaagaagcaaggaagcwagggagaacccccctgtcagtgtttgctcagggaaggcagggcaggagtgacaggataggagcagcattttggaaattaattattttatagaataactgg

SEQ ID NO: 98997 - DNA, 201 bp, Homo sapiens
catggctcccaaaagcttggccacagagtttagcaccaacatggcatgtgaatcaagctaaagtccctaatgcattccacagggcaaccctctctgagatrgagggatttagacctgttagacatgtacattcagattatcctattcatcctcaaggaatttccagtatcttatagaaagagcagatacctacctccttaa

SEQ ID NO: 98998 - DNA, 201 bp, Homo sapiens
aatcaagctaaagtccctaatgcattccacagggcaaccctctctgagatggagggatttagacctgttagacatgtacattcagattatcctattcatcytcaaggaatttccagtatcttatagaaagagcagatacctacctccttaattaacccttttttatacttactggtgtacagacctgtctcttcttactat

SEQ ID NO: 98999 - DNA, 201 bp, Homo sapiens
accagatagttacagacatctctgaagcaacatgtccttaaaacaggatctgttttggcaccacaaggtaccccacagccctcagtgcctagaaataggayaaatactgtaagctctatatctgtctttcaccacctcaggagcaacagcagttaggtgttcagatgtgaagtgtgaagagcaaaagtttcctctactgaa

SEQ ID NO: 99000 - DNA, 201 bp, Homo sapiens
ccaaccaggttgctttgtaccatgatcataatattgctcattccttaacaagtattatgattctgatgttagcacaatgtctgtaatatttcactgtgggwgtcctttcctttctctaataccttggcagctctgtagaaaaaaacctcatgctccctttacgttcgcttctgctttgattttcctactctaggtttatat

SEQ ID NO: 99001 - DNA, 201 bp, Homo sapiens; identical to SEQ ID NO: 15221

SEQ ID NO: 99002 - DNA, 201 bp, Homo sapiens
aagctaatgaactaaaatagaagcttatgtttggttcagtttggttattgattcatcttctttaaggtgtcctggtcaatgaaatcctcaatcacatgaaragagcaactcagataccaagctacaaaaaactcatcatgtattctgcggtaagtattttcatcttcatttaacatatgtttgttcaagtgtgtgatctct

SEQ ID NO: 99003 - DNA, 201 bp, Homo sapiens; identical to SEQ ID NO: 15226

SEQ ID NO: 99004 - DNA, 201 bp, Homo sapiens; identical to SEQ ID NO: 15229

SEQ ID NO: 99005 - DNA, 201 bp, Homo sapiens; identical to SEQ ID NO: 15203

SEQ ID NO: 99006 - DNA, 201 bp, Homo sapiens
tcagactattattcagatctggctgggcaagagagatttgtcaactacatgtttattgaatgatgaaacagctgcacacattcctgcacagaaaacacacrttgtctaggtgacaaagagtaatgtggacacatcagggccatcttctgacctttgctagtttttttgttagtttgttttgtttttgtttctttgtatttt

SEQ ID NO: 99007 - DNA, 201 bp, Homo sapiens; identical to SEQ ID NO: 15228

SEQ ID NO: 99008 - DNA, 201 bp, Homo sapiens; identical to SEQ ID NO: 15230

SEQ ID NO: 99009 - DNA, 201 bp, Homo sapiens; identical to SEQ ID NO: 15232

SEQ ID NO: 99010 - DNA, 201 bp, Homo sapiens
gttgtgctcatggaaaggttttaggcagaggacagatgctgtaactggcttcttgttttaggaagacccttttcagtcattacctgtacgagatctctttstattaagatacaattaatcatgctctcttttctcagtgtctaggacaatgctctggcaaactcctgaaatattttacagtacaaaggagcatatcattta

SEQ ID NO: 99011 - DNA, 201 bp, Homo sapiens; identical to SEQ ID NO: 15237

SEQ ID NO: 99012 - DNA, 201 bp, Homo sapiens
actcctgccctaaacctaggcaattctgacagctataacgctgacctgtcccatacactgctcaccatgccaatacctaagcctctagatcaagtcagtcrcatggttttttcattctgatctgtgagtagagctgaagcaagcaaaagtccaagcctattgtcaccatttcaaacgatgaatgtagacattttattccat

SEQ ID NO: 99013 - DNA, 201 bp, Homo sapiens
tctcaaatgattcactccttcatttctggttcactccacagggagcttaaggacatgtgcgtttcatagacatgcctttcttttccttttatcaccttgtwaaatcttaagattgaacatacaattcagcctgtaatcatatcaattcccatgaaaaatattttccttattcactgcctctatttgtgcttatacatctga

SEQ ID NO: 99014 - DNA, 201 bp, Homo sapiens
ttatgatctatgacagttatattttttcatctccaagctgatattttaaatttcattattcttgctttatactggttgtacatattcagttagagtgattrcagtaggcaatttgcgatgttcccaatttgataaggaaagcttttacattttaccattaagtataacgtttgcgagcttattatagctatcctttgtcac

SEQ ID NO: 99015 - DNA, 201 bp, Homo sapiens
agtttctatgaacagaagaatctgaaagatttaaagactagttagcacagcagcaatttataaatcattaatttgggtactgtctatacatttaatgtgtyctttttcatagtcctatgtgaaatacatatacatatatatatattccactgtttataaacaatattcagttttatttgcataactcaatatattttatat

SEQ ID NO: 99016 - DNA, 201 bp, Homo sapiens
tttatgatctatgacagttatattttttcatctccaagctgatattttaaatttcattattcttgctttatactggttgtacatattcagttagagtgatkgcagtaggcaatttgcgatgttcccaatttgataaggaaagcttttacattttaccattaagtataacgtttgcgagcttattatagctatcctttgtca

SEQ ID NO: 99017 - DNA, 201 bp, Homo sapiens
tgatacaattatatttgatgtatttaaccagattttatatattatattctatattttataacatgtatatgtatcatataacatacacatatacatacacacacacagccaatataatttcactctcagtttcttgttaatcaactattatattgttgatacaacaaatataagaactgttactagtaaattgaataaagc

SEQ ID NO: 99018 - DNA, 201 bp, Homo sapiens
taaacagatgatttcaaaatattatctgtcagattttctgtgttctctatctctgtaatcatatcatctatgttttatgatctatgacagttatattttttcatctccaagctgatattttaaatttcattattcttgctttatactggttgtacatattcagttagagtgattgcagtaggcaatttgcgatgttcccaa

SEQ ID NO: 99019 - DNA, 201 bp, Homo sapiens
ctccgcagctgctggcctgggtgctaagcccctcactgcccggggctggcagggccagccggtcgctccgaatgcggggcctgccaagcccactcccaccsggaactccagctggcccacaagcaccatgcgcagcccgggttcccgcccatgcctctccctccacacctccctgcaagctgagggagccagctccggcct

SEQ ID NO: 99020 - DNA, 201 bp, Homo sapiens
gcgcggcgccggtgggccagcactgctgggggacccggtgcaccctccgcagctgctggcctgggtgctaagcccctcactgcccggggctggcagggccrgccggtcgctccgaatgcggggcctgccaagcccactcccacccggaactccagctggcccacaagcaccatgcgcagcccgggttcccgcccatgcctc

SEQ ID NO: 99021 - DNA, 201 bp, Homo sapiens
attatcttccacaaaactggtccctggtgccaaaaaggttggggactgctgcttttggatatatacccagaagtgggattgctgaagcatatggtagtttwattttaattttaatttaatttagtttaattaatttatttttagcacctaggctggaatgcagcagtgcaatcatagctcactgcagcttccaattcctga

SEQ ID NO: 99022 - DNA, 201 bp, Homo sapiens
caaataattgtatttatttatggggtacgatgtagtgttttgatatatgtttacattgtagagtgactaaatcaagctaattagcatactcatcactgaayatatttatcatttcttgtggtgagaacatttgaaatttaatctcttagcaattttgaaatatatgatacattattattaactacagtcaccatgctgtgc

SEQ ID NO: 99023 - DNA, 201 bp, Homo sapiens
cctgggtaccctactagtggtgtctgctcttgggatgataaacccgaggggcttatcagctttatatatatatatatatatatatatatatattttttttwttttttttttttttttttttagctagcatctctctcgttcttccaggctggagagcagtggtgtgatcttggctcactgtaatctccacctcctgggttc

SEQ ID NO: 99024 - DNA, 201 bp, Homo sapiens
ttgatatgaacaacttttgtaagcctgaaataaaaaataatcaaaataagcccagcctagtgttgaaataatatcctgtggttccaaccaatgttatctartctttaaattctaacgtgaatgaaaagtattcttctagaagggctttcttggcaagactattaaaataagtattgttgatagcaagggcagagagaaacc

SEQ ID NO: 99025 - DNA, 201 bp, Homo sapiens
aacggccaggcgaggtggctcacgcctgtaataccagcactttgggaggccaaggcgggcggatcacgaggtcaggagatcgagaccatcctggctaacayggtgaaaccccatctctactaaaaatagaaaaaaaaaaaaaattagccgggcgtggtggcaggcgcctgtagtccaagctacttaggaggctgaggcagg

SEQ ID NO: 99026 - DNA, 201 bp, Homo sapiens
gccacgggggacgtgagggtagctatggactcgctctgagggaggaggcgggagctgaatctctgggctgccagaacccacagccacatcctacgtgactytgccaccccaaaatattttgaccgcagccttctgcctccttggatctcttccttccccacccccacccccgtagttatttagcagattacgcattaaaac

SEQ ID NO: 99027 - DNA, 201 bp, Homo sapiens
gagtttgagaccagcctgggcaacatagcaaaacccggtctctacaaaaaatacaaaaattagcccggcgtggtggcgcaggcctgtagtcccggctactsgggaggctgagatgggagaattgcttgaaccggggaggcggatgttgcaattagacgagatcgcgccactgcactccagcctgggcgacagagcgagact

SEQ ID NO: 99028 - DNA, 201 bp, Homo sapiens
ccagctggcttcacccagtgtatcttgcaccagggctgcaggtggagctgcctgccagtcccgcgccgtgcacccgcactcctcagccctcgggctgttgrtgggaccaggcactgtggagtgggggtggcactcgtcagggagactcaggccgcacaggatcccacagcggtggcggggggcgggaggctcaggcatggc

SEQ ID NO: 99029 - DNA, 201 bp, Homo sapiens
acacattccaactatggagaatggtcctaagctggcaagccgcatcttgagcaaattaactgatatccaggtaaagcttttcttttcttttcttttctttycttttcttttcttttttttatgtcaccttatttctgtcagagcttacaactaaattatatttcaatgaagaggattaaataatacaatttgagatcaata

SEQ ID NO: 99030 - DNA, 201 bp, Homo sapiens
cagctggaaaactgatagtggtgttattaacctaactgagagggctgggcttatgagtaaattattcctgtgcataaatgaaagattgtttctaaatggcrgctatgttgagcctttgtattagttacatcttttggggtttcaggttgccagcttctttaaatggcctcttctcaactggtataggaagttggaaaataa

SEQ ID NO: 99031 - DNA, 201 bp, Homo sapiens
gttatggtggatgtattcacagcacatatgtaataaggcatgtgtaaaaatgatattgataatttagggaataaaaatggtagattttatagaccatcttygtttttgatatacttttctctgtctcaaaaaacaaaaacaaaaacaaacaaacaaacaaaatatatatatatagcctacattgttgttaactataatcac

SEQ ID NO: 99032 - DNA, 201 bp, Homo sapiens
ctcattatgttcctggaatttgtgatacaaaaaaacaatgtttagcctatcaatagtttatatagtttatgttattttaatataaattcttctcaacttaraaactgcctcttttttcttttaaaaacccacttgtaactgctgtatatattcagggcaacttgatttggtgtttcgttggttgcagtcctcaaatttgac

SEQ ID NO: 99033 - DNA, 201 bp, Homo sapiens
gcctgccaagcccactcccacccggaactccagctggcccacaagcaccatgcgcagcccgggttcccgcccatgcctctccctccacacctccctgcaarctgagggagccagctccggccttggccagcccagagaatggctcccacagtgcagcggcaggctgaagggctcctcaagcgcggtcagaatgggcgccga

SEQ ID NO: 99034 - DNA, 201 bp, Homo sapiens
aacaactttgatttagagaacagagtctctgttaaaatccatgggacttgtcaacttcatatttttgtttatgagcataaaacactctttagtgcatgtcrgaatcatttgatgcttgctgaatcacaggttgctggaacccatccccagattctgattcagtctgagatgaggtctgggaatttgcatttttaacttgtt

SEQ ID NO: 99035 - DNA, 201 bp, Homo sapiens
agtttcacagtgctggggatgatcccgtaaggcctttaaattacattataattagtcatgcacttctctctgctctggggctgtttgaatcgttcactctytttatacctccagtgttcagcacagagcctagggtataatgcgtatgcagtaatgtttcttgaaggagtgaatgggcaagtgaaacaccaaacaaatact

SEQ ID NO: 99036 - DNA, 201 bp, Homo sapiens
gtaactgtagctcctccttggttcttcaaatgatcctgaaggctggtatacaaaccagttatgccctaaaattaattggtaggtaggcaatgtataacctrtcattggctagtttttattcaaattttggatatgaaagtctttggcataaggtgctagcactcagagtcagtaggttttagtgctattccttaacttcag

SEQ ID NO: 99037 - DNA, 201 bp, Homo sapiens
actgtggcaaaatatctttgcgttctcatattagccagagggttaatatgtagaagacaatcattcatccttacagattctcagaatcttggaagaggtarggttctttaagtttagccactattttaggtaactgtagctcctccttggttcttcaaatgatcctgaaggctggtatacaaaccagttatgccctaaaat

SEQ ID NO: 99038 - DNA, 201 bp, Homo sapiens
aacattgaggattctacaatggacacattggtgttgggccccagcccagacccaaatcgaaatttctagagccaggatcagagactctgcattcaacaaastctccagagatttcataaccacttttaaaggactcaccatcccaaaccttgttaaggaatgaaatatatgtctgccagtaatttcagtgctttaagtcat

SEQ ID NO: 99039 - DNA, 201 bp, Homo sapiens
agcttcttagtgtaactagtaagtacagtgactactatgtctggtttacttcagctgttgctgactaatagcacttcttgaatgaagaaattatattaccstactgtagggaaaaatttgtacttcaatggaaaactgaattatttagagcaaacctttaaggttatctgattctgattccatgggccctttcattgggtc

SEQ ID NO: 99040 - DNA, 201 bp, Homo sapiens
ctcacaaaactcagggaaacacttaggtttagtggtttattataaaggatactgcaaagtgtatagatgaagcgatgtgtagggtgaggtatcgggggatrgagtgcagggcttccatgccctcccggggtgtgccaccctttaggaaccttcatgtgttctgctatccggaagctcactgaactcattcttttgggtttt

SEQ ID NO: 99041 - DNA, 201 bp, Homo sapiens
ctggggttgactaggatggctaagtggtttttgcttggggtccgtcacacggttgctgtcagtggctggggttagagtcagctcacaggcttcctaactcrtatggtgctggagggagtgtctcttagcatgctaatgcttcataatttgtgtataatgaacagtgaggatgaccagaggtcactttcattgccatctggg

SEQ ID NO: 99042 - DNA, 201 bp, Homo sapiens
ctgcgactacaggtgcatgccaccacgcctggctaatttttagtatttttagtagagacggggtttcaccatgttagctaggatggtctcaatctccaaaycttgtgatctgcatgcctcggcttcccaaagtgctggtctcctgtgtttttgtcagcattccacagatgctataaagttagtggtggtatcgcatgcaat

SEQ ID NO: 99043 - DNA, 201 bp, Homo sapiens
atcattctatgagtactctcttcctccatgagatcaacttttttttttagctctcacgtatgagtgagaacatgcaatatttgtttttctgggtttttttktttttctgtgtttggcttatttcgcttaccataatgacttccagttccatccatgttgctacaaatgacacgattttactcttttttaatggctgagtag

SEQ ID NO: 99044 - DNA, 201 bp, Homo sapiens
acctctcttcctccacctacacccttcccaccccctgccatcttctgatatctatcattctatgagtactctcttcctccatgagatcaacttttttttttagctctcacgtatgagtgagaacatgcaatatttgtttttctgggtttttttttttttctgtgtttggcttatttcgcttaccataatgacttccagttc

SEQ ID NO: 99045 - DNA, 201 bp, Homo sapiens
agcactgctgggggacccggtgcaccctccgcagctgctggcctgggtgctaagcccctcactgcccggggctggcagggccagccggtcgctccgaatgyggggcctgccaagcccactcccacccggaactccagctggcccacaagcaccatgcgcagcccgggttcccgcccatgcctctccctccacacctccctg

SEQ ID NO: 99046 - DNA, 201 bp, Homo sapiens
tatttttagtagagacggggtttctccatgttggccaggctggtctagaactcttgacctcaagtgatccgcccgccttggcctcccaaactactgggatyacatgcccagccagccatcttttacttctttcttattctcttattccacatattcaagcaggtaccacgtcctgtggactctgtcttctctgaatctata

SEQ ID NO: 99047 - DNA, 201 bp, Homo sapiens
gttctgtggcacatgaaccaatggcatttaaaaagcatactctccttgctcttaaaaaaacaaacaaaacaaaacaaaaactgtccattaaaatttttgtmtttttgtaaagacagggtttcaccataaaaatggacagtttcccttatatctttgggtcttcgttctgtaggctctcgtgtcacataaaattatgatcaa

SEQ ID NO: 99048 - DNA, 201 bp, Homo sapiens
gattcatagaggcctgactttggtggaagcaacaccactgcctgaaatgagatataactgttaaccgtttaattggagcggcctgttctcacgactgcaaractagttcaatggcttataaaataatccacccgctgggcacagtagttcacacctgtaatctcagcactttgggaggctgaggtgggcaaattgcttgag

SEQ ID NO: 99049 - DNA, 201 bp, Homo sapiens
aaataatgacagcaacttaatatatgagcagtgttcatgtcagctgatgtatggattactcagaaggtttacttgaacacctgattcaaactataatccaraaatatctgtaagattgccactgcaatctgaagctacttcagagactctaggaaaattagtttatagacaactccagatgttaatctttgtttttctttt

SEQ ID NO: 99050 - DNA, 201 bp, Homo sapiens
attgtgtgccattgtactccaacctgggtgacagagcaagactctatctcaaaaaaaaaaaaaaaaaaaaaagggccctgttccactgaggcttcagtgckgagcatggagggatactacctccaaattccaaacacgtttgacacatctaaagaaccttctaaaggatgactaaactaattctgcaagctttagcctcta

SEQ ID NO: 99051 - DNA, 201 bp, Homo sapiens
cactgaaacctctgcttcctggattcaagtgattctcctgcttcagcctcccgagtagctgggattacaggcatgtgttgctacacccagctaattttttgtatttttggtagagatgaggtttcaccatgttgcccagggtggtcttgaactcctgacctcaggtgatccacccacctcagcctcccaaagtgctgggat

SEQ ID NO: 99052 - DNA, 201 bp, Homo sapiens
agctgtgcaactccctgaaaaaagaaaaatagcgcagagcgatctgagctttgtgaaggctacacaatttatcaggcccagagagataggagtgtgagacktcagtcacgtccccccgtacgcatgcgcaggagtaattatttaaagacattttgttcctgactaactgcctcactcattatgttcctggaatttgtgata

SEQ ID NO: 99053 - DNA, 201 bp, Homo sapiens
ggccagagataggtatagaagccccttttatgaagtcatagacttgctttaatttatgctcccagaatgacttgcattaaactgtggcaaaatatctttgmgttctcatattagccagagggttaatatgtagaagacaatcattcatccttacagattctcagaatcttggaagaggtaaggttctttaagtttagccac

SEQ ID NO: 99054 - DNA, 201 bp, Homo sapiens
tcacaggacaggtggaaacagtggttctgaactaaccacaaaccagaactaccaaatgtgctacaaattgtttagtaacaaaggaccatcccttcagaatygaagagcacgtctcagttatctcatgcctatgtgcatggaacttaaagtctcaaaattactcttacaagatggcaaattgaggctgtcagctaagctcct

SEQ ID NO: 99055 - DNA, 201 bp, Homo sapiens
tagttaaaatggcttgtattaaaaaaaaaaaaaaaacaggcaataacagatgctgggaggatgtggagaaagggaaccatcatatattgttggttgaaatrtaaatagtacagccactatggagaacagtatggagggtcctccaaaaataaaagtagaactagaacttccgtgtgatccagcaattctaccaccgggtat

SEQ ID NO: 99056 - DNA, 201 bp, Homo sapiens
aagaagtttataaagtttagcataattttaatgatccaggcttaggaagcatttacagccaaaaagtaagtatatataattatcatattatactaaagggyataatatgaaaagtgtttgagagcacagactatctcctaaaatcaaactatcaaaacctgcaagccagcaaggcatgagtaggcatgactcagatacaaa

SEQ ID NO: 99057 - DNA, 201 bp, Homo sapiens
ctgaggaggaggaggaggaggagggattggtcttgctgttttaggagtggcagaggcagaagaaagtccacgtataagtgaacttgtgtagttcaaacccrtgttgttcaagtgtcaaccgtaaatgcaaactccactggttttcaaattttactttagagttattttccctcagctgattggagttttgctcaactcctc

SEQ ID NO: 99058 - DNA, 201 bp, Homo sapiens
cactgcaacctccgcctcccaagctcaagcgatcctcccacctcagtctcccaagtagctgggaccacaggtgtgcaccaccacacccagctaattttagyattttttgtagagacggggtttcaagatgtttcacaggctggtctcaaactcttgagttcaagtgattcacctgccttgacctcccaaagtgctggtatt

SEQ ID NO: 99059 - DNA, 201 bp, Homo sapiens
attttttaaaaagcaaaattagaatattgcaatttcttttctgttttttgagacagggtctcgctctgtcacccaggctggagtgcagtggcacgatctcrgctcactgcaatctctgcctcccaggttcaagtgattctcctgcctcagcctcctgagtagctgagattacaggcatgtgccatcacgcccagctaattt

SEQ ID NO: 99060 - DNA, 201 bp, Homo sapiens
acacgcttgttggaggttcgggcctgggtgcttggttgtctgagcctccttttttgtgtttgcctgggtcctggagaggagcgcacggtatcatggtgagygtcacgtaggttaccccgggtcccgcttacccacctgcatttacttaatggtggtttaattcttctttaaggattgcagtaacggatgctccgcagagtg

SEQ ID NO: 99061 - DNA, 201 bp, Homo sapiens
ctagactatttgctcggatataagggagacaattgtttttttgttctttgccggcgaaccctggctctgtagggctgacctggaatttaaccagtcttccytgagccggcggaggaggacaaaaaccgccgcgaccccggcagggtgggaagtgcagggcagcgctcccaagacacgcttgttggaggttcgggcctgggt

SEQ ID NO: 99062 - DNA, 201 bp, Homo sapiens
cagtaatattctgtccttaatgccttttgtgtcactgtaatatgagctttctgtttgttttggaatatgttttcagcctgaatattattctaaaaatacaatttactatcattcataatatatcaaatgactcacgtagctgcaaggcagtgaattaaacagaattagatcattttaaaaataatgataagagctgatgat

SEQ ID NO: 99063 - DNA, 201 bp, Homo sapiens
ttcacgttctcccccttcagtttgcacatagcggtcagtggcagacaagagcagacgcacaaatgtcaatccccgcccgcaaactctcgagggcagaaacwgctttttgtcagttggatttggagtcggtggaaaagctgccctaatgtagtttctccgaggtttccttagccttgaccgaggggcgcttcccggccattc

SEQ ID NO: 99064 - DNA, 201 bp, Homo sapiens
gggtggatcatttgaggtcaggagtttgagactagcctggccaacatggtgaaaccctgtttgtattaaaaatacaaaaattagccaggtgcgatgacacrtgcctgtaatcccagctacctgggaggctgaggcttgagacttgcttgaaccggggaggcggaggttgcagcgagccgagattgtgccactgcactccag

SEQ ID NO: 99065 - DNA, 201 bp, Homo sapiens
agcctctcaagtacctgagactatcggcttgcatgccatcaggcccaactaatttcgtcattttttgtagagatgggatctccctgtgttgcccagactgrtctccaactcctgggcttgtgcaaccctcccacctcggcctcccaaaatgctgggtcacaggcataagccacaatgcctggccataaataatctttttta

SEQ ID NO: 99066 - DNA, 201 bp, Homo sapiens
aggctgaggcggaagaatggcgcgaagcggcaagacggagcttgcagtgagccgagatcgcgccactgcactccagcctcaaaaaaaaaaaaaaaaaaaaagtccaaagctctaatgaaaaactgatgcattcatgcagattgctaacccaacatcaaggagaacgagaattacatgggactgagtgaatgaaggattgaa

SEQ ID NO: 99067 - DNA, 201 bp, Homo sapiens
tcgtctgggcgcagtggctcacgcctgtaatcccagcactttgggaggccaaggcaggcggatcacgaggtcaagagatcgagaccatcctggctaacackgtgaaaccccatctctactaaaaacacaaaaacaaaattagccgggcgtggtggcgggcgcctgtagttccagctacccggcaggctgaggcggaagaat

SEQ ID NO: 99068 - DNA, 201 bp, Homo sapiens
ggtggcgcgcgcctgcaatcacaggcactcggcaggctgaggcaggacaatcaggcagggaggttgcagtgagcagagatggcagcagtacagtccagctkcggcttggcatcagagggagaccgtggaaagagagggagagggagaccgtggggagagggagagggggagggggagctgcaattttttatttagcaattt

SEQ ID NO: 99069 - DNA, 201 bp, Homo sapiens
aataatatcctgtggttccaaccaatgttatctaatctttaaattctaacgtgaatgaaaagtattcttctagaagggctttcttggcaagactattaaartaagtattgttgatagcaagggcagagagaaaccagtttagcaagatgtcatagtggagaagtattctagtagtagtctcagtctaccaggtatctccca

SEQ ID NO: 99070 - DNA, 201 bp, Homo sapiens
tcatggtacttccatcatggggcatataaggtccctgtctttgttttattcccttctatcttcattcaccactctcatttcctctctctccactagaaatmattctcaggaatcaaattaatattattctggcttatatgtgtttttaaaaatctcatcgctttttatacatgtaattttaatttatgtaagagactttgt

SEQ ID NO: 99071 - DNA, 201 bp, Homo sapiens
cggttaggagctggagaccagcccggccaacacagcgaaaccccgtctccaccaaaaaaatacgaaaaccagtcaggcatggtggcgcgcgcctgcaatcrcaggcactcggcaggctgaggcaggacaatcaggcagggaggttgcagtgagcagagatggcagcagtacagtccagcttcggcttggcatcagagggag

SEQ ID NO: 99072 - DNA, 201 bp, Homo sapiens
gggctgcccccaacttcccagacggggtggctgctgggcggaggggctctttacttctcagatggggcggctgccgggtggaggggctcctcacttctcaracggggcggccgggcagaggcgctcctcacctcccagacggggcagcagggcagaggcgctccccacatctcagacgatgggcggccgggcagagacgct

SEQ ID NO: 99073 - DNA, 201 bp, Homo sapiens
cccccaacctccctcccggacggggcggctggccaggcgggggctgcccccaacttcccagacggggtggctgctgggcggaggggctctttacttctcaratggggcggctgccgggtggaggggctcctcacttctcagacggggcggccgggcagaggcgctcctcacctcccagacggggcagcagggcagaggcgc

SEQ ID NO: 99074 - DNA, 201 bp, Homo sapiens
gggctcctcacttcccagaaggggtggcctggcagaggcacccccaacctccctcccggacggggcggctggccaggcgggggctgcccccaacttcccaracggggtggctgctgggcggaggggctctttacttctcagatggggcggctgccgggtggaggggctcctcacttctcagacggggcggccgggcagagg

SEQ ID NO: 99075 - DNA, 201 bp, Homo sapiens
ggtacacctcccagacggggtggcggccgggcagaggggctcctcacttcccagaaggggtggcctggcagaggcacccccaacctccctcccggacgggscggctggccaggcgggggctgcccccaacttcccagacggggtggctgctgggcggaggggctctttacttctcagatggggcggctgccgggtggaggg

SEQ ID NO: 99076 - DNA, 201 bp, Homo sapiens
gcagatcatctgaggtcaggagttcgaggccagcctggccaatatggggaaaccccttctctactaaaaatacaatacaataaaataaaataaaataaaawaaattagccgggcatggtgcacgtgcctgtaatcccagctacttgggaagctgaggcaggagaattgcttgaacctgggaggcagaggttgtggtgagct

SEQ ID NO: 99077 - DNA, 201 bp, Homo sapiens
cagcactttgggaggccgaggcgggcagatcatctgaggtcaggagttcgaggccagcctggccaatatggggaaaccccttctctactaaaaatacaatrcaataaaataaaataaaataaaaaaaattagccgggcatggtgcacgtgcctgtaatcccagctacttgggaagctgaggcaggagaattgcttgaacct

SEQ ID NO: 99078 - DNA, 201 bp, Homo sapiens
gagtgcagtggtgctatcttggctcactgcaacttttgcctcccgagttaaaatgattctcctccctcagcctccctagcagctgagattataggcacccrccaccacgcccagctaattcttgtattttcagtagagacatggtttcaccatgttggccgggctggtctcgaactcctgacctcagtgatccgcccatct

SEQ ID NO: 99079 - DNA, 201 bp, Homo sapiens
aacatgtggctctaatgtttaatttttattttttttgagacagagtctcactgtgtcacccaggctggagtgcagtggtgctatcttggctcactgcaacytttgcctcccgagttaaaatgattctcctccctcagcctccctagcagctgagattataggcacccgccaccacgcccagctaattcttgtattttcagt

SEQ ID NO: 99080 - DNA, 201 bp, Homo sapiens
tgtcatgtttttcatgataactaatattttttcaatttttttttttttttaagacagtctcactctgtcaccaggctggagtcagtagtgcgatcttggcycactgcaacctccacctcccaggttcacacaattctcatgtctcagcctcctgagtagctgggtttacaggcactcgccaccatgcccagctaatttttg

SEQ ID NO: 99081 - DNA, 201 bp, Homo sapiens
tgtgttgtccaggctagtctcaagcttctggactcaagcaatcctctcacctcagcttcccaaagtgctgtgattacagacataagccatcacgcccggcyccattttctcctttgggtgtatgtatattgctcattgtcaggcatcaaccatttctcttctctgagatggagtctcactctgtcacccaggctggagtgc

SEQ ID NO: 99082 - DNA, 201 bp, Homo sapiens
ttcataggaaaaacactttttccaaaagattactgtcttcccaaatacccacgttctccattttttttttttttttttagagatggggtctcactgtgttrtccaggctagtctcaagcttctggactcaagcaatcctctcacctcagcttcccaaagtgctgtgattacagacataagccatcacgcccggccccattt

SEQ ID NO: 99083 - DNA, 201 bp, Homo sapiens
caaacaactgtataggaaaaatctagtaatctggttttaaaatgggcatgagacctgattagaaaactcaacagaaaaaaaaatttgattaaaaatggatwaaagatctgaatggacatttctcaaaagaagacagacaaatggccagaaggtacatgaaaaaatgcgcaacatcactaattatcagagaaatgcaaaaca

SEQ ID NO: 99084 - DNA, 201 bp, Homo sapiens
atttttgtaaagacagggtttcaccataaaaatggacagtttcccttatatctttgggtcttcgttctgtaggctctcgtgtcacataaaattatgatcarataaatttgtatgacttttctcctattaatctgccccttgtcaatgattttgagcaaccttctgaagaaagtgatggggaagtattccctttgctgccac

SEQ ID NO: 99085 - DNA, 201 bp, Homo sapiens
gtttctcaatcacactaaccacacttgaagtgctcagtagctacatgtggcttagtggctacctggcagatatagaacgtttccatcagcacagaaagttytactggaaagcattgatccaatctctttgaacagtcacaatgcatataaagtccttattatgactgtacaagggaagacaacgagtagaggaaggcagaa

SEQ ID NO: 99086 - DNA, 201 bp, Homo sapiens
ctgtgctggatttccctgctcagtctattagcattagaccataccttttttgtccaatcatatttctacgtggctctccatactttgtttaacctaacctragggggctcagggttttggcctgggcattgtctgttggggaatagagtgagtcatccccagctcatgggtttgcatccagttcttgttgtaaaaggccca

SEQ ID NO: 99087 - DNA, 201 bp, Homo sapiens
tgctcagagaggcaagaagggtccagacagacaggctgtgctggatttccctgctcagtctattagcattagaccataccttttttgtccaatcatatttmtacgtggctctccatactttgtttaacctaacctaagggggctcagggttttggcctgggcattgtctgttggggaatagagtgagtcatccccagctca

SEQ ID NO: 99088 - DNA, 201 bp, Homo sapiens
tttcttttgagctatttatagcttacagcattggggtaaagtatacttctgtgagcaaaatggaaacatttacctttctttctacctgaattcttcagaawttggaaactattcattagtgttcttattttctggcaatatagttatttgcataagttcaataagaacctattttcggctgtgcgtggtggctcatgcctg

SEQ ID NO: 99089 - DNA, 201 bp, Homo sapiens
ctgggaggtggaggttgtagtgagctgagattgtgtgccattgtactccaacctgggtgacagagcaagactctatctcaaaaaaaaaaaaaaaaaaaaaagggccctgttccactgaggcttcagtgctgagcatggagggatactacctccaaattccaaacacgtttgacacatctaaagaaccttctaaaggatgac

SEQ ID NO: 99090 - DNA, 201 bp, Homo sapiens
tcagggtagagaggagctcagtgagaaagcatcagtatggtgaaggccattcctaactcccgagttctcacaaaaggtgatatctggaagattaataagtrttcaatttaagaaaacgttgagtagtcttatcctgcattgctacacaaagagtaccacagcaatatattctacaacagtaaagcaaaataagtataatta

SEQ ID NO: 99091 - DNA, 201 bp, Homo sapiens
cctgggaggtggaggttgtagtgagctgagattgtgtgccattgtactccaacctgggtgacagagcaagactctatctcaaaaaaaaaaaaaaaaaaaaaagggccctgttccactgaggcttcagtgctgagcatggagggatactacctccaaattccaaacacgtttgacacatctaaagaaccttctaaaggatga

SEQ ID NO: 99092 - DNA, 201 bp, Homo sapiens
gacaaataattgtatttatttatggggtacgatgtagtgttttgatatatgtttacattgtagagtgactaaatcaagctaattagcatactcatcactgmacatatttatcatttcttgtggtgagaacatttgaaatttaatctcttagcaattttgaaatatatgatacattattattaactacagtcaccatgctgt

SEQ ID NO: 99093 - DNA, 201 bp, Homo sapiens
acctgggaggtggaggttgtagtgagctgagattgtgtgccattgtactccaacctgggtgacagagcaagactctatctcaaaaaaaaaaaaaaaaaaaaaagggccctgttccactgaggcttcagtgctgagcatggagggatactacctccaaattccaaacacgtttgacacatctaaagaaccttctaaaggatg

SEQ ID NO: 99094 - DNA, 201 bp, Homo sapiens
agtgttttgatatatgtttacattgtagagtgactaaatcaagctaattagcatactcatcactgaacatatttatcatttcttgtggtgagaacatttgraatttaatctcttagcaattttgaaatatatgatacattattattaactacagtcaccatgctgtgcgataggtctcaaaaacttattcctcctaattga

SEQ ID NO: 99095 - DNA, 201 bp, Homo sapiens
gtctctactaaaaatacaaaaacttagccaggcgtggtggtgggctcctgtagtcccagctacttgggaggctgagacaggagaatcaccagaacctgggrggtggaggttgtagtgagctgagattgtgtgccattgtactccaacctgggtgacagagcaagactctatctcaaaaaaaaaaaaaaaaaaaaaagggcc

SEQ ID NO: 99096 - DNA, 201 bp, Homo sapiens
tatatgtttacattgtagagtgactaaatcaagctaattagcatactcatcactgaacatatttatcatttcttgtggtgagaacatttgaaatttaatcwcttagcaattttgaaatatatgatacattattattaactacagtcaccatgctgtgcgataggtctcaaaaacttattcctcctaattgaaattttgttc

SEQ ID NO: 99097 - DNA, 201 bp, Homo sapiens
gaaaccctgtctctactaaaaatacaaaaacttagccaggcgtggtggtgggctcctgtagtcccagctacttgggaggctgagacaggagaatcaccagracctgggaggtggaggttgtagtgagctgagattgtgtgccattgtactccaacctgggtgacagagcaagactctatctcaaaaaaaaaaaaaaaaaaa

SEQ ID NO: 99098 - DNA, 201 bp, Homo sapiens
ctacttccattagtttgactttttcagtccacatatgagtgaaatcgtgcagtatttgtctttctgtacttgtcttgtttcacttagcataatgtccaacrggttccccatgtcattgtaaatgatggaattttcttttttatagctaaataacattccatcatgtatacataccacattttctttatcgattcatctgtt

SEQ ID NO: 99099 - DNA, 201 bp, Homo sapiens; identical to SEQ ID NO: 15323

SEQ ID NO: 99100 - DNA, 201 bp, Homo sapiens
aaattagcccggcgtggtggcgcaggcctgtagtcccggctactggggaggctgagatgggagaattgcttgaaccggggaggcggatgttgcaattagaygagatcgcgccactgcactccagcctgggcgacagagcgagactccgtctcaaaacaacaaggacaaaacttatcttataagcgaccctggacttccagg

SEQ ID NO: 99101 - DNA, 201 bp, Homo sapiens
tcccttctctgccagccaagtgtacagtaaggagcagacaagctggtgccggccaagaggagaattcatgtgcataataagattagggtggggtgaccagscttcccagtgcgctatgtgaacatcatacctgattgaaccaatctgtgagccctatgtaaatcagacaccacctcctcaagcctgactataaaatctggt

SEQ ID NO: 99102 - DNA, 201 bp, Homo sapiens
gccttttgataaagtaatttctgactgatcagaggaaagtgatgattttctctgtgacatgtctttttattttccatcacactcagtgtcttgtccttctrtgcaacatatccatgtatttaaaaacccttgtatatgtatttgccatgtatttgtgaggtatagctcgtgaagtaaaaaaagtctttatttttttaaaca

SEQ ID NO: 99103 - DNA, 201 bp, Homo sapiens
agtccacatatgagtgaaatcgtgcagtatttgtctttctgtacttgtcttgtttcacttagcataatgtccaacaggttccccatgtcattgtaaatgayggaattttcttttttatagctaaataacattccatcatgtatacataccacattttctttatcgattcatctgttgatggacagttaggttgcttctgta

SEQ ID NO: 99104 - DNA, 201 bp, Homo sapiens
ttcttttaaatgaaaagcagccccacacatagacaagcaagctgggagcttgcacgggtgaatgccggcagaaactaggaaccagacacgttaagatggcrgctccattttcccttctctgccagccaagtgtacagtaaggagcagacaagctggtgccggccaagaggagaattcatgtgcataataagattagggtgg

SEQ ID NO: 99105 - DNA, 201 bp, Homo sapiens
tcctttcacttttttcagtgtctacatttcagaccgagtttgtcagcttttttgaaaacacatcagtagaaaccaagattttaaaatgaagtgtcaagacraaggcaaaacctgagcagttcctaaaaagatttgctgttagaaattttctttgtggcagtcatttattaaggattcaactcgtgatacaccaaaagaaga

SEQ ID NO: 99106 - DNA, 201 bp, Homo sapiens
ttggtaaggcttttcttttaaatgaaaagcagccccacacatagacaagcaagctgggagcttgcacgggtgaatgccggcagaaactaggaaccagacaygttaagatggcggctccattttcccttctctgccagccaagtgtacagtaaggagcagacaagctggtgccggccaagaggagaattcatgtgcataata

SEQ ID NO: 99107 - DNA, 201 bp, Homo sapiens
tgtgctttcgccttggctaactcctttgacctcattcttcatatagtagtctaggaaaaagttgcaggtaatttaaactgtctagtggtacatagtaactraatttctattcctatgagaaatgagaattatttatttgccatcaacacattttatactttgcatctccaaatttattgcggcgagacttgtccattgtga

SEQ ID NO: 99108 - DNA, 201 bp, Homo sapiens
gagactgggtgatttataaagaaaagaggtttaactgaattacagttcatcatggccagaaaggcctcaggaaacttacaatcatggcagaaggtgaagasgaagcaaggcacatcttacatggtggcaggagacacagtgagaagggagaagtgccacacttttaaaccatcagatcttatgatgatataggagttaaga

SEQ ID NO: 99109 - DNA, 201 bp, Homo sapiens
cagcctttcaatagggtttagagcaagaatgacagattgctacctggtaggcagcactgactatatttttattggcgttgcgtagagtgactgcatgacaygcaggttgtgcttttgttttgccaggaatttaaaggcatttagcaaaggccgtatgaaattatctgccttatgtacctcgaatgtgaggtaatgaacttg

SEQ ID NO: 99110 - DNA, 201 bp, Homo sapiens
ccctaaaactggaagaaccagagcagctggtatcaaaatgtggaaaaaactgagatgtggcaagtggtacaactgatagccaaggaggaaaaatttgtatmcccctgtaatcccagcactttgggaggctgaaagaggtggatcacctgaggtcaggagttcgagaccagcctggccaatatggtgaaaccctgtctctac

SEQ ID NO: 99111 - DNA, 201 bp, Homo sapiens
ctcctccacgtgttacaggattacaaagctttgcacagcctttcaatagggtttagagcaagaatgacagattgctacctggtaggcagcactgactatakttttattggcgttgcgtagagtgactgcatgacacgcaggttgtgcttttgttttgccaggaatttaaaggcatttagcaaaggccgtatgaaattatct

SEQ ID NO: 99112 - DNA, 201 bp, Homo sapiens
ctctaggaggcaaaagcagaaatgcaactcatcaaaattgaaatggtgacaaaatatgtgcattcaaacctgaaagtgactgaaagagaagcccaaacacrcaattttggggtaagatgggaaaccattaccaaagttctcagaaagagcatttttaaaagtaagattatagaagccaaaaggatatgtagtagtctgttc

SEQ ID NO: 99113 - DNA, 201 bp, Homo sapiens
ctgcagtcagccatgatagcaccactgcactccagcctgggcaacagagtgagaccccatctgaaaaaaaaagaagtcaaaacaaatgaaaaaaaaaaaaagtcaaaacaaatattcagtgtaaatgtgagaccatgtaaaaaagtttaaaagtaaaatatatagtttaagcagaggatgggagacggggaaaaaaccttt

SEQ ID NO: 99114 - DNA, 201 bp, Homo sapiens
tttatattccatgcagggtgaatttaaggtgtcagagagatacctcaccatggatgacttgacaacagccctggaggggaacagagtgagagagatgtttrgctctggtacagcctgtgttgtttgcccagtttctgatatactgtacaaaggcgaggtacgacaagtatttcctcatttcctatcatttccaatcacatt

SEQ ID NO: 99115 - DNA, 201 bp, Homo sapiens
atgcgcaacatcactaattatcagagaaatgcaaaacaaaaccacaatgtaaaatccacttgccctagttaaaatggcttgtattaaaaaaaaaaaaaaaacaggcaataacagatgctgggaggatgtggagaaagggaaccatcatatattgttggttgaaatgtaaatagtacagccactatggagaacagtatggag

SEQ ID NO: 99116 - DNA, 201 bp, Homo sapiens
aacccaatgagatatataaagcagatatttttatctgccagataattaaatgagggaaaaataaggactaacttgcttaagttcacatataccaaatagtrgaaatgcaagagctgtcctcaggtctgttaacaacaaacctgtggtctttctaccagacgtcccctgcaatctggtttatactcattattaaaaagcatt

SEQ ID NO: 99117 - DNA, 201 bp, Homo sapiens
tctctttcttctcctgacagatccccattcctatccaggtagaccaggctctagtgaagattggacacaagtggtttatatcccgaagctcttaacctaaragtcctgccttgtttttttacttcatgtggtcttgaattgctgaggatagcccagtgatcatttctaccttaatatgtagccttcaaaacgttgggtctc

SEQ ID NO: 99118 - DNA, 201 bp, Homo sapiens
aaattagtctgattttatatgtgccatacttttgttttcttgtcaaattgttttgcttttcactttataacaaagctccaatacttatgattaacattggyatctaactttataacttaaaggcatgtaagtattagtcttataatgtgaactggcttaagttattcatattatagcagatccttgaacaacacagggatt

SEQ ID NO: 99119 - DNA, 201 bp, Homo sapiens
ccttttgactcctacaggggaggaggctgaggttcagggacattaaagtggggtttagagacattaggtggtttacccaagctttatctactagatactasataattgtctatctgacaataaagctagaacttacacccagctggacaatggagctacagcttaaaacaaaatcttctaatgagctcagaactcatggct

SEQ ID NO: 99120 - DNA, 201 bp, Homo sapiens
ctgtgatattgtgaaatacatatatgtggtctttgttcctgtttcctggcatacaagtactaaaaatccttggaatctccaaagtgctgtctttttgtatrttagtgttgactgatagcttcagagtggggctggtcaagttgatcaccaatggccagtggtttaatcagtcatgcctatgtaatgaagcctccatgaaaa

SEQ ID NO: 99121 - DNA, 201 bp, Homo sapiens
atatttgtgtgtttttgctgctattttttttaatgacattgttttgaataattcaggctcattggctatttcacatcctgaatttctctaattttatcttyatgattagagccaggctctaattcttggcaagaataacactgaagtgaggttgtgtactcctaattgccctgcatcaaagacacatgatatgcattggtt

SEQ ID NO: 99122 - DNA, 201 bp, Homo sapiens
tgacagttcattttcttttttgtctctgtactctttctgctaccattctcattcttgcactaatttgtgctggtttctctctgagccagctgcacagctgyctgcctaagacttcctcttggcatcttttaccctctctctgtgttacatccccggttttctgaatcgtgtggcgttctcctttttactttacttcctcat

SEQ ID NO: 99123 - DNA, 201 bp, Homo sapiens
aattagctgggcgtggtggtgtgcacctatagtcccagctacttgggaggctgaggcaggaaaattgcttgaacctgggagcagaggttgcagtgagccamgatcgcaccactgcactccagcctgggtgacaagagttaaactctgtctcaaaaaaataaaaagaaaagtttgtaccctcttcttttctcttgcctcagg

SEQ ID NO: 99124 - DNA, 201 bp, Homo sapiens
tgatcacgtcactgcactccagcctgggctacagagtgacaccctatctcaaaaacaagcaaacaaacaaacaaacaaaaaccaacaaaaaattttttatyaagcaaaaaacctcttcaacctcttcctgttatgttttgaataaaagctaaagtccccaccatgctccagaagttcccaagggatctggtccttctcatc

SEQ ID NO: 99125 - DNA, 201 bp, Homo sapiens
gtctattttttcatactgctaactttgttttgcctattttttttctgagcaataatctacagtaatgcctcatcaggcagttaagcaggcatgctaaataycagataacactgggctactcagaaaagagattatcctgtaatttgcaagcatttcacaagttagaagactttgttgaagccagttactatccttgtcaat

SEQ ID NO: 99126 - DNA, 201 bp, Homo sapiens
atcacttgagcccaggaggagctgaagtgatctgtgatcacgtcactgcactccagcctgggctacagagtgacaccctatctcaaaaacaagcaaacaaacaaacaaacaaaaaccaacaaaaaattttttattaagcaaaaaacctcttcaacctcttcctgttatgttttgaataaaagctaaagtccccaccatgct

SEQ ID NO: 99127 - DNA, 201 bp, Homo sapiens
atttagatggggatttaaaaatgatacacatgtaaatgggattggaggcaagggaagtccgtgtgtgtgtgtgtgtgtgtgtgtgtgtgtgtgtgtgtgtgtgtggagggaagacgggaggcctagtggggagagaggttttacattccagacacaggatgtggcccctcaggctaggctcagagatgtaaagctagttaa

SEQ ID NO: 99128 - DNA, 201 bp, Homo sapiens
aatttagatggggatttaaaaatgatacacatgtaaatgggattggaggcaagggaagtccgtgtgtgtgtgtgtgtgtgtgtgtgtgtgtgtgtgtgtgtgtgtggagggaagacgggaggcctagtggggagagaggttttacattccagacacaggatgtggcccctcaggctaggctcagagatgtaaagctagtta

SEQ ID NO: 99129 - DNA, 201 bp, Homo sapiens
aaatttagatggggatttaaaaatgatacacatgtaaatgggattggaggcaagggaagtccgtgtgtgtgtgtgtgtgtgtgtgtgtgtgtgtgtgtgtgtgtgtggagggaagacgggaggcctagtggggagagaggttttacattccagacacaggatgtggcccctcaggctaggctcagagatgtaaagctagtt

SEQ ID NO: 99130 - DNA, 201 bp, Homo sapiens
taaatttagatggggatttaaaaatgatacacatgtaaatgggattggaggcaagggaagtccgtgtgtgtgtgtgtgtgtgtgtgtgtgtgtgtgtgtgtgtgtgtggagggaagacgggaggcctagtggggagagaggttttacattccagacacaggatgtggcccctcaggctaggctcagagatgtaaagctagt

SEQ ID NO: 99131 - DNA, 201 bp, Homo sapiens
ataaatttagatggggatttaaaaatgatacacatgtaaatgggattggaggcaagggaagtccgtgtgtgtgtgtgtgtgtgtgtgtgtgtgtgtgtgtktgtgtgtggagggaagacgggaggcctagtggggagagaggttttacattccagacacaggatgtggcccctcaggctaggctcagagatgtaaagctag

SEQ ID NO: 99132 - DNA, 201 bp, Homo sapiens
aataaatttagatggggatttaaaaatgatacacatgtaaatgggattggaggcaagggaagtccgtgtgtgtgtgtgtgtgtgtgtgtgtgtgtgtgtgtgtgtgtgtggagggaagacgggaggcctagtggggagagaggttttacattccagacacaggatgtggcccctcaggctaggctcagagatgtaaagcta

SEQ ID NO: 99133 - DNA, 201 bp, Homo sapiens; identical to SEQ ID NO: 15333

SEQ ID NO: 99134 - DNA, 201 bp, Homo sapiens; identical to SEQ ID NO: 15334

SEQ ID NO: 99135 - DNA, 201 bp, Homo sapiens
acatgtgcaagtttgttacatgggtatatgttgtgatacaaagattttagcttctaaggatctcattgcccaagtagtgaacgtagtacactataggtagtatttctaaacacttttcccctccccctcttttggaatccctagtgtttattgttcccatctttgtgtctatatgtatctaatgcttagctctcacttata

SEQ ID NO: 99136 - DNA, 201 bp, Homo sapiens
gggtcagactttcataatataaacccactaaatgagtgcatattgatggcggtcactgctgtgaagaagtgggaatggttagcatggaaacatagccccartgggggcgactaagttctttcccatctcattctactatgtctactttcatctctacttttttcttttctgagctatcagctttcttgctctcaactatat

SEQ ID NO: 99137 - DNA, 201 bp, Homo sapiens
agggaagtttgttcttcctgttgttcatatcttgcatatctttactaaggtttagcctgtttgttctataaattacttagagaagctgtgttaaattttcycactaaaattattgatttttgtctttctctgtatttatcagtatgtatctactgaagtcttttcaaatccctgatcagtggtttgttcgggacagcactt

SEQ ID NO: 99138 - DNA, 201 bp, Homo sapiens
tactgaagtcttttcaaatccctgatcagtggtttgttcgggacagcactttgattgagggaggtgacgtggcttaacatagtatggtcttgagctgcctsgtttctgtgatttagggactgaaccagctctggtcacatctggattatctactatccagcattcaaatgaaccagattacatgaaaggatatgggggtac

SEQ ID NO: 99139 - DNA, 201 bp, Homo sapiens
ggccccacccacatcctgctgattggtccattttacagagagctgattggtctgttttgtcagggtgctgattggtgcatttacaatccctgagctagacrcaaaagttctccacctccccactggattagctagataaagagtgttgattgatgtatttacaaaccctgagctagacacagagtgctgactggtgcattt

SEQ ID NO: 99140 - DNA, 201 bp, Homo sapiens
aaaatgtggaaaaaactgagatgtggcaagtggtacaactgatagccaaggaggaaaaatttgtatccccctgtaatcccagcactttgggaggctgaaasaggtggatcacctgaggtcaggagttcgagaccagcctggccaatatggtgaaaccctgtctctactaaaaatacaaaaattagctgggcgtggtggtgt

SEQ ID NO: 99141 - DNA, 201 bp, Homo sapiens
gtgggtactaagtagcttctcctgctaaaatagctcttgggcagtatgggctttatcatatttaccagaggaagccgaaaatgtctttaaaagttttcctrtagacagttggattgaagataaatcttagcagctaatttttcagataatcttgcattttctgtgacgtcaataaaaaaattatttaaagcaaatagaaag

SEQ ID NO: 99142 - DNA, 201 bp, Homo sapiens
catatatctactatgtttccagtgatttcatgtaagcttaaacatggtgggaagttagttttgtccttggacacgtgtaagatctgtcttacctacatgtygggattggagctatgccgacagtcttctactcttctctcttccttcctaccagctcactagggaaggctctataggtagttacatttcagtttctggtta

SEQ ID NO: 99143 - DNA, 201 bp, Homo sapiens
acttcactgtgggtactaagtagcttctcctgctaaaatagctcttgggcagtatgggctttatcatatttaccagaggaagccgaaaatgtctttaaaarttttcctatagacagttggattgaagataaatcttagcagctaatttttcagataatcttgcattttctgtgacgtcaataaaaaaattatttaaagcaa

SEQ ID NO: 99144 - DNA, 201 bp, Homo sapiens
ttccataagtggaaacacatgtagagctctctttcctggccacctaagctctctgaccatatccctgactctctccagaatgccttggcttcatgtccacrtgaggacaaatcatatttttctgcattttgcgtgctggattcctctctggactaaagatccaatgagaggtggtttctagctttctgctctttcccacaa

SEQ ID NO: 99145 - DNA, 201 bp, Homo sapiens
aactacttgggaagctggggcaggagaatcacttgaacccgggaggtagagattgcagtaagctaaggttgtgccactgcactccagcctgggctacagcktgagacttcgtcagaaaaaaagaataattttgtataatttcaggccacaaagtctgcagtcatctgttacaacagcagtagtacacgaatacagattttg

SEQ ID NO: 99146 - DNA, 201 bp, Homo sapiens
tagccaggtgtggtggtgcacgcctatagacccaactacttgggaagctggggcaggagaatcacttgaacccgggaggtagagattgcagtaagctaagrttgtgccactgcactccagcctgggctacagcgtgagacttcgtcagaaaaaaagaataattttgtataatttcaggccacaaagtctgcagtcatctgt

SEQ ID NO: 99147 - DNA, 201 bp, Homo sapiens
atcccccaaactctttttcttcagggcctttgcacttgctgatgcctctgcctggaaggtcttcttctgattccccatccaggggtgccttatcaccctgycctgccaacctcagattggatgctacttcctcaaagagacccttgggactcccatgtttcccaggctttcagtgccctcatctcaacttgtaatgattgt

SEQ ID NO: 99148 - DNA, 201 bp, Homo sapiens
atggtgactcacagccccagcactgtaatcccagcactttgggaggctgaggtgggaggatcacttgagcccaggaggagctgaagtgatctgtgatcacrtcactgcactccagcctgggctacagagtgacaccctatctcaaaaacaagcaaacaaacaaacaaacaaaaaccaacaaaaaattttttattaagcaaa

SEQ ID NO: 99149 - DNA, 201 bp, Homo sapiens
ctcttcactgaatatatgtgttcctgttttttctcatccccatttgtttcccagacacaatttgttctccagagcagagtgatcacatcagtcacctgctwtaaaaactcctcaacccggtggggcatggtgactcacagccccagcactgtaatcccagcactttgggaggctgaggtgggaggatcacttgagcccagg

SEQ ID NO: 99150 - DNA, 201 bp, Homo sapiens
gaggtggaggctacagtgagctgagattgcaccactgtactccagcctgggtgacagagcgagactccatctcaatgaataaataaataaataaataaatwgcaaaggcaataatgtgcatatagtaggtgctacagtagaagtctgcacaaggttctgtgtatgtggaaaagacaagtcagaaaaattaggaaaggcttt

SEQ ID NO: 99151 - DNA, 201 bp, Homo sapiens
gcttagggtttcctccctgtgcagaagaagatgggaagtgcaaatgaggacgaggggtggggagggaagagggagtcaggtgattcagcaagtgcaggagyccacagactaagctcaggaatttgcactttgtctgctcgcagagtgagtttcatcgtggtgtgtatatattgagatatgcaacagactccactggaatgt

SEQ ID NO: 99152 - DNA, 201 bp, Homo sapiens
aaaaaccgccgcgaccccggcagggtgggaagtgcagggcagcgctcccaagacacgcttgttggaggttcgggcctgggtgcttggttgtctgagcctcyttttttgtgtttgcctgggtcctggagaggagcgcacggtatcatggtgagtgtcacgtaggttaccccgggtcccgcttacccacctgcatttacttaa

SEQ ID NO: 99153 - DNA, 201 bp, Homo sapiens
aacctgtcattggctagtttttattcaaattttggatatgaaagtctttggcataaggtgctagcactcagagtcagtaggttttagtgctattccttaayttcagtggaattgccttagtatagcagaattgcttgagtgtcttatctgttatcaccatatacatgagtaccctcaaattatctcatttccctttctttt

SEQ ID NO: 99154 - DNA, 201 bp, Homo sapiens
gacaacagccctggaggggaacagagtgagagagatgtttggctctggtacagcctgtgttgtttgcccagtttctgatatactgtacaaaggcgaggtaygacaagtatttcctcatttcctatcatttccaatcacattaaattacatttaatttaagtgtatgaataaaattgtatctggacccagacccaagatgca

SEQ ID NO: 99155 - DNA, 201 bp, Homo sapiens
accctggctctgtagggctgacctggaatttaaccagtcttccctgagccggcggaggaggacaaaaaccgccgcgaccccggcagggtgggaagtgcagsgcagcgctcccaagacacgcttgttggaggttcgggcctgggtgcttggttgtctgagcctccttttttgtgtttgcctgggtcctggagaggagcgcac

SEQ ID NO: 99156 - DNA, 201 bp, Homo sapiens
cgattggtgtatttacaatctcttagccagacgtaaagattctccaagtccccactagactcaggagcccagctggcttcacccagtgtatcttgcaccakggctgcaggtggagctgcctgccagtcccgcgccgtgcacccgcactcctcagccctcgggctgttgatgggaccaggcactgtggagtgggggtggcac

SEQ ID NO: 99157 - DNA, 201 bp, Homo sapiens
ttctttgccggcgaaccctggctctgtagggctgacctggaatttaaccagtcttccctgagccggcggaggaggacaaaaaccgccgcgaccccggcagkgtgggaagtgcagggcagcgctcccaagacacgcttgttggaggttcgggcctgggtgcttggttgtctgagcctccttttttgtgtttgcctgggtcct

SEQ ID NO: 99158 - DNA, 201 bp, Homo sapiens
atcccagttccctgctacctcacacaatgctccagtgaacagctggaaaatcatacaacccaaggaattattgaaagtgattatatcccagcaaaaggccyaggcccatcttacacttccaccccaagaaggtactgctacttttcgggaatggcctggtctccttggcgaaattggcatttgatctgttctcatcactgt

SEQ ID NO: 99159 - DNA, 201 bp, Homo sapiens
ctttcataatataaacccactaaatgagtgcatattgatggcggtcactgctgtgaagaagtgggaatggttagcatggaaacatagccccaatgggggcractaagttctttcccatctcattctactatgtctactttcatctctacttttttcttttctgagctatcagctttcttgctctcaactatatttgatgta

SEQ ID NO: 99160 - DNA, 201 bp, Homo sapiens
tgcaatgagccaagattatgccactgcattccagcctgggtgacagggcaagaccctgtcttaaaaaaaaaaaaaaaagaaagagacaaacgtagaaagartaccaaatttggagccaatcagatcagacctgggttcaaattgagtttctgtcacttacttcctttgtggccctggagatgcccttcaacctccttgaac

SEQ ID NO: 99161 - DNA, 201 bp, Homo sapiens
caccatgctccagaagttcccaagggatctggtccttctcatctttacagcctcatcttgttttgccgtttccacctccctcatcccccaaactctttttyttcagggcctttgcacttgctgatgcctctgcctggaaggtcttcttctgattccccatccaggggtgccttatcaccctgccctgccaacctcagattg

SEQ ID NO: 99162 - DNA, 201 bp, Homo sapiens
tacccctatggccatatcccagacctttgaatcacacaccaaattccatcaagtcctatgagtcatttttggtccaagacctatcttacatctatgcagtsctatctattttaacaaccatgtgcccagtttaggccactgtcttctcttcactgaatatatgtgttcctgttttttctcatccccatttgtttcccagac

SEQ ID NO: 99163 - DNA, 201 bp, Homo sapiens
aaatacttgcaaaactcagctagttccattaagaatagtctttaatctaaaaagaacaaattcatttgtcagttctttatttcggtgtgtagatttgaatrtttcatcaattgcatttacggtttatccctcagtgtgagaactgtttttgctgttttgactataaatggatatctgctttaggaagacttaggaagcctg

SEQ ID NO: 99164 - DNA, 201 bp, Homo sapiens
ttttcctttaaaatatacttgttattttttatattccatgcagggtgaatttaaggtgtcagagagatacctcaccatggatgacttgacaacagccctgraggggaacagagtgagagagatgtttggctctggtacagcctgtgttgtttgcccagtttctgatatactgtacaaaggcgaggtacgacaagtatttcc

SEQ ID NO: 99165 - DNA, 201 bp, Homo sapiens
ttcatcataagaccttgtcagtgactcacaatgtcaatggtgaacgcaaaggagaatctgtcttttctggaacaccaggttcaggtatcagtttcaactaygcttataatttgtgctctaaagtccacaaagctaaattatctttcccctaaaaattgagtactcatatccttaaaatagcttggaaattagattacctta

SEQ ID NO: 99166 - DNA, 201 bp, Homo sapiens
gggaacagagtgagagagatgtttggctctggtacagcctgtgttgtttgcccagtttctgatatactgtacaaaggcgaggtacgacaagtatttcctcrtttcctatcatttccaatcacattaaattacatttaatttaagtgtatgaataaaattgtatctggacccagacccaagatgcaaaagttttgtcgttgt

SEQ ID NO: 99167 - DNA, 201 bp, Homo sapiens
taagaacataataccttcactatgtccacatgtgaattaagagcttgaggctatcagagggtagaagatgagggagtggggatgaagtatgtttgtaaccygtgtattttctctttcttaaaggaattacggctcatctctttttgcccaatgtgaagcagtagataatgggtgtcagcaggtcctgtggctctatggaga

SEQ ID NO: 99168 - DNA, 201 bp, Homo sapiens
aacagcttgtgaaattggatcaagaatgggtcccatattcaacatctgctagtctgtatattcgtcctacattcattggaactgaggtgcaaactgactcyttattttggggtactttgctgggcaagttattattgtttattgttgtttgaaacttctagcatatagtttgcagtagccccccagtagcatcattaatga

SEQ ID NO: 99169 - DNA, 201 bp, Homo sapiens
ttgtgaaattggatcaagaatgggtcccatattcaacatctgctagtctgtatattcgtcctacattcattggaactgaggtgcaaactgactccttattytggggtactttgctgggcaagttattattgtttattgttgtttgaaacttctagcatatagtttgcagtagccccccagtagcatcattaatgacttctt

SEQ ID NO: 99170 - DNA, 201 bp, Homo sapiens
atatgttgtgatacaaagattttagcttctaaggatctcattgcccaagtagtgaacgtagtacactataggtagtatttctaaacacttttcccctcccsctcttttggaatccctagtgtttattgttcccatctttgtgtctatatgtatctaatgcttagctctcacttataagtgcggacgtgtgatattttggtt

SEQ ID NO: 99171 - DNA, 201 bp, Homo sapiens
cccaccttggcctcccaaagtcctgggattacaggcatgagccacttcacctgaccggagaggattcttaaactctgccattttagtactaaagcagccayagacagcacataaatgagtaaatgcagtgctgtttgccttgcccaattaagactagtcattattttctaagtttacaagtgcagtgcctcccattgtggc

SEQ ID NO: 99172 - DNA, 201 bp, Homo sapiens
ggtgtagggatttctccccaccaccaagcagtgaaccccagctgggtgtcctccaattcaattctcacactgttattacgggaaaggtgtcccaatccagwccccaagaggttcttggatgttgcacaagaaagaatttggggagagtccacaaagtaaaataaaatttattaagaaagtaaaggaaaaaaagaatggcta

SEQ ID NO: 99173 - DNA, 201 bp, Homo sapiens
gggagtcaacattatttattaacgaataccatttggggagccgacattatttatatttggttggtatatttgtatcaactatcattttctaattaatggtrtaggcagaataaaccatcacttgtgattcagaaaggaacatgatacaaataacatccaataatgtatatggatttaaatagatctgccccctacagatgt

SEQ ID NO: 99174 - DNA, 201 bp, Homo sapiens
gttgaaacattgttactgatctcaaagcactaccttccagttattctgagatactttttcagtctaagatctgatactcctattcctggtttgttgagagkttttgtcatgaatggatgttggattttgtcaattgctttttttgaatctcttgacatgattatgtggttttgtactttattacattattaatgaatgaat

SEQ ID NO: 99175 - DNA, 201 bp, Homo sapiens
ttcaaacagtgagaaacaaagcacgttgaaaactgtacaaatacaaatgtaagatgtaatattattttttctataagtctatctcctaccctccctcctcrtggaggttttagcttcttctttttatgcctagtgctgctcttctgcctgtttgagtcactgtcaattgtcatcagacaattgacacagagtgtcctaatg

SEQ ID NO: 99176 - DNA, 201 bp, Homo sapiens
gtctagtggtacatagtaactgaatttctattcctatgagaaatgagaattatttatttgccatcaacacattttatactttgcatctccaaatttattgyggcgagacttgtccattgtgaaagttagagaacattatgtttgtatcatttctttcataaaacctcaagagcatttttaagcccttttcatcagacccag

SEQ ID NO: 99177 - DNA, 201 bp, Homo sapiens
ggtgggaacaggaggaggagagtgagggtgggaggtgccactcactttttaaaacaaacagatctccttagaactcactcactatcatgagaacagcaagrgggaggtttgctcccatgatgcaattacctgacaccaggcccttcctccaacatgggggattacaattccacatgagatttgggtggggacacaaattca

SEQ ID NO: 99178 - DNA, 201 bp, Homo sapiens
gcatatcctgatgtggcatattctggtcatattttgggatggtgcgtcctgagctccaatgctgaaaaaacaggaaccccatttctgttggatgtgccaamctaaaataatcaaaagggtcagaatctagtttaaagatactttattcaagtgcaaagtttaaggacagtgctagggaaacacggatcccaaagaatggaa

SEQ ID NO: 99179 - DNA, 201 bp, Homo sapiens
ttaagaagaaatcacttaggtagatagtgagggtacgggagtccttggtaaggcttttcttttaaatgaaaagcagccccacacatagacaagcaagctgsgagcttgcacgggtgaatgccggcagaaactaggaaccagacacgttaagatggcggctccattttcccttctctgccagccaagtgtacagtaaggagc

SEQ ID NO: 99180 - DNA, 201 bp, Homo sapiens
caggagacatggctggggaggcctcaggaaacttacagtcatggcggaaggcaaaggggaagccagtacatattacatggtgggaacaggaggaggagagkgagggtgggaggtgccactcactttttaaaacaaacagatctccttagaactcactcactatcatgagaacagcaagagggaggtttgctcccatgatgc

SEQ ID NO: 99181 - DNA, 201 bp, Homo sapiens
tttcttgtgtcctttgcacatccccctttttcttcccttcttcctctgcctctggtcagagcttctggctccatgttggcctagggctctcccacttcagmcgctttcttctgtgaagtgtggtgatcatggacacagccgaccccagttttacagcataccaagtaagcaaccccagaagggagaaaatgcctgtatttc

SEQ ID NO: 99182 - DNA, 201 bp, Homo sapiens
atggctgctccataagcagagcagcactgaaggcttctggttggctatttttatggttatttcttgattatatgctaagcaaggggtggattattcatgarttttcctggaaaggggtggggaattcccagaactgagggtttctctttcttttagaccatatagggtaagttctggatgttgccatggcatttgtaaact

SEQ ID NO: 99183 - DNA, 201 bp, Homo sapiens
ttcccggcatgagaggatgaacctggggtatataccccagaaaacatagccacttaagtgagaactcactcactattcacccccaagatccaatcaccttygaccaggttcctcccctggcgtgaggggattaaaattccacatgaggtttgagtagggacacagagccaaaccaaaccatatcagagggtgaagagcagg

SEQ ID NO: 99184 - DNA, 201 bp, Homo sapiens
ttgcctgggataactttagttttaatatactccttcactttggggatgttcatctaacagaacaaataaaattcagaataaggagaaaggaaatagaatawatatttgaagtaaatagaatgttaggaaaaacctttgggctaaaaaaaaagacatgcaattctgaagtaactttgatttatatcatatgattttaagaaa

SEQ ID NO: 99185 - DNA, 201 bp, Homo sapiens
actctgaatcagagctacatgatttaaccagaaacaccagaaactgtcctggtggaaaattgttctttatccaaacaataatcatgaaacatttccaccawggcttttaaaggtcagaatagaaatgagtgagtttgtcttctgcctcttgcaaaatatacaagaccttaagactgttagttactattcagattatggttg

SEQ ID NO: 99186 - DNA, 201 bp, Homo sapiens
attcagagctaagtactaattttagtgttagttgcagagactaacaagatgagtcttatactgcagtcagaggtagaataaacagaagatatggtgagtamgccttgtcctgggcttggccattggtagtccttggcatatgaaaaaccagatacagatcattctcatccttccattcctgctgtttgtacttggcactgt

SEQ ID NO: 99187 - DNA, 201 bp, Homo sapiens
gtctacctataagcttgataaccttatgttagaacaaataaccatgacatattctgttcagtagtttgcatttccttttgactcctacaggggaggaggcygaggttcagggacattaaagtggggtttagagacattaggtggtttacccaagctttatctactagatactagataattgtctatctgacaataaagcta

SEQ ID NO: 99188 - DNA, 201 bp, Homo sapiens
ctggtcaagttgatcaccaatggccagtggtttaatcagtcatgcctatgtaatgaagcctccatgaaaatccaaagggaatggactggggagcttctaaraagtgttttttaccttcccgtgagcctcctgtgctgaacacgtggagggtcacgggaaggtaagcaaaaattcattcacatgctgggagggtggcacatc

SEQ ID NO: 99189 - DNA, 201 bp, Homo sapiens
gtatcttgggattgtaactagatcctggttcattcaagacaatttcatatatccactatagatatcaatatttctctattatctttaatatcctgagtackcattacttttctttgctgtttttttttattagttggcagagaccataggggttcagtgaagtgttggcaacgtgtatgatattgaattaaatggccaacg

SEQ ID NO: 99190 - DNA, 201 bp, Homo sapiens
agatggaggtaatccactcagatttcactgtgtgcatttctcagtcattttcaacaggaccagaaagacaagagctagaaacttagtacaagggagtaagkagcacagttccaaaggctaagtaaggactactgtgcttttgctgcccaaatagacacaagtttcttttttttctttctttcttttttaaagaggtggagt

SEQ ID NO: 99191 - DNA, 201 bp, Homo sapiens
ttgagcaaattaactgatatccaggtaaagcttttcttttcttttcttttctttccttttcttttcttttttttatgtcaccttatttctgtcagagcttrcaactaaattatatttcaatgaagaggattaaataatacaatttgagatcaataagttaaatttaaggaagatattcccaacacaatgtgtgggcatgag

SEQ ID NO: 99192 - DNA, 201 bp, Homo sapiens
acttctcagacctactgagttatacaaccaggggtgtagggaggcaagcagtcatcacatttatttgaggactctcatgttttgtctaaaatattcatccytattttataatatactccataattttcccatataagtttagataaaagatgataccttaaaagtattataacactaaattgtcattccgggaaaatgtgc

SEQ ID NO: 99193 - DNA, 201 bp, Homo sapiens
ctcatttgatttggctgtaaaggattaatagaaaaggaaaacgtagtcactaggctgagaaaaattgaactctattgaattggtataaagatctaagtggrggtgtttggcagacatgatcatgaagctttcactgaggaaggaaactctaggaggcaaaagcagaaatgcaactcatcaaaattgaaatggtgacaaaat

SEQ ID NO: 99194 - DNA, 201 bp, Homo sapiens
tattttcttgaacatatatcacattcataggaaaaacactttttccaaaagattactgtcttcccaaatacccacgttctccattttttttttttttttttagagatggggtctcactgtgttgtccaggctagtctcaagcttctggactcaagcaatcctctcacctcagcttcccaaagtgctgtgattacagacata

SEQ ID NO: 99195 - DNA, 201 bp, Homo sapiens
aacctggatttatcccttagccctgttacagcaagtctcagaaaatttggacttcagcttccccagtgatacattttcaaatgcctatgtatggattgccyattagtttattggctagaactaaaggaaatcaggcaagagacaaaggacattttctctagggtgtcagtcaatgcaaaatgttaggactagcatcagatt

SEQ ID NO: 99196 - DNA, 201 bp, Homo sapiens
caaaaccccttttccccaaagccaaccataaaacctaaaaatagtactctaacttccaccacccccagcctgtctgtgtaaggccataaagaaattatctsactcactttgtttgactgaaggttataagacccccattccagagagggtccagcaccacacccagaaggaagaaatgcatgctcagagaggcaagaaggg

SEQ ID NO: 99197 - DNA, 201 bp, Homo sapiens
gcctattagtttattggctagaactaaaggaaatcaggcaagagacaaaggacattttctctagggtgtcagtcaatgcaaaatgttaggactagcatcakatttttttttttttacaaatgaaaataattgaagtgtggtagaagttcctctagttctggcagtcctaaatattgttaactgaagaatgatggggctcat

SEQ ID NO: 99198 - DNA, 201 bp, Homo sapiens
gagccttcatgataaatcaccattcttactgcactttaagcagataatcatgccagagactaaactgactttgcaaataaattagttttattattattatytttgtgggtaaaagttgggatgactgtagaagagaaaattatatttcagaagaaaattataccatacttgttattagattctagtcttgataattgtttt

SEQ ID NO: 99199 - DNA, 201 bp, Homo sapiens
atatagtattcctgagctacagaaaaggaatcagggcttggggcttattgaggggaggtggtgacaggttataagagggtgaggagaggaagtgtatagcragcataggttgtcttgttatgcagataaaaagtctctcaggtgataaaagttgtctcagagtcccccatcagaagaataggtaatagcctgtgacaaggt

SEQ ID NO: 99200 - DNA, 201 bp, Homo sapiens
cgggcagaggggctcctcacttcccagaaggggtggcctggcagaggcacccccaacctccctcccggacggggcggctggccaggcgggggctgcccccracttcccagacggggtggctgctgggcggaggggctctttacttctcagatggggcggctgccgggtggaggggctcctcacttctcagacggggcggcc

SEQ ID NO: 99201 - DNA, 201 bp, Homo sapiens
caggccgcacaggatcccacagcggtggcggggggcgggaggctcaggcatggcaggctgcaggtcccgagccctgccctgcagggaggcagctaaggccyggcgagaaatctggcccggcgagaaatctagcgcggcgccggtgggccagcactgctgggggacccggtgcaccctccgcagctgctggcctgggtgcta

SEQ ID NO: 99202 - DNA, 201 bp, Homo sapiens
tatagaatgtcataaattacaagatgtaacattattttatacactgagatggagaatcaaactgcaacgcagtacttccctgatcatcctgagtgattcaygagttagttatactagcctcttatttctttgaggtgtacgttttctgagggaatctgccatttctcctgccatgagttgcattgcttggctcgtgatagg

SEQ ID NO: 99203 - DNA, 201 bp, Homo sapiens
cctccaaagtgctgggattacaggcatccgtcactgcactgggccagtttgtaaatcttatgaaaagtatggccaatcttttgcaaaatgtgcaaacacayatagacacaaagttttatatctaaattattggttattaaagccaggacaatagagtgcatatagcatggaagacaggtagaaaagactgaaatggtttag

SEQ ID NO: 99204 - DNA, 201 bp, Homo sapiens
ccacgtagataatgtcagagtcgttcaaaccagagtgactccatcctgaataggggctgggtaaaataaggctgagacctactgggctgcaacatgatgasaccctgactctattgaaacaaaacaaaacaaaacaaaacaaaacaaaacaaaaaacggccaggcgaggtggctcacgcctgtaataccagcactttggga

SEQ ID NO: 99205 - DNA, 201 bp, Homo sapiens
cttgttggaggttcgggcctgggtgcttggttgtctgagcctccttttttgtgtttgcctgggtcctggagaggagcgcacggtatcatggtgagtgtcaygtaggttaccccgggtcccgcttacccacctgcatttacttaatggtggtttaattcttctttaaggattgcagtaacggatgctccgcagagtgtaccg

SEQ ID NO: 99206 - DNA, 201 bp, Homo sapiens
atctctcaagaagttacgtgcagagtttggaaggtctaggcaaaggttattagtcaagtgttcttacagtgtcaacgctcaactcccacaagcgtgagaargagagacctgtcattcctgagggtgatgacatacatttactggagcttatataatttatcagataagacagcagtctccttcagggtagaaagtgtgttt

SEQ ID NO: 99207 - DNA, 201 bp, Homo sapiens
ccagacggggtggcggccgggcagaggggctcctcacttcccagaaggggtggcctggcagaggcacccccaacctccctcccggacggggcggctggccrggcgggggctgcccccaacttcccagacggggtggctgctgggcggaggggctctttacttctcagatggggcggctgccgggtggaggggctcctcact

SEQ ID NO: 99208 - DNA, 201 bp, Homo sapiens
ttaactgaaaacattcttctaaggaaagcatcagaaaacttactagaattgcttaagaataaataaataatacaaataaaagagcaaaatgagaaagtagmcagactcctagtctattgtgctattgatctctccaggttctaggctttcttgggtctgacaccactttgtaaatttttttttttttttttttttttttcc

SEQ ID NO: 99209 - DNA, 201 bp, Homo sapiens
ttttaaaaacccacttgtaactgctgtatatattcagggcaacttgatttggtgtttcgttggttgcagtcctcaaatttgacctcaatatactctctacytatataaattttgtctcagttttgtccgtaggctgacattccaattgttttcctaattatatattttgttccttatttctcatgtctagaaataaagcta

SEQ ID NO: 99210 - DNA, 201 bp, Homo sapiens
acgggcatccccacactcggatacgcacccacagtggctgattcgggggtaaccgtgtcatttgcttgcaacactggcacctctgccctgcaccccgggartgagcagtgagtgaggctcgggtctgggcgctggctccgaatcttcgggctgggagagactccaccatctgggggcggcctgggggagcagccttagtgt

SEQ ID NO: 99211 - DNA, 201 bp, Homo sapiens
atcgcatgcaatttgtacgcttaatgtttggccatttgcagtgggcaaactggctatgtcgggagctggtgagatgctgcttgtggggagttgtttcctaktactctgatttatctttgtttaaataagagttcctttgttcactgtttcctccacacagaacagaggatttatatcttagtgttcattctcaactttcct

SEQ ID NO: 99212 - DNA, 201 bp, Homo sapiens
ttttgttacatgttttttcactgaataaatgctttgcttttttatatcaataagtagttttctccaacaccatttataaagtttaattgaattccattatrttgatgtaccataatttttttaaaaaattatattattgaacatttatgttgttggcaatttttttttcactagtatggacagtacatcctcgattacttc

SEQ ID NO: 99213 - DNA, 201 bp, Homo sapiens
ttacttatttatttttgagactaagtctcgctgtgtcacccaggctggagaacagtggcatgatctcagctcactacaacctccacctcctgggttcaagygattcttctgcctcagcctcccgagtagctgggattacaggtctcatgccaccgttcccggctaatttttgtatttttagtagagatgaggttttgccct

SEQ ID NO: 99214 - DNA, 201 bp, Homo sapiens
gaggcttggcttttgtgaaagatcatccgcaggctatgttaaaaggattttagctcactaaaagtgtaataatggaaatgtggaaaatatcgtaggtaaargaaactacctcatgctctgaaggttttgtagaagcacaattaaacatctaaaatggctttgttacaccagagccatctggtgtgaagaactctatatttg

SEQ ID NO: 99215 - DNA, 201 bp, Homo sapiens
caggaagcatgtaaataatagctgtgcagtttgttttctgaaccaaactgggccttattttttttaaagaaactttattaaacaaacaaaaacctagaaayactagatgtatatttttaaggtttctctcacataatatcctaatcatcagtataccgtaatccaagggctacatataactgaaaaataaatgggtcttaa

SEQ ID NO: 99216 - DNA, 201 bp, Homo sapiens
aatggtcctaagctggcaagccgcatcttgagcaaattaactgatatccaggtaaagcttttcttttcttttcttttctttccttttcttttcttttttttatgtcaccttatttctgtcagagcttacaactaaattatatttcaatgaagaggattaaataatacaatttgagatcaataagttaaatttaaggaagat

SEQ ID NO: 99217 - DNA, 201 bp, Homo sapiens
aatgcgcaacatcactaattatcagagaaatgcaaaacaaaaccacaatgtaaaatccacttgccctagttaaaatggcttgtattaaaaaaaaaaaaaaaacaggcaataacagatgctgggaggatgtggagaaagggaaccatcatatattgttggttgaaatgtaaatagtacagccactatggagaacagtatgga

SEQ ID NO: 99218 - DNA, 201 bp, Homo sapiens
aaatgcgcaacatcactaattatcagagaaatgcaaaacaaaaccacaatgtaaaatccacttgccctagttaaaatggcttgtattaaaaaaaaaaaaaaaacaggcaataacagatgctgggaggatgtggagaaagggaaccatcatatattgttggttgaaatgtaaatagtacagccactatggagaacagtatgg

SEQ ID NO: 99219 - DNA, 201 bp, Homo sapiens
tacatgaaaaaatgcgcaacatcactaattatcagagaaatgcaaaacaaaaccacaatgtaaaatccacttgccctagttaaaatggcttgtattaaaamaaaaaaaaaaacaggcaataacagatgctgggaggatgtggagaaagggaaccatcatatattgttggttgaaatgtaaatagtacagccactatggaga

SEQ ID NO: 99220 - DNA, 201 bp, Homo sapiens
agagaacccagatgcctaagtccacatgtttacaaccaactcatctttgacaaaggtgccaagaactgtaacggggaagacagtcttttcaataaatggtkctgggaaaattggataattatatgcagaagaatgaaactagattcgcttctcttaccatacacagaaatcaaatgaaagtatattaatgacttgaatctt

SEQ ID NO: 99221 - DNA, 201 bp, Homo sapiens
tacttcaaaatttattataaaactataataaccaaaacagcatagtacagatataaaaacagacatagtagaccagtgggacagaatagagaacccagatrcctaagtccacatgtttacaaccaactcatctttgacaaaggtgccaagaactgtaacggggaagacagtcttttcaataaatggtgctgggaaaattgg

SEQ ID NO: 99222 - DNA, 201 bp, Homo sapiens
agccaaagcaatcttgagcaaaaagaacaaagttagaatcaccacactaccttacttcaaaatttattataaaactataataaccaaaacagcatagtacwgatataaaaacagacatagtagaccagtgggacagaatagagaacccagatgcctaagtccacatgtttacaaccaactcatctttgacaaaggtgccaa

SEQ ID NO: 99223 - DNA, 201 bp, Homo sapiens
caatgacagctttgccataactgctgcttagccaataacaattgtggaatgctgagtccagatctcaaacatgttaaaggtaaaaaaaaaaaaaaaaaaaagatattttcgagtctgtaaaacatggtagcgtatccggaattggtgggttcttggtctcactgacttcaagaatgaagccatggaccctcgcggtaagtg

SEQ ID NO: 99224 - DNA, 201 bp, Homo sapiens
agtggaattgccttagtatagcagaattgcttgagtgtcttatctgttatcaccatatacatgagtaccctcaaattatctcatttccctttcttttgtasacaatacacattccaactatggagaatggtcctaagctggcaagccgcatcttgagcaaattaactgatatccaggtaaagcttttcttttcttttcttt

SEQ ID NO: 99225 - DNA, 201 bp, Homo sapiens
agtagaccactttacaagaattattcattggcaaacctggtgcatttactaaaatcttacaaaaggaatttgaggatttggttggaagaaatgttctcctcttagtaaattagtctgattttatatgtgccatacttttgttttcttgtcaaattgttttgcttttcactttataacaaagctccaatacttatgattaac

SEQ ID NO: 99226 - DNA, 201 bp, Homo sapiens
gtggagccacatcattgaagttccttagtcctggtaagtgtggattttattctaagtgtggtgaaatgcccctgagaggttttgagtagtagatggaattscatttttaaaagtcactggtgagtcaagtagtgtactatggttacatttttttccccttatacctcattttgtttttcctgcagttaattcttgcattat

SEQ ID NO: 99227 - DNA, 201 bp, Homo sapiens
tcagcctcctgagttgctgggattacaggagtgcgccaccgcaccatgctaggtcttttttgttgttgtttttgttttttaacttggcactacaaaaaaaataactgggacagtttatccagatgaaactgtattagcatatatctactatgtttccagtgatttcatgtaagcttaaacatggtgggaagttagttttgt

SEQ ID NO: 99228 - DNA, 201 bp, Homo sapiens
gccaggtgtggtggctcatgcttgtaacctcagcactttgaaaggctgaagaaggagggtaacttgaggccaggatttcaagaccagcctagtcaacatgrcaagactctgtctctaaaaaaaataaaaaagaaaaaaagaaaaagaaaaaaaataaagatggaatcagcagaaaggaatgttaggtctggcccatgggcg

SEQ ID NO: 99229 - DNA, 201 bp, Homo sapiens
aagtagaccactttacaagaattattcattggcaaacctggtgcatttactaaaatcttacaaaaggaatttgaggatttggttggaagaaatgttctcctcttagtaaattagtctgattttatatgtgccatacttttgttttcttgtcaaattgttttgcttttcactttataacaaagctccaatacttatgattaa

SEQ ID NO: 99230 - DNA, 201 bp, Homo sapiens
taagtagaccactttacaagaattattcattggcaaacctggtgcatttactaaaatcttacaaaaggaatttgaggatttggttggaagaaatgttctcctcttagtaaattagtctgattttatatgtgccatacttttgttttcttgtcaaattgttttgcttttcactttataacaaagctccaatacttatgatta

SEQ ID NO: 99231 - DNA, 201 bp, Homo sapiens
gttaaattttctcactaaaattattgatttttgtctttctctgtatttatcagtatgtatctactgaagtcttttcaaatccctgatcagtggtttgttcrggacagcactttgattgagggaggtgacgtggcttaacatagtatggtcttgagctgcctggtttctgtgatttagggactgaaccagctctggtcacat

SEQ ID NO: 99232 - DNA, 201 bp, Homo sapiens
gagaaaggagggtgtttatttgcaggtcaagaagcaaacagaatcagggagctcatgcttaagacctgaactccacagtggcttacatgtaaggtgcagargttacaggcaaaggcatcaatcaacacatggaagccatatattggtttggcctaaaaaggtgggatatcctgaagtaggggcttacaggttacaggtaaa

SEQ ID NO: 99233 - DNA, 201 bp, Homo sapiens
gttacatttcagtttctggttaaccaaaagtacttccaaactactggattaggaatggcaaatagttatggaaaatgcattcgagtggtcaatcccttgawttttttttactattaatgctgttatcattaatagtaagtagaccactttacaagaattattcattggcaaacctggtgcatttactaaaatcttacaaaa

SEQ ID NO: 99234 - DNA, 201 bp, Homo sapiens
tgcagcctcaaactcctgggctcacgcaatccttctgcttcagcctcctgagttgctgggattacaggagtgcgccaccgcaccatgctaggtcttttttkttgttgtttttgttttttaacttggcactacaaaaaaaataactgggacagtttatccagatgaaactgtattagcatatatctactatgtttccagtga

SEQ ID NO: 99235 - DNA, 201 bp, Homo sapiens
aatcagaaaaaattgtttggttttattattactttaaaattttttttattggtaccataaattatacatatttatgaggtacactgatgttttcatgcatkcatataatgtgtaatgattaggacaaataagaaagaaataaataaaaattaggataattaggatatccatcacctcaaacatttcttatttttttgtgtt

SEQ ID NO: 99236 - DNA, 201 bp, Homo sapiens
atgcggggctgctgttttcatttaacttcatgtagtctcagggctcagcaagctttaggaaaggtccggtttgggggcactggaagtgtgtgtgtgtgtgtacatatatatacacacacaaatagatccatacatttatgtatctagttggctagctattgcaaaacacatgtttattttgagatcatcaacacttctaaa

SEQ ID NO: 99237 - DNA, 201 bp, Homo sapiens
catgcggggctgctgttttcatttaacttcatgtagtctcagggctcagcaagctttaggaaaggtccggtttgggggcactggaagtgtgtgtgtgtgtgtacatatatatacacacacaaatagatccatacatttatgtatctagttggctagctattgcaaaacacatgtttattttgagatcatcaacacttctaa

SEQ ID NO: 99238 - DNA, 201 bp, Homo sapiens
attctcagtctggctttccttgagctcttaatcaaaatcataaactccatttcccatttctcctcagcattccagcattctccattgcttttccttctttrtttccccctgtgtagtctaacatactatcaacacaataaatgtttacctgtgtctattagaaagtaagcagggagatatgtcagttttgttcactgctgt

SEQ ID NO: 99239 - DNA, 201 bp, Homo sapiens
aggctggagtgccatggcacaatctcggctcactgcaacctccgcctcccgagttcaagcaattctcctgcctcagcctccagagtagctgggattacagrcatgggccaccactcccggctaatttttttgttatttttagtagagacggggtttctccatgttggtcaggatggtctcaaactcccaacctcaggtgat

SEQ ID NO: 99240 - DNA, 201 bp, Homo sapiens
ctattttccacagcttactggaatatttcagctattagtcaatattctttcagttgcaagtcagaaaaccaacttgaaattattatttatttatttatttwtttttttgagacggaattttgctcttgttgcccaggctggagtgccatggcacaatctcggctcactgcaacctccgcctcccgagttcaagcaattctc

SEQ ID NO: 99241 - DNA, 201 bp, Homo sapiens
ctcccaaatttctggaactacaggaatgagccatctcactcagccctatttttagtgttgggaagaatctcaaaaagtaatgactgtactaatttacaccrctaccctcagtatacaagggttccatatcctcactaatacttatcttttatctttttgatagtagccattctaagtatgtatagttttaaaattatgaag

SEQ ID NO: 99242 - DNA, 201 bp, Homo sapiens
caaggcacccatgaaatgaaggtgtcatttcttaactgagaggttaaataaaagtgcagagataagatggttaagttttatcgtagctgggaagaaaagcrggtgtgtgtattatgcttaggtttttcctcccaaacaatgaaacccaaaaaggcaaatgaagctttaaggcgctttatcctttactggtaggatggtcct

SEQ ID NO: 99243 - DNA, 201 bp, Homo sapiens
ttatcctcatatagtaacatatcaaatattttcagtcagtgatgcaatatgaataaaatgaaatgatgcagtagtgacagaactgagagaaagctggtacraatttatactgactggtcagggaaagcttcacagaaaaggtgaactttcagctgacacctgagtaccatggtctggaggtaagagtgtcccatgcatatg

SEQ ID NO: 99244 - DNA, 201 bp, Homo sapiens
aatttgcaagcatttcacaagttagaagactttgttgaagccagttactatccttgtcaattagtaaaaatatccaagagggcctgagacttacattgaaragtaaaataaagtttgatcatttgagtgatgtcggatggcattaagtcatgaaactaagtgaaacttaaaggtggctgagaatgcaacaggcctccagag

SEQ ID NO: 99245 - DNA, 201 bp, Homo sapiens
atgtggaagtggcttttgaattgggtgttgggcagcatgtggaagaattttgagaagcatgataggaaaagcctagcttgccttagaaagactgttagtasaagtagggatgttaaaggcgctgctggtgaggacttggaagtgaagagcatggtaaagaaaatgtgtttcattttagagaatatcaaagtcattgtagaa

SEQ ID NO: 99246 - DNA, 201 bp, Homo sapiens
cgccttggcttcccaaagtgctgggattacagccgtgagccaccatgcccagccagtatacttttagatagttattttttcctaacaaaatgggatcataktgtacataattttgttacatgttttttcactgaataaatgctttgcttttttatatcaataagtagttttctccaacaccatttataaagtttaattgaa

SEQ ID NO: 99247 - DNA, 201 bp, Homo sapiens
attccaatactgttcaacatgtttttctttgttgcaaacaatgcagtttttaagcaaactaatgaatgcataccctgacaaacaaatccaacaaaagaggyacttagagcagtgttcattgaatcctagaattttgaaagaaaaaatctattaggtcattttgggcttttacttctgctgaagaaggattgttcttttgag

SEQ ID NO: 99248 - DNA, 201 bp, Homo sapiens
gtatttacacggtcttaatgcctattgccaaacacatatagctgctattaatgcctattgccagactcatatagctgcaaactcatgtagcttaatgcccrttgccaaactcatatagctgctatatatgtctactggaaaactcacatagctggttgattttaaattgattgtaggaaaattcatacaaaaagatgctac

SEQ ID NO: 99249 - DNA, 201 bp, Homo sapiens
tctcgcttgaattattccaaaagtctcccaactggtctgaagcttaattttcattatgtgctgttcgatgtcattccaccacgcaaaatctatggcttccscattgtctcctgagtttagtttagtgcatgagaccgtttaaaatctacctacacctcttctatgtgcatgcatttctctagtcataagagaggatttgat

SEQ ID NO: 99250 - DNA, 201 bp, Homo sapiens
cagagagaaaccagtttagcaagatgtcatagtggagaagtattctagtagtagtctcagtctaccaggtatctcccaccaacttttgtctggttcatacytgatgtgcttccatccagacattccttaacttcccaagtctgtgttgcttccaaatggcaatgatacttcttcctttcctttatttataccagtgtaacc

SEQ ID NO: 99251 - DNA, 201 bp, Homo sapiens
taatataaacagaactggtggcacttaaaatgataatgattaacttatattgcatgttctcttcctttcacttttttcagtgtctacatttcagaccgagyttgtcagcttttttgaaaacacatcagtagaaaccaagattttaaaatgaagtgtcaagacgaaggcaaaacctgagcagttcctaaaaagatttgctgt

SEQ ID NO: 99252 - DNA, 201 bp, Homo sapiens
tgttttgactttaggactagatgtgagttcaggaatttgaaatcataataaatgtttccttgaactttgaagataaaaggtagagttaaaagacagctgcraagtctacatggggaagcataatacatgactcagggttccatggttttcagtgtcggtgagtgctctgtacacttataagaatagtgctggtgtttatag

SEQ ID NO: 99253 - DNA, 201 bp, Homo sapiens
cagcaattcacaagtgcattaatataaacagaactggtggcacttaaaatgataatgattaacttatattgcatgttctcttcctttcacttttttcagtktctacatttcagaccgagtttgtcagcttttttgaaaacacatcagtagaaaccaagattttaaaatgaagtgtcaagacgaaggcaaaacctgagcagt

SEQ ID NO: 99254 - DNA, 201 bp, Homo sapiens
gattataggtgtgcgccaccatgcccagctaatttttgtgtttttagtagagatgggatttcaccatgttggccaggctggtcttgaactcctgacctaargtaatccacctgccttggcctcctaaattgttgggattacaggcatgaaccactgtgccctgccattttttgatgtcttaaccttcaatattttgtaagc

SEQ ID NO: 99255 - DNA, 201 bp, Homo sapiens; identical to SEQ ID NO: 15331

SEQ ID NO: 99256 - DNA, 201 bp, Homo sapiens
tagggaacatatggagatatttagaataagagagtgtgagatagagcgcttttgctatagcctagccattctgttctctactaagtgttgcggggttaccrggttttctactaggctgtatgaatgcaaaaggtagagagatatatagggccatggaataaataccgaagtgttttctttggtatccttgatacctttcga

SEQ ID NO: 99257 - DNA, 201 bp, Homo sapiens
gttcaatattggatacttaacaacactacatccaaggaagccaggttttgctgattttaacctcgtcctgttgagtaactccatgcaggtacagtggtacraacacatgtggacacacagacccagacctttatttcctcggggattctggtaagtgtagaggtgtcttgaccatagtcaatagcagaaatatgcacaacc

SEQ ID NO: 99258 - DNA, 201 bp, Homo sapiens
cttttttatggctgcatagtattccatggtttatatgtatcacattttctttattcagtccaccattgatggtcacctgggttgattccatgtctttgttrttgtggacagggctgtgataaacatatgagtgcagttacctttttttgtataacagttcataataaaatactcttaacagtagcacagaatttagattgc

SEQ ID NO: 99259 - DNA, 201 bp, Homo sapiens
taaatttttaattgacaaataattgtatttatttatggggtacgatgtagtgttttgatatatgtttacattgtagagtgactaaatcaagctaattagcrtactcatcactgaacatatttatcatttcttgtggtgagaacatttgaaatttaatctcttagcaattttgaaatatatgatacattattattaactaca

SEQ ID NO: 99260 - DNA, 201 bp, Homo sapiens
aataatgtagagcaacattttaatcatctctcataagcagtttccccatttgcaacttcctgggaaatcttacattatgaaatgttcattagaactcccaytttaaaaccctgctgccattttgtgagtgggcagaagaaaggctggagatgagatttgtctgtctcaaatgattcactccttcatttctggttcactcca

SEQ ID NO: 99261 - DNA, 201 bp, Homo sapiens
tgaacgtagtacactataggtagtatttctaaacacttttcccctccccctcttttggaatccctagtgtttattgttcccatctttgtgtctatatgtayctaatgcttagctctcacttataagtgcggacgtgtgatattttggttttctgtttctgtgttaattcatttaggatagagagactccagctgcagctgt

SEQ ID NO: 99262 - DNA, 201 bp, Homo sapiens
ttctttactattttcccctttaacaatttaaacttctttcaaaacaactggcagtagttttttaaaaaagaaaacaggctactcttcaaattaaaaaaaaattgtcttgctttaggaaaaatgttcttctgtcttttccaattatcttatttcttctgcctctcatctgccttgcctaggcagaattattctcaagcctgc

SEQ ID NO: 99263 - DNA, 201 bp, Homo sapiens
gtggatcacttgaggtcagggatttgagaccagcctggccaacatggtgaaaccccatctctactaaaaatacaaaaactagccgggtgtggtggtgcacscctgtaatcccagctcctcaggaggctgaggcaggagaatcgcttgaacctgggaggtggaggttgcagtgagccaagattgcgccactgcactccaccc

SEQ ID NO: 99264 - DNA, 201 bp, Homo sapiens
tctggtaagagctctcctggcttgtagatggccaccttctccctatgtcctctctgggcctttcctctatctggccaagggagctatctctggtgtcttttcctcttcttataaggacagcaggcctatggattaaggcctcactttcatgtcttcatttaagtttaattacctctttaaaggcccgatgtccaaatacag

SEQ ID NO: 99265 - DNA, 201 bp, Homo sapiens
ttataattattactgataacataaactaagtcatatcagaatttaggagtttcccataattttggagcacataccaataacatatttatacaaatacaacycaaagaaagctaaacaccatttcatatttgacagtgcttcctgtatgattttaatataccaagtaagccaaatatgtcatttttggacttaaggggacct

SEQ ID NO: 99266 - DNA, 201 bp, Homo sapiens
aaggcttctggttggctatttttatggttatttcttgattatatgctaagcaaggggtggattattcatgagttttcctggaaaggggtggggaattcccrgaactgagggtttctctttcttttagaccatatagggtaagttctggatgttgccatggcatttgtaaactgccatggcactggtgggaatgtcttttag

SEQ ID NO: 99267 - DNA, 201 bp, Homo sapiens
tacaattatatttgatgtatttaaccagattttatatattatattctatattttataacatgtatatgtatcatataacatacacatatacatacacacacacagccaatataatttcactctcagtttcttgttaatcaactattatattgttgatacaacaaatataagaactgttactagtaaattgaataaagcagg

SEQ ID NO: 99268 - DNA, 201 bp, Homo sapiens
atacaattatatttgatgtatttaaccagattttatatattatattctatattttataacatgtatatgtatcatataacatacacatatacatacacacacacagccaatataatttcactctcagtttcttgttaatcaactattatattgttgatacaacaaatataagaactgttactagtaaattgaataaagcag

SEQ ID NO: 99269 - DNA, 201 bp, Homo sapiens
gatacaattatatttgatgtatttaaccagattttatatattatattctatattttataacatgtatatgtatcatataacatacacatatacatacacacacacagccaatataatttcactctcagtttcttgttaatcaactattatattgttgatacaacaaatataagaactgttactagtaaattgaataaagca

SEQ ID NO: 99270 - DNA, 201 bp, Homo sapiens
agtttcactcttgttgcccaggctggagtacgatggcacgatcttggctcactgcaacctctgcctcccgggttcaagcaattttcctacctcagcctccygagtagctgggattataggtgtgcgccaccatgcccagctaatttttgtgtttttagtagagatgggatttcaccatgttggccaggctggtcttgaact

SEQ ID NO: 99271 - DNA, 201 bp, Homo sapiens
tgcttaagaataaataaataatacaaataaaagagcaaaatgagaaagtagacagactcctagtctattgtgctattgatctctccaggttctaggctttyttgggtctgacaccactttgtaaatttttttttttttttttttttttttccagatagggtctcattctgtcacctaggctggagtgcaggggtacaatca

SEQ ID NO: 99272 - DNA, 201 bp, Homo sapiens
agtgcatgtgattccaacactgagatataatcactgttaattttttatgtctttttatttttgagctggagtttcactcttgttgcccaggctggagtacratggcacgatcttggctcactgcaacctctgcctcccgggttcaagcaattttcctacctcagcctcccgagtagctgggattataggtgtgcgccacca

SEQ ID NO: 99273 - DNA, 201 bp, Homo sapiens
tactagaattgcttaagaataaataaataatacaaataaaagagcaaaatgagaaagtagacagactcctagtctattgtgctattgatctctccaggttytaggctttcttgggtctgacaccactttgtaaatttttttttttttttttttttttttccagatagggtctcattctgtcacctaggctggagtgcaggg

SEQ ID NO: 99274 - DNA, 201 bp, Homo sapiens
tctgtcactcctttttaaggtacctggagatgacctagaggcttgccacgcttagggtttcctccctgtgcagaagaagatgggaagtgcaaatgaggacsaggggtggggagggaagagggagtcaggtgattcagcaagtgcaggagcccacagactaagctcaggaatttgcactttgtctgctcgcagagtgagttt

SEQ ID NO: 99275 - DNA, 201 bp, Homo sapiens
attaaacagatagtttaaacacatagcttaaaaggatctttttcccatttcctatccttgagcaaagaatatattcaaacactttggcagaagtcaatgakgttataccactaattccatgatgaaaatcaactgaatgtgatactgaaagagaaggaagagaattgtcactgtaaagtcaactgttagtcatattaggaa

SEQ ID NO: 99276 - DNA, 201 bp, Homo sapiens
acacaggaaatgaaattcctaatctttttatccagaatcttcatgtgtttgtctctctgtccatctgtcactcctttttaaggtacctggagatgacctaraggcttgccacgcttagggtttcctccctgtgcagaagaagatgggaagtgcaaatgaggacgaggggtggggagggaagagggagtcaggtgattcagc

SEQ ID NO: 99277 - DNA, 201 bp, Homo sapiens
cttcccaagtctgtgttgcttccaaatggcaatgatacttcttcctttcctttatttataccagtgtaaccatgcttgccgtagaaatgaaataatttcaytgacatataaatgtttactaatataacattattggtttgactgccttctttttctctctgtcctacccccatcctccaaaattcatatacatgcctattt

SEQ ID NO: 99278 - DNA, 201 bp, Homo sapiens; identical to SEQ ID NO: 15336

SEQ ID NO: 99279 - DNA, 201 bp, Homo sapiens
ttcatgataaatcaccattcttactgcactttaagcagataatcatgccagagactaaactgactttgcaaataaattagttttattattattatctttgkgggtaaaagttgggatgactgtagaagagaaaattatatttcagaagaaaattataccatacttgttattagattctagtcttgataattgtttttttga

SEQ ID NO: 99280 - DNA, 201 bp, Homo sapiens; identical to SEQ ID NO: 15338

SEQ ID NO: 99281 - DNA, 201 bp, Homo sapiens
tctgtcttgtaaattgagactggcatatattgggcttacattactgggaaaaatgtatgtcatcatcattggtgaaaaagagtttccatagcagttttttytaagtagagagataaatgaatcagacttttggaggaggtatgttttaactcactggaggatcacaccaagtctgaacatctaaggaaccctagtggaaaa

SEQ ID NO: 99282 - DNA, 201 bp, Homo sapiens
aacacaatgtgtgggcatgagcaaagcagaaatgggaaagaagatgtatgttttaaaaaaagaaagaaaatattgttcaggactccacattacttaacatwaaaaaatagatgtaatttttggtaacatttaaaaatctcattaagaaggataacataacttttgttaaaaaaaggaagaaaaaatttgaaagtagaagca

SEQ ID NO: 99283 - DNA, 201 bp, Homo sapiens
gggagcctgggtgacagagagagaccctgtctaaaatatatatatacacacacttgaatgcttcatgtcccttgctcagtgacagccccgtcctctgcttytgcacagttgaccaaggcttctcagtctactcctgtgtagaaaagaattaaagcaggcctgaggctgctagtcttagaaaggcttgcaaagttggccctt

SEQ ID NO: 99284 - DNA, 201 bp, Homo sapiens
ttccaactatggagaatggtcctaagctggcaagccgcatcttgagcaaattaactgatatccaggtaaagcttttcttttcttttcttttctttcctttycttttcttttttttatgtcaccttatttctgtcagagcttacaactaaattatatttcaatgaagaggattaaataatacaatttgagatcaataagtta

SEQ ID NO: 99285 - DNA, 201 bp, Homo sapiens
ttaacagctgtccaactggtctatacatttcacctaacatatggtaaatgttcctactgttggcctttcctgagcctctgtccattcaactaaggccactrcaatgggattgtatgcagttcagccaagaaataaatgtgaggtgcaactcacattttttaaatgtttcaaaattaagcatttaggtgcttttattcataa

SEQ ID NO: 99286 - DNA, 201 bp, Homo sapiens
tgtgccagctatcctctactttctatatgatgctatcattcttttttcttttcttttttttgacagaatctcactgtgttgttcaggctggagtgccgcaragtgatctctactcactgcaacctctgcctcctaggttcaagcaattcttgtgcctcagcctcctgagaagctgggattaccaccatgcccagctaattt

SEQ ID NO: 99287 - DNA, 201 bp, Homo sapiens
aaacataaagtgcaaaacccttttctgtgacagtgtagcttttttaaagattcctaaatttgctatcccattccatgttttagacagttcatctacacttygttagcttttgttcagaatgaaagatgacatatttttgcaccttgtacagacagtcccatgtcttgacagaaaacaaaatgaaaatacccacatatgttg

SEQ ID NO: 99288 - DNA, 201 bp, Homo sapiens
tcaagactgaatgaatcaacactttccagctcagaccgcaactgagctgtgtgtctgtgtgtgcgcatgatgataagaaatctagaaggaaactgggaaamccacatctcatgccctgtttaagaactagaaaaagtgtcagaagaattaaaattaagcctcacgagagtctgtgggtatggaaagtcaccagctagctaa

SEQ ID NO: 99289 - DNA, 201 bp, Homo sapiens
ttgaatctgggattctttatgttccctaaggctgtggatctttccattgatgagtccagcttgacaggtgagacaacgccttgttctaaggtgacagctcytcagccagctgcaactaatggagatcttgcatcgagaagtaacattgcctttatgggaacactggtcagatgtggcaaagcaaaggtaaatttttttcct

SEQ ID NO: 99290 - DNA, 201 bp, Homo sapiens
tagcagaatgttttataaagactatttggaaattacacatttttcttacattaccatttattaaatgtataatacagtgcatttaaaaattagttttcctrtgtaggtgtgaggaatgatatatttgacagtaatgctatcctttattgagttctcaatttgggtatttatgaaaaggagttatacagtttcactgtattt

SEQ ID NO: 99291 - DNA, 201 bp, Homo sapiens
tgatgtgagcctgtggtctcagctactctagaggctgagctggaggattgcttgagccaagaaggtcgaggctgcaggtaagtcaaggttgtgccactgcrctccagcctgggaagcagggcaagaccctgtctcaaaaaaaaaaaaaaaagataatcattttatgtattatgaatgtgaagtattttctcttgtgtgaag

SEQ ID NO: 99292 - DNA, 201 bp, Homo sapiens
gtagaatgagtttggaagtattccctcctcctctattttttgtaatagtttgagtagcattggtattagttcacctttaaatgtttggtagaattcagcartgaagccatcaggtcccaagcttttctttgctggaagactttttattatggcttcaatcttgttacttgttactgttcaggctttggatttcttcatggt

SEQ ID NO: 99293 - DNA, 201 bp, Homo sapiens
gtgggagcagccgtgggacgcgtggccgggagcgggggtgacagcctgggattccgggggcttctcttccttgtcctcctcctctcctctctattcccagwgtggccgtggctgacactaaagactttgtagccatcaacccgagtgcagtttcgatggaaaatgaaggtaaaggcccctggccgaccggttgcaacgcgg

SEQ ID NO: 99294 - DNA, 201 bp, Homo sapiens
cccacctcacttagcgctgctaagtaccaaccatgttgacttccacatacttggggaatattataacagaacaccatctgcttctttacttttgcacattyaaatgaactcccccctctagcctagaattctctcctttacttacaacttgccctcctggaggtctcctgtacatccttcaatacttggattaaatgggct

SEQ ID NO: 99295 - DNA, 201 bp, Homo sapiens
taattctggctgctgcctttcctagttatgtgactttggataagtcacttaatatctttttttcttttcttatttttaactgagggtgattgtgcctgccytatggaatagttgtgaaacaatgtgtttgaaagctgtggtggccaggcgccatgcctcacgccagtaatcccaatacttcgggaggctgaggcaggcaga

SEQ ID NO: 99296 - DNA, 201 bp, Homo sapiens
cagagatggtgtatgggagctagggactgcagtcaaaaatccttgtatgtctacctgacgttttattctactgtagctaagctggcacttaaaccacaatacaaagtccttcctgctcttccctcccctttccacaggcagaggagcctctccctgtggcaaccactatcactgggccatgggtggttttctacaccacca

SEQ ID NO: 99297 - DNA, 201 bp, Homo sapiens
gataaatatgttccaagttcaccaaaagcagtagatgagcagttagttgcatccaaaagatgttacccatttcaggtatagatgccttcaagtccaggaayagttttgggttatcattaaaatgaaaatttagagtgaagtttttttacaatttaattattcctctgcaaagttttgctaagatgacttaaatataaaaga

SEQ ID NO: 99298 - DNA, 201 bp, Homo sapiens
cttttaactgctaatttcaaggcttcacgttttttttttttttttttttttttctgagaggtgagtgggatgcctaggaaacatagagtagcttttataakcttaatgcttttctcatggttttatcaaattatgattttgattatactttggtttgggtttgtactatttcaggattcagtatttagtgttcacctagca

SEQ ID NO: 99299 - DNA, 201 bp, Homo sapiens
aatctggctacagtgtgtagaatagattgaagaactggaaaatggagataggcacctagtttaacaggctttcaaaacccattagtatgcaggtcttatcyaccattggaattaagctgtttgttaacacctgcagagcagtcagtctttaaatactatggccaaaagtatgagtgttctcatagatgctgtagaaggcct

SEQ ID NO: 99300 - DNA, 201 bp, Homo sapiens
gaccaaggaaaggcaactggcagaatttgttgctaatgataaaattcaggttttcaagcaataattagggttttggaaaatttgtatgcactcttatgggytggatagcatcccagtatttaagactttattccaattagatcagtagtgatttcaacaaatgtgtgttttttttaaaaaaaaaattgttacgaaatgtgg

SEQ ID NO: 99301 - DNA, 201 bp, Homo sapiens
gctcatagtaaagccacactgagaaatattaacttagactaatgatcttggaaacgaatggattttttcttttctttttagttcacatgtaatagttgtayttatttatgcaacacagaatgatattttgatacatctgtactatgtgtaatcatcaagtaagggcaattagcatatccctcacctcaaaaatttatgatt

SEQ ID NO: 99302 - DNA, 201 bp, Homo sapiens
ccctagaacttaaagtataataaaaaaatcataaaatgtttagccctaaggttgctattaataaatgagaatttacttctgtcattttgttaattgttttyggaatgttttgtgtaccctttgtttctttttgtttttctttgcagtttaatgattttctgtagtgataatgtttagttcctttttctgtcttatttttgt

SEQ ID NO: 99303 - DNA, 201 bp, Homo sapiens
ctggacaaagggatgatgtccttggcaggacagagtgggatttcatcaccatactcagaatgttgtataattggaaacttatgaattatttatttttggarttttctatttaatatttttggactgctgctaagtaacagaaactgcaggaaattaaaccctggataaggggacactactttaatttctttatacttttca

SEQ ID NO: 99304 - DNA, 201 bp, Homo sapiens
aggaaagaaacaggcaactgctatatgaccacaggggacagccaccatctgagtctcagcagactagttcacacgccatgcaatgttgctgtatattcaarttgtaaaaatcatctagcttatcatgaaacaagctgcatttatcatcagagactgtcaggtcatcatctccacctgcagacagagcttaagcagcatctc

SEQ ID NO: 99305 - DNA, 201 bp, Homo sapiens
gacctcgtgatctgcccacctcggcctcccaaagtgttgggattacaggcgtgagccaccgcgcccggctgtatttaacagtgtgtgtgtgtgtgtgtgtstgtgtgtgtgtgtgtgtgtgtctgtgtgtgtgcgcgcacgcgcgcatgcatgcgcgtgtccatgcgcaagtgtgtgctaagccctgttctgggtatagtg

SEQ ID NO: 99306 - DNA, 201 bp, Homo sapiens
aataagtccattgacactttgctttgtggttcatgtgcttatagttggcccccatcatttttttaaacctatttttgatctgatgattttctaaatgtatsagacttctttcagagaattaccacttgggctagcaaccaagattaagctgtttttatgatactggattatcagaccattttaatctgggcagaaaggtta

SEQ ID NO: 99307 - DNA, 201 bp, Homo sapiens
attttcgccatttagcacatatttgaaaaccatgtacagcacattgtatcaggcttcagggcttagaagtgaaaaagacagtttgagccctctccattggyagacaccagcttgcaaacaactgtgattcaaagaatgatatgtgtctgctcatgaaatgaattgaccatgtgagcctaggcaagccgcttgattttttca

SEQ ID NO: 99308 - DNA, 201 bp, Homo sapiens
taaatgtagcacaaaatttgaatctgggattctttatgttccctaaggctgtggatctttccattgatgagtccagcttgacaggtgagacaacgccttgytctaaggtgacagctcctcagccagctgcaactaatggagatcttgcatcgagaagtaacattgcctttatgggaacactggtcagatgtggcaaagcaa

SEQ ID NO: 99309 - DNA, 201 bp, Homo sapiens
gaaatgtttactattagtgtaaggtaagtctcaatactttataattggagtctcttttgcctcttttatttctctaatggacatagcttacgttttattayggagatcagtattacatggagcccataagagtataacatcgctacataaatagttcagaagtcatatattaaaattatccttagaaaaatgaaaatgtat

SEQ ID NO: 99310 - DNA, 201 bp, Homo sapiens
aggcacaatctttaggtttgtttgttacagctttcattgaacaaaaatgagaattcagaatttttcactttctactataatggcaaagagaataattgacrgagaagacttttcacaattattagacaaatcagaagatcagtgcaaagagccaaatagaagcactgtaggccgtaatgatgtgggtgaaattaataatat

SEQ ID NO: 99311 - DNA, 201 bp, Homo sapiens
taaaaatacaccatctgcagatgtaggataattattccctatgtggtgagggcactaagaaaatgtcctgtgaagtagcagaagtgctttaatcatgcaayaaggtggaatctggtgctgcataaacttgccctgatgagcaatattaaatgcctcccattcctctcttgattgtatttgatgctgtccttaggggagtgt

SEQ ID NO: 99312 - DNA, 201 bp, Homo sapiens
aataatttaatatttttcccgtttccagctcttcagctgtaacagtgactcaaaatcaattacattaagattagtttttttttgttttggtttttttttttaagtaactttgttgctttaaatataagtgaaaatactgtatttacttttgtgtgcttccatctgaactaaagtttcccatggtgcttaccgagttaggtc

SEQ ID NO: 99313 - DNA, 201 bp, Homo sapiens
ttctgtttttgtccctacaccctagcacagggtaggcatttaatatctgaatgaatgagtaagccatatgccaagtggtaagaaatgcaattaaaaaaaaatagagtaacaggactagagtgaatgagggtagacagtgtgtctcactagggtgggttatcagaaaaaggctctacaaagtgacatttaaagactgagagg

SEQ ID NO: 99314 - DNA, 201 bp, Homo sapiens
aattttaaaattcctattctttaaagccaggtcaaaagccaggtctgagaatcttcttgtgatttaacctcttctcatcctggtgaccgctgtttccttaytgtagtattcagtctgcactttgccattttgcacttgacagactgctttatgtaagggtaaaaaccacagttacttttgcaccaacttaataaaataatc

SEQ ID NO: 99315 - DNA, 201 bp, Homo sapiens
gccagttgtcttttctgggtagatcagctatgagctgactgactaagaggagtagttaaaatggagaaagcttagctgtactttgtcttgcatgttaaacrtaatgagtttagaggattatgattatttgtaatcatcaggatctgctagacaggacatctgttttactttttactcttatgttggtggagaaatagcgtg

SEQ ID NO: 99316 - DNA, 201 bp, Homo sapiens
cggcctttttaactttttaaaatagagaaaacagtatattccttggggaaagatgaaggattgagaaaaccagctctgggtaaaaattattatgactgcayctggagttgattaggcctgcctaggaaagaaacaggcaactgctatatgaccacaggggacagccaccatctgagtctcagcagactagttcacacgcca

SEQ ID NO: 99317 - DNA, 201 bp, Homo sapiens
tgctcttctgggtctagccacccagtcgagctaccaggtgccaggctagtactggcgagtgtctgtaaagagtcctatgatgtgatccgttttcaggtctygcagctgtggatactagtacctgctctggtggaggtagctggggagtgaagtagactctgtgagggtccttggttgtgtttttgtttagtgtgctggttt

SEQ ID NO: 99318 - DNA, 201 bp, Homo sapiens
tggatgtctagatctctagcaagaccggggaagttttccttgattatttcctgaaatatgttttccaaactttcaaatttcttttcttcctcaggaacacsaattatttttagctttggatgtttaacgtagacccagccttcacggatgctttgtttattttttttaaaataatttttctttatcttggcagattgggtt

SEQ ID NO: 99319 - DNA, 201 bp, Homo sapiens
gtctgaaataattcagctgtagatccatctggtactggactttttttttgttggcaattttttcattcctgtttcagtctcaccacttgttattggtctgytcagagtttctgtatcttcctgatttaatctaggagagttttatatttctaggaaattaaccatctcctctggattttctagtttgtgcatgtaaaagtg

SEQ ID NO: 99320 - DNA, 201 bp, Homo sapiens
gtttttcttttctgtgctaacattttcaataactttcatgtataaactctaataggctgatcttcagaatggtctaaacaaatgtgaagttagtcataggygagcctttcatggctggaatgagtttgatattagtgaagatgagccactgtggaagaagtatatttctcaggtgagatacttttacttcctcttctactg

SEQ ID NO: 99321 - DNA, 201 bp, Homo sapiens
taccccaaagtgggacttctggaatatatggtagttctgtttttaaatttttgaggaagcttcatacttttttccatagtggctgcaccattttgcattcycaccaacaggattccaatttcttcacatcctcaccaacagtagttgtgttttgttttgttttggttttttgataatagttttccttacaggtgtgaggta

SEQ ID NO: 99322 - DNA, 201 bp, Homo sapiens
gatagtcttaattagtactctgaaaaagagttgaaactaaaagagattatatatatgacattttgtaaactgtagtaatttaagccagaggatgctgtagmgagtacttgtatgcaataaccttctgacagttggattccaaatacttgatttgtcttcatatttttgtcattcatttaaagtcagcagaattcaggtctg

SEQ ID NO: 99323 - DNA, 201 bp, Homo sapiens
tagagaatgatatctagaaaccaagatctgggtgccaggtgtgctccatgctactgggtgtcattgcttctaggctctcttagtagatagagctagcagtrtatatgtttggtaacatgtatgaacacatatgtttttattttcttatctatccatctatgtatataaataaaaaactgccagtgatgctgccagttctgt

SEQ ID NO: 99324 - DNA, 201 bp, Homo sapiens
gtgttttcttgcccacttttcttactcatgttgaggattggtttttctaaacatagcttttgtaaatcaatgtgtactgactgatttcacttccctgattrtatccttaaagcagctaaggtcattggttactataaatgaagtacacacaagtccgtgacttgtgatggtttgacttaggatttttcaacttcacgatgg

SEQ ID NO: 99325 - DNA, 201 bp, Homo sapiens
ctttgcaaactgtagtatgctatataagtgtaatgtcatataagtttaagcttacttatgtatattttcatagcttattcttttaacagtatattgtaatyagaaaacaatgtctttttagattaataattgtgatgagaattagaatctatatttctttactaaatgtcctttttaaagacaaattttaatgcttttcta

SEQ ID NO: 99326 - DNA, 201 bp, Homo sapiens
gtttttctactaaggctaggaatgtcacatgtatgcagggatgagaaccttatcacacacactcacgctcacataccaggtctctcagcccttgggcgtcrccttccaactccatgtgtattttatgcatgtgatctttatatgtgttctttcgctgttttcctatcatgtgaaacacattaaacatctcaacacatttgc

SEQ ID NO: 99327 - DNA, 201 bp, Homo sapiens
ggattcctgtgagaattaaatagtgcctgtaatgtagttaagcacaactaaacaaataacagtaaatagtaatcgtaatcacaaagcactgggtgattctttattcctctgcagcctgccatccatcaagtggtgtgcttagtaatgtggcacagcttttttaggggaaaataaaaaagatcatgggtcttgccctcaaag

SEQ ID NO: 99328 - DNA, 201 bp, Homo sapiens
aatgttgagaatcagagcttttacctctacttcagagcccagtgaaatgccaacaagaataacctttccagatttctagtgtgtgtttgtgtgtgtgtgtktgtgtgtgtgtgtgtgtgtgtagtacagtttcttgtacactttttttttttttggcagggtgttgctctgtagtgtgatcatggctcactgcagcctgga

SEQ ID NO: 99329 - DNA, 201 bp, Homo sapiens
atagggagaccaattagaaaatcaaggaagcttaaggagtaaagggataattgagctgtggcagtcaggatggagagaaaggcatggaatttgaattgtcytttttttttttttttttttttttgaggcagggtctcactctgtcccccaggttggagtacagtggtgtgatcttggctcactgcaacttctgcctcccag

SEQ ID NO: 99330 - DNA, 201 bp, Homo sapiens
tatgatggcacatgcctgtaatcccagccacttgggaggctgaggcaggcaaatggcttgaacccaggaggcggaggttgcagtgagctgagatcatgccmctgcattccagcctgggtgacagagcaagacttcatctcagaaaaaaaaaaaaaaaaaaaaaaagttgtgttaaaatgctagaaaaatgtaagctattaa

SEQ ID NO: 99331 - DNA, 201 bp, Homo sapiens
ttgagagatttctaaaatttcctatattcacatagcactgtcataatttttactgtttaccacatctgtatgattaattcctcaatatttttctgtatttrtacttaaatcacattattagagtttatttagaaaaaaagttcatatcatgactgtaaatggaaaaccattgtcattagccgtaagtaaaaataattaata

SEQ ID NO: 99332 - DNA, 201 bp, Homo sapiens
atttcatctggatgtaaatgtattttcctgtttttccccttagggtgttgtcattggaacaggagaaaattctgaatttggggaggtttttaaaatgatgyaagcagaagaggtgagtacttaatatgttaatgatgtatttgttccaaatctgaaattcttcattgtaagtagagaatgttggattattttatatactat

SEQ ID NO: 99333 - DNA, 201 bp, Homo sapiens
gaaggtctccccattgtggtcacagtgacgctagctcttggtgttatgagaatggtgaagaaaagggccattgtgaaaaagctgcctattgttgaaactcygggtaagtctgtgttaagagcattcttatgcaatgatgcgtaagtttatgtcaatagtgaatcatctcagagttttacagtttttatcttagagatttgc

SEQ ID NO: 99334 - DNA, 201 bp, Homo sapiens
ctaattttgagtttgatgtgctattgcttttctaatttttttaaagatgtatcattaggatatttatttgaagtctttcttctccttcttttttttttttytccacagagttttgctctgtcacctaggctggagtgcagcctagctcactgcaacatctgcctcccaggctcatgcaattcttctgcctcagcctcccaa

SEQ ID NO: 99335 - DNA, 201 bp, Homo sapiens
caccatagccaccacagctggcaatgttctgggtctcacttgaagacacgtctcagagtctcacccaaggcccatgccatgatgcactacctgggtattgyggctgattatttagtacccaaaggctctttattcacaggtgatgaatcctgccaggtgtggatccttcccttcgaggcagcggtttaccttttggcccat

SEQ ID NO: 99336 - DNA, 201 bp, Homo sapiens
agtaggacaggattctagtctttgatttgttttttaagtgaacctatatttctccttgattcttttggtgacttgtaatgatttaattctttaggctgctrtaatgtgatttgttcagataaaactggaacactgacgaagaatgaaatgactgttactcacatatttacttcagatggtctgcatgctgaggtactctat

SEQ ID NO: 99337 - DNA, 201 bp, Homo sapiens
tggctcacagctgtaatcccagcactttgggaggctgaggtggatggattgcctgaggtcaggatttcgagacctgcctggccaacatggcgaaaccccayctctactaaaaatacaaaaattagctgggtgtggtggtgggcgcctgtaatcccagctactctaaggaggctgaggcaggagaatcgcttgaacccagga

SEQ ID NO: 99338 - DNA, 201 bp, Homo sapiens
taaatatttttttttccaagatggtgactttcttcataataacttaagacacagtgataggttcatagtttatgtgtatttttcttaggcgggctgtgtgygcaatgatgctgtaattagaaacaatactctaatggggaagccaacagaaggggccttaattgctcttgcaatgaaggtacgtacctaaatttctcttct

SEQ ID NO: 99339 - DNA, 201 bp, Homo sapiens
atcaattattattagaaaacatgtttttaattgctgtacaatattttgagtataccatgtgtatgtgtgtataaatgcatagcatgcatatatatatatakagagagagagttacataaccattttcctgttgaaatttgagcttctattctttttactactgtaaatgttcctttaaggataatgacaatagcaaccatt

SEQ ID NO: 99340 - DNA, 201 bp, Homo sapiens
acaagtggtgacccttgttctttgttaaaggaaaaaataatcacatataggtgagaattaactttctctttgtgccatatagatgggtcttgatggacttyaacaagactacatcagaaaagctgaatacccttttagctctgagcaaaagtggatggctgttaagtgtgtacaccgaacacagcaggtatccatctgttt

SEQ ID NO: 99341 - DNA, 201 bp, Homo sapiens
agtacagaaagagacaggtttggatttgaagcccgacaagtaatgttttcctctcctgaaaaatctgacaagttactaggcttctaagctttctcagcctytaagttatctcatctgtaaatgagataatgccctcttgcaaagttgatgtgagtaataaatgaagccgccagagcaatgtttgacatacagttaacttgg

SEQ ID NO: 99342 - DNA, 201 bp, Homo sapiens
tccacctagaactggtgtgaaagaagctgttacaacactcattgcctcaggagtatcaataaaaatgattactggagattcacaggagactgcagttgcartcggtataactagactgctttcttttgttttcgatagtttttcttaaaatactgtggtgcataattttgtgaactattagttatgaatatgtttatgtaa

SEQ ID NO: 99343 - DNA, 201 bp, Homo sapiens
aaatcaattattattagaaaacatgtttttaattgctgtacaatattttgagtataccatgtgtatgtgtgtataaatgcatagcatgcatatatatatakagagagagagagttacataaccattttcctgttgaaatttgagcttctattctttttactactgtaaatgttcctttaaggataatgacaatagcaacca

SEQ ID NO: 99344 - DNA, 201 bp, Homo sapiens
tttttcaattcacaaaaaaaacccagtgaatttaatgaaatgttatgagatgagtgcttttcttaaagttccaccctatttcaaaacatcatttaggaggytgacagcggaacctgtttgttcactgtacactttggacacattagatcgtcattcacatgttacatgatccctttggcctcgttaaaatatttaatgctt

SEQ ID NO: 99345 - DNA, 201 bp, Homo sapiens
ataacaaatcatactaaatgagcattacgttgactagcctgtcaagcaaaaacaatttggtttattacattttctctctcatttgctttagccagtcgtcygggattgtattccaaaacttcccagtcagtctcaggagaagaaatagatgcaatggatgttcagcagctttcacaaatagtaccaaaggtaggcctaaac

SEQ ID NO: 99346 - DNA, 201 bp, Homo sapiens
gtacaagttgaaattaaacttgtgtttggtacattttcttcttaggacagaccagagatttgttttatgaaaggtgcttacgaacaagtaattaagtactktactacataccagagcaaagggcagaccttgacacttactcagcagcagagagatgtgtaccaacaagagaaggcacgcatgggctcagcgggactcaga

SEQ ID NO: 99347 - DNA, 201 bp, Homo sapiens
cgttgcctgctgagattgtgactgccaccccgacgggagcagcttcccctacagactttgtagagagcgcttaaacgcctcggggacagcggccatgactstcagcttgggccgaccccgcggccgccccacgggaatgcgtggccgacacggggcgtgggcgaatctccgaccctcgcgttcagggggtgcatataaacg

SEQ ID NO: 99348 - DNA, 201 bp, Homo sapiens
taaaatacatttaaaatggggaataagtttgagatattaaacattgacatattatccattggatcatttttagtttttgaggatttgggttttttttttttgagttctgtttgtacagattgacatatcataacttctgttctttcttcaaggtcttccaaaggacaagatacttaaaaattttcaaatagaataaaactc

SEQ ID NO: 99349 - DNA, 201 bp, Homo sapiens
ctaacactccagggatttccttgattctctctataataatcttatacttctatagtgcttataatttgcaacctgtgttcacttactttatgagattcttrcaaaaatcttttgaaagaaggctagtgtgtatgtatatgtgggtgtatgaatatacatatatatgtgtatatgtttgtctatacatatacatatgtgtgt

SEQ ID NO: 99350 - DNA, 201 bp, Homo sapiens
  misc_feature (1)...(201): n = A,T,C or G
aatcccaagcacattggtaggccgaggcaagaggatctcttgagcctaggagttcaagactgcagtgtgctatgatggcatcattgcactccagcctcagngacagagactctgtctcttaagttagtaagtaaataaataaaatgttcaacttaaaataaaattacaatttcttttctagcagctaggtgaaatttctta

SEQ ID NO: 99351 - DNA, 201 bp, Homo sapiens
tctggtcctgaactgggacagctgacatttcttggcttggtgggaatcattgatccacctagaactggtgtgaaagaagctgttacaacactcattgcctsaggagtatcaataaaaatgattactggagattcacaggagactgcagttgcaatcggtataactagactgctttcttttgttttcgatagtttttcttaa

SEQ ID NO: 99352 - DNA, 201 bp, Homo sapiens
tagaaactctacactttaactttgtccccctgctttttaacgtcttgtttctctttgtttcattgtactatgtcttgaaaagttgtcgttatcatttttgrttggttcaccatttagactttctacttgagtactctacatgccacaattacagtttgtttttgcaatcagttataatattctctgattttctatgtgctt

SEQ ID NO: 99353 - DNA, 201 bp, Homo sapiens
catgttgaattacttttggctactttgtgttcaataatatcattctggggtgtctttgtcttttttggggggcaaggaaatggggtcttggtattttgccyagcttgggcttgaactcttgatcttctgctttagcctcctaagtagagggtgtctttgattatatcttaataaaaggattggaagttgaagcaaggaatt

SEQ ID NO: 99354 - DNA, 201 bp, Homo sapiens
aggcacatcactttttgagccaagtcgtaagtgtccctttgtgtgtagtatggatttgctgagaagtgtctggatattgtgttatggaaaataaagttttrgggtttaattttgcatatttgatattaaatagaagacctatatgtttgctgccaccttctttttttcattgtatgaacatactggtaatttttaaaaaaa

SEQ ID NO: 99355 - DNA, 201 bp, Homo sapiens
attgttatccccactttgtctgaacataaggaagatactattaatctgacacaaaaagttcctggtctcattaatgtagcaaaactgtaccattgaaaacyttaaaatccgagattctagagacatggatgtatttaacagattttttttttttttttttttttttttttagatggagtctggctctgtcacccaggctgg

SEQ ID NO: 99356 - DNA, 201 bp, Homo sapiens
aatttgtttttccattgttgagaatgtaagcttgattgtctgactaggactagtaattttgaaatgggtgtttcttatagatgcagtaatgtgttttgctmtctgagacctctgggctatgtagggaatatgatgagaggcatgattatattgacaaattttactctggatggataattggcggaagacattttctgaaat

SEQ ID NO: 99357 - DNA, 201 bp, Homo sapiens
ttgttttagggtacatgtgcacaacatgcaggtttgttacatatgtatacaagtgccatgttggtgtgcagcacccattaacttgtcatttacattagatatatctcctaatgctgtccctcccccctccccccaccccacgacaggccccggtgtgtgatgtttccaaccccgtgtccaagtgttctcattgttcaattc

SEQ ID NO: 99358 - DNA, 201 bp, Homo sapiens
ttctcacttcatctttattttttaaatttcaggtctgcaatcgaagagggtaaagggatttataataacattaaaaatttcgttagattccagctgagcaygtaagtttgcaagaaatttgtcaccatgggtcttctggataaattatatgaaaagtagaacttaagcagaatgcctagaaacttctctgccttatatttg

SEQ ID NO: 99359 - DNA, 201 bp, Homo sapiens
aatacatgtttgtatttcagaaatactaatataggcaaaaaataggcctcagaattgagtctgctatacgtttttttttgagacggagtctcactttgtcrtccaggctggagtgcagtggcgtgatcttggctcactacaaccttcaccttccaggttcaagtgattctcctgcctcagcctcctgtgtagtagggatta

SEQ ID NO: 99360 - DNA, 201 bp, Homo sapiens
caggagtatagcagcattaactttaatctcattggctacattaatgaactttcctaatcctctcaatgccatgcagattttgtggatcaatattattatgkatggacccccagctcagaggtacgagttttttaattgcatgagctggaaagacaaggaatgtgtactaccctgataattaagttttaaaacttgatttat

SEQ ID NO: 99361 - DNA, 201 bp, Homo sapiens
gtgtatgtatctatactcataaaattgttttttttttcttttttctgtatgcttgggtaggtaaatactgtgtcaggagtgaagccttcaaaactgagccctgttgcagagttggaagatattatgatagttatgatctgcatgaaagcatttgtatacatttttgagtcttgcaaattgtaatttggaataaacggcatg

SEQ ID NO: 99362 - DNA, 201 bp, Homo sapiens
atagcagcattaactttaatctcattggctacattaatgaactttcctaatcctctcaatgccatgcagattttgtggatcaatattattatggatggacscccagctcagaggtacgagttttttaattgcatgagctggaaagacaaggaatgtgtactaccctgataattaagttttaaaacttgatttatggacagt

SEQ ID NO: 99363 - DNA, 201 bp, Homo sapiens
gtttaactcttaactatttctgacttacttggccctagtcctctccctcacttgttcgtatgtatgtatgtatgtatgtatgtatgtatgtatgtatatatgtatgtatgtgtgtatgtatctatactcataaaattgttttttttttcttttttctgtatgcttgggtaggtaaatactgtgtcaggagtgaagccttca

SEQ ID NO: 99364 - DNA, 201 bp, Homo sapiens
atttcaaatggttacctgggctcaaaatctgggtgtgcaattttatctgctctgggcagtgctcaatatcgagcatttcttacaacaattaggacttattmccattcagataatgttgtcctagttaacccctttgtggtttttggagatgtaggtttattctttaaactttttttttttttttttttttttttgagacag

SEQ ID NO: 99365 - DNA, 201 bp, Homo sapiens
atttagtttgccgaataattgaggttagtgaggttgtgaaagtaacaaatccagaccttaaaacttgaaagtaatttatttttctgtttgtttttaagccktggagtagaaccagtggataaagatgtcattcgtaaacctcctcgcaactggaaagacagcattttgactaaaaacttgatacttaaaatacttgtttca

SEQ ID NO: 99366 - DNA, 201 bp, Homo sapiens
tgtttaactcttaactatttctgacttacttggccctagtcctctccctcacttgttcgtatgtatgtatgtatgtatgtatgtatgtatgtatgtatatatgtatgtatgtgtgtatgtatctatactcataaaattgttttttttttcttttttctgtatgcttgggtaggtaaatactgtgtcaggagtgaagccttc

SEQ ID NO: 99367 - DNA, 201 bp, Homo sapiens
tgctcacggtgctccagtccctggcaggagcatggacacctcgccccttccttccgtgggcctcaacgttgcctgctgagattgtgactgccaccccgacrggagcagcttcccctacagactttgtagagagcgcttaaacgcctcggggacagcggccatgactgtcagcttgggccgaccccgcggccgccccacggg

SEQ ID NO: 99368 - DNA, 201 bp, Homo sapiens
gaagctgtttaactcttaactatttctgacttacttggccctagtcctctccctcacttgttcgtatgtatgtatgtatgtatgtatgtatgtatgtatgtatatatgtatgtatgtgtgtatgtatctatactcataaaattgttttttttttcttttttctgtatgcttgggtaggtaaatactgtgtcaggagtgaag

SEQ ID NO: 99369 - DNA, 201 bp, Homo sapiens
atgagaaaccctgtataaattctcttgtgaggtaggaatgataacgtttaagagcttgagttgtggtggaaccatgcagactgatttgaatgctggattcrtcgcttaccatttggctttgtgcatattaaagttttctgtgcttccgtttcttcataaaataaagataatgatagaacctaccttatgaggttgttgtaa

SEQ ID NO: 99370 - DNA, 201 bp, Homo sapiens
ggaagctgtttaactcttaactatttctgacttacttggccctagtcctctccctcacttgttcgtatgtatgtatgtatgtatgtatgtatgtatgtatgtatatatgtatgtatgtgtgtatgtatctatactcataaaattgttttttttttcttttttctgtatgcttgggtaggtaaatactgtgtcaggagtgaa

SEQ ID NO: 99371 - DNA, 201 bp, Homo sapiens
tttatgtaagcatctaccacgggataaaattaatttcatatatcgttttcagtaatacgtaacataacacttggttggtttggctttgagtgttagtaagttaaatacatgaagattttaaattacatttttcttcatttgcataaacagtgaggtatgttaatttttgagaacagaagtaagaaattttatcatgatcag

SEQ ID NO: 99372 - DNA, 201 bp, Homo sapiens
atttatgtaagcatctaccacgggataaaattaatttcatatatcgttttcagtaatacgtaacataacacttggttggtttggctttgagtgttagtaagttaaatacatgaagattttaaattacatttttcttcatttgcataaacagtgaggtatgttaatttttgagaacagaagtaagaaattttatcatgatca

SEQ ID NO: 99373 - DNA, 201 bp, Homo sapiens
acggagtttcaccattttggccaggctagtcttgaactcctgaccttgtgatctacctgcctcggcctcccaaagtgctgggattacaggtgtgagccacygcgcccagcttgagcagtacttttcaactctgagaagataaacccaagggattctagaagagggtctgcttggagaataatttctccagtaatggtatct

SEQ ID NO: 99374 - DNA, 201 bp, Homo sapiens
aatttatgtaagcatctaccacgggataaaattaatttcatatatcgttttcagtaatacgtaacataacacttggttggtttggctttgagtgttagtaagttaaatacatgaagattttaaattacatttttcttcatttgcataaacagtgaggtatgttaatttttgagaacagaagtaagaaattttatcatgatc

SEQ ID NO: 99375 - DNA, 201 bp, Homo sapiens
ctaaacagtatttttgctaatgtgcaggaagtttgagcggtctggatacaagaccaaaccaggcataccattcctttaggccaaagtctaattcagagtargtctctaactctcttgaattctgtgaaggttgagagaggagggttagctgcagaagaaaagtttgaatatagcagaggttggttcttgaggtttaaggaa

SEQ ID NO: 99376 - DNA, 201 bp, Homo sapiens
caatttatgtaagcatctaccacgggataaaattaatttcatatatcgttttcagtaatacgtaacataacacttggttggtttggctttgagtgttagtaagttaaatacatgaagattttaaattacatttttcttcatttgcataaacagtgaggtatgttaatttttgagaacagaagtaagaaattttatcatgat

SEQ ID NO: 99377 - DNA, 201 bp, Homo sapiens
ttagccaagttgtcaatacaaaggaaaattcttgaaggaaattaaaagtgctactccagtgaacacacaaatgataagaaagctaaacagtatttttgctratgtgcaggaagtttgagcggtctggatacaagaccaaaccaggcataccattcctttaggccaaagtctaattcagagtaagtctctaactctcttgaa

SEQ ID NO: 99378 - DNA, 201 bp, Homo sapiens
ctcactaatctgctatctctatggatttgcctattctagatatttcatataaatgaaatgatataatatgggaccttttgtatctgtcttttttcacttascataatgttttcaaggtttattcatgttgtagcatgtgttagtacttcattcctttttgtggctaaagtaatactccattgcatggatgtcacaatttta

SEQ ID NO: 99379 - DNA, 201 bp, Homo sapiens
ggggcactgcctagtggagctgtgagaagagggccaccatcctccagaccccagaatggtagatccaccgacagcttgcaccgtgctcctagaaaagccgyagacactcaacgtcagcccatgaaagcagcaaggagggaggctgtaccctgcaaagccacaggggtggagctgcctaagaccatgggcacccaatcttgc

SEQ ID NO: 99380 - DNA, 201 bp, Homo sapiens
agttaggattcccgttttatttggttagtggtaaatactccatagtcttagcatgttgctctagagtctaagaccaaagaagacagaatcaaatgcctttsgtgattagagtagcatgtaattctccgtcaaggtaaaaaacaaaagttacatctagcaaagacctcaagtgaagagctatgtacctgtgactagcttttc

SEQ ID NO: 99381 - DNA, 201 bp, Homo sapiens
tatgtgacccctccttaggggatgttgtggcaatggtttctgcatcataaaagagaagactgaatgacttattaggttccagctctgatattctagtatamtaggcaatagagagatgaacaattcagatattttagaaataaggagagggcagagggcatagatgtgtagttaggattcccgttttatttggttagtggt

SEQ ID NO: 99382 - DNA, 201 bp, Homo sapiens
tgacgggtcccctcacctcctcttctctcccctccccgcccgccctctctccctcccttcctccctcccgctcgcttcttctcacgccgggagcaggctcscgcctcgcaccgctgccccgcgagcagctcctcttctcccgaggcgcgcggggcgcccccgcgagccccgcggctgagaccccgcagcctggaggagggc

SEQ ID NO: 99383 - DNA, 201 bp, Homo sapiens
ccattagtagactatcagggttccgcttttaggggaatcttcttgcttagacaaatgttgcccatggtcaggtggagctggttagtctagcataggtcatktcaggctaaccattattcaaggcagctattcattcagccaagtgagtgatatgacccactggaccactaactggaccttcttgcgtctttaagaatgtgt

SEQ ID NO: 99384 - DNA, 201 bp, Homo sapiens
ggccatgactgtcagcttgggccgaccccgcggccgccccacgggaatgcgtggccgacacggggcgtgggcgaatctccgaccctcgcgttcagggggtrcatataaacgggcggacaccgtccctggggtaagggaggcgccagcaagaacaaggcgggccaccaaccccgagcgacctcctaccggacggatccaaac

SEQ ID NO: 99385 - DNA, 201 bp, Homo sapiens
tggagctctctgaggctgaaccttgctctctcattacacatggtaactaagcacaccccttacagaattttgggaagtcgccccgcgattaccggctcccscaagaaccaagcagtcagtgcagggttttgcaagtgagagtgcgagactcgggaggctgctcacggtgctccagtccctggcaggagcatggacacctcg

SEQ ID NO: 99386 - DNA, 201 bp, Homo sapiens
catatgctcaggagactttctacagaggtcgatgctagcagttgctggcatagtccgtgcaccaggcttccactgtacagtctgttcaaagcaagaaaaamgtatgttgttaaagaagtaattcagtgcaacaggataactaccattgacatagcttcaacaaatgcatctaaacaatgagagctcttattgctctataat

SEQ ID NO: 99387 - DNA, 201 bp, Homo sapiens; identical to SEQ ID NO: 15386

SEQ ID NO: 99388 - DNA, 201 bp, Homo sapiens
tatattacacaaagataatactgttgacagtagtgtcctttgctgatatcaaacctacactatttaaatgataggactggcaatattttttaaggtaatcwtggccagctcagaaaactagtaaaaagtaagttaggtaagttaaactcaggctgcctgggtacaaattacaccttcatttcttaccagttgtgtcatctt

SEQ ID NO: 99389 - DNA, 201 bp, Homo sapiens
accaacagagaaagggatcttagagaaaggtagtggcagatgctgaagaaaatttccaaaaaccataaaaaagacaaaataactttcaataaaatgtttaytaaataaagtcaagaaatgtatcaaagtagaacagaaagtcaaagacatgtacagtataaaaggtaaaaatcaaaacaaatacagaagatccagtaatta

SEQ ID NO: 99390 - DNA, 201 bp, Homo sapiens
actaagtcctctttactttcccctctgcttttctctagcaagaggagtctctcaccatagccaccacagctggcaatgttctgggtctcacttgaagacaygtctcagagtctcacccaaggcccatgccatgatgcactacctgggtattgcggctgattatttagtacccaaaggctctttattcacaggtgatgaatc

SEQ ID NO: 99391 - DNA, 201 bp, Homo sapiens
aggaagaaagaacagaaaatgagaagattttatcaactaatgctggaaaattttccagaatgaaaagactttagcatctagaataaagtggcccaccaacwgctcagcacaatatgtatgttaaagcagagtggggtgagggataaacacaagacccataattaagaaatttgaggacacttggagagggagaattcgaag

SEQ ID NO: 99392 - DNA, 201 bp, Homo sapiens
ttaatacaacagatagttctgaaaagttgctttagaaaaatgtttcagctaaagtgacccaataccaaattctgtacagttaccctctattttgtaaatgyatatgttaatatcaaagtatttatattgtgtaatttcctaccttaggtgcttttgtttttaatataatgctgtttcaaggtcgaatatgtacagtaataa

SEQ ID NO: 99393 - DNA, 201 bp, Homo sapiens
agcagctcctcttctcccgaggcgcgcggggcgcccccgcgagccccgcggctgagaccccgcagcctggaggagggctgtccggggctttgggtgggtaycagtattacctcctgcccccatttctagaaacttccaggttctgaaggaaggggaggttcgggtatcccctggatgggggggcatctctagggcgccgcc

SEQ ID NO: 99394 - DNA, 201 bp, Homo sapiens
acaggccccggtgtgtgatgtttccaaccccgtgtccaagtgttctcattgttcaattcccacgtatgagtgagaacatgtggtgtttggttttgggtccytgtgatagtttgctcagaatgatggtttccagcttcatccatgtccctacaaaggacaagaactcatccttttttatggcttcatagtattccctgctgt

SEQ ID NO: 99395 - DNA, 201 bp, Homo sapiens
tttctgcactctgacttctaatctgttggtttataagtctttgcagatccaagtaccacaatgttttggttactgtagattttgcgataagttagttttgmaactaggaagtgtgatgtgcttattggttatttgtatatctttggagaaatgtctattcaaatcttttgaccattttgtaatttggttatttactttttt

SEQ ID NO: 99396 - DNA, 201 bp, Homo sapiens
cggcctcccaaagtgttgggattacaggcgtgagccaccgcgcccggctgtatttaacagtgtgtgtgtgtgtgtgtgtgtgtgtgtgtgtgtgtgtgtgkctgtgtgtgtgcgcgcacgcgcgcatgcatgcgcgtgtccatgcgcaagtgtgtgctaagccctgttctgggtatagtgattcacaatcaaacagaccca

SEQ ID NO: 99397 - DNA, 201 bp, Homo sapiens
tgggactacaggtgcctgccaccacgcccagattatcttttgtattttttagtagagacaggtttcaccatgttagccaggatggtctcgatctcctgacstcgtgatctgcccacctcggcctcccaaagtgttgggattacaggcgtgagccaccgcgcccggctgtatttaacagtgtgtgtgtgtgtgtgtgtgtgt

SEQ ID NO: 99398 - DNA, 201 bp, Homo sapiens
tagatggagtctggctctgtcacccaggctggagtgcagtggcacaatctcggctcactgcaagctccatctgccgggttcacgccattttcttgcctcagcctcctgagtagctgggactacaggtgcctgccaccacgcccagattatcttttgtattttttagtagagacaggtttcaccatgttagccaggatggtc

SEQ ID NO: 99399 - DNA, 201 bp, Homo sapiens
cctgaacaatatgttatagtaaatggaatactagctttctagaaagtcatatattaaaatataaaaatttaaaacactgctatttttctcacaatttttttggaaaatttatttttcataaagttatttgtgttagcatgtaatgaggtttaaaattttttacatgagttgatgagtagaaattaaaactgactagttgaa

SEQ ID NO: 99400 - DNA, 201 bp, Homo sapiens
gaaccccggaggcggagcttgcagtgagctgagatcacgcccctgcacaccagcctgggcaatagagcaagactctgtctcaaaaaaaaaaaaaaaaaaaactcctccctaaaaaaaataaaaaagaaaaaatgctcctcccttttccaccgtatctgtatggggctggattttcttcatacactttagcctgaacaatat

SEQ ID NO: 99401 - DNA, 201 bp, Homo sapiens
ctaggctgggcatggtggctcatgcctgtaatcccagcactttgggaggctgaggcgggtggatcatgaggtcaggagattgagaccatcctggctaacayggtgaaaccccgtctctactaaaaatacaaaaaaaaaaattagctgggcgtggtggtgggcacctgtagtcccagctactcgggaggctgaggcaggaga

SEQ ID NO: 99402 - DNA, 201 bp, Homo sapiens
cattacatcctttgaaggcacttggtaactgtcctttgctgtatttatcctagtagcaatttcgcatctttctgtgggggctatttgattcccgatgtatyccaggtgactagcaaagtgcctgacagatggaaggcactgaatacaagtttgtggaattagtgaatgtggggagtaggggtgcaatgaattctatcttga

SEQ ID NO: 99403 - DNA, 201 bp, Homo sapiens
taagtataaacgctttttttgttaattgaagagatacataaaataaactgagtatagacttttgtaattttccagtcatgctcttatggttttttttttttaaagcctttgctgagagaactgtcatgtacaaaactgtgttgaattgctgtttgtttttactttcagtttaaaaatccccttattatgctgcttctggct

SEQ ID NO: 99404 - DNA, 201 bp, Homo sapiens
gattcctgtgagaattaaatagtgcctgtaatgtagttaagcacaactaaacaaataacagtaaatagtaatcgtaatcacaaagcactgggtgattctttattcctctgcagcctgccatccatcaagtggtgtgcttagtaatgtggcacagcttttttaggggaaaataaaaaagatcatgggtcttgccctcaaagt

SEQ ID NO: 99405 - DNA, 201 bp, Homo sapiens
tatttgttcctgttgtctaaacatcttgaaaatcctttgttaaaatactcttagctttaaaatgtccacgtgactgaagaatagtttacttgaaacagtcktcctttaaaagcatagtagtaagagatttttaaatgctaaaaaagtggtatcatagaatcaacagatttactctactgatatttttaaatgactctcttt

SEQ ID NO: 99406 - DNA, 201 bp, Homo sapiens
gtttccaagtttcagcctgcacttgcttttgatgtagaaagctagagaaccaagtggtagggctgtataagtttttgtttgccaatcttttaatgttcacrggcttcttcaggcctcatttattatggaaggaagagaggtggctgaaaggatgggaacacaactgtggaatgtgaattgagtgattttttttttctcagt

SEQ ID NO: 99407 - DNA, 201 bp, Homo sapiens
gggattcctgtgagaattaaatagtgcctgtaatgtagttaagcacaactaaacaaataacagtaaatagtaatcgtaatcacaaagcactgggtgattctttattcctctgcagcctgccatccatcaagtggtgtgcttagtaatgtggcacagcttttttaggggaaaataaaaaagatcatgggtcttgccctcaaa

SEQ ID NO: 99408 - DNA, 201 bp, Homo sapiens
acctcagccccagaaaaagtgatcctgaaacaactgtggaaatgaagtctgctttgtgttcgtctgttgggaaaagattggatcaccagtcatgctgtggktgtttagcaggctgctggcttctgcccacaataaagaggcatctctgaaggttctgatatttttaaaaagagaagcaaaagggcagttagtggatctcaa

SEQ ID NO: 99409 - DNA, 201 bp, Homo sapiens
ctagggcgccgccccgctggcgtgagctggggacgttgcgggcacacgacggggcgggtgcgggatcttggggaggggggctcccgagatagtggctgggsggggaactccttcctcagcctctcgtcagcgccgcttctcctggtttctcttgcagatgctgctgctaggggtggtgggagcagccgtgggacgcgtggc

SEQ ID NO: 99410 - DNA, 201 bp, Homo sapiens
gatagttttagaatatatagtttccttggcagaaaagcacatttctgtatcatttggtctccttacaactaaaacagcatagtactcaaaacatgaatccrttatcaagtatttcctgtgttatgcttataaagatattagtttctttgagggataaagaatatgaaactatctttttatgggcagagacctcacatttta

SEQ ID NO: 99411 - DNA, 201 bp, Homo sapiens
ggtctgcttggagaataatttctccagtaatggtatctgaaggttgaataaaaacaagtgaatagatgtagatattgactaagagtgactaagaaagacarttaccttattaattaatacaatcttgagtgtcatcaaattagctatggggcatatatcctacactcagaaattaggcactattaaagttaaagggggcca

SEQ ID NO: 99412 - DNA, 201 bp, Homo sapiens
tacagatctagtgggatgagagtgatttctcagtagaattcataataataaatgatttctgttttctgagctagcagcttctccatcatcctaactgccgrcccttcactctgtatccaggctggattaattcccagagaatggagtcattttcctgatgggaactcttagcactgattggaaggaggagattagtgggct

SEQ ID NO: 99413 - DNA, 201 bp, Homo sapiens
gaaactgactttaatttaatttaaatttatttaaataactacaggtggcttagtggctacctgattggacagtgcagctctagaacataatagcttttctrggaactatattagtgctgtgtaaggattggttggattaggaaaataattaacgtaagtagtggtaggagtttatctttttttgataagggttttctaagg

SEQ ID NO: 99414 - DNA, 201 bp, Homo sapiens
taatttcagtaatttgcagtaaagaaaggtaatctgtctctagtttcctcatatttattcaccgatatctcctcattaaaagttgaaaaatactactgctytttgttttaaagtatttaaacgtccaactgtactttttacataaataagattagaaaacatgaatttgattgttccagaaactcagtcatactgagagaa

SEQ ID NO: 99415 - DNA, 201 bp, Homo sapiens
ttgttttatagatttgaaataagggcatttcagtggctctaaaacatgtgtgtagcttttgtaaaattcctaatcttttctctaagtttttacatttcttrattatgtaaaaatattatgctataaaataatttcagtaatttgcagtaaagaaaggtaatctgtctctagtttcctcatatttattcaccgatatctcct

SEQ ID NO: 99416 - DNA, 201 bp, Homo sapiens
cagctttctctggtgcctcctttgattagcttaataattgaccttctaaattctttttctggcaattcagagagttcgtctttgttcggatccattgctgrtgagctggtacgatcttttggtggtgttaaagaaccttgttttgtcatattaccagaattgtttttctggttccttctcatttgggtagactatgtcaga

SEQ ID NO: 99417 - DNA, 201 bp, Homo sapiens
tctggctaatcctcatttctataaatatgtagacaaaactagcactgctgtatggtaataactaccagtatactgctttgtcctttaaaatgtgtctgccrtactaggctcaaactattaaaccaagtttttctactaaggctaggaatgtcacatgtatgcagggatgagaaccttatcacacacactcacgctcacata

SEQ ID NO: 99418 - DNA, 201 bp, Homo sapiens
ggcaggagcacgcatcacaggcggagctagagaggctgggctggagggagtgtccagggagtccgagatcgctagaattttagaatttctttctttctttyttttttttttattgagagagttttgctcttttcgccgaggctagagtgcaatggcgcgatctcagcttactacaacctctgcctcccaggttcaagcgat

SEQ ID NO: 99419 - DNA, 201 bp, Homo sapiens
gactggaaccccatgtagccattatgttcctatctgtgaggctcacattcttgcccagtctgttgttaagacccgctaacaagcagcttcctccacgttgkgtaaatccattactggagcaatcactctgtgtcaagcattctgatttcctgagttaataaaatacatgttccatttactcaatgaaaaaatactctggta

SEQ ID NO: 99420 - DNA, 201 bp, Homo sapiens
aggcagagttttaacttttttactcaagttaattatcccattaattctgtaatccagtctttattcattggattgaagtcacgtttttatcacacattaarcacttgcattaattttggagtcttttctcctttaattttcttaccgtgttaattattccagctagtttagtatttcaaagtcagtaatacaattttttta

SEQ ID NO: 99421 - DNA, 201 bp, Homo sapiens
tgggattcctgtgagaattaaatagtgcctgtaatgtagttaagcacaactaaacaaataacagtaaatagtaatcgtaatcacaaagcactgggtgattctttattcctctgcagcctgccatccatcaagtggtgtgcttagtaatgtggcacagcttttttaggggaaaataaaaaagatcatgggtcttgccctcaa

SEQ ID NO: 99422 - DNA, 201 bp, Homo sapiens
aaaattgaagtactgcatacaatgaaatgccctgtgagccactgaaaagaatgaggcaggttagtatgtaaggtgacatggagtccaagatgtattgaatracaaaatttgttattgtgtggttctattagaaattaaaaaaaaaaaacaccagaaatacttgtatacacacctgtatagaaaatggctggcagtatacac

SEQ ID NO: 99423 - DNA, 201 bp, Homo sapiens
taagaggagtagttaaaatggagaaagcttagctgtactttgtcttgcatgttaaacataatgagtttagaggattatgattatttgtaatcatcaggatctgctagacaggacatctgttttactttttactcttatgttggtggagaaatagcgtgcttttcattcaatgtgaaaattttgtgttctagctgggcaccg

SEQ ID NO: 99424 - DNA, 201 bp, Homo sapiens
attttttgatatttttgatatttagatatttgatattgatgcaaaggctattaggagggaaaacaacaacatgactggtagtattcaggatataaagtggyagagggtaagggactaggatgataacaggtgagccatttgagtccctaagaagtgagagatttaatctaaaacttctattgatcataaaaatacatgctc

SEQ ID NO: 99425 - DNA, 201 bp, Homo sapiens
ctttgtttattttttttaaaataatttttctttatcttggcagattgggttaattcgaaagcattgtcttctgtctctgaagttctttcttctgcttgttygattctattgctgagacttcccagtgcgtttggcatttctctaagtgtgtccttgatttccagaagttgtggttgttttttatttatgctatatatttca

SEQ ID NO: 99426 - DNA, 201 bp, Homo sapiens
gggcagcattactgggacatgtaaagcaaacttatttgtgacaacagaatatttaagtatagttaataaataggattcttatagtctcctattaggtaacrttccttttagagatcctcatggagtatgagtatttaaagtgaggtggaggccaggcacagtggctcacgcctgtaatcctagcactttgggaggctgagg

SEQ ID NO: 99427 - DNA, 201 bp, Homo sapiens
aactttcaaatttcttttcttcctcaggaacaccaattatttttagctttggatgtttaacgtagacccagccttcacggatgctttgtttattttttttwaaataatttttctttatcttggcagattgggttaattcgaaagcattgtcttctgtctctgaagttctttcttctgcttgtttgattctattgctgagac

SEQ ID NO: 99428 - DNA, 201 bp, Homo sapiens
tgatggttgtaatgggaatatagagggatttttgaaagtgaattttgggaaagtaaaaatacaccatctgcagatgtaggataattattccctatgtggtragggcactaagaaaatgtcctgtgaagtagcagaagtgctttaatcatgcaataaggtggaatctggtgctgcataaacttgccctgatgagcaatatta

SEQ ID NO: 99429 - DNA, 201 bp, Homo sapiens
tagtcttaagtccattgtttctttcttgactttctgtcttggtgacctgtctagtgttgtcagtggattattgaagttccctcactattattgtgttgccrtctgtctcatttcttaggcatagtagtaattgttttataaatttgggagcttcaatgttaggtgcatatatatttaggattgccacattttcctgttgta

SEQ ID NO: 99430 - DNA, 201 bp, Homo sapiens
tccgcccacctcggcttcccaaagtgctgggattataggcatgggccactgtgcctggcccaaaagggacaattttactacttcctttctgatttggatgkattttttttattttattaagcatttaatttattgcttaattgctttggctaggatttccagtactatgttgaactgaagtagggagagtgggcatccttg

SEQ ID NO: 99431 - DNA, 201 bp, Homo sapiens
tttttgagacggagtctcgcacagtttcccaggctggagtgcaggggcacagtcttgggtcagtgcaacctccgcctcccaggttcaagtgattctcctgyctcagcctccgaagtagctgggattataggtgcctgccaccacacctgactaacttttgtatttttagtagagatggggtttcaccatgttggctaggct

SEQ ID NO: 99432 - DNA, 201 bp, Homo sapiens
gagttttctttcttttttttttttttttttttgagacggagtctcgcacagtttcccaggctggagtgcaggggcacagtcttgggtcagtgcaacctccrcctcccaggttcaagtgattctcctgcctcagcctccgaagtagctgggattataggtgcctgccaccacacctgactaacttttgtatttttagtagag

SEQ ID NO: 99433 - DNA, 201 bp, Homo sapiens
ggaggctgaggcaggagaatggcgtgaacccgggaggcggagcttaccgtgagcctagatcgcgccactgcactccagcctgggcaacagagcaagactcygtcttaaacaaacaaacaaacaaacaaaaagcagtagcggtggaagctcctgccattacactgcacctcttctgcgtggtgcacggccctcccgcagacc

SEQ ID NO: 99434 - DNA, 201 bp, Homo sapiens
ctttggataagtcacttaatatctttttttcttttcttatttttaactgagggtgattgtgcctgccttatggaatagttgtgaaacaatgtgtttgaaarctgtggtggccaggcgccatgcctcacgccagtaatcccaatacttcgggaggctgaggcaggcagatcacttgaggtcaggagttcaagaccagcctgt

SEQ ID NO: 99435 - DNA, 201 bp, Homo sapiens
agggttctctaggaggtgaggtatttattatgggaatcggctcatgcaattatggaggcagagaaatcccataatctgctgtctataagcttgagaacccrgaaagacagcaatgtaatttattcagagtcagaaggcgtaagaactgggagcactaatgtctgaaggcaggagaagatcaatgttccagttcagagaaag

SEQ ID NO: 99436 - DNA, 201 bp, Homo sapiens
gacagtttccaaagcctaagatgagatttcatttgttagaactgaattagaaagagcaggacctaatcacttgattgcaaacataggaaactagattttgsaaagggaatatgggatgtacaatattctgcttctacacaggtgttcctaatgtatatctgatctcaattttaaaattcctattctttaaagccaggtcaa

SEQ ID NO: 99437 - DNA, 201 bp, Homo sapiens
ccattaaattcagccactgaaaagtaattttgttattgcctcttgacagctacgagacaatgtgattacacctcgagacacaacaatgaccttcacatgcyttgtgttttttgacatgttcaatgcactaagttccagatcccaggtatgtttaggtgaacttagttgattgacttgattgactcacttgagtagagtgct

SEQ ID NO: 99438 - DNA, 201 bp, Homo sapiens
ctatgatttaaaaagaagttgaatgtacagtacagatccagattgcaattttccataatatattaatccaagttgacatggatgagttaaatgggctagtrtctaaattttaaatttttaccctatttcctaatcctaggacttgctagagtccctaacaatactaacttacttgatgtttttccctgttagactacctta

SEQ ID NO: 99439 - DNA, 201 bp, Homo sapiens
gaggtgtgaacttcatgagggacccggtagataataaaggacttaggcatttgttttgagagagatgtgaaatcatttgagggttttgagaagagacacgygatctcacttctgttttaacagtgccactctggctactgtgttgcaaattgactgcaggaaactagggcagaaataagaaaatcagtttggaggtattgg

SEQ ID NO: 99440 - DNA, 201 bp, Homo sapiens
aacatgttaaaaacatgagggtaaatatcagagaaaacagctaagagagttaaaattattttgcttccatggagtaggactagtggtgagaagcgttgaayaggaaactgcagtatttcattataagcttttgaagattatttaccatgacaaaaaataaaagaaaaagtgcgataatacccataaatacagtgtgattgg

SEQ ID NO: 99441 - DNA, 201 bp, Homo sapiens
ctctggcttcatgagtcttagaagataaatgaatataatgttaaataagtgcttaagagcaaccccccccccccacaaaaaaaggcaaaatttgaatgatwagagagggagattgaaatttttatatagtaagactagggagggcctcactgagaaggtactatttgacagaagagggacccatgttatatccgaggaaag

SEQ ID NO: 99442 - DNA, 201 bp, Homo sapiens
caggaaaagaagtatcctatttgagctatcaatcaggataggccatgaaaacaacatcatgctctcctgctgcctccctgtccccaaatatctgctcattrtagttacttgggaatgcaggcagatggaagctccattttaatgtgagcacacactgtcacagcaggggtagaagaataggaaattgtgcactggcaccta

SEQ ID NO: 99443 - DNA, 201 bp, Homo sapiens
ctattccaaggagactaaaacaaaataagacctaagccctgtcagaagctcgttgaattgcttaaattcatcctactttaaagtggaattctataaatacyagccctgcctcccaggtattttgtatcttttgaatacctaagtcttttctccaaatattattagagaattttttgtctcattaggttagcaggacggccc

SEQ ID NO: 99444 - DNA, 201 bp, Homo sapiens
ggctggaagataatagagcaaagccttcaaaatgagaggaaatttatccctagctaaacttacaaatgtgaggatagaagaaaaatgtgtcccacaccacrcaccctttcttagatattggtggataaaagaaaaaaaagaaaagggagacttaaaagacttaaaattcagtgaggatagaggtagagggttgttcctaga

SEQ ID NO: 99445 - DNA, 201 bp, Homo sapiens
atattaactcctttagagcagccttttctgacttttccaccttgcttcattacatcctttgaaggcacttggtaactgtcctttgctgtatttatcctagyagcaatttcgcatctttctgtgggggctatttgattcccgatgtatcccaggtgactagcaaagtgcctgacagatggaaggcactgaatacaagtttgt

SEQ ID NO: 99446 - DNA, 201 bp, Homo sapiens
tgtttgctttgtttttggggtggggaaggtgtttatatatttgaatagggcttttttttttttttttggtgcacgtcctatcctggtaatctcttcctgawgtttatttctgaataaatcccatattggatttttttagtggtattgggacagagtattagtaaatgtatgtgaaatctgcagttacttaaacattttacc

SEQ ID NO: 99447 - DNA, 201 bp, Homo sapiens
ttttctatttaatatttttggactgctgctaagtaacagaaactgcaggaaattaaaccctggataaggggacactactttaatttctttatacttttcartgaaaacattgacactggaggctggaagataatagagcaaagccttcaaaatgagaggaaatttatccctagctaaacttacaaatgtgaggatagaaga

SEQ ID NO: 99448 - DNA, 201 bp, Homo sapiens
tgcagcacaccagcatggcacatgtatacatatgtaactaacctgcacaatgtgcacatgtaccctaaaacttaaagtataataaaaaataaataaatttwaaaaaaaaaaagaattttgttttggttatgaggcaaggtgggtatccctctccagccttgagttaatgtcatcttggataagtatgctattcagtattta

SEQ ID NO: 99449 - DNA, 201 bp, Homo sapiens
atggatgaaattggaaatcatcattctcagtaaactatcgcaagaacaaaaaaccaaacaccacatattctcactcataggtgggaattgaacaatgagaycacatggacacaggaaggggaatatcacactctggggactgttgtggggtggggggagggatagcattgggagatatacctaatgctagatgacgagtta

SEQ ID NO: 99450 - DNA, 201 bp, Homo sapiens
agaaacctagtaagtccagcctgtcactcataacaaaaataactattcctacctttaagagtattcagagaaaattttgatacttgtataaagcaagaggyttctaaatgaggttgcttgaaatgagagacagtacagaattacaggttattataacatatttaatgaaataaaattgatagttttagaatatatagtttc

SEQ ID NO: 99451 - DNA, 201 bp, Homo sapiens
tttagtgtatagttctgaacattgagtgatgcatgcagtcttgtgaccaccaccacaatcaagatatagaacagttccatcatccccccagattatcttakgcctttttgtggtaccttctccccctacttccaggacttggcagccactaattctttttttgtctctgccactttaccttttctagaatgcactaaaaat

SEQ ID NO: 99452 - DNA, 201 bp, Homo sapiens
tacccaaatgactataaatcatgctgctataaagacacatgcacatgtatgtttattgcggcattattcacaatagcaaaaacttggaactaacccaaatrcccaacaatgatagactggattaagaaaatgtggcacatatacaccatggagtactatgcagccataaaaaatgatgagttcatgtcctttgtagggaca

SEQ ID NO: 99453 - DNA, 201 bp, Homo sapiens
agttccagtgtcttaccttcaaaagggctgtaaattagtagtggagttattttctctctctgtgattttaccaagtctttgtctcattccacttgtacacytgttcaatccaaaaactttgattcctccttgacatctctctttcagtcaccccttcatctatccataatcaaatcctaccaattttgacttcctaaagaa

SEQ ID NO: 99454 - DNA, 201 bp, Homo sapiens
catcacaggcggagctagagaggctgggctggagggagtgtccagggagtccgagatcgctagaattttagaatttctttctttcttttttttttttttaytgagagagttttgctcttttcgccgaggctagagtgcaatggcgcgatctcagcttactacaacctctgcctcccaggttcaagcgattctcctgcctca

SEQ ID NO: 99455 - DNA, 201 bp, Homo sapiens
tagattgataaaagctttttatatgactagattatcaatctttttgttgtataagtttttttttcccgtttaagttgcctttgaggcatgtggaataaacytggtaagaggacaatatatgtaattaaccatttatgcctagtgttccattattggaatgctaagcatgtgggacttatttatatcctactgctcaaggtc

SEQ ID NO: 99456 - DNA, 201 bp, Homo sapiens
acttcctcttctactgtgtaatttattaatacatggacttctgttatgtagttgcttacttttgtgatactgtttatggagaaaggaaataatttttagaygttttttacctaaaatttttcatttgttggggcttactgttaggttggaattcctgtatttttagtatgtaaatcttaaagacaacattttccatatggg

SEQ ID NO: 99457 - DNA, 201 bp, Homo sapiens
ggttgaaccattttttcattcccactagcagtgtatgaggctttcttttaattaatttctccacatcctctccaacattttgctgttttttttttttttttccattgcatcctagggggtatgaagtggtttcacattgtagttttgatttgcgtttcccaaatgactaatgatgtgtcaaggatcttttgcatggattct

SEQ ID NO: 99458 - DNA, 201 bp, Homo sapiens
caagattaagctgtttttatgatactggattatcagaccattttaatctgggcagaaaggttagttctattaggagttagggtctaactggggccaagctyaggaattcaaacttaagaacacgccagtgggcattatattgtgagccattttttaatctcatgaatccttgtactttgttatagtatagcagtttggctc

SEQ ID NO: 99459 - DNA, 201 bp, Homo sapiens
acataaaacaaacataaaggttgtatagttttctattttgtgggaaaacatataagaagacctcttctagacatttaggattttttgagggtttttttttkgtcatataaatacttctttagtgtggtgtcttctggtaaatacctctcttttttaaggaaaaattcttagaaataaaattatttagtcaaaggggatcca

SEQ ID NO: 99460 - DNA, 201 bp, Homo sapiens
tctctgaaaactaaactactaatagtctctactgttgcctggaagcctcactgataacataaacagtcaattaacacatactttgtatgctatatgtattrtatactgtattcttgcaataaagtagagaaaaaaacttaccaagaaaattatgaggaggagaaaatatatttataattcattaagcagaagtggatcact

SEQ ID NO: 99461 - DNA, 201 bp, Homo sapiens
gaggtgagtacttaatatgttaatgatgtatttgttccaaatctgaaattcttcattgtaagtagagaatgttggattattttatatactattgagagcartattttattcagaatggaaatcagttgtctctgtttagaaacataattggaaagcctgtaattgaaaaggtctaaattgatgttgttagtattctaaagg

SEQ ID NO: 99462 - DNA, 201 bp, Homo sapiens
gcatttcttacaacaattaggacttattcccattcagataatgttgtcctagttaacccctttgtggtttttggagatgtaggtttattctttaaactttktttttttttttttttttttttgagacagtttcttgctctgtcccccaggctggagtgcagtggcatgattacagctcactgcagctttgacctcctgggc

SEQ ID NO: 99463 - DNA, 201 bp, Homo sapiens
gctgctaggttatggggaaggggtggtgtctgtgattcaagactgtctctcctactctcttcaatgattctttcagtgatatgaatataaaaccaggtacyccgattgctctgatttttggttcttgtgatggtatgcagttagttgttaaactttccagtatgcagatatttgttaaaatgtgttgttcctgtcgggggt

SEQ ID NO: 99464 - DNA, 201 bp, Homo sapiens
tgtttgagattggactctgcagtaatagaatgttttgctatgcagttcttggatccatcatgggacaattactagttatttactttcctccgcttcagaargtttttcagactgagagcctaagcatactgggtaaagaaaacgttatctttatcatttatgtattttagataaatcatattttctaatgtgtttgtttta

SEQ ID NO: 99465 - DNA, 201 bp, Homo sapiens
gtaaatgttcctttaaggataatgacaatagcaaccatttattatctgccaatgcatgtattacctacattatctaatttacttcttatagctaccttatraaagataggcagcaccgctttaaaaattctaataattaataagccttatttcttagcagtgttagatttatagaataattgagcagataacacagagttc

SEQ ID NO: 99466 - DNA, 201 bp, Homo sapiens
gtttatacccagagcacttcagccttgcatccaatcatctacttgatatctccatctgaatgtcttgtgaatgttgcagactgaatgtgtccaaagagaaytccacaagctccaaacatgctcctccccaggtttttccatcaatcaacacaaaagctcaaaccagaaacctgggagtcaccttggcacctctctttttcc

SEQ ID NO: 99467 - DNA, 201 bp, Homo sapiens
tctagacagtgttcatacttggctgtctggtttcaccaggaactctacccaaaagaggaaacagcaaggagaacatttgctttgtttgtaggagggaagtkgtcgagctacaaacaaatctttaggcatctgaggaattgctaagtttctaatttcatatggttgctgacaaggaggtgcagacaaggaccctcttgcttt

SEQ ID NO: 99468 - DNA, 201 bp, Homo sapiens
taatacagtgcatttaaaaattagttttcctatgtaggtgtgaggaatgatatatttgacagtaatgctatcctttattgagttctcaatttgggtatttatgaaaaggagttatacagtttcactgtattttttcttgtaagttaaaatttaccttaaaattgaactagttgaatttcagtattttaattccatattcac

SEQ ID NO: 99469 - DNA, 201 bp, Homo sapiens
aagcaatacatggtagaattttgagtagtttaaacatttttgatatttggaagatattttttgatatttttgatatttagatatttgatattgatgcaaasgctattaggagggaaaacaacaacatgactggtagtattcaggatataaagtggtagagggtaagggactaggatgataacaggtgagccatttgagtcc

SEQ ID NO: 99470 - DNA, 201 bp, Homo sapiens
tatattgtaattagaaaacaatgtctttttagattaataattgtgatgagaattagaatctatatttctttactaaatgtcctttttaaagacaaattttwatgcttttctaggtgaacacttttaacagtgtcattataaataaaatgaacagaactcattatagtttttgggttttataggtcttgtcaccaccaagtg

SEQ ID NO: 99471 - DNA, 201 bp, Homo sapiens
tccataaattaaggtactccaatggttttccattgtgatcaggatcctgaactgtggcgtctcaaagccgtacatgttctgtcccttattttctcctctayccttatatgctaccctttgctttctgtgcaccaagtatactggctttatagttctttcgatgtgacacaattattcctactttaagaactttgctgcctt

SEQ ID NO: 99472 - DNA, 201 bp, Homo sapiens
agctctcaggtctgtcagggctctgcagaggattacctggttttggggaatgttttcttctaaaatgtggctctatctttattatgtttgttgttttcccyctacctggcattatgttatatactcgtgcttgtttaaaatcactttcccattaatatccaagggtagaaactttgtttcattcactgctgattatcctac

SEQ ID NO: 99473 - DNA, 201 bp, Homo sapiens
accctacagtggcctcttaagtgttcaagtgaaaggaaaaattgcatgtctttcactttaagtcaaaagctagaaatgattaagcttactgaggaatgcaygtcaaaagctaagataggctgaaggctaggcctcttgcctcaaacaattagccaagttgtgaatgcaaagaaaaaattcttgaaattaaaagtgctattc

SEQ ID NO: 99474 - DNA, 201 bp, Homo sapiens
ttgggatggtccattcccctctggctaggtctggtccaaatgttcccttcatgcatgagtgctggctgagcccagcatggctttgctctccactgtgacayggcagcactgagttcaatagaaagaccactagccactgcactctccctcccccaagtgcatatactctctgtgtagcagggctgctgctaggttatgggg

SEQ ID NO: 99475 - DNA, 201 bp, Homo sapiens
ttcaatttgtttgttaaatttatctgataaaattctgaatttcttttctgttatcttgaatttctttgagttttctaaaaagagctattttgaattctctktctgaaaggtcacatatctctgtttctcctggattgatccctggtgtcttatttagttcatttagtgaggtcatgttttcctggatggtcttgatgttta

SEQ ID NO: 99476 - DNA, 201 bp, Homo sapiens
gtgtttccattagcatttgtttcaagaaatttttcaatttctttcttaatttcttttctttctttctttctttttcttttcttctttttttttttttttttgatagagtctttctctgtcacccaggctggactgcagtggtgtcatctcatctcactgcaacctccgcctctcgggttcaagtaattctcccacctcagc

SEQ ID NO: 99477 - DNA, 201 bp, Homo sapiens
caatgtatctgatatgttttggtatgttgtgtttccattagcatttgtttcaagaaatttttcaatttctttcttaatttcttttctttctttctttctttttcttttcttctttttttttttttttttgatagagtctttctctgtcacccaggctggactgcagtggtgtcatctcatctcactgcaacctccgcctct

SEQ ID NO: 99478 - DNA, 201 bp, Homo sapiens
tcaatgtatctgatatgttttggtatgttgtgtttccattagcatttgtttcaagaaatttttcaatttctttcttaatttcttttctttctttctttctttttcttttcttctttttttttttttttttgatagagtctttctctgtcacccaggctggactgcagtggtgtcatctcatctcactgcaacctccgcctc

SEQ ID NO: 99479 - DNA, 201 bp, Homo sapiens
ttcaatgtatctgatatgttttggtatgttgtgtttccattagcatttgtttcaagaaatttttcaatttctttcttaatttcttttctttctttctttctttttcttttcttctttttttttttttttttgatagagtctttctctgtcacccaggctggactgcagtggtgtcatctcatctcactgcaacctccgcct

SEQ ID NO: 99480 - DNA, 201 bp, Homo sapiens
tttcaatgtatctgatatgttttggtatgttgtgtttccattagcatttgtttcaagaaatttttcaatttctttcttaatttcttttctttctttctttctttttcttttcttctttttttttttttttttgatagagtctttctctgtcacccaggctggactgcagtggtgtcatctcatctcactgcaacctccgcc

SEQ ID NO: 99481 - DNA, 201 bp, Homo sapiens
cttggtcatgatgaatgatgtctttaatgtattgttgaatttggtttgctagtatttcattgaggatttttgcattaatatttatcagagacaccagcctktagatttttttttgatgtgtctttgttctttgtatcagggtaacacttgcctcgtagaatgagtttggaagtattccctcctcctctattttttgtaata

SEQ ID NO: 99482 - DNA, 201 bp, Homo sapiens
aggcacatgccaccatgcacagctaatttttgtatttttattttttaatagaggcagcgtttctccatgttggccaggctagtcttgaactcctgacctcrtgatccacctgcctcagcctcccaaagtgctgggattacaggtgtgaatcaccatgcctggctgatatttctgtttttttctctttttttaatgaaatgt

SEQ ID NO: 99483 - DNA, 201 bp, Homo sapiens
gcacgtgtatgtttattgcggcactattcacaatagcaaagacttggaaccaacccaaatgtccaacagtgatagactggattaagaaaatgtggcacatrtacaccatggaatattatgtagccataaaaaaggatgagctcatgtcctttgtagggacatggatgaagctggacaccatcattctgagcaaactatcac

SEQ ID NO: 99484 - DNA, 201 bp, Homo sapiens
tctcacatgtttatagtcctcattagataccttattttccagtaacatttcttctcaaaaatagatgtacttgactactcttttcttgattcttctgggartaaccatctctttggagatggttgttagtaaggttataaaaataaccttactgaggaactcccatgcaatcctctgaaaataataaaaatttccttattt

SEQ ID NO: 99485 - DNA, 201 bp, Homo sapiens
gtgtagaaagccagttggaatcagatcatttgcagtaggtttgtgagctccattagtagactatcagggttccgcttttaggggaatcttcttgcttagayaaatgttgcccatggtcaggtggagctggttagtctagcataggtcatttcaggctaaccattattcaaggcagctattcattcagccaagtgagtgata

SEQ ID NO: 99486 - DNA, 201 bp, Homo sapiens
taaatcccatattggatttttttagtggtattgggacagagtattagtaaatgtatgtgaaatctgcagttacttaaacattttaccattagacttctgcrtaacttctcagagatgctaaaggtggtgaaactttcattttatttgctttcttcagtttgtcctctggctctcttataaaaattaaggtgaactctggaa

SEQ ID NO: 99487 - DNA, 201 bp, Homo sapiens
tatgtaaaagggaaaaataactatttaattatctttcaggaatcatcatgttggttggctggttactgggaaaagatatcctggaaatgtttactattagwgtaaggtaagtctcaatactttataattggagtctcttttgcctcttttatttctctaatggacatagcttacgttttattatggagatcagtattacat

SEQ ID NO: 99488 - DNA, 201 bp, Homo sapiens
tcacattaagcagtgttaactttaacctcccctgtttaatggatttttataaaatcttctaattgtgatctgatatgctttcccttttttgtcaagggacrttttagattccttcagcttgttctgttccttctaggtgattgtatgtaaaagggaaaaataactatttaattatctttcaggaatcatcatgttggttgg

SEQ ID NO: 99489 - DNA, 201 bp, Homo sapiens
accaccacacctggctaatttttgtatatttagtagagacggagtttcaccattttggccaggctagtcttgaactcctgaccttgtgatctacctgcctyggcctcccaaagtgctgggattacaggtgtgagccaccgcgcccagcttgagcagtacttttcaactctgagaagataaacccaagggattctagaagag

SEQ ID NO: 99490 - DNA, 201 bp, Homo sapiens
attagtgctgtgtaaggattggttggattaggaaaataattaacgtaagtagtggtaggagtttatctttttttgataagggttttctaaggtaaagtaaraacttaagtacaagtttagaattgcagataatctgtaattgcttatgtaggctcttcctggttttcaaaagtagtatctatcgaaacatgaaaaagataa

SEQ ID NO: 99491 - DNA, 201 bp, Homo sapiens
cagctgttgactttaagttgaagccaatgatgatttatcattctgaaaattctaggtccctaaagaatgatgctaaatctactttgcttgtgctctatcartggaacaacagagcctgtaggacagcagatccatttatagcatggcttactgaatattttaagcccactgttgagacctcaaaaaaaaaaatagattcct

SEQ ID NO: 99492 - DNA, 201 bp, Homo sapiens
cgtccgggaggtgaggggcgcctctgcccggccgcccctactgggaagtgaggacccctctgcccggccagccgccccgtccgggagggaggtgggggggwcagccccccgcccggccagccgccctatccaggaggtgaggggcgcctctgcccggccgcccctactgggaagtgaggagcccctctgcctggccagccg

SEQ ID NO: 99493 - DNA, 201 bp, Homo sapiens
gggtcagccccccgcctggccagccgccccgtccgggaggtgaggggcgcctctgcccggccgcccctactgggaagtgaggacccctctgcccggccagycgccccgtccgggagggaggtgggggggacagccccccgcccggccagccgccctatccaggaggtgaggggcgcctctgcccggccgcccctactggga

SEQ ID NO: 99494 - DNA, 201 bp, Homo sapiens
ctgagaagtgaggagcccctccgtccggcaaccaccccgtctgggaagtgaggagcgtctccgcccggcagccaccccgtcccggagggaggtgggggggstcagccccccgcccggccagccgccccggccgggaggtgaggggctcctctgcccggccgcccctactgggaagtgaggacccctctgcccggccagccg

SEQ ID NO: 99495 - DNA, 201 bp, Homo sapiens
cggggtttcgctgtgttggccgggctggtctccagctcctaaccgcgagtgatccgccagcctcggcctcccgaggtgccgggattgcagacggagtctcrttcactcagtgctcaatggtgcccaggctggagtgcagtggcgtgatcttggctcgctacaacctccacctcccagccgcctgccttggcctcccaaaga

SEQ ID NO: 99496 - DNA, 201 bp, Homo sapiens
gacggggtttcgctgtgttggccgggctggtctccagctcctaaccgcgagtgatccgccagcctcggcctcccgaggtgccgggattgcagacggagtcycattcactcagtgctcaatggtgcccaggctggagtgcagtggcgtgatcttggctcgctacaacctccacctcccagccgcctgccttggcctcccaaa

SEQ ID NO: 99497 - DNA, 201 bp, Homo sapiens
tggcttaagactttgggggactgttgggagggcatgattggttttgaaatgttaggagatgatatttggagggcccaggagcagaataatatggtttgacwgtgtccccacccaaatttcaacttgacttctatcttccagaattcccatgtgttgtgggatggacccaagtggaggtaattgaatcataggggccagtct

SEQ ID NO: 99498 - DNA, 201 bp, Homo sapiens
aattatttgcaaagggattctttgcaaatacaaatagatctctatactcctatattagtctaattaatattaaacacaccatttactattcttccaagcaraccagttaacacacacacacacagagaaagactgtgttattgctgtttaagatcacatagtggaaaaactaaaacatcactaaagaaagataaagtcttt

SEQ ID NO: 99499 - DNA, 201 bp, Homo sapiens
gccatgtccctacctgatagctcccaaaccagtggctctcaaagtgaggttcccagcagcatcagcatcactggagaagttgttaaaaaagcaaaatctctgctcctcccgcaagacctacagaattagaaagtctgagggtggggcccagccacctgtgctttaacaagccctccagatgattcaaatgtatgttcaagt

SEQ ID NO: 99500 - DNA, 201 bp, Homo sapiens
tggaaaccaaccaaagatagttagggaagaaagaaactaattacaaattacatcatcagcctggacaaatcacattgttggggtttcccaagtagagtgtrtgtgcgttaattatagcagatatcctgatgctattccaaggagactaaaacaaaataagacctaagccctgtcagaagctcgttgaattgcttaaattca

SEQ ID NO: 99501 - DNA, 201 bp, Homo sapiens
cgttaattatagcagatatcctgatgctattccaaggagactaaaacaaaataagacctaagccctgtcagaagctcgttgaattgcttaaattcatcctrctttaaagtggaattctataaatactagccctgcctcccaggtattttgtatcttttgaatacctaagtcttttctccaaatattattagagaatttttt

SEQ ID NO: 99502 - DNA, 201 bp, Homo sapiens
ttttttaattgcatgagctggaaagacaaggaatgtgtactaccctgataattaagttttaaaacttgatttatggacagtgttggaaaactttgcagcamatgttttaacatttatgttataaattgtgtgatgtgtgtattttattaattctttttgagtgtgcatgcagtgtagatctgagcctttccactgttagat

SEQ ID NO: 99503 - DNA, 201 bp, Homo sapiens
tggaagcaacatttttatcaaaattccttcctctcccctgtcctctgctccactctagtcgctacagaagaacggttcagttgtagccatgacaggagatrgagtaaatgatgcagttgctctgaaggctgcagacattggagttgcgatgggccagactggtacagatgtttgcaaagaggcagcagacatgatcctagt

SEQ ID NO: 99504 - DNA, 201 bp, Homo sapiens
actggtaatttttaaaaaaataataaaatattactgctttaagggatggtaggagcagtgtcaaccaaaagtaaaactgtgtgtgtgtgtgcatgtgtggwgtgtgtgtgcacacatgtacgtatgtgagtatgcacagcattcacattaagcagtgttaactttaacctcccctgtttaatggatttttataaaatcttc

SEQ ID NO: 99505 - DNA, 201 bp, Homo sapiens
agagaagttaatctaaaattaacaatgagtttgatttctataaaattcagagaagtaggacaggattctagtctttgatttgttttttaagtgaacctatrtttctccttgattcttttggtgacttgtaatgatttaattctttaggctgctgtaatgtgatttgttcagataaaactggaacactgacgaagaatgaaa

SEQ ID NO: 99506 - DNA, 201 bp, Homo sapiens
cccctataggaatatttaatcttcagagttcaggtggcagtcaaaaccttaggcttgagtaacttctctgggaattatgagaaatgaatgccacttaattytggactccaatggcaggtaagtacaagttgaaattaaacttgtgtttggtacattttcttcttaggacagaccagagatttgttttatgaaaggtgctta

SEQ ID NO: 99507 - DNA, 201 bp, Homo sapiens
aacttggtgtttaacattcctaacagttccagtgtcttaccttcaaaagggctgtaaattagtagtggagttattttctctctctgtgattttaccaagtstttgtctcattccacttgtacacttgttcaatccaaaaactttgattcctccttgacatctctctttcagtcaccccttcatctatccataatcaaatcc

SEQ ID NO: 99508 - DNA, 201 bp, Homo sapiens
ccttacagaattttgggaagtcgccccgcgattaccggctcccgcaagaaccaagcagtcagtgcagggttttgcaagtgagagtgcgagactcgggaggytgctcacggtgctccagtccctggcaggagcatggacacctcgccccttccttccgtgggcctcaacgttgcctgctgagattgtgactgccaccccgac

SEQ ID NO: 99509 - DNA, 201 bp, Homo sapiens
tatgtgtgtgtctgtttatgtggcataccacatagcttaaggtatgccacgtaaggaaaccccaatgagtaaataacattaccattagaaaacagctactkactctgaatgagtaattatggcagaagagtagaaaacaatgttggtttttcatttgtttgttttttgagaaggagtcttgctctgttgcccaggctggag

SEQ ID NO: 99510 - DNA, 201 bp, Homo sapiens
cctgtggtacctttggtaaagattgaaatgaccatgtcagattaatgtcttaacaaacatatgtcatattgcttaagcttgatctcagtggcaaattaaawacagcttaaattgatgagtttttcatcattagttatgaatgcatgggttattctgtagaaatcttaatattgaagatttttagtgtatcttgtattttaa

SEQ ID NO: 99511 - DNA, 201 bp, Homo sapiens
gtgtcttaccttcaaaagggctgtaaattagtagtggagttattttctctctctgtgattttaccaagtctttgtctcattccacttgtacacttgttcartccaaaaactttgattcctccttgacatctctctttcagtcaccccttcatctatccataatcaaatcctaccaattttgacttcctaaagaattttccc

SEQ ID NO: 99512 - DNA, 201 bp, Homo sapiens
catcatctaatttttatttttaatttcagaaactgtaccttatgctgaaacaagcataatgagagaagttaatctaaaattaacaatgagtttgatttctrtaaaattcagagaagtaggacaggattctagtctttgatttgttttttaagtgaacctatatttctccttgattcttttggtgacttgtaatgatttaat

SEQ ID NO: 99513 - DNA, 201 bp, Homo sapiens
ttgttaaaggaaaaaataatcacatataggtgagaattaactttctctttgtgccatatagatgggtcttgatggacttcaacaagactacatcagaaaarctgaatacccttttagctctgagcaaaagtggatggctgttaagtgtgtacaccgaacacagcaggtatccatctgtttaaagaatacttatttcctgtt

SEQ ID NO: 99514 - DNA, 201 bp, Homo sapiens
agaatgcagtgtcatcaatttcagtattactggtttttaggtattgagtgaaaaaaactcatactatttcattgtttttactatcttttaggtatcagttbtattcctataaatgtaaagtatagacttttttcagtataactttattgttcacatgcaagttacaaactaatgagcagtcattgatttcttgtgaagaaa

SEQ ID NO: 99515 - DNA, 201 bp, Homo sapiens
aagagaatttttcctttttttgtctctggaacatttcaagaataaggctgttttctttccagagtttacacataatgatataaattggatgacttgtttarattgtgtatttcctgtggtacctttggtaaagattgaaatgaccatgtcagattaatgtcttaacaaacatatgtcatattgcttaagcttgatctcagt

SEQ ID NO: 99516 - DNA, 201 bp, Homo sapiens
catgactcacttttttttgttgttgtttggattttattatttcctaagttcttgctttggcttctggtcctgaactgggacagctgacatttcttggcttsgtgggaatcattgatccacctagaactggtgtgaaagaagctgttacaacactcattgcctcaggagtatcaataaaaatgattactggagattcacagg

SEQ ID NO: 99517 - DNA, 201 bp, Homo sapiens
tgtgtgtgtgtgtgtgtgtgtgtgtgtgtgtgtgtgtgtctgtgtgtgtgcgcgcacgcgcgcatgcatgcgcgtgtccatgcgcaagtgtgtgctaagcmctgttctgggtatagtgattcacaatcaaacagacccaggtgattcaaaaggttgcttcaatttgcacattttacatttgaacaaataatttgtttttca

SEQ ID NO: 99518 - DNA, 201 bp, Homo sapiens
cccctaagtactagagactcagcagcctgatctgtggctcaggtgatcaagcgggacactgagtgtggaagggagaatttgctccacttctgggctgactrtagtctagctttagcctggagatgcctgccaagaaccaaatacctcatgaacccctggggagtactgctcttaggggccagcacccctgggctacatatg

SEQ ID NO: 99519 - DNA, 201 bp, Homo sapiens
caacttttatcttcataggttgtgtcttagcttgggttgctttaacaaaataccatgccatttatttttcacagttacggaggctggaagttcaaggtcarggtctggcagggtttggtttctggtgaggactgttgctagcttgagatggctatcttcttgcagagtcctcacatggcggagacagcaatttctctctct

SEQ ID NO: 99520 - DNA, 201 bp, Homo sapiens
agacttaatactgattcagataggtttgtattactggtaggtaacaaaagagaacagataacaaatcatactaaatgagcattacgttgactagcctgtcwagcaaaaacaatttggtttattacattttctctctcatttgctttagccagtcgtctgggattgtattccaaaacttcccagtcagtctcaggagaagaa

SEQ ID NO: 99521 - DNA, 201 bp, Homo sapiens
tctcctctctattcccagtgtggccgtggctgacactaaagactttgtagccatcaacccgagtgcagtttcgatggaaaatgaaggtaaaggcccctggscgaccggttgcaacgcggagttgagggtgtggtggtttgcttttaagttgtctttgtttttccacctttttattttcgtgagcttatttatttactgtgt

SEQ ID NO: 99522 - DNA, 201 bp, Homo sapiens
aaaatactcttagctttaaaatgtccacgtgactgaagaatagtttacttgaaacagtcttcctttaaaagcatagtagtaagagatttttaaatgctaaraaagtggtatcatagaatcaacagatttactctactgatatttttaaatgactctctttttcaacaggagtatagcagcattaactttaatctcattggc

SEQ ID NO: 99523 - DNA, 201 bp, Homo sapiens
tccaatccattgatcctatcacttttttcactgctccacaccctactgctgctgtcacttctttttatcatacccagcttaaactccacagacaaacattrtaattactctgtggcacataggctcaactcccttattgtccttcttgcctggtaaagcaaacatcctaggttaagttcacttgggcatctactcatcatc

SEQ ID NO: 99524 - DNA, 201 bp, Homo sapiens
gccatctcggttcactgcagcctctgtctcccgggttcaagcagttctcccgcctcagcctcctgagtagctgggactacaggtgccctccatgatgcccrgctaatttttgtatttttagtagagacggggtttcaccatgtcggccaggctggtcttgaactcctgacctcaaatgatctgcctgccttggccttccaa

SEQ ID NO: 99525 - DNA, 201 bp, Homo sapiens
aaaaacactacagaaaactctctgaacataggaaaaagggctcaagggggacaggtactcacatggggataattccttctggtcttttttcattattttcyaagtttgagcttggctgcccattgaaattgtcttggtagttttctaccctttccagtgtggctacggctggagttgctataatattctcacattcctgcc

SEQ ID NO: 99526 - DNA, 201 bp, Homo sapiens
tgtggcagtcaggatggagagaaaggcatggaatttgaattgtcttttttttttttttttttttttttgaggcagggtctcactctgtcccccaggttggrgtacagtggtgtgatcttggctcactgcaacttctgcctcccaggatcaagcgatcctcccacctcagcctcctgcgtatctgggattacaggtgcacac

SEQ ID NO: 99527 - DNA, 201 bp, Homo sapiens
ccatataccacaaacgaatgaaaaagattagctctccctggagctctctgaggctgaaccttgctctctcattacacatggtaactaagcacaccccttamagaattttgggaagtcgccccgcgattaccggctcccgcaagaaccaagcagtcagtgcagggttttgcaagtgagagtgcgagactcgggaggctgctc

SEQ ID NO: 99528 - DNA, 201 bp, Homo sapiens
actgccaccccgacgggagcagcttcccctacagactttgtagagagcgcttaaacgcctcggggacagcggccatgactgtcagcttgggccgaccccgsggccgccccacgggaatgcgtggccgacacggggcgtgggcgaatctccgaccctcgcgttcagggggtgcatataaacgggcggacaccgtccctgggg

SEQ ID NO: 99529 - DNA, 201 bp, Homo sapiens
agaaagatgtggtcattggggactgctctgaagtctgccagccctctatcctaaaagttggtagatcagttattatatcttgatatgtacccctaattcayatgaggggccaagagagattagttactcctgatttcatctgttagaagataaagggagtgtggtttgtatctatattagagtaatgggaatgaagggtag

SEQ ID NO: 99530 - DNA, 201 bp, Homo sapiens
ctcttaaagtctgacttgttgtcatggtgcgttgaaagagtagccagttgtcttttctgggtagatcagctatgagctgactgactaagaggagtagttamaatggagaaagcttagctgtactttgtcttgcatgttaaacataatgagtttagaggattatgattatttgtaatcatcaggatctgctagacaggacat

SEQ ID NO: 99531 - DNA, 201 bp, Homo sapiens
aagagaagttcaaagaataggatatagacatttaaagaagggagaggttccacctgatttgaatgagatcagaatatgcctcagaccacatggctttggcrgtgataattgaagagtagtactggacaaagatggggaagacaatgaagcaacaccattcaaatcactatgaacattccagtgtatgaaactctgttggga

SEQ ID NO: 99532 - DNA, 201 bp, Homo sapiens
tggatctttccattgatgagtccagcttgacaggtgagacaacgccttgttctaaggtgacagctcctcagccagctgcaactaatggagatcttgcatcragaagtaacattgcctttatgggaacactggtcagatgtggcaaagcaaaggtaaatttttttcctgatttgaaaaaagcagttcctttgtttgaaacta

SEQ ID NO: 99533 - DNA, 201 bp, Homo sapiens
gtagttaggttgattttgttctagttaatccacttttacgtatatagttgaacattttttattctctctaccttaattctgccttatttgttttgcctgtyacttgctaccccaaacagacttttgcaactactttgactgcagattgaaataactttccttaaagagttggggatcttttatccatctaaatttaaatgt

SEQ ID NO: 99534 - DNA, 201 bp, Homo sapiens
gcagcttcctccacgttgggtaaatccattactggagcaatcactctgtgtcaagcattctgatttcctgagttaataaaatacatgttccatttactcartgaaaaaatactctggtaaaacccaggttacaattctgatttggtttggtatgctttttcaaaaaagaatgttttcaaatatttgataaaatgtaagcat

SEQ ID NO: 99535 - DNA, 201 bp, Homo sapiens
tagcacaattttgtctctttggagttatatttattttcatgatgaatattttaaaacttaacaacctattgtaaactgttatttttgcagttatgtttgcytaacacacaaacacaccaagcatgttcctgtccccaaggtctttgtactttttgttgcctttacatgaaatccactctccctaattatggcccagccttg

SEQ ID NO: 99536 - DNA, 201 bp, Homo sapiens
gtctgttatgaaaccattttcgccatttagcacatatttgaaaaccatgtacagcacattgtatcaggcttcagggcttagaagtgaaaaagacagtttgwgccctctccattggcagacaccagcttgcaaacaactgtgattcaaagaatgatatgtgtctgctcatgaaatgaattgaccatgtgagcctaggcaagc

SEQ ID NO: 99537 - DNA, 201 bp, Homo sapiens
agtggtaataggaagggtaataggaataggtaataggaagaaagaacagaaaatgagaagattttatcaactaatgctggaaaattttccagaatgaaaasactttagcatctagaataaagtggcccaccaacagctcagcacaatatgtatgttaaagcagagtggggtgagggataaacacaagacccataattaaga

SEQ ID NO: 99538 - DNA, 201 bp, Homo sapiens
aaataataacagtattttaatatctaatacatagttcatgagaagttttttttttactttttattatgtagattacagctattcactaggtgatttatagraaatttaggtagcttttatgtttcatgtgttaggctaaagttatttcttcctaatggaaagaaaatgtttatattttttaaaaagcagcgatttatccat

SEQ ID NO: 99539 - DNA, 201 bp, Homo sapiens
tgatttatggacagtgttggaaaactttgcagcaaatgttttaacatttatgttataaattgtgtgatgtgtgtattttattaattctttttgagtgtgcrtgcagtgtagatctgagcctttccactgttagatgcctagcctaaggttgagaatagatcaggaataggtgctatccctgtcctcaggaagtaagtaagc

SEQ ID NO: 99540 - DNA, 201 bp, Homo sapiens
tctccttttggaatatgaagtgttgctatgtactttgacctagagccagttaaaaagtagtactgaatctcagttttgcttgttattaagtcatctgggarttctcagtgttttccatttatgactttttctagtgtgtcctacattttccattgatccattgatagaagtggtcatcctctttcattcttctttttctga

SEQ ID NO: 99541 - DNA, 201 bp, Homo sapiens
cctcctccttcatttattttacacttacaacttcaagttatatattcagaatgtggaattttcttaaattgtttctgcatcttaaggtatgtctatacttytttgattagaaaatttattcattagtggtatatgttcaacatagaaaaatcaaataatatagaaaagtaagagctacaatagaagttgtctgtaatctaa

SEQ ID NO: 99542 - DNA, 201 bp, Homo sapiens
ggaatttattttattagctattttgtagccatccattgttactaataaaatgtgctacctcctccttcatttattttacacttacaacttcaagttatatrttcagaatgtggaattttcttaaattgtttctgcatcttaaggtatgtctatacttttttgattagaaaatttattcattagtggtatatgttcaacata

SEQ ID NO: 99543 - DNA, 201 bp, Homo sapiens
caactttccacctcagctagggaaagagaatgacagttaaggcttgacccaggattataatcgttagagcaagtgggagtttcagagacttaaggggcacygcagggaggccttgctgccacaaaattagggtttggattgataaagcctgtgtcggaaggggcagtggcagctccactgagacaatcctgggaagactgt

SEQ ID NO: 99544 - DNA, 201 bp, Homo sapiens
tcacatttgagctgtccaactcacttccaggatttgtagaacccttgccagtattgaggtgttaagttttagttggttaattggccctcaaaagatggaartttgagaatgtagcaaaatatgaatcactggttcttttagatctccagaggtctctgagtagctgatagaaattttattttaaacaagtttatcttatga

SEQ ID NO: 99545 - DNA, 201 bp, Homo sapiens
agggttctctaaagggacagaactagaggatatttgcatatatgatggggagtttattaggagaattgactcacatgagtcacacgatcacaaggtgaaawcccacaataggccgtttgcaagctgaggatcaaggaagtcagtctgagtctcaaaacctcaaaagtagggaagctgactgtgcagccttcagtctgtagc

SEQ ID NO: 99546 - DNA, 201 bp, Homo sapiens
ccagtatgtgttaatatatgggataaccagatcgttttaactgctctggctaatcctcatttctataaatatgtagacaaaactagcactgctgtatggtrataactaccagtatactgctttgtcctttaaaatgtgtctgccatactaggctcaaactattaaaccaagtttttctactaaggctaggaatgtcacatg

SEQ ID NO: 99547 - DNA, 201 bp, Homo sapiens
agatttctattaataagtacagacaaataaaaatgtaggcttagttttatgtttatttaaatatctgaaacttctgtagattttagaacagtgtttcacartatcagcagatttcctttttagctagaacatggttaacaagaatagaattattctagcttagagaaaaatgtaatattgttgcataagcctgaagttcgt

SEQ ID NO: 99548 - DNA, 201 bp, Homo sapiens
aagctaattaaaatgtactgttatgctttctgtaagtcttgtggctgattgtgttatttttctccctaaattttgtttgtttggtaaactctgcctttttrtttacattttttttaaaaaatcaattttgttgagatataattcacataaaatacaatgtactttttaaaagtgtacaatttgcattttgacaaatgtaat

SEQ ID NO: 99549 - DNA, 201 bp, Homo sapiens
taacctgtgcatcctttgcttgtctggtctcttttacttcttgtttttctcctagtttgtgaatagctcttaaagtctgacttgttgtcatggtgcgttgraagagtagccagttgtcttttctgggtagatcagctatgagctgactgactaagaggagtagttaaaatggagaaagcttagctgtactttgtcttgcat

SEQ ID NO: 99550 - DNA, 201 bp, Homo sapiens
ttatttggctgaagccattagtttcaacttctcctttaaaacctggagtgcacctaaagtgctcttcaatcctgtcatggtctcattgactaagtacttayttttagtagagacagttttctgtctggcatcctcacttctaactttcattggccagacttcatactaaagtacaaagaggaaactgtttttaaaactttt

SEQ ID NO: 99551 - DNA, 201 bp, Homo sapiens
gaaatagtctaggctcattgactcgcttggactaaaaagctatctttctcataatgcagtttaggataatgtttacctttttagcaacaggtttacactgmgaatgcttttacagctctttaaatgatgtatgaggtcaacttaacccatgtgtttgtctgaattattattgtagagccttagcatctggtatgttagtag

SEQ ID NO: 99552 - DNA, 201 bp, Homo sapiens
acgaggtcttgatatattgcccatgctggtcttgaactcctggactcaagcagtcttattgccttggcctcccaaattgttggaattataggcatgagccmccgtgcccagctttagtatgacattctttattcttttagaaagctttgagatattgatgcatccttatagaaattactttcatttatttatttacttact

SEQ ID NO: 99553 - DNA, 201 bp, Homo sapiens
atagagggatttttgaaagtgaattttgggaaagtaaaaatacaccatctgcagatgtaggataattattccctatgtggtgagggcactaagaaaatgtmctgtgaagtagcagaagtgctttaatcatgcaataaggtggaatctggtgctgcataaacttgccctgatgagcaatattaaatgcctcccattcctctc

SEQ ID NO: 99554 - DNA, 201 bp, Homo sapiens
tgccggcccttcactctgtatccaggctggattaattcccagagaatggagtcattttcctgatgggaactcttagcactgattggaaggaggagattagygggcttttcatttttgtcctgatgcaatttgaaaatctcatcaattcaaaggtatcctggagacactgtttctcaattcttgtttcatgtttctcaacct

SEQ ID NO: 99555 - DNA, 201 bp, Homo sapiens
atcctagtctagtaccacttacttgggaacaaatatagaaacacaggcaaccccgtccgttaattctgatgttgaacgtgtggttagagagcacactgcgrtatgttacaggacctgagataaaaagcaaatttgtaaagtgtctaagtgttgatggagaaaaacacatctagcatatacggaaattttcttttgagttct

SEQ ID NO: 99556 - DNA, 201 bp, Homo sapiens
caccaaactttattattgttttattttaggaaattgccaccgccacttcaactttcagcaaccaccgccctgatcagtcaatagccattaacgtcaaggcragatcccctaccagccaaaatattatgactcattgatggttcagatgatcattaacattctttagcaataaagtattttttaactaaggtatatacattt

SEQ ID NO: 99557 - DNA, 201 bp, Homo sapiens
tagggctgtagtaccagaatggctgagtgattaaggtattggacttaagaatcatagggctaattcatgaagaaagataggtatgcatttgggaggttccrgaggaaataaccatgaccaatgggtagaattgcagggagggattatgatatactaataaagatgaactttctaaaaatgaaaggtaaagaaatgaattat

SEQ ID NO: 99558 - DNA, 201 bp, Homo sapiens
cagtcttggggatgtctttcagcagcatcaaaacagactaatatacatagtttctgaaacttgtctgatactctagataaagatcatctttatgttgattkaaaaattttttaactttgtttaatccccataatcatatattgaccttttttgctgaattttgctcattgagaatgtattgaaatgtctacttttttcata

SEQ ID NO: 99559 - DNA, 201 bp, Homo sapiens
agcattaactttaatctcattggctacattaatgaactttcctaatcctctcaatgccatgcagattttgtggatcaatattattatggatggacccccarctcagaggtacgagttttttaattgcatgagctggaaagacaaggaatgtgtactaccctgataattaagttttaaaacttgatttatggacagtgttgg

SEQ ID NO: 99560 - DNA, 201 bp, Homo sapiens
agtgctgtttaacctacattttaatactttgtatatgttggttatagtttggctgtagcagcaattcctgaaggtctccccattgtggtcacagtgacgcyagctcttggtgttatgagaatggtgaagaaaagggccattgtgaaaaagctgcctattgttgaaactctgggtaagtctgtgttaagagcattcttatgc

SEQ ID NO: 99561 - DNA, 201 bp, Homo sapiens
tcctaatggaaagaaaatgtttatattttttaaaaagcagcgatttatccattaaattcagccactgaaaagtaattttgttattgcctcttgacagctaygagacaatgtgattacacctcgagacacaacaatgaccttcacatgctttgtgttttttgacatgttcaatgcactaagttccagatcccaggtatgttt

SEQ ID NO: 99562 - DNA, 201 bp, Homo sapiens; identical to SEQ ID NO: 15465

SEQ ID NO: 99563 - DNA, 201 bp, Homo sapiens
tagattccttatactataaaaaaattaaaaattaaatttcatgactaccctgatataaagatgaatgcattaaaatgatgtatgaaaatattttcttctamctaaaagtgagtttttttaggtctgaagattgtaaaagacgtaaaaatattttcatgggcccctaaaaagtgttgtgagccctaggcactgtccctgcgg

SEQ ID NO: 99564 - DNA, 201 bp, Homo sapiens; identical to SEQ ID NO: 15466

SEQ ID NO: 99565 - DNA, 201 bp, Homo sapiens
ttttgctatgataatgtatagttatatataatcatttattgaactttaatgttggtcattggccttgattgcatttttaaaatttttattttaattttatrtatttacttaccttagagacagggtctcactaccttacccaggctggtcccaaactcctgggctcaagcagttctcccgccgctgtctggcaggtagctg

SEQ ID NO: 99566 - DNA, 201 bp, Homo sapiens
gcattcaatgaagtttgcaccataaagccctaagaactccaggcttgaagattctctgcaaaaagtgttaccatagccagtcattttggtttgccataacygataagggcttatctttctgacagcacttaccaacctagttcctctgatttttgagtcatgtcctagaaaaagagctgagcccaaggaactacagcttgg

SEQ ID NO: 99567 - DNA, 201 bp, Homo sapiens; identical to SEQ ID NO: 15510

SEQ ID NO: 99568 - DNA, 201 bp, Homo sapiens; identical to SEQ ID NO: 15512

SEQ ID NO: 99569 - DNA, 201 bp, Homo sapiens
ttttctctctccacattaaacaccaaacaggtatcctgatgtgcagactcgagtgcaggcagaattggatcaggtcgtggggagggaccgtctgccttgtrtgggtgaccagcccaacctgccctatgtcctggccttcctttatgaagccatgcgcttctccagctttgtgcctgtcactattcctcatgccaccactgc

SEQ ID NO: 99570 - DNA, 201 bp, Homo sapiens
ggaggagcggccgcaggcagcgcccagggatatgactggagccgactttccagaagcggcgcacgcaaagcccagctccgcacgcaaaggggaggcgacascagaaacttcaacccgataaagttcgccggagcgcggagattcgcctcctcctgccactctccgccccgctcgggtcccgccccgctagctcccccaggc

SEQ ID NO: 99571 - DNA, 201 bp, Homo sapiens; identical to SEQ ID NO: 15513
  misc_feature (1)...(201): n = A,T,C or G

SEQ ID NO: 99572 - DNA, 201 bp, Homo sapiens; identical to SEQ ID NO: 15514

SEQ ID NO: 99573 - DNA, 201 bp, Homo sapiens
caacggcactcagtccccagaggctggggtaggggcgtggggcgcccgctcctgtctctgcacccctgagtgtcacgccttctcctctctgtccccagcaygggcaccagcctcagcccgaacgacccttggccgctaaacccgctgtccatccagcagaccacgctcctgctactcctgtcggtgctggccactgtgcat

SEQ ID NO: 99574 - DNA, 201 bp, Homo sapiens; identical to SEQ ID NO: 15469

SEQ ID NO: 99575 - DNA, 201 bp, Homo sapiens
tggcgcgcggctggatttggagaacgtaccggccactatcactgacatcttcggcgccagccaggacaccctgtccaccgcgctgcagtggctgctcctcytcttcaccaggtaaagcctctgggaggcgtgggccaggtcttttctcctctgaaaaaggcggagtagagacagaatatgctgagtttgcaagcagggccc

SEQ ID NO: 99576 - DNA, 201 bp, Homo sapiens
tgctcacttgcttttctctctccacattaaacaccaaacaggtatcctgatgtgcagactcgagtgcaggcagaattggatcaggtcgtggggagggaccrtctgccttgtatgggtgaccagcccaacctgccctatgtcctggccttcctttatgaagccatgcgcttctccagctttgtgcctgtcactattcctcat

SEQ ID NO: 99577 - DNA, 201 bp, Homo sapiens; identical to SEQ ID NO: 15472

SEQ ID NO: 99578 - DNA, 201 bp, Homo sapiens; identical to SEQ ID NO: 15473

SEQ ID NO: 99579 - DNA, 201 bp, Homo sapiens; identical to SEQ ID NO: 15474

SEQ ID NO: 99580 - DNA, 201 bp, Homo sapiens; identical to SEQ ID NO: 15476

SEQ ID NO: 99581 - DNA, 201 bp, Homo sapiens; identical to SEQ ID NO: 15475

SEQ ID NO: 99582 - DNA, 201 bp, Homo sapiens; identical to SEQ ID NO: 15477

SEQ ID NO: 99583 - DNA, 201 bp, Homo sapiens
ctctccacattaaacaccaaacaggtatcctgatgtgcagactcgagtgcaggcagaattggatcaggtcgtggggagggaccgtctgccttgtatgggtraccagcccaacctgccctatgtcctggccttcctttatgaagccatgcgcttctccagctttgtgcctgtcactattcctcatgccaccactgccaacac

SEQ ID NO: 99584 - DNA, 201 bp, Homo sapiens; identical to SEQ ID NO: 15479

SEQ ID NO: 99585 - DNA, 201 bp, Homo sapiens; identical to SEQ ID NO: 15480

SEQ ID NO: 99586 - DNA, 201 bp, Homo sapiens
gcgacctcttcagatggattattacaggtagcgggtggcgtggtaggtactttaaaggaaatcaagcgccaccgcctcgatgcccgcagcgttgtccccarattgcaggaaccgttacgcgccttgcggggaggggaagggtttggcgctgggttacagcgaggtggaaacacgccccttctcttctccaagggagagtgg

SEQ ID NO: 99587 - DNA, 201 bp, Homo sapiens; identical to SEQ ID NO: 15528

SEQ ID NO: 99588 - DNA, 201 bp, Homo sapiens; identical to SEQ ID NO: 15481

SEQ ID NO: 99589 - DNA, 201 bp, Homo sapiens
agccacccccgcccaagcgcctccggcttcccttataaagggagggcccccttcgcgaccgcaagcgcgcccaggaagaccacagagccgccggtgcgcascgaggtggcgatacgcgcccgggctcggcctgcgggtggtggcccaagcgtccgcctcgctggcctggcaggcgcgactgtgcgtgcgcagccgagggtg

SEQ ID NO: 99590 - DNA, 201 bp, Homo sapiens; identical to SEQ ID NO: 15482

SEQ ID NO: 99591 - DNA, 201 bp, Homo sapiens; identical to SEQ ID NO: 15483

SEQ ID NO: 99592 - DNA, 201 bp, Homo sapiens; identical to SEQ ID NO: 15484

SEQ ID NO: 99593 - DNA, 201 bp, Homo sapiens
ccaaacaggtatcctgatgtgcagactcgagtgcaggcagaattggatcaggtcgtggggagggaccgtctgccttgtatgggtgaccagcccaacctgcyctatgtcctggccttcctttatgaagccatgcgcttctccagctttgtgcctgtcactattcctcatgccaccactgccaacacctctgtcttgggctac

SEQ ID NO: 99594 - DNA, 201 bp, Homo sapiens
atgggtgcagcacaccaacatggtacatgtatacatatgtaacaaacctgcacattgtgcacatgtaccctaaaacttaaagtataataataataaaattwaaaaaaaatgctacagtatgaccccactcctgggtatttatcctagagaaatgaaaacacattcacacaaaagctatacatgaatgtttacagcagctgc

SEQ ID NO: 99595 - DNA, 201 bp, Homo sapiens; identical to SEQ ID NO: 15534

SEQ ID NO: 99596 - DNA, 201 bp, Homo sapiens
tagacaaagtacattctggggaaacaacatttatatgtagcctttactgtttgatataccaaattaaaaaaaaattgtatctcattacttatactgggacmccattaccaaaataataaaaatcactttcataatcttgttatgaagttttatgttgtagcaaatatagtctaatgtatcactttatttcaactattacta

SEQ ID NO: 99597 - DNA, 201 bp, Homo sapiens
ccgacctctccacccaacggcactcagtccccagaggctggggtaggggcgtggggcgcccgctcctgtctctgcacccctgagtgtcacgccttctcctytctgtccccagcatgggcaccagcctcagcccgaacgacccttggccgctaaacccgctgtccatccagcagaccacgctcctgctactcctgtcggtgc

SEQ ID NO: 99598 - DNA, 201 bp, Homo sapiens
gaggagcggccgcaggcagcgcccagggatatgactggagccgactttccagaagcggcgcacgcaaagcccagctccgcacgcaaaggggaggcgacagsagaaacttcaacccgataaagttcgccggagcgcggagattcgcctcctcctgccactctccgccccgctcgggtcccgccccgctagctcccccaggcc

SEQ ID NO: 99599 - DNA, 201 bp, Homo sapiens
gtctctgcacccctgagtgtcacgccttctcctctctgtccccagcatgggcaccagcctcagcccgaacgacccttggccgctaaacccgctgtccatcyagcagaccacgctcctgctactcctgtcggtgctggccactgtgcatgtgggccagcggctgctgaggcaacggaggcggcagctccggtccgcgccccc

SEQ ID NO: 99600 - DNA, 201 bp, Homo sapiens; identical to SEQ ID NO: 15487

SEQ ID NO: 99601 - DNA, 201 bp, Homo sapiens
caaccaggggcgctgtgaggcaaaccgctgccactacactggctttccgggaagcaagctcaagtcgcggagagggaagggaggtcgtgcgctcggggcgrggcgcgctcccaagtcgagcgcagcggccggggcaggttgtaccgagcgtggttctggggacaccgtgcggcctcgattggaggtggctgtgatgaagcg

SEQ ID NO: 99602 - DNA, 201 bp, Homo sapiens; identical to SEQ ID NO: 15488

SEQ ID NO: 99603 - DNA, 201 bp, Homo sapiens; identical to SEQ ID NO: 15489

SEQ ID NO: 99604 - DNA, 201 bp, Homo sapiens
gccacccccgcccaagcgcctccggcttcccttataaagggagggcccccttcgcgaccgcaagcgcgcccaggaagaccacagagccgccggtgcgcagsgaggtggcgatacgcgcccgggctcggcctgcgggtggtggcccaagcgtccgcctcgctggcctggcaggcgcgactgtgcgtgcgcagccgagggtgg

SEQ ID NO: 99605 - DNA, 201 bp, Homo sapiens; identical to SEQ ID NO: 15490

SEQ ID NO: 99606 - DNA, 201 bp, Homo sapiens; identical to SEQ ID NO: 15491

SEQ ID NO: 99607 - DNA, 201 bp, Homo sapiens
ataagaattttgctcacttgcttttctctctccacattaaacaccaaacaggtatcctgatgtgcagactcgagtgcaggcagaattggatcaggtcgtgkggagggaccgtctgccttgtatgggtgaccagcccaacctgccctatgtcctggccttcctttatgaagccatgcgcttctccagctttgtgcctgtcac

SEQ ID NO: 99608 - DNA, 201 bp, Homo sapiens; identical to SEQ ID NO: 15493

SEQ ID NO: 99609 - DNA, 201 bp, Homo sapiens
gaagggaggtcgtgcgctcggggcggggcgcgctcccaagtcgagcgcagcggccggggcaggttgtaccgagcgtggttctggggacaccgtgcggcctygattggaggtggctgtgatgaagcgcggttaccgcacaatggaaacgtgggcacctccgctcccatgaaagcctgctggtagagctccgaggccggccgg

SEQ ID NO: 99610 - DNA, 201 bp, Homo sapiens; identical to SEQ ID NO: 15494

SEQ ID NO: 99611 - DNA, 201 bp, Homo sapiens; identical to SEQ ID NO: 15495

SEQ ID NO: 99612 - DNA, 201 bp, Homo sapiens; identical to SEQ ID NO: 15548

SEQ ID NO: 99613 - DNA, 201 bp, Homo sapiens; identical to SEQ ID NO: 15497

SEQ ID NO: 99614 - DNA, 201 bp, Homo sapiens; identical to SEQ ID NO: 15496

SEQ ID NO: 99615 - DNA, 201 bp, Homo sapiens
ggccgccccccgcgacatgatggacgcctttatcctctctgcggaaaagaaggcggccggggactcgcacggtggtggcgcgcggctggatttggagaacktaccggccactatcactgacatcttcggcgccagccaggacaccctgtccaccgcgctgcagtggctgctcctcctcttcaccaggtaaagcctctggga

SEQ ID NO: 99616 - DNA, 201 bp, Homo sapiens; identical to SEQ ID NO: 15500

SEQ ID NO: 99617 - DNA, 201 bp, Homo sapiens
ggcgtggggcgcccgctcctgtctctgcacccctgagtgtcacgccttctcctctctgtccccagcatgggcaccagcctcagcccgaacgacccttggcygctaaacccgctgtccatccagcagaccacgctcctgctactcctgtcggtgctggccactgtgcatgtgggccagcggctgctgaggcaacggaggcgg

SEQ ID NO: 99618 - DNA, 201 bp, Homo sapiens
aaataaattataatgtgctttctagatgaaataagaattttgctcacttgcttttctctctccacattaaacaccaaacaggtatcctgatgtgcagactygagtgcaggcagaattggatcaggtcgtggggagggaccgtctgccttgtatgggtgaccagcccaacctgccctatgtcctggccttcctttatgaagc

SEQ ID NO: 99619 - DNA, 201 bp, Homo sapiens; identical to SEQ ID NO: 15502

SEQ ID NO: 99620 - DNA, 201 bp, Homo sapiens; identical to SEQ ID NO: 15501

SEQ ID NO: 99621 - DNA, 201 bp, Homo sapiens
gaaataagaattttgctcacttgcttttctctctccacattaaacaccaaacaggtatcctgatgtgcagactcgagtgcaggcagaattggatcaggtcrtggggagggaccgtctgccttgtatgggtgaccagcccaacctgccctatgtcctggccttcctttatgaagccatgcgcttctccagctttgtgcctgt

SEQ ID NO: 99622 - DNA, 201 bp, Homo sapiens; identical to SEQ ID NO: 15506

SEQ ID NO: 99623 - DNA, 201 bp, Homo sapiens; identical to SEQ ID NO: 15505

SEQ ID NO: 99624 - DNA, 201 bp, Homo sapiens
cccgcagcgttgtccccagattgcaggaaccgttacgcgccttgcggggaggggaagggtttggcgctgggttacagcgaggtggaaacacgccccttctyttctccaagggagagtgggttggggatgggaaggggcgtcttcggccatttctccagagagtcagctccgacctctccacccaacggcactcagtcccca

SEQ ID NO: 99625 - DNA, 201 bp, Homo sapiens; identical to SEQ ID NO: 15507

SEQ ID NO: 99626 - DNA, 201 bp, Homo sapiens; identical to SEQ ID NO: 15559

SEQ ID NO: 99627 - DNA, 201 bp, Homo sapiens; identical to SEQ ID NO: 15560

SEQ ID NO: 99628 - DNA, 201 bp, Homo sapiens; identical to SEQ ID NO: 15570

SEQ ID NO: 99629 - DNA, 201 bp, Homo sapiens
aaagaaatatgcattccatgataagtttaataactgatcaaaaacagaaaaataataatgtgatggagacagattttcagtgaacactcaaatacatgaagaatgttgttgtttcttaattatgatggcagacttaattaaatatcagtataatctctcctatcttcacctccactagcaattgtgggttaattcaccttt

SEQ ID NO: 99630 - DNA, 201 bp, Homo sapiens
ctaaccactaaggtgctggtattagaaggtgaatcgttgcgggaggtgatgagttcatggagaaaaagcctgtttaaaagggattaatgctttaaaaaaamaatcctgagggaactcccccattcttccatgtgagaacatagcaatgagactgccatctatgaaccagaaagcaggtcctcatcagacaacagtctacgt

SEQ ID NO: 99631 - DNA, 201 bp, Homo sapiens
ctcttaggcacatctacatacaacttgttatccatccatgaatatgtaggtaaggatgttttcacttttttatcagcctggtttccttaggtatcaaatgkaaattcagatagaagaagccttaaacatgcacctgcatatgtagagatcatttctaaatttaacctttctgtcaagagtctaactgcctacaaaatggag

SEQ ID NO: 99632 - DNA, 201 bp, Homo sapiens; identical to SEQ ID NO: 15576

SEQ ID NO: 99633 - DNA, 201 bp, Homo sapiens
ctaaaattagacatcatgagacttagaggcaagtttaagtttgtgagactgtcatctggccatctagtccaattattatcagacttataattagattttcygacagataatagttcacgtggcttccagagtgaagagaaaaattcttaccctctgattctacaattatttgtggtatattatcataattaacccaatgga

SEQ ID NO: 99634 - DNA, 201 bp, Homo sapiens
tctattttacaacacaattaataaactgctttcaaggtaagtggctgaaacaatgacttaatgttgtttcccattaaaatgtattggccagggatggtggytcatgactattcccagcactttgggaggctgaggcaggtggatcacctgaggtcaggaggtcgagaccagcctggccaaccaacatggtgaaaccccatc

SEQ ID NO: 99635 - DNA, 201 bp, Homo sapiens; identical to SEQ ID NO: 15577

SEQ ID NO: 99636 - DNA, 201 bp, Homo sapiens
ttatcatttggtatttatgtagtattataagattaacataacaagtcacattccttaaaaaaattacagctttggtatttatgtagtattataagattaasataacaagtcacattccttaaaaaaattacagctagttgtgtttttccagaaattggctgctgaatattattagcatgcagagcatattagtccattctt

SEQ ID NO: 99637 - DNA, 201 bp, Homo sapiens
tatttacattgaatattatcttcatttcgatggtttcttgccagcatctgctcattcttaccaaaattagacggtcccagatgttaagagaattgtaattraatagatagcaacctaagagaagatttaattttcagagaagactcaagaaatctctctaataaatgttcaaattattcaaacaatgaagtttgcaaatgt

SEQ ID NO: 99638 - DNA, 201 bp, Homo sapiens
tatagcctaaaggtgtggtaggctatggcatctaagtttgcgtgagtacacttataatgtgtgcacaatgattagatcgcctaacaatgcatttcttagartgtatccctgtcaataaatggcatatgacaaggatacattatataatagtacctaaattatatataatagtacctaaatatcatgaatgtagaaatgctg

SEQ ID NO: 99639 - DNA, 201 bp, Homo sapiens
aatatacacaataaacataaagatcagtaaatttttaccaatatgtacaactccataaagataaagcataattccattgcctcagaataaagtcccccccsacctctttgcaaacagccatcttactccccatgtccagtcaatcactgattctatttttattatagattagttttaccttttctagagctttatattcat

SEQ ID NO: 99640 - DNA, 201 bp, Homo sapiens
ataatttgtagaattactaacgactatattttaggtaattatcatcaataaagtataatatgctatatgcagaaggcttataaaacattatacttacctckctttcagaaatcaatatgcatagcaaagtcacaatcatatgcatcagatttctcttttggtttcttttgctctgcatgcttattgggaagtcacatactg

SEQ ID NO: 99641 - DNA, 201 bp, Homo sapiens
tacattcgccaggctgccttcaccatgaattcttaaaagcagtcattaagtatgcttacaaaatgcatttggttgtaaacttgtaattttaaatgttagcatgcttatacctgcttggttaatgttatagaggtaagggcagagaacagactaaaattagacatcatgagacttagaggcaagtttaagtttgtgagactg

SEQ ID NO: 99642 - DNA, 201 bp, Homo sapiens
atgtacagaaggtatctgaatgatgaaggattttttgtgttgaacttttagaaaatttcaaccagagtttttcttaatatgatttagcataaggtagaatmagagcaaggaatgaattacttatctttgtcactttaatcttttgtttatgttagaaaaggctgaaaaactttatagtttcttgattattctaaataccac

SEQ ID NO: 99643 - DNA, 201 bp, Homo sapiens
gctgacgttgataataatgtgaaaattgacttgtgactagattttgtcttcttagtaataaacaagccaatatgaaataagaagacaaagaaagagaggcrgactaagaaaagaaggagaggaaagaggaaaacgtttaattttgattttgatttacttcaaactcaatattttatttactcattacggtgtattcacttt

SEQ ID NO: 99644 - DNA, 201 bp, Homo sapiens
atactaataacataaagatatattataaggaaatctacagatgtagtgactgtgtagagccacttttaaaaatctctgagttcctgtttgtgtgaccttgrcattaatatattattgagtgctataaaggtataaatgagctcaacactgtagatattgaaaagatagagtcgacagttattcattttcaaataacaacta

SEQ ID NO: 99645 - DNA, 201 bp, Homo sapiens
atgcataaattggtaaaaacagatttattgataaataatagaaccttgatttaaatggagaaaaaaactccgaagtttacatatttaaaaacacaataaaraatttctaaatattctgaacttggaaatatttatctaagagcacacacgcacattacataatatgatatgatataatattacatattataaacaaatagt

SEQ ID NO: 99646 - DNA, 201 bp, Homo sapiens
ctattttacatatttatatatttattaaatacaaatttaataagctttattggggtgataactaatgtaacacattatttttaacacattatttttctttkgcaaaaagtaaattatctgtctctaaggttacatatgttttaaatcaactgtattcttactacatagttatatgaataaggtcctcaatgtccttattta

SEQ ID NO: 99647 - DNA, 201 bp, Homo sapiens
cttgcttctatactttttcattcattcattcattcatagcctcttatttatttatcatttatttattcagaacctctctgaaatggttaatattttctaawgcttttttgccaggaataaatgttctgacatgtcacttttattttgtcctgttttgatatcataaaatcacaagctacttaacaaagtaatttggaagta

SEQ ID NO: 99648 - DNA, 201 bp, Homo sapiens
ttcttgatgattttgttattgcattctctaggattgttagcacaatattaaataatagatgtggagcatatagtttcaaatcttagagggatgagttcacmattttggtattgtctatattaactatagttttgcccttcgtcaaatttaggaaattctcttctattcctatttcttgagagtctttattataaatagata

SEQ ID NO: 99649 - DNA, 201 bp, Homo sapiens
attgtgatagtatgtccaaaagagtcagaaaaaataaccatttagaatatattttctaaatatgtatgtgtatctatagaaaataaagtagtttttttttctcccactacatttgtaaaccaaaaccacattttatacatgggagtaaattgcaccaatgtgaataatttaaaaaaaatagaaatttagaaatttacttat

SEQ ID NO: 99650 - DNA, 201 bp, Homo sapiens
gtggacttgtgcagttcagactcatgttgttcaaggtcaactgtgtgtatattttttaccttttcttttaaacatttgtagttgcaaatttgctttgcccytgcacacagagatttgctttggagaaacttgtttttaatatctctatacatatgtgtacgttataaatattcacaaactatcttaagtattagataatct

SEQ ID NO: 99651 - DNA, 201 bp, Homo sapiens
attttcaaaaattgccagtaaattttcttaattccaaacaaaaactcagttcctcaaaaactcaaattcctcaaaaactcaattcctcaaaaactagaatkgtctgaattccaaacaaaaactcctgtctttatttccaatattaaatactattttgataagcaaattgatctaaattcagatacacagctgtatttgtga

SEQ ID NO: 99652 - DNA, 201 bp, Homo sapiens
ggaagaaaatccacatgtaagtggacttgtgcagttcagactcatgttgttcaaggtcaactgtgtgtatattttttaccttttcttttaaacatttgtasttgcaaatttgctttgcccttgcacacagagatttgctttggagaaacttgtttttaatatctctatacatatgtgtacgttataaatattcacaaacta

SEQ ID NO: 99653 - DNA, 201 bp, Homo sapiens
taacatttagtattttttgttaaaatcagctagggaatattaatagtactttcaaaattgaattaaaaatacaaaaaaaaagatttgtcaccttttttatwtgaaagttattgttataacagtttagcattttcaaaaattgccagtaaattttcttaattccaaacaaaaactcagttcctcaaaaactcaaattcctca

SEQ ID NO: 99654 - DNA, 201 bp, Homo sapiens
cactagccatttagtcaaaagttcctcaagagtagtaaatgcctacaagttcgatttcaaacaattttccagggctgttagaccttaatgtgacaacactratatcctaagtccatatattcaattgtatctccttctatcctagaattcaacaaaactagttttttcgtcattatttgaactaagaagtagattaatcat

SEQ ID NO: 99655 - DNA, 201 bp, Homo sapiens; identical to SEQ ID NO: 15587

SEQ ID NO: 99656 - DNA, 201 bp, Homo sapiens
atgttaagagaattgtaattgaatagatagcaacctaagagaagatttaattttcagagaagactcaagaaatctctctaataaatgttcaaattattcamacaatgaagtttgcaaatgttcttcctaattgaggacagataaaacatcttaagtttcttatatctaatgtagtgtcttctatatgtatacatgcctaaa

SEQ ID NO: 99657 - DNA, 201 bp, Homo sapiens
tcatttcgatggtttcttgccagcatctgctcattcttaccaaaattagacggtcccagatgttaagagaattgtaattgaatagatagcaacctaagagragatttaattttcagagaagactcaagaaatctctctaataaatgttcaaattattcaaacaatgaagtttgcaaatgttcttcctaattgaggacagat

SEQ ID NO: 99658 - DNA, 201 bp, Homo sapiens
ttacattgaatattatcttcatttcgatggtttcttgccagcatctgctcattcttaccaaaattagacggtcccagatgttaagagaattgtaattgaawagatagcaacctaagagaagatttaattttcagagaagactcaagaaatctctctaataaatgttcaaattattcaaacaatgaagtttgcaaatgttct

SEQ ID NO: 99659 - DNA, 201 bp, Homo sapiens
aaattttgacaaaagctgaaaagtatgtcagacataagtttagagaagttcagcaaagggcccaggagttggtaggcagaaaagaaatcaggccagcaagkgttggaaaatggggactctagggacaagctgcatttctaagatttggctgaattcctgaagattggcccttggctaggcagggctcagcatgcacgtttc

SEQ ID NO: 99660 - DNA, 201 bp, Homo sapiens
tctgttttgttctcctaattttttgttgttgttgtttgtttgtattgtcctagttttttaattgtataaatatgtttgggatgtattccatatttcatttytataaaacataagctactaatagctaaacaagtcacatcttatctataaatttggttccttcttcgagtcatttcttgataagtataatatatatttaca

SEQ ID NO: 99661 - DNA, 201 bp, Homo sapiens
aactgatctggaaaaaagtaaatgagaacagttcttgatttttgtaatggggagtgggtaagacaattacatgctaagccaaatgttgttaatacacaagrtattttaaaatgattgggacaatttgaaaatagatattcatctttttactaaattttaattgtaataatcagaaattgcagatttgacagattcctaaag

SEQ ID NO: 99662 - DNA, 201 bp, Homo sapiens
aagacgtcgttgttccaatttcttcaaatacatttaagagcgcttgttctagatcacattaatattatctagatggctctttctctaccattttaagaggrtttatttccaagtagaaataaatatttatttaattgtaactttttaaaagatagggaaattatacacagggaaaatattttgaatatttgcttgaacatc

SEQ ID NO: 99663 - DNA, 201 bp, Homo sapiens
caatgatttcaattttactataatgtctctattttattatttaggaatccaaatgagactcagaacaatagcacaagctggcctgtcttcaaaagcactgwacaaaaatatctaaccttgaatacagagtcaacaagaataatgacgaaactacgtgctcaacaatgtcgattctggacatcattttttccaaaagtcttg

SEQ ID NO: 99664 - DNA, 201 bp, Homo sapiens
cctgctcctttcctctttatatctaatctatctgccaagtaatggctctacctacaaaatacatgtaagatctgactaattatttcaatttctgccactaygtctctagttcaagcaaccaacacttctcacctaaattattttagtagcctcctaattggtcaccttgaaccatctgtagttattcccagcactacagac

SEQ ID NO: 99665 - DNA, 201 bp, Homo sapiens; identical to SEQ ID NO: 15573

SEQ ID NO: 99666 - DNA, 201 bp, Homo sapiens; identical to SEQ ID NO: 15572

SEQ ID NO: 99667 - DNA, 201 bp, Homo sapiens
aattttactataatgtctctattttattatttaggaatccaaatgagactcagaacaatagcacaagctggcctgtcttcaaaagcactgaacaaaaatawctaaccttgaatacagagtcaacaagaataatgacgaaactacgtgctcaacaatgtcgattctggacatcattttttccaaaagtcttggaaatgacag

SEQ ID NO: 99668 - DNA, 201 bp, Homo sapiens
aacaatagcacaagctggcctgtcttcaaaagcactgaacaaaaatatctaaccttgaatacagagtcaacaagaataatgacgaaactacgtgctcaacwatgtcgattctggacatcattttttccaaaagtcttggaaatgacaggtgtgtctgtttttagtgtttggttatttaatagatgatgggttatgtaaaaa

SEQ ID NO: 99669 - DNA, 201 bp, Homo sapiens
aaaaatttaaatgaattaacatgaagaactcagtgaaacattttcttcagttttgtaatattttagctctaaaattaaaaaggaaatgaaaattagatacmatttacatttcctactccgctccaccaaccccccaaaaaagtaataatttcttaaggaaaatatgatcgatcatagttgttttaaagttagagattttga

SEQ ID NO: 99670 - DNA, 201 bp, Homo sapiens
ttcaccactgaagttaactgatctggaaaaaagtaaatgagaacagttcttgatttttgtaatggggagtgggtaagacaattacatgctaagccaaatgytgttaatacacaagatattttaaaatgattgggacaatttgaaaatagatattcatctttttactaaattttaattgtaataatcagaaattgcagattt

SEQ ID NO: 99671 - DNA, 201 bp, Homo sapiens
ttgttttaaagttagagattttgattgtatttatttaacataacctcctaaagacacggtgtcatgatttataattgtttctataagattatagtgttctrgtcatgctgttttctttctctaatttaataactgagttttgcataatcattcaatactgtcataaagagaaccaaatatggccattaaacaattagaata

SEQ ID NO: 99672 - DNA, 201 bp, Homo sapiens
atacagattatatatttcctgtggggttcttctcttctcctcttctcctctcctctccctttctcttcccttcttttttctcataaaaacctatatccaarttctctgtgaagctgaggatgtattccaatccacaagtcaggaatgatgaaacagtaaaagtttaataagctacttggccatggactcttatagcacagt

SEQ ID NO: 99673 - DNA, 201 bp, Homo sapiens
aaatggaaagagaaaaaaattataaatagacatttgtggtggttttaaatgggttatctttcctaggtagttgacagttaactagtttctgaatgttttcwggacatcttatcagatgtataacaagatacctaatagaaatataatttatcttttaaaaagtcttttttgtcaactaatttgataacatttacagagcct

SEQ ID NO: 99674 - DNA, 201 bp, Homo sapiens
cctaagtccatatattcaattgtatctccttctatcctagaattcaacaaaactagttttttcgtcattatttgaactaagaagtagattaatcattaatrtctatgttaattctatccctttttctagctttcccgactttcctttctagctcaggtccttatttcctctctttcagccagattcccattccatcaggta

SEQ ID NO: 99675 - DNA, 201 bp, Homo sapiens; identical to SEQ ID NO: 15583

SEQ ID NO: 99676 - DNA, 201 bp, Homo sapiens
tctagctcaggtccttatttcctctctttcagccagattcccattccatcaggtaatttcctttcaagcatgtaatgactgctccttcttctgaacaattygtggccctttttttagactcggtttatgctatcttatgttgtagttctttgtttccctgggttttcttgcttataaattccctgaggaaaactttgtgtt

SEQ ID NO: 99677 - DNA, 201 bp, Homo sapiens
tgcactctagcttggcgacagagtgagactccatctcaaaagagacattagttcatttaaatgatatttgcatcacattttgctgtccctctttgtcacasagtttccaaatctgatttttaatttcttttttattgaaaagaaactcacatctgcattatgaatttctgataaaacttagatctcttctaatagtctatg

SEQ ID NO: 99678 - DNA, 201 bp, Homo sapiens
attcgtggccctttttttagactcggtttatgctatcttatgttgtagttctttgtttccctgggttttcttgcttataaattccctgaggaaaactttgygtttcatatttatatttctagaggctagatctgtgtctaactcatactaataacataaagatatattataaggaaatctacagatgtagtgactgtgtag

SEQ ID NO: 99679 - DNA, 201 bp, Homo sapiens
cttcctcaattccccacttcacttagtctgcaacaaaacaagctttttaagtttgatataaagacgtcgttgttccaatttcttcaaatacatttaagagmgcttgttctagatcacattaatattatctagatggctctttctctaccattttaagaggatttatttccaagtagaaataaatatttatttaattgtaac

SEQ ID NO: 99680 - DNA, 201 bp, Homo sapiens
agtgctctgtgtattaccaaatgttctgtgacataatatataaccagggatgggattctgcttctcttggcagagcaacagtgccatccttttgtcctccrggtgtaaataacgaagaggtaactcattaatatgccaagagacccaaagagatactatcatttatcatatcacatactatatattattaatctttattta

SEQ ID NO: 99681 - DNA, 201 bp, Homo sapiens
atcaacataataatttcatttctgaggtagggtctttcttccaaatagctgcttttgtttgctggttcattcgcatcaggaatatattcacttctcttatwtttattttattttatttatgctttaaaaattattgtaaactggctttttcttgttttagtgtaaaagtatttactagtaaatttgcctctgaatgcaaat

SEQ ID NO: 99682 - DNA, 201 bp, Homo sapiens; identical to SEQ ID NO: 15584

SEQ ID NO: 99683 - DNA, 201 bp, Homo sapiens
tttgtgtccccctaaaattcatatgttgacatcctaaccactaaggtgctggtattagaaggtgaatcgttgcgggaggtgatgagttcatggagaaaaarcctgtttaaaagggattaatgctttaaaaaaaaaatcctgagggaactcccccattcttccatgtgagaacatagcaatgagactgccatctatgaacca

SEQ ID NO: 99684 - DNA, 201 bp, Homo sapiens
tcaattgtgaaaaataaattgctgttgtatataagctatccagtgtatgatgttttgttatggcagtctgaatggactaaaatattttctaattccttagrctttgttaaatagacttagctctggtgaaaatttactcagtgtcctttttggctagacaaaaaacaacaaccacacacaaaaaacttatcattattattt

SEQ ID NO: 99685 - DNA, 201 bp, Homo sapiens
cttatttactcatttattttttggccttgatttttaccatgcctgctatacatttgccaactctatttttttcttttatttacatttctgctatatatttscccttgttcttttatcttcacttctctatattaccgtattttacacgtattatttaaatgccatcagctgaggtcaatggataaatactatgtgacctat

SEQ ID NO: 99686 - DNA, 201 bp, Homo sapiens
ctcatttattttttggccttgatttttaccatgcctgctatacatttgccaactctatttttttcttttatttacatttctgctatatatttccccttgtycttttatcttcacttctctatattaccgtattttacacgtattatttaaatgccatcagctgaggtcaatggataaatactatgtgacctattgttgata

SEQ ID NO: 99687 - DNA, 201 bp, Homo sapiens; identical to SEQ ID NO: 15590

SEQ ID NO: 99688 - DNA, 201 bp, Homo sapiens; identical to SEQ ID NO: 15592

SEQ ID NO: 99689 - DNA, 201 bp, Homo sapiens
gaaatttgtatgacttaaataagtgttgaagtgtgggggttgaaaggagatacatatcagagacatccattcagttaatagaactaagtttttgatttgcrtagcttatatctagagcattgtgtttcttattttctatattactatcttctctaactatataattagcacagattgaagctataatggatttcaataata

SEQ ID NO: 99690 - DNA, 201 bp, Homo sapiens
ccgagtagctgggattacaggtgcccgccatcactcccagctaatttttgtatttttattaaagacggggtttcaccatgttggccaggctggtgttgaamttctgacctcgtgacctgcccacctcggcctcccaaagtgctggattacaggcgtgagccaccgtgcctggccagtcttgttctttctttgtgcaaaccc

SEQ ID NO: 99691 - DNA, 201 bp, Homo sapiens
caaagacatacatggcactaaataatgtgaacttactgtcccctctccaacctcacctcctacactcattcccttgctccctccactctagtcacactgtcccctttgctttccttggaaaactctaagcacgtgtttttctcatgatctttgttttccatcccttctactgaaatactatttccccaaacaactatttgg

SEQ ID NO: 99692 - DNA, 201 bp, Homo sapiens
ccacagcctcaccagcatctattgtttcttgactttataataattgcctttctgactggtgtgagatggtatctcattgtggttttgatttttatttctcyaatgatcagtgatgttgagctttttttcatacgtttgttggccacataaatgtcttcttttgagaagtgtctgttcgtattatgtgcccactttttgatg

SEQ ID NO: 99693 - DNA, 201 bp, Homo sapiens
tttataataattgcctttctgactggtgtgagatggtatctcattgtggttttgatttttatttctctaatgatcagtgatgttgagctttttttcatacrtttgttggccacataaatgtcttcttttgagaagtgtctgttcgtattatgtgcccactttttgatggggttgtttgcttttctcttataaatttgttta

SEQ ID NO: 99694 - DNA, 201 bp, Homo sapiens
ttctgcatatggctaaccagttttcccagcaccatttattagatagggaatcttttccccattcttgatttttcaggtttgtcaaagaacaaatggttgtmgatgtatgatgttatttctgagatttctgttttgtgtcattggtctatatgtctcttttggtagtaacaccatgctgttttggttactatagccttgtag

SEQ ID NO: 99695 - DNA, 201 bp, Homo sapiens
tttttcaggtttgtcaaagaacaaatggttgtagatgtatgatgttatttctgagatttctgttttgtgtcattggtctatatgtctcttttggtagtaayaccatgctgttttggttactatagccttgtagtatagtttgaagtcaggtagcatgatacctacagctttcttctttttgcttaagattgtttttgctat

SEQ ID NO: 99696 - DNA, 201 bp, Homo sapiens
taacactgaatgtcagtgcagtccaatttacaggctggagcagcagctgcatcctgcatttccccgaagtattacatgattttcactccttgcaaactttrccatctttgttgcagagaatcgggtaagttgctctgaatttacaccttcgtgtagagatccaagttactgtaaagctcattctgtgggatgagagtgatc

SEQ ID NO: 99697 - DNA, 201 bp, Homo sapiens
ccttttgtcctccaggtgtaaataacgaagaggtaactcattaatatgccaagagacccaaagagatactatcatttatcatatcacatactatatattaytaatctttatttaaaatatttttatatgagagggttataatttgagatataatgagtgggttattttaagtgacttatttattataagccaagctgagcc

SEQ ID NO: 99698 - DNA, 201 bp, Homo sapiens
taaacaatatctgtaattcagaattttttgaaaagtgagagagtgagtgagaaattttcctctacagttagccattagtccccagattcaatgaggttaayttatcttgacctgtctttcatctggttaaaaatcacgccattagagtttgcagtagaaagaggaggcagagcaagatggcagaacagaagctactacagg

SEQ ID NO: 99699 - DNA, 201 bp, Homo sapiens
tcaactttaaatttcaattcttacaattttaaataacatagtggttctcagtgctcaaaccactaagcccagttcacatacgtttcatatcatcaatatayatccacattttttctgtcttaaattctttaaagctcttgtgaacagtgttagaaaacaatattctttttaatctaacaatgatttcaattttactataat

SEQ ID NO: 99700 - DNA, 201 bp, Homo sapiens
aaacatttacacagcactttcattatattaggtatgaattatctagggatgtgcatggcttatgtgaaaatgttatgctattttacattagggacttgagyatgagaggattttggtatccctgagaggtcgtagaaccaactccccacaaatactaaggatgactgtagtcatatataattttcatcagaaataattatc

SEQ ID NO: 99701 - DNA, 201 bp, Homo sapiens
cacacaaaaaacttatcattattattttcatagaagagaaaacgattttttttccaaatgtgacaatacatgcaaaacaaagatcacaaagaagtgaactsaaaaagttatgccaatgtgtttataaatttaccgtttcacaaattgccttccacgactattcccttctctttaccctgtgaggcattaaacaaaaaattg

SEQ ID NO: 99702 - DNA, 201 bp, Homo sapiens
aaaattgattcccatcttttctatctccccaaaacccacacacaaagcaagttgtctctgttttacaatcacaacaagacttggtgacatttgaaataatyttaaagtactaaaatcattcatattactgagttggttaaaaaggatattattattgatttaaaattgggcatagaaagctgaagaataaaaatataacaa

SEQ ID NO: 99703 - DNA, 201 bp, Homo sapiens
gttcccctccctgtgtccatgtgttctcattgttcagctcccacttatgagtgagaacatgcagtattcggttttctgttcctgtgttagttgtgttagtytgctgatgatggtggcttccatcttcatccatgtccctgcaaaggacattatctcatacttttttatgacttcatagtattccatggtatatatgtgcca

SEQ ID NO: 99704 - DNA, 201 bp, Homo sapiens; identical to SEQ ID NO: 15589

SEQ ID NO: 99705 - DNA, 201 bp, Homo sapiens; identical to SEQ ID NO: 15591

SEQ ID NO: 99706 - DNA, 201 bp, Homo sapiens
tatacatttgccaactctatttttttcttttatttacatttctgctatatatttccccttgttcttttatcttcacttctctatattaccgtattttacaygtattatttaaatgccatcagctgaggtcaatggataaatactatgtgacctattgttgatattatgaattaagacactttttatacatattattatata

SEQ ID NO: 99707 - DNA, 201 bp, Homo sapiens
accaaatgttctgtgacataatatataaccagggatgggattctgcttctcttggcagagcaacagtgccatccttttgtcctccaggtgtaaataacgawgaggtaactcattaatatgccaagagacccaaagagatactatcatttatcatatcacatactatatattattaatctttatttaaaatatttttatatg

SEQ ID NO: 99708 - DNA, 201 bp, Homo sapiens
aagacactttttatacatattattatatagtatgatcattgtagtatgaataaagaggactttatatttactctctacataagaatctggaaaggtcaatygattcatttttctttataaaatataattaaaaccataatatattatggtagtctttccattatgttcacagtgtccaaaacacaaaatgttaccactata

SEQ ID NO: 99709 - DNA, 201 bp, Homo sapiens; identical to SEQ ID NO: 15594

SEQ ID NO: 99710 - DNA, 201 bp, Homo sapiens
atcaagtttaatccttgtttataatgtgccagccctaaattttttattatgatgttccagccacttaagttacatggtttttaatcatgaatattgctgaygttgataataatgtgaaaattgacttgtgactagattttgtcttcttagtaataaacaagccaatatgaaataagaagacaaagaaagagaggcagacta

SEQ ID NO: 99711 - DNA, 201 bp, Homo sapiens; identical to SEQ ID NO: 15571

SEQ ID NO: 99712 - DNA, 201 bp, Homo sapiens
gtatgaattatctagggatgtgcatggcttatgtgaaaatgttatgctattttacattagggacttgagcatgagaggattttggtatccctgagaggtcstagaaccaactccccacaaatactaaggatgactgtagtcatatataattttcatcagaaataattatctgttatataactatatatgtaaatgagacca

SEQ ID NO: 99713 - DNA, 201 bp, Homo sapiens
ttaatctgttcataaaatgagttatcaactatgtgctgaaatatcaatgacaagcaagtaattttctgtaacacagatgtaaaaaaaaaagatactctgcttttttttgttgttaagttagctgtgtcttaaaacctttcaaacctacatatgaagaaaattctaatgggtgatctgtagagcattttggtataccacaaa

SEQ ID NO: 99714 - DNA, 201 bp, Homo sapiens
tacacatccatggatttaaccaaccacgagtcaaaaacatttgataaataaatacatctatactaaacatatacagacctttttttcttatcattattccytaaacaatataatataataaacatttacacagcactttcattatattaggtatgaattatctagggatgtgcatggcttatgtgaaaatgttatgctatt

SEQ ID NO: 99715 - DNA, 201 bp, Homo sapiens
tctgctattacggagccttaaagtctaatggaggtgattagtcaaatgttgggacctccagtgaatagtgatataaagtcaataactttgaattcaagaayaattatttgatatgctgaaactacccattaaagaaaaacatcacaattaaatttttgtataattttcttggagtattatttcccaagtcttttctaatat

SEQ ID NO: 99716 - DNA, 201 bp, Homo sapiens
ctcagcttattaatttatttccatcttatcaaataaatatttccctacaccaacatttgtgaagactggtttttttttctgttttcttcttgctttatggktttagctttttacttttgattcataatatatttacattcatatctgtgaacttttaatgtaggcattgaggttcattatttcccatataaatattcagat

SEQ ID NO: 99717 - DNA, 201 bp, Homo sapiens
acataatatataaaagtatgctttaagtgggcacttgattcccagttagaaatttaggattaaaaaaacacactacatctcagcaacggtgaaaatacgtsaagattttgatttggattaaaaagaaaaaatatttctttgtgcttaaggcattttatactccattttatttcttgaacagaacagagcttaacaatactg

SEQ ID NO: 99718 - DNA, 201 bp, Homo sapiens; identical to SEQ ID NO: 15578

SEQ ID NO: 99719 - DNA, 201 bp, Homo sapiens; identical to SEQ ID NO: 15579

SEQ ID NO: 99720 - DNA, 201 bp, Homo sapiens
attttttcacttttaatcatggaatgtgtgtcacattctaggcaaggtcattccaataaaaaaatgcatgttaagtaagaactggtggatctaattgaaaygcagagattctatcagtaaaatcaagagtaactacaaatttccagctgcgtacttaccatctccatttggatgtaaaatttaacacgtgaacttaacatg

SEQ ID NO: 99721 - DNA, 201 bp, Homo sapiens
tgagactcagaacaatagcacaagctggcctgtcttcaaaagcactgaacaaaaatatctaaccttgaatacagagtcaacaagaataatgacgaaactaygtgctcaacaatgtcgattctggacatcattttttccaaaagtcttggaaatgacaggtgtgtctgtttttagtgtttggttatttaatagatgatgggt

SEQ ID NO: 99722 - DNA, 201 bp, Homo sapiens; identical to SEQ ID NO: 15581

SEQ ID NO: 99723 - DNA, 201 bp, Homo sapiens
acctataattttactttttcacttctgagcaagatagtttcgattcttgggtgtttatattctactaattaaaatataacattgctgctattttcatgacygattttttaaaataaagatttcttgcgtcttaaatatcaattaggtaatgcagctctacttgtatcgtcactgtgcaataaatttcagtcaatttaacgt

SEQ ID NO: 99724 - DNA, 201 bp, Homo sapiens
ttccaaattctactggacttagagactttggccaaacaaaacaaaacaaaacaaacttagatcggctcatactactccaaaatttctatctattaataatrtacagaaggtatctgaatgatgaaggattttttgtgttgaacttttagaaaatttcaaccagagtttttcttaatatgatttagcataaggtagaatcag

SEQ ID NO: 99725 - DNA, 201 bp, Homo sapiens
atttggtatgatatttaacatctttcttccacatctaatcttttttgaccctttatagaagttctattattcaccaaaaaattgtgattatagtgactgayctttttaaaagccatttttacatgaaagtgaaacactttatgtaaactttcaaatatttttccaatgtccaagcattgtgaacatttcaaacctaaatat

SEQ ID NO: 99726 - DNA, 201 bp, Homo sapiens
attaccaaatgttctgtgacataatatataaccagggatgggattctgcttctcttggcagagcaacagtgccatccttttgtcctccaggtgtaaataaygaagaggtaactcattaatatgccaagagacccaaagagatactatcatttatcatatcacatactatatattattaatctttatttaaaatatttttat

SEQ ID NO: 99727 - DNA, 201 bp, Homo sapiens; identical to SEQ ID NO: 15585

SEQ ID NO: 99728 - DNA, 201 bp, Homo sapiens
aaaatggcttttgtattcgaaattatttttcagttaatgaaacagataaaaattttgattaatacaacttattccatattttacaggaaatattgatgaarcagaatgggagtggaaagcaggattccatcgctggaacaattacatgatggactggaaaaatcaatttaacgattacactagcaagaaagaaagttgtgt

SEQ ID NO: 99729 - DNA, 201 bp, Homo sapiens
aaagcagatttagatttatagagcatttgtgaactaaaaagcatttcaaaatactaaattgtatagacatttgataagacacataggaaaaaatgtaaatktatgtaaatcagtgattttggtattattccatgaataaaaaaggaaaatcagatctaggactctttctataaggattaaaattcatggtctaaattttaa

SEQ ID NO: 99730 - DNA, 201 bp, Homo sapiens; identical to SEQ ID NO: 15588

SEQ ID NO: 99731 - DNA, 201 bp, Homo sapiens; identical to SEQ ID NO: 15593

SEQ ID NO: 99732 - DNA, 201 bp, Homo sapiens
aaccccatctctactaagaatacaaaaattagctgggtgtggtggtgcacgcttttaatcccagcaactctggaagctaaggcaggagaatcgtttgaacmcaggaggcagagaatgcagtgagccaagattgtgccagtgcactccagcctgggcaacaagagcaaaactctgtctcaggagaaaaaaaaaaaaaaaaag

SEQ ID NO: 99733 - DNA, 201 bp, Homo sapiens
cttcacttagtctgcaacaaaacaagctttttaagtttgatataaagacgtcgttgttccaatttcttcaaatacatttaagagcgcttgttctagatcayattaatattatctagatggctctttctctaccattttaagaggatttatttccaagtagaaataaatatttatttaattgtaactttttaaaagataggg

SEQ ID NO: 99734 - DNA, 201 bp, Homo sapiens
aaattagtcactaaattttctcctccaaagtaatatcttacaaagtttaattaatttcaaagatttctaactgaaaagtatatattaaaagagttgccagyccctattttcagtatacatgaaattacttaaaattttttgttagtttaatgactgtagcttagcattctaaaagtttaaaaagaaaaccacagttatata

SEQ ID NO: 99735 - DNA, 201 bp, Homo sapiens; identical to SEQ ID NO: 15567

SEQ ID NO: 99736 - DNA, 201 bp, Homo sapiens
acccggctgacaatttcttaaaataagacaatgaagtttgctacatcgattaactcttctatgaaagagttctccatagtgtacattttacccgcagtagmacttctttcaaaattgtagtcaatcctctcaaaccctgctgttgttttatcaattatgcttatagaatattccaaaatctttattgtcattttaacagtg

SEQ ID NO: 99737 - DNA, 201 bp, Homo sapiens
tacatggggtttttttgtagaatgatttatttctttgggtacatacctggtagtggcatcactgggtccaatggtagctctgtttttagttctttgagaaractccacactgctctccgcagtggctgaactcattgacatccctgccagcagtgcttgagtttcccttttctctgtagcctctccagcatctgttatttt

SEQ ID NO: 99738 - DNA, 201 bp, Homo sapiens
ttggcgagttagatgagggggtgtctcggggtgtgtggacgctctgctcccatcagacctccacatgctgtttgctggtctccccagaacctgtgggcagyggcaccttggctttagtatgctgttgttctttttttctttatttttgtctgtgtttcccttctttgttacctcttagaaaatgctgagttctttctcttt

SEQ ID NO: 99739 - DNA, 201 bp, Homo sapiens
cccgatggtagtttatgtcctcaggaggagaaactgccatgtccccgtctgaaccaggcccggagtcttgatgcatagctctttgcctccctgggtatacycgacagcttgttgagagtgcgtgtgctctgagttgaacacaaatatatttctgttgtttgaaggttattataaagtttctaacttacagagttggcactc

SEQ ID NO: 99740 - DNA, 201 bp, Homo sapiens
ttgctggtctccccagaacctgtgggcagcggcaccttggctttagtatgctgttgttctttttttctttatttttgtctgtgtttcccttctttgttacstcttagaaaatgctgagttctttctctttattaccaattcttagcggaagatggtctagtagacacctctgtgggggcaaatttttacttttcctttgtc

SEQ ID NO: 99741 - DNA, 201 bp, Homo sapiens
aggtgcttgcctctctgcctgctggggccatggtggttttcaaagaaggccctggccgtagggaacatggtggtggtgaggagcagcgtaaaccagagaaraaggctcagtaagtgcttcaaggagaaacaccggcaggtgagagcaggggtaatcccagtttctcaggaaagcatgctccggagacctcatagggagagg

SEQ ID NO: 99742 - DNA, 201 bp, Homo sapiens
tcccaagtagctattattacagatatgtaccaccacacctggctaatttttgtatttttagtagagacggggtttcaccatgttggccaggctggtcttgwactcctgacctcgtatgatccctcccaccttggcctcccaaagtgctgggattacaggtgtgagccaccacgcctggcctaaaaaacagctttatttggg

SEQ ID NO: 99743 - DNA, 201 bp, Homo sapiens; identical to SEQ ID NO: 15640

SEQ ID NO: 99744 - DNA, 201 bp, Homo sapiens
tgtgacagaattcttttctgttgcctattatattagttttctagtgctgctttaacaaattaccacaaaccgagtggcttcacacaaacggaaattaggartctgaaatctgagatgggtctcactgggctaaatcaagatgctggcggctgttgaacggtggctctcggcaaatgcacgttcttacctcttgcgccttca

SEQ ID NO: 99745 - DNA, 201 bp, Homo sapiens; identical to SEQ ID NO: 15643

SEQ ID NO: 99746 - DNA, 201 bp, Homo sapiens; identical to SEQ ID NO: 15644

SEQ ID NO: 99747 - DNA, 201 bp, Homo sapiens
caaggaaggatgaatagatctcaaggaattcagctttgctgattatagcagctgtgagtacctctcatgaactgtttgaaggatgagggcataaattctasatgaggcaacctctttataccattctaggttttaattcatgttccccaatcctttattaataggccacttgcattttttttcatgtctctattttttgct

SEQ ID NO: 99748 - DNA, 201 bp, Homo sapiens
attacaggcacccgccaccgcactcagctaatttttgtttgttttttgagatggaatcttgctctgtcacccaggctggagtgcaatggcacaatctcagstccctgcaacctctacctcccaggttaaagcgattctccttcctcagtctcctgagtagctgggattacaataggcgtgcgccaccgtgcccggttaatt

SEQ ID NO: 99749 - DNA, 201 bp, Homo sapiens
gtttcaccatgttggccagggtggtctcgatctcctgatctcgtgatccgtccaccttggcctcccaaagtgccaggacaggactacaggcgtgagccacygcgcccagccagtttttgtatttttagtagagatggggtgtcaccatgttggccaggctggtctcaaactcctgaccttaggtgatccacccgcctttgc

SEQ ID NO: 99750 - DNA, 201 bp, Homo sapiens
tctcgtgatccgtccaccttggcctcccaaagtgccaggacaggactacaggcgtgagccactgcgcccagccagtttttgtatttttagtagagatgggstgtcaccatgttggccaggctggtctcaaactcctgaccttaggtgatccacccgcctttgcctcccaaagggctgggattacaggcgtgagccaccgtg

SEQ ID NO: 99751 - DNA, 201 bp, Homo sapiens
attggatgtagcacggagcagttgagatcattgaatgcaagtggctcattttgttagtaagtccccgagggcggttggccctgtgcgtggaacctatacgsagcggccccaacgcttctgccgcaaagtcgcttggaaggtggtttctctgtctttcttattttttgtgcggcggaggccttacttttttgctgagactgg

SEQ ID NO: 99752 - DNA, 201 bp, Homo sapiens
cagagcccctgtgcgtgccgccccagcccctcccagcagaggctgcctcaatcttactgttacagcagctacttccttattctttgttgttttgactgaaytgagtacctctaaatattagttaagtttttccttttttttttttttttttttttttttagacttaagtcttgctctgtcgcccaggctggagtgcagtgt

SEQ ID NO: 99753 - DNA, 201 bp, Homo sapiens
gtgatccacctgcctcagcctcccaaaatgctgggattacaggtgtgagccaccgcacccggccagcctttcagtctgaatctacaggttacattatccaycccacctcccgtggaagtattttctgaggtaacttggtggttggactcgtgtatctcacggtctagattttgctggctgcattcttctggagaggcccag

SEQ ID NO: 99754 - DNA, 201 bp, Homo sapiens; identical to SEQ ID NO: 15630

SEQ ID NO: 99755 - DNA, 201 bp, Homo sapiens
ccgcacccggccagcctttcagtctgaatctacaggttacattatccatcccacctcccgtggaagtattttctgaggtaacttggtggttggactcgtgyatctcacggtctagattttgctggctgcattcttctggagaggcccagtgtgttcctctatcctttggtttcttgtagattgtgtttggttggttggttg

SEQ ID NO: 99756 - DNA, 201 bp, Homo sapiens
ttccactttggatgaataaagtgctgtattttaaagttccttgacaaatactcttgttttattttttattttatttatttttcccaagaaagaaataagacaaatattattttctctggttatgttgcccatttgtttcagatcatttttagatttaggattttttacaaattttatgtacaaaataattacctgttataa

SEQ ID NO: 99757 - DNA, 201 bp, Homo sapiens
gtttgtttgtttgtttattctcactctgtcactcaggctggagtgcagtgttacaatctcggctcactgcaacctctgtctcctggattcaagtgattctsctgccttagctccctgagtagctggaattacaggcacccgccaccgcactcagctaatttttgtttgttttttgagatggaatcttgctctgtcacccag

SEQ ID NO: 99758 - DNA, 201 bp, Homo sapiens
ccctgaggggctgacttcctccaaagctgctcctcatcgaggcccacctggtggtctctgctccacctgtttgctgcagggagcagggtcgggagcatgtrcatttcggagagctctggttgctccgtcatagaagccatgctccacatcctgtaagtgagagactccccagcagcgttcagccatagctgcgatgtcagg

SEQ ID NO: 99759 - DNA, 201 bp, Homo sapiens
gagagtcaagaccaacctagaatgagatgtctgttttgaagagagaacagctgggttcttctcgacccacagggatgcacggcccaccttgtaggttggaggggaggagcgtggaggacaagatcatcctggaatgagaacataagggctggggaatggggcggcgctgccaccagggaggagagatgcctgaaattagga

SEQ ID NO: 99760 - DNA, 201 bp, Homo sapiens
gagtcaagaccaacctagaatgagatgtctgttttgaagagagaacagctgggttcttctcgacccacagggatgcacggcccaccttgtaggttggaggsgaggagcgtggaggacaagatcatcctggaatgagaacataagggctggggaatggggcggcgctgccaccagggaggagagatgcctgaaattaggaca

SEQ ID NO: 99761 - DNA, 201 bp, Homo sapiens
tccgtgttgcgtgtatccattcattcttttgttattgctgcataatgatccattgtagggctgtatcacaatttgtcttctagtttttagatactacatawaaagctgctgtgaattttatatgtaagtcttcatacagaggccaggcgtggtggctcatgcctgtaatcccagcactttgggaggccgagatgggcggat

SEQ ID NO: 99762 - DNA, 201 bp, Homo sapiens
caccagtttggccaggatgctcttgatctcctgacctcgtgatccagctgccttggcctcccgaagtgctgggattacaggcgtgaaccaccatgcccagcctttttttttttttttttttttttttttgagacggagtctcactctgtcgccaggctggagggcaatggctcgatctcagctcactgcacctcgacctcc

SEQ ID NO: 99763 - DNA, 201 bp, Homo sapiens
ctgtcttctccatttttttctctaatcaatatttgtagaagcttatcaattttattgctctttcccaagaaccagagtttggtttcattgattttttttcttttttttttatttcattgatttcacatctttattgtttttttcttgctgcttactttgggattaaatttgctttacttttgtgtgttttttctttgatac

SEQ ID NO: 99764 - DNA, 201 bp, Homo sapiens
attacagatatgtaccaccacacctggctaatttttgtatttttagtagagacggggtttcaccatgttggccaggctggtcttgaactcctgacctcgtrtgatccctcccaccttggcctcccaaagtgctgggattacaggtgtgagccaccacgcctggcctaaaaaacagctttatttgggtataattgatataca

SEQ ID NO: 99765 - DNA, 201 bp, Homo sapiens
taattcatgttccccaatcctttattaataggccacttgcattttttttcatgtctctattttttgcttattttgcaatttgggggtattgtcatcctgtraacggattgcaggaagtcagagaacaagtttttcgattccagttttccattatacagtttttttctatacatatttaggcagatggagccatgacggtag

SEQ ID NO: 99766 - DNA, 201 bp, Homo sapiens
gggggtattgtcatcctgtgaacggattgcaggaagtcagagaacaagtttttcgattccagttttccattatacagtttttttctatacatatttaggcrgatggagccatgacggtagaggttaaaatgtgtgatttagttccatgcttaatttgatttcatctcttataggtaatgcacaagggtcacgtgtatgctc

SEQ ID NO: 99767 - DNA, 201 bp, Homo sapiens
agggtagcagtgggcagtgtgtggaggccagaggcctctcacgtccacccaccccaaaggcactgccctgggggacagctgagtgaggagagagggagacrcccttgaagcagggaggggagagttggagggagtcacatgtgggagtgaagcccaggaggaggaggaggggcaggagcattgccgctgggggcagacagg

SEQ ID NO: 99768 - DNA, 201 bp, Homo sapiens; identical to SEQ ID NO: 15639

SEQ ID NO: 99769 - DNA, 201 bp, Homo sapiens; identical to SEQ ID NO: 15642

SEQ ID NO: 99770 - DNA, 201 bp, Homo sapiens
ctcctgtctttcacaaaagttagcatgggctgttgacactgtgtgtgtctggtttttcttgtttgtttgttatgagatggagtctcgctctggattcaagygattcttgtgcctcagcctcctgagtagctgggactacaggcacccgccaccacgcccagctaatttttatatttttagtagagatggggtttcactgtg

SEQ ID NO: 99771 - DNA, 201 bp, Homo sapiens
agtgtgttcctctatcctttggtttcttgtagattgtgtttggttggttggttggttggttggttttgaggcagggtcttgctttgtggcccaggatggastgcagtggtgctcccgggctcaagtgattttcccacctcagcctccctaataactgggaccacaggcacgcatcaccacacccagctaagttttaaaaat

SEQ ID NO: 99772 - DNA, 201 bp, Homo sapiens
gtgtgttcctctatcctttggtttcttgtagattgtgtttggttggttggttggttggttggttttgaggcagggtcttgctttgtggcccaggatggagwgcagtggtgctcccgggctcaagtgattttcccacctcagcctccctaataactgggaccacaggcacgcatcaccacacccagctaagttttaaaaatt

SEQ ID NO: 99773 - DNA, 201 bp, Homo sapiens
actctagcctggacaacagagcaagatcctctctcttaaaaccaccaacaatgacaacaacaaaacaacatttttatttctcaatgtaagctccatcaagrtcaagatacttttgtaagctgtgacaccagccatttagtccacctctaaagaattgcgggctctgggaatttaaccatgtcagtgcagcctttttaacat

SEQ ID NO: 99774 - DNA, 201 bp, Homo sapiens
acagagtgtgtagccattacgtactacagatgcttcgcaactcaggacacggccacgtccgataaacccatcaaagtcgaaaatgcacttaatacctgatkggagcctgggcatggtggcttacgcctataatcccagcactttgggaggttgaggtgggaggatcacttgagcctgggagtttgagaccagcctcagcaa

SEQ ID NO: 99775 - DNA, 201 bp, Homo sapiens; identical to SEQ ID NO: 15647

SEQ ID NO: 99776 - DNA, 201 bp, Homo sapiens; identical to SEQ ID NO: 15629

SEQ ID NO: 99777 - DNA, 201 bp, Homo sapiens; identical to SEQ ID NO: 15631

SEQ ID NO: 99778 - DNA, 201 bp, Homo sapiens
cagctagaaggcttgttttcttggtggcctgggttagtaattctgcagctacttcgtgcatgtgttgtagggttgagcaaatgaggaaatctgccaggagrgtgggagcccagcctcccagaggtggattgaaacgtcacggatgcaggccgggcgcaatggctcacacctgtaatcccagcactttgggaggccaaggca

SEQ ID NO: 99779 - DNA, 201 bp, Homo sapiens; identical to SEQ ID NO: 15632

SEQ ID NO: 99780 - DNA, 201 bp, Homo sapiens
aagttacatgggcacttcatggagaaaggattgtcctttcaacagattgtgttggaacagttagacatccatgtgcaaaaaaatgaacttcaatccttcaragatctaaatataaaacttaaaacttctaaaagacaacacagaagaaagtctttgaattaggcaaagatttctttggtacaagcccaaaagcacaatcca

SEQ ID NO: 99781 - DNA, 201 bp, Homo sapiens; identical to SEQ ID NO: 15633

SEQ ID NO: 99782 - DNA, 201 bp, Homo sapiens
gtgtgtgtgtttatgggttctagtgcttccgctggaagggcctaaaggcagaggcacccgtaacagtgagtgcacggctgcctacctcgtacccgcgtggyggttatccacctcgggcctttttggcagcgctcgtcctccagaccagattatttcatctctgactggagaacactcttgcgtggactttagtgtgggtca

SEQ ID NO: 99783 - DNA, 201 bp, Homo sapiens
accaaggctaaagtgcagtgtcacgatcacagctcactgcagtctcaacctcttggtctcaagcgaacctcccgtctcagcctgccaggtagctgggactscaggtgtatgccaccaagcctggctaatttttaaatttttttttttttttcctgagatggagactcactccatcgcccaggctggagtgcagtgacgtga

SEQ ID NO: 99784 - DNA, 201 bp, Homo sapiens; identical to SEQ ID NO: 15636

SEQ ID NO: 99785 - DNA, 201 bp, Homo sapiens; identical to SEQ ID NO: 15638

SEQ ID NO: 99786 - DNA, 201 bp, Homo sapiens
gtcagcagtgtatctcattggtttttttcttaaaatagctttcatggaaataatctgatatacgtaaaagtggaaagggtagcataataaaccctgtgcaygcatccccagcttcagaattaccagttcacagccattcccatttcatctgtgtcctccactcactttttaaaaagttttgtttttaaaaagaatttcaac

SEQ ID NO: 99787 - DNA, 201 bp, Homo sapiens
atagtatgcctaaacagctgctgtgaacatttgcatatgaatcttcatatggacatgcttgtgtatccataaacccatcctgcaggcggcatggacacacrcatccctcctgactgtgtcttctgcccctcgcggcccctcctcccgccagcacagacctgccctttggcctcccgcactctgcaggattgtttcgagatt

SEQ ID NO: 99788 - DNA, 201 bp, Homo sapiens
catttacaaaatataggaattctcagttgctgaaaacgtcagatcccagaagacacagcgttcccacacgtggtgttaacatcgttcccagttgctggccraagattcctttgatgaatccgatttttccaaaatagatgattctgatgattcagatgactctgatgttagttctgtttagaaataattccaagaacagtt

SEQ ID NO: 99789 - DNA, 201 bp, Homo sapiens
gcatatgaatcttcatatggacatgcttgtgtatccataaacccatcctgcaggcggcatggacacacgcatccctcctgactgtgtcttctgcccctcgyggcccctcctcccgccagcacagacctgccctttggcctcccgcactctgcaggattgtttcgagattcatccgtgttgcgtgtatccattcattctttt

SEQ ID NO: 99790 - DNA, 201 bp, Homo sapiens; identical to SEQ ID NO: 15645

SEQ ID NO: 99791 - DNA, 201 bp, Homo sapiens
cccctacaagctggctcctggatccttttgacatcattcctgaactctctcagaggtttctggctgtctgatatgttctgtgctcatcttgtatttttcckgctccagacctgaaataagccatttcttcagctctggtttcttttaagggcttggaagtttcaaaaccacagtctgcatgtgacaggtgctcactgctgt

SEQ ID NO: 99792 - DNA, 201 bp, Homo sapiens
tgtggtctatactgtgggaggttccctgggcccctgaagaagcgtgtgccaggcggcggtgggagcggcggttggggaggcactgcggtgcgtccactggstcagttggctgacggtattgctcaagtcttctctgttctcgctgactttctgtctagttctgggtggcctggtaggcccagcagcttctcttcatgggag

SEQ ID NO: 99793 - DNA, 201 bp, Homo sapiens
gggccagcatgtggtctatactgtgggaggttccctgggcccctgaagaagcgtgtgccaggcggcggtgggagcggcggttggggaggcactgcggtgcrtccactggctcagttggctgacggtattgctcaagtcttctctgttctcgctgactttctgtctagttctgggtggcctggtaggcccagcagcttctct

SEQ ID NO: 99794 - DNA, 201 bp, Homo sapiens
ttgtcatgattggctttttttcaagaaaagatctagcacaagttaagagagattctgtgaatcttgaaaaagcttcagaggcccggtctttgaggtgaggacacagttaatctatatggaaagaaacctaagacttttagtccacttgacaggtggttacagggtctcccccaacacacactcttgtccaggtaattcctg

SEQ ID NO: 99795 - DNA, 201 bp, Homo sapiens
tgtcatgattggctttttttcaagaaaagatctagcacaagttaagagagattctgtgaatcttgaaaaagcttcagaggcccggtctttgaggtgaggacacagttaatctatatggaaagaaacctaagacttttagtccacttgacaggtggttacagggtctcccccaacacacactcttgtccaggtaattcctga

SEQ ID NO: 99796 - DNA, 201 bp, Homo sapiens
tccatgcttaatttgatttcatctcttataggtaatgcacaagggtcacgtgtatgctctcaagatgatcaggcagatcctgtcctcaggaccagaagcaygtctctgctgcacacattgttgtctacaccatgagtgtttagtagcaggactcttggaaagcagtgatctatgctgtaagaccatgagtcacagattctt

SEQ ID NO: 99797 - DNA, 201 bp, Homo sapiens
agagacaggtttcaccatgttagccaggatggtctcgatctcctgaccttgtgatccacccgcctcggcctcccaaagtgctaggattacaggcgtgaacyaccgcgcccagccaatgttttaattttttgtagagctggggttttgccatgttgcccaggctggtcacaaactcctgagctcatgcagtccacctgcctt

SEQ ID NO: 99798 - DNA, 201 bp, Homo sapiens
atgacatcgatggccctgtcgtctgcccatcaaggcagttctgattttctctgacagccgcctcctgcctgggcagactcccatccagtgctgtatagaayatgccgaggggaagcactcactctttcactgatgagtatgatgggagctgcactgtttcccggatgcgtctcataaggctgaagatgtttccttccattc

SEQ ID NO: 99799 - DNA, 201 bp, Homo sapiens
cttccattcctggtttgtgcagagtttttgctgtgaatagaggtagaagtgttggcaaatgtttttctacatcgaatgacgtgcccatatggttttcctcsttttgctaatgtattgttttaattttttttttttttttagatggagtcttgctctatctcccaggctggagtgcagtggtgcgatctcggctcactgcaa

SEQ ID NO: 99800 - DNA, 201 bp, Homo sapiens
cctttgggagaatgcgctctggatgaattgacccccttataattttgtgatgttgtttgttatatttagtatgttattcttaaatctttacccggtattartgtcgccactccagctttctctcggtttgtattaacatggtataccttttttcatccatttgtttttagcccttttcctgtttgccctgagaacactcac

SEQ ID NO: 99801 - DNA, 201 bp, Homo sapiens
gtattaatgtcgccactccagctttctctcggtttgtattaacatggtataccttttttcatccatttgtttttagcccttttcctgtttgccctgagaayactcaccggcagtgcttgcagctgcagcgtttaccccgagataagtttgccatgaaatctctcgttttcatgatgacttctgcattgctcgagtatatcg

SEQ ID NO: 99802 - DNA, 201 bp, Homo sapiens; identical to SEQ ID NO: 15634

SEQ ID NO: 99803 - DNA, 201 bp, Homo sapiens; identical to SEQ ID NO: 15635

SEQ ID NO: 99804 - DNA, 201 bp, Homo sapiens; identical to SEQ ID NO: 15637

SEQ ID NO: 99805 - DNA, 201 bp, Homo sapiens
tttccatctcctcgcgacctggccccagaagacagtctgagaggccggtggccgcggatcctggacgcgcttccctcctgcctgtggtttccctttattcsggcagcgctgtgagtccacccttcacttataggagccacatccagaaccttctcctggggccacagcgtgggcttccgatacctgtgtgaccccagctct

SEQ ID NO: 99806 - DNA, 201 bp, Homo sapiens
gtggttgatgttgttggatgtaaaacctctgctctttaaggttacctcctccccaaccccctccacacacacagtgagtaactcagctgtgcaaagtatgyccataacaccttgcagaaagactaaaaaaattactaggggagcggactgacttctgtgtgtgtgcagaggagctgagaagcagcttctttagcgaaaggt

SEQ ID NO: 99807 - DNA, 201 bp, Homo sapiens
tgtggcccacaccgccttcgttgctaagagaatcgcagcccctcgggctcccttctgcgcctttctattccgggtggccctggtagacccgggcacctctrtggaaacacgtcccggccaagctgagccgtcagaagcttctgttggtgttctcgtgttggtcgaaagggaagttatttattttgaagttaactctgatca

SEQ ID NO: 99808 - DNA, 201 bp, Homo sapiens
ggcttcggggggtttctccgagacctgggcgctgttctgggggagcaggggcccgggccaccaaggttcgtgcggaccgtggggtgtcccacgcccaggcygggggatcccagagccccgcttccctcaagggcgccgcgccccggactgcaggtggagacggggaccggccccgcggggtcgccgacaggcgcggggcgg

SEQ ID NO: 99809 - DNA, 201 bp, Homo sapiens
atatccatatccatatagtatgcctaaacagctgctgtgaacatttgcatatgaatcttcatatggacatgcttgtgtatccataaacccatcctgcaggyggcatggacacacgcatccctcctgactgtgtcttctgcccctcgcggcccctcctcccgccagcacagacctgccctttggcctcccgcactctgcagg

SEQ ID NO: 99810 - DNA, 201 bp, Homo sapiens
ttttaaaaattttatcttatttcatgctttcatgcatgcttttggacattatatgtggaatttaaaaatgtttcattttctggccaggcgcagtggctcasgcctgtaaacccagcactttgggaggctgaggcaggtggatcacgtgaggtcaggagttcaagaccagcctggccaacatggcgaaaccccgtctctact

SEQ ID NO: 99811 - DNA, 201 bp, Homo sapiens
tccccgtctgaaccaggcccggagtcttgatgcatagctctttgcctccctgggtatactcgacagcttgttgagagtgcgtgtgctctgagttgaacacraatatatttctgttgtttgaaggttattataaagtttctaacttacagagttggcactcctacgtcccttgcccccagctggagctaccgtgactgccac

SEQ ID NO: 99812 - DNA, 201 bp, Homo sapiens; identical to SEQ ID NO: 15641

SEQ ID NO: 99813 - DNA, 201 bp, Homo sapiens
ctattattcaggctagtcttcaaactcctgccctcaagtgatcgtcccatctcagcctcctgagttcctgagtagcttgggactacaggctcaccatactyggcattttttgtttgtttgttttgttttttgttttgtagagaacagggtcttgtttttttgcccaggctgatctcaaacttgtggtttcaagcgatcctc

SEQ ID NO: 99814 - DNA, 201 bp, Homo sapiens
ctggagtgcagtggcacaatgatagctcaccacagcctcaaacttttgggttcaaatcatcatgtctcctcagccttccaagcagctgagatacaggcacrcaccaccgcacctggctaattttgtttgtaaagacagagtttcactattattcaggctagtcttcaaactcctgccctcaagtgatcgtcccatctcagc

SEQ ID NO: 99815 - DNA, 201 bp, Homo sapiens
ctgtgcctttagcccgtgacaccccttagcggtttggttttggctttctcttttagtgtctgtggattccagcagctctctggcttcagccctttcaaggrttcgggcctctctgcatcccagccttccaggcccttctgctccccactttttagcacctaggtttttctacattctgcagtacctcagatcccttccttg

SEQ ID NO: 99816 - DNA, 201 bp, Homo sapiens
gctgcacactgcagcctgggcgacagagtgatccgtctcaaaaaaatttgtttttcattttctaattcatctgtagaaatacagttgctgtttttttgagrtaggatctcactgttggccaggctggagtgcagtggcacaatgatagctcaccacagcctcaaacttttgggttcaaatcatcatgtctcctcagccttc

SEQ ID NO: 99817 - DNA, 201 bp, Homo sapiens
cacccgtgagttatttagaattgtattttgttttcaaataattgcttatttcccagatttctttcttttgctttataatttaactccattgtgtttagagracttgtatagtttcagtccttttgaaatgcccaacgcgtatgttatgggccagcatgtggtctatactgtgggaggttccctgggcccctgaagaagcgt

SEQ ID NO: 99818 - DNA, 201 bp, Homo sapiens
cataatctagtaaagccttttgttttgtgatgctcaaatagctataaatgtgactagttgggagccccttccaagctggcccctgtgtccttttcactccrtacgtggtcctgggaatgcatcctttctggcccagcgtcccaggctcacggtgatgtctttcccaggcctgcgtcagctgcttctccagagcgcctgggt

SEQ ID NO: 99819 - DNA, 201 bp, Homo sapiens
atttatcttaagctgtcatctgtggagtttgttctcctgtttcttcttttttaggtcttcattcttgaagtcatattttacttttatttttagtgtttttrtgggacctataatctcacatcagaatttttctatcctgatttatgttgtttctttatatcattttcttaatttctttagtttctttgcaagaggaagtta

SEQ ID NO: 99820 - DNA, 201 bp, Homo sapiens
aatagctataaatgtgactagttgggagccccttccaagctggcccctgtgtccttttcactccgtacgtggtcctgggaatgcatcctttctggcccagygtcccaggctcacggtgatgtctttcccaggcctgcgtcagctgcttctccagagcgcctgggttccttttagtgcagaaaggcatctggacaccgaggt

SEQ ID NO: 99821 - DNA, 201 bp, Homo sapiens
cttccactttggatgaataaagtgctgtattttaaagttccttgacaaatactcttgttttattttttattttatttatttttcccaagaaagaaataagacaaatattattttctctggttatgttgcccatttgtttcagatcatttttagatttaggattttttacaaattttatgtacaaaataattacctgttata

SEQ ID NO: 99822 - DNA, 201 bp, Homo sapiens
aggaaaggtttttaagtgtttagtattctgttctcttgccctgtcccctcctgtttctggggtggctgttctgattgtacatatgttggatcttctttacrtgtcttttaaattggtccgtttctcttgagtcttttttaatcccctcatttctttttcattaaaaaaaattgtgtttccctttcatttatcttaagctgt

SEQ ID NO: 99823 - DNA, 201 bp, Homo sapiens
tcccagcactttgggaggccaaggcaggcggatcacctgagattgggagtttgagaccagcctgaccaacatggagaaactctgtctctactaaaaatacaaaaaaaaaaaaaaaattagctgggtgtgatggtgtatgcctgtaatccgagctgcttgtgagactgaggcaggagaatcacttgaacccaggaggcggag

SEQ ID NO: 99824 - DNA, 201 bp, Homo sapiens
ataagaatgatcgtcgcccagatcgtgagcatggtactcaataggttgtttttcagtcttgtcccctcctcccttcctccctccctcactcctcactctckcagtcccagtgcctgtggttctcatctttatgtccctgtgtaccacatgcttagctcccactgataggtgagaacatgtggtatccggttttctgttcct

SEQ ID NO: 99825 - DNA, 201 bp, Homo sapiens
ttcacgtagctacatttcagtaagtatttttaaaagatagattttttttttttttgagatggagtctcactctgttacccaggctggagtgcagtggtgcratcttggctaactgcaacctccatctccagggttcaagcaattctcatgcctcagcctctcaagcagctgggattacaggtgtgcaccacaatgcctggc

SEQ ID NO: 99826 - DNA, 201 bp, Homo sapiens
acctcccgggttccagggattctcctgcctcagcctctcaggtagctggggttacaggtgcgcgccaccacgcccggctaatttttgtatttttagtagakacagggtttcaccatgttggccaggctggtctcgatctactgacctcaagtgacctacctgtcttggcctcccaaagagctgggattacaggcgtgagtc

SEQ ID NO: 99827 - DNA, 201 bp, Homo sapiens
ccactgcacccggctgacaatttcttaaaataagacaatgaagtttgctacatcgattaactcttctatgaaagagttctccatagtgtacattttacccrcagtagcacttctttcaaaattgtagtcaatcctctcaaaccctgctgttgttttatcaattatgcttatagaatattccaaaatctttattgtcatttt

SEQ ID NO: 99828 - DNA, 201 bp, Homo sapiens
gagtacagtggcgccatcttggctcactgcagcctccacctcccgggttccagggattctcctgcctcagcctctcaggtagctggggttacaggtgcgcrccaccacgcccggctaatttttgtatttttagtagagacagggtttcaccatgttggccaggctggtctcgatctactgacctcaagtgacctacctgtc

SEQ ID NO: 99829 - DNA, 201 bp, Homo sapiens
ttgtaaatggaattttcttaaagaggcagtggcatgattagacttttatttcaggaatatactctgacatttttgtggaggatggtttggaggaaagtctrgtaaaacatacactaagattaattattctgtcaatgatgataaaaggccagaactagggttgtaaaatgaaaggtaatgaataaatttgggtaatatcta

SEQ ID NO: 99830 - DNA, 201 bp, Homo sapiens
tcagagtataagttttgcatttcttttgttaaatttattcctaagtattttaccttttttgatacttttgtaaatggaattttcttaaagaggcagtggcrtgattagacttttatttcaggaatatactctgacatttttgtggaggatggtttggaggaaagtctagtaaaacatacactaagattaattattctgtca

SEQ ID NO: 99831 - DNA, 201 bp, Homo sapiens
gaaaattacataatttttatgtgacgggaatttagaggatatatttgtaactaaggcataagtccatttgtgcacattttggagtttgagtttgtggttaygatactttctattagaagtcaggatacaaaactgcaaggagaaatccctgtttcattctcactaaagacccagtctgttaggactggcttcttctcttgt

SEQ ID NO: 99832 - DNA, 201 bp, Homo sapiens
ttgagatgagttgttgggacatgcaaataaaatgaagaatgaactttcgtgtctttttgtttcttgttgtgggctcgtttacatagcttcatgataatgaraaagaaaaccaaagtgggatgaaaagtgcagagggaaacctgttctattaaataactggggaagttgccttaatgtcttgaccttgatttcctcatctat

SEQ ID NO: 99833 - DNA, 201 bp, Homo sapiens
aagcttgttttttgcctatggatttatccatatgttctggtctgtgggagccaggaataattgagaaattttaatttaagaattagtttcattgaagtacrgggacttatacaacccagtattagttttgagcgtacagacatatgtggaactattcttggaaagtctacaaagtgaaatctatcgagttatttctcattt

SEQ ID NO: 99834 - DNA, 201 bp, Homo sapiens
ctgttgggctgctttctgtgtaagttgtgatggcacagaggatacaaacctgccagattttcttaggactgttcagttgatgaattactgcaaatctttcytccttacacattttgatattttattatctgttagtatcccaatgagaaggtggcccaaagaaatgaagaaacgcaatatttagtactgttttctttctag

SEQ ID NO: 99835 - DNA, 201 bp, Homo sapiens
ttgctctgaaggtgattttttattttttttgtaaatgataaacataaggcaatattacttgcagatagtccttagaaggataagtatcagtttgaggggaytataaacatcagtttgtgcttttttatccttaccatataataaatgagctatttcttttttaggccaaaaaatcattttactgggcaagaaaaacatctc

SEQ ID NO: 99836 - DNA, 201 bp, Homo sapiens
cttggaaagtctacaaagtgaaatctatcgagttatttctcatttgcaaagtgatcctttgagtcatttctcataatctataatctgaatgttaatactgrtatttttaaaagccctacatcccaacagaccaggccatctagatatttcagcgtggtgtctcaggatgagtaaacaaacagctaaaaatatatgacttat

SEQ ID NO: 99837 - DNA, 201 bp, Homo sapiens
tttctatatccttgacctttgggagtttgattattaaatggcttgaactagtcttgtttggattaaatcaatcaccaatccttgcttggtgttctgtagcyttcttgtgcttgaatattgatatctttctctagatttgggaagttctctgttattttttcttcaaataaactttctaccctcatctttctctatctcctt

SEQ ID NO: 99838 - DNA, 201 bp, Homo sapiens
cgcccccggtccctcgtctgggccgagcccgcccagctggctgagacgcgtggagcctggcggcgagtgggggcgtgcgacggttactctggttactgggsccgcgccgcgctggcgagagccgccgcccgcgagggatgctggtgaggaagccgtcgggagccgccgccgccatctgagggaggtaccctggaaaccacc

SEQ ID NO: 99839 - DNA, 201 bp, Homo sapiens
ttttcttttttccaatccagaggttaattggagtagagtgccctgaaattatggagagaaaccattggtaggtttatattaatattagttagattaccaarattctactccttaatatgaatggaataatttttaacagaggcttctgctcctctattcccagatcacactgggaattgtatgacagttcattttctatat

SEQ ID NO: 99840 - DNA, 201 bp, Homo sapiens; identical to SEQ ID NO: 15656

SEQ ID NO: 99841 - DNA, 201 bp, Homo sapiens
gccacttttgaagctttcagatggggaaattatgaatatttatgaaaagggtcatccattacctgatatttttagcatttatttttcttttattgtaaatrtggtggtttttcttttttttttcttttttccaatccagaggttaattggagtagagtgccctgaaattatggagagaaaccattggtaggtttatattaa

SEQ ID NO: 99842 - DNA, 201 bp, Homo sapiens
aggagaggattatggtttatttcatgttgcattttctttctgaagttgaagtggaattacagacctgaaatagttatgttgttatctttaaatgatattayagatttgctaagactctcattgacttccagaagcattcacagtttctgaaatagttacattagttttgttcagttctccagatttgaaggcagagactca

SEQ ID NO: 99843 - DNA, 201 bp, Homo sapiens
caacatgtacatggaaacatttcaataaattttcatttagttaagccacttttgaagctttcagatggggaaattatgaatatttatgaaaagggtcatcsattacctgatatttttagcatttatttttcttttattgtaaatgtggtggtttttcttttttttttcttttttccaatccagaggttaattggagtagag

SEQ ID NO: 99844 - DNA, 201 bp, Homo sapiens
gaagggaaaccctcattgtcaattatgatatgattagagtaataggaaactatttttggtatgagtacattttgtttaaatattccgtttttttcaagttwttttttaaactaagtgaaaccactttagtaacaaattattaacagaaatgaagtgaaatgaagtgggcaaacttagattttaaataatgacattttcaac

SEQ ID NO: 99845 - DNA, 201 bp, Homo sapiens
gtgttaagaaggactaaatgtgttcctatgtctttatggcagaacaggtttactcaggagaggattatggtttatttcatgttgcattttctttctgaagktgaagtggaattacagacctgaaatagttatgttgttatctttaaatgatattacagatttgctaagactctcattgacttccagaagcattcacagttt

SEQ ID NO: 99846 - DNA, 201 bp, Homo sapiens; identical to SEQ ID NO: 15649

SEQ ID NO: 99847 - DNA, 201 bp, Homo sapiens; identical to SEQ ID NO: 15654

SEQ ID NO: 99848 - DNA, 201 bp, Homo sapiens
ctgatttgcatttctctcatagataatgatgttgaacatcttttcatatgcatataggccatttgttgtttggagaaatgtatatttagactttgcatatwtttttaattgggcagatttaaaatttatgtattgttgagtttcaagagtcctttatatattttaggtacaagtcccttattagatatgtgatttgcaaaa

SEQ ID NO: 99849 - DNA, 201 bp, Homo sapiens
attttgagttaaattttgtgtctgttgagaggaaggggtccagcttgatttgtttgtgtgtggatattcagttgtcccagtatcatttgttgaaaagactrtttgttccccagtgaattttcttgcccttgtggtcaaaattcccttgactgaaaggtaagggtttctttcaacaatattttgtagttttcagagtataag

SEQ ID NO: 99850 - DNA, 201 bp, Homo sapiens
gtagagacggggtttcgccatgttggccaggctggtctcaaactcctgacctcaggtgatccacccacctcagcctcccaaagtcctgggattacaggcaygagccaccatgcctggcctgttactcctatattttcttctaagagttttatagttttacctcttaaatttagctctttgatccattttgagttaaatttt

SEQ ID NO: 99851 - DNA, 201 bp, Homo sapiens
ttgagtttcaagagtcctttatatattttaggtacaagtcccttattagatatgtgatttgcaaaatttttctcattctgtgggttttctttccattcttmttaatggtttccattgaagtacacatggtttaaattttcatgtttattttttctttcgttgcttgtgcttttgatgtcatatttaggaaggctttgtcca

SEQ ID NO: 99852 - DNA, 201 bp, Homo sapiens
cctcggcttttgtttgtctgggaaagtctttatttctccttcatgtttgaaggatattttcactggatatactattgtagcataaaagttcttttccttcrgcactttcagtgtgtcttgcccctctctcctggcctgtaagatttccactaagtctactgccagacatactagagctccattgtttgttgtttcctttct

SEQ ID NO: 99853 - DNA, 201 bp, Homo sapiens
tgagtatctcttatctgaaatgctagggatcagaagtgtttcagattttttatttttttcagatgtttgcattatacttaccagttgagcatctctaatcygaaaatctgaaatttgaaatgatctaatgagtattttgtttgtcacattactgctcaaaaagttttggatttcagatttttggattagagatactcagcc

SEQ ID NO: 99854 - DNA, 201 bp, Homo sapiens
tttgcctacctcttgtaggcttttgatttgaaattaccaggaagcttgcaggtcatatcttataaccgattattttaaactgatgacaactgattccacaracgagcagagaaaactaataaaaactctacactttatcctccttgctttttaacttttgtgagttttgtaccttcatgtaattgcttactgctcgttaag

SEQ ID NO: 99855 - DNA, 201 bp, Homo sapiens
gaaggtaattttctctggtagtatgttttaatttcttgcttttaatttttttgcctacctcttgtaggcttttgatttgaaattaccaggaagcttgcagrtcatatcttataaccgattattttaaactgatgacaactgattccacaaacgagcagagaaaactaataaaaactctacactttatcctccttgcttttt

SEQ ID NO: 99856 - DNA, 201 bp, Homo sapiens
gaatcatccatacatgtttttgtccattactattggcgtcttaatatttttccagtggtttttaatgagtaaattttattatatatacatgtattaatctyttgttctatttcatatgtctttcccaaagtattgttttagtttttatttttaaaattaattttttaactttctaattttcggttggcactttaaaaatgt

SEQ ID NO: 99857 - DNA, 201 bp, Homo sapiens
ttaaatttatactgttacgaataacttctgggacagatagtttgtcactgtggattagtgcattattaataccaaaattagttttatgatctatttagttrttaacattgagtgtatacaagtattgtgctagtcagggaaacaacaggtaaaaaactgaccttgacctagagaaggcctttttctttttttctttttttt

SEQ ID NO: 99858 - DNA, 201 bp, Homo sapiens
catcccttcattttcagtctctttgtggctttataggtgaagtgtgtttattttaggcagcagatcgttggttctttttttaaatccattcagccacttaygcctttcgagtggagtttagtccatctacattgaatgttattattggtaagtgcgtactattgccattttgtttttgttttctgattgttttgctgtctt

SEQ ID NO: 99859 - DNA, 201 bp, Homo sapiens
ttgtcttgaaatctattttactgatgtaaatatcactatgctcttttttggtttccatttgcatggaatatctttttccatcccttcattttcagtctctktgtggctttataggtgaagtgtgtttattttaggcagcagatcgttggttctttttttaaatccattcagccacttacgcctttcgagtggagtttagtc

SEQ ID NO: 99860 - DNA, 201 bp, Homo sapiens
gcccccggtccctcgtctgggccgagcccgcccagctggctgagacgcgtggagcctggcggcgagtgggggcgtgcgacggttactctggttactggggscgcgccgcgctggcgagagccgccgcccgcgagggatgctggtgaggaagccgtcgggagccgccgccgccatctgagggaggtaccctggaaaccacct

SEQ ID NO: 99861 - DNA, 201 bp, Homo sapiens
aggatgagctttatgagtagcgctgagttcagtgacatggtgcatgggtttgaggaatgggaaaggagggagagagaatccttaatgtttaatttgaactyttttgtattgtggtctgaaataatttcccttaaggtcactgagctctagttcaggtggctggaatgctgttcctgttttcatgctgtgtagagaaatttt

SEQ ID NO: 99862 - DNA, 201 bp, Homo sapiens
tttctgaagttgaagtggaattacagacctgaaatagttatgttgttatctttaaatgatattacagatttgctaagactctcattgacttccagaagcattcacagtttctgaaatagttacattagttttgttcagttctccagatttgaaggcagagactcatttttgatgtgtgtgtgtcttctttggttcttagtt

SEQ ID NO: 99863 - DNA, 201 bp, Homo sapiens
tattggggtctgtctccttagctctaataatatttcctttatatatctgagtgctccggtattgggtgcatatgtaattgttacatcctcttgctgaattracccctttatcattatctaatgaccttctttgcctctttttatagtttttgtcttgaaatctattttactgatgtaaatatcactatgctcttttttggt

SEQ ID NO: 99864 - DNA, 201 bp, Homo sapiens
tgtatgaaaatggaaaaatcggccaggtgcggtggctcatgcctgtaatcccagcactttgggaggctgaggtgggcagatcacgaggtcaggagttcaaraccagcctggccaatatggtgaaaccccgtctctactaaaaataagaaaaaattagccaggcgtggtagcacgcacctgcagtcccagctacttgggagg

SEQ ID NO: 99865 - DNA, 201 bp, Homo sapiens
aaaaatacaaaattagccgagtgtggtggtgcatgcctgtaatcccagctactcaggaggctgaggcagaagaatcgcttgaacgggaggcagaggttgtrgtgagccgagatcgtgccattgcactccagcctgggcaacaagagcgaaactccgtctcaaaaaaaaaaaaaagttttgatatgtttttgtcacataata

SEQ ID NO: 99866 - DNA, 201 bp, Homo sapiens
tgctttaatttgcaatttaaaatgaaggggttaaataagttagacatttaaaagaaatgattgttaccataaattagtgctaatgctgaggagaactacastttttcttttgaatttagtatttgagatgagttgttgggacatgcaaataaaatgaagaatgaactttcgtgtctttttgtttcttgttgtgggctcgtt

SEQ ID NO: 99867 - DNA, 201 bp, Homo sapiens
tttggaactggcttttcatttagcacaatgtttttgaggttcattcatgttgtagcatgtttcagttcttcatttgtttttatggccaaataatcttccaytgtgtggctatattacattttgtttagccattcatcaattgatagatatttgggttgtttctactttttggttattacaagcaatgctgctatgaacatc

SEQ ID NO: 99868 - DNA, 201 bp, Homo sapiens
gaataacttctgggacagatagtttgtcactgtggattagtgcattattaataccaaaattagttttatgatctatttagttgttaacattgagtgtatasaagtattgtgctagtcagggaaacaacaggtaaaaaactgaccttgacctagagaaggcctttttctttttttctttttttttttttttttttttttttt

SEQ ID NO: 99869 - DNA, 201 bp, Homo sapiens
atgattagacttttatttcaggaatatactctgacatttttgtggaggatggtttggaggaaagtctagtaaaacatacactaagattaattattctgtcaatgatgataaaaggccagaactagggttgtaaaatgaaaggtaatgaataaatttgggtaatatctaggatgtagaatgtaaaaaacgtgatgatttgga

SEQ ID NO: 99870 - DNA, 201 bp, Homo sapiens
aaaagagcttccaaagtattttgcatcacttaatgaattaacagcaaaatcaaggaagtaccttttaaacaactcttccaagacctaaatattagtagttwtttactaacagaaaaaagtttattcatatttatattactctccataatgctgattatggaattcagaagaaatcctggttgttgaaattctaggactaga

SEQ ID NO: 99871 - DNA, 201 bp, Homo sapiens
tgattagacttttatttcaggaatatactctgacatttttgtggaggatggtttggaggaaagtctagtaaaacatacactaagattaattattctgtcaatgatgataaaaggccagaactagggttgtaaaatgaaaggtaatgaataaatttgggtaatatctaggatgtagaatgtaaaaaacgtgatgatttggat

SEQ ID NO: 99872 - DNA, 201 bp, Homo sapiens
tttatagatataaggaattattatttatcgctactcacagctctcttcacttgataatttactgcttagttagagatactggttggacatcttagagactrggaatttggtttctagaattgtgttaaaaagagcttccaaagtattttgcatcacttaatgaattaacagcaaaatcaaggaagtaccttttaaacaact

SEQ ID NO: 99873 - DNA, 201 bp, Homo sapiens
gattagacttttatttcaggaatatactctgacatttttgtggaggatggtttggaggaaagtctagtaaaacatacactaagattaattattctgtcaatgatgataaaaggccagaactagggttgtaaaatgaaaggtaatgaataaatttgggtaatatctaggatgtagaatgtaaaaaacgtgatgatttggata

SEQ ID NO: 99874 - DNA, 201 bp, Homo sapiens
aagtctttatttctccttcatgtttgaaggatattttcactggatatactattgtagcataaaagttcttttccttcagcactttcagtgtgtcttgcccctctctcctggcctgtaagatttccactaagtctactgccagacatactagagctccattgtttgttgtttcctttctcttgttgctcttaggatcttttc

SEQ ID NO: 99875 - DNA, 201 bp, Homo sapiens
agtctttatttctccttcatgtttgaaggatattttcactggatatactattgtagcataaaagttcttttccttcagcactttcagtgtgtcttgcccctctctcctggcctgtaagatttccactaagtctactgccagacatactagagctccattgtttgttgtttcctttctcttgttgctcttaggatcttttct

SEQ ID NO: 99876 - DNA, 201 bp, Homo sapiens
tatgtatgtttatattaatgttctcttagattccttagtcattccttggcattaacagctaagtgcttaatgaataattttattaatgaaataattagttyttgatttatcacaagggatatatgtaacaaccataacagatgtatagtaggcatttgtttatacttgataagaaaatatgtgatactttgaaattgaagt

SEQ ID NO: 99877 - DNA, 201 bp, Homo sapiens
aaacaaactcccaaattaataaaaaaaagtttcgggccgggcacagtaggtcatgcctgtaatcccaccactttgggaggctgaggtgggcagatcacctraggttgggagttcaagaccagcctgaccaacatggagaaaccccgtctctactaaaaatacaaaattagccgagtgtggtggtgcatgcctgtaatccca

SEQ ID NO: 99878 - DNA, 201 bp, Homo sapiens; identical to SEQ ID NO: 15651

SEQ ID NO: 99879 - DNA, 201 bp, Homo sapiens
tactcaggagaggattatggtttatttcatgttgcattttctttctgaagttgaagtggaattacagacctgaaatagttatgttgttatctttaaatgayattacagatttgctaagactctcattgacttccagaagcattcacagtttctgaaatagttacattagttttgttcagttctccagatttgaaggcagag

SEQ ID NO: 99880 - DNA, 201 bp, Homo sapiens
ttagtttctgagtcttaccaatatgtatttttttctattacagattgtctcctaaccctctagttttaattggacacttctttgctgttgcaatctatgcygtgtatttttgctttaagtcagaaccttggattacaaaacctcgagcccttctcagtagtggtgctgtattgtacaaagcgtgttctgtaatatttcctc

SEQ ID NO: 99881 - DNA, 201 bp, Homo sapiens
gggaatggcaccacccttgctggtagttaatacctagtctataaccgcctgataatagtagctgttaatattagcctaggggtaatatacatttcttaggrtgagctttatgagtagcgctgagttcagtgacatggtgcatgggtttgaggaatgggaaaggagggagagagaatccttaatgtttaatttgaactcttt

SEQ ID NO: 99882 - DNA, 201 bp, Homo sapiens
cattagacgggaatggcaccacccttgctggtagttaatacctagtctataaccgcctgataatagtagctgttaatattagcctaggggtaatatacatytcttaggatgagctttatgagtagcgctgagttcagtgacatggtgcatgggtttgaggaatgggaaaggagggagagagaatccttaatgtttaatttg

SEQ ID NO: 99883 - DNA, 201 bp, Homo sapiens
atggagaatgggttgtaggcgtacaagaatggaagcagggctatcaggcaagagactatagcagtaaacgcccacttgctttttaaatttttgcgccaccrtttctggatgtgagatctttggcaaattgcttaatttctgtgagaatctgttacctcttccattagacgggaatggcaccacccttgctggtagttaata

SEQ ID NO: 99884 - DNA, 201 bp, Homo sapiens
acagtttcttcaatagtattatcttcaactactctctataatgctatctgataatatatctaaatctcttcacgcacattttttaagaatggctttttttrctgtgtgtttctgactactaaactgagtagtcttcatttctgttataggaactccatgctccactgactgttgttgcagatgggcttttctccaagttca

SEQ ID NO: 99885 - DNA, 201 bp, Homo sapiens
tggttgagcctcagatggaggttggatatttgattatgaaagatggaacgaaatgttagaatttcattttgaaggagaagaacaaccactttccatgatgmaaaagtttttaaaaagttcttgggtaaggattggatttgtgcctgaggaagaaagaaacgtgctgcgggtaagtccactgcttgtaagaagtgacagctg

SEQ ID NO: 99886 - DNA, 201 bp, Homo sapiens
gtagcataaaagttcttttccttcagcactttcagtgtgtcttgcccctctctcctggcctgtaagatttccactaagtctactgccagacatactagagctccattgtttgttgtttcctttctcttgttgctcttaggatcttttctatatccttgacctttgggagtttgattattaaatggcttgaactagtcttgt

SEQ ID NO: 99887 - DNA, 201 bp, Homo sapiens
actatgaagagttctcctttgactaaatgaaaattacataatttttatgtgacgggaatttagaggatatatttgtaactaaggcataagtccatttgtgyacattttggagtttgagtttgtggttacgatactttctattagaagtcaggatacaaaactgcaaggagaaatccctgtttcattctcactaaagaccca

SEQ ID NO: 99888 - DNA, 201 bp, Homo sapiens
tagcataaaagttcttttccttcagcactttcagtgtgtcttgcccctctctcctggcctgtaagatttccactaagtctactgccagacatactagagctccattgtttgttgtttcctttctcttgttgctcttaggatcttttctatatccttgacctttgggagtttgattattaaatggcttgaactagtcttgtt

SEQ ID NO: 99889 - DNA, 201 bp, Homo sapiens; identical to SEQ ID NO: 15653

SEQ ID NO: 99890 - DNA, 201 bp, Homo sapiens
acaagttagtgatttgtccagaaataaaaatgttacctgagtttgctaactcccaagttggtagttttttaaaattccattttgagcaatagttgtagttktagttttagtttggaaggtagtggaatttccttagacaacattaatagcaatgcctcagtaacatattcattattttgaattcctctggtgcagactaga

SEQ ID NO: 99891 - DNA, 201 bp, Homo sapiens
tctaaatttgaatattatgtaacacttgattgctatgggccacttagctcatagtggttgtaaatttagcttcagtgtcatataacccattgctctgaagktgattttttattttttttgtaaatgataaacataaggcaatattacttgcagatagtccttagaaggataagtatcagtttgaggggattataaacatca

SEQ ID NO: 99892 - DNA, 201 bp, Homo sapiens
aatttgaatattatgtaacacttgattgctatgggccacttagctcatagtggttgtaaatttagcttcagtgtcatataacccattgctctgaaggtgaytttttattttttttgtaaatgataaacataaggcaatattacttgcagatagtccttagaaggataagtatcagtttgaggggattataaacatcagttt

SEQ ID NO: 99893 - DNA, 201 bp, Homo sapiens
ctggatggttttgatgactgtggatgttcaccaatgtctgggcattgatgagttaggtatttattgtggtcttcggagtctgggcttgtttgtacccatcyttcttgggaacgcttttgaagtattcaaagggaagtgagtgttgtgatctaagtctttggtcatagcagccgtatctgtattaaggggcaccccaagtcc

SEQ ID NO: 99894 - DNA, 201 bp, Homo sapiens
tctgaaagctcacatctctgttactctgggattggtcactggtgccttatttattattgttaatttagtgagttcatgttttcctggatggttttgatgastgtggatgttcaccaatgtctgggcattgatgagttaggtatttattgtggtcttcggagtctgggcttgtttgtacccatccttcttgggaacgctttt

SEQ ID NO: 99895 - DNA, 201 bp, Homo sapiens
ccctgggatgcgggctatggcaacccccacgccagcttcgcgtggggccgctgcctttacctccttaggtttgaacggcccgcccggggtaaccgctaagmgcagccccgccccgcgccgcgctgtcccgccccttcctccggctctgcagcgctcccgcccggccgcccgcaggcctgggtcctcgcttgagcgggagga

SEQ ID NO: 99896 - DNA, 201 bp, Homo sapiens
ggtagagttgagagtggctggggatacggtccatgctatcgctcttttccctattttcttttagtttagatgtttagccagtaggagttatttcattgttyttcgctcggtgagcctgttcccctgttgagggatataattttttttggctaacttctgctagagtttgggaaaatagaacttgtgttaaacgagaacgcg

SEQ ID NO: 99897 - DNA, 201 bp, Homo sapiens
gagttgagagtggctggggatacggtccatgctatcgctcttttccctattttcttttagtttagatgtttagccagtaggagttatttcattgttcttcsctcggtgagcctgttcccctgttgagggatataattttttttggctaacttctgctagagtttgggaaaatagaacttgtgttaaacgagaacgcgagct

SEQ ID NO: 99898 - DNA, 201 bp, Homo sapiens
acaacctttttctttcctatttaatatatttaataaaagcagcagacccttgagattgagtatattttagtgttttggattgccttaggtaaataatacakttaagataatttgtctgtaatattttcctcttaggcattgagtaaatttttttttttaattctagagtgtcacacagaaaatgaaataaaatctagggat

SEQ ID NO: 99899 - DNA, 201 bp, Homo sapiens
tctgcccgcctcagcctcccaaaatgctgggattacaggcgtgagccacggtgcccagccctttgctttcctttcttgcattgggtgtcatcccatcactracttcagaactctaaaacccacctgcttgccacaaaatctgatgcttctttttgggaccatccaataaaacgtaatgggagatttcccaaattaccatga

SEQ ID NO: 99900 - DNA, 201 bp, Homo sapiens; identical to SEQ ID NO: 15662

SEQ ID NO: 99901 - DNA, 201 bp, Homo sapiens
tgagtctgtgatttcaggggctaacaatggacacccagaaggacgttcaacctccaaagcagcaaccaatgatatatatctgtggaggtaagagtagcacytacctaaagtaagaatattttatttaagtttttttgaaattgttacatttattctttgcttaaatgagttactggtcttcagagttataaagtagaacac

SEQ ID NO: 99902 - DNA, 201 bp, Homo sapiens
agcgccggaagttggtctcgacacctggactagccgggttgtatttggaaacgcggagtgagtttttccgtgctgtgtaggtaagcgaattggcgggttgrggtttgtggtggatatttgggccaaaactggaaagacacttggggtaaaaaggtccggtatgggggtagagttgagagtggctggggatacggtccatgc

SEQ ID NO: 99903 - DNA, 201 bp, Homo sapiens
gacgttcaacctccaaagcagcaaccaatgatatatatctgtggaggtaagagtagcacttacctaaagtaagaatattttatttaagtttttttgaaatygttacatttattctttgcttaaatgagttactggtcttcagagttataaagtagaacactttagcaaccataaaaaaaatcgttgaggtcagtagacctg

SEQ ID NO: 99904 - DNA, 201 bp, Homo sapiens
gttggattgggaactagcaccaacatgaattcttgttgaaattctggatcttcttgctatgacttgtcattactttgcccttttgtagggccccaggaccmatttgtattctacatatgttgatccattctgatctccataaattgttctgcacgagaattatcttgatatttcaactggagagttaatatacaagagagc

SEQ ID NO: 99905 - DNA, 201 bp, Homo sapiens
accactcttctctgactggacatttctccaactggatgtccctcagtcatccaaaaccaaactcactaaaattattatgagacagggtctcgctctgtcaygcacgctggagtgccgtggtgcaatcttggctcactgcaacctccacctcccaggttcaaacgattctcctgcctcagcctcccgagtagctgggatgac

SEQ ID NO: 99906 - DNA, 201 bp, Homo sapiens; identical to SEQ ID NO: 15660

SEQ ID NO: 99907 - DNA, 201 bp, Homo sapiens
aggtttgaacggcccgcccggggtaaccgctaagcgcagccccgccccgcgccgcgctgtcccgccccttcctccggctctgcagcgctcccgcccggccrcccgcaggcctgggtcctcgcttgagcgggaggagcgccccctctctcgctcacccctgcacccgtcccgaggcgggtcagaaaggctctgcttctcccc

SEQ ID NO: 99908 - DNA, 201 bp, Homo sapiens
actaacctttgctttaaaacaagtaaacggattgggcgagggatgtgacagtagcctatcagagaaggggccagaaagcaaaaacaaaatcaagagaaagrtaggaggcagctgccccactgccccagtacagatatcaaacaatttttaaaaacaatctggaaaagtgtttttctacgtgaaaatcattggtgtagtcga

SEQ ID NO: 99909 - DNA, 201 bp, Homo sapiens
tgcccgcctcagcctcccaaaatgctgggattacaggcgtgagccacggtgcccagccctttgctttcctttcttgcattgggtgtcatcccatcactgayttcagaactctaaaacccacctgcttgccacaaaatctgatgcttctttttgggaccatccaataaaacgtaatgggagatttcccaaattaccatgata

SEQ ID NO: 99910 - DNA, 201 bp, Homo sapiens
gtccttaactcaaattaatacagtggtcgtttttgatgctcgatgaatgctgggaattcagaggaatgtcttcacttatacttggatttgctctcttcccrtttctgattgttgtatagctttcgattttgcttacagtagttcccccttatcttcgggagatacattccaaggcccccagtgaactcctgaaacctcaaa

SEQ ID NO: 99911 - DNA, 201 bp, Homo sapiens
gtggatatttgggccaaaactggaaagacacttggggtaaaaaggtccggtatgggggtagagttgagagtggctggggatacggtccatgctatcgctcktttccctattttcttttagtttagatgtttagccagtaggagttatttcattgttcttcgctcggtgagcctgttcccctgttgagggatataatttttt

SEQ ID NO: 99912 - DNA, 201 bp, Homo sapiens
ggtggatatttgggccaaaactggaaagacacttggggtaaaaaggtccggtatgggggtagagttgagagtggctggggatacggtccatgctatcgctyttttccctattttcttttagtttagatgtttagccagtaggagttatttcattgttcttcgctcggtgagcctgttcccctgttgagggatataattttt

SEQ ID NO: 99913 - DNA, 201 bp, Homo sapiens; identical to SEQ ID NO: 15663

SEQ ID NO: 99914 - DNA, 201 bp, Homo sapiens
tttgtataaagcaattttttgttccattacgtgactttttgttttattgtatatgtaatttaacacacaataaagggtaaagttgcttccccaaaccacasttttaatcaaaacctagaatcatctgcagtccttgttaaaaatgcaggtttctagaaccctctgaagttctgattaaataaatttattgcaaaccactgt

SEQ ID NO: 99915 - DNA, 201 bp, Homo sapiens
atttaataaaagcagcagacccttgagattgagtatattttagtgttttggattgccttaggtaaataatacagttaagataatttgtctgtaatattttyctcttaggcattgagtaaatttttttttttaattctagagtgtcacacagaaaatgaaataaaatctagggatccaatcagatgcagagaatgtggatac

SEQ ID NO: 99916 - DNA, 201 bp, Homo sapiens
tcaggaaatagcatcctgtgtccccgcactgcagttgtctggtctctccagcagtttggtacttccggtgagtggcagatgcacctttgagctggggacargggttgggagaggggagaggcaaaggatttcatgtcctcccaatgtcaaagacagggctcaacattacagcctaaggcaggtgacaggaaaggagagatc

SEQ ID NO: 99917 - DNA, 201 bp, Homo sapiens
cttctctcttgcctctcctaggtcatccacaactatggccatggaggctacgggctcaccatccactggggatgtgccctggaggcagccaagctctttgkgagaatcctggaagaaaagaaattgtccagaatgccaccatcccacctctgaagactccagtgactgctgcctccccccacaagaactcccttctcccct

SEQ ID NO: 99918 - DNA, 201 bp, Homo sapiens
ttctctcttgcctctcctaggtcatccacaactatggccatggaggctacgggctcaccatccactggggatgtgccctggaggcagccaagctctttggkagaatcctggaagaaaagaaattgtccagaatgccaccatcccacctctgaagactccagtgactgctgcctccccccacaagaactcccttctcccctc

SEQ ID NO: 99919 - DNA, 201 bp, Homo sapiens
acagtggcaattgaggtagtgatggtggtggtgttagcagaggtgacaaggttgatggtaatgacctttattcatctcagagccttcattttccttcatcyttgaccctcctcatttgtatctaggacccagacagttactcttggaggcatcttccagttgggaaactggagtgaactaaacaatatccaggaccacaac

SEQ ID NO: 99920 - DNA, 201 bp, Homo sapiens
aaaggcaatgttaataacatggttgcaccaaccatgttatctcaatggcgatgttactggtgtcgtggagatgacaatatcaatggcaatgttagtggtgrtggtgaaatgatgaatgcagttggtggtgatgacctattaatgatagtagcaaagacaatgttgttgatggagatgacaacattgatggaagtggtgatg

SEQ ID NO: 99921 - DNA, 201 bp, Homo sapiens; identical to SEQ ID NO: 15672

SEQ ID NO: 99922 - DNA, 201 bp, Homo sapiens
cagggctggggtagtgagggtgggtgcagcagagccttaatcacagatgagggcggggtgctttgagtctcgtaggcaacagactcctgggttcaaaacasgtttggtttaaattctatttttgctttgaaaattatttttgttttacattttgctgttaaattggcagaggacaaagaatcttctgatgcccaggggaaa

SEQ ID NO: 99923 - DNA, 201 bp, Homo sapiens
cacgcatgaatgattttacctaaggctggatctgccacatctgacaatctgtctctggcttgtcatgaggacctcatgcatttattttgtattttaaaacmcacacacacacacacacacacacacacacacacgttgctataatcagtgtcaactttgactcatatcttgaatttttttaaaaaaagataattgacttag

SEQ ID NO: 99924 - DNA, 201 bp, Homo sapiens
cacacacacgttgctataatcagtgtcaactttgactcatatcttgaatttttttaaaaaaagataattgacttaggactcacacttttttccttttaaattttttttttttttttttttttgacagagtttcactcttgtcacctgggctggagtgcaatggcatgatttctgcccactgcaatctccacctcccaggtt

SEQ ID NO: 99925 - DNA, 201 bp, Homo sapiens
gcagacagtcaaaaagcccagagaggggaattaacttagccaaggtcgcacagcaaggcagaagtgaagccaggtctgactctgcctttctcttctcctctttttttttttgaggcagaatttcgctctgttgcccagactggaatgcagtggtgcgaactcgactcgctgcaacctctgctgcccaggttcaagcgattc

SEQ ID NO: 99926 - DNA, 201 bp, Homo sapiens
ttcgctctgttgcccagactggaatgcagtggtgcgaactcgactcgctgcaacctctgctgcccaggttcaagcgattctcctgcctcagcctcccgagyagctgggattacaggcgcctgccaccgcgcctggctaatttttgtagttttcagtagagatggggtttcaccatcttggccagactggtcttgaagtcct

SEQ ID NO: 99927 - DNA, 201 bp, Homo sapiens
tcccaaagtgctgggattacaggcatgagccatcatgccttgccaaattttatctttttaaatagagatagggtctcactatgttgcccgggctggtcttraactcctgggctcaagtgatctgccctccttggcctcccaaagtgctggaattacaggcatgagccatcatgccttgccaaattttatctttttaaatag

SEQ ID NO: 99928 - DNA, 201 bp, Homo sapiens
gcccagagccccgtgccagctctcaaggttcattcaacctttggcactgtgctaagggctttatccacattatctgttacctttcatgggaccaagagtatttttttttttttgagacagggtctcactgtattgcccaggctggagtgcattggcatgatctcggctcactgcaacctctgcttcctgggttcaagccat

SEQ ID NO: 99929 - DNA, 201 bp, Homo sapiens
ctttcatgggaccaagagtatttttttttttttgagacagggtctcactgtattgcccaggctggagtgcattggcatgatctcggctcactgcaacctcygcttcctgggttcaagccattctcctgtctcagcctcctgagtaattgggattacaggtgcgcactaccacgcctggctaatttttgtatttttaagaga

SEQ ID NO: 99930 - DNA, 201 bp, Homo sapiens
cccaatggcttcttgtgaagattaaatggaccagtataagaaaatgcttggaacagtgccttatatgcacttagcattacataagtctctgtcattatcattttttttttttttgagatgaagtctcgctctgtggcccaggctggagtgcagcggcacaatttcggcttactgcaacctccagctcccagattcaagcaa

SEQ ID NO: 99931 - DNA, 201 bp, Homo sapiens
ccaatggcttcttgtgaagattaaatggaccagtataagaaaatgcttggaacagtgccttatatgcacttagcattacataagtctctgtcattatcattttttttttttttgagatgaagtctcgctctgtggcccaggctggagtgcagcggcacaatttcggcttactgcaacctccagctcccagattcaagcaat

SEQ ID NO: 99932 - DNA, 201 bp, Homo sapiens
caatgcctatctaatttttaaatatttttgtagagatagggtctcactatgttgcccaggctggtctcaaacccctgggctcaagcaatcttcctgcctcrgcctcccaaagtgctgggattacaggcgtgagcaaacaggcctagcaaaaatttgcattttaagaagcttcctggcgattctaattatcagccatgtttg

SEQ ID NO: 99933 - DNA, 201 bp, Homo sapiens
tcaaatatagctctgatttttacctttatttccaccttttgcttactgtgactctagctatggctggttccacacaagcctaattctggagggaaagaacyatctacagtggctgactgaaaggtgagattttaagcttcactttgagggaggtacctcccagagaccaagttgtagtggaagatggttcgtgggcttccc

SEQ ID NO: 99934 - DNA, 201 bp, Homo sapiens
catgttggtagtgggaacaaaggaacactgggatcatggtggccattaggagctgatttatatctgagactcaatgagttttgggtctagagagctggccrcattttctcagtgtcagctgcactccaaggtcagaacttggttgcttcctagccctaccgacatctgtgttggtctttctgcaaagtccaggccctcagc

SEQ ID NO: 99935 - DNA, 201 bp, Homo sapiens
ggaagtctctgccttcatgttggtagtgggaacaaaggaacactgggatcatggtggccattaggagctgatttatatctgagactcaatgagttttgggkctagagagctggccgcattttctcagtgtcagctgcactccaaggtcagaacttggttgcttcctagccctaccgacatctgtgttggtctttctgcaaa

SEQ ID NO: 99936 - DNA, 201 bp, Homo sapiens
ccaagagtgattattaactccatgatacagacaaggaaactgagtctcagagaattcaagtagcaagtgatgaggctggggtctctgacactatgctctgytgtctgacactatgctctgttgctttctctcatccccggggactctcactgtttctgctttctctcccctatttctgacttttcccctataactcaccct

SEQ ID NO: 99937 - DNA, 201 bp, Homo sapiens
gacttttcccctataactcaccctcggtcttactcttacccttaccataaataggggttaagaacatgaactctggaactaagctgtatgggttaaaatcycaacaccaccatttattagctgtgtaatcttagacaagttatttaatctttctaagcctcaattggtccatctgtaaactggggaaagaatagcatccac

SEQ ID NO: 99938 - DNA, 201 bp, Homo sapiens
ggaaggtagggggtatgaaatcacagatctcaagcccagaagctccatatcaccatattgttttgtagatgaagatactgagtttcagagaggctaagtgmcttcctaaggtcacacagccaagtggccaaactgggattccaaccagtctgtatgaccccacacccctcctttcttttctctacagcctgatgcctctct

SEQ ID NO: 99939 - DNA, 201 bp, Homo sapiens
ctgccttttatttttatctccctctctctttttttttcttctctaactgctttggccaatacctctagaacaatgttactcatacagatgatagtggatgkctttgacttgttcctcatgttaataggaatcttgcagtgttctaaattagcaaacactcacttgagagatacattggtatttatattcacatacattcat

SEQ ID NO: 99940 - DNA, 201 bp, Homo sapiens
agccaccacgcccagcctgattccatacattttttatatattactgttttttaaagatttttaggccaggcatggtggttcatacctgtaatcctagcacwttgagaggccgaggtgggcagatcacttgagcccaggagttcaagaccagcctgggcaacatggcaaaaccctgtctctacagaaaaattcaaaaatcag

SEQ ID NO: 99941 - DNA, 201 bp, Homo sapiens
tttcatttttttgagacaaaatcttactttgtcacccaggctggagtgggatgtagtggtatgaacacaactcacagcagcctcaacttcctgggctcaartgatgctcccacctcagcctccaaagtagctgggaccacatgcatgtgccacaatgcctatctaatttttaaatatttttgtagagatagggtctcacta

SEQ ID NO: 99942 - DNA, 201 bp, Homo sapiens
tttttttgagacaaaatcttactttgtcacccaggctggagtgggatgtagtggtatgaacacaactcacagcagcctcaacttcctgggctcaagtgatsctcccacctcagcctccaaagtagctgggaccacatgcatgtgccacaatgcctatctaatttttaaatatttttgtagagatagggtctcactatgttg

SEQ ID NO: 99943 - DNA, 201 bp, Homo sapiens
atggctggttccacacaagcctaattctggagggaaagaactatctacagtggctgactgaaaggtgagattttaagcttcactttgagggaggtacctcmcagagaccaagttgtagtggaagatggttcgtgggcttccctcagcatggactaacccccaggtttgaagaatacccttaggcctggtgtgggagctatc

SEQ ID NO: 99944 - DNA, 201 bp, Homo sapiens
aattctctttataaccgggaggtaagggctgtccttatcctcacttaataaatgagaaaacggaggctccaagaaatggagtaacttgcccaaggccacaragctcgccagtggcagagctgggatttgaacccaggccatctgtgactccatggtgtccagtgtgctaacaggaacagcacagccctgggacggtttgct

SEQ ID NO: 99945 - DNA, 201 bp, Homo sapiens
tatttcctgttctttggatgtttctagtgtatttctttctttcttcttttttttttttttttttttgagacagagtcttgctctgtcacccaggctggagwgcagtggcgcaatctcggctcactgcaagctccgcctcctgggttcatgcctttctcctgcctcagcctcccgagtagcttggaatacaggcgcctgcca

SEQ ID NO: 99946 - DNA, 201 bp, Homo sapiens
ccttgtctctactaaaaatacaaaaattagccaggcatgttggtgcatgcctgtaatcccagctactcaggaggctgaggcaggagaatcacctgaacccrggaggcagagtctgcagtgagccaagattgtaccattgcactccagcctgggcgacaagagtgaaactctgtctcgaaaaaataaagtttatagatgagg

SEQ ID NO: 99947 - DNA, 201 bp, Homo sapiens
ttctcctgcctcagcctcccgagtagcttggaatacaggcgcctgccaccacgtctggctaattttttttttgtattgttagtagagacggggtttcaccrtcttagccaggatggtctcaatctcctgacctcgtgatccgcccacctcggcctcccaaagtactgggattacaggcgtgagccaccgcgcctcgctgtt

SEQ ID NO: 99948 - DNA, 201 bp, Homo sapiens
gtgtgtgtgcatgtgtgtgagggtgtgtgcatatgtgatggtgtgtgcacatatgtgagggtgtgtgtgcatgtgtgtgagggtgtgtgcatatgtgtgayggtgtgtgtgcacgtatgtgggggtgattgtgcatgtatgtgagggtgtatgtgcatatgtgtgatggtgtgcgtgcatgcacaccatgtgagggtatgt

SEQ ID NO: 99949 - DNA, 201 bp, Homo sapiens
tgtgtgacggtgtgtgtgcacgtatgtgggggtgattgtgcatgtatgtgagggtgtatgtgcatatgtgtgatggtgtgcgtgcatgcacaccatgtgagggtatgtgtgtgtgcatgtgtgtgaaggtgtgtgcgcatgtgagagtgtatgtacgtgtgtgatggtgtgtgtgtgtgagagtatgtatgcatgtgtgtg

SEQ ID NO: 99950 - DNA, 201 bp, Homo sapiens
gtgcatgcacaccatgtgagggtatgtgtgtgtgcatgtgtgtgaaggtgtgtgcgcatgtgagagtgtatgtacgtgtgtgatggtgtgtgtgtgtgagrgtatgtatgcatgtgtgtgagggtatgtgtgtgcatgtgtgtgagggtgtgtgcatgtatgtaagggtgtgtgtgcatgcatgtgtgtgaggggtatatg

SEQ ID NO: 99951 - DNA, 201 bp, Homo sapiens
gtgtgtgatggtgtgtgtgtgtgagagtatgtatgcatgtgtgtgagggtatgtgtgtgcatgtgtgtgagggtgtgtgcatgtatgtaagggtgtgtgtrcatgcatgtgtgtgaggggtatatgtgtggatgcatgtgagggtgtgtgtgtgcatgtgtgtgagggtgtgtgtctgagggtgtgtgtgtgcatgtgcac

SEQ ID NO: 99952 - DNA, 201 bp, Homo sapiens
atcctgtgtccccgcactgcagttgtctggtctctccagcagtttggtacttccggtgagtggcagatgcacctttgagctggggacaggggttgggagargggagaggcaaaggatttcatgtcctcccaatgtcaaagacagggctcaacattacagcctaaggcaggtgacaggaaaggagagatccagcctctcaaa

SEQ ID NO: 99953 - DNA, 201 bp, Homo sapiens
cccagtaaatctacattttacataagatgaaggtttgggccaggcgtggtgactcacacctgtaatcccagcactttgggaggctgaggcaggtggatcaygaggtcaggagttcgagaccagcctggccaacgtggtgaaaccccatctctactaaaaatacaaaaaattagctgggtgtggtggcaggtgcctgtaatc

SEQ ID NO: 99954 - DNA, 201 bp, Homo sapiens
attttacataagatgaaggtttgggccaggcgtggtgactcacacctgtaatcccagcactttgggaggctgaggcaggtggatcacgaggtcaggagttygagaccagcctggccaacgtggtgaaaccccatctctactaaaaatacaaaaaattagctgggtgtggtggcaggtgcctgtaatcccagctactcggga

SEQ ID NO: 99955 - DNA, 201 bp, Homo sapiens
ggcaggtggatcacgaggtcaggagttcgagaccagcctggccaacgtggtgaaaccccatctctactaaaaatacaaaaaattagctgggtgtggtggcrggtgcctgtaatcccagctactcgggaggctgacgcaggagaatcgcttgaacccgggaggcagaggctgcagtgagccgagactacaccactgcactcc

SEQ ID NO: 99956 - DNA, 201 bp, Homo sapiens
ctcctgcctcagcctcccgagtagcttggaatacaggcgcctgccaccacgtctggctaattttttttttgtattgttagtagagacggggtttcaccgtsttagccaggatggtctcaatctcctgacctcgtgatccgcccacctcggcctcccaaagtactgggattacaggcgtgagccaccgcgcctcgctgtttc

SEQ ID NO: 99957 - DNA, 201 bp, Homo sapiens
gggtggatgtcctcagcccacctccctcctcatgcccggcttctgacaaaggggaatttggcactggtacaactctccccttctctactctgaatctcatygcctttgctgttacaaagcaatgtggtggtcataggaagtgctgggggctaagaggcctgggtttgagttccaactccatcattgactcactctatggcc

SEQ ID NO: 99958 - DNA, 201 bp, Homo sapiens
aataaagttaaaaggagtcagaaggagaaagagaactctctctgcttcctttctgacttcttttgggaggttccaggaagatttcccccatccaaagaacygttttacaaccacttttatattcagagttgtgcaggagcctcataacagcctatgaacagccatgggcagcctcattttacaggggcagctgagaattaa

SEQ ID NO: 99959 - DNA, 201 bp, Homo sapiens
ttgaagccaggcccctctgattcctcattgagacctctccccactgttcatcagggagtagacagattgagggtagaagaaaggggaagagagaacagggrataccagggtcttccccacctttcatcccccactaccctgttggttgctaccaggtggcaagagaaggcgcagacgtgattgtcaactgcactggggtat

SEQ ID NO: 99960 - DNA, 201 bp, Homo sapiens
gtcagtatattacttcttttgcatcaggcagcttgttaaatttgttacgtttggcatcttgttcaatttcccatccatcccctcaagcataggttattagrggttgaagcatcttgcccaaagttaacggccagtaggtggcagagctgagtcctgaagccagagcccatcgcactaaccaccggcctacccagcctacag

SEQ ID NO: 99961 - DNA, 201 bp, Homo sapiens
ccagggagaactaattatgttcattcaaatgcctcatctctggcttactgatttttttttttaaaaagaagtctttcatattctttgctatgggcacatarcaatcaaaggcatcagctgtctcagattgccttctaggggacaagggaggtcctaggcagataaatgcaagactgaaagacaagcagaaagcatcaagtg

SEQ ID NO: 99962 - DNA, 201 bp, Homo sapiens
gaggtgagttgcagggctgatgcggtggatggggcagggagaagaggggaggcctctgcttcttgctgctgagtcgggggctcccttctcaggctcctagrgtccccacaggcctgcctcagacccttgccccagaagcactcaggtattctgaaggaggaagtctctgccttcatgttggtagtgggaacaaaggaacac

SEQ ID NO: 99963 - DNA, 201 bp, Homo sapiens; identical to SEQ ID NO: 15673

SEQ ID NO: 99964 - DNA, 201 bp, Homo sapiens
tagctggaatttcaggcgtgcaccaccatgccaagctaatttttttgtatttttgtagagacagggtttcaccatattggccaggctggtcttgaactccygacctcaagtgatctgccagcctcgacctcccaaagtgctggaattaaagacgtgagccactgtgcccggcctttttgattttccattctattcctacca

SEQ ID NO: 99965 - DNA, 201 bp, Homo sapiens
cctcattgagacctctccccactgttcatcagggagtagacagattgagggtagaagaaaggggaagagagaacagggaataccagggtcttccccacctktcatcccccactaccctgttggttgctaccaggtggcaagagaaggcgcagacgtgattgtcaactgcactggggtatgggctggggcgctacaacgaga

SEQ ID NO: 99966 - DNA, 201 bp, Homo sapiens
actgaggttcgattaggattaaccaactcatcctggtttgcctgggactctgatgcactgacttttagtctgaaagtctgcatcctgggaggaccctcagycctgggcaagctggggaggttggtcaccctcactcagtcaagttgagcaacttgcccagggttacatggctggtgtgtgcccaagtcaggctgcgaacct

SEQ ID NO: 99967 - DNA, 201 bp, Homo sapiens
aggctacccactcaaacctggccttgggctgggaaggtagggggtatgaaatcacagatctcaagcccagaagctccatatcaccatattgttttgtagakgaagatactgagtttcagagaggctaagtgacttcctaaggtcacacagccaagtggccaaactgggattccaaccagtctgtatgaccccacacccctc

SEQ ID NO: 99968 - DNA, 201 bp, Homo sapiens
atactgtctcttagattcttcatggagaattaggaaaaatacagaaagccctttattcctctgccttctcattgttaacatataaaaatggtcaagcgggygggtgcagtggcacacacctgaaagcccagcgctttgggaggctgaggggggaggattgcttgagcctaggaattggaggtggcagtgagctatgattgt

SEQ ID NO: 99969 - DNA, 201 bp, Homo sapiens
ctggctaatttttgtagttttcagtagagatggggtttcaccatcttggccagactggtcttgaagtcctgacctcgtgatccacccgcctcggcctcccraggtattgggattacaggcgtaagccactgcagctggtcctccctctctccttttgttcctgcaatgtctttgttctatgtgatttttcaaaatgctagg

SEQ ID NO: 99970 - DNA, 201 bp, Homo sapiens
ggattaaccctgttttgcagatgaagagcttgtgtctccagaggcaaagtatgggggaagagggaagagagaagaccaagggtccctgagaggggctgtcmcctaagccccagtatccaagctcgggctcgaagctggaaggagaattgcctagaggaacgatacctttctgtttgttggttctatctccaacttggcttc

SEQ ID NO: 99971 - DNA, 201 bp, Homo sapiens
agagagccgagatttaaggtagacatcaatcctaacaacaacagttattattgttattattttgagacggaatctcactctgtcgcccaggctggagtgcrgtggcgcaatctcagctcactgcaaccttcacctcccaggttcaagcaattctcggcctcagcttccagagtagctgggattacaggcgcccgccaacct

SEQ ID NO: 99972 - DNA, 201 bp, Homo sapiens
tgctgggtcttttctattcccagcccagaaactgggtgtctggggacgctccccagagaaagttgcatcattcaccagccgtgtgactgtggccaagtctyggtcacttctccatacctcagtgtttccatttgcaaaacgggaacaatgatattccttcctcctaggggtcatcgggaaggtcaaatataaaaagggctt

SEQ ID NO: 99973 - DNA, 201 bp, Homo sapiens
agaagctcaggtggcatctggctttgcccaggactcttcgggaggctcctgagtcttccagggcagaagagcttcatctattctttccactgtccctctcrgacctggccaccttctctcttgcctctcctaggtcatccacaactatggccatggaggctacgggctcaccatccactggggatgtgccctggaggcagc

SEQ ID NO: 99974 - DNA, 201 bp, Homo sapiens
ctgccctccttggcctcccaaagtgctggaattacaggcatgagccatcatgccttgccaaattttatctttttaaatagagatagggtctcactatgttrcccgggctggtcttgaactcctgggctcaagtgatctgccctccttggcctcccaaagtgctgggattacaggtgtgagcccttgcacccagctgaatct

SEQ ID NO: 99975 - DNA, 201 bp, Homo sapiens
gctactcgggaggctgacgcaggagaatcgcttgaacccgggaggcagaggctgcagtgagccgagactacaccactgcactccagcctggcaacagagcraggctgtctcaaaaaaaaaaaaaaaaaaaaaaattgaaggtttgaaggaaaaaggaatggaggaagttctgtatctgggaagataagcttgtcattgatg

SEQ ID NO: 99976 - DNA, 201 bp, Homo sapiens
ggtgttcatgggatgacaatattgttgatagcggaatggtggtattagggataatattgtattgatggggaagacagcgttcatgggggtggtgattagcrtaagagttgtagagtggtgatgttaatggaggtggtctggtgctgatgaggagatcaatgttgatgaaggtgtgattgggagtggggatggtagctggtg

SEQ ID NO: 99977 - DNA, 201 bp, Homo sapiens
agccaggcatgttggtgcatgcctgtaatcccagctactcaggaggctgaggcaggagaatcacctgaacccgggaggcagagtctgcagtgagccaagaytgtaccattgcactccagcctgggcgacaagagtgaaactctgtctcgaaaaaataaagtttatagatgaggaaactgaggttcgattaggattaaccaa

SEQ ID NO: 99978 - DNA, 201 bp, Homo sapiens
gactccaaggctatttccagatatccattttgtggctgccccatcatctcttgcaactgttccagggggtccccaccattccaccccggtgccaagagaarctcaggtggcatctggctttgcccaggactcttcgggaggctcctgagtcttccagggcagaagagcttcatctattctttccactgtccctctcggacc

SEQ ID NO: 99979 - DNA, 201 bp, Homo sapiens
ttcatgacccttccagggactggagccaacagacctttgactatctcctgagccatgtccattctcccaacgctgaaaacctgggcctgttcctaatctcrggctacaacctcttccatgaagccattccggtgggtgaacagttcttgaccatgagggatgagcacccagggctggggtagtgagggtgggtgcagcaga

SEQ ID NO: 99980 - DNA, 201 bp, Homo sapiens
tgggctggagccgttttccctcctttataaaactaggccatattaagaatgtcccgctgtccagggccacaggcccgagttgccaggagctgaggtctgcrggaggagagttgtgagtgaagatgagggaaagttgaatttggctcttctgggcacaaataattctcttgttctgcctcagcaggagcctgcagaatattt

SEQ ID NO: 99981 - DNA, 201 bp, Homo sapiens
tttataaaactaggccatattaagaatgtcccgctgtccagggccacaggcccgagttgccaggagctgaggtctgcgggaggagagttgtgagtgaagakgagggaaagttgaatttggctcttctgggcacaaataattctcttgttctgcctcagcaggagcctgcagaatatttccctgctgtgcgggcttaagtag

SEQ ID NO: 99982 - DNA, 201 bp, Homo sapiens
ttaactggctgtgtgacttcaggtaagtcacatcacctctctgaaccacagtttcctcctctgtaagacgggactgataacagcagcccctacctcatgasagtgttgggagacttggatgaatggatgcttgtgaagcacttagtgccggggccagctggctcacagtaggtgctccacaaatgtcagtatattacttct

SEQ ID NO: 99983 - DNA, 201 bp, Homo sapiens
aggtcaaatataaaaagggcttggtggtgtctggcaccttctaagccttcagtggatggtggcaatggcgctaaggatgatggagatgatggtgatgatgktgtgcctcaacccttccttcccacaggctgctgcaatgcgtgtggtggtgattggagcaggagtcatcgggctgtccaccgccctctgcatccatgagcg

SEQ ID NO: 99984 - DNA, 201 bp, Homo sapiens
tcttcctatgttacccaggcttgtctcaaactcctgacctcaagtgaccctcctgcctcagcctcctgaagagctgggattataggcatgagccactgcamccagccagaattttaattcacacagctgtaaaaaaccaatgattctgatcagtgggcagtgattcggggcccaggctccttccatctaatggctctgccg

SEQ ID NO: 99985 - DNA, 201 bp, Homo sapiens
atggctaaaatacaaacatgttctgcagtgacgggcacttggtgctgaagccaaaaggtttcaagtgcccctgaaggtcccaaggctttttatcaagaagraataaaatactcatcaaagcaaaaactgccaaagcatttattatgtgccaggtccagtcctaactaatttacagctagcgactaatttaattctctttat

SEQ ID NO: 99986 - DNA, 201 bp, Homo sapiens
aaaggtttcaagtgcccctgaaggtcccaaggctttttatcaagaaggaataaaatactcatcaaagcaaaaactgccaaagcatttattatgtgccaggyccagtcctaactaatttacagctagcgactaatttaattctctttataaccgggaggtaagggctgtccttatcctcacttaataaatgagaaaacggag

SEQ ID NO: 99987 - DNA, 201 bp, Homo sapiens
actcaaatggtagttattattatttttggtgggggagttggtaggctggttctcaaacttttatagcttctgttccatttcaaggataaactctgcaaatmacttcatgagaagtagccgtgtggtgcaaccagggagaactaattatgttcattcaaatgcctcatctctggcttactgatttttttttttaaaaagaag

SEQ ID NO: 99988 - DNA, 201 bp, Homo sapiens
aacagcttcgcactggaccttcaaacacagaggtatgctcccatggcaaggaaagtaatgccctcttccactcctcagatggctctggcattttcagggarcagtcatgtctgatctcaagttccacacaggctccatagcaggcaggggcagtggtggctaatatcccctcctctataaatggggaaactgaggctcaat

SEQ ID NO: 99989 - DNA, 201 bp, Homo sapiens
aaggataaactctgcaaataacttcatgagaagtagccgtgtggtgcaaccagggagaactaattatgttcattcaaatgcctcatctctggcttactgatttttttttttaaaaagaagtctttcatattctttgctatgggcacatagcaatcaaaggcatcagctgtctcagattgccttctaggggacaagggaggt

SEQ ID NO: 99990 - DNA, 201 bp, Homo sapiens
ccttcctcctaggggtcatcgggaaggtcaaatataaaaagggcttggtggtgtctggcaccttctaagccttcagtggatggtggcaatggcgctaaggrtgatggagatgatggtgatgatggtgtgcctcaacccttccttcccacaggctgctgcaatgcgtgtggtggtgattggagcaggagtcatcgggctgtc

SEQ ID NO: 99991 - DNA, 201 bp, Homo sapiens
tacacgcatgaatgattttacctaaggctggatctgccacatctgacaatctgtctctggcttgtcatgaggacctcatgcatttattttgtattttaaaacacacacacacacacacacacacacacacacacacgttgctataatcagtgtcaactttgactcatatcttgaatttttttaaaaaaagataattgactt

SEQ ID NO: 99992 - DNA, 201 bp, Homo sapiens
ggagccaacagacctttgactatctcctgagccatgtccattctcccaacgctgaaaacctgggcctgttcctaatctcgggctacaacctcttccatgargccattccggtgggtgaacagttcttgaccatgagggatgagcacccagggctggggtagtgagggtgggtgcagcagagccttaatcacagatgagggc

SEQ ID NO: 99993 - DNA, 201 bp, Homo sapiens
acacgcatgaatgattttacctaaggctggatctgccacatctgacaatctgtctctggcttgtcatgaggacctcatgcatttattttgtattttaaaacacacacacacacacacacacacacacacacacacgttgctataatcagtgtcaactttgactcatatcttgaatttttttaaaaaaagataattgactta

SEQ ID NO: 99994 - DNA, 201 bp, Homo sapiens
cacagttctgggatttcggaagctgacccccagagagctggatatgttcccagattacgggtgagtttattgtcacaggcaaaggggactggggcctgacragttagcagacctgtccagaaggcagcagagggtagaggcaccagatttcctgtcctacccaggccctggtaccctggtctcctggtccttggtccagct

SEQ ID NO: 99995 - DNA, 201 bp, Homo sapiens
agaagtagaagagacataaaggcaaagaaacggaagtggtggaattggggctggataggaggtaagagcctggtatgatgccagcctagattggggcatcrtaagtgcttgctgggaaatcttgacctaaattgttgtcctgacatgcccaggcatgtcttccaactgggtgaccagaaattgagtcagtcggaaactgga

SEQ ID NO: 99996 - DNA, 201 bp, Homo sapiens
attcaacccaggcagacaggctctcaaaccaatgccgtctccctgacttccttagatgtatgtttaggtatgaataaagaagaaatgtctatataaaaggygtgtttgtactttatttttcaaagagatcatcttcagacaccaacgaaagtgaaataaagtcaaatgaagagccactcctaagaaagagttctcgccggt

SEQ ID NO: 99997 - DNA, 201 bp, Homo sapiens
accacttaagcccaggtgtttgaggctacagtgagctatgatccactgtgctgcagcctgggtgacagagcaagacccagactctaaaaaaaaaaaaaaaatttaaataggaatgagaaaatcactggttctcaatatatgtaaaagtcatctggagaatttgtggaaaaacttttaagaatcctgccaaaactgatgtag

SEQ ID NO: 99998 - DNA, 201 bp, Homo sapiens
taaaaatacaaaaattagccaggcgtggcagcaggtgcctgtaatcccagctactcaggaggttgaggcaggagaatcgcttgagcccaggtagcagaggmtgcagtgagcccagatcatgccactgtattccagcctgggcaacagagtgagactgtctccgaaaaaaaaacctgaggggttataatatatatgaatgaa

SEQ ID NO: 99999 - DNA, 201 bp, Homo sapiens
gcttgatttaacttttgttctcctttagcagttaaatgatgataatgtcagtaagattattaaattcagccaaagacaagatgtctaaaaaatgaactagrtgaagcttaactctttaaatgtttttctgatgaattgcttatcctttgaccagcaaactattattaaatcaagcataaatgatatgaatcaaaactattt

SEQ ID NO: 100000 - DNA, 201 bp, Homo sapiens
aggggagtggggccatgggtggttttggaaagggcaacattatagtgggaaaacaggaatacatgtcactttgggctgcagttccaggattgagggtggartcctcgctggggaccatcttcttctgcccagaatttccctgcctcctgtccctatcaaaatgatgtctacatatgctgtgtgatggtatttggaggtgga

SEQ ID NO: 100001 - DNA, 201 bp, Homo sapiens
ctcatgaataggattagtgcccttaagagacatgagagatatgatctctctctctctgctatgtcaggatacagcaagaaggtggccatctgtaaatcagkaagagggccttcaccaataacccaaccatgctgacatcctgatcttgggctttcagcttccagaaatgttcaaaaagaaaaataaaagtatgctgtttaa

SEQ ID NO: 100002 - DNA, 201 bp, Homo sapiens
aaggatttggaaaatagcatgtgattaaaagattgggacattagtcctttttggaaaggtcaaagagattgaggcttgaggctttgtgggttttttttttkttgttgttgttgttgttttgtttttgagacagagttgcactctgttgccaggctggagtgcaatggcacgatcttggctcactgcaacctcctcctcctg

SEQ ID NO: 100003 - DNA, 201 bp, Homo sapiens
gcctggcattacttctggatgtaaaagtagactgattacctggcagtaaagtagcagctacagttggttaataggtgcctaattatctaacaccatagcamatattatataaaatgttaaagcagtgactgttgagattcattagtttatttacttcagtgccttcttgactagtttttactctcccccctccccttttag

SEQ ID NO: 100004 - DNA, 201 bp, Homo sapiens
ttgggctgcagttccaggattgagggtggagtcctcgctggggaccatcttcttctgcccagaatttccctgcctcctgtccctatcaaaatgatgtctayatatgctgtgtgatggtatttggaggtggagccttgggaggtaattaggtcatgtgggtggagccctcatgaataggattagtgcccttaagagacatga

SEQ ID NO: 100005 - DNA, 201 bp, Homo sapiens
gagtttgggaaatgctgaacacttcattcttctttagcaagtacagtcagtacatcaaagactgagcagttcagtggtacataaatttatctcgccctgcrtattcccaacatacttaacacagatgttttttacctgttaacatctcacccagctagtgttcctcagaacaaagattggaaaaagctggccgagaaccat

SEQ ID NO: 100006 - DNA, 201 bp, Homo sapiens; identical to SEQ ID NO: 15685

SEQ ID NO: 100007 - DNA, 201 bp, Homo sapiens
ttctttcatttgcttcagtgccactagattatgttaatttgaatatttttaaagtacatcctggccagcttcttaattagccagaaaattcgattccatcktaattttttaaagataaattttattgtgtatgtttaaggtgtatgacatgatgttatatatatatatatataataaaatggttacccattatgtaacaaa

SEQ ID NO: 100008 - DNA, 201 bp, Homo sapiens
ccctcaccgcagtcacgccagcccgttagattgcaagttgcaggaccgctgtaggaaatgttattcgccgcggtcaggacaggcctgtccgcccgccctcrccgcagcctggcttcgtcgttgcgagcgccggggaggccgtccccggggagggcggaggaaggagctgactttgggtttgcgtcccgctcgctgctctgc

SEQ ID NO: 100009 - DNA, 201 bp, Homo sapiens
cacttcctaacagtattagtcagctaccaggtaacagtaaggattcaacccaggcagacaggctctcaaaccaatgccgtctccctgacttccttagatgkatgtttaggtatgaataaagaagaaatgtctatataaaaggcgtgtttgtactttatttttcaaagagatcatcttcagacaccaacgaaagtgaaataa

SEQ ID NO: 100010 - DNA, 201 bp, Homo sapiens
aattctgaagcagtaaaaaagcttcttgttagcatagtccccctttttgtttggagacatctagtcactatggataacatttattctgtcttccctgatcwtgttcccttaatgacaatttgttgattatctgttctcttataaactaagaaacatacttagaaccacagtggattgttgctaatttaacattttatagta

SEQ ID NO: 100011 - DNA, 201 bp, Homo sapiens
ttcagtgccactagattatgttaatttgaatatttttaaagtacatcctggccagcttcttaattagccagaaaattcgattccatcttaattttttaaarataaattttattgtgtatgtttaaggtgtatgacatgatgttatatatatatatatataataaaatggttacccattatgtaacaaattaatatttcctt

SEQ ID NO: 100012 - DNA, 201 bp, Homo sapiens
tattataggaaagcaaggaccctaaagtataatttactgaaagcatttgtaacatactattctattttttaaatgtcaatgacagagacttgttttgtatraacaaggttttgcaaaatcctttgaaatttaaaattaataactgaagtaggaggctggtaaaatattagaactaataagctcaataaattattttgcaat

SEQ ID NO: 100013 - DNA, 201 bp, Homo sapiens
tattacagacatgagccaccatgcccagcctgggaattccatctttctatatccgacctctctcttttttcatgttgaatttttgaaattttctttttttytttttttttttttttaatatttagctctatactatctattctgtgttttggagtcctgattattgtaggttgactctccttcacctattctccaattact

SEQ ID NO: 100014 - DNA, 201 bp, Homo sapiens
cccatctcagcctccattgttgctgggacagcaggcatataccactacacctggcctaattttggtatctttagtttttttagagacagggcttcaccacrttgcccaggctggtcttgaactcctggcctcaagcgatctgcctgcctcagccttccaaagtgctgggattacaggcatgaattactgtacccagcctat

SEQ ID NO: 100015 - DNA, 201 bp, Homo sapiens
gttatctgtaagatcatatctgctttgtatggcttcaggtgatattcatcattgttcagtttccattttcttatttatttattggtattttttatttactyctatttatttatttatttatttattttttatttttttttgtagagattgggttttgccatgttgcccaggctggtcttgaactcctggactcaagcagtc

SEQ ID NO: 100016 - DNA, 201 bp, Homo sapiens
ggaaaggccggaagcggccgggctggatcaggatgaggtaaatgttgctgttgcgtcttccccctcaccgcagtcacgccagcccgttagattgcaagttrcaggaccgctgtaggaaatgttattcgccgcggtcaggacaggcctgtccgcccgccctcgccgcagcctggcttcgtcgttgcgagcgccggggaggcc

SEQ ID NO: 100017 - DNA, 201 bp, Homo sapiens
gaaggtccttctttgtccaacgccaagacctacagaagtccatcgtctgacagaggatttgaaggaggcatacctttctgctccagtaggtagaggtggckcattttctcctatggagatctttggccatggcactaacttgtgtattttgtttctttgcaaacagttgtggtatttattgttatatatgtgtatatatat

SEQ ID NO: 100018 - DNA, 201 bp, Homo sapiens
ggaggtgcaggttccagaggctcgctgtttctatggctttcaaattctcatcgagaatgttcactcagagatgtacagtttgctgatagacacttacatcwgagatcccaagaaaaggtattgttgggattttatttacaaaatattgcttacggcttggttatgttcagatcagaatttattccaaaactcaatgttaag

SEQ ID NO: 100019 - DNA, 201 bp, Homo sapiens
gcccgccctcgccgcagcctggcttcgtcgttgcgagcgccggggaggccgtccccggggagggcggaggaaggagctgactttgggtttgcgtcccgctcgctgctctgccccggggccagccaaggacgacgcttggaggcctcaggccggggtgagacttacccctgcgtttatccgcctcacgctctcccaccctcc

SEQ ID NO: 100020 - DNA, 201 bp, Homo sapiens
aatccataaggtctttctgacctgtttgttacatgacaggcagtttttaagcgataatgctgatgtccagattctgatttgcagtgtttaatgagagcctrtagaactggatatatctattttccttatcttcttaggtggagcgctttagtcaggaggtgcaggttccagaggctcgctgtttctatggctttcaaattc

SEQ ID NO: 100021 - DNA, 201 bp, Homo sapiens
gtagaaggggacacgaaatcctcatgacctcctcccagtgaaaaaatcagggtaggaggccagttttgctcaggcccggctccttaactaactgaatcttyggggtgtcactttcttcctttatacaatggaagtgatacttcagagagaattaagtaaaatgctttatgcaaagtgccacgaaaattgtaggtgcttaat

SEQ ID NO: 100022 - DNA, 201 bp, Homo sapiens
cttaactctttaaatgtttttctgatgaattgcttatcctttgaccagcaaactattattaaatcaagcataaatgatatgaatcaaaactatttacagtrcattaacatgagtttgatttttactctcagatagtaagcttaatagagaacctgcaccttaacctttggagctctgtaatagaacactggattctggctc

SEQ ID NO: 100023 - DNA, 201 bp, Homo sapiens
aatcagggtaggaggccagttttgctcaggcccggctccttaactaactgaatcttcggggtgtcactttcttcctttatacaatggaagtgatacttcasagagaattaagtaaaatgctttatgcaaagtgccacgaaaattgtaggtgcttaataagcccaagttgttcatccaagttgtttatgctgataaaagtac

SEQ ID NO: 100024 - DNA, 201 bp, Homo sapiens
taaaggcaaagaaacggaagtggtggaattggggctggataggaggtaagagcctggtatgatgccagcctagattggggcatcgtaagtgcttgctgggraatcttgacctaaattgttgtcctgacatgcccaggcatgtcttccaactgggtgaccagaaattgagtcagtcggaaactggaagtaccattctggaaa

SEQ ID NO: 100025 - DNA, 201 bp, Homo sapiens
tgagatgctgggttgcctgaagcactttgtttttctagatgccagagtgcataataggagacctgcatcagagtcacttggagtattttgtaaaaaatgtraattgctggaccaacaccccaaacatagtgaatcaaaatctcttgagatctgcatttttaacaagtacttcaggtgatcctggtacacatattaaaacaa

SEQ ID NO: 100026 - DNA, 201 bp, Homo sapiens
tacctgccattcaatcctaattaccattgccaagttaatccttcattagaccagtgcctcagtgtcactgaccctgtgtcccccaaaaaactcccaaaagrgtctcaattcctaccaaaaagcctggccaacacctcaggctggtgaagtcttgttgaagctgcttttttcatgctaactgccacatcttaattcaagtcc

SEQ ID NO: 100027 - DNA, 201 bp, Homo sapiens
tccatagttattgtcaatttctcagagttaactattgctaatctaattcatagtctattgtcaaggtaaagtttaggccagaaaacattaaatggcatgcscaggactcagtagaggagctaaatttaaaaccaagttcttgcacctgggcgggtatcccattggttccgtcagactttgtgggaatagaagtgaaaataa

SEQ ID NO: 100028 - DNA, 201 bp, Homo sapiens
tgacttaataggaaacagttggagtaccatatctgcctttgcattcgatttgttgcagtgtatatgtatatagtatatgcctcatttaaatatgtattatmgttagaaaagggaggaatattttatttagcttttcagattattacggatatgtcatgtagcctctagaaaataccattgtaaagtatgagagactggtag

SEQ ID NO: 100029 - DNA, 201 bp, Homo sapiens
acctccaaaattttttaaaaatcagattactactaaccaattttgctcttttattaaccctgtaaaaatatagatacccatgagctttgaaatttctatgkctagtaggctgctctctcatgcacccatatatttctttttgttttgttttgttttttgagatggagtcttgctctgtcaccaggcctgagtgcagtggcg

SEQ ID NO: 100030 - DNA, 201 bp, Homo sapiens
tcagtagaggagctaaatttaaaaccaagttcttgcacctgggcgggtatcccattggttccgtcagactttgtgggaatagaagtgaaaataatacttasaagtagtgtatgactatgacaacatacagctattttacagaagtagaagagacataaaggcaaagaaacggaagtggtggaattggggctggataggagg

SEQ ID NO: 100031 - DNA, 201 bp, Homo sapiens
gaaattgtattcaaatgtatgtttgtgcacgtttctaagcattatgaaataatacgtcatctctagcccagctcaaaggttgatgttggttaacctccttstcttcacattgcaaaatccctcataatacactcctaatccagctactcctcttaatagtctacaggttatcaggatagaacaggagaatgtgtatacaaa

SEQ ID NO: 100032 - DNA, 201 bp, Homo sapiens
acaggagaatgtgtatacaaatgtgactttcattctaacttaaaggtactagtcttcagcagatcagttatttatcatcatttaaaaacttcattcatcgkcagggcatttggtgctgaagagtgactgcttgtgatgtccttcccaacttccagtaacaaaagtatagaagttcccaactttcatactttgagtatatcc

SEQ ID NO: 100033 - DNA, 201 bp, Homo sapiens
cccctgtatttgcatagccgtatgcttgtattttgggctttcttcttgctaagccttagcctcctctgctataacagttgctttggcgaggtgacaatggrtggacgctggagtaaggaacataacgggcctgtcacagtagagagagagacagttttggataggagtctagaagttgtatgtgttctaatcctggtttat

SEQ ID NO: 100034 - DNA, 201 bp, Homo sapiens
gttttacaggatattgaataactttaacttatacattgaagaagatcagttgtagaagataagtgttggaattactgagactaaatatgatgttctcaatrttttagtttagattactatctataaacaagttttctgctgcaacaatggcatctaattctgccagatttttatttccaatatattagaacattttttttc

SEQ ID NO: 100035 - DNA, 201 bp, Homo sapiens
gaaaaaacattaaagtagcttataccagtagcttattcattccagcaatcttatcagagaggctctaaagggacattttgttcacaaacttagaaatttgyccatcatgatgacatttatgggtctagctttgtacttatcctcaaactagcaataattacaataatttttgagtgcttactatataccaggctttgttta

SEQ ID NO: 100036 - DNA, 201 bp, Homo sapiens
gccaccatgcccagcctgggaattccatctttctatatccgacctctctcttttttcatgttgaatttttgaaattttctttttttttttttttttttttttaatatttagctctatactatctattctgtgttttggagtcctgattattgtaggttgactctccttcacctattctccaattacttaagattctattgc

SEQ ID NO: 100037 - DNA, 201 bp, Homo sapiens
agagcattcacatcctatagtgcagtgttccttcttgttttacaggatattgaataactttaacttatacattgaagaagatcagttgtagaagataagtrttggaattactgagactaaatatgatgttctcaatgttttagtttagattactatctataaacaagttttctgctgcaacaatggcatctaattctgcca

SEQ ID NO: 100038 - DNA, 201 bp, Homo sapiens
ggaggaaggagctgactttgggtttgcgtcccgctcgctgctctgccccggggccagccaaggacgacgcttggaggcctcaggccggggtgagacttacscctgcgtttatccgcctcacgctctcccaccctccttccctgttttggagccctggccagggaaaccgaggcaaggaaagaggactgtggcggctctgct

SEQ ID NO: 100039 - DNA, 201 bp, Homo sapiens
ccaccatgcccagcctgggaattccatctttctatatccgacctctctcttttttcatgttgaatttttgaaattttctttttttttttttttttttttttaatatttagctctatactatctattctgtgttttggagtcctgattattgtaggttgactctccttcacctattctccaattacttaagattctattgca

SEQ ID NO: 100040 - DNA, 201 bp, Homo sapiens
taaaagtcatctggagaatttgtggaaaaacttttaagaatcctgccaaaactgatgtaggaggcccaggtgggactgaggaatctgcattttgtattcakctgattccctcacaaggagcttcagaaacactttgggaaatgctggctttagagaaaaaagaagggaagaggcagagtgttccatatacgctgaaaatat

SEQ ID NO: 100041 - DNA, 201 bp, Homo sapiens
tcagcgcccgtagcttcggcggagtctgcgcgatgggcgacccggaaaggccggaagcggccgggctggatcaggatgaggtaaatgttgctgttgcgtcktccccctcaccgcagtcacgccagcccgttagattgcaagttgcaggaccgctgtaggaaatgttattcgccgcggtcaggacaggcctgtccgcccgcc

SEQ ID NO: 100042 - DNA, 201 bp, Homo sapiens
tgtattacagacatgagccaccatgcccagcctgggaattccatctttctatatccgacctctctcttttttcatgttgaatttttgaaattttctttttytttttttttttttttttaatatttagctctatactatctattctgtgttttggagtcctgattattgtaggttgactctccttcacctattctccaatta

SEQ ID NO: 100043 - DNA, 201 bp, Homo sapiens
tcagtaagattattaaattcagccaaagacaagatgtctaaaaaatgaactagatgaagcttaactctttaaatgtttttctgatgaattgcttatccttkgaccagcaaactattattaaatcaagcataaatgatatgaatcaaaactatttacagtgcattaacatgagtttgatttttactctcagatagtaagctt

SEQ ID NO: 100044 - DNA, 201 bp, Homo sapiens
tttaagttgtttcctcttttgatctattgtgaataatgctactatgaacgttcatttacacatttttgtgtggacatgttttcatatctcttaagtatacwcctaggagtgaaattgctggatcatatggtaactccatgtttaatcattagaagaactaccagactgttttctaaagcagctgcacaattttatattccc

SEQ ID NO: 100045 - DNA, 201 bp, Homo sapiens
ttttttgagacaggatctcactctgtcacccaggctggcatacagtggcacgatcatggcttgctgcagcctcgacttccctgggctcaagcattcctccyatctcagcctccattgttgctgggacagcaggcatataccactacacctggcctaattttggtatctttagtttttttagagacagggcttcaccacgtt

SEQ ID NO: 100046 - DNA, 201 bp, Homo sapiens
tcacatagaaatatggccaggaaggacttgagaagacagtttgatccattgcttttagacaggactgggttttgctgtccaattatatacaataatagttyttcttacaactaagctggccccagccttgtcttgatattaatacatgaaatttttataattgtctcattgtctcatttagaaacatccatatttttctgc

SEQ ID NO: 100047 - DNA, 201 bp, Homo sapiens
ttgcagattttgtttgttcataaattaatttttctataatgttgatgaactaagatttgctggcattgaaaatttttattataggttattgtattggcatytaatgagatttgaaagaaggaagttcctagtcctattaacccctcttccattttccagaagttctgtgttatattcctagaaccactttatacaatgctt

SEQ ID NO: 100048 - DNA, 201 bp, Homo sapiens
ctgctttgtatggcttcaggtgatattcatcattgttcagtttccattttcttatttatttattggtattttttatttacttctatttatttatttatttwtttattttttatttttttttgtagagattgggttttgccatgttgcccaggctggtcttgaactcctggactcaagcagtctgcccaccttgacctccca

SEQ ID NO: 100049 - DNA, 201 bp, Homo sapiens
gggaggcggggctggccgaagttaggcggagccccgaggcgggggaggcggggccgggccggcgcagggagagtcactcaatggacaggcgagaaagcagkaccggcgcggcggggcggggccggccgagtccctagagctgggggcggggcggacccagcggaccagcggaccacctgggtgctgtcgtagttggaggtg

SEQ ID NO: 100050 - DNA, 201 bp, Homo sapiens
tctattgcatttgtataaccatactcgggtatttcacaagtttattttcatttttggttgagttatctgtaagatcatatctgctttgtatggcttcaggygatattcatcattgttcagtttccattttcttatttatttattggtattttttatttacttctatttatttatttatttatttattttttattttttttt

SEQ ID NO: 100051 - DNA, 201 bp, Homo sapiens
gatgtcccatcccactcaggaaatcttacaaagccaaaggttttcacatacagaacatatttaagttgtcactgggttttgctacagtgacagcaaaccaytggggcagtgtgttgttcactaatacttttaacagagtagttaaaaactgaattctgtctgctctccaaagtacatgctgacccaaatatgacaaagtga

SEQ ID NO: 100052 - DNA, 201 bp, Homo sapiens
cactcaggaaatcttacaaagccaaaggttttcacatacagaacatatttaagttgtcactgggttttgctacagtgacagcaaaccattggggcagtgtrttgttcactaatacttttaacagagtagttaaaaactgaattctgtctgctctccaaagtacatgctgacccaaatatgacaaagtgaatgcaaagccct

SEQ ID NO: 100053 - DNA, 201 bp, Homo sapiens
ggacctctagtaaattctacagaaaaaggcattgaggcacatttccaaacagatgagagtaaatagagtaacttgggatgatcttacttggagaaaagttytagatgtgatgcagctcaaaaagtcagcattattatgaagcaatgttgtacatgtgacagcagcatgagtagatcagatcgtaatcatttaaaacattag

SEQ ID NO: 100054 - DNA, 201 bp, Homo sapiens
agaaagaaacagttggtattcattgctcttaataatcctctgtagctggcttctcaaactttaatgtgcataagaatcatttgttaacatgcacattgatwgggtctgaggtggagtctgatgtctgcatttctaacaaactcccaggggatggatgccgatgttgcttgtccagaggcggcactttgaatatcagtctac

SEQ ID NO: 100055 - DNA, 201 bp, Homo sapiens
ccccaagtgcagtaaatagctctcctcacctcctgaccctgttatttcctggtagttctgagttgtggatcctgcagtggagagggagggaacaaagaagytgcagaggcctcagcttcacagagcattgagcagtgggtgatattgtatcctcaggcaggggttgacctcacatttcagtgcaggtcattctaatgactg

SEQ ID NO: 100056 - DNA, 201 bp, Homo sapiens
tatagagagattaggaaagaatttaaacagaaggccaaaagggagggcatctaagaaaggaagagggaatagcattagcaagaaagtcctaactggaatcraagggggagaggtgttggtaagccaagggggcctaataagcagtgaagaccatgagttcatgtggtctttagtgagtggcttctttcacttagtacagtg

SEQ ID NO: 100057 - DNA, 201 bp, Homo sapiens
ttcagagagtaattagttggaatcacaaaagcattaggtgctgaactgccagagacaagcaacaaataatatgtggaaccacaactgttttggctacgtargaattttgctccacaagtaatttaaattgttcctactaccacttacaacctttcctcctctatgggggtacatctcaatttttaagttaatatattagaa

SEQ ID NO: 100058 - DNA, 201 bp, Homo sapiens
taattcttacatgcatgtgcttgatctctgggccatgcttgcttctagttaagtagcctttcaggatggtgtttaatttattctgagccctttataatatmccctgacaagagcatggagtggatagagggagtcttagtcaatatgtattataaatagatttagggttcacaaaggtcagcagccttcatctcttgccct

SEQ ID NO: 100059 - DNA, 201 bp, Homo sapiens
ctaataaagtgaatggttcaatcagagttttccgatctgtaacagtcacctcccacagtcttactttctcactttttgcccactgctgtgccacttcagcrtccacttgtctctgctcagaaaggtcgattttgtttcctaataccacaattgctacctgaaagaaaacggattgaaaagatcatactagtactttgccaa

SEQ ID NO: 100060 - DNA, 201 bp, Homo sapiens
tctcttgccctacccccatcacacacaaaaataaaaatcacaaataataaaggattttaagagttataccagtcgggagtgggttcatttttttgtttttktttttgtttgtttttggcaagctgaagtcatctgttggatccaaaaatgcataaaaatcttcaggcttatagaaccaacagcatcaaaggaagagcagtg

SEQ ID NO: 100061 - DNA, 201 bp, Homo sapiens
cttttttctaaaggaagaaaacttagtcatttatttagctttaataattggctttttgagtttgttcaatactttaagctctgtgagcatatggatcatgycagccatctagcacagggtttagaaaacagtaactgctcaaacttttgctgtgaatgaatgaaggagcaaatgaatgattttcctgaaagggaaataaaa

SEQ ID NO: 100062 - DNA, 201 bp, Homo sapiens
tgtttttggcaagctgaagtcatctgttggatccaaaaatgcataaaaatcttcaggcttatagaaccaacagcatcaaaggaagagcagtgtgactcaatattggggtgggggcaggtttggggttttggttgtgtagaagctccttatgagagaacagtgtgatgcttggagctgtggagaatccagccactgcttttt

SEQ ID NO: 100063 - DNA, 201 bp, Homo sapiens
caaaggaagagcagtgtgactcaatattggggtgggggcaggtttggggttttggttgtgtagaagctccttatgagagaacagtgtgatgcttggagctrtggagaatccagccactgctttttctctcttccttaccttattactcttcttgattcacctggatgtggaaactgtccctgtttaagagtggccttgtca

SEQ ID NO: 100064 - DNA, 201 bp, Homo sapiens
gttgttgatgttaaattttactcatatgcagagctgtatttaaatttaaaaagaggcttattttataacatagccactaatatttttcattggaattgccrtctacctctacttgttctccagtgtagatttaattcttatattcttttgtttaaaaatctaaggtcctaactgcccttagaattaagtgcccaaaatctt

SEQ ID NO: 100065 - DNA, 201 bp, Homo sapiens
tgtaaagaaaaatatagaggtgtggggggctgggcgcagtggctcacgcctgtaatcccagcactttgggaggccgaggtgggcagatcacctgagctcgrgagtttgagaccagcctggtcaccatggcaaaaccccatctctactaaaagtacaaaaattagccaggcgtggtggtgggcacctgtaatcccagctact

SEQ ID NO: 100066 - DNA, 201 bp, Homo sapiens
tgaaactgggtttcataataagcccattcttattcagcctcttttatgcagccatgctctaaagtgaaacaaaagacctagtaactggtgtcagaatatgyttctaatcctctgggaaacctcctcctttataggctaaaagctcatcaaagtccctgcttgagaaccgtaatccaggaactttgctgtatgctaatggct

SEQ ID NO: 100067 - DNA, 201 bp, Homo sapiens
gagctgagagagaatcgcttgaagccgggaggcgaaggttacagtgagccaagatcttgccactgcgctccagcctggacaacagagcgagactttgtctmaaaaaaagaaaaatacagggatgtggtgactcacacctgtaatctcagcactttggttagctaaggcgggtggattgcttgagcccaggagtttgagacc

SEQ ID NO: 100068 - DNA, 201 bp, Homo sapiens
gtagatcagtgttttctgaatatattgtctgtatcagaattacttgaggcagttgttaaaaatggaaattcctcttttgtccatctccccactgttttggtttctctctctctctctctctctctctgtgtgtgtgtgtgtgtgtgtgtgtgtgtgtgtgtgtgtgtatgtgtgtgtatgtatatatataatttttctttt

SEQ ID NO: 100069 - DNA, 201 bp, Homo sapiens
tgtgttccaatacagctttattacggacaccgatttcaatttaataattcaatataaaatttattaatagttttcacgtgtcataaaatactagttttctktagatttttttaatcacttaaaaatgtgaaaacctttcttaactagtagaccaaacagaaacaggttgagggcctgatttggcccatgtgagtcatagtt

SEQ ID NO: 100070 - DNA, 201 bp, Homo sapiens
gaaaaataaaagccctccagtggttctgacaagctgtagctagaggggggtggcagttgcagaaggggcagtttctccgtcttgtattttttatttttttytttgattcttgaaaataagttcttatttttgataagatggaggattattattattattattttgagacagggcctcaaaaaaaaaaaaaaaaaagagagg

SEQ ID NO: 100071 - DNA, 201 bp, Homo sapiens
gtgagtcatagtttgccaactcttgctccttaggcaactaaggttttcaaaccagtgccctagcttatctgatagttaactgtcattctctgtattatttggggaaaattcttacatcagtaacatgaattttcagtacctgtgagagaaagtagttcttaatggtcaggaagggataattaaataaatgtcttacataaa

SEQ ID NO: 100072 - DNA, 201 bp, Homo sapiens
gtattaaaaaatagaggttatgcagatactctgtaaaacttttttggcattatatgcagttttactgacctttatgtaacagttctattatatctagatayctgtgtatctaacaaatttagacattttgcaaaaactgaagacatgttaccaaaaattggtgcctcaaccagtgaaaggaagtatagcattactcagctg

SEQ ID NO: 100073 - DNA, 201 bp, Homo sapiens
ggcttgtgcctgtcccagcacacctaaggaagagggaaaatgtccatcaataagtaacaggggtttactttcagtggacagggtggatggaaggagagatkagcaaatttggggtgaaaaataaaagccctccagtggttctgacaagctgtagctagaggggggtggcagttgcagaaggggcagtttctccgtcttgta

SEQ ID NO: 100074 - DNA, 201 bp, Homo sapiens
ttatcacattgagttacggtcatttgtgtttgtctctctgtcaagaccgagtttttaaaaaatatgattatttttatttcttgtacctaacaccagaagakgcctaaaaagtatgaatgattactgaaacaaattaaaatacagcatttagtagtagttgtataaatgttaccagttacttcatttagatgttaccatcaa

SEQ ID NO: 100075 - DNA, 201 bp, Homo sapiens
ctgttggatccaaaaatgcataaaaatcttcaggcttatagaaccaacagcatcaaaggaagagcagtgtgactcaatattggggtgggggcaggtttggkgttttggttgtgtagaagctccttatgagagaacagtgtgatgcttggagctgtggagaatccagccactgctttttctctcttccttaccttattactc

SEQ ID NO: 100076 - DNA, 201 bp, Homo sapiens
cccgccactatgcctggataatttttgtattttttgtagaggcagggtttcaccatgttggccagactggtcttgaatgcctgactgagctcaggtgattsgcctgcctccgcctccgcctcccaaagtgctgaggttacagacatgagctaccatgcccagccaaatacttttttctaaaggaagaaaacttagtcattt

SEQ ID NO: 100077 - DNA, 201 bp, Homo sapiens
agcagataaaaggagaaagccttcagcaaatttgtgagttgataagcatggattgattggctctgttggcctgggttcttgaggagtttgctgctatttcrgaatttctgtagagaaaccctggcattgtcaggatatgggtatgccacatgtttcccttcctcccccttccctccactccttcttattacctagctagct

SEQ ID NO: 100078 - DNA, 201 bp, Homo sapiens
tcagaaaaaagcagaaatagacttctcttcaaattttgttcagccttttgggtgtagtcattgtttgctaagtatgttgtttaattatctttatgtacccmttatgttgcacttcagtttttaagaggtatttatgattctcagtattttaaagcttactttgaggcagtgtagtactaccagctaacacaagaggtcagc

SEQ ID NO: 100079 - DNA, 201 bp, Homo sapiens
tggccttgtgaaaagtaccagaagacatctgggacagagggaaggtaaaaacaggccctgaggcggggacaagtcaggtgatgctgattatgtaaaccgtrctaagtagagagtttggatttttctcaataatgctttaaaagtcttttcccaccctccctgctgcatggaaaatagctgggaggaagatgctagtggaag

SEQ ID NO: 100080 - DNA, 201 bp, Homo sapiens
tgaactagttttgtcattttacttgcttgccacctacccccacgactaccctgacaggccagaagggaaagtgcggttccttagctcactgtactaataastcctcattcagccatccctagttaagagtgaccccctaatgtccacattttttaggtctgctcttcttttgtcatccctaccagagtaacttaacccttt

SEQ ID NO: 100081 - DNA, 201 bp, Homo sapiens
agagtgtggtattagaaagcagtgagtggaaagttttgaggtagagtgatcaagtgggaaatggtgctgtgcagtagaaaaagatgaagaccagcaagtamccactagattttacctcaggtttgttggtgaccttcacgtgtcaaacctggtttagaggagagacaatggaaaaggaggaatgattttcaagaatgaaaa

SEQ ID NO: 100082 - DNA, 201 bp, Homo sapiens
cctaaataaaaggagattgttgactttgcagagaaaaagaccctaaaagaaaacatttgttttattacaagcacccaggaggattttttataaacatgaamgataactttcctctaacctaagtaaatatttcagaaccaacgtatgttaagtgattatagtaatgtgtgtgcagagactggcagtaaagttagcagcgtc

SEQ ID NO: 100083 - DNA, 201 bp, Homo sapiens
tttttttaatagagacaggatctcactatgttgcccaggctggtctggaactcctaagctcagatgatcctcctgcctcagcctcccaaagtgctgggatwacaggtgtgaatcaccacacccagacccagctgttttctaaatttttttggagaggtggggtcttgctgtgttgcctgggctagtctcaaactcctggtc

SEQ ID NO: 100084 - DNA, 201 bp, Homo sapiens
ccccatttaggcttcaaagacgaaccctactgcatctttttaaaagcattttctgacttgcagatgctgtagtagcaagtacatgagaaatgggttccgtsatggataaattggtaccctgccttagggggcattttggcagtacatgtcctgacccagcagttctgtttctgtatgtctctttcagagaaacttatctgg

SEQ ID NO: 100085 - DNA, 201 bp, Homo sapiens
ttttcaaaccagtgccctagcttatctgatagttaactgtcattctctgtattatttggggaaaattcttacatcagtaacatgaattttcagtacctgtragagaaagtagttcttaatggtcaggaagggataattaaataaatgtcttacataaatctagtttaaggtaaatgtaatgttgaaacatttggtttttta

SEQ ID NO: 100086 - DNA, 201 bp, Homo sapiens
aacaaaaaactttagctaagcaggtacttagtaaatgttagtttccatcacgttctcttacccaaatatgtccttatgcttaataagcttggaggaagatwatcacaattttagaaaaaaaaatacaatatacttaaatgcccacataatgtgatataatcagtaactaccctgacagttcagatatgggagaaatcaagt

SEQ ID NO: 100087 - DNA, 201 bp, Homo sapiens
tcctgggctcaggcatttctcccacctcagccttccaagtagctggggctacaggcatgcaccaccacactcagctaatttttaaattttttgtagagacrgggtttccctgtgttgcctaggctggtcttgaacttgcgacctcaagcaatcctcccaccttggcctcccaatagttttcatttttattgaaattataca

SEQ ID NO: 100088 - DNA, 201 bp, Homo sapiens
ggctacaggcatgcaccaccacactcagctaatttttaaattttttgtagagacagggtttccctgtgttgcctaggctggtcttgaacttgcgacctcargcaatcctcccaccttggcctcccaatagttttcatttttattgaaattatacactaacatagtttaaaggctttaatatttctttgtttgttaaaaaaa

SEQ ID NO: 100089 - DNA, 201 bp, Homo sapiens
agtcggagattgcttgagctcaggggttcgagaccagcccaggcaatatagtgagaccctgtgtcaaaaaaaaaaaaaaaaagatgtcttattaagccaamccccacagggaaaattgcctgtgtggaaactgggaaattgggcagaacacttgcctcagaatgatcccgcccaaattatcagttattcattgagggctgc

SEQ ID NO: 100090 - DNA, 201 bp, Homo sapiens
agaggggtatttggcagggtcataggacaatagtggagggaaggtcagcagataaacaagtgaacaaaggtctctggttttcctaggcagaggaccctgcgggccttccgcagtgtttgtgtccctgggtacttgagattagggagtggtgatgattcttaacgagcatgctgccttcaagcatctgtttaacaaagcaca

SEQ ID NO: 100091 - DNA, 201 bp, Homo sapiens
cagctactagggaggctgaggtgggagaatcacttgagcccaggaagtcaaggctactgtgagctgagatcacattgtgctccagcctgggtgacacagcragactgtgactcgaaaaatatcctaaatttcactttgcttcaggatgttctttaaaagaaatcaataatgtcatttgaaaattgaaatgcagatttggtt

SEQ ID NO: 100092 - DNA, 201 bp, Homo sapiens
ttagccccaccgtgttccagtataacttccttgatacagtggataccactaatgtgaattttttttgagacggagtctcgctctgtcgcccaggctggagygcagtggcgtgatctcatctcactgcagcctccgcctcccaggttcaagcgattctcctgcctcacccttctgagtagctgggattacaggcgctcgcca

SEQ ID NO: 100093 - DNA, 201 bp, Homo sapiens
ttccccaaagcctgggccacagaccccgtactggtccctggcccattaggaaccacgcacataacagatgagcagtgggtgggcaggccggccagctgagygaagctccatctgtatttacagccactgcccatggcttgcattactgcctgagctccgcctcctgtcagctcagatcagcaatggcattaggttctcata

SEQ ID NO: 100094 - DNA, 201 bp, Homo sapiens
gcttgtccactaatctgcattgcttattaaaacaggttgatacttttaaggctctgcaaagaagttcttttcattggttagtatctaataagtgatagctggtacaggactttaaaaatatataataggggtttattttctttatttttattatttattttatttttttttgagacaaggtcttgttctgttgcccaggct

SEQ ID NO: 100095 - DNA, 201 bp, Homo sapiens
gcacaatgttttaagctctctccctgttgctatgcaagcatctaattcattgcgttgaacagccacatagtattccaaggggtatactcattttatcttayagaagaccagatcgtttccagctctccatccccactaacagtgaacattctggtccgtaatcttttttggacctctgtaagaattaagcagaactgcaag

SEQ ID NO: 100096 - DNA, 201 bp, Homo sapiens
ccatctgtatttacagccactgcccatggcttgcattactgcctgagctccgcctcctgtcagctcagatcagcaatggcattaggttctcataggcacaygcaaaccctattgtgaactgctcatgtgagggatctaggttgcgtgctccttatgagaatctaatgcctgatgatctgctactgtcacccatcaccccca

SEQ ID NO: 100097 - DNA, 201 bp, Homo sapiens
acctcaagcaatcctcccaccttggcctcccaatagttttcatttttattgaaattatacactaacatagtttaaaggctttaatatttctttgtttgttaaaaaaaaaaaaaaactattcccagcattttgctctctagtggcaactacttgtacctccttgagccgagtactttgttgtttatatcctgtttttaggta

SEQ ID NO: 100098 - DNA, 201 bp, Homo sapiens
ttcatccaatagcagctttaagtgactatctaaaacttgatattcagggctgagcatggtggctcacacctgtaatcccagcactttggcaggctgaggcrgtcggatcacaaggtcaggagtttgagaccggtctagccaatatggtgaaaccccagctctactaaaaatacaaaaattagctgggcatggcggcgcaca

SEQ ID NO: 100099 - DNA, 201 bp, Homo sapiens
actggggtcttactgtcctgcatgcataagctctttttcagtacagcacctctgccctcatccatgttaatgaccactggtgcagagaccctctgtttcarcttcttctgaaaataaatttcagactgtcaggatttctctttctgtgtaacaaattactgcaaatttagcagcccaaaacaatacacacatttagtatct

SEQ ID NO: 100100 - DNA, 201 bp, Homo sapiens
aagtgtggtctgatagtccatttcccaatttcccactgcaaataaatgtcccaaattgaaatgctttcttcttgctttagaacttctcttcgtaggtgatycagctataagactaaccatccttcccttctcttcactcagcgtctgtcctagcatctggggaggtgctctgatacctgtccgtgggcaccagggaggcct

SEQ ID NO: 100101 - DNA, 201 bp, Homo sapiens
gttcctcatctgtaaaaagattttagagtagccttttgcctttaagtgtttaccataaactagataaaagagcattcccctttatctgcaacccctgtatyagtgttattttcatatatagtccacttttcattaactgcactccaggtgtcatagctgtatcagccagtgtctctagactttcttcagtttgctataaca

SEQ ID NO: 100102 - DNA, 201 bp, Homo sapiens
ggcataacgtttggactgtaattgaactgatgcttgtttccccaaaatgtctttggttttcattaaggtgggggattctctgcatttttggagttgtcacwttatcgaaattcctctccacactaagtactgtgtgtggtatgcttttattttcacctaattgatttctgcaaataaagtgatttaatttttggtattaag

SEQ ID NO: 100103 - DNA, 201 bp, Homo sapiens
ttcctcatctgtaaaaagattttagagtagccttttgcctttaagtgtttaccataaactagataaaagagcattcccctttatctgcaacccctgtattrgtgttattttcatatatagtccacttttcattaactgcactccaggtgtcatagctgtatcagccagtgtctctagactttcttcagtttgctataacaa

SEQ ID NO: 100104 - DNA, 201 bp, Homo sapiens
ctgtaaagaaaaatatagaggtgtggggggctgggcgcagtggctcacgcctgtaatcccagcactttgggaggccgaggtgggcagatcacctgagctcrggagtttgagaccagcctggtcaccatggcaaaaccccatctctactaaaagtacaaaaattagccaggcgtggtggtgggcacctgtaatcccagctac

SEQ ID NO: 100105 - DNA, 201 bp, Homo sapiens
gccgtggggtcggcgcctcacagcccgcctgtctgtatgctcccctagaggtttgagcagcgggacactgaagaattgagccacacccccatcacacaccygcaagtgggacaagggaacctttcccatttcactgctgtgacagtgcaaagctattaaaatctgaattgcttagcaggcatgtaaggtcctctctgctct

SEQ ID NO: 100106 - DNA, 201 bp, Homo sapiens
tttgatagtcatatatttaaaattaagaatttaatagaccttcccactagggaagcatttgtttcctaggcacctttggaaggtgctacattaatgaattwgttttattattttagataaattgtttttccctatttttagaatattaatagagtcaggttggaagatacaaataaacactgattcagaacgccacatgag

SEQ ID NO: 100107 - DNA, 201 bp, Homo sapiens
acaacctgatcccagcttttatatttccatcttatttcctctctctgtaacttgctgttttcagtatgccccctaggatgttctctctcccagcttctttsctttttatttttcaaagctctgataaaaatgattcactccacacagctctcatctgtgtcccagggcactttaaatacatacctctttaaaacatttatc

SEQ ID NO: 100108 - DNA, 201 bp, Homo sapiens
agccatgtcatagcagtagttaaacagagtattaaatgcagatgaacaagatgtcggaaagcaatggtaatgttagcaaagctagagagaagataatttcktatattttacagcaaatgttgttgtctgtgtaaagaaaattataggcatgactgtgaagaaatgaggtttatttaagatgccaaaagtggctgggcgtga

SEQ ID NO: 100109 - DNA, 201 bp, Homo sapiens
tatgagaatctaatgcctgatgatctgctactgtcacccatcacccccacatgggactgtctagttgcaggaaaacaagctcgggggctccccactgattstacattatggtgagttgtataattatttcattctatatcacaatgtaatactaatagaaatagagtgcacaataaatacaatgcacttgaatcatcccaa

SEQ ID NO: 100110 - DNA, 201 bp, Homo sapiens
atacaaattttagcttagtttctttttgcttcacactgtgtgcggtggagattttaaaaataggataaagctttaataataacagctaactttattaagtmtgtcaatatgattgttattctcattttataaatgaggaaagagaaccttaaaatgcttaagtaccttgcccaaggtcactaggctcttaagtggagaagc

SEQ ID NO: 100111 - DNA, 201 bp, Homo sapiens
gctgctatctcagttacatgtaatgttttaaaaaaatgcaggccaggttgggtggctcatgcttgtaatctcagcactttgggaggttgaggcaggaggaktgcttgagcccaggagtttaagagcagcctgggcagtatagcaagatcctgtctacaaaaaatttaaaaattagctagatgtgctggtgcgcacctgtgg

SEQ ID NO: 100112 - DNA, 201 bp, Homo sapiens
gaaatgaagaggacttggagaaaggagtaggaggaaagccacaaggttgcaaaagtccctagagggagatcaaggaaattttctcttggggctctaaagtrtaagaacttaggtgtatgttttgtaggctgagaggaagaagcaaatatagagagaaaaagagtaaaaattgctagagagtccgggcacggtggcttacgc

SEQ ID NO: 100113 - DNA, 201 bp, Homo sapiens
tagtgatacatttgctttcttctgcagagaggagggactgaattttgggactgttgcctgcaccatcccagtccaacttgctatgtgtttttatttttagycattggctgattccaatttgaaattcagaggatttgtgatatattatgtgatatgttttaaaaattactagctccttgctgcattttataaagcgttgga

SEQ ID NO: 100114 - DNA, 201 bp, Homo sapiens
tttcctttctcagagatcactgccttgcactacctgatgtccagtgtatggaaactgctgttttatatattttgtcagtttttttgttgtttaagtggtasggcagatttagtatctgatataccatcttggttagaagctgaagtgactttacagcccatgatactttttgtaaataaagattagtcgttagaaaacaat

SEQ ID NO: 100115 - DNA, 201 bp, Homo sapiens
cccgccagtcccgcactgtgcgcccacactcctcaacccttgggcaggcgatgggaccgggagccgcggagcagggggtggtccccatcggggaggctcargccacgtgggagcccactgcaggggtggaggggaggctcgggcctggcaggctgcacgtctcaagccctgccccacggggaggcagctgaggcctggcga

SEQ ID NO: 100116 - DNA, 201 bp, Homo sapiens
acgttttttgtcattatgtagttgtacttgatttcttttctgttttgtctacttttttctgaactttcaaaaaaattaacacctaaattgcaaacagattacagagagatagcaatcttaattggatttctggttatatcacaggtgataagctatcacaggtgacaaactgtaaaatgttcaaacttatgctcctaactg

SEQ ID NO: 100117 - DNA, 201 bp, Homo sapiens
caagttccagtatctcctcttccttccccactttcctttcacctgatgaccatattgtttcagtaagatacgcaattagaagagaatttcagccaggcacrgtgactcacacctgtaatcccgtactttgggaggtggaggtgggtggatcatgaggtcaggagattgagaccatcctggctaacacggtgaaaccctatc

SEQ ID NO: 100118 - DNA, 201 bp, Homo sapiens
cgttttttgtcattatgtagttgtacttgatttcttttctgttttgtctacttttttctgaactttcaaaaaaattaacacctaaattgcaaacagattacagagagatagcaatcttaattggatttctggttatatcacaggtgataagctatcacaggtgacaaactgtaaaatgttcaaacttatgctcctaactgg

SEQ ID NO: 100119 - DNA, 201 bp, Homo sapiens
aaagacgaaccctactgcatctttttaaaagcattttctgacttgcagatgctgtagtagcaagtacatgagaaatgggttccgtcatggataaattggtmccctgccttagggggcattttggcagtacatgtcctgacccagcagttctgtttctgtatgtctctttcagagaaacttatctggatacacatacattca

SEQ ID NO: 100120 - DNA, 201 bp, Homo sapiens
acccgggaggcggaggttgcattgagccgagatcgtgccattgcactccagcctgggcaacaagagcaaaactccgccttaaaaaacaaacaaaaaaaacmaaacaaacaaaaaaactctctctgtatctaaaacaaactttttggtggcttacacttataatcccagcactctgggaggctgaggtaggaggattgcttg

SEQ ID NO: 100121 - DNA, 201 bp, Homo sapiens
aacatccctggcctctatccaccagatgccattagcacctccctcccgtttgtggcattcagaatgactgcaagcattgccaaacgtcagggggtggggtrggaggcaaaattacttccagttgagaaccactgctctaagactactgttgaaatatgggtgtttgggggggtttgtgatatgaatgatgtactttatgta

SEQ ID NO: 100122 - DNA, 201 bp, Homo sapiens
ttgcggggtggggtggggggttcgctatgtcggatgacgattcgagggccagcaccagctcctcctcatcttcgtcttccaaccagcaaaccgagaaagamacaaacacccccaagaagaaggagagtaaagtcagcatgagcaaaaactccaaactcctctccaccagcgccaagaggtactgtgctcttttttttttcc

SEQ ID NO: 100123 - DNA, 201 bp, Homo sapiens
ttttttccatttttaaaattcttctaacctttgtcttgggtttttctttttattatatactttttctttgattctttggctaatgcttgttatggcactarcatcacgtaacagctgaaatttattaacctgagtataatgttttgatgagcctctgacaagctcagtactgttgagaagaagtaatggatttatttggag

SEQ ID NO: 100124 - DNA, 201 bp, Homo sapiens
cagtggcttacgcttgtaatcccagcactttgggaggctgaggcaggcggatcacgaggtcaggagatcgacaccatcgtggcgaacacagtgaaaccccrtctctactaaaaatacaaaaaaattagccgggcatggtggcgggcacctgtagtcccagctactcaggaggctgaggcaggagaatggtgtgaacccagg

SEQ ID NO: 100125 - DNA, 201 bp, Homo sapiens
gccgggcatggtggcgggcacctgtagtcccagctactcaggaggctgaggcaggagaatggtgtgaacccaggaggcggagcttgctgtgagcagagatygcaccactgcactccagcctgggcaacaaagcgaggctccatctcaaaaaaaaaggttatactaagtgaaataaactagaaccaaaaagacaaatagcgt

SEQ ID NO: 100126 - DNA, 201 bp, Homo sapiens
tttgattctttggctaatgcttgttatggcactaacatcacgtaacagctgaaatttattaacctgagtataatgttttgatgagcctctgacaagctcastactgttgagaagaagtaatggatttatttggagtggatttttacatatatgaaacaaaactaaagtaaatttaaaggtgtctccttgcctaatcatggg

SEQ ID NO: 100127 - DNA, 201 bp, Homo sapiens
ttgaaccctggaggcagaggttgcagtgagccaagattacgccactgcactccagcctggttgacagagtgagactctgtctcaaaaaaaaaaaaaaaaagaaagaaaagaaaaggcactgccttcaaggagttcataatctagtcaagatgttaagacatgcacacacatattttgaatggtacttggaaatataaatat

SEQ ID NO: 100128 - DNA, 201 bp, Homo sapiens
gttcataatctagtcaagatgttaagacatgcacacacatattttgaatggtacttggaaatataaatattatttggaaaataataaaatgcagatatcaygttataaagtttcagaggagtgagagattactttgacttgggtttgagggattgtggctggagtacttagtgatctgggaaggcttcatggaagaggtga

SEQ ID NO: 100129 - DNA, 201 bp, Homo sapiens
cttaagtgcctaatcattttcaagaggaggagcaaacagtttgccctcaagtatctggtctatcaacaggggtctggctaaggaaaaaacggccttagagmgtgatgaacctacttaacactacctggtacctcaactcatgctaaacattctaatttgagcaaagctaaatcatgggtcttagtctgtttagcaaaatct

SEQ ID NO: 100130 - DNA, 201 bp, Homo sapiens
tgtgtctagagaggaagaaacattagtgggagaataaatagtaatagataaagcttgtgttcttcagtgtcaggctaagtctttaaattttattatgtagrtgctggagaatcattaaaaaccttttgagtaggggctgtcattcagatagagttggctatctggatagagacagagtaaggattgagtggagcttggtag

SEQ ID NO: 100131 - DNA, 201 bp, Homo sapiens; identical to SEQ ID NO: 15687

SEQ ID NO: 100132 - DNA, 201 bp, Homo sapiens; identical to SEQ ID NO: 15688

SEQ ID NO: 100133 - DNA, 201 bp, Homo sapiens
ggtgaccatagttacttttattttttatttttatttatttatttatttttagatggagtctccctctgttgcttaggctggagtgcagtgacacgatctcrctcactgcaacccccacctcctgggttcaagctattctcctgcctcagcctcctgagtagctgggactacaggcgcccactaacacacccggctaatttt

SEQ ID NO: 100134 - DNA, 201 bp, Homo sapiens
taataacattgattaaaacatataatggctttcttgtgaataagcacagtcaaatctaaaattgtaaaccatttgaagattttcatgggattaagcatttaaaaaaaaaaaacagtgtaagtacacttcagtttcacatcgttttaactgagtttatgtgtgaaagatttatgctcctgaggcatgtggaacttttttatc

SEQ ID NO: 100135 - DNA, 201 bp, Homo sapiens
tgtttggaatgaagcaggaaaataagtcaaaagatctcccctcagttcctaagcaactttgttgtaaaaataactgtgaaaactgggcttaaatgaaacayacattcgaatgcctggagtaagaattattgatagcccagacttagtatcccccccacctttccaagtccttaaagcattggctttctactcagaaacgct

SEQ ID NO: 100136 - DNA, 201 bp, Homo sapiens
ttattagagacggggtttcaccgtgttagccaggatggtctcgatcttctgacctcgtgatccacccacctcggcctcccaaagtgctgggattacaggcmtgagccaccatgctcagccttaaaattgttatttggaaataatgcacgtgatagacaactcaaaacagtagaaagggatatatagaaaaagtaagttttc

SEQ ID NO: 100137 - DNA, 201 bp, Homo sapiens
gggttcagtttcatttttttgtttgtggctattcttttgttcccaacaccatttgataaaaaagactattctgtctccattgagctgatttggcactcttktcaaaaatcaatttacctgtaaatgtaagagtttatttctgggctcttaattaggttccattgatctttgtatctatccttttgctggtactacgatgtc

SEQ ID NO: 100138 - DNA, 201 bp, Homo sapiens
ttataataattcgttttatccacatggttcaagtgggtctttttttaccctccagtggtgataggctgacccaagcccaggcccatcagaatgctttatcwtggtcaggcatggtggctcatgcctgtaatcccagcactttgggagaccgaggtgcatggatcacctgaggtcaggagtttgagaccagtctggccaaca

SEQ ID NO: 100139 - DNA, 201 bp, Homo sapiens
tataaatgaaaaggcacaagctgggcatggtggctcacgcctgtaatcccagcactttgggaggccaaggcgggtagatcacctgaggtcagcagtttgasaccagactggccaactaaaaatacaaaaattagccgggcgtggtgacgcgcgcccgtaatcccagctacttgggaggctgaggcaggagaattgcttgaa

SEQ ID NO: 100140 - DNA, 201 bp, Homo sapiens
tgcatggatcacctgaggtcaggagtttgagaccagtctggccaacatggcgaaaccccacgtctactaaaaatagaaaaattaaccgattgtggtagtgyatgcctatagtcccagctactcgggaggctgaggcaggagaatcgcttgaacctgagaggcagaggttgcagtgagccaaaattgtgcctgggcaacaga

SEQ ID NO: 100141 - DNA, 201 bp, Homo sapiens
attttatctgctataaatgggtaagagttagattttatttaaaattcatcttggcatttagagactgatactgtttctggccatatcagctgaactgtgtyattagaatttttaattgttttagggttttttttttaagaatagatgattgatttttttctgtctctctactcttcttactcagaattagatgtgctttga

SEQ ID NO: 100142 - DNA, 201 bp, Homo sapiens
gtattaaatgcagatgaacaagatgtcggaaagcaatggtaatgttagcaaagctagagagaagataatttcgtatattttacagcaaatgttgttgtctrtgtaaagaaaattataggcatgactgtgaagaaatgaggtttatttaagatgccaaaagtggctgggcgtgatggcttatgcctgtaatcccatcgcttt

SEQ ID NO: 100143 - DNA, 201 bp, Homo sapiens
atataccaccattgtgcatggcagaggaacttcatttggtaaagaattgtgtcacatggttataggttgtaagatactatctttttcctttccgtcttatmtttcttattatttattttttgagacagagtcttgctctgtcacccaggttggcatgtagtggtgccatcacggcttactgcagcctcaaactcctgggct

SEQ ID NO: 100144 - DNA, 201 bp, Homo sapiens
gtagctggggctacaggcatgcaccaccacactcagctaatttttaaattttttgtagagacagggtttccctgtgttgcctaggctggtcttgaacttgygacctcaagcaatcctcccaccttggcctcccaatagttttcatttttattgaaattatacactaacatagtttaaaggctttaatatttctttgtttgt

SEQ ID NO: 100145 - DNA, 201 bp, Homo sapiens
tgaggcaggagaattgcttgaaccctggaggcagaggttgcagtgagccaagattacgccactgcactccagcctggttgacagagtgagactctgtctcaaaaaaaaaaaaaaaaagaaagaaaagaaaaggcactgccttcaaggagttcataatctagtcaagatgttaagacatgcacacacatattttgaatggta

SEQ ID NO: 100146 - DNA, 201 bp, Homo sapiens
gagaagaagtaatggatttatttggagtggatttttacatatatgaaacaaaactaaagtaaatttaaaggtgtctccttgcctaatcatgggtctttgayatgccattaaagatgatgtaaaacctttcagatgcgaaggacattttggtttggaaaactgctttgctacagtaatctcttattcaatctctgctaagct

SEQ ID NO: 100147 - DNA, 201 bp, Homo sapiens
gtgtgaaagatttatgctcctgaggcatgtggaacttttttatctttgggaaaccctcccaattaccccttcaaggtgaaacgtttgggaattacctgtgrtcaggggatgcaccaaactgggtggctgttgggtgattggtgttacggagtcaaagctcaaaatactaaattttaagaaaaatctctgatttgagagaaa

SEQ ID NO: 100148 - DNA, 201 bp, Homo sapiens
taggttcagcagaagtcatcctttataaaaccctgtatcttatgtgctaaaaagtattcttccttttagcatctttcatttatctgatgttactaaatgcrttaaggatagaagtgtgacttaaacatctgaatgatgtttagtttcaccattgcagtgtgtatacctttatgcatgtaaaggcagtgttgaaaaattgtg

SEQ ID NO: 100149 - DNA, 201 bp, Homo sapiens
aaggaatgaagttgtgatgcatggatacaacatggttgaaccttaatgttatactaagtgggctgggcgcagtggcttacgcttgtaatcccagcactttrggaggctgaggcaggcggatcacgaggtcaggagatcgacaccatcgtggcgaacacagtgaaaccccgtctctactaaaaatacaaaaaaattagccgg

SEQ ID NO: 100150 - DNA, 201 bp, Homo sapiens
cttacacgcaagcagctctaagcgaaacctctgcctttcctacagcggatgggtgtgctgtgtcctgagacagacagcagtaggaagaccagctctccggytcctgggacatagaaaccaattttgaactcttttcacacacaacaattttcactctagtttttaggtgactgattacaaggcaagtgacaattttcactc

SEQ ID NO: 100151 - DNA, 201 bp, Homo sapiens
actccaacatgaaaagacagagcctatctaaagagataggctagtgtgaggtttttttacagcacaaatctgttgaataagtggatttggatgtaaccacrggcttgccatatgaaattctattccatgggaattaaagtttgtggctttgtgaaggcatttgttgcagactatgaaaagttctcatattcttttgccaaa

SEQ ID NO: 100152 - DNA, 201 bp, Homo sapiens
agaaacttaaccaaacactagtatgcgtagatctgagagagtggggttatctaccagtctctgtatggagtcagtatgttaaatgtgtcagaaatagaattaataaaacaggagaatacaaaagaaaaacaatgaacagagatttttaaaagagggtgtttgtaaagggtagagaaacagaagagacaaaggttgggccgg

SEQ ID NO: 100153 - DNA, 201 bp, Homo sapiens
tttaagttggttttaatattgttagtgtttttcaaatgatgggttgagcctctttagtaattgtgtattaaaataatttggtaagttgtgaccagcatttaaaaaaaaaaagaatggcataggataggaaagggaagggaaaagaaagaaagggtacaatgtaagtggtaataagggctactaattttggaaacttttata

SEQ ID NO: 100154 - DNA, 201 bp, Homo sapiens
acggcttatatttgtggactggacccctgaaggctaattagggcctttctcattgtctcctccacctagttcttcatttcaggtgtgtgtgtgcgtggatkcatacacgcacatatgttggaggaacagcgtttgtaggaatcgtctcgtgtgattgaaagtttgtcttatgtaattcatcaagtgaacatttagagaata

SEQ ID NO: 100155 - DNA, 201 bp, Homo sapiens
caaaatgctaagtctttgtaaccgttttcttctttcctagcccctttgcttttactctgtccaaagttaacatgtcactgaaaaacgagccacgggtaaayacctctgcactgcagaaaattgctgctgacatgagtaatatcatagaaaatctggacacgcgggaactccactttgagggagaggaggtagactacgacg

SEQ ID NO: 100156 - DNA, 201 bp, Homo sapiens
agtgtgctactgacataaagttagacttacaggtcaactgaatagagtcgagaatctaaaaataattcttatgattatggtcaattaaatttcagcaaggkggtgccaaaacaattcaatggagaaagaatagtcttttcagcaaatggtgctagaaaaactagatatccacttgcaaaaaaaaaaaaaaaaaaaaaaaaa

SEQ ID NO: 100157 - DNA, 201 bp, Homo sapiens
gtctataaatcataacagcatcgatatatatttaagaatggagaagaggccaggtgcagtgactcacacctgtaatcccagcaatttgggaggctgaagcrggaggattgcttgagcccaggaattcaagaccatcttcggcaacgcagtgaaaccccctctctacaaaaattagctgagtgtggtggcatgcatctgttg

SEQ ID NO: 100158 - DNA, 201 bp, Homo sapiens
gaaaattgctgctgacatgagtaatatcatagaaaatctggacacgcgggaactccactttgagggagaggaggtagactacgacgtgtctcccagcgatsccaagatacaagaaggtaaagacggatgatctgagcggggaagaaaagagtttatctcggttggtcggaagaccacaaatttgaagtaaccagcaaatga

SEQ ID NO: 100159 - DNA, 201 bp, Homo sapiens
gattgggtaagcaaggaaggaaatgcctctgggcaattaggaaagaaggtaaatcatcaagggcttgttcctgccaggttgagttccctcttcccttacaygcaagcagctctaagcgaaacctctgcctttcctacagcggatgggtgtgctgtgtcctgagacagacagcagtaggaagaccagctctccggttcctgg

SEQ ID NO: 100160 - DNA, 201 bp, Homo sapiens
ccaggctggtttagcttttctggaactagttaggcagtcccttctttccccaagccatacagtgcattttctcagaagaggaagagcgttcttggttaggmcttgacattatgaagaagctgttctccctgctagaatctccttgggcttattgtgagtcaaagattgaactcattgttgtgggttttgagatctactctt

SEQ ID NO: 100161 - DNA, 201 bp, Homo sapiens
tttgtagtaattaagaataaccttgtaaaagtaaaagaagcaaaataaaacaaaataaaatgaaatatagacaggagccatgacagatgttacagaatagkgaagggatgtgaagacaataggtgccgttgtcattaccgcagccctggcaacacacgtcacagattaaataatgaatgccagttggtgggcacagagagg

SEQ ID NO: 100162 - DNA, 201 bp, Homo sapiens
agtttagcttgttattcaggctatgaagcgatagcctggatgacagcttctgtcctccagtccaacagcacaccctcccaagtcctgaaatgtgacagaaygtgttgtaggaagccattcactcaatctcaaaaaccatgtgaactgcttggctgtcatctaaaattgatactaccttttattttttgggtgaatttctct

SEQ ID NO: 100163 - DNA, 201 bp, Homo sapiens
cgaggtttcaccatgttggccaggatgatttcgatcccttgaccttgtgatccgcccgcctctgcctcccaaagtgctgagattacaggcgtgagccaccrtgcccagcctccctctcattttcgatggttactgagattattctctccaacagctgaattgttcaatatgattcaagcataggatacaatttgatataca

SEQ ID NO: 100164 - DNA, 201 bp, Homo sapiens
gttcgaaggagacatttcaaccggcggaggaaatgctctacaggcaatcatgcacttcaactacaggtgccaaaactctaaatggtctattttgagctttyggtcatgcatcatgtaagctgatgaagggaatggcagtgtttctccacatccattcggtggagtggggaacaaatgaacactttattttactttcaaatc

SEQ ID NO: 100165 - DNA, 201 bp, Homo sapiens
ggctttcattttgcagaaatatttcccacattttgtataagcctacactataacaacctggaaaatgccttcatccccaaggaatgattcattcgcctttkccctttatggctagagtttataatagtcaataccttgaccaaaagaagaagaatgcattgctttattatcacaggaatcttgtcactaattaactgttta

SEQ ID NO: 100166 - DNA, 201 bp, Homo sapiens
agtatagaagaaatgtcaggtattaataaatggagagtagtaatgtattccattagtgttaatatctctattatttcaaaaatccattagttatgcaggtragtagaaaactgtaggattcaggccaagttcctaatttgcaactactactcttcatgagtaataatgtcttaagcctaagaagcagaatttcatctgctt

SEQ ID NO: 100167 - DNA, 201 bp, Homo sapiens
ttgcttgagcccaggaattcaagaccatcttcggcaacgcagtgaaaccccctctctacaaaaattagctgagtgtggtggcatgcatctgttgtcccagsttttctggcagctgaggtgggagaattgctggagcctggaaggcagaggttgcagtgagctgagatcatgccactgcagtccagcctgggtgacagaggg

SEQ ID NO: 100168 - DNA, 201 bp, Homo sapiens
agaacagtattaccatttaacccagcaattccattattggatatatacccagaggactataaccattctactgtaaagactcagtgcatgtgtattttcaytgcagcacaatttacaatagcaaagacatggaatcaacctaaatacccatctgtagtagactggatagtacatgtacaccacagcatatgaaatcatgta

SEQ ID NO: 100169 - DNA, 201 bp, Homo sapiens
gaaaataaagactaacatgattgtcttgtttatttctcatagaaccagtttttcataagctgtgctgatgacaaagttgtgttcaacaagataggcgatgccattgcccagaggatcctgaaagctcacaggtaacagcctttggctgagagttctcgctgcagatgttcttgtatttattactaaaatgactttgcaaag

SEQ ID NO: 100170 - DNA, 201 bp, Homo sapiens
tgtggctaaaagttgttgcagggttaaaatgagaaacatgtaaacctaactttcccataagcctgtgacatttctgattacaaagagaatcatacaaatckcatcttatgcttcagtgggaacacattccagtgtgttagtttccctaaattcacagtgcagtgtaaaatctggaccccagctgttttagtgctgggttat

SEQ ID NO: 100171 - DNA, 201 bp, Homo sapiens
tgctagcttctcttctccccagtagttagagcaactgatggaattattcatacaaatcagagcatctcctgtgataaacaacggtagcaactgctccactstctttgtcacgtgcttacagcacagattctttctaacccaacagtggaagtgttcaatacctatagcaagtctgatgtgtaggagaatacattaaaaatc

SEQ ID NO: 100172 - DNA, 201 bp, Homo sapiens
tggacaataagatacaagggaactcttagcccctgattgggatcttcataacagtctagtctagtttggtttatgccactttccatgggtggattttataygtagtgtgatattagaatcactggatttgccattattttttctattgtctgtcttccgtgtgagagggcaaggtccttgaggtcacagactgtgtttttg

SEQ ID NO: 100173 - DNA, 201 bp, Homo sapiens
ttcactcactgaaactctatctttcaggttcaagcgattctcccacttcagcctcctgagtagctgggactacaggcgcctgccaccacccccgactaaaktttgtattttttgatagagacggggtttcaccatgtttgccaggctggtctcgaactcctgacctcaagtgatctgtctgcctcggccttccacagtgct

SEQ ID NO: 100174 - DNA, 201 bp, Homo sapiens
aaagataataaatacccacacctctgacttactaattattttactaaatttattgctctctatgctatttatgtttattatttctatatggtgaaaatacygtaactattgcacgtcttccccaaactgtatgttctagtgatatcatgttggtaacttggaagcggccatgataggaatttctttttttgagacagaatt

SEQ ID NO: 100175 - DNA, 201 bp, Homo sapiens
tcttctccccagtagttagagcaactgatggaattattcatacaaatcagagcatctcctgtgataaacaacggtagcaactgctccactgtctttgtcaygtgcttacagcacagattctttctaacccaacagtggaagtgttcaatacctatagcaagtctgatgtgtaggagaatacattaaaaatcaaatatataa

SEQ ID NO: 100176 - DNA, 201 bp, Homo sapiens
cccacacctctgacttactaattattttactaaatttattgctctctatgctatttatgtttattatttctatatggtgaaaataccgtaactattgcacrtcttccccaaactgtatgttctagtgatatcatgttggtaacttggaagcggccatgataggaatttctttttttgagacagaatttcactcttgttgtc

SEQ ID NO: 100177 - DNA, 201 bp, Homo sapiens
aaaaagaatggcataggataggaaagggaagggaaaagaaagaaagggtacaatgtaagtggtaataagggctactaattttggaaacttttatatcagtkgtagatagatagatagatagatagatagatagatagatagatagatagactgactgacccggtgttggtttgggtgtataatgtatttctttctgcagct

SEQ ID NO: 100178 - DNA, 201 bp, Homo sapiens
aaataaatgggtcatgatgaagaatgtcaggtgtaatgttctactatttaggttgaaattttgggttttaccctttgtattatatcttttagtgaaaggcttttttttttttgtaaccattattcagtgctgaattctaaaatattcaaataccaaaaatagaactgaacagtagaggagaaaaataaaataatattgtaa

SEQ ID NO: 100179 - DNA, 201 bp, Homo sapiens
ggatccaatgggcatacagaacattctacccaacaacagcaggatacacattcttctcaagtgcacttggggcattttccaggaccatctgttaggctgcwaagtaagtcctaatagattttaaaaggtagatatacaaacatctgtctgaccacaagataatgttagaaattaataacagaaggacaactagaaagttca

SEQ ID NO: 100180 - DNA, 201 bp, Homo sapiens
tctgaccacaagataatgttagaaattaataacagaaggacaactagaaagttcacaaatttgtggaaattaaataacacactgttaaacaagcaatgatmaaacaaaaattcacaagggaaagagaaaatacttagagacaaatgaaaatgaaacaacataccaaaattatgggacacagagaaagcagtgcaaaggggg

SEQ ID NO: 100181 - DNA, 201 bp, Homo sapiens
gaagcagggagctaatacctttgtcaattctttacaaaaagccttgcatctcagtgtgttaccactggatgatgccttcaaaatctcataagcagttgcaratgatctttcctttggtttatcttgatgggatcttaatgtttaaactgttgctaatcaacaaagcatgtggacaataagatacaagggaactcttagccc

SEQ ID NO: 100182 - DNA, 201 bp, Homo sapiens
agcttgaagagtaaataggagtcttttttttttctttttctttttgctaaatgctgagaataaaattattttctttggtgtatacgttgtacagtttggtrtttgaattatagaaaatgcttttcagggagaacacagacctatttcattatgacaggaaggacatttcaaaagcatattatcagtggggattattccctc

SEQ ID NO: 100183 - DNA, 201 bp, Homo sapiens
agatttttataggcatattttgggggcaataatcagtaatttttcaggaaatggtaggctccctttgatcatcttctattctgcttatttcctgcatttcyagcgttagaatggcatattttcaggttatcactgggtttatatgtttaagaggagatagagatggcattgcctgccattgtttcaacaggataaaaaata

SEQ ID NO: 100184 - DNA, 201 bp, Homo sapiens
gtgtcgagagggcagacagcaaaggagttctttgcctctggaaacttagttagctggggagagatagctgagatgaataattcagttacagtgcaaggtayggtctctgagtaaatgctggtgtgacagtaaggaccagcatgctgtaagagtttggaaatccagagggacagaactgggtgtccactctaaggaatagtc

SEQ ID NO: 100185 - DNA, 201 bp, Homo sapiens
aggaagcagggagctaatacctttgtcaattctttacaaaaagccttgcatctcagtgtgttaccactggatgatgccttcaaaatctcataagcagttgsaaatgatctttcctttggtttatcttgatgggatcttaatgtttaaactgttgctaatcaacaaagcatgtggacaataagatacaagggaactcttagc

SEQ ID NO: 100186 - DNA, 201 bp, Homo sapiens
agtgcctaaatcagttattttgcatcgtgtgcaattggaggtatgtgtatataagaaataagacatttcagactgtagatcaaataatagaactttttttwaaaaaggccaggtgtggtggctcccacctgtagtcctagcactttgggaggccgaggcgggtggatcacctgaggtcaggagttcgagaccagcctggcc

SEQ ID NO: 100187 - DNA, 201 bp, Homo sapiens
tctttgtagaaaccacaatttgtggtttccagttttgaatgaaaataatcctggatgaaagagggtatattcaggatgtgatttccagctgaggaccttcyttatggactacatccaaggaccagttgccccctttctcccctcttccttagcagcattccccaccccactactctcctttggttcacacatgacactcaa

SEQ ID NO: 100188 - DNA, 201 bp, Homo sapiens
gcgggagcccgcggaggggaggggctcgggcatggcaggctgcaggtcccaagctctgccccgcggggaggcggctgaggcccagtgagaattcaagcgcrgtggggcgggccggcagtgctgggggacccggcgtaccctccgcaactgcttgcccggtgctaagcccctcactgcccggggccggtggcgccagccgct

SEQ ID NO: 100189 - DNA, 201 bp, Homo sapiens
agggttcagaatttaacagtgatctttttcaaagtaggcttttacagatggcacatttagatgaaggagaataggaataaacatggggaaaaggaaagccrtagaaagggaggggagaaacaaatgcagagacgaggcattggcagagggccacagataggaagcagggagctaatacctttgtcaattctttacaaaaag

SEQ ID NO: 100190 - DNA, 201 bp, Homo sapiens
tcctgagcttattataaagtatttcctttggctctggacccttttcttgcctttgcctattcaagggtgcaaattggtttttaacacaagaattaatttcratgctaagcctgtttatgaaaagatttccaagtaccttgggaacagtcaaaataaggcatctcagtggggaaaatgttcatatgctagacagagagcaaa

SEQ ID NO: 100191 - DNA, 201 bp, Homo sapiens
gcaactgcttgcccggtgctaagcccctcactgcccggggccggtggcgccagccgctctgagtgcgggacttgccgagcccacgcccacccagaactcgygctggcctgtgagtgcagcaggcagcctggttcccactggcgtctctccctccacacctccctgcaagcagaaggagttggctctggcctccgccagccc

SEQ ID NO: 100192 - DNA, 201 bp, Homo sapiens
aactgtaggattcaggccaagttcctaatttgcaactactactcttcatgagtaataatgtcttaagcctaagaagcagaatttcatctgcttaaaataartgggtcatgatgaagaatgtcaggtgtaatgttctactatttaggttgaaattttgggttttaccctttgtattatatcttttagtgaaaggcttttttt

SEQ ID NO: 100193 - DNA, 201 bp, Homo sapiens
ccattgcccagaggatcctgaaagctcacaggtaacagcctttggctgagagttctcgctgcagatgttcttgtatttattactaaaatgactttgcaaarcccatttttaaagtactgtcatttcctagcagcttaaatttggttcagccagcaataggttattgatgcctttagtctgagtcagttgctaaagattttt

SEQ ID NO: 100194 - DNA, 201 bp, Homo sapiens
cgcttacgtccatgtgatagagaacagcaggcactatatctatatcgaagtaagtcttgctcatgtaaattcgtgtgagaaactgccttcccttaaatatyatgcagagatttcagggtccccaaacttaggacccctcatattaataagtatattttgaggcgtgaaaagtgctggagaagctctggttcatatcacctg

SEQ ID NO: 100195 - DNA, 201 bp, Homo sapiens
ccattgctaatacttgttcatttctgattgctgccttgtagttgctccgctctgctgctgattggtctgctggtataaagtaccatgaagagtccatccaygccgcttacgtccatgtgatagagaacagcaggcactatatctatatcgaagtaagtcttgctcatgtaaattcgtgtgagaaactgccttcccttaaat

SEQ ID NO: 100196 - DNA, 201 bp, Homo sapiens
ggattggacattgtctttttgattattaatattgttaaataattgtattatttgtatagcatgttagcatctacaaggcacttttgatttaatttgactcrattaaataggccacggtgaccttgtctattttcttttagatccaaggtctaaggaaggatgaatcaattgaatttgggtgtccattttatactaaagttt

SEQ ID NO: 100197 - DNA, 201 bp, Homo sapiens
tttttgattattaatattgttaaataattgtattatttgtatagcatgttagcatctacaaggcacttttgatttaatttgactcgattaaataggccacrgtgaccttgtctattttcttttagatccaaggtctaaggaaggatgaatcaattgaatttgggtgtccattttatactaaagttttcaatgttttggatc

SEQ ID NO: 100198 - DNA, 201 bp, Homo sapiens
aaaaaaaagaaaattttcaagaaagtataaataacatccaaattataccactgaaaaaaaattgttttcacgcttggaataaatgtccaaaggatattccmaaggatctgttagatctgaaaggacagcaaaatgttttgtatcccagaatggtgtgagagaataaagtagataggtgaaaaataaagtgagcaggtgggg

SEQ ID NO: 100199 - DNA, 201 bp, Homo sapiens
tcatggtgaaataatatagtgtaactttccacttgattaagtgttacaggtgatatgacctggaatcagatgagaccctgagtgagatgaggcggcttttwttctgtgtcgttgactttcttgatgtgatttcagtgatcagaacacatctgctgtgtgaaacattttaaaaaatatattacagtattgttcttacgtata

SEQ ID NO: 100200 - DNA, 201 bp, Homo sapiens
taccacttctcctctgctcctgccacatcgcatagctgctgaacgacatgctccacatttctctggagttcacctgaaagcaaggcacagatcctcctggytctcatatcctcacattgaaaagagagtggggtctatcctgtttttccccgaactcagcttgaggccaaaggactgattccttgccctgagtcttgctct

SEQ ID NO: 100201 - DNA, 201 bp, Homo sapiens
ggctttttttctgtgtcgttgactttcttgatgtgatttcagtgatcagaacacatctgctgtgtgaaacattttaaaaaatatattacagtattgttctkacgtatattgctaagaaaataaagactaacatgattgtcttgtttatttctcatagaaccagtttttcataagctgtgctgatgacaaagttgtgttcaa

SEQ ID NO: 100202 - DNA, 201 bp, Homo sapiens
agcagaacaaacacataagcaaaaccattatatttcattactttaagtcattgaatgcacgcagtgaagaataagtgcatatgcatttgggaattaaaacrctttttacttccagtgtcatgtggtactttgatatcttttttcacataatatttggggacttttatacttaaggacatattataacagtaactatcagca

SEQ ID NO: 100203 - DNA, 201 bp, Homo sapiens
tttctacctgatgaataataatgcagctccttggagatgatgtaaaatcatgatatttttccagtgtggataatatttatctaaattttccttatgagttmtcttctatgatatttaatatattcatgttgacaattaaattttgaaattttgttgcacatattcatctgataatttttttaatgctttgattggcgatat

SEQ ID NO: 100204 - DNA, 201 bp, Homo sapiens
ttattgatttgaacaagaatttttccaggccttttatatacagcagacatagaactgattatgtattggatcgctttgtatattcctaatgagtatgggascattctttttattttcaatatcagttgaccttataagggacagttttaatattcatttcaaaccagaaatagcaagtattatttttatactaattcttct

SEQ ID NO: 100205 - DNA, 201 bp, Homo sapiens
aaatagaagccattgctcagaatttttaccttgatcattaaacttgtttctatggatctttgagagaaaaggaaaatatctaagtaaattaaaacatcatrggtacatttagccacatggcagtgataaataggacaaaaattaaaaggaaggataagagttaagaaactaggacatcactgatgaactcttaaattccaa

SEQ ID NO: 100206 - DNA, 201 bp, Homo sapiens
gtccaaaggatattcccaaggatctgttagatctgaaaggacagcaaaatgttttgtatcccagaatggtgtgagagaataaagtagataggtgaaaaatraagtgagcaggtgggggtaaaaggaatccaccttgtccatttccatggaagttatttaccatgggagttgttttccatgtatgggccaggccttcatgga

SEQ ID NO: 100207 - DNA, 201 bp, Homo sapiens
tgtcctttattaaaatgcattacttaccagtatctagtggcaggtctaataactactgtaattttgaaatagtgatgagtggaaatgatactttgagataytgcaataactaatgtgatatgaaaaatccttgatgtctaagaaaatatctttgacgtcaaagaaaatatctttgatgacaagttacagaaggaaatgata

SEQ ID NO: 100208 - DNA, 201 bp, Homo sapiens
cggggtttcactgtgttatccaggatggtctcgatctgctgacctcgtggtccgcccgccttggcctgccaaagtgctgggattacaggcatgagccaccrcgcctggccaaaacacattttatctaagtatgccaatcattggtttcacattttttcttgtgggataactcccaagctctgtacgatttctggagaagag

SEQ ID NO: 100209 - DNA, 201 bp, Homo sapiens
gagtttctgttatatgccaatcactattctgggtgctagagatgtggtgaataaaacagatgaagtgcaattaactagttggagggtaaggatgggaactrtgtatacaaatagagagtcaaacacatttcaggtggtgataattatcacggagaatagttgagcatgatccgggaggaagagcataggagaagagttact

SEQ ID NO: 100210 - DNA, 201 bp, Homo sapiens
aaataccagtctatgtagttgagtgctgtttctgcagcccctgtttagaagccttggggtaagtgccaagaaggcagatagttcgtgtggcccaggattgmatttctccagatgactgcaaaagaaggacatacaagcagagatttttgggcaaatgaagagtcagagatggactgcatgctctcagttggatgaacaggg

SEQ ID NO: 100211 - DNA, 201 bp, Homo sapiens
caagttacagaaggaaatgataattttagttagaagttagtaaaaataaaaataaaattttttatcaacagcctgaattctgtctgacacccttagccttsccttaaatttcactctttcttctcatgctgtacattttccagggacaaactctgtgtcccactgtcccccagctgcagctgctccttcagtgtcagtgac

SEQ ID NO: 100212 - DNA, 201 bp, Homo sapiens
ctgcagcccctgtttagaagccttggggtaagtgccaagaaggcagatagttcgtgtggcccaggattgaatttctccagatgactgcaaaagaaggacayacaagcagagatttttgggcaaatgaagagtcagagatggactgcatgctctcagttggatgaacagggtgtgaggtctagaaggagctggtggcgagtt

SEQ ID NO: 100213 - DNA, 201 bp, Homo sapiens
atatgatgtgcgcatttcccaagcttatttgacagagaatctcttgttttatgcattcttatctgtttccatctttccaaacaaataccttgagaccaaaygtttatacacatgaagaacttattagactagagagataatgagagcaaggggacaagtgaagaggctattacagtaattctgacatataattaagtccta

SEQ ID NO: 100214 - DNA, 201 bp, Homo sapiens
gacacaaggtgagaagactggtttccagatatgagattttgatgaggatagtttatggagaattgtatacatctgaatatgaaggcagtaacttacaggaratggaaaaagcagggaacatgaagttgaggggtcaggactgagtctcagaccaacagtttcacagtatgaccttaatcactttgagttattgcttcttca

SEQ ID NO: 100215 - DNA, 201 bp, Homo sapiens
aacaaattagcccagatagatggacaaattcctttaaagacattgtattagtcagggttccctcaagaaacagaaccaataggagatatatatatatatakagagagagagagagagagagagagagagaaattatgtaaatataacttctcagcctccataattacctgagccaattcctcataataaatcttttcatat

SEQ ID NO: 100216 - DNA, 201 bp, Homo sapiens
caaattagcccagatagatggacaaattcctttaaagacattgtattagtcagggttccctcaagaaacagaaccaataggagatatatatatatatatakagagagagagagagagagagagagagaaattatgtaaatataacttctcagcctccataattacctgagccaattcctcataataaatcttttcatatat

SEQ ID NO: 100217 - DNA, 201 bp, Homo sapiens
aataagaacaaattggaggtgtcacatacgtgatttcaaaacttgcagtaaacccacaataatagtgtgctactgacataaagttagacttacaggtcaaytgaatagagtcgagaatctaaaaataattcttatgattatggtcaattaaatttcagcaaggtggtgccaaaacaattcaatggagaaagaatagtcttt

SEQ ID NO: 100218 - DNA, 201 bp, Homo sapiens
acaaattggaggtgtcacatacgtgatttcaaaacttgcagtaaacccacaataatagtgtgctactgacataaagttagacttacaggtcaactgaataragtcgagaatctaaaaataattcttatgattatggtcaattaaatttcagcaaggtggtgccaaaacaattcaatggagaaagaatagtcttttcagcaa

SEQ ID NO: 100219 - DNA, 201 bp, Homo sapiens
ggtgtttaataaatgagagttgagcctccctttctgggactcacctgaaccacagtctctgagggggtcttgctgcattcacagataccgggtccatccgyagtttacagacaggtgtgggagagctgcatggggaaaccagattctggcatggaaaggactactgcaatttcgtcttcaaagactgggttcaacttgata

SEQ ID NO: 100220 - DNA, 201 bp, Homo sapiens
tgatttcaaaacttgcagtaaacccacaataatagtgtgctactgacataaagttagacttacaggtcaactgaatagagtcgagaatctaaaaataattyttatgattatggtcaattaaatttcagcaaggtggtgccaaaacaattcaatggagaaagaatagtcttttcagcaaatggtgctagaaaaactagatat

SEQ ID NO: 100221 - DNA, 201 bp, Homo sapiens
tagttttcagctgacatcgaaagaaagagaagaatgaggataagaaactgagagagggtgtttccgacagaaggaatagcaagtatgaaaggccatgaggyagaggggttgggtgtgttccaggaatacggctgtagtgaagtgggctaggagaggatgataagaacaaaatcagagaggtgggctggggtgggttatgtg

SEQ ID NO: 100222 - DNA, 201 bp, Homo sapiens
gtttggttcagtccagctgagcagggaaacgtaatacaaaaacctcaactatgaatcacagggagagagaagcggtagaagggaacatatgtgtaattgasatacttgagaatgttttaagtggtaataggggaaagtcacaggatcaggagaagttgatgagggagttgactgatgaaataatgagaggacggttggaaa

SEQ ID NO: 100223 - DNA, 201 bp, Homo sapiens
cagaaatccttactaataggaatttattaaacaaatgattcttttataccattttactatgaagttattaaaaataatgatatcccactatattgctgtgrcaagatatctagaacataatcagtaaaaaattagtttataaaacaatagtctcatttttgcaattataaagttctgtaactacagattatatttaacctg

SEQ ID NO: 100224 - DNA, 201 bp, Homo sapiens
catctctgtgatcagattaacagtggttttatcagtatcatagggcttatgttcaagtaactgtattttacttaataatggctacaaagtgcaaaagtagygatataatatttttggaccatggttgactgcaggtaactgaaattttagttacatgaaaccacagataaggggggactgcactacacataaaataggcat

SEQ ID NO: 100225 - DNA, 201 bp, Homo sapiens
gctgtgcctgtggcagctgctcaccccctattatagattattttagatgaaagaaaacattgactgataaatgaagatttgacaacataggagcgtagatrgttttgcagcttgatattcaagaatgaaaccaacaatacaatggttggatgaaaagtcagcacacaatgcccatggacataagtaaaggtagagatagac

SEQ ID NO: 100226 - DNA, 201 bp, Homo sapiens
actcttcctcccattttataaactatgaatatcaacctttttttgatatgtgctctatgtatatattttaaacaagtacagcaggtaatttaaacatctckttggctatttcttacatcataataatcacaccatatatggagatatttatacacaactctgtctttcccactggatcataaactccttttgggtaaggga

SEQ ID NO: 100227 - DNA, 201 bp, Homo sapiens
tgttgtacaagcatattgcaaaaaggagcattcagaaacttaaccaaacactagtatgcgtagatctgagagagtggggttatctaccagtctctgtatgsagtcagtatgttaaatgtgtcagaaatagaattaataaaacaggagaatacaaaagaaaaacaatgaacagagatttttaaaagagggtgtttgtaaagg

SEQ ID NO: 100228 - DNA, 201 bp, Homo sapiens
taagtcctattcttcaataattatcttttctttctgtccttcagcctcaaaattaacttttctcttttgttcaggaaaggaatcatcctatgtgaataacygcacactgtgatatgaatggctgacactcaactagaaaagtggctatgaaaagaaagagcttgataagatgagacaggttcttgaactaggtcaatttct

SEQ ID NO: 100229 - DNA, 201 bp, Homo sapiens
ttacaggagatggaaaaagcagggaacatgaagttgaggggtcaggactgagtctcagaccaacagtttcacagtatgaccttaatcactttgagttattrcttcttcaatgaaaagaaggttaaaaataatagtttcccctgtaggattattaggaaaattaagagatatgtgtacagaatgctttgtaacccagaaagc

SEQ ID NO: 100230 - DNA, 201 bp, Homo sapiens
aaaagaaaggagggaagtataattctagcacctcagatgtctttcggaataggtatattaatcaatttcctttcaagacacatacgtcattatacctcacrtaaagtcatggccaaaatctcctttcttgaagaggtaatatacactttgcttgggatatcacctacagagaaaatgtagaaatattatgctatcataaaa

SEQ ID NO: 100231 - DNA, 201 bp, Homo sapiens
ggaaaatattcatgcttaatagtgtatgttttggtacagcctttcttgcagtaatttgaatattctctgacccaggaattctaattctaaaatttcttctwatgaaataatcacagaaatgtacaaaatcacatatgatgaataaactgtgttcattgtaacactgtttataataatgaaaaattggaaattacccaaaag

SEQ ID NO: 100232 - DNA, 201 bp, Homo sapiens
atagaacctccatcatttgtaaactttatacttcagctctacttgaattaaagaaccacactgcagcatgtcttatgcagtgtctttttttaaaaaaaaadttttctcagcctgccgcaatggagtctatggaatccttaagactcaaagataaaaatgagcctgttcaaaacctacccatccagaagagtattgatgatg

SEQ ID NO: 100233 - DNA, 201 bp, Homo sapiens
gcagaacaaacacataagcaaaaccattatatttcattactttaagtcattgaatgcacgcagtgaagaataagtgcatatgcatttgggaattaaaacaytttttacttccagtgtcatgtggtactttgatatcttttttcacataatatttggggacttttatacttaaggacatattataacagtaactatcagcat

SEQ ID NO: 100234 - DNA, 201 bp, Homo sapiens
ttcatttttaaatggctttttgcatgtttgcttatttactaatcatgctagtttgcataaatgtgcaaatccatgaaaacaaataaaattataaaagttaygtaaacattatcccattactggatatatacccaaaggattataaatcatgctactataaagacacaagcacacgtatgtttattgcggcactattcacaa

SEQ ID NO: 100235 - DNA, 201 bp, Homo sapiens
ggaccacagcatcaagaccactctggcagaagggggtggaaaggtaaagtctaaatgccttaacatcacctgccttgtactctatgtccaggtacactgcmcctttttcatttcttcaaacatatcatggttatggagttaaaatacagtggtcagatgggagagatatttagaatttggctggatttattaattgattgg

SEQ ID NO: 100236 - DNA, 201 bp, Homo sapiens
cactcgcatttgtccaaaatgtctactttctggctaggaaccattatctttcttttagatcatgttactggaaccaactgttaggtctcttcccaaggccrtttttcacaaagaaataaagatttaattacttcgtaagagttattgcatagtcaaggatgagtgggaagtaggtatggactgtgggctgacaggatgtct

SEQ ID NO: 100237 - DNA, 201 bp, Homo sapiens
ttggggccaggcatttgggtttttttggttttgtttttggcatcagtattttttaaaaagcttccttgttagctttcctaggtaatgctcatatgtggtcrgagctgagaacttctgacctggaggcaaaggaaatacaagtaggcagaaaagacagagtagcccagtgtgctcaatagaagaaccagttttccttcaaaa

SEQ ID NO: 100238 - DNA, 201 bp, Homo sapiens
ataatgccaaaaagcattttttagctacaaagagtaactgttgagtagtaagtgatgaaaacagttgagtggagttgaatgcctgaagattttgtggtgcrtagggcgattgccatctgattggtttgtcatgcctgttaaaggcatgtcttttcatgtgaaagtgagaagcatgagaaaagctaggaaagaaaaaaccct

SEQ ID NO: 100239 - DNA, 201 bp, Homo sapiens
cagagaaatgcaaatgaaaactacaatgagatatcatctcaccccagttaaaatggcttttatcaaaaagacaggcaataacatactggtgaggatgtggwgaaaagggaaccctcatacactgttgatgggaatgtaaattagtacgacgactacggagaacagtttggaggttcctcaaaaaactcaaaatagagctac

SEQ ID NO: 100240 - DNA, 201 bp, Homo sapiens
ggaggcaaaggaaatacaagtaggcagaaaagacagagtagcccagtgtgctcaatagaagaaccagttttccttcaaaacaaactaaaacggggtagagktcgtgcgttcgtttcccattactgctgtaacaaatgaccacaaacttagtagcttaaaacaacacaaatttattatctgacacttcagtaggttagaaat

SEQ ID NO: 100241 - DNA, 201 bp, Homo sapiens
ctctgagggtctggttggaggtcagtggagcccacgtgctgtgctgcatgccatggaggctgtgccaaagccctgctcttgcccagaaggaggctgagatkgttggtggcattaggagaagaagtgagagcagttgtgactggggatctttactgagcagaggccagggatgcagatggacccagcccatctggaggcctg

SEQ ID NO: 100242 - DNA, 201 bp, Homo sapiens
tgaatgcctgaagattttgtggtgcgtagggcgattgccatctgattggtttgtcatgcctgttaaaggcatgtcttttcatgtgaaagtgagaagcatgrgaaaagctaggaaagaaaaaacccttgaggaatccaagtaaagaaagaagaggcgatggggcttagatgcagccacagagattaagcttggggtatgcag

SEQ ID NO: 100243 - DNA, 201 bp, Homo sapiens
ttttagctcaattggagtagtgcttgcaggataggtcaagcccaggcacctcctgtgccctctcgtctccatccctagaaacccgtgtctccaccacacgygatggggatgcttcactcctctcagctccaccacgtctctcctcccctgtctccacagcccagcagcagcagcctctccctgtcttcatgactttcagac

SEQ ID NO: 100244 - DNA, 201 bp, Homo sapiens
ctgataaactgaatatatgtctagtgtagcattgttgagagacagagagagagatagagagagagaacaacctaaacgtcaaagagtagggaaatggtgargaacataatgaatggtaacaaatggttcatctcttttatggaattgggcaatgattacaactgtagttggggatacaaaaataaacatagaagatttatt

SEQ ID NO: 100245 - DNA, 201 bp, Homo sapiens
aggcaaaggaaatacaagtaggcagaaaagacagagtagcccagtgtgctcaatagaagaaccagttttccttcaaaacaaactaaaacggggtagagttsgtgcgttcgtttcccattactgctgtaacaaatgaccacaaacttagtagcttaaaacaacacaaatttattatctgacacttcagtaggttagaaattc

SEQ ID NO: 100246 - DNA, 201 bp, Homo sapiens
ccatattattactttgttcataaattttttaacactcggatcactccaaattgacattttatatgcacataaatatggcttcacataaataatttagtttytgaaagccacacactagctttgcaaagtatgaggttgaaacataatatttgttttttgcattaacaggtcccagaggtccacaaggtttattaaaatgaa

SEQ ID NO: 100247 - DNA, 201 bp, Homo sapiens
tgtatttagccgtaagtcaatggtctcggcacagttatttgtgaaatgctatagtagattgctgcttttgcacctatatcataagctttcatctgttgttrccatattttttataaatgccatctatgatttgaagtatataaatgttaaagcgcaacagattttagctgttatctaggccaaattcttcattttacgcat

SEQ ID NO: 100248 - DNA, 201 bp, Homo sapiens
agcgaaaaatggtatttataaagcaaaatctgggtgctagatgtgatcattgctactagaatatcactactttgggcctttgtacacacacacaaacctattctctctctttcttgtcatgtggatatctccaattccaatcccacagcataggattccttctagctatccctctttttatgtttatagctcctttctttc

SEQ ID NO: 100249 - DNA, 201 bp, Homo sapiens
cgaaaaatggtatttataaagcaaaatctgggtgctagatgtgatcattgctactagaatatcactactttgggcctttgtacacacacacaaacctattctctctctttcttgtcatgtggatatctccaattccaatcccacagcataggattccttctagctatccctctttttatgtttatagctcctttctttcac

SEQ ID NO: 100250 - DNA, 201 bp, Homo sapiens
tttattttatttaaattaccacaaatattggcatacagttatttttaatagttattattcatttaatataattataatgcctctaggccctatagtgattmcctgtctttcactccttttttttttttgagacagggtcttcctttgttgcccaggctgaagtgcactgacatgatcgtggctcactgcagcttcaacctt

SEQ ID NO: 100251 - DNA, 201 bp, Homo sapiens
tctgagggctctgttctgttccattgatctatatctctgttttggtaccagtaccatgctgttttggttactgtagccttgtagtatagtttgaagtcagrtagcatgatgcctccagctttgttcttttggcttaggattgacttggcaatgcgggctcttttttggttccatgtgaactttaaagtagttttttccaat

SEQ ID NO: 100252 - DNA, 201 bp, Homo sapiens
tataaattaccttgtgcagtatggccattttcatgatattgattcttcctacccatgagcatggaatattcttccatttctttgtatcctcttttatttcmttgagcagtggtttgtagttctccttgaagaggtccttcacgtcccttgtaagttggattcctaggtattttattctctttgaagcaattgtgaatggga

SEQ ID NO: 100253 - DNA, 201 bp, Homo sapiens
ttttctattgattggaatagtttcagaaggaatggtaccagttcctccttatacctctggtagtattcggctgtgaatccatctggtcctggactcttttwggttggtaaactattgattattgccacaatttcagagcctcttattggtctgttcagagattcaacttcttcctggtttagtcttcgaagggtgtatatg

SEQ ID NO: 100254 - DNA, 201 bp, Homo sapiens
aaacttcccttctcgcttcatttcattcattttgtcttccatcactgataccctttcttccagttgatcgcatcggctcttgaggcttctgcgttcttcaygtagttctcgagccttggctttcagctccgtcagctcctttaagcacttctctgtattggttattccagttatacattcgtctgaatttttttcaaagtt

SEQ ID NO: 100255 - DNA, 201 bp, Homo sapiens
actgtgttatgaatgggcaattagattgtcttcaacaaccattatatgcttctaacggaactacatacaatgggtaactgtgtatatattaatatatatayatatattcttatttgttgaaggtatatatttagcataaatttctagagtgggattgctgagtcaggaggtaaacacataggtagctttgttagatattgc

SEQ ID NO: 100256 - DNA, 201 bp, Homo sapiens
aatttgcattttcatcaccaatatatgagagagtctgtcttcaacccattctcactaacagaatatgttgtcgtactttttattttttgccaatcttatakataacaaatggtttctcaacgtcatttttatttgcattcctataattatgagtcaagatggatatcttttcaaatgtatcttttgtgtgtgtgaattgtc

SEQ ID NO: 100257 - DNA, 201 bp, Homo sapiens
aatcccagcactttgggaggccgaggtgggcggatcacgaggtcaggaggtcgagaccatcctggctaacatggtgaaaccctgtctctattaaaaatgcaaaaaaaaaaaaattagcaaggcgtggtggtgggcgcctgtagtcccagctacttgggaggctgaagcaggagaatggcgtgaacccgggaggcggagctt

SEQ ID NO: 100258 - DNA, 201 bp, Homo sapiens
gtagttaactcatcaaatcattaaaataaaatgttcatatatgaatagctttttggattgccttagcaaagggaagacagaaaacacttcaattaaaaaawaaatatatataatatatatatatatatatatatatagagagagagagagagagagagagaaagccattcagactgacaatatgaaattcagatatcaaaa

SEQ ID NO: 100259 - DNA, 201 bp, Homo sapiens
tcatcagtagggaccatcagtagggacttatataatgcagacatggatcctagggaatgtgattatataaatgaagtgcctaaatcagttattttgcatcrtgtgcaattggaggtatgtgtatataagaaataagacatttcagactgtagatcaaataatagaactttttttaaaaaaggccaggtgtggtggctccca

SEQ ID NO: 100260 - DNA, 201 bp, Homo sapiens
gacttatataatgcagacatggatcctagggaatgtgattatataaatgaagtgcctaaatcagttattttgcatcgtgtgcaattggaggtatgtgtatwtaagaaataagacatttcagactgtagatcaaataatagaactttttttaaaaaaggccaggtgtggtggctcccacctgtagtcctagcactttgggag

SEQ ID NO: 100261 - DNA, 201 bp, Homo sapiens
tattttaacacaaccaaagcaagatccaaaaattcaaaacaaaaattcaattctcagtctttctctctttctcatgctagtgaccattattgacactgtcwcctgatttcacctagaatttatttctcaatttacttgatattctctaagtcatagcacttaatatgatgacttctgtacagcaacagtttccttacgcct

SEQ ID NO: 100262 - DNA, 201 bp, Homo sapiens
atacacagttgattttattttttgaaacgttaagtagtggagtgttgggccccagttggggttgtcctccctcaccccactggtgcgtgcttgtctgatgsacggtttttcttcaggcctactccttggagtttcagtgaaccagaatatcattttaatttttctctttgaaaagtctggcacttttctggaatgcctcaa

SEQ ID NO: 100263 - DNA, 201 bp, Homo sapiens
gcaggatttcgaagccttggcaggtagggcattttggagatgacactctactgttgggagggagagtgcagaatgtatatgggagtgggagtatagcctarcacaggtggagagtaagggtgatgtgaggggaggaacaaccatgaacaggtggaattaagaatgagagggctggaaagttaaactaacatgttcttggtt

SEQ ID NO: 100264 - DNA, 201 bp, Homo sapiens
gttactttaaggatgctttagttcagggtaatgtactagtgttttaaatatgctaatatgcttctgttattgccattttattctccttttttccccactgsgaaatacagtgtattagaaagggtctgttctttcatgttcttctctgcttaaaaaaaattgagggggaagggagacagaaataggtacttaaaaaagatc

SEQ ID NO: 100265 - DNA, 201 bp, Homo sapiens
ttaaacatgaaagtatcgtaacataaatgagactgatttggggaaactcctgtttcctaccttttttgagttctaccggggtggtttttggtagtgtcatrgggactagggaaatgtgtatcactttgtaagaaaggcaggccataggctgggcacagtggctcatgcctgttatcccggcactttggaaggctgaggcag

SEQ ID NO: 100266 - DNA, 201 bp, Homo sapiens
aatacaactggaagccaagtggaaatgacatattagtatctgtgttggatttgcagtccagaggtcttgttagtaaatatcagccctgcccccgccccctttttttttttttttttttttttgagatagggttttgctctgtcaccaaggctggagtgcagttgaatgatcatggctcactgtagtctcaacctcttgggc

SEQ ID NO: 100267 - DNA, 201 bp, Homo sapiens
ctaccctgtggctgacctcagacattattgcatgtctgttatagaacctccatcatttgtaaactttatacttcagctctacttgaattaaagaaccacaytgcagcatgtcttatgcagtgtctttttttaaaaaaaaatttttctcagcctgccgcaatggagtctatggaatccttaagactcaaagataaaaatgag

SEQ ID NO: 100268 - DNA, 201 bp, Homo sapiens
gtcatggaagttctatggaaggagggaggaattcctctctgatgatgcagaaagactttttgaggaggggacatttgggttaggcctggaagtaatttaaytggggtaggtgataggaagtcattgcaagtgagggaggtgagttgagcaaaggtgctggaatgggaaagcaccaactgctttcaaattgtgtaaaatgca

SEQ ID NO: 100269 - DNA, 201 bp, Homo sapiens
tgagtttcgtcatcatcttgacagtactttcctggatgagtgttcaggaaacatgaaaagtttttaaacaattcaacaaatgtgtaataaaagtttgttaycttgttttatttgttgttatattgtctcttggcttgagtttttatttgggaagctaatagagagacgggatattagaaaaccagaggcaaactgcttggt

SEQ ID NO: 100270 - DNA, 201 bp, Homo sapiens
tcactatagaagtcatcacaatttaatccatggtttaaaaccccacttcaaactctttcacccgtccagtgagtctgagcaaggactcactagacctcatkctggtaagtaatttgtgaagtggcagaactcccttaggcttgagctttggttgtgttgtctgctgcatgggcatagtgaatgtgtttccagattggcttt

SEQ ID NO: 100271 - DNA, 201 bp, Homo sapiens
aaatacaactggaagccaagtggaaatgacatattagtatctgtgttggatttgcagtccagaggtcttgttagtaaatatcagccctgcccccgccccctttttttttttttttttttttttgagatagggttttgctctgtcaccaaggctggagtgcagttgaatgatcatggctcactgtagtctcaacctcttggg

SEQ ID NO: 100272 - DNA, 201 bp, Homo sapiens
tgctatggttttcttagtatgttgacttactcttcctcccattttataaactatgaatatcaacctttttttgatatgtgctctatgtatatattttaaayaagtacagcaggtaatttaaacatctctttggctatttcttacatcataataatcacaccatatatggagatatttatacacaactctgtctttcccact

SEQ ID NO: 100273 - DNA, 201 bp, Homo sapiens
gcacatggtttggagtctggtccaaatatacatccagctgtcccattacacacaggtgacctggatccaggtcactacctgcctccagcagcagcttgcamtggggcattcaatggacttgagggagcttctatgtcttcataaacctggagaagggttttctcaggaaaacaggaatttgggttgcaccagaggatctca

SEQ ID NO: 100274 - DNA, 201 bp, Homo sapiens
gaaatacaagtaggcagaaaagacagagtagcccagtgtgctcaatagaagaaccagttttccttcaaaacaaactaaaacggggtagagttcgtgcgttygtttcccattactgctgtaacaaatgaccacaaacttagtagcttaaaacaacacaaatttattatctgacacttcagtaggttagaaattcagcgtgag

SEQ ID NO: 100275 - DNA, 201 bp, Homo sapiens
tccagctgtcccattacacacaggtgacctggatccaggtcactacctgcctccagcagcagcttgcactggggcattcaatggacttgagggagcttctrtgtcttcataaacctggagaagggttttctcaggaaaacaggaatttgggttgcaccagaggatctcaagagaaggatgatgggaggcaggggtttcttt

SEQ ID NO: 100276 - DNA, 201 bp, Homo sapiens; identical to SEQ ID NO: 15710

SEQ ID NO: 100277 - DNA, 201 bp, Homo sapiens
tttgttgttctctaagcagagaaaaatcaggctgcttacacttactgcccttcctaggcagcagaggaaacttggtattttcaatccttgttttccaggtmcacaaagtcaatggtggttatgtgttatgtggagactctaggcagtggcttccatgttttgctttaccataagataagtttcttttcttttcttttttaa

SEQ ID NO: 100278 - DNA, 201 bp, Homo sapiens
taagagtttaggatagtttagttatgagtgacagaaaaatctaaagcaaactggcttataccaaagagaactaatcagccatgttgagcatgactgattcmcttgtggtagcaagatggccacctcccacactcacaccaaattctgtggaagcaagagagtcccttcctggcattcctgagcaagtaagtcctcacattt

SEQ ID NO: 100279 - DNA, 201 bp, Homo sapiens
aaattagctgggcttggtggtgcatgactgtagtcccagctgttcaggtggctgcggtaggagaactgcttgaacccaggaggtggagattgcagtgagcygagatcatgccattgcactccagcctgggtgacagaccaagactctgtctcaaaataaataaataaataaataaataaataaaattatagtattttaggg

SEQ ID NO: 100280 - DNA, 201 bp, Homo sapiens
agttaactcatcaaatcattaaaataaaatgttcatatatgaatagctttttggattgccttagcaaagggaagacagaaaacacttcaattaaaaaaaawatatatataatatatatatatatatatatatatagagagagagagagagagagagagaaagccattcagactgacaatatgaaattcagatatcaaaaat

SEQ ID NO: 100281 - DNA, 201 bp, Homo sapiens
gtgtcacatacgtgatttcaaaacttgcagtaaacccacaataatagtgtgctactgacataaagttagacttacaggtcaactgaatagagtcgagaatytaaaaataattcttatgattatggtcaattaaatttcagcaaggtggtgccaaaacaattcaatggagaaagaatagtcttttcagcaaatggtgctaga

SEQ ID NO: 100282 - DNA, 201 bp, Homo sapiens
ttaactcatcaaatcattaaaataaaatgttcatatatgaatagctttttggattgccttagcaaagggaagacagaaaacacttcaattaaaaaaaaaawatatataatatatatatatatatatatatatagagagagagagagagagagagagaaagccattcagactgacaatatgaaattcagatatcaaaaataa

SEQ ID NO: 100283 - DNA, 201 bp, Homo sapiens
ttcatatatgaatagctttttggattgccttagcaaagggaagacagaaaacacttcaattaaaaaaaaaatatatataatatatatatatatatatatakatagagagagagagagagagagagagaaagccattcagactgacaatatgaaattcagatatcaaaaataaatcctggatgaattctgaaatagaaaaca

SEQ ID NO: 100284 - DNA, 201 bp, Homo sapiens
gggcttggctatgacttaagttgccttgagggagtcagccaaaactgggcttgggaacaggaaggctttgcccgtttatttggattctcagggtagtcgaytttgccacctcttggctatcagctgccttggagattggtttcatagtaaggattctttctttaaggtgatatggagcaactgctttcacaggggcaccag

SEQ ID NO: 100285 - DNA, 201 bp, Homo sapiens
gcagaagtggtagaatagtggtaataataataataataataataatgaacacataaaagtcatttcctaagtgcagtcactgttctaagccccagcccccctctctttttttttgaggcagagtctcactctgttgcccaggctggagtgcagtggcacgatcactgctcactgcaacctcaaactcttggtcttaagtca

SEQ ID NO: 100286 - DNA, 201 bp, Homo sapiens
tatttggattctcagggtagtcgactttgccacctcttggctatcagctgccttggagattggtttcatagtaaggattctttctttaaggtgatatggakcaactgctttcacaggggcaccaggttagtaaataacattttgcactttctgctgcgtgtgtcagattttctttctgagctcacggtgtgatgataggac

SEQ ID NO: 100287 - DNA, 201 bp, Homo sapiens
ttgacccagcatttctggggtagtagtactaccccagttagtagtaatagtcatagcagaagtggtagaatagtggtaataataataataataataataawgaacacataaaagtcatttcctaagtgcagtcactgttctaagccccagcccccctctctttttttttgaggcagagtctcactctgttgcccaggctgg

SEQ ID NO: 100288 - DNA, 201 bp, Homo sapiens
agtgaagaggctattacagtaattctgacatataattaagtcctaaactagaaatgaagagaaggaacaaataggaggtatttttgaggaaagagacaaarggacatcacgactaggaactaactgaaaatttgggacagaggaaaaagttaaagatagtttagtgtcacaaagtctccaaagaaccataggaactgtgtc

SEQ ID NO: 100289 - DNA, 201 bp, Homo sapiens
gattaatttcctttattatgccattagaaagtttagactaaagtggcgtgccatggaacagacagctattaaaggtagaatgaagatcacatgccaaatgrcctaccttttagaatgtattaatctgaacaatatctatttaggggaaaaggaataatcacattgttaagtcagagctaggatggccataccatatggtcc

SEQ ID NO: 100290 - DNA, 201 bp, Homo sapiens
ctgaggcaggagaatcacttgaacctgggaggcgaaggttgcagtgagccgagatcatgccattgcactcaagccttggtgacaaaagtgagactccatcycaaaaaaataaaaaaaataaaaaataaaataatcagcttttctttttaatgtgacaatagtattaaatgatgtcagtaacgccatgtaggtatacatagt

SEQ ID NO: 100291 - DNA, 201 bp, Homo sapiens
agcttaaaatttcagttaggtttttatagctaattaaactataaggtagatagtgtatttaataaaggatacggaggaagttcatgtaaatacctgaaacrtcagtccaggaaagattctttgagagattttcaatatgtccagatgtctggataacaattctttggtctaaacgcagttgatgatgtgatgaaagggaca

SEQ ID NO: 100292 - DNA, 201 bp, Homo sapiens
acaattatattgctgcccttatacatcatgttaggaaacacctttttgacttttctgtgtcaagcttaaaatttcagttaggtttttatagctaattaaaytataaggtagatagtgtatttaataaaggatacggaggaagttcatgtaaatacctgaaacatcagtccaggaaagattctttgagagattttcaatatg

SEQ ID NO: 100293 - DNA, 201 bp, Homo sapiens
ctaatacatgtccaggttgtaataaaatacctctttgtggaccctgaaaaacaaaggcaaaaagcattgtggattttggtttagaagaggctttagcagcrttccagtctctcctgtgatgcaggaatcccatcagcagcatccttagcacctggttacccagcctttgtacatgtctagtgacaaagagaagaggggcag

SEQ ID NO: 100294 - DNA, 201 bp, Homo sapiens
agaggaggggtcttcttccaatgttttggtgggaaaggagtcaaaatcacaaataaggtgagggacattgagagattctgcccttaaagcctcccttgtcrtggtaaagtgaaatgcatgaggttattttatattctcagtgcctagcatggtgctcagcacatagaaggtgttcaataaatatccattgagtgaactact

SEQ ID NO: 100295 - DNA, 201 bp, Homo sapiens
ggcagttattgaacccctcctgtgtggtaagcactgtttagtgctttaacactttggtttttacatgcttgttgcatttaatcccattgaatgggtaaatmactgtagagagtacagggctgaaagaagcagcctctgcccacagggacgttctagacctgtactgtccagtatattgtcccctagccacacgtggttatt

SEQ ID NO: 100296 - DNA, 201 bp, Homo sapiens
acactttggtttttacatgcttgttgcatttaatcccattgaatgggtaaataactgtagagagtacagggctgaaagaagcagcctctgcccacagggaygttctagacctgtactgtccagtatattgtcccctagccacacgtggttatttgagaattgaaatgtggccagtccaagttgaaatgtgctctaagtgta

SEQ ID NO: 100297 - DNA, 201 bp, Homo sapiens
tcccttctttccccaagccatacagtgcattttctcagaagaggaagagcgttcttggttaggccttgacattatgaagaagctgttctccctgctagaayctccttgggcttattgtgagtcaaagattgaactcattgttgtgggttttgagatctactcttttaaaataatattttccatacataagtttccgtgttt

SEQ ID NO: 100298 - DNA, 201 bp, Homo sapiens
tgttgatgggaatgtaaattagtacgacgactacggagaacagtttggaggttcctcaaaaaactcaaaatagagctaccatatgatctagcagttccacrtctaggtatatacccaaaagaaggaaatcagtatatcaaagatatatctgcacttccatctgtgttgaagcactattcacaatagccaagatttggaagc

SEQ ID NO: 100299 - DNA, 201 bp, Homo sapiens
tgcacagactctatccatcactgccctgagtagttgcagtgcttggtagtgatattgtcatctcctttttacagatgaagaaactcagggttagagatgakacatgacctgcccaatggagttccaatttatcatcctcccagtgcccataattaagacctgtgatttagcagaaataaagattactatgttatgcttttt

SEQ ID NO: 100300 - DNA, 201 bp, Homo sapiens
tggtttagagaaaaaagtcaggagctccacttcgatgggtttaatctgaggtgatgggatcaatcccaaattgactggcatgccacacacatgtgatgaartggcaaaacagtgtggcatagtagaaaaacttcggatatggaatgacaaaaagcaagttcaagctgtgatgctgatgctagtacctctgtgacaccatgc

SEQ ID NO: 100301 - DNA, 201 bp, Homo sapiens
agcagcaaacttgaacagtttacattttttaatgtcttctttccaactcaaactatgtttgccatctagtgaataatccatgccattacaacaacctactyaagatccttgtttcttagcatggcagccaaactcacaggcctccaaatttcattgttggtagtcatttctgccctgaacttctctttccacttgccctga

SEQ ID NO: 100302 - DNA, 201 bp, Homo sapiens
ccaaaattccccttattttcttctctctcttcactgaaaagcacctactattgttaacagttcagtgtgtatctttctagatctcttgttctgtcttcttyctcatatgttgtataaaaatagggtaatactacaactgttcttctgaatttgattttcagaatacaggaacaaatggagggagcatttacatccatcata

SEQ ID NO: 100303 - DNA, 201 bp, Homo sapiens
ttaaaagtctcccccataccgaagctctttgagcccatatttaatgtacacatcaaaaaattgcaattgtatatatgttgttggctatctctcacttttgrtgaactagcagtgcacagcaatgcattttactattttaaaacagatttccttttaatgcttctttgatcttttctgatcaattgctgtgctttatttgtt

SEQ ID NO: 100304 - DNA, 201 bp, Homo sapiens
cctcaagctaaatggcggctgccccaaaatatagtatatgggcgtgggagcttgaagagtaaataggagtcttttttttttctttttctttttgctaaatrctgagaataaaattattttctttggtgtatacgttgtacagtttggtatttgaattatagaaaatgcttttcagggagaacacagacctatttcattatg

SEQ ID NO: 100305 - DNA, 201 bp, Homo sapiens
tgcctagtggatcccgtgcccaggctgcaggctgagctgcccgccagtcccgcgctgcgagcctgcactcctcagctcttgggcagtcaatggtaccaggygctgtggagcagggggtggtgcccgtggaggctccggctgtgcgggagcccgcggaggggaggggctcgggcatggcaggctgcaggtcccaagctctgc

SEQ ID NO: 100306 - DNA, 201 bp, Homo sapiens
agtcaccacccaacttaggagcccagctggctttgcctagtggatcccgtgcccaggctgcaggctgagctgcccgccagtcccgcgctgcgagcctgcaytcctcagctcttgggcagtcaatggtaccaggtgctgtggagcagggggtggtgcccgtggaggctccggctgtgcgggagcccgcggaggggaggggct

SEQ ID NO: 100307 - DNA, 201 bp, Homo sapiens
atgccattgcactcaagccttggtgacaaaagtgagactccatctcaaaaaaataaaaaaaataaaaaataaaataatcagcttttctttttaatgtgacratagtattaaatgatgtcagtaacgccatgtaggtatacatagttgggacatagacctggttgacactcctctagtcaagataagcagtcagcattcatc

SEQ ID NO: 100308 - DNA, 201 bp, Homo sapiens
gttgagggaaatcgttggaggttggactgcattcttaaacgaaaagcagtatgtactttcccagaaaatgctgatataattttttaactgtctgttgtctytgaaatgcttttcttttcaaagcctttcacacgtataacttttcactttagagtttgacaaaaagtaggataactaatgttttccagttcatttggttct

SEQ ID NO: 100309 - DNA, 201 bp, Homo sapiens
acaatggaggatgataatggggttgaattgggctgaaattgcctttgcttcctatgacacaatcagaactttatattttgttttagttacttaaaatcttsgtttcattgtttcaggctgagtccagaaatcttcctgaaacgcccagtggttgagggaaatcgttggaggttggactgcattcttaaacgaaaagcagta

SEQ ID NO: 100310 - DNA, 201 bp, Homo sapiens
attcacatttgatgcagtaaaattgtgctttgggtctcaattagcagccaatgtctatgtgcaaacatctcttaaatctttttttaaaaaaagttattctygtgtagtctgaaggaggcacattatttgaagtggaaacagaactttgaggttataaaagtcaagaatcctagaaagcctatggtgccagatccattttaa

SEQ ID NO: 100311 - DNA, 201 bp, Homo sapiens
gtatatttgccttttaaaaattgtgtttgggccaggcacggtggttcatgactgtaatctcagcactttgggaggccaaggtgggtggatcacttgagatkaggagtttgagaccagcctggccaacatggtgaaaccgcatctctactaaaaatacaacaattagccaggtgtggtggtgcacacctgtaatcacagcta

SEQ ID NO: 100312 - DNA, 201 bp, Homo sapiens
ggatgtagacagcagacttctggagcatctctaaataccacatttaatcagagcatctcatttagaaaacatactattgtatatttgccttttaaaaattrtgtttgggccaggcacggtggttcatgactgtaatctcagcactttgggaggccaaggtgggtggatcacttgagattaggagtttgagaccagcctggc

SEQ ID NO: 100313 - DNA, 201 bp, Homo sapiens
tttttacaggatcattcttattcaaacattccataatgtcttccttctttacaaatacctcctcttaattcttcatctccctccagatttgcctcatatcwttgttcctctttaaagcaaaactctggtaagttgtcagttctcactgtctccaattcctgaccccacattctcttctaacaacatcttgtaaacatttca

SEQ ID NO: 100314 - DNA, 201 bp, Homo sapiens
cgctgtttatgtgtggtcaattcagacaatagtttcttttatgtcaggcactctgaggatatgagagtagctaggtcatggtctctcaaataatttgcatrtatatatttgcatatatagagatagatataatagacatatatcctgcaacaaactgctttatctcagttactcaatgtggaggtcacttgtatttcaggg

SEQ ID NO: 100315 - DNA, 201 bp, Homo sapiens
gcttggctgtcatctaaaattgatactaccttttattttttgggtgaatttctctgcatctgacctttgcagggaaaaccagaaataccgggtatatgtcrtgataccacttctgccagggttcgaaggagacatttcaaccggcggaggaaatgctctacaggcaatcatgcacttcaactacaggtgccaaaactctaa

SEQ ID NO: 100316 - DNA, 201 bp, Homo sapiens
cacatatgttggaggaacagcgtttgtaggaatcgtctcgtgtgattgaaagtttgtcttatgtaattcatcaagtgaacatttagagaatattatttctrcaattggctgcttttgaaacaaatttacttaagtacttacacaaaataagtaggctggacttaagtatacttctctgttactagttaaatattgttcact

SEQ ID NO: 100317 - DNA, 201 bp, Homo sapiens
attgtttaaaatattggtcaagttacttagtctttctttgcctcagtttccttatctataaagaggggatggcaaactcctgtcatgctcaaaatagaaawaacaagccctcacagatttattattaatgacaaatgagacaatgtatgtaaacaattatcaccagcgaggtgcattctaaacattagtaactattaacta

SEQ ID NO: 100318 - DNA, 201 bp, Homo sapiens
catggcaccaactttctcaaagatcatcgatttgggtcatatgctgctatccaagagaatgctttagctaaatggtaagttattatttctctaagcctgtyaaggcagtcatagcatctaatattacactggcctaaattcacctggaatcagttttcaaaactgtgaaagattatgcattatacttaacaagggcttctc

SEQ ID NO: 100319 - DNA, 201 bp, Homo sapiens
atactaccaaaaaatgttaaatgcctgctttcttgatgttctttgcctcaaattttcagtttgtgtttggtatattaccaaataaaaaagagcatgagatrgaacagagtgaccagtcttttcaatatttggctttttctttaaaggacacttattttaaaatgcaacagctatagacatgctcggtggtggggaggggct

SEQ ID NO: 100320 - DNA, 201 bp, Homo sapiens; identical to SEQ ID NO: 15702

SEQ ID NO: 100321 - DNA, 201 bp, Homo sapiens; identical to SEQ ID NO: 15704

SEQ ID NO: 100322 - DNA, 201 bp, Homo sapiens
tcactcatttttctatttatgctctaatcaggttttccggtgccttcccaatgatgaagtacacaatttaattcagctgagagactttataaacaagcccrtattagctaaggaagatcccattcgagctgaggaggaactgaagaagatccgtggatttttggtgcaattccccttttatttcttgtctgaagaaagcct

SEQ ID NO: 100323 - DNA, 201 bp, Homo sapiens
gtcttcctcaaattcatatgttgaaatcctcaccccaaggggtgatggtattaggaggtgaggcctttaggagatgattaggccatggtggctctgccctyatcaatgagattagtgcctttataaaagaggccagagagggacctctgactctcttcactaagtgacgggttagtgaaaaggcagcctctggggaagcag

SEQ ID NO: 100324 - DNA, 201 bp, Homo sapiens
ttcttgtgggataactcccaagctctgtacgatttctggagaagaggttaccttgggacacagatgacaacagatcgtggcaggagaccttttgatttagrtcatgtaaatgcttttattctattctaaaaattgtataaaatggtaacctcagcagatagagaaatgtaaagattagcacagggcaggggccagcactca

SEQ ID NO: 100325 - DNA, 201 bp, Homo sapiens
aaacagtctggcagttctttaaactgttaaacatagttaccacatgtcccagcaattccagggattcacctaggagaactgaaaaaatatgtctacaataraacttttctatagcagtattataatagcagtattatggataatagccttacaagtggaaacaattctaatgttcatcaattgatgaatggataaacaaaa

SEQ ID NO: 100326 - DNA, 201 bp, Homo sapiens
aatattgttcctttatctcctcgtctatagccagaaactgtgtaaaccacagtatggtgagatacacacacacacacacacacacacacacacacacacayacacacttttaatatttgtatagcacatttaaaaaatactgttcttttatctcctggcctatagggataaaagctctttaggagtttatttattccccca

SEQ ID NO: 100327 - DNA, 201 bp, Homo sapiens
tttaataatttctttttaaatttgcagttggtaatcagtggataaattacatatcattctgtggtcttagaacacatgcagagctcgaaggaaacctagtmactgagcttatctatgtccacagcaagttgttaattgctgatgataacactgttattattggtaagtacagtatatggtctataattgtattccttgcca

SEQ ID NO: 100328 - DNA, 201 bp, Homo sapiens
aataccacactgggaaatctgaaattattgggggaccagatgtctggagacctggattctctccagctctgttatccacaggtatgtgaccttctgagtaygtcagtttgtccttctgacacgctgtttcttcaccaaccacgaataatattatctgttctacgtagcttatatgaatatatgtgaaagtagtttgtaagc

SEQ ID NO: 100329 - DNA, 201 bp, Homo sapiens
gaatatatgtgaaagtagtttgtaagctgtaaagcaccagttcatgtaagaacttattatagcatttccatgatattcatcatctggaaatatgttgttcmctgtaaattgaagcaaggataaagaggcatcatattcaaatcagctgtttcaaaattagtatttatgctagaaaaagaaatgttttaatttaaaagatgc

SEQ ID NO: 100330 - DNA, 201 bp, Homo sapiens
gaaagtagtttgtaagctgtaaagcaccagttcatgtaagaacttattatagcatttccatgatattcatcatctggaaatatgttgttcactgtaaattsaagcaaggataaagaggcatcatattcaaatcagctgtttcaaaattagtatttatgctagaaaaagaaatgttttaatttaaaagatgcttaaatgttc

SEQ ID NO: 100331 - DNA, 201 bp, Homo sapiens
aagagtatgtgtgttctttgtgactgggtgtgatgtgctaggaaattaagcaggaatggcaggtggaggccttgtttcagagggccatttctcctaagatraggagcctggacccaccctatgatgataggtggtgtcttgtgcagagatttgtgccaggtggtttaattgggaatggcatccagggagcaggggtgaaag

SEQ ID NO: 100332 - DNA, 201 bp, Homo sapiens
gtctacaggtagactaggtcgagttcagaagcctgaagaacaccagtgtttaagggatggtgttgggaaagggagccaggccagccagagaggaacgttcsggaactctgaaaggaaggaaatggcaggaacaaaggagctggggcacaacagtggtgactcacactgggaacacttcggcccattgtgtttatgcttata

SEQ ID NO: 100333 - DNA, 201 bp, Homo sapiens
tattccttctatcttgactgagtttatttaatcttcaccaatttgttagatttcacatggaatttcaccattttaattcacattttttagaattaaaaatrtgtttattagccatgtataatttttttcataaattgcctagtttatttgtatcctttgcccattacgatggaaggtttaactttctttttttattatttt

SEQ ID NO: 100334 - DNA, 201 bp, Homo sapiens
ccgccccctttttttttttttttttttttttgagatagggttttgctctgtcaccaaggctggagtgcagttgaatgatcatggctcactgtagtctcaamctcttgggctcaagcgatcctcccacctcaacctcctgaatagctgggattacaggtgcatgccaccgcacccagctaatttttttttttatactttttt

SEQ ID NO: 100335 - DNA, 201 bp, Homo sapiens
caccttgcatggcaggtataagtcaacaagaattttagctttcctaatgtttatttagcatgaaaatgttggtgctacctggctcttaagaaaaaaagccrggatactggatcggccagtgccattacctcaaaatactgttgagagaattctgcagccatactctgcctctctgattggttcctagaaaaccatccttta

SEQ ID NO: 100336 - DNA, 201 bp, Homo sapiens
cccaataccacctgttctcacttataactgggagctaaataacgagaactcatggacacaaagacggcaacaacagatactagggcctacttgagggtggkgggtgggaggagggaaaggatcagaaaaaaatgcctgtcaggtactatgcttagtacctgggtgacaaagcaatctgtacaccaaacccctgtgacacaa

SEQ ID NO: 100337 - DNA, 201 bp, Homo sapiens
aaatggaagcagatctatctgtttgtagcagatctatctattgttggttataagataaccaactcttaaatcaggtctgtgctgtaacataagactaatartatgtttcatacaacagaggtcttgtctgttggaataattattttccataaaggccatgtgctcgcttttaaacttttcactcatttttctatttatgct

SEQ ID NO: 100338 - DNA, 201 bp, Homo sapiens
tggctgcatggtattctatgatgcatatggaccacattttctcttatccggtccatagttgatgggcatctaggctgactccatgtctttgctattgtgamtagtgctgtggtgaacatatgaatttgtgtgtgtttttggtagaacaacttattttcttttggatatatacccagtaatggggctgctgggttgaatggt

SEQ ID NO: 100339 - DNA, 201 bp, Homo sapiens
cttttttcatattattaggatatttgcatatattttggtcaaaagctgcttacttaaaaatatgtattcagaagaaaaatgtccataatatgctatagtattttttttttaaagacaaccttctaagtttgcctctgaaattatcctgggagcaactgccctctggggattcatggtctagtgcagtggttctcacactct

SEQ ID NO: 100340 - DNA, 201 bp, Homo sapiens
aaaatagaagagttataatggtatactataataaaaattatgtgaatgtgatctctctttttctctctctctcaaaatatcttattgtacagtacttttctttttttttttttgagatggattcttgctcccctcgtgtaggctggagtgcagtggcacgatctcggctcaccgcaacctccacctcccaggttcaagcga

SEQ ID NO: 100341 - DNA, 201 bp, Homo sapiens
agagcaattaaatggacttcgtgaaaattgcagaatccagaggcagctgtttaacccagcagtccaataatgtgccagatttcactaattctttattactyccttttttttttaatttttaaaactatttttgagatgggggtctcgctgtgtttcccaggctggtctcaaatgattcttctacctcagtctcccgtgtgc

SEQ ID NO: 100342 - DNA, 201 bp, Homo sapiens
acacagtctacaggtagactaggtcgagttcagaagcctgaagaacaccagtgtttaagggatggtgttgggaaagggagccaggccagccagagaggaaygttccggaactctgaaaggaaggaaatggcaggaacaaaggagctggggcacaacagtggtgactcacactgggaacacttcggcccattgtgtttatgc

SEQ ID NO: 100343 - DNA, 201 bp, Homo sapiens
taagtactagtcagtgatttaagtttggagtaattttcactatagtaaattgtcagctaaattttggatcattttaataacacaagtgattgtatccacayctacattcgtccttgcattaaaataaattaagtgaatacaaagttgattttacagcaaggatccagtttacagtggtgtgacgctgttttaaaaagttga

SEQ ID NO: 100344 - DNA, 201 bp, Homo sapiens
acctaggagaactgaaaaaatatgtctacaatagaacttttctatagcagtattataatagcagtattatggataatagccttacaagtggaaacaattcwaatgttcatcaattgatgaatggataaacaaaatgtggtattcctatagagtggaatattatccagccataaaaggaataaatcacatcaagttaaaaag

SEQ ID NO: 100345 - DNA, 201 bp, Homo sapiens
cctggatgaattctgaaatagaaaacatatacatataatatacaatctattctgaacagtctaagtagtatgttttgagaaacaataagatttaatgtacrtttattgagcttggtcatattaattttaataatttctttttaaatttgcagttggtaatcagtggataaattacatatcattctgtggtcttagaacaca

SEQ ID NO: 100346 - DNA, 201 bp, Homo sapiens
aggaaatggcaggaacaaaggagctggggcacaacagtggtgactcacactgggaacacttcggcccattgtgtttatgcttatagtttcccaagtttatsttttcagggttatgattacgttaacctcacctccctccctccctctaaaacaaaacaaaaaaaaaggagtgaaagactcttcagtattatgaatggcccc

SEQ ID NO: 100347 - DNA, 201 bp, Homo sapiens
ttttcactatagtaaattgtcagctaaattttggatcattttaataacacaagtgattgtatccacacctacattcgtccttgcattaaaataaattaagkgaatacaaagttgattttacagcaaggatccagtttacagtggtgtgacgctgttttaaaaagttgagtagaacttaatatgtctataacaatagattta

SEQ ID NO: 100348 - DNA, 201 bp, Homo sapiens
tatgtctacaatagaacttttctatagcagtattataatagcagtattatggataatagccttacaagtggaaacaattctaatgttcatcaattgatgartggataaacaaaatgtggtattcctatagagtggaatattatccagccataaaaggaataaatcacatcaagttaaaaagcttctgcacagcaaaggaaa

SEQ ID NO: 100349 - DNA, 201 bp, Homo sapiens
tatatgaatagctttttggattgccttagcaaagggaagacagaaaacacttcaattaaaaaaaaaatatatataatatatatatatatatatatatatakagagagagagagagagagagagaaagccattcagactgacaatatgaaattcagatatcaaaaataaatcctggatgaattctgaaatagaaaacatata

SEQ ID NO: 100350 - DNA, 201 bp, Homo sapiens
tattatttagtagtcatgaagagagagacataggtaaaaacagcagttagtatttcttcattctgatatctggcagcaagtgagtgatgctaccattatcrgctaaaatcaggaactggtattaatgcattttgttttgttttgttttctgctttattctcctctgtcatagacagtgaagagtaagtgaagaatttgagg

SEQ ID NO: 100351 - DNA, 201 bp, Homo sapiens
gcaaaacgtcagagaggagcctcgagagatgcccagtttgccccgttcatctgaaaacatgataagagaagaacaattccttggtagaagagtaagtttcytcactattctgtggttttaaacctaattttgcagtgctgtagaaacacagcatctactgaggggtgaagtaggcctggctacaactcctctcatccactc

SEQ ID NO: 100352 - DNA, 201 bp, Homo sapiens
aaattttatcttacttgtttataaaagaagttagaaagtacagtgcaggccaggtgcagtggctcatgcctgtaatcccagcactttgagcggctgaggcrggtggatcacttgaggtcaggaatttgagaccagcctggccaacatggcgaaatcctgtctctactagaaatacaaaaattaactgggcgtggtggcatg

SEQ ID NO: 100353 - DNA, 201 bp, Homo sapiens
ttaccagcccagaaatactcctttcagtctttacaaaaaaaaaaaaaaaaaaaagaagtgcagatgcactcacaaacacaaaagttaatttattattattwttttttttttgagatggatttttgctcttgtcacaaggctggagtgcaatgacgcgatctcagctcacagcaacctcaacctcccgggctcaagtgattc

SEQ ID NO: 100354 - DNA, 201 bp, Homo sapiens
gcatcctgatacaattgcgtcacagagtcagaggtgttggggcagttgttagtgggatgacagcagtgctagtgactgcctcttccttatggggagatggsaggtgatagctaatgtggctcttgaaggatgattaggatatcaggccaagagggagaaaggagcatttcaggtagaagtaataatgtgccaactgcatgg

SEQ ID NO: 100355 - DNA, 201 bp, Homo sapiens
attatgctgtagagagacaatgggtacaatttctactttactgccaagtttagcttgttattcaggctatgaagcgatagcctggatgacagcttctgtcytccagtccaacagcacaccctcccaagtcctgaaatgtgacagaacgtgttgtaggaagccattcactcaatctcaaaaaccatgtgaactgcttggctg

SEQ ID NO: 100356 - DNA, 201 bp, Homo sapiens
ttttctttcaaaggttgtcattaatcacttgagagaatgggacatgaaatattgtgttgtatgtgcaggggacttaaatatacatactggccactcagaawtctttttttttttttttttttttttgagatggagtctcgctctgtcacccaggctggagtgcagtagcgcgatctctgctgactgcaagctccgccaccc

SEQ ID NO: 100357 - DNA, 201 bp, Homo sapiens
cttctccctgtatatcctataaatagagacaagaacgttaatagcttttgattctgaataaatggtacctatttggagcatacttcaaatttctgattttytgaatgcccgtcaaagagagaaagctacactttcttcttctattgttatatcattgagtagaattcattttctttcaaaggttgtcattaatcacttgag

SEQ ID NO: 100358 - DNA, 201 bp, Homo sapiens
aggatgtgtcttcattgtttatatactcctaatctgcactcttttagtgcaatgccattattattgatctgtgtagtctgtggagcacaccaaacagtatwtacacacagctatacctaatacatgttttttaatgcataaatttgaattgttttgcttgctaaagatggattttttgcttcttttcagacagagtttctt

SEQ ID NO: 100359 - DNA, 201 bp, Homo sapiens
ccatgtctccctgatacaccactgagcacaactccctcagaaatgtctctaagatgagctttgttttcttatttcacctgccagcatttagattgaaagawaataacatgtgggggtaaatgacagactctagaggcagactgcatggtttaattcatctttgccttgtgatcttgaatgagtgacttaacctctctgttc

SEQ ID NO: 100360 - DNA, 201 bp, Homo sapiens
tcggggcccactgtggtgggagaggaatgggggcgcgtgggagaatgtgtgtgcggagggggctttccaggctggctcacatcccaggttctcctgaccckaaacaaagcagtgatgtcagttcaatccagcagcccccgcctgacagcggcctctgctggctccaggggcacagtaaaagtcctaaagtagcaatatggg

SEQ ID NO: 100361 - DNA, 201 bp, Homo sapiens
atgtgcagggcatttggctaatcatatgaggatgtacataaataaaagccatgattcttaagttgaaggagcttataaaatctgcagaagtgtcagttgcmtgcagaaacaatgccccgatttaatggcaagagggaaagcattgggctttcccaatggaaaaggtccagttggggagctccacacaacatgaaggatgtg

SEQ ID NO: 100362 - DNA, 201 bp, Homo sapiens
aagcaatggcagaacaaatttttaattatattttaaaatccaaattccagcatccatttaaatattctacccaaagctgaacttgtaggcaaagtgtacarattatattcatgaaaacccaaggacaaagaacgcacaaattggccagccaaagaagacgtacaaatggccaataagtatacgaaaagatgctcaacgtta

SEQ ID NO: 100363 - DNA, 201 bp, Homo sapiens
agctgtacattattatagttgctcaagacaaaaaccttgtagtcatctttgatgcctcactttttgacacaccctacattcactctatcagtaaaacctgytggctctatcttcatctccactgccacccaggcccaagccaccatcatacctcacctggattatgggagtagctcctaaatgggctccctgtttcaaccc

SEQ ID NO: 100364 - DNA, 201 bp, Homo sapiens
ggtccacaaggtttattaaaatgaatgttttattttcttctatctgattgtgcagatattctgagaggaatttaggaactgtctctgccttatagccaacstatggcaaacatctcttatgatggctgtttcttaagaaaaaatagaatattttatgtatctgattaataaccaagttgaacttctcctatttctttggcc

SEQ ID NO: 100365 - DNA, 201 bp, Homo sapiens
aggtaggaattagtgagttttgtgtatttgtttgttttaatacactgggtatttgggctagttttacataccagttttaaattataaatcctttaaaagcmatggcagaacaaatttttaattatattttaaaatccaaattccagcatccatttaaatattctacccaaagctgaacttgtaggcaaagtgtacagatta

SEQ ID NO: 100366 - DNA, 201 bp, Homo sapiens
gagtgtgttctcaatacagcagccgtattttaatatgtaagtcagattctgtcactcctctgcactgatgtctacactctccatttcacttaatataaaarccaaagccttacaaggccaattttcctattgctctttccaaatagcacaggtcttcttggtattatttcagcctatcaagtatgtgggaaaagggctttg

SEQ ID NO: 100367 - DNA, 201 bp, Homo sapiens
aacagggcactgagctagttgagagcgaggaggagagagtagggaggaaagtcatgtgagaatgagatggtttatttagtcccatgttgggaggctgtacragctaagtgggagtgggaaatttgaaggtgatgggttaattttctgtctctttcagagaaggtatgataatgaaaagatctggaggacacagaataccag

SEQ ID NO: 100368 - DNA, 201 bp, Homo sapiens
atactagagctaatctgctaaataagggcccacattatggccgactgggtcatggcaggtcttgcttcctagggctccagaatcctggattgcttcccccrttgctcctaatgcccgtgaccctcagctcccctctggatgagggcaatattttattctgtactcaatcattttttgaactttttggatctagagttggga

SEQ ID NO: 100369 - DNA, 201 bp, Homo sapiens
tttgtcccctggtttgctcagcgagaccttcgtgtctgagggcccccttctcaccttgcagatcagctggtgtggtactgaatgcctgatggatggccagrggcccctgatccatctgcattcccagaatataagaatctcatttggggccacccagcccccactactcttagtatatgaaataaggtggaatagataaga

SEQ ID NO: 100370 - DNA, 201 bp, Homo sapiens
ggtgccatcccgaacagtaatgttgctttgagcaaaagaaattctgaaatgctgtttgagtcctcaaacagtattcaattatgataaaaatattctagtgytcctaattctttattctgtctaattctttgagattagaataattctaatactttggatatccaagtatctgcttagacagcttgattgctgcatttctct

SEQ ID NO: 100371 - DNA, 201 bp, Homo sapiens
atgattatggtcaattaaatttcagcaaggtggtgccaaaacaattcaatggagaaagaatagtcttttcagcaaatggtgctagaaaaactagatatccmcttgcaaaaaaaaaaaaaaaaaaaaaaaaaaaaaaaaaagaagttgaacccctacctcataccatatacaaaaattcactcaatatggatcaaaggccta

SEQ ID NO: 100372 - DNA, 201 bp, Homo sapiens
ataaaaatattctagtgctcctaattctttattctgtctaattctttgagattagaataattctaatactttggatatccaagtatctgcttagacagctygattgctgcatttctctctgactctgggcagacaggattctataatgcagaatcagtcttaccagccatttccagatggacttgagggtggctgctcctt

SEQ ID NO: 100373 - DNA, 201 bp, Homo sapiens
ttcctttctgactctaaggtcttaagaacattcttctatatttcaaatgtttacatgtttgtagttcatgtttagctctttaatcctaaaaatatttgttkttcatatttgggactataatatggaaactattcttattggagctttgaggtagagaactaattttattttatatttctctgaattgccaatagtctcagc

SEQ ID NO: 100374 - DNA, 201 bp, Homo sapiens
acagtaagactgttctgttagaacatcagtgttgggtttttgttaagaaaagaagtaaaacagcaagtggccagacaagctaattgctaagtaaaatgtarattgaatattgggcaagatgttaaaaagatgtttgaataagtaaatattaactaaacaattagcaatagatttgattatgctacatgaaacaaaacggta

SEQ ID NO: 100375 - DNA, 201 bp, Homo sapiens
gcgcctttaatcccagctacttgggaggctgagacagaagaatcgcttgaacccgggaggcggaggttgcagcgagccacagttgcgccactgcactccakcctgggttatagaggaagactctgccaaaaaaaaaaaagtggagatagatttattataaaggtgtttgtataataggattttccccaaaggaatttggtt

SEQ ID NO: 100376 - DNA, 201 bp, Homo sapiens
ttttataggcatattttgggggcaataatcagtaatttttcaggaaatggtaggctccctttgatcatcttctattctgcttatttcctgcatttccagcrttagaatggcatattttcaggttatcactgggtttatatgtttaagaggagatagagatggcattgcctgccattgtttcaacaggataaaaaataaaaa

SEQ ID NO: 100377 - DNA, 201 bp, Homo sapiens
ttcagaaacttaaccaaacactagtatgcgtagatctgagagagtggggttatctaccagtctctgtatggagtcagtatgttaaatgtgtcagaaatagaattaataaaacaggagaatacaaaagaaaaacaatgaacagagatttttaaaagagggtgtttgtaaagggtagagaaacagaagagacaaaggttgggc

SEQ ID NO: 100378 - DNA, 201 bp, Homo sapiens
ctagaggtgcgcatcaccatccttggccagttttgtttgtatttttataaagatggcgtctcactgtgttgctagggctggtcttgaacagctgggctccygcaatcctcctacttcggcttcccaaagtgctggattacaggcatgagctaccatacccagctgagaaatgcacttttaaaagagaaaaggtaaaaagcc

SEQ ID NO: 100379 - DNA, 201 bp, Homo sapiens
aatgtgtgtcactcttgatggttatgttcacgagcatccagaaagcccagtgctcctgaactgaattataggctttgaaatgaccatgtggtttgcattcrgcaaaaaaacataccccagacatgtgcaagggttgttggtttggggaaaattagatgactccaacatgaaaagacagagcctatctaaagagataggcta

SEQ ID NO: 100380 - DNA, 201 bp, Homo sapiens
tcagaaacttaaccaaacactagtatgcgtagatctgagagagtggggttatctaccagtctctgtatggagtcagtatgttaaatgtgtcagaaatagaattaataaaacaggagaatacaaaagaaaaacaatgaacagagatttttaaaagagggtgtttgtaaagggtagagaaacagaagagacaaaggttgggcc

SEQ ID NO: 100381 - DNA, 201 bp, Homo sapiens
actcttgatggttatgttcacgagcatccagaaagcccagtgctcctgaactgaattataggctttgaaatgaccatgtggtttgcattcagcaaaaaaayataccccagacatgtgcaagggttgttggtttggggaaaattagatgactccaacatgaaaagacagagcctatctaaagagataggctagtgtgaggtt

SEQ ID NO: 100382 - DNA, 201 bp, Homo sapiens
gaaagatatcttctttttctctgagacaggctctcactctgtcacccagactggagtgcagtggtgcaatctctgctcactgcaaccttcactcactgaamctctatctttcaggttcaagcgattctcccacttcagcctcctgagtagctgggactacaggcgcctgccaccacccccgactaaagtttgtattttttg

SEQ ID NO: 100383 - DNA, 201 bp, Homo sapiens
cagaaacttaaccaaacactagtatgcgtagatctgagagagtggggttatctaccagtctctgtatggagtcagtatgttaaatgtgtcagaaatagaattaataaaacaggagaatacaaaagaaaaacaatgaacagagatttttaaaagagggtgtttgtaaagggtagagaaacagaagagacaaaggttgggccg

SEQ ID NO: 100384 - DNA, 201 bp, Homo sapiens
tctcattgtctcctccacctagttcttcatttcaggtgtgtgtgtgcgtggatgcatacacgcacatatgttggaggaacagcgtttgtaggaatcgtctygtgtgattgaaagtttgtcttatgtaattcatcaagtgaacatttagagaatattatttctgcaattggctgcttttgaaacaaatttacttaagtactt

SEQ ID NO: 100385 - DNA, 201 bp, Homo sapiens
aatgttttccagttcatttggttctattttattcctattgcttttgagtgcataaatattttagactaattcacagcatggattatgttagcatctctaaytcttatttttgaatcagttatgggcagctaattttataggcaaaaaaattataataaaatttcatcattgaataataaatgatgaaatggagcatagcat

SEQ ID NO: 100386 - DNA, 201 bp, Homo sapiens
agactctgcctgcccagcacgccccaagctctgctcctcatctcttctctgtatccacccccgacctggtgtttccctcagattcacacgggaggcagctsaggactgcgaggtgctggggcagcgcatccccgcaggcgctgtgctagagatggccgtgggtgccctgcaccatgaccctgagcactggccaagcccgga

SEQ ID NO: 100387 - DNA, 201 bp, Homo sapiens
caagctctgctcctcatctcttctctgtatccacccccgacctggtgtttccctcagattcacacgggaggcagctcaggactgcgaggtgctggggcagygcatccccgcaggcgctgtgctagagatggccgtgggtgccctgcaccatgaccctgagcactggccaagcccggagaccttcaaccctgaaaggtgagt

SEQ ID NO: 100388 - DNA, 201 bp, Homo sapiens
ctagtgaacccaaaagtgacttaaaagtaaaaatcattattagcaagagattaagaacataacttcattgagaggtcaatgttaagagaacagttcattaraagtttctgtttaaaaagaaaaggaaaggcccaaatagccatttcaaggcagagcaggtgaaaggcctggaacactcctgtgcgctcactgtcggctgct

SEQ ID NO: 100389 - DNA, 201 bp, Homo sapiens
ctaagggtaactgagaattcgcatgtcacgagttccctggaaagattctgctgagagccagcgtggaaagccccggcacagtgagtgttcctgttggtccyctctctgaccacctcagactgactacatctccaggctcgaaggacctggcccctgaacccccaccctccactgctttatttttctctgtggaactatcac

SEQ ID NO: 100390 - DNA, 201 bp, Homo sapiens
tagacactgttaatcacctcactcttcttgaatcactcccctcccttcacatccttcacatgcatgcttgtttagttttttttgttttttttttttttgtwttttttcccaaaattcctagtccttcctcctttcacatgcttgtttaggtttttgtttttgtttttgttttcaatactcctagcctgccttcctgccttc

SEQ ID NO: 100391 - DNA, 201 bp, Homo sapiens
tctggtcattttggggggcattaaaaagtccaggccagtctggcccagatgaaaacttcaggctcaaatccaatcagtgcccttctgttctcttagctcargctgacctgtggcctgaggatgccgccctgcgggaggagaggtctgttttttcccctccttctacccctcccccacccctgctgggcccctttctcctcc

SEQ ID NO: 100392 - DNA, 201 bp, Homo sapiens
gcatgtcacgagttccctggaaagattctgctgagagccagcgtggaaagccccggcacagtgagtgttcctgttggtcctctctctgaccacctcagacygactacatctccaggctcgaaggacctggcccctgaacccccaccctccactgctttatttttctctgtggaactatcaccagctaacattccattttgt

SEQ ID NO: 100393 - DNA, 201 bp, Homo sapiens
gtgtggtggcttatgcccaaaatcccagggctttgggagggcaaagtgggaggatcacttgagcccaggagtttgagaccagcctgggcaacaaagagagwccctgcttctaccaaaaaaaaaaaaaaaaaaacaaatcaaaaattagccaggtgtggtggtgcgagtctgtaatctcagctacttgggaggctgaggtcg

SEQ ID NO: 100394 - DNA, 201 bp, Homo sapiens
gtagtggaagaaggaagtgataagtttcattagtggaaattaatttttcatttgttggtcaccagtttagagcactttaaggcattaattttttcattttwaaaaaaaacccagaaatacgtttaaataccttcccccacccccagcagctgacccttacttattcagaaaaccctcctctgacatcagccccaaaatatt

SEQ ID NO: 100395 - DNA, 201 bp, Homo sapiens
ctagaacttatcttagcaattttccaagtttctaggcagcctgaccaagtaggaagaataatttggtcaattccatgaagaggttccctcttttgaaatgyatgattctaatccgcagctctttcatcaaagcaaaggcagtgaataacacagcccaaactgattttgttggtaaacaccacccaactgttttcttattag

SEQ ID NO: 100396 - DNA, 201 bp, Homo sapiens
caaataaaaatgtcattatccattcagttcgacagacagcaagcagagtatcgcagaaaattacaatcacgtcaggcagcaacaaaggattctagtcaaargcacgtagaagacccgatggtgggcagctggcctgggctctctttcacactgtccaggaatatgtttggattcagaatgggtggccccctctttatacac

SEQ ID NO: 100397 - DNA, 201 bp, Homo sapiens
ctgtttagatggatagggttatgcaaaaaagaccctctccttccctctctctgtgtaggaaatatgttttccctagcactcagcattgtccaaactttcargaactccaaaggcttaaagatggtgggttttttctttctcaagtttatgacataagatctgcacagaatgacctagaagtgaataaactaaggagcaaag

SEQ ID NO: 100398 - DNA, 201 bp, Homo sapiens
tttcaacatctaaatctgccaaattattgaagctagcacagagaactttctgggcattggccagggaagccagcaatgtggatggaaagatttatcacccsctctcataaccaaacctccatcgtatctccctgcaagccttgaaactgctcactggacccactcagacaacagagctatgggatctagaaggtgaaatgt

SEQ ID NO: 100399 - DNA, 201 bp, Homo sapiens
aaaagccataaacaagaatgttcataaggctttattcataatggcccccaacctgggaacaactcaaatgtccattgacaaggaaaaggatggataaatcsgggcagctcacccaatggagcaccaaatcatgaggatgaacacaccacaacacacaacatgggtgactgtcacagacatgaaactgagcaaaagaaggca

SEQ ID NO: 100400 - DNA, 201 bp, Homo sapiens
ggctggagtgcagtggcgcgatctcggctcactgcaagctctgcctcccgggttcatgccattctcctgcctcagcctccggagtagctggcactacaggygcccgccaccacgctggctaattttttgtattttttttagtagagatggggtttcaccatgttagccaggattatcttgatctcctgacctcgtggtcca

SEQ ID NO: 100401 - DNA, 201 bp, Homo sapiens
ttgggagggcaaagtgggaggatcacttgagcccaggagtttgagaccagcctgggcaacaaagagagaccctgcttctaccaaaaaaaaaaaaaaaaaamcaaatcaaaaattagccaggtgtggtggtgcgagtctgtaatctcagctacttgggaggctgaggtcggaggatctcttgagcccaggaggttgaggata

SEQ ID NO: 100402 - DNA, 201 bp, Homo sapiens
ggaagcattaaggttcaatgcttggctctgtgcttgtttttcttacccctatcccagaggactcatccccgtctgtgcgacaccatctccccacttctacrccaagctgctcacggtctcacccaggtggggtggtggagggggcctccagcaaaatcctgcaaaagctgatctccttcccctggaagatgctgccccacc

SEQ ID NO: 100403 - DNA, 201 bp, Homo sapiens
ccaagtgaggtcaaggggcagacggaggagcagccccactgcatcggggcttccacgtgtgcggggcttgtctcacttccccacgatctcaacatacagtrcagcagccagaccagtctcccaaaacgctgcttatgcctggcactccccggcttaagaaccagccaggagtcaagggctccccgttcttccttgtctgct

SEQ ID NO: 100404 - DNA, 201 bp, Homo sapiens
gtggcatagtctcagctcactgcaacctccgcctcccgggttcaagtgattctcctgcctcagcctcctgagtagctggggctacaggtgcgtgccaccayacccagctaatttttgtatctttagtagaggtggggtttcatcatgttggccagtctggtctcgaactcctgacctcaggtgatccgcccacctcggcct

SEQ ID NO: 100405 - DNA, 201 bp, Homo sapiens
tgcagatgggtgatgatgcgctcctgcctcccttcagtttgttctgttctcccaaattctttcagtgtgcctggtagaagcagtctgccagtctcccctcrctccctctcattcatcccctctctaactactcatcctgcgaccccactgacttggttttggccttgtccctgccacagttgacaaatataatggcgcgtc

SEQ ID NO: 100406 - DNA, 201 bp, Homo sapiens
tgcccaggctggagtacagtggcacaatcacagctcactgcagcctcaacctccccaggctcggggaattctcccaccccagccccatgagtagctgggastacaagcgagcactaccaccccaggctattttttgtatttttttgtagagacggggtttctccatgttgcccaggctgggaactctggatcttaataaaa

SEQ ID NO: 100407 - DNA, 201 bp, Homo sapiens
gtggagtcagaatctttctttctgggactgatgccatggggcctggctccacccccacaactgcatggcacagcactgccttttccttggccatgggctcrccctgcagatgggtgatgatgcgctcctgcctcccttcagtttgttctgttctcccaaattctttcagtgtgcctggtagaagcagtctgccagtctccc

SEQ ID NO: 100408 - DNA, 201 bp, Homo sapiens
atctcttctctgtatccacccccgacctggtgtttccctcagattcacacgggaggcagctcaggactgcgaggtgctggggcagcgcatccccgcaggcrctgtgctagagatggccgtgggtgccctgcaccatgaccctgagcactggccaagcccggagaccttcaaccctgaaaggtgagtactgccccttttaaa

SEQ ID NO: 100409 - DNA, 201 bp, Homo sapiens
gtctcaagctcttggcctcaagtgaccctcctacctcagcctcccaagtagctgggactataggtgcatgcaaccatccctggctaattttatgttttacttatttatttatttatttatttatttatttgtaaagacaggattttgctatgttgcccaggctggtcttaaacgcctgaggtcaaatgatcctcccacctc

SEQ ID NO: 100410 - DNA, 201 bp, Homo sapiens
ttcccgtcacgtttatttggcctggcagagtgaccaggatctgctaaggtcatgaggctgtccctgggtgggtgggggcgtggccatgctgcatcagaccrgtccagaggtggagggcaccttggggtctctcgtgtggctctcctgttgatgagggacctatgaatatcccacagcgaccttttcagatgctccataacc

SEQ ID NO: 100411 - DNA, 201 bp, Homo sapiens
acccccgacctggtgtttccctcagattcacacgggaggcagctcaggactgcgaggtgctggggcagcgcatccccgcaggcgctgtgctagagatggcygtgggtgccctgcaccatgaccctgagcactggccaagcccggagaccttcaaccctgaaaggtgagtactgccccttttaaaaagctctgaagggatgt

SEQ ID NO: 100412 - DNA, 201 bp, Homo sapiens
tctcaagctcttggcctcaagtgaccctcctacctcagcctcccaagtagctgggactataggtgcatgcaaccatccctggctaattttatgttttacttatttatttatttatttatttatttatttgtaaagacaggattttgctatgttgcccaggctggtcttaaacgcctgaggtcaaatgatcctcccacctcg

SEQ ID NO: 100413 - DNA, 201 bp, Homo sapiens
gataaaaaataaattccagtgcttaaagctcttatctttgtttaccatttccccaaacagctagtgacctgctctctgactcctacagcaaatcatcaacragatgcacacgaagatgagggatgggaaatgcaggaggggtgtgcggagggcaagttgatggctctccgccttcccgtcacgtttatttggcctggcaga

SEQ ID NO: 100414 - DNA, 201 bp, Homo sapiens
gactgcgaggtgctggggcagcgcatccccgcaggcgctgtgctagagatggccgtgggtgccctgcaccatgaccctgagcactggccaagcccggagamcttcaaccctgaaaggtgagtactgccccttttaaaaagctctgaagggatgtgagtgtgtgggatagaaatttaccagtggaggcagcagccgggaggc

SEQ ID NO: 100415 - DNA, 201 bp, Homo sapiens
ctcaagctcttggcctcaagtgaccctcctacctcagcctcccaagtagctgggactataggtgcatgcaaccatccctggctaattttatgttttacttatttatttatttatttatttatttatttgtaaagacaggattttgctatgttgcccaggctggtcttaaacgcctgaggtcaaatgatcctcccacctcgg

SEQ ID NO: 100416 - DNA, 201 bp, Homo sapiens
ccaggctggtctcaaactcctgacctcaagtgatctgcctgccttggcctcccaaagtgctgggattacaggcgtgagccattgtgcccagctgctcttcyctttttactgtcctatgactggtctcccaatgccagctgagagtgttggtctgatctcttttcttctaagctggccacacaaatggacctcagttactca

SEQ ID NO: 100417 - DNA, 201 bp, Homo sapiens
tcaagctcttggcctcaagtgaccctcctacctcagcctcccaagtagctgggactataggtgcatgcaaccatccctggctaattttatgttttacttatttatttatttatttatttatttatttgtaaagacaggattttgctatgttgcccaggctggtcttaaacgcctgaggtcaaatgatcctcccacctcggc

SEQ ID NO: 100418 - DNA, 201 bp, Homo sapiens
atggcttcctcctccttcccaaggggctgccccaccgctttgccctcactagccagagcaatctaccttgttcactttgcccaagacacagggaggacccytgtggtctttgcaggggcttcacccagttgagctgggaagagacctcacagcatcctccccatctccctggcccgggtttagaatactgaagacacatag

SEQ ID NO: 100419 - DNA, 201 bp, Homo sapiens
gctggagtgcagtggcatgatctctgttcactgcaagctccgcctcccgggttcacaccattcttctgccttagcctcccaagtagctgggactacaggcrcccaccaacacacctggctaattttttgtatttttagtagagacagggtttcactgtgttagccaggatggtctcaatcttcttacctcgtgatccgccc

SEQ ID NO: 100420 - DNA, 201 bp, Homo sapiens
gttaactctctgaattacaataaccatcaactagatacctttttaaaagaattgtaatactttctttataaaacgttatctttggccaggcatggtggctsacacctgtaatcccagcactttgggaggccgaggtgggtggatcacttgaggttaggagttcgagaccagcctggccaacatggtaaaaccctacctcta

SEQ ID NO: 100421 - DNA, 201 bp, Homo sapiens
gcaggggtggctcagctggagcacagggctgcagaggggagggagcgggtgttctgggccagccctgaccacacggacctgcaggttcacggctgaggccmggcagcagcaccggcccttcacgtacctgcccttcggggccggcccacggagctgcctcggggtgcgtctagggctgcttgaggtcaagttgacactgct

SEQ ID NO: 100422 - DNA, 201 bp, Homo sapiens
gggctgcttgaggtcaagttgacactgctccacgtgctgcacaagttccggttccaagcctgccctgagacccaggtgaggcccccctgctcagaggcagrggcaggggcaggggtgggagggccaccccagttctctgcgtgagagcaggccagcctgggggcaacatcaggctctgcctccgtgagcttgggcaagctc

SEQ ID NO: 100423 - DNA, 201 bp, Homo sapiens; identical to SEQ ID NO: 15731

SEQ ID NO: 100424 - DNA, 201 bp, Homo sapiens
ccacttcggataaattttcttttatttccatactcttttgtgacatgtgtggcacaagtattcaatctcacagggatgttaaaacccacactcgaagggtktccagtgtgcttaggaaatgtgggtttgcgcaatcacaggccaagcctgggggtcctcggggaagctactcctccaggtcacctgccaggtggatgcact

SEQ ID NO: 100425 - DNA, 201 bp, Homo sapiens
cagaacatttcatccaataaccgcagaatacacattctattcaacatcatatggaactttctccaagatcgaccatatgataggccataaaacaagcctcwataaatttaagaaaattgaaattgtatcaagcactctctcagaccacaacagaataaaactggaaatcatctccaaaaggaactttcaaaaccatgcaaa

SEQ ID NO: 100426 - DNA, 201 bp, Homo sapiens
ttaagtgttacatgtgccatccagccaggtgagatggcagcagagaacctaaaccctgagaaggtgaaatcaaatgggctgggcgcggtggctcatgcctrtaatcccagcactttgggaggccaaggcagacagatcacttgaggtcagaagttcgagaccagcctggccaacatggtgaaactccatctctactaaaaa

SEQ ID NO: 100427 - DNA, 201 bp, Homo sapiens
atcctactctcttctgcttggtgaattcatctgcacagtctaagctcaaatgtcattagattcaaaccttttgccgatctcctgtcctcctgtttgtgtcygctctgtgccctgcatgtatttgtgtgccatcataactataagacggacggaacttaggtgattatatgtctatttccttatcctggaaggtgagctcct

SEQ ID NO: 100428 - DNA, 201 bp, Homo sapiens
gatgggggcacctgattgatgttgacacgccaatgttgggctatcatcggaggaggtctgtattaattttaacaatgaaaatagacgggttacagttaccytaaatagcatcaagtcaccccacttcataaagcccttcaatggctttcctttccttttggaaggaagtagtgcatttttcacatggtccactgggtctta

SEQ ID NO: 100429 - DNA, 201 bp, Homo sapiens
tgctattcattctttcccccaactctcttcttttgtttgtttgttttttgtttgagatgcagtctcactctgtcgcccaggctggagtgcagtggcactaycttggctcactgcaacctccgcctcccaggttcaagcgattctcctgcctcagcctccctagtaactgggattacaggtgcacgccaccatgcccggcta

SEQ ID NO: 100430 - DNA, 201 bp, Homo sapiens
ccaagggccaaatcagatgaaatgttcaatttataaaggtcaacaaatatttattaattagttcctgttgttaaggagtttataatgtagaagagaaacamggtacataaatcactgcattattaccaatcgtggaaggtggtgacagagctggggtcctgctttgagcatcagaagccactttggcagggaggaagcagt

SEQ ID NO: 100431 - DNA, 201 bp, Homo sapiens
tgttacatgagtgacagacacacttctgtagtgtgaagctcttgagatttgggggcccctcattacaacacttatgctattcattctttcccccaactctsttcttttgtttgtttgttttttgtttgagatgcagtctcactctgtcgcccaggctggagtgcagtggcactatcttggctcactgcaacctccgcctcc

SEQ ID NO: 100432 - DNA, 201 bp, Homo sapiens
ttgcaattaggggtggtcatgtttccaaagagtgtgtacaccacctccaggcctggcctgtaaaattcttcctcatatcatcttctctgttttccacttgycagctggttgtggatgatccagcagaggcatctgaggttccagtggacgacagggttacaagatggaaaaagcctgaattcctgagtcactgcatggaag

SEQ ID NO: 100433 - DNA, 201 bp, Homo sapiens
agttctccaagaaatcctgtctctgactcccccatccaggcttggaaccctggaggcttcctcgtagggctgcgtagagcaggtggggagggcaactccasagccctagtcacctgtgagctgcgtagacaagagaattttccagcaagtagaagtcaagtgtcctggggaaggtctgatttgcagagtcagggtttagtt

SEQ ID NO: 100434 - DNA, 201 bp, Homo sapiens
atgagctttgatctacaaatgcaggtcttgcttcaacttaaaaatattttcttttctaatatctttaaatagctcttctgttctttttttctctctccttyaaaactagatttctatcacctgtctttctatgtctagaccttgtttctgatagttttgatctctttgtcctttttttttcttttttgtgaggcaggttct

SEQ ID NO: 100435 - DNA, 201 bp, Homo sapiens
atcttctccactcagtccaccaactcacatgccagtctcttctgaaaacaccctcacagacacacccagaaagaatgcttcaccagctatctaggcatccsttgagccaatcaaggtgacacctaaaattaaccatcatagtgataatttaaggcattaaggacatcatttcatgtcctgcagctctttaagcccaggctt

SEQ ID NO: 100436 - DNA, 201 bp, Homo sapiens
acggtcaagcggagatagtcattctctccctgtctccttgaaagggagtatgagggtttgtgagcaataacccttacaccaacatatattgctattagtcyattgatggcatctgtttacctctcagttgtaggtgcttcaaaattaaagaaaatctatttcttgaaaagtgcacaataaatcaagctttaaactcaattt

SEQ ID NO: 100437 - DNA, 201 bp, Homo sapiens
caagtcacccaagctacacaccatcaacgtttggggcttatctctgtttagatggatagggttatgcaaaaaagaccctctccttccctctctctgtgtargaaatatgttttccctagcactcagcattgtccaaactttcaggaactccaaaggcttaaagatggtgggttttttctttctcaagtttatgacataaga

SEQ ID NO: 100438 - DNA, 201 bp, Homo sapiens
ggaactcatctcctcccaaacctccttctggtaaacaataaccacctcctagtccttcagctccagccattgcaggtcaactgccaggacccattgtttckttgttgttgttgttgttgttttttgtgtgatagcttttcacattcttccattcctcttcctttctactgccagtacctgattgagcctatccctacctcc

SEQ ID NO: 100439 - DNA, 201 bp, Homo sapiens
ccccgagcatctctcatttcttcccttccactccatcctggctaatttactgtccacaattcacagagtattgtctccactctgcgcagccacagaatggrtgtggtaacgtctccatggcatttatggtttctacaaatcacaaatcacatatgaagggctccaagaatattagaggaatgagccagttaactcagcgcc

SEQ ID NO: 100440 - DNA, 201 bp, Homo sapiens
aacactcttgctcagggtgctgtgcgatgggccattggtaggtagtcccagctggtctggtgtgtgaggggagaggcaggttcacccagctgtctgtgccygggcagggcaactcccgaagtgggctgagggagagctctccgtgatctctaaggagggaggcagcgcattgcagggttagcaaacctttagaagatcctc

SEQ ID NO: 100441 - DNA, 201 bp, Homo sapiens
attcacgtttgatgttctatgatgatgaaattacttcttggaaattggctctgaaacccagcctcagtcccagtgctgtttttctttttaactggtttaattttttttttgaacttttttatctcattgtagcttaccttggattgaaactggccacatgtaaaaccaagagcaaatggtagctccttccctacccccagc

SEQ ID NO: 100442 - DNA, 201 bp, Homo sapiens
tcgaggacaaggagcaggcatcccgtgtggcgggagcaggaacactcttgctcagggtgctgtgcgatgggccattggtaggtagtcccagctggtctggygtgtgaggggagaggcaggttcacccagctgtctgtgcctgggcagggcaactcccgaagtgggctgagggagagctctccgtgatctctaaggagggag

SEQ ID NO: 100443 - DNA, 201 bp, Homo sapiens
acttttagaaatgtgaaatgctctggaaagtctcagcaatagaacaagtagaagaaggaaattcagagctcaaagacaaggtctttgaattaactgaatcyaacaaagacaaagaaaaaaaataaaaaaatatgaacaaagcctccaagaagtctgggattatgttaaatgaccaaacctaagaataattggtgttcctga

SEQ ID NO: 100444 - DNA, 201 bp, Homo sapiens
tcagaaagaggcagcccacaagctgagcacagctgcagaggttttagcttgcttactacatttgaattaattgccaaacttttaaactcaggggaattccrcaaaaatctaggtaccagcttttcttgaagacaacggaagctcaggccaccctgaggccatcacctctggcagtcacctgccaagcacgtggctccagct

SEQ ID NO: 100445 - DNA, 201 bp, Homo sapiens
tatgaagccagtatcaccccaataccaaaactaggaaaggacacaaccaaaaaagaaaactacagaccaatatccttgatgaacatagatactaaaattctttttttttttttttttctgagacagagtcttgctctgtcgcccaggctggagtgcagtggcgcgatctcggctcactgcaagctctgcctcccgggttca

SEQ ID NO: 100446 - DNA, 201 bp, Homo sapiens
aggccctagggggcagtagcaccaccatgcagatcaccagttccacaaaagaacggaactccaccagtacctagtgttattagtataagttttgggaaagrtccttcttttcttagctcattagaaaaacaatcacagcatcctatggactgggccaaagtgggcagacattgcagtccagcccaaagaggcctgtcccag

SEQ ID NO: 100447 - DNA, 201 bp, Homo sapiens
acaggtgccctgaggaatgaatgggtggacggcgcttacagactcgggtgccacttcctcttgtccagctccatgccctcccccatagtgtgtggaccatygggggcctagaactgaggtcctggttggtagcacccaggagcctgttcccaacatggccccatggcagggcctggtctccaggtgtggcatgaggtgcta

SEQ ID NO: 100448 - DNA, 201 bp, Homo sapiens
atctgaggacctgggaggatttcagaaatcgctggtcagtcccagcaactaaggctcaaatgccctccccaggattctgctggagatcattctgccagtcrctccaggagcgaggggctcacctcttcctaaggcaggactttccacgaggctagaccagaccagtgtcctccaattaattcatttccctgtgtcttccat

SEQ ID NO: 100449 - DNA, 201 bp, Homo sapiens
tgacacagttccccctaagcctcgcttcttcactgtttaaaggggataataatagcatctgctctgttagactgagggctggttaagtggaataacatacktagcacatagcctggtacccacttattttttttattttgctactttgtttcaaatcttcaaatcttcctattattccttttttacagagccatgtcagaa

SEQ ID NO: 100450 - DNA, 201 bp, Homo sapiens
cttcagacctcaggtgtcccccagaggtgccatctttgaatctaatgtgtagattcttattcagttggtctgggtagggtgtgggctttagaattttaaargatctccctggtgcttctaatgcacaggtagggttgagaagcacactgttctcaaagagtggtcccagaccagcagcatcagcatcacctgggaaattgg

SEQ ID NO: 100451 - DNA, 201 bp, Homo sapiens
aaactcaatttgttttccagaaatttttcaaattttcccatgacaaaatttacatttattttctgattttaacagtaagagtaccattctaattttcatckggtctttgcttcattggttgacatttgccttgcccttggacttgagaacttgaagtatcaatgaggcatagcacatcagtaaataagccccgctaagcca

SEQ ID NO: 100452 - DNA, 201 bp, Homo sapiens
tcctgggccaggcccaggcccccactgtgtgcagcctaggaacttggtgctgtgagtcccagccactccagctgtggctaaaaggggccaaggtaccactwggacttgtggcttcagagggtgcaagtcccaaatcttagcagcttttacatggtttgagcctgcaggtgcaaaaaagtcaagaattgaggttggggaacc

SEQ ID NO: 100453 - DNA, 201 bp, Homo sapiens
aattttcaattattttttctttaagctatttcattgaatatttctcccattcaatattgggggattgtgttgggagaggagggtctccctttcccacttcygcaaatggggcactcacagtatttggagtgtcttctgggtcctgcaggagcagtctggttccttcagagagtctgtgggtccttttgggattgctggttt

SEQ ID NO: 100454 - DNA, 201 bp, Homo sapiens
tggaaaattttcagcctgatgatgcaatagaaaagaaaaacccattttctggagagaaattcaagcctgctgcagaaatttgcataagtaaggagcccaaygttagtcaccaagacaatggggaaaatgtctccagggtatgtcagagacctttgcagcagcccctcccctcacaggcccagaggtctagggggaaaaaat

SEQ ID NO: 100455 - DNA, 201 bp, Homo sapiens
tagtttaaatattgttttaagtgttgttcaaatgtatttccattttctacagtaacattttttctttaaaatattcaattttaacacttcttgagtgctaygtgtatccattttctcgttacagaatagttgcataggttacacgtgatatagtttggctgcatccctaaccaaatctcatcttgaactgtagctcccata

SEQ ID NO: 100456 - DNA, 201 bp, Homo sapiens
aataccacattacttctgcaagaatggccataatcaaaaaataagaaaacagtagatgttggcgaggatgtggtgatcagggaacacttccaccctgctgrtggggatgtaaactagtacagccactatggaaaacagtgtagggattccctaaagaaccaaaagtagaactacctaccatttgatccagcaattccgcta

SEQ ID NO: 100457 - DNA, 201 bp, Homo sapiens
agcctcccgagaagctgacaccacaggtgcacgccatcaagcccagctaattttttttttttttgagacagtctcactttgttgcccaggctggagtgtartggcacaatctcggctcactgcaaactctgcttcccgggttcaagcaattctcctgcctcagcctcccccaagtagctgggactataggcgcacgctgcc

SEQ ID NO: 100458 - DNA, 201 bp, Homo sapiens
agggccgagcacagtgcctggcacgtgagaaataggtgttgagaaaagttatttcactcttccttttctaactggaaaccaactccaagcacagatttgasgggggacgagcagggaggcacagtagataaagcctgtgagttactgcgcccagcgagaaaggggtcggtggagtcaaagagagaaggcactgcgtgggga

SEQ ID NO: 100459 - DNA, 201 bp, Homo sapiens
cttactatgtgccaggaatggtgaggagtaccgagagggagtgagacatcacccctgctctcagaagcagcagtgcggcggggagggcaggactccaaaamggctccgattccaggcccgcgtttgcttcccgggaacaggcgtctaatggccctggtttattatcacccccttttcaatgccacttttgtttttctcttt

SEQ ID NO: 100460 - DNA, 201 bp, Homo sapiens
tgacgtattgtttccttcagggcacagaaaatatggagtctagcgaacagaagcagggcccatgcgtaggggtggtccaggtttacaccaaagaaaatgartactactcacagctgtctggcaaggtggcaagagagcgcctcggaggtcgtgagtgtccctcaccatccataggaatgccacaaaagcccttgctgccag

SEQ ID NO: 100461 - DNA, 201 bp, Homo sapiens
ttttccatgatgatcatttgatttaaaccgaccagtgtgtggctgagctctgtgaactggggcatcaggggatcagggctgcaccaccagggctggagatggagctggggatagagactgtattagctggaagtacatggagcacatgctaagacgattaacacacaagataacacattttaaaaactaattttttcccat

SEQ ID NO: 100462 - DNA, 201 bp, Homo sapiens
aaagtgtttaggaaattaagtctaaatcaagcccttcttggagattcatagaatatcaaaggccctgaaaggttctttaataaagaaacctgttcagcttyatttaacccagtgttttcgcagcgtctttgctaaagtactgctgcatatggccgtggtgggttgggcaactagacccgctgagatggtcccttgaaaacg

SEQ ID NO: 100463 - DNA, 201 bp, Homo sapiens
tcaagtctcattctaagaccagtttaaattgaaatgtgattggtgattattaagatttaagactatcacagattattaagacttaagtttaccactatgcstggaagttcctttcccagagagtttcttctacatgtaagaactggactctaattctagacccacatctactccagactatatttagaaggcaccattggg

SEQ ID NO: 100464 - DNA, 201 bp, Homo sapiens
ccacctctctgggcttgatcacttttccatacggtcaagcggagatagtcattctctccctgtctccttgaaagggagtatgagggtttgtgagcaataamccttacaccaacatatattgctattagtccattgatggcatctgtttacctctcagttgtaggtgcttcaaaattaaagaaaatctatttcttgaaaagt

SEQ ID NO: 100465 - DNA, 201 bp, Homo sapiens
gcctcccaggttcaagcgattcttctgcctcagcctcccaagtaggtgggactacagatgcacgccactgtgtctggctaatttttgtatttttagtagaratggggttttaccacattggccaggttggtctcaaactcctgacctcagatgatccacccaccttggcctcccaaagtgctgggattacaggtgtgagcc

SEQ ID NO: 100466 - DNA, 201 bp, Homo sapiens
tgtaaattcacccttaagtcttaaggataggtacgagatccaatcagccttcactcttatctctaatttattctgtctcatcagaaccagaaaacatcacygcactttccttggaggtaagtgctttattccatgtagtgtgccacaggactgcatcttgccactacataaatacacataatatatgatttcctccttcaa

SEQ ID NO: 100467 - DNA, 201 bp, Homo sapiens
cccggtgtagaggtggctgtgccctccctcccatcattactcctacactacctcagcaaagccatagccaagcctcagggaccacaatgatatcacacccygaggaccttcagagggactgactgagaggtctgggggtgctctggggtcctgtgctggtgtcccagagctgagggagcaagggatgctcacttcccctgc

SEQ ID NO: 100468 - DNA, 201 bp, Homo sapiens
gccttaccagtcatgggcctgagacaatgagaggggtctgggagctgtcccatttggctagagatagtgtgcattgtattttatttatttaataagcacaytagcagtcagtgttctaaggagtttaatcaatcatttaaaaaaatcacttttttttttttttaacagtacatggaactctaggttgccaaaataccattt

SEQ ID NO: 100469 - DNA, 201 bp, Homo sapiens
tattaggctatcaaccactgtttgctgactgagaaaaaaatgaatgaccaatagaacacagaaacattatggcaggcatgctcctggaagcagttctcctrgcacacgcttctgaaggcctttcctttttcccccttccctctccctccacccatacaagggtccagacgagtgagtcttctgtcaacttcgggtccaacc

SEQ ID NO: 100470 - DNA, 201 bp, Homo sapiens
gccagacgtggcggtgggcacctgtaatcccagctacttgggaggctgagataggataatcgcttgaacccaggaggcagaggttgcagtgagccgagttytagtgccattgcactctagcctaggcaacaagagctaaattccatctcaaaaaaaaaaaaaaaaaaaaaaaggcagaaaggcatcaattggatttagcaa

SEQ ID NO: 100471 - DNA, 201 bp, Homo sapiens
cagtaggtgctcaatcaatagacgcagaaaaatgagcttcagtcttcatccacttcggataaattttcttttatttccatactcttttgtgacatgtgtgrcacaagtattcaatctcacagggatgttaaaacccacactcgaagggtgtccagtgtgcttaggaaatgtgggtttgcgcaatcacaggccaagcctggg

SEQ ID NO: 100472 - DNA, 201 bp, Homo sapiens
cttcgatttaataactcagtgatgagcttggagataaaattgagcctgctgtgaaaactaggtctgtggcttccttgaggaccatttctacagaatattattttttttgttttctctctcttaaatggttatacacaatatccctatccttctcctcactttattgattttccagaatgagagtacgaggtatgactataa

SEQ ID NO: 100473 - DNA, 201 bp, Homo sapiens
ggtttcatcatgttggccagtctggtctcgaactcctgacctcaggtgatccgcccacctcggcctcacaaagtgctgggattacaggcatgagccacagygcccggcccactttattttatagcttatgcatgtgacctatcttcttggcttgactgtaagtccctaagaggagggcccacatcttaagccagtgagtgc

SEQ ID NO: 100474 - DNA, 201 bp, Homo sapiens
gggggtgaatgtagggagagtgagcatttttattttattattttatttcatctcaaaaagcgtgttgacttttcccaagtgctgacacaacttggacttaytcataaaagaaaatcagaatcgcccttgtgggaaacacagcagccctgtctgagcgccactgaggtgactcccggatgctgtgcggtgcagttctgaagc

SEQ ID NO: 100475 - DNA, 201 bp, Homo sapiens
gtttcatgctttaggcgtgaggtttcaggactgtagtctaattatttcttccagtggagtagaatgtctgaaaggatttggagtaacagggctgatgaagyggcaaggaaggtgagtagctatctaggcaagtatgtgaacacagcctggaagggcttgtagtaccaagctgctcttaaagctcaggtaccaagacccaga

SEQ ID NO: 100476 - DNA, 201 bp, Homo sapiens
ggagtgcagtggctcgatctcagctcactgcaacctctgcctctgggttcaagcaattctcctgcttcagcctcccgagtagctgggactacaggtgtgcrccaccatgcttagcaaatttttgctttttttttttttttttttgagatggagtctcgctctttcacccaggccagactgcagtggcgctctcttggctca

SEQ ID NO: 100477 - DNA, 201 bp, Homo sapiens
agtctttctgcatcttttgtatttctttaatgagtgtgaatatttagcaaaaaagagaaattttactaaaaagagtgggaaactgctcccttctagtggtraaggggaaagcagtttcatgctttaggcgtgaggtttcaggactgtagtctaattatttcttccagtggagtagaatgtctgaaaggatttggagtaaca

SEQ ID NO: 100478 - DNA, 201 bp, Homo sapiens
tgggttcaagcaattctcctgcttcagcctcccgagtagctgggactacaggtgtgcaccaccatgcttagcaaatttttgctttttttttttttttttttgagatggagtctcgctctttcacccaggccagactgcagtggcgctctcttggctcactgcaagctccgcctcctgggttcacaccattctcctgcctca

SEQ ID NO: 100479 - DNA, 201 bp, Homo sapiens
ggtgacctcacacactctaaagctttcaccgccatccacactggtgtgtggtccctggcctcagcccagatgtctcccaaacttcctttgaacagtgattrtctgccgaatgcttctacctagggggttcacaaactggacagcacacactcccatatggaacactgcactggtcaccttttctcattgaatgtgccttcc

SEQ ID NO: 100480 - DNA, 201 bp, Homo sapiens
gcaatctcggctcactgcaacctccgcctcccgggttcaagtgattctcctgcctcagcctcccaagtagctgggactacaggtgcccaccatcatgccckgctaattttttgtatttttagtagagacagggtttcaccatgttggccaggatggtctcgatctcttgacttcgtgatccacccacctcagcctcccaaa

SEQ ID NO: 100481 - DNA, 201 bp, Homo sapiens
gagacaggaccaataggagataggtagatagatagatagatagatagatagaaccaataggagatagatgatagatagatagatagatagatagatagatdatagatagatagatagatagatagatagatagatagaaccaataggaaatagataggtagatagatagacacaaccaataggagattagatagatagata

SEQ ID NO: 100482 - DNA, 201 bp, Homo sapiens
acttcctggttggctactgagagaaatgagtctcttgagcaattatcctttgcaggtagcttccatgaagaacccagtttttgagtgcctctagcagagamtaagcttcaaacctcattaaccatggatccaatccaatatggcagcttgtatgttctccattctcaaagcccaatataaatgatgggctttcttcattca

SEQ ID NO: 100483 - DNA, 201 bp, Homo sapiens
gggaggggctgccgcgcagcgcggggggactgggcgcagggcgggccccgggtagtgggtgagagggccggcctggacccggcgggcgcacggctccgagyccagcgcagccgagccggtctgcagaggggcccccagaactttgtgtgtgtgtgtgcacgcgcgcgcgtgtgtgcccaggtgcgagggtgcgcgcgtgtg

SEQ ID NO: 100484 - DNA, 201 bp, Homo sapiens
acattggttcggactctggctcttgaaaatgggcctgcgcattctgagagcatgtgtgtctggagatgttctccccagcccagctcccatagagcccggtrcagggtgaacccacaatggaagctgagaagctgaacccagccagtgcccctctccaggggagatgaggggttcctgactctggcagcccgatccccagca

SEQ ID NO: 100485 - DNA, 201 bp, Homo sapiens
tcagtaaagcggtgcctggctgagtatttacttaggttcatgcacagatagcccaagatccaaaaacagtgatgatgaatgattctgcggctacctaaacyagctgtccagtggaggggcacaaggctctgcaccagggcctgcctacagaccaatgaactgaagggaggcttagaaggcacacttactacattgcagata

SEQ ID NO: 100486 - DNA, 201 bp, Homo sapiens
ttgcaggttcaattctctcctatcataaaacaaacaactgagccagccaactaaccaaccaaccaaccaaccaaccaatcaaccaaccaactcactaaccrcctcttctttgactccaccccaggcaccactccacttatccttctcttcccagcctagtgacttgaaagaggactttgtatttgctcactttctcacctc

SEQ ID NO: 100487 - DNA, 201 bp, Homo sapiens
tcatcatagagaatttccattaatttctggccgtgtgccactgcaaccagctttcaccctgacttgtcatataacaaaatatcattaaattgaactctagtttttttttttttttttttagacagggtcttactctgttgcccaggctggagtacagtggcacaatcacagctcactgcagcctcaacctccccaggctcg

SEQ ID NO: 100488 - DNA, 201 bp, Homo sapiens
tctctgacggaaaatgtataaataatgtgatcccctggggacccaggttagcactagatttatttttaaattttataactcatctgaaagagagagaacayagtggaatctatatatttgtatattcctctaagctgttctgatttgaaagatattaaatcaataggaataactttctgagactcttgtaagattgcataa

SEQ ID NO: 100489 - DNA, 201 bp, Homo sapiens
ttgttagctcattgtttctgtgggtcaggaatcctggcatggcttagctgagtgcaaaggctgagtccagagggactgagggctgaggccagagggatcarggtgtcttggagtagtagtcaaatggctggcctgatctgtggtctcatctgaaggcttgactgggggaagatctgcttctaagcctcatcacacggttat

SEQ ID NO: 100490 - DNA, 201 bp, Homo sapiens
ggctcttttgagtccctcttcgtgtgtggatcaacaagtcacccaagctacacaccatcaacgtttggggcttatctctgtttagatggatagggttatgyaaaaaagaccctctccttccctctctctgtgtaggaaatatgttttccctagcactcagcattgtccaaactttcaggaactccaaaggcttaaagatgg

SEQ ID NO: 100491 - DNA, 201 bp, Homo sapiens
tcatcccataacacagtattaggctatcaaccactgtttgctgactgagaaaaaaatgaatgaccaatagaacacagaaacattatggcaggcatgctccyggaagcagttctcctggcacacgcttctgaaggcctttcctttttcccccttccctctccctccacccatacaagggtccagacgagtgagtcttctgtc

SEQ ID NO: 100492 - DNA, 201 bp, Homo sapiens
agaagaggacctgtgcagggaaactcccctttataaaaccatcagatcttgtaagacttattcactaccacgagaacaacataggaaagacgtgaccccaygattcaatttcctcccaccaggtccctcccaccacacgtgggaattgtgggagctacaattcaagatgagatgtgggtggggacacaaccaaaccatatc

SEQ ID NO: 100493 - DNA, 201 bp, Homo sapiens
gtgacctcagccagggtggcagctgtggggatggaaagagttggccaaagagagatttaataattgtgactgacaggattgtagttgagagagagagaacwactcctaggtttggggtttgggttagttttggtttttcaagcttttttgactatgatctacagtaagaaacacattcacattttgatacagaatacacac

SEQ ID NO: 100494 - DNA, 201 bp, Homo sapiens
tttattggagtgtgatgacagatagtgaataaattaacataaatttgcataatacaatacagctgttaatttatgatcatattaaaacacaaagttttgtmgtttgaagcagttaaaagtcttaatcttctgaaaatttccctcttgtttgttatttgtttatgagttacttagggttattagataaaatacaggcttctg

SEQ ID NO: 100495 - DNA, 201 bp, Homo sapiens
ctgtcagttaaacttattagagttacccattcaatcaaaagcacctggatttagatggctctggcttttgagggcaaagtgagtggaaaaaataatggagractggagtccgaacagaattttaatttatgttttcagtagtaataaagccttctctagattaataactgggaaagcactttgaaaagcatcaagcattat

SEQ ID NO: 100496 - DNA, 201 bp, Homo sapiens
gtgcagctcctacaaaatttgagaccctgaaaggatctcaaacttgaactccgagttgctcccctgtggttttgttaattcaacagcaaattttcctaagsctgactctggtgtctgtaggtcgaaggcctcataatatgctacatttatgcatattcgccctgtcagttaaacttattagagttacccattcaatcaaaa

SEQ ID NO: 100497 - DNA, 201 bp, Homo sapiens
gttcctaaggatcacttttttaaaaaatcttttttaaatgggagtaagctgttatctgcacaaagcccttggggtgaagtccagtcaacagggcttccctyaggagatgttctctaaactgtgttcatgaaagtgaataagagttagcaggcaaaggagaaagggggttggagagggatctagagtttcagagaaagagaa

SEQ ID NO: 100498 - DNA, 201 bp, Homo sapiens
aatttaaggaaaagacaaaatgctgtgagatttgggctaacacgaacttctccctttgtcacgacccctccatcagatggcccctgagttctgcagcctcraggaaggcctgccctatctggacatggtgattgcagagacgctgaggatgtacccgccagctttcaggtgtgtggtagccccctcccctgcccgagtccc

SEQ ID NO: 100499 - DNA, 201 bp, Homo sapiens
agagctattgtattttatgaatatttgtgaattttaggatcttcttcttgaatcttagctgtgtgaaaaatatcttccaaacagtgttcattttcccagamagcactacatataacctcttcatctgcagccaatttaggtgtactcccggcatggtgccctaattacacctttgttatccattatcagatggttcccctc

SEQ ID NO: 100500 - DNA, 201 bp, Homo sapiens
aaagagtaagatggtgctccccattccagcaaacactggccacagtggacagtccaggagagagctgtgcaccaggaaggtgtcagctggacagtagtcargcgtccagtaaagcagcgatgaggaggctgtcagtggacaccagggccccactagtgggtggttcaggaacctgagaagcccccggccctgagaaaggag

SEQ ID NO: 100501 - DNA, 201 bp, Homo sapiens
tttcttcttcccattttccctcttctaagccatagctcagtagtatggtgaaatgtctttgattttagtttaaagaaatgaaatcagattccagatttgcwacctcttattagttgtgtggccttcagacaatcctttaacctcctgattctcaatttcctcctgtgtaaaatacattagactagctaatccctaaggtct

SEQ ID NO: 100502 - DNA, 201 bp, Homo sapiens
gtggcgccatgggcccaggtgagggtgatcaccaaaccctggggttcagggatgccgtgtttagactctgattgtgggcggcggtgagtctgtgggcttaytagccacacactgaattcctaaggagaggcagggagggagctgtggacattccaggtgattctgcgaattcagctctgcctctggggctgtgcaggaaga

SEQ ID NO: 100503 - DNA, 201 bp, Homo sapiens
gggtcatcctatgggaggggaggtggcgccatgggcccaggtgagggtgatcaccaaaccctggggttcagggatgccgtgtttagactctgattgtgggyggcggtgagtctgtgggcttactagccacacactgaattcctaaggagaggcagggagggagctgtggacattccaggtgattctgcgaattcagctctg

SEQ ID NO: 100504 - DNA, 201 bp, Homo sapiens
cctttgcccaagcggtcactttcccacccactttcccagaggggtaccttctccatcttctctctttaagcagattctacctgtgcctggctcacctcctmcacaaaacagcccgagatagcgtgggagtaagtcagacctaggttcaaatcctagctcttccacttaactatgtgatcttggtcaaaatgcttaacctct

SEQ ID NO: 100505 - DNA, 201 bp, Homo sapiens
attgcctaattgtctctcctgtcagatagtcagacccttggaaactgtgactgggtcttgatttgctttcgtgcccccagtacttttgtaagtataatatsacatgtgtttacgcactatctccagttagagttcacgccaccagctgactgactgactgagcctttcatccatattttcattaatgtcattaagtatctg

SEQ ID NO: 100506 - DNA, 201 bp, Homo sapiens
cttcctcggaccatccttgagagtcacgtcttcttggcagtgtcccatagactgtgaatggtgagtgagatcactttagaaggtacacggactttaaaaawctttcattataaagcatttatttattttttaatttttaattttaattttttattttgagaaggagttttgctctcgttgcccaggctggagtgcaatggc

SEQ ID NO: 100507 - DNA, 201 bp, Homo sapiens
ggaactcagcactcccccagcaccatgcttggtatctgctctctggccatggttttgaactatcagctgagcccaagcaaccttgcagaccacattttgaytatgtcttcctcggaccatccttgagagtcacgtcttcttggcagtgtcccatagactgtgaatggtgagtgagatcactttagaaggtacacggacttt

SEQ ID NO: 100508 - DNA, 201 bp, Homo sapiens
ggccttccaaagtactgggattacaggcatgagccaccatgcctggccgctttgcaacatttgattctgttaattttgggtatatgtcaaagctgtcagtyacgtaggggtagaaaaaaagttgtgcatcattgattataatgccagggccccattttacagatgtgaatatggaggtccagagaagttatgtgatctgat

SEQ ID NO: 100509 - DNA, 201 bp, Homo sapiens
tggctaattttatgttttacttatttatttatttatttatttatttatttgtaaagacaggattttgctatgttgcccaggctggtcttaaacgcctgagstcaaatgatcctcccacctcggccttccaaagtactgggattacaggcatgagccaccatgcctggccgctttgcaacatttgattctgttaattttggg

SEQ ID NO: 100510 - DNA, 201 bp, Homo sapiens
tcagtcagtggggatctacaaatgtttcagcaaagcattactgaaataacaagtatttttggaagatctggccaggcatggtggctcatgcctgtaatccmagaacttcaagaggccaaggtgggaggatcgtttgaacccaggagttcaagaccaacttgggcaacatagggagaccccgtttctacaaaacattaaaaa

SEQ ID NO: 100511 - DNA, 201 bp, Homo sapiens
tatttttggaagatctggccaggcatggtggctcatgcctgtaatccaagaacttcaagaggccaaggtgggaggatcgtttgaacccaggagttcaagaycaacttgggcaacatagggagaccccgtttctacaaaacattaaaaaaattagccagctgtggttgtgtgtgtctgtagtcccagatattaatacttgag

SEQ ID NO: 100512 - DNA, 201 bp, Homo sapiens
tccagaatgatgagaggataatttctgttgttttaagccacccggtttgtggcaatttgttagagaagccctgggtaactagtctggtctccttgctcccrttggtcttactgagccaaagcatcccattggccttactgagccaaagcatcccattgcatcatgtttgttactgtaaccctcaaatctttttcttgacct

SEQ ID NO: 100513 - DNA, 201 bp, Homo sapiens
ggcagatcctatctactctcttagtgatgcacaatgacatctgggctagtgcctgacacagagtaggcactaaatatatttttatggaataaagaatggamcaactacattgtttcaatatctaatcaaaggaggaaatagcttacagattttatgaggcttagtaaccagcttgatacactcaaggtgaaactttggaaa

SEQ ID NO: 100514 - DNA, 201 bp, Homo sapiens
gtacagatatccaaagtagagcctttgggtatttaaaaataatttgtaaatgccaaattaagagtttaaagggcactgtatgaactagttgtgtgtgtgtragagagagagagagagagagaaggagagagagagagagaatgacagagaaaaagagagagagagaaaaggagagagaaagagacagagaaagagatagaa

SEQ ID NO: 100515 - DNA, 201 bp, Homo sapiens
agtgaagcagaatggctttttatcccttgtgtatgatcatcaagacacaggacagcacagagattcaaaatacaatgcattccccttgctcgtctggtcargctcaccttcctattgcacagggttgattggttggaggccgccaacctctagctgaaaggcagagacagtctcccctgttatttcggtaccaagctgtgt

SEQ ID NO: 100516 - DNA, 201 bp, Homo sapiens
tggttgctgcatattttaatgactactgctatctaagtctttgtgacccaccctcataaagatcaagaacctgtattaattccctcttctttgggtagaarcatccaacagggcatgatagcttacagtagaaatctgcagttaaaatcccagcttcaactttctttctctctactgcttgttaccttaatggatttaggc

SEQ ID NO: 100517 - DNA, 201 bp, Homo sapiens
aagcagagtatcgcagaaaattacaatcacgtcaggcagcaacaaaggattctagtcaaaggcacgtagaagacccgatggtgggcagctggcctgggctytctttcacactgtccaggaatatgtttggattcagaatgggtggccccctctttatacacagggcatgcctctgaagagttgtgtgtaaatcacatttta

SEQ ID NO: 100518 - DNA, 201 bp, Homo sapiens
ctgttggtgtttgggggcagagcctgtctctgtatgcagcacctgctcacactcacacagctcagagtcaggtaccaagggttgcctgtttagactaacayactgcctcttcaccacattcctgcgagataaataccatcatccttattattaccatcccattttacagaggaggaaactaggcacggagagattaagtag

SEQ ID NO: 100519 - DNA, 201 bp, Homo sapiens
aaaatatagttctctggagttccaatgagagagttccaaggcctcactgaattagggccttggggaaatatgacacagattctagagctgagcaacaagasaaagcatgtctaatgagaaagtgagctccccagaattggaggatttcaagcagagaccaggtacctaggtgccaggggtgctatgaaggtagaagactgg

SEQ ID NO: 100520 - DNA, 201 bp, Homo sapiens
tattaggtgtatgcgtgaatttggaaaaaagacaaaaaaaatctttcatttaaaaagacactgttttaaactaggcacagtacactttgatcgttttcccraaaccgcgttggacaccatttttccatgatgatcatttgatttaaaccgaccagtgtgtggctgagctctgtgaactggggcatcaggggatcagggctg

SEQ ID NO: 100521 - DNA, 201 bp, Homo sapiens
ccagcctgcaggtcagggccctcctccatcagttaccacttgtgtttctggagggcaacgcctgagtcctgggttcctttgtatccccatggcacctcagrtatctggcccgctttcctacaggttaacaaccttctcaaagcttcacaggcattttcttaacaccgccttcctccccagcccaagctggccctttggtct

SEQ ID NO: 100522 - DNA, 201 bp, Homo sapiens
ctggccagaaactctgctgagatctgttggagagtttcctgcaaagataagagttaacaagcccccagattcccttccccgctcaggaggggccctcactrtcagctttggggctgatagaagcacagttccaagcgcctggcttcctcctcctccccagtggataaaatgctggaactccgtcaggcaggactgccataa

SEQ ID NO: 100523 - DNA, 201 bp, Homo sapiens
tttgaaatatggaggaccgaaaaggccccatagtcaaataatttggtgaaatattacaaactatattcttcaagattcaccatgtacctgagcatatgaarggcttgagaaaggcctgcagtaaagaaacctgcttaactttgtttattctgggctcaaataggttttcaaaaggagagaacgtgggttgttaacttcctg

SEQ ID NO: 100524 - DNA, 201 bp, Homo sapiens
gggattacaggcatgagccaccatgcccggccaggatgttctgaatattaaactagctgaccggtggacattagctgtgctgtggaaaagtgaagcagaawggctttttatcccttgtgtatgatcatcaagacacaggacagcacagagattcaaaatacaatgcattccccttgctcgtctggtcaggctcaccttcct

SEQ ID NO: 100525 - DNA, 201 bp, Homo sapiens
atggatgtaaaaatccattggtgagcaataaagtgtttcacaaggcaaaacactattattattctagatctctgcagacagcaatttctgcagcaggtcarcactgtcagtgaagctcagcccagagccatcatggagaagactgatgccccgtgggttgtgtgtttgtgtgcgcacgcagcctggtttatgttttttcat

SEQ ID NO: 100526 - DNA, 201 bp, Homo sapiens
tccaagttggtagaatgaaagaagggctggaaataagggctataagattttgagtttaagtgcccaccttataaatcattagcaaaagcagaatataaccytttctccaattctgtatgggtgacacccaccagtctggtaaatggaggtcgttagtgtgatggggtgtcattctcactttgtttagcacccccactagat

SEQ ID NO: 100527 - DNA, 201 bp, Homo sapiens
gcaaacatgagttagttagacactgttaatcacctcactcttcttgaatcactcccctcccttcacatccttcacatgcatgcttgtttagttttttttgttttttttttttttgtattttttcccaaaattcctagtccttcctcctttcacatgcttgtttaggtttttgtttttgtttttgttttcaatactcctagc

SEQ ID NO: 100528 - DNA, 201 bp, Homo sapiens
acagaaaaggaagcccatagctacccctgctggcttttggtgtccatttgcatgaagtgtctttttccacccctttactttaagtttacatgagtccttawgtgtcaggtgagtctcctgaaggcagcagatagttagttggtgagttcttatccattctgcagttctgtatcttttaagtgcagcatttaggccatttac

SEQ ID NO: 100529 - DNA, 201 bp, Homo sapiens
ggaaactttctcccctagcttggctactgcactgcaaccccggtcttagcttgggctgtcataaccaaacaccattgagtgtgtggcttaaacaacagactttttttttttttgagatggagtcttgctctgtcacccaggctggagtgcagtggcgtgatcttggctcactgcaacctccacctcccaagttcaagtgat

SEQ ID NO: 100530 - DNA, 201 bp, Homo sapiens
tccaagtcatcaaaggatgaatgagggaggagagaagggtatactttcatccctgtcctccaaaagagatatcctggaaaatgcacttttaaagtcataastatcatttgaggcccaggtaagagaacatcaataggaaacaaagcaagatggtaaaggaaaagaagagcaataagaatgcttggtgcgaagtagggtcat

SEQ ID NO: 100531 - DNA, 201 bp, Homo sapiens
tcaggtgtggagaagcgctagggtaggtctcagacagacagtcggaaagacctatgcccctgagtgcacattaggacagccagggggctaaaaagggagarctggtgcccaggccccacctcagaccaacactggggagtagggcccaagcatccatctatactaaaacatataaaaatctggctgtttctggctgggcgc

SEQ ID NO: 100532 - DNA, 201 bp, Homo sapiens
ggacaaatagccagtcctctttatctgcagggatgagggcagggacagaaatcagactccctgtctgcttttactcataggagactgagtttgcttttcaytgggtcctagacttccaagtcaaccctactacatccaagtcatcaaaggatgaatgagggaggagagaagggtatactttcatccctgtcctccaaaaga

SEQ ID NO: 100533 - DNA, 201 bp, Homo sapiens
accttgacctcttgagggccagatggaagtgcagactcgattaattgcacagatgtttattgagtgcttactatgtgccaggaatggtgaggagtaccgagagggagtgagacatcacccctgctctcagaagcagcagtgcggcggggagggcaggactccaaaacggctccgattccaggcccgcgtttgcttcccggg

SEQ ID NO: 100534 - DNA, 201 bp, Homo sapiens
cagtggtgctcggaggccacgtaggactgtgccaggggctgtctggaggatgcaggaaggggaagtgtagcaaatggggcctcggtggaaagctggggggygggggagggtcagaagcaaaacttctctattttctgcctaagtttggaaccaactgaggtatggaaagaggttttaggcaaaggaaataaaattttctct

SEQ ID NO: 100535 - DNA, 201 bp, Homo sapiens
gaggcaggagaatcacttgaagcagggaggcggaggttgcagtgagcaaagattgtgccattgccctccagcctgggcaataagaaagaaactccgtctcaaaaaaaaaaaggaccacatgttattatggggctgtacagactgttgcaaagcactgagaccccttggtcaaataaacacattacagcaggtcaaattttt

SEQ ID NO: 100536 - DNA, 201 bp, Homo sapiens
tttggctgagatagaaagaagaagagtagaggccaaatgtgtgctaggaaaatgtgatgtttggggcacaagtagagaggacaaccttggcagtggcagaygagagagaacctcaggactggtgctaaggaggtgggttatttaaagaaagttgtgcaggtatagagtggagaaggggtgcagggggaggatggaattgag

SEQ ID NO: 100537 - DNA, 201 bp, Homo sapiens
agttgcatcctgaccactaatatcagaaaggcccctcctcccagcccgtgaagaggggcctctctgggtgtgtacctggaaccctatcttggaagttaagwtttgtggtcactgctaccaacacaccaactcccaggacacaggatactagggacttctgtgccccatcagtggacaagtcacaagttcccaaagcagggt

SEQ ID NO: 100538 - DNA, 201 bp, Homo sapiens
gagagaacctcaggactggtgctaaggaggtgggttatttaaagaaagttgtgcaggtatagagtggagaaggggtgcagggggaggatggaattgagttaaaaaaaaaaactagcaaaaaacattctgatagcacaggtgagagagataagagtgatttagattatcagaaatggaaggaaaagaaggagaattttatag

SEQ ID NO: 100539 - DNA, 201 bp, Homo sapiens
ccctgttatcagctgcttccaaaggccagggtggtcgttagtgcatcattaataacccattatcgggttgtcatctctgaatttatctaaatttatctcamttattgtaaccctgtagactgataagccctataagtataaaatacactggatgaaaaagctacttcctattatttgttctaaaaaattaactccttcaag

SEQ ID NO: 100540 - DNA, 201 bp, Homo sapiens
ctcccgagtagctgggattgctggcacgggccaccacacctggctaatttttgtatttttagtagagagggggtttcaccatgttgaccaggctagtcttraactcctgacatcaagtgatccacctgccttggcctcccaaagtgctgagattacaggagtgagccactgtgccaggcccagacatgtattttctcacag

SEQ ID NO: 100541 - DNA, 201 bp, Homo sapiens
gctgaacaatgagaacacatgcgcataaggaggagaacaacacacactgaggcctgttgggggaggggggaggaagagcatcaggataaatagctaatgcytaatacctaggtgatgggttgataggtgcggcaaaccaccatggcatatatttacctatgtaacaaacctgcatgtcctgcacatgtatcccaaaactta

SEQ ID NO: 100542 - DNA, 201 bp, Homo sapiens
agcctgggtgacagaatgagatcctgtctcaaaagaaaagaaaagaggccaggaagctctttcaaagaactttctttagtacacctgggtgtcaggcactrtcaaagtcctaagactacaaagatgcttaggctatagtcttttttctcaagaaggaagatgacaaccatattccaggtgacaagtagcaacacctgaact

SEQ ID NO: 100543 - DNA, 201 bp, Homo sapiens
aagtgtggctgtagtcatcaatacttcagagtccaaaaatacattggccttgcctgaccagttgcccattttctggaatagctgggtatttatctagcagygagagaccattatcctgagacacagtcgtgttccaccgacacctgatctactaattaaaatcactatcatgatggactgtttaaattctggtttaaatgt

SEQ ID NO: 100544 - DNA, 201 bp, Homo sapiens
gctgaaaggcagagacagtctcccctgttatttcggtaccaagctgtgtttcttaggcattaaaatggagggaaagcaaccactggcccctcactgggatygttcttgaggattccagacagaccataagtaattcattgagtcgctcacaaagggcctggccctgaaggtttgtggctgcagcatccaggcgagccaaag

SEQ ID NO: 100545 - DNA, 201 bp, Homo sapiens
ttgggacatacttatactaaaaagttaatcttattgtatatctgaaattcacatttaactgaatggttatattaatatttttatttgataaatcaggcaaytctgtatttcataagcagtttaacctctctctactggctcttctctggcagggcagaggggtgctgttttatggagaaaggcacttactgctgggacctt

SEQ ID NO: 100546 - DNA, 201 bp, Homo sapiens
agaaagatagaaatttaagtattcttctagaaatgttatgttcatatacaagcatatatagtctaccctttaaaagtaaagcataaatgagattgtgccaktgcccttgggtaaaatgaacaatctgatcaaatattttcctctctgggagaagaagctatcggtagagacatagacaacagggaacagattttcaaaccc

SEQ ID NO: 100547 - DNA, 201 bp, Homo sapiens
aaatgtatttaaatattgggccaggcagagtggctcatgcctgtgatcccagtactttaggaggctgagactggaggatcactggagtccaggagttcaasacaagcctgggcaacatagtgagatgtccccgcatctctacaaacaaacaaaaaacaattagacaggcatggtggcttgcacctgtagtcccagttactc

SEQ ID NO: 100548 - DNA, 201 bp, Homo sapiens
gagccatgattctgccactgcacttcagcttgagcaacagagcgagaccctgtccgagagagagagagagacgcaagagagagaaacagagagagatggcrgtataaattctcgtggttattctagttcttttggttccatatatctgtttacaggaatcagcttgtcaatttttaaaatgtttaatttttgtgagtatat

SEQ ID NO: 100549 - DNA, 201 bp, Homo sapiens
tctcccttggaatttctcttccttagtcattttcagaaagttaggagtcggcaaccttaaggaggagtttcctatcatctctcctccacttcctcccctcrtttcctccccgtcttctccttggagtccttcatcaatgtctctattttctgttcaggataaacaaagagtccctcttacctgcacaggcctcacctgcct

SEQ ID NO: 100550 - DNA, 201 bp, Homo sapiens
gagctcctgggagttatcttgggaatgactgcaaggtctgaggtagatcgttccaggagcaggtgcttatatacagtggaatggcacccactggcacaccrctaggaattctgttttcttaccaccaccggagccaggtctctgtcacggtgatgagaagttcccaaagtcatttctcctctctagggtgtcccctctctg

SEQ ID NO: 100551 - DNA, 201 bp, Homo sapiens
tctccactgttattgatgatgatgatgataaatgaatgtttctgtgccagatcctaaactaaacaaaagttaacttgatactcacaatggctgtatgaagygggagttatcaccatccccatttcatcagtggggaaagaaaggctggattagtcagggatctccagaggaaccgaactaataggacagagacagaaagac

SEQ ID NO: 100552 - DNA, 201 bp, Homo sapiens
gataatctcctcaaagtcagctgattttaagtgttaaccatatctaccgaagaccttcccagcaaccctgggattcatgtttgattaaataactgcacacwatagcctagcaaagttgacacaaaagactaaccaagctaaataacttgagaacataagataataccctaggacagggcctaggtcggattggcactcacg

SEQ ID NO: 100553 - DNA, 201 bp, Homo sapiens
attcttttcaaccttgtctctaatattccatgattccatggttctgatgccattcctcagcgctctgctgttcttgcctgaccaagtggatcaatggtggctctggcatttctataaaggggatttcagggctgcctgctggggagggaggcttgaagctgtgtctgcactgcatcttcacagcactgagaaaatgccagt

SEQ ID NO: 100554 - DNA, 201 bp, Homo sapiens
gatcacatgggcttgctatgctaatacttcacccagaatgggacaattgcaggggggtggcagatgccatcggggctggcccgcggcccacatgtgctcarttccttcctccaagactgggtctgatacagtgtagacagcaggagatggagagtgacttagatgcagcggttggccagtggggcccaccgggatcacttg

SEQ ID NO: 100555 - DNA, 201 bp, Homo sapiens
tgcccaatgtcacacagtattgaagcttaggaataggtctcgtggctcccactctagtgttttttgctccacaccggtcatttatctccttcccttctatyctccctgcaatctttaactttagtcttggcccaggtcatcctaaatattgccatcttcataatacgtggttctggccatgccacgctcctggctaacatc

SEQ ID NO: 100556 - DNA, 201 bp, Homo sapiens
tacccaagctctttaaactgtctgccaagctcaaaggcaaaattggtatttcccaggccttttggacgggtcatagtgcaatagaaaggtggaaatattgsctgggtttatgaagacataacttcttatccaattggcaaacattttttaaatgcctactcggctgggtacaaaagaacctagaattattctgagcaccca

SEQ ID NO: 100557 - DNA, 201 bp, Homo sapiens
cctcccgtgaagctgggattacggacatgtgccaccatgcccggctaatttttgtatttttagcagagacggagtttctgcatgttggtcaggttggtctygaattcctgacctcaggtgatctgcccaccttcacctcccaaagtgctgggattataggcgtgagccaccgcgcccagccgagaactttttcatatgctc

SEQ ID NO: 100558 - DNA, 201 bp, Homo sapiens
aacccatccctaccatccagaggaaaccactcctctgacatcaatttgtatagatttctcttttcctgctgttgaacttcatgtaaatgtaaacttacagyatgtatccttttgttctggcatcttttgctcaacataatgtctgtaagagtcatccataccacgtatttagattaatatagccaggtgtggtggctcagt

SEQ ID NO: 100559 - DNA, 201 bp, Homo sapiens
agtcacttccatacacaaaccttgagtgtaaagctcaatgtattattgtctatgtattcccctatgtgacaccacccagatcaagacacaaacatttccarcactccagagggttccctcatgcctcttctcagtcaacccatccctaccatccagaggaaaccactcctctgacatcaatttgtatagatttctcttttc

SEQ ID NO: 100560 - DNA, 201 bp, Homo sapiens
tcctctcttacctgttgtcacccctctaatgacttttcactttctctgctcaccttctccttcctgcctcttttagaaatgggaaacaaagggcccatagrccctaaaaggggccaccctttgaaggaggagacatgaccacaaatgtcaccctttgatatcctaatgggatccatgttaaaaaaggaagtttttaacctg

SEQ ID NO: 100561 - DNA, 201 bp, Homo sapiens
gccataattagaagaggcccctttccagcagctgaagctgactaggcagatagagcccaaatttgtttttagccaccacatgcccctgagctgacccctcragctgtggacacatctcacaacctcacccggaggccattctctcaggccagtcacactctcccacagagagagcgaagatgatgtcaaatctatggccac

SEQ ID NO: 100562 - DNA, 201 bp, Homo sapiens
gcccagttcacgtgaccgttggcagccacagggagccacggagtcccaccagcgtcccatagagccacttggagcttcaggtacaaggaacaagcccctcktaggccccctcaggaaaatttattctcgcagccaagcatgtcaagtgcaatatcaggaacacccttgtccttcttgaacactgcttctggccagaaactc

SEQ ID NO: 100563 - DNA, 201 bp, Homo sapiens
gaggtggggagcccaggccaccaggatgcagacagaggaaagcttattgggtgtgaggtgcttggggctgagtcttaaagaaattagagaaagtccccctscctgtgttccgaactaggtgagccatccagagtgtgtccttgtcatcgcaagagcttatgagatgagtacaattatcatctctattttatagacaaagaa

SEQ ID NO: 100564 - DNA, 201 bp, Homo sapiens
gttcacgcagctatcatagaaggcgttgctccagccctccttggccggcggacggacaaaggaggcattgcccctgacgaactcgcccaccagcacccggrccaggaacatcgtgtgggtctgcgtgtcggatttgctgtagtggtgggaatatgcagcatctcgggcaaagtagctccctgaaatgacacacgagggctc

SEQ ID NO: 100565 - DNA, 201 bp, Homo sapiens
aaccatttttggggggttccaattagacctcacttttcattcttttagggaagtacgtattcattcttttgttgattatgtggcaaactttttcatacctrccatatgccaggcactgtgtaggtgctgactgtaaagagacagtgtccctcgaggaactctcggtttagtgagggaggcagacaaggaaagggaccagca

SEQ ID NO: 100566 - DNA, 201 bp, Homo sapiens
aactacaatcacttctggttagtccactagtgaacccaaaagtgacttaaaagtaaaaatcattattagcaagagattaagaacataacttcattgagagrtcaatgttaagagaacagttcattaaaagtttctgtttaaaaagaaaaggaaaggcccaaatagccatttcaaggcagagcaggtgaaaggcctggaaca

SEQ ID NO: 100567 - DNA, 201 bp, Homo sapiens
atcatctccctttcctttctgtttggagaacatccttcagccattctttaagggtaaatatgtgagtgacaaaatctcttagttttccttcatcagagaaygccattatttccacttttctcctgaaggatactttcaccaaatagatgacttgtgattgacagctatttcctttcagcacttgaaaaatgtgccacttcc

SEQ ID NO: 100568 - DNA, 201 bp, Homo sapiens
ggtagacctggtgtttctcaaagatcacaaagatggaggggtcggacacactgttcacgcagctatcatagaaggcgttgctccagccctccttggccggbggacggacaaaggaggcattgcccctgacgaactcgcccaccagcacccgggccaggaacatcgtgtgggtctgcgtgtcggatttgctgtagtggtggg

SEQ ID NO: 100569 - DNA, 201 bp, Homo sapiens
atatttggtagaattcttcattgagaattctacattagagaattgtactctctaagtacattgagtaccacatcatagggtggtgtaatttttgcttcaamcatcaagtatgatttaagagactccaaggtatcctggcctggagatgtgtttttcaggaaattttaaattatgaattcaaataaaaaatatgaataatta

SEQ ID NO: 100570 - DNA, 201 bp, Homo sapiens
ctgtgagctggttctacctcattggtgtgctatggataacattcccatgaattcagatagatagaggaattgccccatttgaaattgaagagcaagactgyaaaaggaggggatgatggaatgcaggacccagccacttagaatacgtggtacatgggggtatatagagcactcaaagtctgagtggggtatcctgacacc

SEQ ID NO: 100571 - DNA, 201 bp, Homo sapiens
aaggggcctttccaaaatgtgtgcttatggcccagacactcctttaaccctaggttttccagaaagtctgttttgccccaggactgtggacagcattatgktttgtttggtgagctttcttttttttttttttttaggttgtattttataactgaatatggcatgtgtgaaaatatcagctaccagactctgttagtccag

SEQ ID NO: 100572 - DNA, 201 bp, Homo sapiens
ataaatctcagtggtttcctgatcattccataatcatgatggcattcactttattgagtgggagatgaagtgatgcaggaatgagccaatcctaatacatkttagaagtgtattaatcctaaataaagcctaaaatcatctattttcttcagtaattgtttccatggtgggaggttagggggagcttttgaggtgatttaa

SEQ ID NO: 100573 - DNA, 201 bp, Homo sapiens
gtgtgctggacatggcaagtatgtattcctcatgacatttaatgtgctcatgttcttcagtggtttaccttttgctaataaatctcagtggtttcctgatyattccataatcatgatggcattcactttattgagtgggagatgaagtgatgcaggaatgagccaatcctaatacattttagaagtgtattaatcctaaat

SEQ ID NO: 100574 - DNA, 201 bp, Homo sapiens
cctgcctcagcctcccaaagtgctggaattacaggcgtgagccaccgcgcccggcttcaatccactttttaattcatgcccccagactgattctttctggrccacatgtgttttcttccaaatcgtcttgtttgggaattttatctggcctctcctcctcttgtcccaccatcaaaattcagtgtaaaatcttctttctca

SEQ ID NO: 100575 - DNA, 201 bp, Homo sapiens
gtgcccttctgttctcttagctcaggctgacctgtggcctgaggatgccgccctgcgggaggagaggtctgttttttcccctccttctacccctcccccamccctgctgggcccctttctcctccaggagtggggcctgtgaacggatccccaaatcctgcctacctggagctgccctcagtgccttccctgcggggcttc

SEQ ID NO: 100576 - DNA, 201 bp, Homo sapiens
ctctcttaaatggttatacacaatatccctatccttctcctcactttattgattttccagaatgagagtacgaggtatgactataaagtaacgtgactgaytattttagcatacactccaatacttatacagccaaatgaattttatgaccttcggaggcattttcctgataggctaaacccttactgcagatatgccact

SEQ ID NO: 100577 - DNA, 201 bp, Homo sapiens
gtatggcttgattcaggggctcaagccctgtccaagttgttctctctccccatttctcagctccggtttctctgggcacactcccttctcaggcacatctyccctaggggtctcaagccagctgtgtaaccagtgttttgaacagtctcaactcagtgaggtaccaacttgaaaccatttggtgttttttgtttcattttt

SEQ ID NO: 100578 - DNA, 201 bp, Homo sapiens
catgatgaggcaagaacagatggctccaatggggagttgtccctgaggaacaagaaaagagaagagaatgattccagtagtccaaaccagcctgggaggayggatccctccagaggacaactaccatgtttacaccactccctgccttctgtgccaagtgttttgcatattttgtttctaatctttgtcacgactcttcaa

SEQ ID NO: 100579 - DNA, 201 bp, Homo sapiens
agaaagagcagatatgtgcatggcatcagttcagactcttctgtggacagtgataaaaaaaactcagcccagattgtctcagggagtttactgacccctayaactgaaaactccagagggcagagctgccttcaggtatggcttgattcaggggctcaagccctgtccaagttgttctctctccccatttctcagctccgg

SEQ ID NO: 100580 - DNA, 201 bp, Homo sapiens
aggaacaagaaaagagaagagaatgattccagtagtccaaaccagcctgggaggatggatccctccagaggacaactaccatgtttacaccactccctgcyttctgtgccaagtgttttgcatattttgtttctaatctttgtcacgactcttcaagggaggtattattttcatttttgcagatgaggaactagactcagt

SEQ ID NO: 100581 - DNA, 201 bp, Homo sapiens
cagggtcctgacctcaggggttccgattccataagtctgggctgggacccaggaacccgcattttattttattttattttttgagatggagtctcgctctrtcatccaggctggagtgcagtggcacaatcttggctcacagcaaactccgccgcctaaggaacccacgttttaaataaatgtttccagtgattctgatgc

SEQ ID NO: 100582 - DNA, 201 bp, Homo sapiens
gcctgcagggcagtagaaggcagaagataatcaggtctagaatgtgtgatgtcatttagagagccatggggcgataggagtctgtcccaccagctataacmatagtcacatccagttatgtcagtctgccaggaggacacagcaagtgctcatgttaggccaggcacagtggctcatgccagtggctcatcccagcacttt

SEQ ID NO: 100583 - DNA, 201 bp, Homo sapiens
cacctgccctttccacaccagagccccagggtcccggggagactaaagctggggtctatttctattcccccaaccaagacgggagcttcacatccccacayactgagaggccagaatgggtcagaccagagtgagtgtgctctggctaagactggccgacagctctgttcccctggggtggggactggacgtggccctttg

SEQ ID NO: 100584 - DNA, 201 bp, Homo sapiens
ccccaaccaagacgggagcttcacatccccacacactgagaggccagaatgggtcagaccagagtgagtgtgctctggctaagactggccgacagctctgytcccctggggtggggactggacgtggccctttggtttaactgcattttactctttccagcctgtctggccattattcttgcaggagcacgcaggactaaa

SEQ ID NO: 100585 - DNA, 201 bp, Homo sapiens
attttaggtaccgctgcagctagaatccaaatctgccctaggtccaaaaaatggtgtctatatcaagatcgtatcccgctgacacagaaggctgccgggtsgggggagggcacccccaaattcaaagaaaaccctaagtgtggatgttcagaattttggaaaaatgtcactgaagtgattgaaagagtgcctggcatgcaa

SEQ ID NO: 100586 - DNA, 201 bp, Homo sapiens
ttttttcaaaattgatttagttattttaagttctttgcctttccatataagttttggaataagtttgtctacacctacaaatattcttgctgagactttgrttggaattgcattaaactgatatgccagttttgggagaattgatatttttacattgtggagtcttccaatccatgaacatgatatgtttctccacttagt

SEQ ID NO: 100587 - DNA, 201 bp, Homo sapiens
agagagagagagagaaggagagagagagagagaatgacagagaaaaagagagagagagaaaaggagagagaaagagacagagaaagagatagaaagagatagagaagatagaagagggggagagagagagagagaggagagagagaggtggagcgaattggtttccttgacaacaggatatccaatcaactttttcctcca

SEQ ID NO: 100588 - DNA, 201 bp, Homo sapiens
atattatcttctagaatttttatagtttcaggtcttaggtttaagtctttaatccatcttgagtgaatttttgtatgagagatgaagatccagtttattcycctacatgtggctagccaattatcccagcatcgtttattgaaagggtgtcctttccctacttcatgtttttgtttgctttgtcgaagatcagttggttgt

SEQ ID NO: 100589 - DNA, 201 bp, Homo sapiens
agtgaatggccccatggtgacggtggccctgtcagtggctctcttggccctcctgaaatggtaagtgcagccagccctagggactgtgacagcgtcagccrtctcaccctggagccttgctggtgccatggcggggtatgtgggagtgtgtttttcttcttttctaatctagcgggagtgagtattaacacagcttcagaa

SEQ ID NO: 100590 - DNA, 201 bp, Homo sapiens
gagagagagagagaaggagagagagagagagaatgacagagaaaaagagagagagagaaaaggagagagaaagagacagagaaagagatagaaagagatagagaagatagaagagggggagagagagagagagaggagagagagaggtggagcgaattggtttccttgacaacaggatatccaatcaactttttcctccaa

SEQ ID NO: 100591 - DNA, 201 bp, Homo sapiens
aagtgaatggccccatggtgacggtggccctgtcagtggctctcttggccctcctgaaatggtaagtgcagccagccctagggactgtgacagcgtcagcygtctcaccctggagccttgctggtgccatggcggggtatgtgggagtgtgtttttcttcttttctaatctagcgggagtgagtattaacacagcttcaga

SEQ ID NO: 100592 - DNA, 201 bp, Homo sapiens
agagagagagaaggagagagagagagagaatgacagagaaaaagagagagagagaaaaggagagagaaagagacagagaaagagatagaaagagatagagaagatagaagagggggagagagagagagagaggagagagagaggtggagcgaattggtttccttgacaacaggatatccaatcaactttttcctccaactt

SEQ ID NO: 100593 - DNA, 201 bp, Homo sapiens
tttcgccatgttggccaggctggtctcaaaatcctgacctcaggtgatccgcaagtgctgggattacaggcgtgagccactacgcccggcctgtgcatgcstttctgttccttctgctgatgtggggggtgttgggctcctgtcaggggcctcctgatgccccgttggggcacttcctcgctcagcttcctcgtccctgac

SEQ ID NO: 100594 - DNA, 201 bp, Homo sapiens
cagcctcctgtctcatctggaagaccaccactctggggtctcagaggaatgatggaagccttggggtttctaaaattggaagtgaatggccccatggtgayggtggccctgtcagtggctctcttggccctcctgaaatggtaagtgcagccagccctagggactgtgacagcgtcagccgtctcaccctggagccttgct

SEQ ID NO: 100595 - DNA, 201 bp, Homo sapiens
tttctagtttctttaaattttatttttaaaatatagaatgtttgatatatcaggaatttatttggaagatggagttagggacacaccctttttcccccccyccaggagggtagagttccatctggaaattcatccttttccaaatgatttgaaatgtcacttttatcatttattaattcctaggtgtatttctgatttctc

SEQ ID NO: 100596 - DNA, 201 bp, Homo sapiens
tccatgagccaagcagggacagagccccaggactctggggaccctgctttctccatggcaccctgtggaccatccagccccggaggagcgcctgtgagtcraatgcccaggtactcccagcactggacttctccttaactttctctgaactttctggaagttgagcatctcagacactcacaactgtgatctgcagtagcg

SEQ ID NO: 100597 - DNA, 201 bp, Homo sapiens
ttcagaattttggaaaaatgtcactgaagtgattgaaagagtgcctggcatgcaaggataagaggttctttacataacatttcctaaatgcttaataaacrtttgttgcacttggttttgacattgccaatggggtttgaaccagtgctctctctaaatgaagaattgctgataaataagtgaaaatgtagttttgacaaa

SEQ ID NO: 100598 - DNA, 201 bp, Homo sapiens
aggctgtcagtttattggcctatttataaaggtctgactctctgacatgttctccaggctccccacattaaccactaaggaggcactctttgcagatgaatttttttttttttttttttttttttggcctcggcttaaagaggaacctattaacctttgcccggaatctatggctggtgaatggcttgtcatagcatgtta

SEQ ID NO: 100599 - DNA, 201 bp, Homo sapiens
acactgcgttgacatcatggaattcccactgcatgcttaacaccataatgaacactagacatcaaagataagaagacaagatgtgtttccaccactcacaracgagcagaaagacagtcaggaaaaaaattacaattactagagaaccactaggagtcaaccaggcaagaaaagaggagccgttccaggcaaggcaggggg

SEQ ID NO: 100600 - DNA, 201 bp, Homo sapiens
caagacagagctatacggttactaagaaaacttgctttaaaaccatctaaagtctgtatacattccatcaagcagatgtgtgtttgcgcagtgaaaatgcrgcacagatgttaaaaggtaaatatttttctaagctctagccgatgggtggattagacacctacatctatcagggtgcgtattttccttggataggaccat

SEQ ID NO: 100601 - DNA, 201 bp, Homo sapiens
aagtgggaggtgatctgagggttctgtatgctgagcttccccacagaggactctttgccccgctagacctgagactggctggggccagccacaaaggcagscccatggctgatggagccaacagggcacctctgcagggggcacctctccagggtggtaggagtgaaatagagcaggccccaagttttagaaaatgaccag

SEQ ID NO: 100602 - DNA, 201 bp, Homo sapiens
caatttttgtacttttagtagagacggggtttcgccatgttggccaggctggtctcaaaatcctgacctcaggtgatccgcaagtgctgggattacaggcrtgagccactacgcccggcctgtgcatgcctttctgttccttctgctgatgtggggggtgttgggctcctgtcaggggcctcctgatgccccgttggggca

SEQ ID NO: 100603 - DNA, 201 bp, Homo sapiens
gcagcagccgcgtcctgtgcagcttcacgcccggagaactgtgcagcaaacgtgtctagatccagaaggcatgggaaggtgtaggcaagcttgcagccccytcggcccacaccactgtgaactcaactcgcatgtccttggaggtgcgggaagaagcagctaactggcatccctgccccagctctgaagcctaaaaggaca

SEQ ID NO: 100604 - DNA, 201 bp, Homo sapiens
aaaacttgagcacctacctatctcacaggtctgacatgagactcaaaggagctctcagagccctcccagggcagactgtccaagtatcagggattccaacygggattccactgctccttggtgttcttgtagccagcctgcatcttggggagtctgccgaattcagaagccccatacctcaccagctcggggtgagcttct

SEQ ID NO: 100605 - DNA, 201 bp, Homo sapiens
atgtcttgatgtcatcacatcatgggaactctagttcaaatgaagtttttggcagaatcaccaggttgaagtgggaggtgatctgagggttctgtatgctsagcttccccacagaggactctttgccccgctagacctgagactggctggggccagccacaaaggcaggcccatggctgatggagccaacagggcacctct

SEQ ID NO: 100606 - DNA, 201 bp, Homo sapiens
gattcgacccatccatgagcatgggatgtgtttccatttgtttgtttcatctatgatttctttcagcagtgttttgtagttttccttgtagagttctttcsactccttggttaggtatattcctaagtatttttatttttttgcagctattgtaaaaggggttgagttcttgatttgattctctgcttggtcattgttggt

SEQ ID NO: 100607 - DNA, 201 bp, Homo sapiens
tgccaccacccacgcaccacaccattgctgcagacccagtcctttgcagagcaagcattttgcatgttttccatgggtgtggctgggttggggtggttagmaaagtgtgcagaagatggtgtgggagaagggcagggcatggagaatcacagtggggtctcttcatgcttgtggactctcctggtggagctggttctctgg

SEQ ID NO: 100608 - DNA, 201 bp, Homo sapiens
acgattgtattgtcagcagtgacagtttgacttcctctttagcgatacggatgctctcctttctttcttccttccttccttcattccctccctccctaccytctctttctctttctctctttctctctttctttctttctttctttctttctttctttctttctttctttctttctttctttctttcttctctctctctct

SEQ ID NO: 100609 - DNA, 201 bp, Homo sapiens
agtctcccccaaaatgaagaaactctggtttgagaatgtaaatcactaggtaaagattctgtttattttctttatttccatgtttcccaatatttaatttkcaaccctctaagagcagttattttataaaataagtcccagctgaaatgaatttgataggattttagaatttctttctcccttaacacatcctattagcct

SEQ ID NO: 100610 - DNA, 201 bp, Homo sapiens
ccctgctctcaccacttagaaaccaacccagggaccaaccaagcatattcccagcagtaggcaagaagatccctaaagaagggaagtgagacctgcgtttwttcccctgatacttgggaaatctagcagatatagagacagtgacccaggtatccaagggattggtccaaattcaccatcctgtaactcgaaatgcaatgc

SEQ ID NO: 100611 - DNA, 201 bp, Homo sapiens
attgtattgtcagcagtgacagtttgacttcctctttagcgatacggatgctctcctttctttcttccttccttccttcattccctccctccctaccttctctttctctttctctctttctctctttctttctttctttctttctttctttctttctttctttctttctttctttctttctttcttctctctctctctctc

SEQ ID NO: 100612 - DNA, 201 bp, Homo sapiens
tattgtcagcagtgacagtttgacttcctctttagcgatacggatgctctcctttctttcttccttccttccttcattccctccctccctaccttctctttctctttctctctttctctctttctttctttctttctttctttctttctttctttctttctttctttctttctttctttcttctctctctctctctctctt

SEQ ID NO: 100613 - DNA, 201 bp, Homo sapiens
cggctccgagtccagcgcagccgagccggtctgcagaggggcccccagaactttgtgtgtgtgtgtgcacgcgcgcgcgtgtgtgcccaggtgcgagggtkcgcgcgtgtgctggcggggagggaaccgacccgaaagagagccccacgctggcaaagtggctcgcccatctcacagccggttggcgctcgcggaggtagg

SEQ ID NO: 100614 - DNA, 201 bp, Homo sapiens
gcacgccgcggaaatgcagcccccggggtggtcgctgggttcctgccggagtctggcttccacgccaccctgatcttctcctcctcgcgtctacactgtcycgagggccgccactccatcacttgaatgggagctcacaactctctgggtcctcgcttttctcagcgctctctcctatcagggcttccgctaaacactctc

SEQ ID NO: 100615 - DNA, 201 bp, Homo sapiens
tttgggccagtcaatcttggcctgcagggctggctacaggatctgtgaggcccagtgagaaataaaagcgtggtagcctttattcccaaagcagggggacrtgtccatcgtggtactcagcgagcttctttgtttcttctgcagtctctttttcgacttgtcatggtgctttttattttccatttactgttgttctaagta

SEQ ID NO: 100616 - DNA, 201 bp, Homo sapiens
tgaagcaggagaatcacttgaacccgggaggtggaggatgcagtgagccgagatcacaccactgcactccagcttgggcgacagaaaaagactctgtctcaaaaaaaaaataaataaataaaagataaagttatgaagactctcaagacagcgccacagaggattaacccccgcacagagcccttttcattggtcacttgc

SEQ ID NO: 100617 - DNA, 201 bp, Homo sapiens
gccccctctccccatgccagcattaagacctgatgtgcagcccttccctgatctcctttggagcctcttgcaaactgtcatccaattctttcttttattcttttttttttttttttttgagatggagtcttgctctgttgcccaggctggagggcaatggtgtgatcttggctcactgaaacttctgcctcttgggttcaa

SEQ ID NO: 100618 - DNA, 201 bp, Homo sapiens
atgagctggaaaaaaagaaaaaaaaaactcctgctgcaataaattacatcacagtggagatctctttctacccagaaaattctgagcccagacaatggctyatttatttcagacaatattcaatacaacagaattccaggtcaatagaaggatttctgcaggttcttagagttggtagcaaagggatttaacccacggaga

SEQ ID NO: 100619 - DNA, 201 bp, Homo sapiens
cctccaagtttcctctttcccaccagctcactgtggcctttgtgtctcacataaattttgtcttctgtgtctgaaactcttactgacttctgcttccttgytccctgggtctacactgttccttctcttcctggaactgacccttcgatctctgggcttcctaccttgagtaatttgtcaaaatcctgttcttgcaattgg

SEQ ID NO: 100620 - DNA, 201 bp, Homo sapiens
ttggtcctgggccgaacctggggacgtacctaggaatttctagccaaataagcaatagagggaagggtctgactgatgacggagcatgagcacactctagraagggcaaagaattgatctgggggatgggatggggcggggccctaagatttcaactccaccctggaaaagcaggacttaggggaggcatgtctgaagttc

SEQ ID NO: 100621 - DNA, 201 bp, Homo sapiens
gcaaagtaaataaccctcaagacccttaaatcttcaaccttcaggatcagatgaaatcacattcagtagtctcattcttgttttcactctagcagggaaaygtgtaatcagttgtagaaacgttttcaataaaagcagtgtgaattttaaaagtcatctggaaacgtcatgtattccttaatgataagttagtggttatag

SEQ ID NO: 100622 - DNA, 201 bp, Homo sapiens
aagttgacactgctccacgtgctgcacaagttccggttccaagcctgccctgagacccaggtgaggcccccctgctcagaggcaggggcaggggcaggggygggagggccaccccagttctctgcgtgagagcaggccagcctgggggcaacatcaggctctgcctccgtgagcttgggcaagctccttaacctctctcgg

SEQ ID NO: 100623 - DNA, 201 bp, Homo sapiens
caagtgattctcctgcctcagcctcctgagtagctgggattacaggcttgtaccacccatgccccatgcccggctaatttttgtatttttagtacagactrggtttcaccatgttggccaggctggtcttgaactcctgacctcaggtgatccgcctgcgtcggcctcccagagtgctgggattacaggcatgagccacca

SEQ ID NO: 100624 - DNA, 201 bp, Homo sapiens
attttcttccctttaaaaaatacttgaggccaggctcagtggctcaccgctgtaatcccagcactttgggaggccgaggcgggtggatcatgaggtcaggmgttcgagaccagcctgaccaacatggcgaaaccccgtctgtactaaaaaaatacaaaaattagcctagtatggtgccgcgcacctgtaatcccagctact

SEQ ID NO: 100625 - DNA, 201 bp, Homo sapiens
ttgtcatggacctgtattgccaccaaggtggctttggctccctgagtcctgaccctctgcttgttacttcccaacaggcgtcgggtttggagttcaagtcrgtagccgacagcgttctgtttttacgtgacaaaagatgggaagaggtcagaggtgccctgatgtctgctttcagtcctgaaaagctgaacgaggtaagac

SEQ ID NO: 100626 - DNA, 201 bp, Homo sapiens
taagggacatgttctcctgatacactagctgggctccactcacccaagtcattaattggagtcttattgggctactgcctcatatcctactcccgaagagytgatacctcccataacctcattcttagggtcagctggccgtaccagaaagagcactggattaggagccagatctgggttctggtcttagctcagctatcc

SEQ ID NO: 100627 - DNA, 201 bp, Homo sapiens
attgtcagcagtgacagtttgacttcctctttagcgatacggatgctctcctttctttcttccttccttccttcattccctccctccctaccttctctttytctttctctctttctctctttctttctttctttctttctttctttctttctttctttctttctttctttctttctttcttctctctctctctctctcttt

SEQ ID NO: 100628 - DNA, 201 bp, Homo sapiens
tatcaattcagtagttagcccatcaaagtaaaaaattgaattacactgtgtaaggccaccttgggatccaaaagataaaagagaagataagggacatgttytcctgatacactagctgggctccactcacccaagtcattaattggagtcttattgggctactgcctcatatcctactcccgaagagctgatacctcccat

SEQ ID NO: 100629 - DNA, 201 bp, Homo sapiens
gtcagcagtgacagtttgacttcctctttagcgatacggatgctctcctttctttcttccttccttccttcattccctccctccctaccttctctttctctttctctctttctctctttctttctttctttctttctttctttctttctttctttctttctttctttctttctttcttctctctctctctctctctttctc

SEQ ID NO: 100630 - DNA, 201 bp, Homo sapiens
atttccaaaagcaatagagaagcactgaatatttttgagcaggagtccaagttggtagaatgaaagaagggctggaaataagggctataagattttgagtktaagtgcccaccttataaatcattagcaaaagcagaatataaccctttctccaattctgtatgggtgacacccaccagtctggtaaatggaggtcgttag

SEQ ID NO: 100631 - DNA, 201 bp, Homo sapiens
ggctaatttgggtaatggtactattttactggagacaaataaaaggaattagggggagagtctcatattaaaatagagggttggataaggggagtttatamtctttccccatcagtggcttttatgctctatcaattcagtagttagcccatcaaagtaaaaaattgaattacactgtgtaaggccaccttgggatccaaa

SEQ ID NO: 100632 - DNA, 201 bp, Homo sapiens
agcagtgacagtttgacttcctctttagcgatacggatgctctcctttctttcttccttccttccttcattccctccctccctaccttctctttctctttctctctttctctctttctttctttctttctttctttctttctttctttctttctttctttctttctttctttcttctctctctctctctctctttctcttt

SEQ ID NO: 100633 - DNA, 201 bp, Homo sapiens
ggttttaccacattggccaggttggtctcaaactcctgacctcagatgatccacccaccttggcctcccaaagtgctgggattacaggtgtgagccaccaygtccagtcacattattttcttaactgtgtcaactctctcatatcactttgttggcttatctcattcttaccttttatttcatggagtctgagatttttat

SEQ ID NO: 100634 - DNA, 201 bp, Homo sapiens
ttccttttattcccagtgttctctcattccccttcccatccccaatagtcaaccattccaattgtgtttaatgtgtttttttttcacatgttcttgcaaaytgtgcattatcatttcgtggatattatccttagtttatgccaatagtactgccgtagatctcattctattccttagttttttcatttagcactgtgcttt

SEQ ID NO: 100635 - DNA, 201 bp, Homo sapiens
acagtttgacttcctctttagcgatacggatgctctcctttctttcttccttccttccttcattccctccctccctaccttctctttctctttctctctttctctctttctttctttctttctttctttctttctttctttctttctttctttctttctttctttcttctctctctctctctctctttctctttctccctc

SEQ ID NO: 100636 - DNA, 201 bp, Homo sapiens
atcctgttcaagagggctctgccctcatgacccatttgtcccccaaagaccccaccttctaatactgtcatctgggggtttaagatttcaacatatgaatytgttggggggatggatacaaacattcagaccatggcagagctgctaaggagacattgggtgcaaggtgacttaggaatgaagcactcagaggatcaggaa

SEQ ID NO: 100637 - DNA, 201 bp, Homo sapiens
cagtttgacttcctctttagcgatacggatgctctcctttctttcttccttccttccttcattccctccctccctaccttctctttctctttctctctttytctctttctttctttctttctttctttctttctttctttctttctttctttctttctttctttcttctctctctctctctctctttctctttctccctct

SEQ ID NO: 100638 - DNA, 201 bp, Homo sapiens
tttgacttcctctttagcgatacggatgctctcctttctttcttccttccttccttcattccctccctccctaccttctctttctctttctctctttctctctttctttctttctttctttctttctttctttctttctttctttctttctttctttctttcttctctctctctctctctctttctctttctccctctctc

SEQ ID NO: 100639 - DNA, 201 bp, Homo sapiens
ctttttaaggctgagtaatattccattgtaagcctattctgccttttgtttattcgtttgtttgtagatggcggagtgtgttacttccagcattgagctamtgtgaataatgttacttgaatatggatgtggaaatacctctttgagaccctgcttttagttcttttgggtatatatgcagaggtggaattgccagatcac

SEQ ID NO: 100640 - DNA, 201 bp, Homo sapiens
tgacttcctctttagcgatacggatgctctcctttctttcttccttccttccttcattccctccctccctaccttctctttctctttctctctttctctctttctttctttctttctttctttctttctttctttctttctttctttctttctttctttcttctctctctctctctctctttctctttctccctctctctc

SEQ ID NO: 100641 - DNA, 201 bp, Homo sapiens
gacttcctctttagcgatacggatgctctcctttctttcttccttccttccttcattccctccctccctaccttctctttctctttctctctttctctctttctttctttctttctttctttctttctttctttctttctttctttctttctttctttcttctctctctctctctctctttctctttctccctctctctct

SEQ ID NO: 100642 - DNA, 201 bp, Homo sapiens
gcacaaagtcagaggggatggtttccccatgtcttgaagtgctcactgctggccctgctccagatgttgtccactcaacagacatttcagtctttgctacrtgtacagcatggagctcatggcagtgggagagactacccatcccctccagaaaatgtatcattcatgtctcttttcccaaagaaagctgacatctaattt

SEQ ID NO: 100643 - DNA, 201 bp, Homo sapiens
tataaacggcagttcccctacatatactcacttgcctgccaccatgtaagacatgcctttgctcctcctttgctttccaccataattgtgaggcctcccasccatgtgaaactgtgagtccattaaacctctttttctttataagttactcagtcttggtatttcttcatagcagtatgaaaatggactaatacaacatgt

SEQ ID NO: 100644 - DNA, 201 bp, Homo sapiens
ttccctccctccctaccttctctttctctttctctctttctctctttctttctttctttctttctttctttctttctttctttctttctttctttctttctttcttctctctctctctctctctttctctttctccctctctctctctctctctttctttctcttgtctgattgttctggctaggacttccagtactatgt

SEQ ID NO: 100645 - DNA, 201 bp, Homo sapiens
gacagagagcttcactgggagctcctcagtggtccaggcgagagagacagggcctgaagccagttggcattagacgttggagctggaatacagcacactgygttgacatcatggaattcccactgcatgcttaacaccataatgaacactagacatcaaagataagaagacaagatgtgtttccaccactcacaaacgagc

SEQ ID NO: 100646 - DNA, 201 bp, Homo sapiens
tccctccctccctaccttctctttctctttctctctttctctctttctttctttctttctttctttctttctttctttctttctttctttctttctttctttcttctctctctctctctctctttctctttctccctctctctctctctctctttctttctcttgtctgattgttctggctaggacttccagtactatgtt

SEQ ID NO: 100647 - DNA, 201 bp, Homo sapiens
accactcacaaacgagcagaaagacagtcaggaaaaaaattacaattactagagaaccactaggagtcaaccaggcaagaaaagaggagccgttccaggcraggcagggggaacagcatgtgcaaaggcatgggagtgagagatcatggagggtttcagtcggtatgatcaggattggctcttggcggtggggtggggagg

SEQ ID NO: 100648 - DNA, 201 bp, Homo sapiens
cctctttcagcctctgtttcagcctctgcctcagtccttgccagagacgtcaggcttagcacagagcagctgggagccttcagcagagaaggaaggcaccrcttagacatctgcacgggcagtttttaaacatagggaacatgaaggaaataccacagaatttatggagtgaaagctttaaaaagaaacacaagtctgaag

SEQ ID NO: 100649 - DNA, 201 bp, Homo sapiens
tcagtgcctgccatgtaggaacaccacaccattcagcagggcagctatgtgtttgctgtctattcttgggccatattaataacctggttcaaagatgcagrgattaagataaatgtaccaagcagaagtggtaaacaggaagtgagagctgacttctatttgttattgcaaaaatatttattaacctgttaatgtgtgccc

SEQ ID NO: 100650 - DNA, 201 bp, Homo sapiens
agctgctaagataatttctgcccacattctattggctaagcaatccacatgcccaaggttaacattaatggggcagggaagaagactctgtccactgtagygggaggcactgcacagtcatggagcaaggggcattgatgtagaattttgatacagatggggcatgaagcatcaggagcagtgattcactctacctcatgc

SEQ ID NO: 100651 - DNA, 201 bp, Homo sapiens
aaatggatgcatgaagggatggatgagtacattttcatcaaggaccaagtgagcctagcctcggggctgcaggctcctgggcagtgagtggtaatggggtrggggcttggtcaccctgggaagggggctgagcagggggtcctctgtccccagcctcattccacacaccatgctgcctgcccctgatccccttcacactca

SEQ ID NO: 100652 - DNA, 201 bp, Homo sapiens
aaagtactaagcatagtgcctgagacacaggaaactaaaaactattgtaaattataataatagtaatgattgtgtaactcttgtatgtcaatatacatgtwtaatatatttttcttgtgcagtgacaaagttattgtcaggctaatgactgcaatgactatgtctttgtggtacctacattattggtgaaagaactgaaca

SEQ ID NO: 100653 - DNA, 201 bp, Homo sapiens
tttccctccaggtactccacatcagcattctcaagactggagaagttaggcctcagacatcccaagccttctcctttcattggaaacttgacatttttccrccaggtaagggctgtcttccattggcttccatcataaaatatgctgagggccaggcacagtggctcatggctgtaatcccagcactttgggaggccgaag

SEQ ID NO: 100654 - DNA, 201 bp, Homo sapiens
ctcctcatctcttctctgtatccacccccgacctggtgtttccctcagattcacacgggaggcagctcaggactgcgaggtgctggggcagcgcatccccrcaggcgctgtgctagagatggccgtgggtgccctgcaccatgaccctgagcactggccaagcccggagaccttcaaccctgaaaggtgagtactgcccct

SEQ ID NO: 100655 - DNA, 201 bp, Homo sapiens
aataacaaggtcgtttcaacactttttaaagctcagcttccatggtgccatccattaggagagtctgtgttctggaagtgactaaggtgtgaacacttttygtgtaattgctcttaaccatcatgtttatgtactatttagatggggttgaagaacagcatagagatggtttactttaatactggcagatggctatgtgag

SEQ ID NO: 100656 - DNA, 201 bp, Homo sapiens
gagcatcccatgagcaagaagcctcagctctttgtcctcctctgtgtaggagcccacaaggatgctttatctccaatctggaatggacacttagcatcctkagttctgccctgctcaaaatccatacctgttcatgagtaccagggcttcagggcccgagaacccacagctaacacccataggagaaaggtttcatatgag

SEQ ID NO: 100657 - DNA, 201 bp, Homo sapiens
tgaatggctcttccatttgcctttgaagattgcttgtaactcttcaagttcacttcttcatctcactgccagaccacagcttgagactgatgattgacatkgccactaggttcttcccaaagactccagcctaaagattgttagctgcttcccccaaaggcttagccttctctgctagagttttggttctttggagcatcc

SEQ ID NO: 100658 - DNA, 201 bp, Homo sapiens
cactaaggaggcactctttgcagatgaatttttttttttttttttttttttttggcctcggcttaaagaggaacctattaacctttgcccggaatctatgsctggtgaatggcttgtcatagcatgttagtttgatgaggcaattgtggtcttttttgttaaaacaccccccagcacctcttgatactacttggcctactg

SEQ ID NO: 100659 - DNA, 201 bp, Homo sapiens
ctccctccctaccttctctttctctttctctctttctctctttctttctttctttctttctttctttctttctttctttctttctttctttctttctttcttctctctctctctctctctttctctttctccctctctctctctctctctttctttctcttgtctgattgttctggctaggacttccagtactatgttgaa

SEQ ID NO: 100660 - DNA, 201 bp, Homo sapiens
tagggcaaaaggtaaaggaatctaaatgtctaaaaccaaattaactccagatactagtgtgaactttcaagcaaaaaaagtcacacaccaccgcatacacstttgaaattctactaaattttgaatgtttgacgttagcctttaaactggaacatattcttctttcttccttaggatctttaaatcttttaaagtttgggt

SEQ ID NO: 100661 - DNA, 201 bp, Homo sapiens
tctctttctctttctctctttctctctttctttctttctttctttctttctttctttctttctttctttctttctttctttctttcttctctctctctctctctctttctctttctccctctctctctctctctctttctttctcttgtctgattgttctggctaggacttccagtactatgttgaagaggagtggtggga

SEQ ID NO: 100662 - DNA, 201 bp, Homo sapiens
ggcccaggaccagaagccagacctaatctccgatatcagtcagggtggacaggtccatcatggttggaacagatccatgctggagaggcaccgagtctcaygatgtgtggctggaggttgttcctgcttctggggccagggctgggcctgcagatgagggacagagcacctggctagaaaggagagaggactgcagcggct

SEQ ID NO: 100663 - DNA, 201 bp, Homo sapiens
tctttctctttctctctttctctctttctttctttctttctttctttctttctttctttctttctttctttctttctttctttcttctctctctctctctctctttctctttctccctctctctctctctctctttctttctcttgtctgattgttctggctaggacttccagtactatgttgaagaggagtggtgggagt

SEQ ID NO: 100664 - DNA, 201 bp, Homo sapiens
tctctgtaagatttttgcattgggtgtaaatatctaagtaattcatgtggatatcttctcccaggtaggtgtggccagctgattacttattcccagggagytggagcagcaggaaggaatggcctggaaactggaaataatcccatttgccggggtaagctagctgtggaaaactgaccaggctgtgggtaccgagagagc

SEQ ID NO: 100665 - DNA, 201 bp, Homo sapiens
aatattcttgctgagactttgattggaattgcattaaactgatatgccagttttgggagaattgatatttttacattgtggagtcttccaatccatgaacatgatatgtttctccacttagttcttcttttatttctttcatcaacattgtaaatggcaatgtgctttcatttggtttacacatgttcattgttagcatgt

SEQ ID NO: 100666 - DNA, 201 bp, Homo sapiens
aaccgaactccagtggaagcacttctcctgcagagaccagctcccgcacctgactgtgggcccaggctgggcacctcccacccagtagcaccttcttgttytttaaaatcacaagttcaactattattgaaattatttccaagccttaactcggaatcatgctaagaagctaacacaaatatattaattgaccatttaaga

SEQ ID NO: 100667 - DNA, 201 bp, Homo sapiens
atattcttgctgagactttgattggaattgcattaaactgatatgccagttttgggagaattgatatttttacattgtggagtcttccaatccatgaacatgatatgtttctccacttagttcttcttttatttctttcatcaacattgtaaatggcaatgtgctttcatttggtttacacatgttcattgttagcatgta

SEQ ID NO: 100668 - DNA, 201 bp, Homo sapiens
ttgatttcatgaccactagtgagtcaaaatcagcaatttgagaagcaaagggccagatgatatctgaagtcctttccagttgtaaactggatgactacaarccaatgagacagcccctatcagtgtgcatcagaaaattgttagaggccattgtgtttgcctctttgtggtttaagattctgagaaacctctgtcaaagtc

SEQ ID NO: 100669 - DNA, 201 bp, Homo sapiens
tattcttgctgagactttgattggaattgcattaaactgatatgccagttttgggagaattgatatttttacattgtggagtcttccaatccatgaacatgatatgtttctccacttagttcttcttttatttctttcatcaacattgtaaatggcaatgtgctttcatttggtttacacatgttcattgttagcatgtag

SEQ ID NO: 100670 - DNA, 201 bp, Homo sapiens
ctttcatttttctagtttctttaaattttatttttaaaatatagaatgtttgatatatcaggaatttatttggaagatggagttagggacacacccttttyccccccctccaggagggtagagttccatctggaaattcatccttttccaaatgatttgaaatgtcacttttatcatttattaattcctaggtgtatttct

SEQ ID NO: 100671 - DNA, 201 bp, Homo sapiens
agtttgcaaatacttcctcccagtctgtggcttgtctcttcactttgctgattgtttcctttgctgtgcagaagttttttaacttgatgcaatctcaatcrtccatttttgcgttggttgcctgtgcttgtggggtattactcaagaaatctttgcccagttcaatgtcctagatattttctcaagtgttttcttttagta

SEQ ID NO: 100672 - DNA, 201 bp, Homo sapiens
gcctgggcaacaaagcaagactctgtctaaaaacaaaaaaaaagaaagaaagaaagaagaaggaaagaaagaggaaagaaagaaggaaggaaggaaggaargaaggaaggaaggaaggaaagaaagagaaggaaggaaagaaggaaggaaggaaggaaagaaagagaaagaaagagagaaagaaagagagaaagaaggaaa

SEQ ID NO: 100673 - DNA, 201 bp, Homo sapiens
tgggcaggacaggcctgcgcctaaggacagggatggggggaaagttcaagcattttcacttcaagaaaaattgtggtgcacctcagcccagaagctataayttagtggtggacaccaaatttaaataactgattatctggcttttcgtcattttgtaactaaaaggtttttgctttaaaaaaacatctttagtctaagttt

SEQ ID NO: 100674 - DNA, 201 bp, Homo sapiens
gaattggtttatggccttattgagttgttttttgttttcttggttaaaatcagtaaaagcaaacaaacaaacacaaaaagtagttagtattcttttctttytttgtaccacatctgttgaattcctgtttctcaaagattttcctgacaattttggaaaatacgatgactcaggtaaatgttttccaagtgcctaatatgt

SEQ ID NO: 100675 - DNA, 201 bp, Homo sapiens
ggcggatcacctgaagtcaggagttcgagaccagcctgaccaacatggtgaaaccccgcctctactaaagatacaaaaattagccgggtgtggtggcacaygcctatagtcccagctactcaggaggctgaggcaggaagatcacttgaacctgggaggtggaggttgcagtgagccaagatcacaccattgtactccagc

SEQ ID NO: 100676 - DNA, 201 bp, Homo sapiens
gggagtgagagatcatggagggtttcagtcggtatgatcaggattggctcttggcggtggggtggggagggggaccgggggcaggcaggcggggggaatarggaggcacaaggccaaagaacaaggcagggagcagggtgtgaaggacatcatgtgccacatgctaaagacttggcaaaccattgaagggtgttcagtaaa

SEQ ID NO: 100677 - DNA, 201 bp, Homo sapiens
agtgagagatcatggagggtttcagtcggtatgatcaggattggctcttggcggtggggtggggagggggaccgggggcaggcaggcggggggaataaggwggcacaaggccaaagaacaaggcagggagcagggtgtgaaggacatcatgtgccacatgctaaagacttggcaaaccattgaagggtgttcagtaaagaa

SEQ ID NO: 100678 - DNA, 201 bp, Homo sapiens
tccacctcttccacacccatccaaactcttgctgttcttcaagacactcctcagatactgcctcctccaggaagccttccctgcctccatccacatgcacytttccccttccctgaactctggcagcgctcaccatgtgtgtcactcgttgtcacagttgatccccttgtgccttccagtatttacagtgaaggaggatat

SEQ ID NO: 100679 - DNA, 201 bp, Homo sapiens
gtactatcttggtcgtcggatgtttattgttatttctgagccagacatgatcaagcaggtgttggttgagaacttcagtaactttaccaacagaatggtaygtagttttctttccgcatatagatggatggggaattgttctcagatggagacactgcatgtcagatccaatggggatgcaatcaggcctctgatcaggtt

SEQ ID NO: 100680 - DNA, 201 bp, Homo sapiens
ctgtgttcatgaaagtgaataagagttagcaggcaaaggagaaagggggttggagagggatctagagtttcagagaaagagaaaaacagctcacgagaagkaccacaccctagagagatgacatggtcaagggtctaacggaataatgcgacatcatctcaacactatgtgccaaggactgtcctgaaagctgtgtcataa

SEQ ID NO: 100681 - DNA, 201 bp, Homo sapiens
gtttatgcggatattaggttgcctcagtcaacaatgcttgaaaatggctttaaaatgagcatcatatcatgaagccatatttgtatttaaattaaaattgtttttttttttggtctatgtcataccagggataatatagagcaacagagaaccagggaaaatgtgattcatgcatctccaagtcaggaaaaagagactatt

SEQ ID NO: 100682 - DNA, 201 bp, Homo sapiens
ttaggttgcctcagtcaacaatgcttgaaaatggctttaaaatgagcatcatatcatgaagccatatttgtatttaaattaaaattgtttttttttttggyctatgtcataccagggataatatagagcaacagagaaccagggaaaatgtgattcatgcatctccaagtcaggaaaaagagactattggaatcatagcca

SEQ ID NO: 100683 - DNA, 201 bp, Homo sapiens
agccagacgtggcggtgggcacctgtaatcccagctacttgggaggctgagataggataatcgcttgaacccaggaggcagaggttgcagtgagccgagttctagtgccattgcactctagcctaggcaacaagagctaaattccatctcaaaaaaaaaaaaaaaaaaaaaaaggcagaaaggcatcaattggatttagca

SEQ ID NO: 100684 - DNA, 201 bp, Homo sapiens
caccaaccctgactgccaagagaagcttctgagagaggtagacgtttttaaggagaaacacgtgagtacaagttggatccagttacccatgggatatccayaggacaattgattttgtgtttgtgggagtgaaacttatttttaatgacttgctaatatcacattctaagcttataagatgaaatagggtcattgcttggc

SEQ ID NO: 100685 - DNA, 201 bp, Homo sapiens
tgccagtggagaaagtctcctccaaccctcaggctcagcaccactcagggccagtgagatgcacaaacagcatcttgcaggtaccacaatgccttcatcasttgtatcttccccgaccctgtgatgaagtaggatgaagatggctgagggtatggacgttgggcccacctccctggcttaaagctgctggaccccttaccc

SEQ ID NO: 100686 - DNA, 201 bp, Homo sapiens
gtggtcactgctaccaacacaccaactcccaggacacaggatactagggacttctgtgccccatcagtggacaagtcacaagttcccaaagcagggtgaccaatcgatctggatcaggtggcagggcctcggatcttaactgtccatttcattgttatgcacacaaacttatcttagagatccggccatctgcctgttccc

SEQ ID NO: 100687 - DNA, 201 bp, Homo sapiens
agtttgagtttcaatacacacagaaagctagattgtactgatagtctccatgtttttccttgcccttaaattgtgatttggctgatctctgcgtgatgctwaacaaccagtttgactcattaattttgctgaactaactgaacttttgacctaattggctgctggttagggatcagagccatatgtgcaggtttttctaag

SEQ ID NO: 100688 - DNA, 201 bp, Homo sapiens
tcaggaaaatgaacgaggaggttttttaaaatctactttacaaacgaggaaatgtatcgggttccttaagagcctttccaggaaaatttttgctcatttgyggccaaactcgaaataaaacttaggtcccccaactcccaaccctgcgttttctggtttccttccaccactctttctagtatccattttcctggtctccaa

SEQ ID NO: 100689 - DNA, 201 bp, Homo sapiens
ggtcactgctaccaacacaccaactcccaggacacaggatactagggacttctgtgccccatcagtggacaagtcacaagttcccaaagcagggtgaccaatcgatctggatcaggtggcagggcctcggatcttaactgtccatttcattgttatgcacacaaacttatcttagagatccggccatctgcctgttcccgt

SEQ ID NO: 100690 - DNA, 201 bp, Homo sapiens
ctggttctcccttgtgaccactttaaaaatcgactcatttggccaggtgtggtggcttatgcctttaatcccagcactttgggaggccaaggcaggaggaycgcttgaggccaggagttaagaccaacctggacaatatagggagaccctgtctctacaaagaatctgaaatactagttgggagtggtggcacatacctgt

SEQ ID NO: 100691 - DNA, 201 bp, Homo sapiens
cccacatgttgaaaaacactgggttagagggtcacagttcaggaaaatgaacgaggaggttttttaaaatctactttacaaacgaggaaatgtatcgggtyccttaagagcctttccaggaaaatttttgctcatttgtggccaaactcgaaataaaacttaggtcccccaactcccaaccctgcgttttctggtttcctt

SEQ ID NO: 100692 - DNA, 201 bp, Homo sapiens
gtcactgctaccaacacaccaactcccaggacacaggatactagggacttctgtgccccatcagtggacaagtcacaagttcccaaagcagggtgaccaatcgatctggatcaggtggcagggcctcggatcttaactgtccatttcattgttatgcacacaaacttatcttagagatccggccatctgcctgttcccgtc

SEQ ID NO: 100693 - DNA, 201 bp, Homo sapiens
agataggagaattgcttgaacccaggaagcagaggttgcagtgagccaagattatgccactgcactccccattctgggcaacagagcaagattccatctcaaaataataataataataataataataataataataaataaatagcaaaagaaagaaaaaaccctcagctaagaagtatactgttgtgttttttggggttt

SEQ ID NO: 100694 - DNA, 201 bp, Homo sapiens
ggaaaaaaaacaacaggccaggcatgatggcttacacctataattcttttgggaggctcactttgggaggctgaggtaggaggatcacttgagcacaggawttctcgagaccagcctgggcaatataggaagtctccgtctctacagaaaatacaacaattagccaggtgcggtgacatgcatctgtggtcccagctactc

SEQ ID NO: 100695 - DNA, 201 bp, Homo sapiens
ataataatagtaatgattgtgtaactcttgtatgtcaatatacatgtataatatatttttcttgtgcagtgacaaagttattgtcaggctaatgactgcartgactatgtctttgtggtacctacattattggtgaaagaactgaacaccagccagatatttatgtatttattgagtagtcttctattttttttccagagg

SEQ ID NO: 100696 - DNA, 201 bp, Homo sapiens
aacaggaagctcagggtaactcacagtccccaccccagacacttcttcttttcaggcacacttcaaaataaaatcaggatctacatacactataagttggygtggtagctgaatattggccccctaaaatgtcgatgtcctagcctctggaacttgtgaatgcaaccttagatggcagaactgattttgaagatgtgatta

SEQ ID NO: 100697 - DNA, 201 bp, Homo sapiens
gataggagaattgcttgaacccaggaagcagaggttgcagtgagccaagattatgccactgcactccccattctgggcaacagagcaagattccatctcaaaataataataataataataataataataataataaataaatagcaaaagaaagaaaaaaccctcagctaagaagtatactgttgtgttttttggggtttt

SEQ ID NO: 100698 - DNA, 201 bp, Homo sapiens
tatctgctctctggccatggttttgaactatcagctgagcccaagcaaccttgcagaccacattttgattatgtcttcctcggaccatccttgagagtcaygtcttcttggcagtgtcccatagactgtgaatggtgagtgagatcactttagaaggtacacggactttaaaaatctttcattataaagcatttatttatt

SEQ ID NO: 100699 - DNA, 201 bp, Homo sapiens
ataggagaattgcttgaacccaggaagcagaggttgcagtgagccaagattatgccactgcactccccattctgggcaacagagcaagattccatctcaawataataataataataataataataataataataaataaatagcaaaagaaagaaaaaaccctcagctaagaagtatactgttgtgttttttggggttttt

SEQ ID NO: 100700 - DNA, 201 bp, Homo sapiens
aagtcaagatgtgtccatctttaccataaaaaaaaacaaaaaacttgcttcaataaccaataaacagatcaaacaacagaaaaataaatagcaaaagactkcagggctcgatggctcacacctgtaatcccagcactttgggaggcggaggtgggtggatcacctgaggtcaggagtttgagaccagcctgaccaatacgg

SEQ ID NO: 100701 - DNA, 201 bp, Homo sapiens
tccatcacaggcccacaccttgtctcagaattaagaggaaatgcttctggctgccaggggtggggtggggtaggatgcagagcctctccctccaccaccayctccatccttttccctttctctgaaaatctcatttgatgattccccagcctggctgcaaattaaagatttgtagacctgaaagatgctaccgatggttat

SEQ ID NO: 100702 - DNA, 201 bp, Homo sapiens
ccctcctgcccctccagccaaaattacctttttgatgtcccatttccccaggacactattttgtcctagggatcaaaaataaaaaaataagaaagaaagaragagagagagagagagagagagagaaagaaagaaagggaagggggaaagaaagaagaaaagaagaagaaagaaagaagaaagaaaaagaaagaggaagga

SEQ ID NO: 100703 - DNA, 201 bp, Homo sapiens
ttttagaaaagtccctcatcagattatcaggaagtcgtgggttttccgtgatcatgctgtggtcagatccagcccaaccagagagccaaaaacaaaacaarcatacaaaacaaacaaacaaacaaacaaaacccaaatccctggcaagccccacgaaatgactgctctgataacattcagcagacaagcctgtttgaaatc

SEQ ID NO: 100704 - DNA, 201 bp, Homo sapiens
aataatcgtctccagttccacccacattgctgcaaatgccattaactcattcctttttatggctgagtagtattccatcatatatatatatatatacatayatatatatatatatgtgtgtgtgtgtgtgtgtgtgtgtgtgtgtgtgtgtatatatatatatatatatacaccatagtttctttatccactagttgatgg

SEQ ID NO: 100705 - DNA, 201 bp, Homo sapiens
taaaagaggcccttccaccgcgtagggttacagtgagaagactgaatctatgaggaagcaggaggttgcactttatagactccaaacccggtaaataaacrtctgctgttgatgagccgtccagtcaatggtgttttgttacagaagtccaaatgaacaaaggcaatccctgactctcagaaaaacgcctggcactcagta

SEQ ID NO: 100706 - DNA, 201 bp, Homo sapiens
catggcttacgcctataatcccagcactttgggaggccgaggtgggtgaatcacctgaggtcaggagttcaagaccagcctggccaacatggtaaaacccygtctctataaaaatacaataactacgtgggcatggtggtgagcgcctgtaattccagctacttgggaggctgacgcatgagactcgcttgaacccgggag

SEQ ID NO: 100707 - DNA, 201 bp, Homo sapiens
aaagcaatgagtgaaatggcaggatcagtcaggctgtgaggaaatttggagggggttctgaaaatcataccatgggcaaccatgtggctgacccagctgcwgggtgaagctgtgttgttcttgctgttcctctggtcatttaccttggctctcctccagcttgactgcacttgcctgtgttaaggtttcagatcactccaa

SEQ ID NO: 100708 - DNA, 201 bp, Homo sapiens
ccacaggagacacgtacagccccaagcactaagaccctggtgactctttgctgtcacattagccactggctcatcattttactcagctccagaggaaaccsaactcctcgagtaattctttggtttttcttcaaagtccccagtccaccactggctctgccttttaagctggacataggaaagctttctggatgtcagtga

SEQ ID NO: 100709 - DNA, 201 bp, Homo sapiens
cgccccccttgaactcattcctacacctgtaaccactgacagtttttgaaaactgttcacctggagttcctggttctctttctcttaaatcaaacattgartaaatgaagacactcagatgttcaaacatgtgcatcaagattttacttgtgagagtggttgccatgcatgacctagggaagctctcatggcttcagtcaa

SEQ ID NO: 100710 - DNA, 201 bp, Homo sapiens
ggttgccatgcatgacctagggaagctctcatggcttcagtcaaaccttgccaactttttttagctgtgcatttcttgagaaaggtcaactcacattacgrgtctacagctctgagcaagggagaagttcttcctgaaagcacaaacagactacagagggcagtgaaaccagaaacacaggtgtgcaacctcatttgcctg

SEQ ID NO: 100711 - DNA, 201 bp, Homo sapiens
ctaacttgttggccactgatggactttaaccagggtgtttgtcatggacctgtattgccaccaaggtggctttggctccctgagtcctgaccctctgcttrttacttcccaacaggcgtcgggtttggagttcaagtcggtagccgacagcgttctgtttttacgtgacaaaagatgggaagaggtcagaggtgccctgat

SEQ ID NO: 100712 - DNA, 201 bp, Homo sapiens
cttcatctgcagccaatttaggtgtactcccggcatggtgccctaattacacctttgttatccattatcagatggttcccctcatcagccaagcctgcgamcttctcctggctcatttaaaacgctatgcggaatctggggacgcatttgacatccagaggtaaggctgctgcattacagatgagaaatcgagtttttgaa

SEQ ID NO: 100713 - DNA, 201 bp, Homo sapiens
gcttgtcctacagaaggtggggacacttcctctggctcctcctgacagagcaaggtgctgtctgcttggaggggaagctgaagggtttcagctccttgaasggtacccccagctttgccttccccccttgtgcagacactcacgtgtccccatggccacagcctggtccctctcacaggtggtgacacagcctcttcccaa

SEQ ID NO: 100714 - DNA, 201 bp, Homo sapiens
cattgtgggtagcccctgccagagtcctttcagatctctgtgctcccatctcccgtaggtgctactgcaattacaccacagatgtggttgccagcgtcgcstttggcaccccggtggactcctggcaggcccctgaggatccctttgtgaaacactgcaagcgtttcttcgaattctgcatccccagacctatcctggttt

SEQ ID NO: 100715 - DNA, 201 bp, Homo sapiens
acaatgtatgttttctgtaataatatacagatgttcatgaagcctgccttaaagtttgtcttgtgtttatttgagtgctaagagcccttgctttttgttcrttgctattaagaaaactgtaaaatcattaagaggaagagggagacaaagttaataaaactagataattaggttgttaattcatcaaggacaatttgatgt

SEQ ID NO: 100716 - DNA, 201 bp, Homo sapiens
ttaataacccagtttttagctttttggaaaagaacttaatctgactactcctataagataacaaaaagaatcatttgagtttaaaatggccttttgagggsgcagctttcctatagcctaagaggttaaattttctggagctcctgccagacacttttccttctgtttgtttctaaagcacaatgtatgttttctgtaata

SEQ ID NO: 100717 - DNA, 201 bp, Homo sapiens
ttttttaaggctcaacaaatatccaatagtcagacagaagagtgatcaaaatagaaagcatgtatttaaactgggactgacaggtgacaggggatgcctcwtagccacaatgatcataatgtaaatgcttaattaactgtttgtcagtagccattgaatgtctgtctggtccactaggctgtaagtgccacagagcaaggg

SEQ ID NO: 100718 - DNA, 201 bp, Homo sapiens
aggagacattgggtgcaaggtgacttaggaatgaagcactcagaggatcaggaagctgcattaggaaggagagaggaatgggagctccagggtaggcctgraatccggaatctccacctcccaccctccaacaatcgaatggggtgtttcccgcagtgtgtccttgagaccatcgtttccactgacagtaataattgttac

SEQ ID NO: 100719 - DNA, 201 bp, Homo sapiens
cttgggggtgggatgggcattttaaagcactcttgagaaagtagaacacactccattttaaggcagtttctttgcagtgcttcttcgtacacatcaacccyatgctcactctgccccatggcctccaggtgacccatctgttccaaggcagcagcctttccagtgccttcacctgctatggtgccacaacatggctctcgt

SEQ ID NO: 100720 - DNA, 201 bp, Homo sapiens
ataaaaacaaaggattaactgcagatgactaagcccacatgatggaaacagaatcaggtacagtaaataatgaacgtagacaggattagattcctacaaayaatacattgtgttctcctgctcttcattggcaatcatccccagtagggaatcagtggaactctttgagtggccaaggaaaacatctccatgtgcccagga

SEQ ID NO: 100721 - DNA, 201 bp, Homo sapiens
ttgggttccgcccctggagattcgatttagtgggtctggagtgaggcctgggcttcttagaagccccagcggattctaaaatgcagccaggaggaagaacsttgccagaatcccatgaggcacagatgcaaatgtgcatagtgacattgggttgcattatcaatggcaggactgactttataaacctccacatccttactg

SEQ ID NO: 100722 - DNA, 201 bp, Homo sapiens
aacactgtgatgaccaaggcggagattagagggatgcatctacaagccaaagaccatggattgccagcaactaccaggagatggacagaggcaaggaaggrgctcccttcgtgtcttcagagggagcatggccctgctgatgtcttgacctcagaattctgaactccagaatgatgagaggataatttctgttgttttaag

SEQ ID NO: 100723 - DNA, 201 bp, Homo sapiens
ggagaattgcttgaatctgggaggcggaggttgcagtgagccaagatagtgccactgcactccaccctgggcggcagagcgagactctgtctcaaaaaaarcaaacaaacaaacaaaaaaaacagtcccctaaacaatgaagaataaaaaaaaaagaaaaaaaaaggccccctgccattctccatcccaatcccatcccct

SEQ ID NO: 100724 - DNA, 201 bp, Homo sapiens
gagctgacctagaagaggtcaatgatttggcctgctaggggcagacatactcaatgcacatgtccaagcaaggaggacacaataatattgccctcagcttygatcaatttatcctccaagccatttgtctgccgtttctaatttctttcaccatcccctcacccacccctccacgcagactaggtccagtgccccaaactc

SEQ ID NO: 100725 - DNA, 201 bp, Homo sapiens
agccctgtcctcgccacagtgcccgcatcttcattggttcacctttgcaggtatcatctgtgacctgtcatccaggctctgagccctgaggataataagtytccctcgaaggtcctgggtttgttggagctttttctccctcttgccatgtccttttcacggtccatcctctgagtttgtgaattatctttcttcgtggcc

SEQ ID NO: 100726 - DNA, 201 bp, Homo sapiens
gtgatcttgcttatgaagtgataacctagcttcaagagtgttgaagcagggtccagagctcagtgtaggggccaggttggtcctgggccgaacctggggaygtacctaggaatttctagccaaataagcaatagagggaagggtctgactgatgacggagcatgagcacactctaggaagggcaaagaattgatctggggg

SEQ ID NO: 100727 - DNA, 201 bp, Homo sapiens
agcaggtgaatctgggtaaacgatacatgggtatctaatgtactattcttcaacttttctgtaagttcagaattatttcctaatgaaaattaaaacagaaaaacaaacaaaccaaagaaatgtgcaagaggaagacaatcaatgacatagacagaccaagtcagatgaagactgaggagtattcatcagatgtacccataa

SEQ ID NO: 100728 - DNA, 201 bp, Homo sapiens
agaggctggggtgagaggatcagttgagcccaggatgtggatgttgtagtgagccaagatcgcaccactgcacttccaacagcaaagaccctgttcccccmaaaaaaacacaaaaaacaaaaaacaacaaaaaaaaaacaacccaccaaaaaacagaaacaacagatagtgatgcagaattttcccactgagacactgaca

SEQ ID NO: 100729 - DNA, 201 bp, Homo sapiens
gcaggtgaatctgggtaaacgatacatgggtatctaatgtactattcttcaacttttctgtaagttcagaattatttcctaatgaaaattaaaacagaaaaacaaacaaaccaaagaaatgtgcaagaggaagacaatcaatgacatagacagaccaagtcagatgaagactgaggagtattcatcagatgtacccataaa

SEQ ID NO: 100730 - DNA, 201 bp, Homo sapiens
ataagcagccagagatgagagaaacgggggtcctcacccagatcctgcccactcccaagctctccctccttcctgacatctggctacgtctctgcacagcrttagctattccctgcctatcctgaccactgctgtcccctgcacctatcctcatgcttgtcctgccacccggaacccactgttcagctgcagacctggaca

SEQ ID NO: 100731 - DNA, 201 bp, Homo sapiens
ttcaatattctagtgaaagatctaaaatacaatcggaatacacaagcatagacttgggttaattccagggattgtgcatatggattaggctttatttactygctaatgctaaccaaatgtcatgaaactgagtactgattctcagttttgtctaagcacttaatgatcattttcataattatttcaccgtattcactgtaa

SEQ ID NO: 100732 - DNA, 201 bp, Homo sapiens
attaatttctggccgtgtgccactgcaaccagctttcaccctgacttgtcatataacaaaatatcattaaattgaactctagttttttttttttttttttkagacagggtcttactctgttgcccaggctggagtacagtggcacaatcacagctcactgcagcctcaacctccccaggctcggggaattctcccacccca

SEQ ID NO: 100733 - DNA, 201 bp, Homo sapiens
caggtgaatctgggtaaacgatacatgggtatctaatgtactattcttcaacttttctgtaagttcagaattatttcctaatgaaaattaaaacagaaaaacaaacaaaccaaagaaatgtgcaagaggaagacaatcaatgacatagacagaccaagtcagatgaagactgaggagtattcatcagatgtacccataaat

SEQ ID NO: 100734 - DNA, 201 bp, Homo sapiens
aatgccaggcgcatgacaggtgctcactcattcattcaacaaacattaatgagcaaatggataagcagccagagatgagagaaacgggggtcctcacccakatcctgcccactcccaagctctccctccttcctgacatctggctacgtctctgcacagcgttagctattccctgcctatcctgaccactgctgtcccctg

SEQ ID NO: 100735 - DNA, 201 bp, Homo sapiens
ctcttctgcatctcctaggttcttgccccaatgtacctggtaccttccctctctctcatcacttacctggctccccaagggcaggattggtccttcctcakctttagctgagcactcagcattgtgccaggggcactcaacacacttctgttgagtaataggcacgcagttacttgttgaaccaaactgcgttagaagaga

SEQ ID NO: 100736 - DNA, 201 bp, Homo sapiens
tggtggctcatgcctgtaatcccagcactttgggaggccaaggtgggcggatcacaaggtcaggagatggagaccatcctggctaacacggtgaaaccccrtctctactaaaaatacaaaaacttagctgggcgtggtggcgggcacctgtagtcccagctacttgggaggctgaggcaggagaatggcgtgaacccagga

SEQ ID NO: 100737 - DNA, 201 bp, Homo sapiens
aggtgaatctgggtaaacgatacatgggtatctaatgtactattcttcaacttttctgtaagttcagaattatttcctaatgaaaattaaaacagaaaaacaaacaaaccaaagaaatgtgcaagaggaagacaatcaatgacatagacagaccaagtcagatgaagactgaggagtattcatcagatgtacccataaata

SEQ ID NO: 100738 - DNA, 201 bp, Homo sapiens
attataccattttttagccacgcgtggtggctcatgcctgtaatcccagcactttgggaggccaaggtgggcggatcacaaggtcaggagatggagaccaycctggctaacacggtgaaaccccatctctactaaaaatacaaaaacttagctgggcgtggtggcgggcacctgtagtcccagctacttgggaggctgagg

SEQ ID NO: 100739 - DNA, 201 bp, Homo sapiens
ggtcactttccctttctgggtttctgttttcacctctgtaaaaaagagtaaggcttggtcagtgtttctcaaagcactctccttggaaaactacatctggkatatgttataaatgtccctgaagaggcctttgtggtaaaatacacttgagaaatgcagctctctgcatcgtgctcttggagatttccaatgcatattagc

SEQ ID NO: 100740 - DNA, 201 bp, Homo sapiens
aggaaataattataccattttttagccacgcgtggtggctcatgcctgtaatcccagcactttgggaggccaaggtgggcggatcacaaggtcaggagatsgagaccatcctggctaacacggtgaaaccccatctctactaaaaatacaaaaacttagctgggcgtggtggcgggcacctgtagtcccagctacttggga

SEQ ID NO: 100741 - DNA, 201 bp, Homo sapiens
ggtctcatccccaggacctgaaacattaatttatgagggtgaccttgacctcttgagggccagatggaagtgcagactcgattaattgcacagatgtttaytgagtgcttactatgtgccaggaatggtgaggagtaccgagagggagtgagacatcacccctgctctcagaagcagcagtgcggcggggagggcaggact

SEQ ID NO: 100742 - DNA, 201 bp, Homo sapiens
ttgcaagacataatttccaaaggaaataattataccattttttagccacgcgtggtggctcatgcctgtaatcccagcactttgggaggccaaggtgggcrgatcacaaggtcaggagatggagaccatcctggctaacacggtgaaaccccatctctactaaaaatacaaaaacttagctgggcgtggtggcgggcacct

SEQ ID NO: 100743 - DNA, 201 bp, Homo sapiens
aggtacaagtcagactggggttcagtacagagaccaccagtacagacagggatggaactaggatcagtaaagacagggacttggctaaatgttcaaggtaygaaggtgttggccaggctgttctctaactcctgacctcaagtgatccacctgctttggcctcccaaagtgctaggattataggtatgagccaccacgccc

SEQ ID NO: 100744 - DNA, 201 bp, Homo sapiens
cccaaatagtcaaaagttatggcaattcagatagatgtttgcaagacataatttccaaaggaaataattataccattttttagccacgcgtggtggctcaygcctgtaatcccagcactttgggaggccaaggtgggcggatcacaaggtcaggagatggagaccatcctggctaacacggtgaaaccccatctctactaa

SEQ ID NO: 100745 - DNA, 201 bp, Homo sapiens
agtacatatatatatgtagatagatagacagattttcttttaccatgttactattcctctgaagtaaatttaaaaggtatttaggtttatgggattttatkaaactaggattcagttgtaccactaaacttattaagataatcgaaggaagatagccagtaaagctagttataaaaatgtggcttagactgtactgacttt

SEQ ID NO: 100746 - DNA, 201 bp, Homo sapiens
tttgctcacgcaagcaaaccattgtcctgataggaaagtggtttgctcagacaaattagtttgcattaatttcctgaagccaacagtgaagctgtttcttsgttcagaggtttatcttcctcggcaagaattttctggagcagagaggaagtcactgacacaggtggtctcgatgctcactccaagagttgagttgtgtgg

SEQ ID NO: 100747 - DNA, 201 bp, Homo sapiens
atctgcagccaatttaggtgtactcccggcatggtgccctaattacacctttgttatccattatcagatggttcccctcatcagccaagcctgcgaccttmtcctggctcatttaaaacgctatgcggaatctggggacgcatttgacatccagaggtaaggctgctgcattacagatgagaaatcgagtttttgaatcac

SEQ ID NO: 100748 - DNA, 201 bp, Homo sapiens
catcaggtggaggaggcggccctggagagaggcctggtttccatcccagctctcccaccatctgcctgtggcctctgcaagctccccaagccctgggggcyttcgtttcctccctgcaaagggagctgccctcagaagcactcagctcggttcttggcatggggagtgattagctctgcacaaacctggtagtttcacgag

SEQ ID NO: 100749 - DNA, 201 bp, Homo sapiens
tgccctgccaccttcccctgggaagcattaaggttcaatgcttggctctgtgcttgtttttcttacccctatcccagaggactcatccccgtctgtgcgayaccatctccccacttctacgccaagctgctcacggtctcacccaggtggggtggtggagggggcctccagcaaaatcctgcaaaagctgatctccttccc

SEQ ID NO: 100750 - DNA, 201 bp, Homo sapiens
ttttgtttttctctttcaagtatcatttccatccataatggtcccactggcccggattttgcccaataagaaccgagacgaactgaatggcttttttaacraactcattaggaatgtgattgccttgcgggaccagcaagctgccgaagaggtaacgtattttaataggacacagccttgaaatggaatggagccgacttt

SEQ ID NO: 100751 - DNA, 201 bp, Homo sapiens
tctctttcaagtatcatttccatccataatggtcccactggcccggattttgcccaataagaaccgagacgaactgaatggcttttttaacaaactcattrggaatgtgattgccttgcgggaccagcaagctgccgaagaggtaacgtattttaataggacacagccttgaaatggaatggagccgactttggcatcact

SEQ ID NO: 100752 - DNA, 201 bp, Homo sapiens; identical to SEQ ID NO: 15726

SEQ ID NO: 100753 - DNA, 201 bp, Homo sapiens; identical to SEQ ID NO: 15729

SEQ ID NO: 100754 - DNA, 201 bp, Homo sapiens
acacagagatactaagaataaatcaggatagtcatacttatttttcttttttgagtggacttccagataggtagatgaggtaaatcacatttctgtttctrcaaatcatttgacaaagtcttccccagctgactcatcagtaaagcggtgcctggctgagtatttacttaggttcatgcacagatagcccaagatccaaaa

SEQ ID NO: 100755 - DNA, 201 bp, Homo sapiens
attttccagtggtgctcggaggccacgtaggactgtgccaggggctgtctggaggatgcaggaaggggaagtgtagcaaatggggcctcggtggaaagctrgggggtgggggagggtcagaagcaaaacttctctattttctgcctaagtttggaaccaactgaggtatggaaagaggttttaggcaaaggaaataaaatt

SEQ ID NO: 100756 - DNA, 201 bp, Homo sapiens
aattgacgttttaaaaagcacaactgtagatttagattttcacagtcttttgctagattctttaccaaagactattagtgagtagtaaccctgggattgtrtaaaactttattaaggatgagggaataaataggtttaatttcaggaaataaaactggggctaaattagtacttctctgacggaaaatgtataaataatgt

SEQ ID NO: 100757 - DNA, 201 bp, Homo sapiens
tagaaaatgaccaggggctgggtgaattttggaagcaagataaatgtggataaagagaaaaaaggattctgaggtttcaagtctggcttcagagttgaaasctccttctgccaggaggagtaatagggaagccaagaggataaaatgatttcccagtcctggaaaggcagcttaaaaccatccttccacttgctcttaagg

SEQ ID NO: 100758 - DNA, 201 bp, Homo sapiens
gatccatgttaaaaaaggaagtttttaacctggtctcagaggacacttgcaagagatgccaaggaaggcagtgtgatcatcccaagtcaagcagcctaacrtgagcctgtgagagagaaactgcaatccacccgcaacgtgtggtcatcaaagggcggcaaccccagttaccagcttgagattaaaaacccaaattaaaac

SEQ ID NO: 100759 - DNA, 201 bp, Homo sapiens
gttactggaaccattaaaaaatgtttcatacaatgaactgaaaaccacttcccgggaaattctacttctttattctactggggaagtaaaggcaaagtcartgtctcttcttcacagcagtttttaaatatttgaaaactgcattcactgtgttactaattaattgtcttaactttaggctcaacatgagtttatggtcaa

SEQ ID NO: 100760 - DNA, 201 bp, Homo sapiens
gagttttcctaattccaaaagcagctcccctttgcatatgaagagcagagggtttgaggctctaagccatggtgtagacaggatgcaggaaatgacagggrggctgcttctgggctgtggaagatgggtggaggggacaaaatgagaagtgtcctatattcctccccaaaacctcctggtttctggatgcttcctcaaact

SEQ ID NO: 100761 - DNA, 201 bp, Homo sapiens
cagcttcagggcattttcttctagatgaggcccctcttgatcgcttatagcagatataacgagggtgctgagcaaggctactttatcacctcattttttcytctagatgcttgtgtgtgtataactttgactcatgagttgtcaaagagattcatttttaaaatctgtactttaaaaggaagaccaccacagtggaatcct

SEQ ID NO: 100762 - DNA, 201 bp, Homo sapiens
ctgaggaggaggctcacaaatggaataagggaagatggggcccgtcagcgcccaggccagcttcagggcattttcttctagatgaggcccctcttgatcgyttatagcagatataacgagggtgctgagcaaggctactttatcacctcattttttcctctagatgcttgtgtgtgtataactttgactcatgagttgtca

SEQ ID NO: 100763 - DNA, 201 bp, Homo sapiens
cgacccaatggcggctgctgcttcttctgcctgggcacctcatcatccccagcagtagttcctaggtgtgagcgtggcaaggagcccagaaatacagaagsagcgtttaggggcctcacggtagcttcatgcctgactcttttctctcctcttccggcctggcctctaggcctttctggatcgccagccagtcagactcta

SEQ ID NO: 100764 - DNA, 201 bp, Homo sapiens
ctgagcccctgtaacttacagaaagcaccaaattgtcttttgtaggaaaatgatgtttaatgcatggtgaggcagaccctggcttgtggtgggcgaggagmctccccttggaggaggctcttggtgaaccacctctgggtgctcccttgcccagcctgctgccttgtttaggaatggatcttggttaacggcaaaggttat

SEQ ID NO: 100765 - DNA, 201 bp, Homo sapiens
gtgcgatctcagctcactgcaacctcctcctcccgggttcaagcgattctcgtgcctcagcctcctgagtagcagggactacaggcgcacgacaccatgcytggctaatttgggtatttttagtagagacggggtttcaccatgttggccaggctggtctccagctcctgacctcaggtgatccacacacctctgcctccc

SEQ ID NO: 100766 - DNA, 201 bp, Homo sapiens
cacagaaactgatcaatggacacagtacttcctggacctaaactcagccacgaatccatcagacaagaccttattagctgtcatgttgaataacaaagggrttaggctcttcaacatgaaaatgcggtggccgattctccactgacccgttataaacagcagagcagaaaaggaagttggtgcaggtggaccaggaagctg

SEQ ID NO: 100767 - DNA, 201 bp, Homo sapiens
tgcaaactgtcatccaattctttcttttattcttttttttttttttttttgagatggagtcttgctctgttgcccaggctggagggcaatggtgtgatctyggctcactgaaacttctgcctcttgggttcaagagatcctcctgtctcagcctcccaagtaactgggattacaggtgcccgccactatgcctggctaatt

SEQ ID NO: 100768 - DNA, 201 bp, Homo sapiens
ctcactttgagagctggctgagatcccaggcagggtggccagtggctgctccagggctgtgaagggctccccctgcagacggaggaactaggcctcccagygcctgtaactggaacgttggcggcttgagaatggacttgccctgaaggccggcctcctgctgctctgggaaaaagagggaacagaagaaagcaatccgcc

SEQ ID NO: 100769 - DNA, 201 bp, Homo sapiens
aaaggggtggtggcatgctggctcctccaaccccagctgtgagctgaaatactgtctcaaatccaaactgtctacatgatactgataagaaacaggattckaatctcaattttgctacccaaggattttgatgtaagagaatgtaaatttaaaaccaacattaggactgtgagtttgagactaaaactctggccttgctgt

SEQ ID NO: 100770 - DNA, 201 bp, Homo sapiens
ggccaggcctttgactgtggatgagattgtgggccaggccttcatcttcctcatcgctggctatgaaatcatcaccaacacactttcttttgccacctacstactggccaccaaccctgactgccaagagaagcttctgagagaggtagacgtttttaaggagaaacacgtgagtacaagttggatccagttacccatggg

SEQ ID NO: 100771 - DNA, 201 bp, Homo sapiens
cagcactttggaaggccgaggcaggcggatcacttgaggtcagaagttggagaccaacctggccaacatggtgaaaccccatctctactaaaaatacaaargttagccaggcatggtggcagatgcctgtaatcccagctatttgagaggctgaagcaggagaatcacttgaacccgggaggtggaggatgcagtgagccg

SEQ ID NO: 100772 - DNA, 201 bp, Homo sapiens
ggaaaagacaaaatgctgtgagatttgggctaacacgaacttctccctttgtcacgacccctccatcagatggcccctgagttctgcagcctcgaggaagkcctgccctatctggacatggtgattgcagagacgctgaggatgtacccgccagctttcaggtgtgtggtagccccctcccctgcccgagtccccacctcc

SEQ ID NO: 100773 - DNA, 201 bp, Homo sapiens
aacttctccctttgtcacgacccctccatcagatggcccctgagttctgcagcctcgaggaaggcctgccctatctggacatggtgattgcagagacgctraggatgtacccgccagctttcaggtgtgtggtagccccctcccctgcccgagtccccacctcctacccctaccccctgccccagcctgcaggtcagggcc

SEQ ID NO: 100774 - DNA, 201 bp, Homo sapiens
gactggcccaaggccatggctaagggttacagacccggaacagaaccctgccctttgcctcccttgtgggacccaaagccaggccaaggtcaaggggaggsgctgcagggggggcttcctcattgggtgtggacagcaaaggttgattttgagatttccccccagctctaattctcagtaatttggcctttgaaacaggag

SEQ ID NO: 100775 - DNA, 201 bp, Homo sapiens; identical to SEQ ID NO: 15797

SEQ ID NO: 100776 - DNA, 201 bp, Homo sapiens; identical to SEQ ID NO: 15798

SEQ ID NO: 100777 - DNA, 201 bp, Homo sapiens
ttctaaactgatgaaaggaaaaaatatgccaaaaactgagacaaagcacattgaactaatacttgtttaatttctttttttatctgagcagcaggactaaktttctcaaattcgatcagattgtatagcttagcaacccctccagggtcgccagaactagaggaatttctctaagcagaatctaaatgcctaacaaaaaac

SEQ ID NO: 100778 - DNA, 201 bp, Homo sapiens; identical to SEQ ID NO: 15800

SEQ ID NO: 100779 - DNA, 201 bp, Homo sapiens
gattgtacattggaggaattcattcagtgttgttattgtaacccactggctgataccgggtaaaacccatatgctctaagttaagtagacattagttcctrcagatttttaaacctgttagttcccccccaacacacacacatacacatacacacatttgcacattcatacacacgcaaccacgtgcatccaaactaccct

SEQ ID NO: 100780 - DNA, 201 bp, Homo sapiens
ggccagggtcggggtgggggcatggctgcctttgccggcacgttttgcagacattcaggtgataccgggttgttgcgagaccttctggcttttccattccycgcgctccccaccgtcgtgtttccgcctcactcatctttagtaactggcgaagcaacagggaggaaacggacctcactctttatcggagccatgcccgct

SEQ ID NO: 100781 - DNA, 201 bp, Homo sapiens
atcttcccccttctcatgattgtgtatcttccacgggtatggaattgtgtggggtgttattgaggctgtgtggtgtgctggcgtctgaatgcagcttgacrtaacagaaagcagttgctccctgcgttcttatttctacaatatacagagacttttctgtcctgtagatacatgggggatgatcataagtgagcttttata

SEQ ID NO: 100782 - DNA, 201 bp, Homo sapiens
aaacagtcacagatcaaacagtgtcaccccgccggagcgccacttggtgccccgcgcttccacccggggggcttggccgccaggatcgccgcttcttccartgcgaaatctaatgcaaacacattttgatcatggatttttggccggtcttgatcttccaacagaaaaaaatttgaaaaatacacaaaaagcacccccccc

SEQ ID NO: 100783 - DNA, 201 bp, Homo sapiens
ggatgaagggcgtgggaagggttaatcgtgggcaaaggattgcacagaacacaactggcagtgggtcggctcctgtccccccacttccagagcaaaccctrccgtcacttccacccccacgggcacctttcctggagtttgctttacagcctaaggcagaggcactgagacgggctccagctggctctgccctgggctgct

SEQ ID NO: 100784 - DNA, 201 bp, Homo sapiens; identical to SEQ ID NO: 15806

SEQ ID NO: 100785 - DNA, 201 bp, Homo sapiens; identical to SEQ ID NO: 15809

SEQ ID NO: 100786 - DNA, 201 bp, Homo sapiens
atggaagtaattccagatgaaagcaaacagccttattttgctaggaatccacgttaatgctttttatgagtgaggggggaagagctaaacaatggctcatytaatgaacacaagaatcccacaggtttggaatcaaagtagagataataaaccctgtaattaaacttacacagaaccttctagtatggaatctatttttga

SEQ ID NO: 100787 - DNA, 201 bp, Homo sapiens; identical to SEQ ID NO: 15812

SEQ ID NO: 100788 - DNA, 201 bp, Homo sapiens
cactgcgctccggcgcgccgagtgcacgggactcggagagaacttgtccacccaggcggagctgcgcggccggcgctgggacgaagggcgcggactgggcscgcctgccggggcccccgcccgacccggagaggccgaggtcacggtcgcaggcctgaggaatctcaactccaccgcggcgccgggcctgcgcggtcccgg

SEQ ID NO: 100789 - DNA, 201 bp, Homo sapiens; identical to SEQ ID NO: 15799

SEQ ID NO: 100790 - DNA, 201 bp, Homo sapiens
tttgctaggaatccacgttaatgctttttatgagtgaggggggaagagctaaacaatggctcatctaatgaacacaagaatcccacaggtttggaatcaargtagagataataaaccctgtaattaaacttacacagaaccttctagtatggaatctatttttgaaatctcacttcaaaacacaggacacttggaacatgt

SEQ ID NO: 100791 - DNA, 201 bp, Homo sapiens
ttttcccttcctctctcatcactgtgaagtattgctattctacatctgtcatccaccaacttcctggctaccaaacaatcaattatttgacactaagataytctcaagaaaaactcatcagttacggatggaacagtgaggcaggccaacatgcagctttaagaaaaaaacagtcaggatgttataataaaaacactttgg

SEQ ID NO: 100792 - DNA, 201 bp, Homo sapiens
gaaataaaaatacataacagctgagtggttggttttctgtcttggcttgattgcacagttcaaagccaggattacggaggtcattaagcagcattgtctckgtgacatgattagtcaggtagcaaagtccatttgtcacctgcaccagcaaattgagttaatactgcactacaggctatggggactgtataatatcaacgt

SEQ ID NO: 100793 - DNA, 201 bp, Homo sapiens; identical to SEQ ID NO: 15801

SEQ ID NO: 100794 - DNA, 201 bp, Homo sapiens; identical to SEQ ID NO: 15803

SEQ ID NO: 100795 - DNA, 201 bp, Homo sapiens; identical to SEQ ID NO: 15804

SEQ ID NO: 100796 - DNA, 201 bp, Homo sapiens; identical to SEQ ID NO: 15805

SEQ ID NO: 100797 - DNA, 201 bp, Homo sapiens
aatcacattttgtagaaaacctcatttctcaccaggggactggtagcgatagtgttccctctatatgttgttggaatttacatttggaaattgaattgtcyccttgagggtttttactcaaagtaacttggagaattgcttgtggaatgagggccagttgaaggagccccggcatcaagtcaactgtagagaatgctcatt

SEQ ID NO: 100798 - DNA, 201 bp, Homo sapiens; identical to SEQ ID NO: 15807

SEQ ID NO: 100799 - DNA, 201 bp, Homo sapiens
gcgcgtgcggcagcggcggcaggggctccccgccctgcccggggtccccggtcgtgccccgccgcccgggccgcgctcggggttgattcgtaccaccttgsaaggaagtgaacgcttcgcacgggaaggggaggcgcctgcgccggccgccgcgcagctccggggacgcccggggctgccgccggctcggggccgcagacg

SEQ ID NO: 100800 - DNA, 201 bp, Homo sapiens
cccgtacatacatgcgccggggggagatgtcaggcgctgctccaccttccaaacagtcacagatcaaacagtgtcaccccgccggagcgccacttggtgcsccgcgcttccacccggggggcttggccgccaggatcgccgcttcttccaatgcgaaatctaatgcaaacacattttgatcatggatttttggccggtctt

SEQ ID NO: 100801 - DNA, 201 bp, Homo sapiens
atgcctcttttttccctgcacacacgccaagaatccttttaatataaatagtatctccatatgaacaacctaacccctagtttcttccttgaatccttaasggaaaagaatggggacagttttcttttgagttgggaggggacagaatctttgcctcccgctttccctactctgttggaaaatctgctcccaccaccacgt

SEQ ID NO: 100802 - DNA, 201 bp, Homo sapiens
gtcccaattcaggaggtacaggggacctgggagtcaacattttccaggtgacccccccccaagacacacacacacacacacacacacacacacacacacamgcacacatgctgctggtggtaaggtcctggattattacgctgcctttggagagattcccatcttgcaaaatgctacttcatcaggcatttcagagcaacg

SEQ ID NO: 100803 - DNA, 201 bp, Homo sapiens
cgctaacatccgtatgagtcacctgttcaaatactggtcccaattcaggaggtacaggggacctgggagtcaacattttccaggtgacccccccccaagasacacacacacacacacacacacacacacacacacacgcacacatgctgctggtggtaaggtcctggattattacgctgcctttggagagattcccatctt

SEQ ID NO: 100804 - DNA, 201 bp, Homo sapiens
cccgctaacatccgtatgagtcacctgttcaaatactggtcccaattcaggaggtacaggggacctgggagtcaacattttccaggtgacccccccccaavacacacacacacacacacacacacacacacacacacacgcacacatgctgctggtggtaaggtcctggattattacgctgcctttggagagattcccatc

SEQ ID NO: 100805 - DNA, 201 bp, Homo sapiens
caaacctgtgctcaaaaacgcacggcagctgacccaccccaggtttagcaatggattagtaggtgagctgagttaagggatgctgcagctgtaaaacttcygagacaaaattaaaatggagcagcaaaagggggagcgagagagaaaagttgccctgatagtggcggagctgtcaggagcatgtgtgtttccatggtgagt

SEQ ID NO: 100806 - DNA, 201 bp, Homo sapiens; identical to SEQ ID NO: 15808

SEQ ID NO: 100807 - DNA, 201 bp, Homo sapiens
gggggtgggggtacaaggagggtctccaaatgcgcgaatccttcccagtgtgtctttcttgtctttctgtggctccctggcccttccgcccctgctccccrtcccgagccccgcattcgctttgcgcctgctgcgcttgaacttgtttctggtggagcggaaggcgcgagctgcggaccctcacgcagaggtaaggactca

SEQ ID NO: 100808 - DNA, 201 bp, Homo sapiens
agcgcgtgtgcgcgctccccaggctgctccggtgtgcgtcctgctccatctctccacctcttcccaggaagcggcaaaccacagcctggggcggggagagrgggggttgcattttccccttgcagagccccccagggcgcgcccatcccgaggtggggaggactgccgtcgcagaggggctggccgcccgggtgtcccccc

SEQ ID NO: 100809 - DNA, 201 bp, Homo sapiens
cctctgctaacccggtccagcgcgtgtgcgcgctccccaggctgctccggtgtgcgtcctgctccatctctccacctcttcccaggaagcggcaaaccacmgcctggggcggggagagggggggttgcattttccccttgcagagccccccagggcgcgcccatcccgaggtggggaggactgccgtcgcagaggggctgg

SEQ ID NO: 100810 - DNA, 201 bp, Homo sapiens
tgctcaagtgtaagataatggagcaaagagtttgtaggaatggctaagggacggtgggggatggggaaggcgtttttgataaacggtttgttgcttacggraggggaacagtgttttctgctgactctccaggccgagattcccaccccctcccccccgctttttttcttgtctttctttcttgtctttccttctttgttt

SEQ ID NO: 100811 - DNA, 201 bp, Homo sapiens; identical to SEQ ID NO: 15802

SEQ ID NO: 100812 - DNA, 201 bp, Homo sapiens
gttaacgaccgccgcgtggcgcgtgtcccgggcagctgggccagggtcggggtgggggcatggctgcctttgccggcacgttttgcagacattcaggtgayaccgggttgttgcgagaccttctggcttttccattccccgcgctccccaccgtcgtgtttccgcctcactcatctttagtaactggcgaagcaacaggga

SEQ ID NO: 100813 - DNA, 201 bp, Homo sapiens
attgtacattggaggaattcattcagtgttgttattgtaacccactggctgataccgggtaaaacccatatgctctaagttaagtagacattagttcctgmagatttttaaacctgttagttcccccccaacacacacacatacacatacacacatttgcacattcatacacacgcaaccacgtgcatccaaactaccctt

SEQ ID NO: 100814 - DNA, 201 bp, Homo sapiens
tgggctattttcaaacctgtgctcaaaaacgcacggcagctgacccaccccaggtttagcaatggattagtaggtgagctgagttaagggatgctgcagcygtaaaacttctgagacaaaattaaaatggagcagcaaaagggggagcgagagagaaaagttgccctgatagtggcggagctgtcaggagcatgtgtgttt

SEQ ID NO: 100815 - DNA, 201 bp, Homo sapiens
tttatcatcaatacagttggtgtggtcactttaaactggattaccaatatggttggtgtggtcgctttaaagtttgttttcattttttttctatttttaawtcttacgggtatatagaaggtgtatatatttatggggtacatgagatgtcttgaaacaggcatgcaatgtgaaataaataagcacatcatggagaatggg

SEQ ID NO: 100816 - DNA, 201 bp, Homo sapiens
agaactagaggaatttctctaagcagaatctaaatgcctaacaaaaaacccatcgtaacatatttgtttgtttgttttcttttagatttgttggtgttaaygcatctgacatcaactattcagcaggccgctatgacccctcagttaagcctccctttgacataggtttcgaaggcattggggaggtggtggccctaggcc

SEQ ID NO: 100817 - DNA, 201 bp, Homo sapiens
atgttcgacttggtaatgatttaagtagtaagacattttccttctacaccccctttcccaactcttccacttaaaattttatttatttatttatttatttatttgagacagagtcttgctctgtcaccaggctggagtgcagtggcgcaatcacggttcactgcaacctccgcctcccgagttcaagtgattctcctgcct

SEQ ID NO: 100818 - DNA, 201 bp, Homo sapiens
accttggattatctagagcgtcagcttgatcagtaggtttggagaaatttgaatttattgtaggttctttttttcttttttctttctttttttttttttttgctaatctctgccctctggcggtacaagttggagtagccgttttgtttgtttgtttgttttgtctttgagacggagtcttgctttgtcgcccaggctgga

SEQ ID NO: 100819 - DNA, 201 bp, Homo sapiens
aatgattcttctgaaattactaagcaagtctctaatatagagagccaggactaaaatccaggtctgttgcctcccaggtctttgctgttccagctctgcaytctgcttcctacttagatgaaaagatcagcccattgagtgtccctccagatcccaagaagagcttctgtgaagcaaactctcaccccttgaactgcattg

SEQ ID NO: 100820 - DNA, 201 bp, Homo sapiens
tcttttgtacattcagtgtttgagtttacccttttctttcatgacttgccaccattttcctgcaaccacttttgctcataaataaaataagcactttttaycaacattttatagagtataaacttttttcttttaaatctaattcttttgattaaattcttgctgtatatactatatacttttaaaaggaaatttatttct

SEQ ID NO: 100821 - DNA, 201 bp, Homo sapiens
gaccttggattatctagagcgtcagcttgatcagtaggtttggagaaatttgaatttattgtaggttctttttttcttttttctttctttttttttttttttgctaatctctgccctctggcggtacaagttggagtagccgttttgtttgtttgtttgttttgtctttgagacggagtcttgctttgtcgcccaggctgg

SEQ ID NO: 100822 - DNA, 201 bp, Homo sapiens
ccagggcgggcttgcctgtatagggttgggatgttaacccgctgtttgtgaaggtgcccgcggtggctctgacagccctggagttccagctgcccgtgctyggaagtccttccccttggccttagaaaagttaaagggcacaagaggataactagtggatgactttcaacccgaatgagctcagtgctttctatgacccaa

SEQ ID NO: 100823 - DNA, 201 bp, Homo sapiens
gttccagctctgcactctgcttcctacttagatgaaaagatcagcccattgagtgtccctccagatcccaagaagagcttctgtgaagcaaactctcaccycttgaactgcattgaaactaggcaaaggcctgtggacattcatttctttttcttcccgaaaagacttccccctcataacctatcaaagcaacttatcaca

SEQ ID NO: 100824 - DNA, 201 bp, Homo sapiens
ttttttttgttttttgttttttttgtttttttttgcgatggagtctggctctgtcgccaggctggagtgcagtggcgtgatctcggctcagtgcaaccgcygcctcccgggttcaagtgattcttctgactcagcctcctgagtagctgggactacaagcgcctgccaccatgcccagctaatttttgtgtttttagtaga

SEQ ID NO: 100825 - DNA, 201 bp, Homo sapiens
ttttttttttttgctaatctctgccctctggcggtacaagttggagtagccgttttgtttgtttgtttgttttgtctttgagacggagtcttgctttgtckcccaggctggagtgcaatggcacaatctcgtctcactgcaatgcaaccaagttggagtagcttaaaaaatgttgatccttttctccccgcccccagcaat

SEQ ID NO: 100826 - DNA, 201 bp, Homo sapiens; identical to SEQ ID NO: 15830

SEQ ID NO: 100827 - DNA, 201 bp, Homo sapiens
aatcagggcctctgataatgtggctgattccagaacagtaagcaaagttagctaagccaagaagatggtgaagggctttccaagcagaagaaaatgagcasgaaatgctcaaaggcatggaagtgcaggatgtatgtctagggaaggacaggcagttttgcactgatggagtggcaaatatcagctggagagacatgggag

SEQ ID NO: 100828 - DNA, 201 bp, Homo sapiens
ttcgacttggtaatgatttaagtagtaagacattttccttctacaccccctttcccaactcttccacttaaaattttatttatttatttatttatttatttgagacagagtcttgctctgtcaccaggctggagtgcagtggcgcaatcacggttcactgcaacctccgcctcccgagttcaagtgattctcctgcctcag

SEQ ID NO: 100829 - DNA, 201 bp, Homo sapiens
gttcgacttggtaatgatttaagtagtaagacattttccttctacaccccctttcccaactcttccacttaaaattttatttatttatttatttatttatttgagacagagtcttgctctgtcaccaggctggagtgcagtggcgcaatcacggttcactgcaacctccgcctcccgagttcaagtgattctcctgcctca

SEQ ID NO: 100830 - DNA, 201 bp, Homo sapiens
gatacaatatacgaggatgaagatgtaaaagaagccataagaagacttcctgagaacctttataatgacaggatgtttcgcattaagagggcactggaccygaacttgaagcatcagatcttgcctaaagagcagtggaccaaatatgaagaggtagcacagctttatctacctgacagtgttgctcattaaggatggagt

SEQ ID NO: 100831 - DNA, 201 bp, Homo sapiens
tcttgttattgaagacctgttgagtgtttgggatatatcagtacgtgatggtaacatataatatttcattcattctttaggaaaatttctaccttgaaccrtatctgaaagaggttattcgggaaagaaaagaaagagaagaatgggcaaagaagtaatcatgtagttgaagtctgtggatgcagctgttatgaagatggt

SEQ ID NO: 100832 - DNA, 201 bp, Homo sapiens
ttgtagcaattaacagtgtgacaattatcagtttcagcatcaggcaagtggctggatggtattcgaaaatggtattacaatgctgcaggattcaataaacygggtaagcagctgtgctgtttaatgttttttgttgttgttgttgtttctttgtttttttttttgtttttctgagagtattgcttttgcaagtgttactgt

SEQ ID NO: 100833 - DNA, 201 bp, Homo sapiens
gcacgcaaaatgccccgcctactccattggcctcaccctggccgagaggtgcttacgcaggtgctgaacggcagtcgtcagaactgcgcctgcgcaagcgkcctttctctgttcgcgatgtgacgtaacgcgcctgcggactgggcccagcttgtcctctatgacttacccagaaggcaacgcttctctttctggtcaaaa

SEQ ID NO: 100834 - DNA, 201 bp, Homo sapiens
atcaggcaagtggctggatggtattcgaaaatggtattacaatgctgcaggattcaataaactgggtaagcagctgtgctgtttaatgttttttgttgttrttgttgtttctttgtttttttttttgtttttctgagagtattgcttttgcaagtgttactgtggttccaaaaaccatttcagttcttgtatacatcagaa

SEQ ID NO: 100835 - DNA, 201 bp, Homo sapiens
tgttcgacttggtaatgatttaagtagtaagacattttccttctacaccccctttcccaactcttccacttaaaattttatttatttatttatttatttatttgagacagagtcttgctctgtcaccaggctggagtgcagtggcgcaatcacggttcactgcaacctccgcctcccgagttcaagtgattctcctgcctc

SEQ ID NO: 100836 - DNA, 201 bp, Homo sapiens
ggacgtgggtgggtgagggcagggctgacaggtgtggacgtgggtgggtgagggcagggctgacaggtgtggacgtgggtgggtgagggcagggctgacargtgtggacgtgggtgggtgagggggcagggctgacggatgtgggtgggctaaggggacagcgctgacaggtgtgggcctggtgggcagaggggacagtgc

SEQ ID NO: 100837 - DNA, 201 bp, Homo sapiens
tgagggcagggctgacaggtgtggacgtgggtgggtgagggggcagggctgacggatgtgggtgggctaaggggacagcgctgacaggtgtgggcctggtrggcagaggggacagtgctggtggagccccgtgttaacagccaggtggaaaggggcatgtgtgcctgcagctgggaaaggcggaaacccaggagtggagag

SEQ ID NO: 100838 - DNA, 201 bp, Homo sapiens
tgtatataatttgatctatgtaatttaatcttaggtttttaataaaggaagcattgctttcttgcagtaagagcaatattttaggaaacattttctcaccyaacaaatgtagctaattagctgttcagaaatcattatgggccatgtgtggtggctcatgcatgtaatcccagcactttgggaggctgaggtgggtgcatc

SEQ ID NO: 100839 - DNA, 201 bp, Homo sapiens
ctggttttgtctgcgttttgttcagttaattcttttctatgtaacatggacatacttgtgacgctgaactgtgcacatcaatcgccccatctgaaggaccygttttgtcccactgcctcgatgccgggattgaaaagggcccttttagcttaattggtgcctcctggctccttaggaagagggattggtggaaaacaagtt

SEQ ID NO: 100840 - DNA, 201 bp, Homo sapiens
aggaaggcgcagtttactcgacgtgtaaataggaatagccttaactagctgtgggtgtgcggacagggaagggaaagaggagaaacatctgcagagacaaygccgggtgcacagcccgtgggcggggccgcgggtgcaggggaacccgtgcctctgaagggctgggaaggccagggtgttgggggaggagaccgggcctat

SEQ ID NO: 100841 - DNA, 201 bp, Homo sapiens
cctgcccacagccatctggaggcctaaccatctccccgtgatgctgtgcttcagcagtcacactgctgtttcactttcatgttccacccagtacacctggstctgccttctagatagcagtagcagaattagtgaaagtactaaaagtctttgaaatgcatagaagaaataatggcgtaagctggcctctctctctctccg

SEQ ID NO: 100842 - DNA, 201 bp, Homo sapiens
gttgacaaatgaaaatgcagtttcacttatctggctcagattatgcccttgatcatttctttctttttttttttttttttttttttttgagatggagtctygctctatcacccaggctggagtgcagtggcgcgatctcggctcactgcaagctctgcctcccgggttcaagctattctcctgcctcagcctcctgaggag

SEQ ID NO: 100843 - DNA, 201 bp, Homo sapiens
ttagcgcgactggtgcccaggctgcccagctcacacaagctcttctctgggaaaaggagagcttgtcctttgtttgtttgtttgttttaactgatggtttygttttgtttttttttaagatggagtctcactctgtcgccaggctggagtgcagtggcgcaatctcggctcactgcaacctccgactccctggttcaagcg

SEQ ID NO: 100844 - DNA, 201 bp, Homo sapiens
gctgggggctgggagatatgggaccagttgcttcttgagggggctcaggggcagagcaggagggttgggaaggggccgggtgggagccatagacatgaggrcctcatcctccagcagcgctgagctctgagtaggccggggtgtttgcttgttgctgtccccgtggtactggggagaggctaggcacagagaccctccgag

SEQ ID NO: 100845 - DNA, 201 bp, Homo sapiens
tgcgctcaggatagtccagaactgtcagatcttttctgttgaagtttaatttctaatacacttgtatttaaaatcaggttgcagattttaaagatgccctygccagagtatatggagtgatacccaaaatccagtgccttccaccaagccaggttagacagttatgttttgtcttcctttttttctcaagaagacaggttc

SEQ ID NO: 100846 - DNA, 201 bp, Homo sapiens
ggagtctcactctgtcgccaggctggagtgcagtggcgcaatctcggctcactgcaacctccgactccctggttcaagcgattctcctgcctcagcctccygagtagctgggattacaggcatgtggcaccgtgcccagctaatttttgtatttttagtagagacagggtttcaccaggttggccaggatggtctcgatct

SEQ ID NO: 100847 - DNA, 201 bp, Homo sapiens; identical to SEQ ID NO: 15890

SEQ ID NO: 100848 - DNA, 201 bp, Homo sapiens
tgttcagttaattcttttctatgtaacatggacatacttgtgacgctgaactgtgcacatcaatcgccccatctgaaggacccgttttgtcccactgcctygatgccgggattgaaaagggcccttttagcttaattggtgcctcctggctccttaggaagagggattggtggaaaacaagttaaactgggatgtaggtac

SEQ ID NO: 100849 - DNA, 201 bp, Homo sapiens
tgaggcttaacaaagtccaatgcttgcatatctaagaattagtccatatcagacaggagagaatatttcttaaggaaattgtgctcctgtcttcaaatacrttaagaaaaaagagaccaggcacagtggttcacacctgtaatcccagcactttggaaggccaaggcaggtggatcacttgaggtcaggagttcgagacca

SEQ ID NO: 100850 - DNA, 201 bp, Homo sapiens; identical to SEQ ID NO: 15834

SEQ ID NO: 100851 - DNA, 201 bp, Homo sapiens
agagacactcaaatttattattctggttttgtctgcgttttgttcagttaattcttttctatgtaacatggacatacttgtgacgctgaactgtgcacatyaatcgccccatctgaaggacccgttttgtcccactgcctcgatgccgggattgaaaagggcccttttagcttaattggtgcctcctggctccttaggaag

SEQ ID NO: 100852 - DNA, 201 bp, Homo sapiens
acaaattacaccaattgaccttttccctctcctcccctcccctgccctgtgcccaagccactgcatgaggggcctgagcgaggggctccgaccggagcaarccctgacactcccccatgccagacctgtgcagatcctgacgctcgcccgccagccccgcctcgtcccaggccccaggacttctgggtcagatgaccgacg

SEQ ID NO: 100853 - DNA, 201 bp, Homo sapiens
tggtgggcagaggggacagtgctggtggagccccgtgttaacagccaggtggaaaggggcatgtgtgcctgcagctgggaaaggcggaaacccaggagtgkagagatttgagaagaggcaccgtaggactgcatatccccggggggtccaggacaggaaagctgaaatgctttttgagtgggggcgtgggtgggtcgtggg

SEQ ID NO: 100854 - DNA, 201 bp, Homo sapiens; identical to SEQ ID NO: 15868

SEQ ID NO: 100855 - DNA, 201 bp, Homo sapiens
tggtggagccccgtgttaacagccaggtggaaaggggcatgtgtgcctgcagctgggaaaggcggaaacccaggagtggagagatttgagaagaggcaccrtaggactgcatatccccggggggtccaggacaggaaagctgaaatgctttttgagtgggggcgtgggtgggtcgtgggtctgtggtggtgtgagccgctg

SEQ ID NO: 100856 - DNA, 201 bp, Homo sapiens
gtgacatttgctggtgtcagaagcttggcaagaggggaggatgatcagaccctgcatggacagttcgaattggagctctctgcagagtccaggaagagagstctggatgggagggaagccatggggtggaaaagatagcttccaatggaaggcagtgaaaactcgccataagtgaaggagaagaaggaggccaaggagagg

SEQ ID NO: 100857 - DNA, 201 bp, Homo sapiens
gtgtatctaacctctagctcttttttccatgctgtgaaataaatggataggttgccctcaaccctgaagtctcttccagctcttaaaatctgcactaccargtatatacactaagaaacgtacacagacctatacactttgatttgtatatagtttgtgtatataatttgatctatgtaatttaatcttaggtttttaata

SEQ ID NO: 100858 - DNA, 201 bp, Homo sapiens
gaccgcgggcctgcagggtgcgcgggtcgggctgggggctgtccctggagagtagagtggccctggggcccgcacgcccacttgctggcgggggatggcgmagacacgggcggtccccccgagggcggtcctcacgggtggtctaggttagctcggacccgggagtgtgggagtggcgcagagctgcgggaaaaggcgcgg

SEQ ID NO: 100859 - DNA, 201 bp, Homo sapiens
agcgccgaggtggcgggaggctgcggggagcctgggcggccaagcaccatctgcagtcaggagctcccgggcagcttgcagggcgcagtttttgaaagcgrgtgctgcgtgcggaccgcgggcctgcagggtgcgcgggtcgggctgggggctgtccctggagagtagagtggccctggggcccgcacgcccacttgctgg

SEQ ID NO: 100860 - DNA, 201 bp, Homo sapiens
ctttcattgtttacttttaggatgaggaagtacagacaattggtcagatagaactgtgcctcactaagcaagaccagcagctgcaaaactgcaccgagccrggggagcagccgtcccccaagcaggaagtctggctggcaaatggggccgccgagagccggggtctgagagtctgtgaagatggcccagtcttctatcccc

SEQ ID NO: 100861 - DNA, 201 bp, Homo sapiens
gggtgggtcgtgggtctgtggtggtgtgagccgctgctcctcagagtagtcctggcttccttgttgtgtagcagtaggaacacctttgcattgtcccaaasggaagtagcccaatttgcacactcaatcatatcgtgccctaggacatctcggagagctgatggggctgaagccagcatggtggggcaggagaggtggggt

SEQ ID NO: 100862 - DNA, 201 bp, Homo sapiens
ttttaggatgaggaagtacagacaattggtcagatagaactgtgcctcactaagcaagaccagcagctgcaaaactgcaccgagccgggggagcagccgtmccccaagcaggaagtctggctggcaaatggggccgccgagagccggggtctgagagtctgtgaagatggcccagtcttctatcccccacctaaaaagacc

SEQ ID NO: 100863 - DNA, 201 bp, Homo sapiens
atccccggggggtccaggacaggaaagctgaaatgctttttgagtgggggcgtgggtgggtcgtgggtctgtggtggtgtgagccgctgctcctcagagtrgtcctggcttccttgttgtgtagcagtaggaacacctttgcattgtcccaaacggaagtagcccaatttgcacactcaatcatatcgtgccctaggacat

SEQ ID NO: 100864 - DNA, 201 bp, Homo sapiens
gctttcactgcggcgggtggtgaaacgacggttcttcctctttttgagtatcctgttctgaatcccttcccttggctcgccctccgcgtgtgtgtgtgtgygcgcgtgtgtgtgtgcgcgtgtgtgtgtgtgcgtgtgcgtttgtgtgtgcgtgtgtgtgtgcgtgcgtgtgcgtgtgcgtgcgtgcgtgtgtgtgcgtgt

SEQ ID NO: 100865 - DNA, 201 bp, Homo sapiens
cctccgcgtgtgtgtgtgtgtgcgcgtgtgtgtgtgcgcgtgtgtgtgtgtgcgtgtgcgtttgtgtgtgcgtgtgtgtgtgcgtgcgtgtgcgtgtgcgkgcgtgcgtgtgtgtgcgtgtgtgtcgtgtgtgcgcgtctgtgcgtgtgtgtcgtgtgtgcgcgtgtgtgtgtgtgcgtgtgtgcgtgtgtgtgcgtgcgt

SEQ ID NO: 100866 - DNA, 201 bp, Homo sapiens
tgtggtagcattgaaggcttgcgggagttgtgggtctttcctaggaatggtacattccccaaggtcattagttgcaaatccatcacaagttctttttttcytttcttttctttttttttttttttttgagacagagttttgctcttgttgcccaggctggagtgcagtggcgcaatcttggctcactgcaacctccacctc

SEQ ID NO: 100867 - DNA, 201 bp, Homo sapiens; identical to SEQ ID NO: 15888

SEQ ID NO: 100868 - DNA, 201 bp, Homo sapiens; identical to SEQ ID NO: 15880

SEQ ID NO: 100869 - DNA, 201 bp, Homo sapiens
gctctggatgggagggaagccatggggtggaaaagatagcttccaatggaaggcagtgaaaactcgccataagtgaaggagaagaaggaggccaaggagakggggcaggaatggcagccggcagccaggcggtcagtggagcaggtgctcaggaggcccacaggagagcttcgtggaaggagtggacagtgtctgaggcaa

SEQ ID NO: 100870 - DNA, 201 bp, Homo sapiens
ttaactcttttcttcacaagcgtaccttcaaagtcatctttaaaattaaggggtcatgaatgtattcaccaggattgagcccttgctgctgttttagtaartattgttatctcgaccccacaaattacaccaattgaccttttccctctcctcccctcccctgccctgtgcccaagccactgcatgaggggcctgagcgag

SEQ ID NO: 100871 - DNA, 201 bp, Homo sapiens
tctgcagtcaggagctcccgggcagcttgcagggcgcagtttttgaaagcgggtgctgcgtgcggaccgcgggcctgcagggtgcgcgggtcgggctgggrgctgtccctggagagtagagtggccctggggcccgcacgcccacttgctggcgggggatggcgcagacacgggcggtccccccgagggcggtcctcacgg

SEQ ID NO: 100872 - DNA, 201 bp, Homo sapiens
ctcttttcttcacaagcgtaccttcaaagtcatctttaaaattaaggggtcatgaatgtattcaccaggattgagcccttgctgctgttttagtaagtatwgttatctcgaccccacaaattacaccaattgaccttttccctctcctcccctcccctgccctgtgcccaagccactgcatgaggggcctgagcgaggggc

SEQ ID NO: 100873 - DNA, 201 bp, Homo sapiens
atagatcgtggcccttcaatttagaagagattaaggtattgacttttaattatatttctactgcagagtgttgacctagattaactcttttcttcacaagygtaccttcaaagtcatctttaaaattaaggggtcatgaatgtattcaccaggattgagcccttgctgctgttttagtaagtattgttatctcgaccccac

SEQ ID NO: 100874 - DNA, 201 bp, Homo sapiens
tcctttactaagcagtggcctgtctgcattactcctggacggtttaacacaatttcttttcccttctaaagaaatttgaactctgactcctcttacctgcrtcttctttcttaagcatcctgcctgggataaggaattcccaattagaatttctctttttattctttgcagacttcaatgaaagtgttttctaaggtcatg

SEQ ID NO: 100875 - DNA, 201 bp, Homo sapiens; identical to SEQ ID NO: 15842

SEQ ID NO: 100876 - DNA, 201 bp, Homo sapiens
gtgaggagtcagggccgacaggtgtggacgtgggtggatgagggggcagggctgacaggtgtggacgtggatgggtgagggcagggctgacaggtgtggaygtgggtgggtgagggcagggctgacagatgtggacgtgggtgggtgagggcagggctgacaggtgtggacgtgggtgggtgagggcagggctgacaggtg

SEQ ID NO: 100877 - DNA, 201 bp, Homo sapiens; identical to SEQ ID NO: 15891

SEQ ID NO: 100878 - DNA, 201 bp, Homo sapiens
ggagaatcaattgaattcaggggatggaggttgcagtgagccgagattgcaccactgtactccagcccgggcaacagggcaagattccatctcaaaaaaaaaaaaaaaaaaagaagatgtcttctaaaatgatgatctcatgcctatgacttagggaggagagaaagtgagacttagcatgtgaggctgagacctcagtca

SEQ ID NO: 100879 - DNA, 201 bp, Homo sapiens
ataagtccagaattagatgtgtgaggatggagttaaagttctagacagtgtaagtgcgtttgctactgaaaatgaaatgaaaatcctactagctgatcttytgccatacgccaggcactttctgacatgttttatctgtcatctcctggagtcctcctcaccattgaaaggaacagactctcgctgttctcatgctggatc

SEQ ID NO: 100880 - DNA, 201 bp, Homo sapiens
gaaaactcacagggcgggaatttattagagatactagcagaggcgttcctttgagatacccgtaccttatatgtcatacggagtcttcactcacacacacrccctcatctttccttaggggtgccaacagttcctgtgtgtaaccagtatataccagggtaactggacctggaccccagggagggggtggtaactgaggcc

SEQ ID NO: 100881 - DNA, 201 bp, Homo sapiens
tctgtagcaaaatgtccttgttaaggagtgtatttcctactgggcagccatggtgaagggttctgtttgagcccaggtgtcctcctaggcagtgagggctrtccctggtgccccctctgatgagatgcttgtgtcaaagatgctcagtctgcctgtcgggttctcagtgttctgggctctcccacagctccatgcaggcag

SEQ ID NO: 100882 - DNA, 201 bp, Homo sapiens
tagttcaggttatgttttgttgccaaatgaattacaaaaaactaccaggtttcaggcttttatgggtttcacgaatgcaggggagggatcgtgggtctgcrtttctcttgagcatccttaggagaaaggtgcttcgtggctcagtggcttcccttcagtgaggccctccctggctgcactcctagcttgccctgcctccgc

SEQ ID NO: 100883 - DNA, 201 bp, Homo sapiens
ttccaggagagtgacccgagtaggtcccctcctaattctggagccgtccctcgggctgcgcagtggagcgccgaggtggcgggaggctgcggggagcctgsgcggccaagcaccatctgcagtcaggagctcccgggcagcttgcagggcgcagtttttgaaagcgggtgctgcgtgcggaccgcgggcctgcagggtgcg

SEQ ID NO: 100884 - DNA, 201 bp, Homo sapiens; identical to SEQ ID NO: 15835

SEQ ID NO: 100885 - DNA, 201 bp, Homo sapiens; identical to SEQ ID NO: 15864

SEQ ID NO: 100886 - DNA, 201 bp, Homo sapiens
ccggaagtcttcctcgggcagcaggtgggaagtgggagccggagcggcagctggcagcgttctctccgcaggtcggcaccatgcgccctgcagccctgcgyggggccctgctgggctgcctctgcctggcgttgctttgcctgggcggtgcggacaagcgcctgcggtgagttaccttgcgaggtaaagtggggagcgtgg

SEQ ID NO: 100887 - DNA, 201 bp, Homo sapiens
ttctcccggaagtcttcctcgggcagcaggtgggaagtgggagccggagcggcagctggcagcgttctctccgcaggtcggcaccatgcgccctgcagccytgcgcggggccctgctgggctgcctctgcctggcgttgctttgcctgggcggtgcggacaagcgcctgcggtgagttaccttgcgaggtaaagtggggag

SEQ ID NO: 100888 - DNA, 201 bp, Homo sapiens
cctcctgagtagctgggattacaggcatgcgccaccatgcccggcttattttgtatttttagtagacatggggtttccccatgttggtcagactggtctcraactcctgacctcaggtgatccacctgcctcggcctcccaaagtgctgggattacaggtgggagccaccgcgcccagcccacaagttctaatccatatgg

SEQ ID NO: 100889 - DNA, 201 bp, Homo sapiens
ctaggttagctcggacccgggagtgtgggagtggcgcagagctgcgggaaaaggcgcggggcgcctgcgtggcgaaggaacacagccgcctgacacgccckcaaggcccgcggagctgctcctgcctcggcctctctgagccaaccacggggcggggcgtgaacgccgggcggggacgtgccgttctggggggcgtgtcca

SEQ ID NO: 100890 - DNA, 201 bp, Homo sapiens
ccagccctagtgtagcttcctcatggatgtgttgttgtaagcaatgtattgtgaagtagccctggctttagcttgtgttattagtgcagtacctgtatctygttggcatatgttgcaactagctgctaaatgtattttaatagggttcctaagtgtatttgaataaacaaagagccaatcattttcttgttatattttctc

SEQ ID NO: 100891 - DNA, 201 bp, Homo sapiens
ggcaggggaaggtgtcacagcactgctgtggaatgtgtctttgggcataaccagccccgaggactggctgcctgttgtggccgagcgggctgggtgacagygggtgggtgagcctgggacatccgctcctggctgcatctgctcttggtgggtgagtcagggtgtctctcagcacagagggcaacacgctgagtcacttcg

SEQ ID NO: 100892 - DNA, 201 bp, Homo sapiens; identical to SEQ ID NO: 15867

SEQ ID NO: 100893 - DNA, 201 bp, Homo sapiens; identical to SEQ ID NO: 15887

SEQ ID NO: 100894 - DNA, 201 bp, Homo sapiens
tgaattaatgcacatttagattgtgtttttaagactgcatataagtgctttataagtggttgcatgaatgttatttattaaaacttcatgaattcatcacyaataaagctgaggaaatctgattcccattttgtcttttcatgctaaagatgataaacatctgatgacacgccagtcattctgaaggtggctgtcaatctc

SEQ ID NO: 100895 - DNA, 201 bp, Homo sapiens
ttgaggctttagaaacaagatttaaaaaaaaatctgtagcaaaatgtccttgttaaggagtgtatttcctactgggcagccatggtgaagggttctgtttsagcccaggtgtcctcctaggcagtgagggctgtccctggtgccccctctgatgagatgcttgtgtcaaagatgctcagtctgcctgtcgggttctcagtg

SEQ ID NO: 100896 - DNA, 201 bp, Homo sapiens
agcagggcaggcagtgttcctcctcccacagcactcagtgctgaatgaatgattgaagggatggatgggtggatgaattttttctgtaactttaaaaaaasttcttgaaaaataagtttcttatgttttaacagtgacaaccatgagtggaaaaaactaattatggttcagcactggcctgagacagtatgcgaggtgagt

SEQ ID NO: 100897 - DNA, 201 bp, Homo sapiens
ctcacaggaagcatgagtgggaaaagcatgggacctgcgccgcccaggtggatgcgctcaactcccagaagaagtactttggcagaagcctggaactctayagggagctggacctcaacaggtgggtgcgcccttcccccggctgcacttcccagtggggatctctgctgtcgcccaagcctgacagctggatccagggga

SEQ ID NO: 100898 - DNA, 201 bp, Homo sapiens
ccacattctgtcaggagcacgcaggctttatgttttgcctctagcactgagtggtagtgactttcgcttctacttcctcactgatttttctgatgacaaaygaaaatgaaattttgcttatctggctcaaattatgctcttgctcacttctgtacacgagattgccccgttttcagttttgcagacttaatgttgcgctcc

SEQ ID NO: 100899 - DNA, 201 bp, Homo sapiens
ggcggtcctcacgggtggtctaggttagctcggacccgggagtgtgggagtggcgcagagctgcgggaaaaggcgcggggcgcctgcgtggcgaaggaacrcagccgcctgacacgccctcaaggcccgcggagctgctcctgcctcggcctctctgagccaaccacggggcggggcgtgaacgccgggcggggacgtgcc

SEQ ID NO: 100900 - DNA, 201 bp, Homo sapiens
agtggacagggctgagaaagctttatgggccgcgaaaggcagagtagttgttggtggatgagggtggctgtggcaggtggcgtttcaggtgagacagctcrgggcccagaaagacactgggaggaggagagctctgctctccagagaaacaggagcagagaggaaaacagagccgcagcgagcggcttgtggtctggggat

SEQ ID NO: 100901 - DNA, 201 bp, Homo sapiens
aaagttcttgaaaaataagtttcttatgttttaacagtgacaaccatgagtggaaaaaactaattatggttcagcactggcctgagacagtatgcgaggtragtgtttctgccttgacgggccctggggcctggggagccctgtgaagaggggtttgtgtgcacgtgcccgtccagggcacccacgctgctggtgcgggag

SEQ ID NO: 100902 - DNA, 201 bp, Homo sapiens; identical to SEQ ID NO: 15883

SEQ ID NO: 100903 - DNA, 201 bp, Homo sapiens
ataggaatagccttaactagctgtgggtgtgcggacagggaagggaaagaggagaaacatctgcagagacaatgccgggtgcacagcccgtgggcggggcsgcgggtgcaggggaacccgtgcctctgaagggctgggaaggccagggtgttgggggaggagaccgggcctatgggactggccctggctacgccaaggtgg

SEQ ID NO: 100904 - DNA, 201 bp, Homo sapiens
gtttactcgacgtgtaaataggaatagccttaactagctgtgggtgtgcggacagggaagggaaagaggagaaacatctgcagagacaatgccgggtgcasagcccgtgggcggggccgcgggtgcaggggaacccgtgcctctgaagggctgggaaggccagggtgttgggggaggagaccgggcctatgggactggccc

SEQ ID NO: 100905 - DNA, 201 bp, Homo sapiens; identical to SEQ ID NO: 15884

SEQ ID NO: 100906 - DNA, 201 bp, Homo sapiens
gagatagggagggattgctggagtccttggttcctacggaagaaggaccgtggaggaggagctggaacttaagcactgtctttgacccacactgaaggatmtgcctccagggcctgagaccaggctgctctgcattcagggaggcatttacatgacaaaacgtgggtgtgtccctgcacactgaatgtaaatatgggtgga

SEQ ID NO: 100907 - DNA, 201 bp, Homo sapiens
acagctaaactaagaaaaatatagataccattgtcagtctaacccctcagaaaattaaatactggtaattatatatgcaattcatatactttgaaaaaatraacatggtgatatttcatagcctattttattcacatattaatataacatgaacttctttttgcttaatttttgacctcctgttttaatttacaaaatgac

SEQ ID NO: 100908 - DNA, 201 bp, Homo sapiens
agttgacagccacatcaaaatataatttattaagccaaacatttattttttattgtttagagacagaggctcactctgttgctcaggctggagtgcagtgrcactatcgtagttcactgcagcctcaaactcctgggctcaatctatcctcccacctcagcctcccaagtagcttggacagcaggtgtgtgccaccacagc

SEQ ID NO: 100909 - DNA, 201 bp, Homo sapiens
tctttaaaatatagataatgaaaagtaagaaaatggaagttacctctgatttcatcactataactactgttaacattttgatatgtacctaccacaaattrtaatttttaatgagctctatgtttttaccaactagaaagctaacattcttgtagtatagtcctgaaactttgaattatatcgcagtgcaaaaggaaggaa

SEQ ID NO: 100910 - DNA, 201 bp, Homo sapiens
ttgtatcaataaaaagctctttcacgcagtagaaattctcttcttggcattcagctattctattacttgttttctcttggtttttatgctttcaactaaarcagcagtgactaaaggcttaagttaataactcatattgaaatacctcaactgcatagactggaaaggataaatgcccttacaaaattagcattctttaaa

SEQ ID NO: 100911 - DNA, 201 bp, Homo sapiens
aaggataaatgcccttacaaaattagcattctttaaaataaagaaatctccactggaatgaggtttgcaatgaacagaaccattgtaaaacatttctgctstcatggtaacattggctcacctagacaaataaaattaattttatatagtcatagtctttctaaaatagtatatctctatagtggttgatttcacatttga

SEQ ID NO: 100912 - DNA, 201 bp, Homo sapiens
taataaatattgtaaaataaaatgtaataaaataaaaaagttaaaatgcaggggctaggggcaggcatggtggctcacgcctgtaaccccagcactttggraggcccatataggcagatcactgaggtcaggagttcgaaaccagcctggccaacatggcgaaactccatctctactaaacatacaaaaattagctgggca

SEQ ID NO: 100913 - DNA, 201 bp, Homo sapiens
ccagcctgaccaacatggagaaaccccatctctactaaaaatacaaaattagccgggtgtggtggcacatgcctgtaatcccagctactagggagggtgasgcaggagaatcgcttgaacctgggaggcggagtttgcggtgagccgagatcgtgccattgcactccagcctgggcaataagaacgaaactccgtctcaaa

SEQ ID NO: 100914 - DNA, 201 bp, Homo sapiens
aaactctctctaaaaaaaaaaaaaaaaaaaagcaggggctggtttattgctacgcatgcttattattaaataaacactgtcatcatatcctgcaggatgcraatttgttctttaccaaaattaattaccgaatattgtgtacttttaagactgctcttaaataaatgaaatagaaataatttcaggtccttagaatgtatg

SEQ ID NO: 100915 - DNA, 201 bp, Homo sapiens
tcattcattaaatgtttattgagtgccatctgcaatgtaccctagtaggttgctcattcatttcttctttgctttaaaagtagcatttctgtgagcctttrgagcagtttatatgcactggggcaccataactggtatctaagccagagaactaggcacccaaatgattaaattgtgatattctgtctgctttattttttt

SEQ ID NO: 100916 - DNA, 201 bp, Homo sapiens
attttatatagtcatagtctttctaaaatagtatatctctatagtggttgatttcacatttgaattaaattagcactgctttacgattaggatgtaagagrgtcttttactacagtatggttagatgacagggatgtttataaaaatttattgcagaccgggcgcggtggttcacgcctgtaatcccagcactttgggagg

SEQ ID NO: 100917 - DNA, 201 bp, Homo sapiens
cctagtaggttgctcattcatttcttctttgctttaaaagtagcatttctgtgagcctttagagcagtttatatgcactggggcaccataactggtatctragccagagaactaggcacccaaatgattaaattgtgatattctgtctgctttatttttttttctagtttccacgttccttttcctgtttaaggacatgtt

SEQ ID NO: 100918 - DNA, 201 bp, Homo sapiens
atatagagcttttatgaaaattactttcacaatttcagctgccctttgggctttaaggaagcagtagctgcagccaagactgattcagtcagacattgccyatgactttcactagacgtgtgctccatagccacctttctgtgtgtttctctaggaggttgctgtgtgctaagaaactttttttaagcctgttgctttgct

SEQ ID NO: 100919 - DNA, 201 bp, Homo sapiens
acgcctataatcccagtactttgggaagccgaggtgggtggatcacctgaggtccggccaacgtggcgaaacccagtccctattaaaaatacaaaaattarctaggcatggtggtgcacacctgtagtcccagctacttaggaggctgaggtaggagaatcgtttgaatctgggaggcagaagttgcagtgaactgagatt

SEQ ID NO: 100920 - DNA, 201 bp, Homo sapiens
taagccattgtgcccggctgagaactgtaatcttttcatgttgatttattctatctaagaacaagggatgtctttccattatttcatgtctacttttatgkcttatagggacatttaaattttttccttgtatggattttgcacatttcttgttaaatttattcctgtgtctttaggcctctttgttgctgttacaaatgg

SEQ ID NO: 100921 - DNA, 201 bp, Homo sapiens
aaagatatactggatggctggacaagataatgtatttctttgatgatcattactagatttactaattgctaacagttcatgaaggtttttttgcagtgtcyagacaatgtcagcccaagagactgaaattctaaatgaacaaacactgagaaatatttgaagaattcattcagtaattacctatgtaacattcttgctaaa

SEQ ID NO: 100922 - DNA, 201 bp, Homo sapiens
caccgcactgggctaattttatatttttagtagagacgaggtttctccgtattggtcaggctggtctcgagctcccgacctcaggtgatctgcccacctcsgcctcccaaagtgctgggattacaggtgtgagccaccgtgcctggcctatatcattgttaaatgtcttgaatgtgactatatggtattatggttatatag

SEQ ID NO: 100923 - DNA, 201 bp, Homo sapiens
agctactcgggaggctgaggcaggagaattgcttgaacctgagaggcggaggttgcagtgagccaagatcgcactactgcactccagcctggcgacagagygagactcatctcaaaaaaaaaaaaaaaaaaaaaaaaaaaggaagaacaattatatcccctgaaagagaagctatagaatccattaaacaaaaaaacatac

SEQ ID NO: 100924 - DNA, 201 bp, Homo sapiens
gtcaattcatatcttctatcctttttttgagacagagtgttgttctgtcacccaggctggagtgcagtggcgcgatctctgctcactgcaaccttcacctyccgagttcaagcgattctcctgccttagcctcacgagtagctgggattataggcgcgtgccaccatgaccagctaatttttgtatttttagtatagatgg

SEQ ID NO: 100925 - DNA, 201 bp, Homo sapiens
tcctgagcttaagcagtcctcctgcctcggcctcccaaagtgctggtattacaagtgtgtgccaccacacctggcctctttcatattatttttttttttttcagagacagagtctcactgtgttgcccaggctggagtgcagtggtgcggtcttggctcactacaacctctgcctcccgggttcaagcaattctcccgcct

SEQ ID NO: 100926 - DNA, 201 bp, Homo sapiens
ctttctttttctttctgcttccttttcttctttctttctttctttctttctttctttctttctttctttctctctctctctcttctctcttctctctctcyctctttctctcggtctctgtcacttaggttggagcacagtggcaggaacttgattcactgcagcctcgacttcctgggctcaagtgatcctcccacctca

SEQ ID NO: 100927 - DNA, 201 bp, Homo sapiens
tttcttttctttctttttctttctgcttccttttcttctttctttctttctttctttctttctttctttctttctttctctctctctctcttctctcttctctctctctctctttctctcggtctctgtcacttaggttggagcacagtggcaggaacttgattcactgcagcctcgacttcctgggctcaagtgatcctc

SEQ ID NO: 100928 - DNA, 201 bp, Homo sapiens
tctttcttttctttctttttctttctgcttccttttcttctttctttctttctttctttctttctttctttctttctttctctctctctctcttctctcttctctctctctctctttctctcggtctctgtcacttaggttggagcacagtggcaggaacttgattcactgcagcctcgacttcctgggctcaagtgatcc

SEQ ID NO: 100929 - DNA, 201 bp, Homo sapiens
tctctttcttttctttctttttctttctgcttccttttcttctttctttctttctttctttctttctttctttctttctttctctctctctctcttctctcttctctctctctctctttctctcggtctctgtcacttaggttggagcacagtggcaggaacttgattcactgcagcctcgacttcctgggctcaagtgat

SEQ ID NO: 100930 - DNA, 201 bp, Homo sapiens
tctctctttcttttctttctttttctttctgcttccttttcttctttctttctttctttctttctttctttctttctttctttctctctctctctcttctctcttctctctctctctctttctctcggtctctgtcacttaggttggagcacagtggcaggaacttgattcactgcagcctcgacttcctgggctcaagtg

SEQ ID NO: 100931 - DNA, 201 bp, Homo sapiens
gtgtcagatcataacagtcgagttagaataggagaaaaaaagttataggagcagatgaaaaagttggagagagtcaccttctagccaagcaaaaagatacrctttttcaagtggagaaagaacagaagggaataatatatgacttgcaatcatgtacagtgaaggacagcagaatttgaacttctgaggtatacatttgag

SEQ ID NO: 100932 - DNA, 201 bp, Homo sapiens
tctctctctttcttttctttctttttctttctgcttccttttcttctttctttctttctttctttctttctttctttctttctttctctctctctctcttctctcttctctctctctctctttctctcggtctctgtcacttaggttggagcacagtggcaggaacttgattcactgcagcctcgacttcctgggctcaag

SEQ ID NO: 100933 - DNA, 201 bp, Homo sapiens
atcctaggagcttgaggttacagtgagctatgattgcactactgcactccagcctaggcaacagtaagatcctgtctctaaaaaaatttttttaaaaggtrgtataataataaatgttattatataaagattacatattcatcataaaaaagaaagaacagctaaactaagaaaaatatagataccattgtcagtctaacc

SEQ ID NO: 100934 - DNA, 201 bp, Homo sapiens
agtcatacaatgtataataatcacatcaaggtaaatgagttatccatcacctcaagcatttatcctttgtgttacaaacaatccaattattactcttttakttattttattttttgttgttttttttttcacctttttttttttttttccttttttgagacggagtcttgctcggtcacccaggctggtgtgatctcagct

SEQ ID NO: 100935 - DNA, 201 bp, Homo sapiens
cacaacagtattagttgctcatagaagttgcttagtaaatattggttgagttcatttgaatgaatgagcatctgtgatttgtatgtttagaacacactctygaaaaagaatttctgggttagggggcaggcacattttaaagacttttggcatactctaaagtagtcttccagaaaatatgtatattgggttatacgccaa

SEQ ID NO: 100936 - DNA, 201 bp, Homo sapiens
ctccaaaaaaaaaaaaaaaaaaaaaaaggaagacataagagaagttggaaatctaaattatttttaatcccagtattttattgtggcaaataatacatatrtttatttccctaaaaatctctgttaattggctaagataatgtgttcattagaatacacacatgcacacacacatgaaactttgatttcgccattactttt

SEQ ID NO: 100937 - DNA, 201 bp, Homo sapiens
gtaaatgacctaaagtattattacacagaaacacatctgaaacaaggttatatattaattggtgggtgaaaatgttatgaccggagcctcacaggaacttyaccctgtatttcccttagcagtagtgtttcattatttgctaattctgtttttgcagcaacattatagaatgtagctactgggaataatgagataaaaaat

SEQ ID NO: 100938 - DNA, 201 bp, Homo sapiens
agtgatactctgccttcttttatcccagggataaatcccatttagccacagtatataatacttttagtatgttgttgagtttggctttctagtgttttatkgaggatttaaaaatctatgttcatcagagatactcacctgtacttttctttcttctggtgtctttggctttggtatcagagtgatgctggcctcataatg

SEQ ID NO: 100939 - DNA, 201 bp, Homo sapiens; identical to SEQ ID NO: 15920

SEQ ID NO: 100940 - DNA, 201 bp, Homo sapiens
gttgtttgcttattgatttctgactggatgatttatccattacagagaatgatgtattgaagttacttgctattattattattattttgagatggagtctsgctctgtcgcccaggctggagtatagtggcgcgacctcggctcactgcaacctccgcttcctgggttcaagcaattctcctgcctcagcctcccaagtag

SEQ ID NO: 100941 - DNA, 201 bp, Homo sapiens
tgtttgccttcagatctgttgttgctttatatatttaggtgctttgatgttgggcacatatatatttataattgttacatctttctgttgtattgaccctyttatcattatataatgacttttgttccctcttgtgatgatttctgacttaaagtttattttgtctgataaaagtttagccactcatgttctcttccggtt

SEQ ID NO: 100942 - DNA, 201 bp, Homo sapiens
cttttttctttttgtccctctaatgctatcatttcaaatgacctgtcttttaagtttcccagttcttttcttctgcctgagtctgctgttgaagctgtctyttgagcttttcagttgagtcattgtattcttcagctccaggatttctatttgcttcttttttatggtttctgtttctttattaaacatctctctttattc

SEQ ID NO: 100943 - DNA, 201 bp, Homo sapiens
agctgcaaatttcttacttttctttagtgcaatccatgtgtgaaatatgtgttataatttgtaactaacaatatttgaagtcctgaagtttttgaatgatyttgtatgtaagattagagtagattcatggttcccactaataaccacttcattattatcactttgttatgtgtgtgtgtgtgtgtgtgtttaaagagataa

SEQ ID NO: 100944 - DNA, 201 bp, Homo sapiens
gtcattgtattcttcagctccaggatttctatttgcttcttttttatggtttctgtttctttattaaacatctctctttattcatttatttgctttcctgrttttgtttagttgtagttcattgagcttctttaagatgattattttggattctttgtcatgcaattcatacatctctatttatttagggccagttactag

SEQ ID NO: 100945 - DNA, 201 bp, Homo sapiens
atccacctgcctcggcctccccaagtgctagtattacaggtgtaagccattgtgcccggctgagaactgtaatcttttcatgttgatttattctatctaaraacaagggatgtctttccattatttcatgtctacttttatgtcttatagggacatttaaattttttccttgtatggattttgcacatttcttgttaaatt

SEQ ID NO: 100946 - DNA, 201 bp, Homo sapiens
tctctctctctttctctcggtctctgtcacttaggttggagcacagtggcaggaacttgattcactgcagcctcgacttcctgggctcaagtgatcctccmacctcagcctcccaactagctgggaccacaggtgcatgccgctacacctggctaattttaaaatattttttatagagatagggtctcgttatgttgccca

SEQ ID NO: 100947 - DNA, 201 bp, Homo sapiens
cagtggcaggaacttgattcactgcagcctcgacttcctgggctcaagtgatcctcccacctcagcctcccaactagctgggaccacaggtgcatgccgcyacacctggctaattttaaaatattttttatagagatagggtctcgttatgttgcccaggctggtctcaaactcctgagcttaagcagtcctcctgcctcg

SEQ ID NO: 100948 - DNA, 201 bp, Homo sapiens
cctcagcctcccaactagctgggaccacaggtgcatgccgctacacctggctaattttaaaatattttttatagagatagggtctcgttatgttgcccagrctggtctcaaactcctgagcttaagcagtcctcctgcctcggcctcccaaagtgctggtattacaagtgtgtgccaccacacctggcctctttcatatta

SEQ ID NO: 100949 - DNA, 201 bp, Homo sapiens
ttctctctctctttcttttctttctttttctttctgcttccttttcttctttctttctttctttctttctttctttctttctttctttctctctctctctcttctctcttctctctctctctctttctctcggtctctgtcacttaggttggagcacagtggcaggaacttgattcactgcagcctcgacttcctgggctc

SEQ ID NO: 100950 - DNA, 201 bp, Homo sapiens
ccacacccctactggcttccaaactttatggatgttttcacatggtctttgccttttgttggggaaaaaggtaagagaactaaagcacatgtctcatcagytgtttggtgactgagcataccttatatttgcatgagcccctccatgattcagaaatgttttctaattttgtttgttctctacatagattttttttttttt

SEQ ID NO: 100951 - DNA, 201 bp, Homo sapiens
ctctctttctctctctctttcttttctttctttttctttctgcttccttttcttctttctttctttctttctttctttctttctttctttctttctctctctctctcttctctcttctctctctctctctttctctcggtctctgtcacttaggttggagcacagtggcaggaacttgattcactgcagcctcgacttcct

SEQ ID NO: 100952 - DNA, 201 bp, Homo sapiens
ttgtagactagtttctaatggatctgtagttgtccatgttgatcagtgttgtaactaatcccggtggtgttggttattggagtttttcccaagtttttgcygacaaaacccatatagttttgaacatttgtttagataaaaatgtgcacattctcttaaccaatatttattacatgcttgatatataccaagtactgtatt

SEQ ID NO: 100953 - DNA, 201 bp, Homo sapiens
tttctctctctttctctctctctttcttttctttctttttctttctgcttccttttcttctttctttctttctttctttctttctttctttctttctttctctctctctctcttctctcttctctctctctctctttctctcggtctctgtcacttaggttggagcacagtggcaggaacttgattcactgcagcctcgac

SEQ ID NO: 100954 - DNA, 201 bp, Homo sapiens
ctgaggcagtaggatcctttgagtccagtagttcgaggctgcagtgagctgtgatcacaccactgcattccagccaggcaatagagcaagaccctgtctctaaaaaataaaaaaaaaagtaaaagccacagttcattctacctgagtattctgtcggctttgacataattagtaacttttatctcaaaacagtcttatttt

SEQ ID NO: 100955 - DNA, 201 bp, Homo sapiens
gctgaggcagtaggatcctttgagtccagtagttcgaggctgcagtgagctgtgatcacaccactgcattccagccaggcaatagagcaagaccctgtctctaaaaaataaaaaaaaaagtaaaagccacagttcattctacctgagtattctgtcggctttgacataattagtaacttttatctcaaaacagtcttattt

SEQ ID NO: 100956 - DNA, 201 bp, Homo sapiens
ctctacttcatcctattctcacaccttttgcttgtgccattgcaggagcctcttgctgagactatgtagtctgtccacgctgtcatcgtgatctgtgaacwatatcaagggtcattcttgtgctcaaaatccttcatgagcacttcctgcctgtgggataaactctttgttgatgggcagtaccctgcatgctaaacctct

SEQ ID NO: 100957 - DNA, 201 bp, Homo sapiens
ttagtagagatggggtttcaccatgttggccaggctggtctctaactcctggcctcaagtgatctgccttcctcagcttcccagagtgctgggattacaggcacgagccactgtggccagctgcatcttttagtttctacttgaacttcctttagttgctctcataaggctggtgtagtcatgacaaactccagtttttgt

SEQ ID NO: 100958 - DNA, 201 bp, Homo sapiens
ggatatttaggttgtttctaactgtgactactgctgtaatagtaaaaataagtttaatataaaagtagaattattggccgggtgcggtggctcacgcctgyaatcccagcactttgggaggccaaggcaggtggaacacaaggtcaggagttcaagaccagcctggccaacatgatgaaacccctgtctctactcaaaata

SEQ ID NO: 100959 - DNA, 201 bp, Homo sapiens
gggtttcaccgtgttagccaagatagtcttgatttcctgagctcatgatctgcccaccacggcctcccaaagtgctgggattacaggcgtgagccaccgcrcccggcccatttatttatttttgagacagagtctcactctgtctcccaggctggagtgcagtggcgccatcttggctcactgcaacctccgcctcccagg

SEQ ID NO: 100960 - DNA, 201 bp, Homo sapiens
gttgctttctgttttgtggttctactattcctctctttttctctttgtgatttgatttttatttttgtagtggggtattttggttctttttatcttttgtrtatctactgtgcttttttgttcatcgggtttgcatcaaacattttatagttatagcactctgtcttacgctgagaagaaattactttcaatgacgtatag

SEQ ID NO: 100961 - DNA, 201 bp, Homo sapiens
tgtttgttttgagacagagtttcgctcttgttgcccagactggagtgcagtggcatgatcttggcttatggcaacctccgcttcccgggttcaagcgattytcatgcctcagcctcccgagtagctggggttacaggcatgtgccaccacacccagctaattttgtatttttagtagacgcggggtttctccattttggtc

SEQ ID NO: 100962 - DNA, 201 bp, Homo sapiens
attggtattaattcttttttttaatgattaatagaattcacccatgaaaccatctggtcctgtgcttttctttgttgagagctgtttgattactgattccrtctccatatttgctattggtctgtttgggctttctatttcttcatgattcagttttggcaggttgtatatttccagactctatccatttcttctgggttt

SEQ ID NO: 100963 - DNA, 201 bp, Homo sapiens
atacacatgcttctactgtatttaatatatgattcagaatacatctaatgtatatatgaatgaatgattctcagattgtcaacagtgcctgtgttagattytagggatctaacatggagatgcacaagcaaagtcctttactgtattttctagtgagaggtacagcatatatatatataacaaatatatattatatataat

SEQ ID NO: 100964 - DNA, 201 bp, Homo sapiens
agcactttgaataagaagtcatacttgtcgtcctagaatgttttatatctgtgaatgggctctttgcttctgtgcataatggttttttttttttttaacakttttagagataaggcctcactctgttgtctaggctggagtgcagtaatgcgatcaatgctcactgtggcctcaaacaaactcctggcctcaattgatcgt

SEQ ID NO: 100965 - DNA, 201 bp, Homo sapiens
ttggtatcagagtgatgctggcctcataatgtgagtttggaagaattctctcttctattttttggaaggtttaagaaagattggtattaattcttttttttaatgattaatagaattcacccatgaaaccatctggtcctgtgcttttctttgttgagagctgtttgattactgattccatctccatatttgctattggtc

SEQ ID NO: 100966 - DNA, 201 bp, Homo sapiens
gagggcttggtttcttggtgaagatgttgaactagtacaccaaacctggacatctcatctccagacttgatgtgttttttgttttgtttttttttttttttgggacggagtctcactctgttgcccaggctggagtacagtggcaccatctcggctcactgcagcctctgcctcccaggtttaagtgatcctcctgcctca

SEQ ID NO: 100967 - DNA, 201 bp, Homo sapiens
agagtaatggtttgagaacatgggcttcagtcagacatacctggattcaaatttctgtttgttttttttttcaaggagatggagtcttgctctgttagccrgctgaagaagtgcagtggcaccatcatagctcactgcagcctcaaactcctgggctcaagtgattctcttgcctcattctcatgcctggcactacaagca

SEQ ID NO: 100968 - DNA, 201 bp, Homo sapiens
gtgtatatgtgccacattttctctatccagtctatcactgatggacatttgggttggttccaagtctttactattgtgaatagtgctgcagtagacatacrtgtgcatgtgtctttatagtagaatgatttataatcctttgagtatatacgcgataatgggattgctgggtcagatggtatttctggttctaatccttga

SEQ ID NO: 100969 - DNA, 201 bp, Homo sapiens
tacctgcatttctttatgtgtagaagagggataatgaaacttgcagtggcaagcacatagtgagtactccatatatgttatggtaggtgctgctgccgccwtcgctatcatcatcatcatcataagaattactgtctcctatgagctcccataaacaatctcattgctttgcaaatcgctttaaatattttcttgtccttt

SEQ ID NO: 100970 - DNA, 201 bp, Homo sapiens
ctttccaggggctgaactggaaaatcccaaagttaatttaatttaattttatttttttgagacggagtctcgctctgtcacccaggctggagtgcagtggygcaatctcagctcactgcatcctccgcctcccaggttcaagtgattctcctgcctcagcctcccaagtagctgggattacagccccccaccaccatgctc

SEQ ID NO: 100971 - DNA, 201 bp, Homo sapiens
tttatttattttattttttgttgttttttttttcacctttttttttttttttccttttttgagacggagtcttgctcggtcacccaggctggtgtgatctsagctcaccgcatcctccacttcccaggttcaagcaattctcctgcctcagcctcctgagtactgggattacaggcacctaccaccatgcctggctaattt

SEQ ID NO: 100972 - DNA, 201 bp, Homo sapiens
agtactgtattttatatagtcacgcttacatagttgcttaataattcggagttctgacaaatgcatccttaggcgatttcatcattatgcaaacattgtayagtgtacagttatcccttggtatatgtgagagcttagttccaggacccccacatataccaaaatccctgaatattcaagtccagaagttggccctgtgga

SEQ ID NO: 100973 - DNA, 201 bp, Homo sapiens
tattcatttatttgctttcctgattttgtttagttgtagttcattgagcttctttaagatgattattttggattctttgtcatgcaattcatacatctctrtttatttagggccagttactagaggtttattagtttcctttggtggtgtcatttttgcctggttctttataattcatatagccttgcaatggagtctatg

SEQ ID NO: 100974 - DNA, 201 bp, Homo sapiens
taaataaggtgagtgatcaagctagatgataccatttggggtcagaaacaaggtatgattataaggtaatgagactggtttttctcgtgttgctgatacartggctctggaggcacttccaaaagaggagttccaaaaacgttttgagtaatggcagcatctctggattaattatatggtaaggcaacaagttgtgctgaa

SEQ ID NO: 100975 - DNA, 201 bp, Homo sapiens; identical to SEQ ID NO: 15918

SEQ ID NO: 100976 - DNA, 201 bp, Homo sapiens
gtctcattactttatagttataccttgtatatgcagttggggagataagtttcaaagatggccaaaatataattaatatttactctatttaaaagtaaacyatggaatggcacatctcatttaaatccgatttgggtcagtcattttagtgtgtcctccagtgacttgtctattttaaaaagcatgtctttaacttaagtt

SEQ ID NO: 100977 - DNA, 201 bp, Homo sapiens
ttatagttataccttgtatatgcagttggggagataagtttcaaagatggccaaaatataattaatatttactctatttaaaagtaaaccatggaatggcrcatctcatttaaatccgatttgggtcagtcattttagtgtgtcctccagtgacttgtctattttaaaaagcatgtctttaacttaagttctgtcctagtc

SEQ ID NO: 100978 - DNA, 201 bp, Homo sapiens
ctaagatataaaaagaacaggacattgtgaactaagcccagtacatttcctggaagttggctgttgttttaaatttcacaggagctttcattatgattagmcactcaaaaataggaagacaggcagggcgtggtggctcacgcctataatcccagctctttggggtgcctaggcgggcggatcacttaaggccaggagttc

SEQ ID NO: 100979 - DNA, 201 bp, Homo sapiens
acagataaaatattttaattttacataaatgatatggtgctgtccagtggtcttgaaatgttaacatacaccattattacctggaaagcttgtgcaaacasaggttgcaggaccctgaccctgtttctgactcatcaggcgtggggtggaacctggcaatctgtattctgtcgggttcccaggtgatgctgtttaccacac

SEQ ID NO: 100980 - DNA, 201 bp, Homo sapiens
tcattaaaataaagaacttctcttcttaaaaatacatgattaagagaggaaaaaggcaagacacaaaatggaagaaaattttttgcaatacacgtctcacmaagcccttgtatccagaatatataaagaactataaatcaataggaaaaaacaaatttcaaaaatggtcaaaagatttaaacaggcacttcacaaatgagg

SEQ ID NO: 100981 - DNA, 201 bp, Homo sapiens
ctgggcaacagggcgagaccctgtctccaaaaaaaaaaaaaagagtctgacaataccaagtattggtgtgtttgtggagaactagtactaggtatgttgcyaaagggcttgtaaattgattcaagcgctttagaaaactactgggcagtaaagctaaacatatgtctaccctgtaacccagcagttccacacctggtgtat

SEQ ID NO: 100982 - DNA, 201 bp, Homo sapiens
agtaccaattctgaaatttacccaggagctgacttcttaggaaagggctttctggaatcccggaatgaaaaggttgatgttcgtgagaataaacatgcaargggaagagacaggagatcatattactgggtgactaacactaggtatgaaaattggtattgaagcattaatatcttaaactaaagtttaactgcttttttt

SEQ ID NO: 100983 - DNA, 201 bp, Homo sapiens
  misc_feature (1)...(201): n = A,T,C or G
gtttgacatcattagacattcagaaaatgctaatcaaaaccacaatgggataccacttcacagtcagtaggatggctgtgaaaagacagcagttaataagnagtgttgatgagaatgtggagaaattgggaccttcttaacactgctggtggaaatgtaaaatggtacagctgctttggaaaacattctgacaggtcttca

SEQ ID NO: 100984 - DNA, 201 bp, Homo sapiens
tttttttttaatttttttagagttgggtctcactgtgttgttcaggctggccttgaacttctggcctcaggataccctccaacctcagcctcccaaagtgytaggattacaggcatgtgctaccacagccagcttgtatcaacaattttaaaaacaattaatttatcaaagatttacttaagtcacaagaactgaaaaaac

SEQ ID NO: 100985 - DNA, 201 bp, Homo sapiens
aatggaatactattcagccataaaaaggaattaaatgcaggtatacatgtcaacatgactgaaccttgaaaacattatgctaagtgaaagaagtcagtcaytacagaccacatattatatgatgccactcatttgaaatgtccagaacagaccaatctagagagaaagtagattcgtgttcaaccaggattaaggggaaga

SEQ ID NO: 100986 - DNA, 201 bp, Homo sapiens
tcctgtagatatataattgattctcattacttgtggatttcatatttgtgaattcccccacttactaagatgtatttgtaacacccaaatcagtacttacrgaggtttcataatcattcatgggaatgtagtgtgcaatgcaacaaaaaatttgagtcacctcactcacatgttcctagctgaggttgaacaaaatgatgc

SEQ ID NO: 100987 - DNA, 201 bp, Homo sapiens; identical to SEQ ID NO: 15921

SEQ ID NO: 100988 - DNA, 201 bp, Homo sapiens
gattggtattaattcttttttttaatgattaatagaattcacccatgaaaccatctggtcctgtgcttttctttgttgagagctgtttgattactgattcmatctccatatttgctattggtctgtttgggctttctatttcttcatgattcagttttggcaggttgtatatttccagactctatccatttcttctgggtt

SEQ ID NO: 100989 - DNA, 201 bp, Homo sapiens
taagaaatgtctattcagatattttgctcatttttaaattggattattggatttttcctattgaattgtttgagctccttacatattctggttattaatcycttgtcagatggatagtaaaaagtctttttttctttcttcttctttattttattttattttattttattttattttgagacaaggtctctctttgttacc

SEQ ID NO: 100990 - DNA, 201 bp, Homo sapiens; identical to SEQ ID NO: 15922

SEQ ID NO: 100991 - DNA, 201 bp, Homo sapiens
agatgagatggaggagctctttctattgtaggattatctattgttttcatgtttgatctgtagtgaagtatattagtgaaatagagaaacagaatgatgartactaagctattcataaaatttcagtagtgtgtaatacttgtagttttgaaacaaaatcagctaatatcaccttgacttttccccatcttcctattaaaa

SEQ ID NO: 100992 - DNA, 201 bp, Homo sapiens
ggataatcacttgaacctgggaggcagaggttgcagtgggctattgtgccgctacactccagcctgggtgacagagcaagactctgtctcaaaaaaaaaaragaaagaaagaaagaaagtatggatgttagaaagacacattgagttcagtttatttctttgtgtttttgctagcatgagaaggtttcagacggtaaagat

SEQ ID NO: 100993 - DNA, 201 bp, Homo sapiens
tctttcatgtttatgtgtaaaacatagggctgggcgcagtggctcactcctgtaatcccagcactttgggaggccgaggcaggtggatcacctgaggtcargagttcgagagcaggctggccaacatggtgaaaccctgtgtctactaaaaatgcaaaaattagccaggtgtggtggcatgcttctgtaatcccagctact

SEQ ID NO: 100994 - DNA, 201 bp, Homo sapiens
aaccccgtctctactaaaaataaaaaaaaattagccgggtgtggtggtgggtgcctgtagtcccagctactcgggaggctgaggctggaggatggtgtgawcccgggaggcggagcttgcagtgagccgagattgtgccactgcactccagtctctcaaataaataaattaattaattaattaattaaattaaataaataa

SEQ ID NO: 100995 - DNA, 201 bp, Homo sapiens
aaaagttggccctctgtatttgcaggatggggttttgcagcctgtgtttggttgaaaacatttgcatataagtgaaccagtgcagttcaaacccatgttgyttgagttaaccatacttatacaaacctagatgttatatatatctacaaacgtagatgttacacacctaggctgtatggtatatagcctattgctcctaat

SEQ ID NO: 100996 - DNA, 201 bp, Homo sapiens
catctgggcaataaagcgagatcctatctcaaaaacaaattttttttctttaataatatattaaacttagcttactgttaagtttttactttataaatgtwtcagtttttaaaaacttttggacttttttgtaataacacctagcttaaaagacaagtacattgtatagctatagaaaataatttttctttatatctttat

SEQ ID NO: 100997 - DNA, 201 bp, Homo sapiens
ccaggaaactggtaatattggttacctgcagagagagggcaggaggcacattatacccttttgtggcttctaaaatttgagctatgttggggccaggcacmgtggctcacgcctgtaatcccagcactttgggaggccgaggcgggcagatcacaaggccaggagattgagaccatcctggcgaacacagtgaaaccccgt

SEQ ID NO: 100998 - DNA, 201 bp, Homo sapiens
cccagcactttgggaggccgaggcgggtggatcatgagttcaggagatcgagaccacggtgaaaccccatctctactaaaaatacaaaaaattagccgggygcggtggtggacacctgtagtcccagctactcgggaggctaaggcaggagaatggcatgaacccgggaggcagagcttgcagtgagccgagattgcgcca

SEQ ID NO: 100999 - DNA, 201 bp, Homo sapiens
tatataaatgatccatgtatatatatatgatatgggtgatatatataaaataaatatgggtgatatatatatatacacacacacacacacacacacacacmtacatatatatatgttctctgctgtatcatttatttatgttttcttttttttagaggcagaatctcactctgtcacccaggctagagtacagtggctcag

SEQ ID NO: 101000 - DNA, 201 bp, Homo sapiens
tgtaatcacagctacttgggaggctgaagtgggaagatcgcttgagcccaagagtttgagaccatcctgggcatgtaacaagaccccatttcaaaaaaaaagaagaaacagcatgaaggccagagtgatcttcttgtacgtgtggtttttcaagtgcctttaactcaaagttgtcagtgtgccagagtggtgtattttggg

SEQ ID NO: 101001 - DNA, 201 bp, Homo sapiens
ttttattttgataattatagattcacaggaggttgtaaataaagaaatgtaaagggaggtcccaaacacctctcccctaactcccttccctctctttgccmgtgtcagtatcccacaccaccacacacagtagtataccaaaaccaggaaattgacattggtacagtccatagagcttgttcagatttcaccagttataca

SEQ ID NO: 101002 - DNA, 201 bp, Homo sapiens
agttttggggtaatttgttacatggcagtagataattcatataatttctagaaacttatagggaaataaagatttgctcaaagacatatatatatatatawgtgatatataaatgatccatgtatatatatatgatatgggtgatatatataaaataaatatgggtgatatatatatatacacacacacacacacacacac

SEQ ID NO: 101003 - DNA, 201 bp, Homo sapiens
tgcaacctcatagctctggatcagagtttctaaagtaaatgaatttcttatttccacgaacctattttttttttttttttttttgatagggagtctcgctycgtcacccaggctggagtgcagtggcacaatctcggctcactgcaacctccgcctcccaagttcaagtgattctcctgcttcagcctcctgagtagctgg

SEQ ID NO: 101004 - DNA, 201 bp, Homo sapiens
tttgggaacactgaaagacttcttggatgcataggcttagaatgattctcagctgtgatttatttcctccctccctccctccctccctccctccctccctycctcccttcctcccttcctccctcccttccttcccctccctccctccctccctccttccctccctccttccttccctccttccccctccatcccttcccc

SEQ ID NO: 101005 - DNA, 201 bp, Homo sapiens
ccctctctcaatattctgtaatattgaaatatttcgttaaaaatatacagcatattacatatatatctgaaattttctcctttcttccttttagtataccytctatttattttggtaccaagaatagagtgctgctgtaacaaacacctaaaagtgtggaagtggctttggaacttctgaaagacccagcccaagtcccat

SEQ ID NO: 101006 - DNA, 201 bp, Homo sapiens
tccacaaatactctgggtgcaacctcatagctctggatcagagtttctaaagtaaatgaatttcttatttccacgaacctattttttttttttttttttttgatagggagtctcgcttcgtcacccaggctggagtgcagtggcacaatctcggctcactgcaacctccgcctcccaagttcaagtgattctcctgcttca

SEQ ID NO: 101007 - DNA, 201 bp, Homo sapiens
acaatgccttctcatggaatacctcctgaaggacctgtctggggctgttttacagttaccttttttttgttgtttttgttttttgaataagtagaaggagwatactctaaagtaatgattaaaagggtggtatagtgaatgtataagccagtaacatatttgttatcgttatatgactggcagtgcagtaggtttgtttac

SEQ ID NO: 101008 - DNA, 201 bp, Homo sapiens
aacacctaaaagtgtggaagtggctttggaacttctgaaagacccagcccaagtcccatcttcatttatttatttatttatttttaagaattttttttccmaggctggatctcggctcactgcaacctccgcctcctaggttcaagtgattctcctgcctcagcctctggagtagctgggactacaggtgcacaccaccat

SEQ ID NO: 101009 - DNA, 201 bp, Homo sapiens
gattgcatgagcccaggaattcaaggctgcagtcagctatgatcaccacactccagcctgggtgacagagcaagactctgtctccaaaaacaaaagacagrcagaccaaggtagacccataatatgtactgatatggagagatgctaagatattttataaggcatttgcagagcatgtaaatggtcatctcctttgtaaat

SEQ ID NO: 101010 - DNA, 201 bp, Homo sapiens
tcttctacctccacctcctgtcccactggaaggtcttcaggggaattaacaggcatggagcagtcacctcctatgacaacaatgccttctcatggaatacytcctgaaggacctgtctggggctgttttacagttaccttttttttgttgtttttgttttttgaataagtagaaggagtatactctaaagtaatgattaaa

SEQ ID NO: 101011 - DNA, 201 bp, Homo sapiens
ttatcttggtgtttatattacctgtgaagctgtaagtatattcttttatttctgtaacaatttgacaattgaagaaaagtatgtgttgaatttttagcatytactacacacacacgcacacacacacacacacacacactactgttgtactttgtaatatcaagacactgataaaagttttggtgttgtattgttatggat

SEQ ID NO: 101012 - DNA, 201 bp, Homo sapiens
agaagagggataatgaaacttgcagtggcaagcacatagtgagtactccatatatgttatggtaggtgctgctgccgccatcgctatcatcatcatcatcataagaattactgtctcctatgagctcccataaacaatctcattgctttgcaaatcgctttaaatattttcttgtcctttcttcacaataaactcctctct

SEQ ID NO: 101013 - DNA, 201 bp, Homo sapiens
tcctaagcactttgaataagaagtcatacttgtcgtcctagaatgttttatatctgtgaatgggctctttgcttctgtgcataatggttttttttttttttaacagttttagagataaggcctcactctgttgtctaggctggagtgcagtaatgcgatcaatgctcactgtggcctcaaacaaactcctggcctcaattg

SEQ ID NO: 101014 - DNA, 201 bp, Homo sapiens
gcttctggcatctgggaggttgtgttctgattatcttggacataaatagtctattcattttatcttctgcttctggaccataacagttctggaaatcttgrctcacccactgtttgtccatggcaatgatgtcggcagtatgcatcattaatttattctctgtagtgtcagtaatgggtgcatgatacaaacatttacaaa

SEQ ID NO: 101015 - DNA, 201 bp, Homo sapiens
aggattacaggcatgagccactgggcctggccttagactctacttcttgataggatagggtcaggtcactgctatgctttaaatatgatccccagaaagcrtatgttggctgcctgggtgatgggtatactagaagcccaaactttaccattatgcagtatatccatgtaaaaaaggtacacatataccccttgaatctga

SEQ ID NO: 101016 - DNA, 201 bp, Homo sapiens
tcgaactcttggcttcaagcagtctccccaacttggattcccaaagtgctgggattacaggagtgagtcaccatgcctggctggttgcagccagttttggraaataaaatgtgctacagacattgtaagggcaaaatatttaacaataactgagatttctaaaaattgcagattggctaaatgttaataaattatgatcta

SEQ ID NO: 101017 - DNA, 201 bp, Homo sapiens; identical to SEQ ID NO: 15919

SEQ ID NO: 101018 - DNA, 201 bp, Homo sapiens
tagaagagggataatgaaacttgcagtggcaagcacatagtgagtactccatatatgttatggtaggtgctgctgccgccatcgctatcatcatcatcatcataagaattactgtctcctatgagctcccataaacaatctcattgctttgcaaatcgctttaaatattttcttgtcctttcttcacaataaactcctctc

SEQ ID NO: 101019 - DNA, 201 bp, Homo sapiens
cgggtcttttcaattcttcggtaaggatgtctgtcattacagtgcggattaaaggcattttgagagtaaattagacgtcgaattcagaacagtttttttakaattggaatgtagtattgaaactgcaggtctttaggttgagtgcaaattcaatgaacatgtttaagcgactaaaaatgttccagcaaacattgatttgtt

SEQ ID NO: 101020 - DNA, 201 bp, Homo sapiens
agctattctttataactttgactatttttgtctgcttgaactatcagttactttcagcattgtgtcaaaatttccaactaccattacagtgtcatgcatcrtttaataaggagggtacgttctgagaaatgggtgccgattttgctgttgtgaaatcatcatagagtgtacttacataaacctaggtggtatagcctgcta

SEQ ID NO: 101021 - DNA, 201 bp, Homo sapiens
agtaaaagccacagttcattctacctgagtattctgtcggctttgacataattagtaacttttatctcaaaacagtcttattttcattggttgtttcttargcattttagaaggaaaaaggcagaaaatgtggcatttgaaacagtccctgggggtactcagttactccccatacaagtgccttcttttctgaaaaaggga

SEQ ID NO: 101022 - DNA, 201 bp, Homo sapiens
aagcggagcttgcagtgagccgagattgcgccactgcagtccgcagtccggcctgggcaacagagcaagactccgtctcaaaaaaaaaaagaaaaaaaaaagaaagtcaaaacattactagctgattttaaaaaacagataacatggtgggaggctgaggctagacgatcccttcagcccaggagttctacaccagccttg

SEQ ID NO: 101023 - DNA, 201 bp, Homo sapiens
gtgaacccgggaagcggagcttgcagtgagccgagattgcgccactgcagtccgcagtccggcctgggcaacagagcaagactccgtctcaaaaaaaaaaagaaaaaaaaaagaaagtcaaaacattactagctgattttaaaaaacagataacatggtgggaggctgaggctagacgatcccttcagcccaggagttcta

SEQ ID NO: 101024 - DNA, 201 bp, Homo sapiens
ctactaaaaatacaaaaaattagccgggcgcggtggcgggcgcctgtagtcccagctactcgggaggctgaggcaggagaatggcgtgaacccgggaagcrgagcttgcagtgagccgagattgcgccactgcagtccgcagtccggcctgggcaacagagcaagactccgtctcaaaaaaaaaaagaaaaaaaaaagaaa

SEQ ID NO: 101025 - DNA, 201 bp, Homo sapiens
agtagagagaagatgggcaaactagaagggccagagaactgaaatacataaaatgaagaaaaagaagagggatagttgaaaactggtggagcagttgacawcaatttcattaatgggacagcaagactattttgatgactgttatttttttcttttcttttttttttttttttctgagacagagtctcgctgtcgcccggg

SEQ ID NO: 101026 - DNA, 201 bp, Homo sapiens
gggtgactatgtggacagaggctatttcagtatagaggtaaaaattaaactggatatgttgggactattatattgtctttcaaaaaagatgatttccattsttcagtagaagaaattaaaatgagaactctggcagaatttataaactttgttactttcaaaattaaagtagtagaaatgttttaattgatagaacagtta

SEQ ID NO: 101027 - DNA, 201 bp, Homo sapiens
ggaggcagaagttgcagtgaactgagattgcgccactgcactctagtctgggtgacagagcaagactctgtctcaaaaaaaaaaaaaaaaaaaaaaaaaaagctgatttttagacatgtctctattagagacaaaattattcatttaattccgggatttgtagtcattttggaactttgctgctacttaattgctaaatga

SEQ ID NO: 101028 - DNA, 201 bp, Homo sapiens
aaaatgtgctacagacattgtaagggcaaaatatttaacaataactgagatttctaaaaattgcagattggctaaatgttaataaattatgatctaagtarattatatctacctaggagaaaataaaaaaaaatttatggtattttaaggtatttatttatgtacttatgcattgagatatttgccatcaaaatttttact

SEQ ID NO: 101029 - DNA, 201 bp, Homo sapiens
acccaggaggcagaggctatagtgagccaagattgtgccactgtactgtagcctgggcgacaagagtgaaactcagtctcaagccaaaaaaaaaaaaaaaactcatctgtaaaatagggttaataataccttccctgtcaagcctgggtcatgcaagtgacataaagcatgtgaaaaggtcaagttaaggtagtactttga

SEQ ID NO: 101030 - DNA, 201 bp, Homo sapiens
cgcccaggttggagtttcagtggtgcgatctcagctcactgcaacctccacttcctgggttcaagtgattctcctgcttcagcctcctgaggcaagcacgygccaccacacccggctaattttttatttttagtagagatagggtttcaccatgttggtcaggctggttttgaactcgaccttatgatccacctgcctccg

SEQ ID NO: 101031 - DNA, 201 bp, Homo sapiens
gaatcgcttgaacccaggaggcagaggctatagtgagccaagattgtgccactgtactgtagcctgggcgacaagagtgaaactcagtctcaagccaaaaraaaaaaaaaaactcatctgtaaaatagggttaataataccttccctgtcaagcctgggtcatgcaagtgacataaagcatgtgaaaaggtcaagttaagg

SEQ ID NO: 101032 - DNA, 201 bp, Homo sapiens
cagcctcccgagtagctgggattacaggcgcccgctaccacgcccagctaacttttgtatttttggtagaggcaagagtgtcaccatgttggccaggctgrtctcaaactcctgacctcaggtgatctgcctaccttggcctcccgaagtgctgtgattacaggcgtgagccactgcacctggccagaagttgctagtcat

SEQ ID NO: 101033 - DNA, 201 bp, Homo sapiens
tgaacccgggaggcggaggttgcagtgagccaaaatggtgccactgcattccagtctgggcaacagagtgaaactctctctaaaaaaaaaaaaaaaaaaaagcaggggctggtttattgctacgcatgcttattattaaataaacactgtcatcatatcctgcaggatgcaaatttgttctttaccaaaattaattaccga

SEQ ID NO: 101034 - DNA, 201 bp, Homo sapiens
gtagaggcaagagtgtcaccatgttggccaggctggtctcaaactcctgacctcaggtgatctgcctaccttggcctcccgaagtgctgtgattacaggcrtgagccactgcacctggccagaagttgctagtcattctaaactggaagcttgacataatattttgaatcaagcattttaaaaatgtctgcttttcataaa

SEQ ID NO: 101035 - DNA, 201 bp, Homo sapiens
ttttttctctttaagaaacgactcgggggaagccatcgggggtggtgtgagcagggagtcgactcttccaagtaagatatttaagattagatctttcttgdcgtccgccccccacccttttttaggacgtataccatgtgccttttgacccgctttctctagatcattgcaagtcactgctattactggaataaacttagt

SEQ ID NO: 101036 - DNA, 201 bp, Homo sapiens
atggataaagaaaatatggtatatatacacaatggaatattgttcaaccataaaaaaacaaaacaaaataatgtcacttacagcaacatggatggaactgraggtcattatcttaagttaaataagctaggcacaaaaagacaaatatcatatattctcacttatatgtgggagctaaaaatttgaacacatggaggtaga

SEQ ID NO: 101037 - DNA, 201 bp, Homo sapiens
ataaactttgttactttcaaaattaaagtagtagaaatgttttaattgatagaacagttattccttttttaaaaccagtcgaaaatctgacaaataggctwtatattaatattaacccaattttacaaatagttaaatgttcaccaacttttcctcttgaagatagtatacaggattgtataaaaatgacataaattgctg

SEQ ID NO: 101038 - DNA, 201 bp, Homo sapiens
gaggacaaaagttaaaggtataaactgacaaaatagtaaagcccatttttccttctgctccgtaaatgtccaaggtctctaaataggtactgggaataggyggagattatccttgcagactgtatcattgaggagcttccctgttgccactcatatcatgcatgtttcagtagacataagtcaaatgtatggatgtggggc

SEQ ID NO: 101039 - DNA, 201 bp, Homo sapiens
ccgtaaatgtccaaggtctctaaataggtactgggaataggcggagattatccttgcagactgtatcattgaggagcttccctgttgccactcatatcatkcatgtttcagtagacataagtcaaatgtatggatgtggggctgcgcgcaatggctcatgcctgtaatcccagcactttgggaggccgaggtgggtggatc

SEQ ID NO: 101040 - DNA, 201 bp, Homo sapiens
aaaaaaaaaaagaaagaaagaaagaaagtatggatgttagaaagacacattgagttcagtttatttctttgtgtttttgctagcatgagaaggtttcagayggtaaagattagaagaatacaaaaattactgaatttctaattaggcattttattttattttatttttttagagatggggtcctgccatgttgcctaggct

SEQ ID NO: 101041 - DNA, 201 bp, Homo sapiens
ttgagtgtactttaggaacttagtttttcaaaatttatttaatttttattttgataattatagattcacaggaggttgtaaataaagaaatgtaaagggargtcccaaacacctctcccctaactcccttccctctctttgcccgtgtcagtatcccacaccaccacacacagtagtataccaaaaccaggaaattgacat

SEQ ID NO: 101042 - DNA, 201 bp, Homo sapiens
atataaatgatccatgtatatatatatgatatgggtgatatatataaaataaatatgggtgatatatatatatacacacacacacacacacacacacacayacatatatatatgttctctgctgtatcatttatttatgttttcttttttttagaggcagaatctcactctgtcacccaggctagagtacagtggctcagt

SEQ ID NO: 101043 - DNA, 201 bp, Homo sapiens
aggcagaaaatgtggcatttgaaacagtccctgggggtactcagttactccccatacaagtgccttcttttctgaaaaagggaactctattattctttttyttcttccttttcttctactgttgctcttctttctctttctctcttttcttttctctctctttctctctctctttcttttctttctttttctttctgcttc

SEQ ID NO: 101044 - DNA, 201 bp, Homo sapiens
agagggagaccctgtctcaaacaaacaaacagaaacacatatatttcctattctttcccaccacaaacataaaaataaataaataaataaataaataaatraaaaggaagaatgggccgggcatagtggctcacgcctgtaatctcagcactttgggaggctgaggcaggtggatcatgaggtcaggagatcgacaccatg

SEQ ID NO: 101045 - DNA, 201 bp, Homo sapiens
actgctatgatgaacaccctcatataaatctaccatgatttaatgtctctaggttttatgaacaaaatcggattgccaggagaaagggtgtatgcattcayacttgaactgagcattggttgccagatggctcttcagaatggctgtgcaagtctctattcctaccagcagcactgaagaattcctatttcctcacatccc

SEQ ID NO: 101046 - DNA, 201 bp, Homo sapiens
gcatgagaaggtttcagacggtaaagattagaagaatacaaaaattactgaatttctaattaggcattttattttattttatttttttagagatggggtcytgccatgttgcctaggctggagtgcagtggctatacacaggtgcgatcatttcgtacctcagcctccaactcctggattcaagccatcctcctgcctcag

SEQ ID NO: 101047 - DNA, 201 bp, Homo sapiens
gtgtgtatcagtgtgggaagaagctctgaacagcaatccggtaaaatcaagtaattaggcaatagatcttcaaagactccagacttttactggagcaagtratctacccaaattctttttaaacctgaaagtttacatttatgctactttttatagctattcttactaacataatgataaataatttttgcttatgcttac

SEQ ID NO: 101048 - DNA, 201 bp, Homo sapiens
atccctttctttgagtcagggaaggcgtaggaggtaggagaacctatcttccatctctgctgtctttcttcacttccttcaatatctttaagttgctgaayggagagttctcgggcattaacccagggtttggtctccctttgcaggcaagaaagtgagagtgtgctgactctcaagggcctgactcccacaggcacactc

SEQ ID NO: 101049 - DNA, 201 bp, Homo sapiens
aaactggatatgttgggactattatattgtctttcaaaaaagatgatttccattcttcagtagaagaaattaaaatgagaactctggcagaatttataaaytttgttactttcaaaattaaagtagtagaaatgttttaattgatagaacagttattccttttttaaaaccagtcgaaaatctgacaaataggctatatat

SEQ ID NO: 101050 - DNA, 201 bp, Homo sapiens
tagatagaacatgggaacagagattagagagagatttctatgaaggcttgtcaaattctagggcaataagtatatcacattcaaaaggtttcatttttcartttgggagtaacaatgagatatgccattacagcaagtcatttgaattatataaattgtgtttatgcattataatggtcacaaagaaaattttatgcttga

SEQ ID NO: 101051 - DNA, 201 bp, Homo sapiens
gaacagagattagagagagatttctatgaaggcttgtcaaattctagggcaataagtatatcacattcaaaaggtttcatttttcaatttgggagtaacartgagatatgccattacagcaagtcatttgaattatataaattgtgtttatgcattataatggtcacaaagaaaattttatgcttgaatttgtcttgtagt

SEQ ID NO: 101052 - DNA, 201 bp, Homo sapiens
tattgtgctttgtgtgagatgtggatctaactttatgtttttttttttaaatggcaaccacttgtcccagagccatttatttaaaagttcatcattattaytgtgatttgagatgccacctttattatttaccaaatttttgtaggtacttttatactatatctgtagtataaaattccactggtatgtttatctacataa

SEQ ID NO: 101053 - DNA, 201 bp, Homo sapiens
ttctagggcaataagtatatcacattcaaaaggtttcatttttcaatttgggagtaacaatgagatatgccattacagcaagtcatttgaattatataaaytgtgtttatgcattataatggtcacaaagaaaattttatgcttgaatttgtcttgtagtgtgtgctgtatttatggagtttaaagattaatcatcccaaa

SEQ ID NO: 101054 - DNA, 201 bp, Homo sapiens
ctcaccagcatttgtcattgcctgtcttttggataaaagtcattttaactgggtgagatgatatctcattgaagttttgatttgcatttctctgatgatcrgtgatattgaataccttttcatatacctgtttgccattttatgtctccttttaagaaatgtctattcagatattttgctcatttttaaattggattattg

SEQ ID NO: 101055 - DNA, 201 bp, Homo sapiens
gcatttgtcattgcctgtcttttggataaaagtcattttaactgggtgagatgatatctcattgaagttttgatttgcatttctctgatgatcggtgataytgaataccttttcatatacctgtttgccattttatgtctccttttaagaaatgtctattcagatattttgctcatttttaaattggattattggattttt

SEQ ID NO: 101056 - DNA, 201 bp, Homo sapiens
taaaaggtgaaacgccttattgcatgttcagggagggggaagaattttagtgtataacttaggtttcccccctctctccccaaatcagcctcataaatgtkaattatctgtactacataattataatgggatttttgagatttatctgcttagcatttgtatgctatcgttagaggtttaactgaattgttcatctaactg

SEQ ID NO: 101057 - DNA, 201 bp, Homo sapiens
ctctaaatcttgtagagttttaggttatagttgtttctccctttaaactaagaagatggattacacataaccactaatttatgtgctgcttttattcagcsgtaagtcttaggcacaacccttctctctgagattaacaatcggtttgaaagcgctattttgtaagaagggaatagacttagaccagctgtgttagtggcc

SEQ ID NO: 101058 - DNA, 201 bp, Homo sapiens
aaaatatcaatgagatacgcatatcttatttggagtatattattttctaactgtggtcttttagtttaaggaacaacagactgtttgaatgatccttacgrtgtttgaacatgttaccggctggaatcccagaaaatatcttggcatgcctttgaattttgagagcccattttattgtgggtgctctggtttaatcccaaa

SEQ ID NO: 101059 - DNA, 201 bp, Homo sapiens
aaagagaaggttagaggttttatgaaaaagcgaaatgttatgtgttgctctttgagaaagttcattggcactagtaaggttctggagagcttgccagtttkgattggtgagtgatggcagtgggtaaaattagccttagaatttcagcagatcatttcagtagccattagataaaactggtttccagtaatagcaggcagt

SEQ ID NO: 101060 - DNA, 201 bp, Homo sapiens
ttggcactagtaaggttctggagagcttgccagttttgattggtgagtgatggcagtgggtaaaattagccttagaatttcagcagatcatttcagtagcyattagataaaactggtttccagtaatagcaggcagtttcggcagacatgcttgcagagaattacatttttgggtcaatgttatatgtcctgagtgcttcc

SEQ ID NO: 101061 - DNA, 201 bp, Homo sapiens
ccacactctcccttcttgttttagctctcatgctttaaacaagtattcttttcatagtctatttagtgcctgaatgcctgctataggtaaccaatctcttyagtttctggtttatctttcctgcattttttatgtacaaagtagatacatacatatgaatttcatatatcttctttattatatagagggtggcatactaca

SEQ ID NO: 101062 - DNA, 201 bp, Homo sapiens
tcacctacaccaggcttaagaagaactcactcatgttttcttctagaacttgtgtggctttttctttttacatttagattgctcatccttttgttgtttaytgtgctttgtgtgagatgtggatctaactttatgtttttttttttaaatggcaaccacttgtcccagagccatttatttaaaagttcatcattattactg

SEQ ID NO: 101063 - DNA, 201 bp, Homo sapiens
aagtatatcacattcaaaaggtttcatttttcaatttgggagtaacaatgagatatgccattacagcaagtcatttgaattatataaattgtgtttatgcrttataatggtcacaaagaaaattttatgcttgaatttgtcttgtagtgtgtgctgtatttatggagtttaaagattaatcatcccaaaacattgtttctg

SEQ ID NO: 101064 - DNA, 201 bp, Homo sapiens
gttttcttctagaacttgtgtggctttttctttttacatttagattgctcatccttttgttgtttattgtgctttgtgtgagatgtggatctaactttatstttttttttttaaatggcaaccacttgtcccagagccatttatttaaaagttcatcattattactgtgatttgagatgccacctttattatttaccaaat

SEQ ID NO: 101065 - DNA, 201 bp, Homo sapiens
gaacttgtgtggctttttctttttacatttagattgctcatccttttgttgtttattgtgctttgtgtgagatgtggatctaactttatgttttttttttwaaatggcaaccacttgtcccagagccatttatttaaaagttcatcattattactgtgatttgagatgccacctttattatttaccaaatttttgtaggta

SEQ ID NO: 101066 - DNA, 201 bp, Homo sapiens
acacagtggacagtcaccttatcacatttccaagcaacagagctggaaagttaatccaaggtcacacttgtctttaagaggagagaggtattgttaacctrttatccacaacttttcaaaagtatctttacaaagataattgtgctttcaaatcatctaaaataaatggctctaaagtagcttcatattctcctggcctat

SEQ ID NO: 101067 - DNA, 201 bp, Homo sapiens
ttacttgaacctgggaggcagaggttgcaatgagcggagatcttgccactacactctagcctggccaacagagggagaccctgtctcaaacaaacaaacaraaacacatatatttcctattctttcccaccacaaacataaaaataaataaataaataaataaataaataaaaaggaagaatgggccgggcatagtggctc

SEQ ID NO: 101068 - DNA, 201 bp, Homo sapiens
gagcggagatcttgccactacactctagcctggccaacagagggagaccctgtctcaaacaaacaaacagaaacacatatatttcctattctttcccaccmcaaacataaaaataaataaataaataaataaataaataaaaaggaagaatgggccgggcatagtggctcacgcctgtaatctcagcactttgggaggctg

SEQ ID NO: 101069 - DNA, 201 bp, Homo sapiens
aacatgtggtgtttggttttctgtccttgtgatagtttgctgagaatgatggtttccagcttcatccatgtccctgcaaaggacatgaactcatcctttttatggctgcatagtattccatggtctatatgtgccacgttttctttatccagtctatcattgatggacatttgggttggttccaagtctttgctattgtga

SEQ ID NO: 101070 - DNA, 201 bp, Homo sapiens
aaatgccgttagtgttttggaattaagtaaaatacaggttttacgactaatatatatgtgtgagtggctgagagagttctagatatttagatagaacatgrgaacagagattagagagagatttctatgaaggcttgtcaaattctagggcaataagtatatcacattcaaaaggtttcatttttcaatttgggagtaaca

SEQ ID NO: 101071 - DNA, 201 bp, Homo sapiens
gtcacccaggctcaatgcagtggcacaatgatacctcactgcaaccttgaactcctgggctcaagcagtcctcctgcctcagcctcctgagtagctgggaytacaggatgtaccgccatgcccagctaattgtttttaaaatttttagaggagatgaggtcttgctgtgttgcttaggctggtctcgaactcctgacctat

SEQ ID NO: 101072 - DNA, 201 bp, Homo sapiens
gaccagggatgactcttagcttccagatactgcttgcagttcggtaacatgtcgccaccagtggtagttcccaatatgaatgtttgcttttttccaggccrgcctgaatgcatctctctgaccttctcttctgtgatcagctagctggaaaaaaaccctcactcagtttttaaaaggctcaccttaggtcaggcatggtgg

SEQ ID NO: 101073 - DNA, 201 bp, Homo sapiens
agtggcacaatgatacctcactgcaaccttgaactcctgggctcaagcagtcctcctgcctcagcctcctgagtagctgggactacaggatgtaccgccaygcccagctaattgtttttaaaatttttagaggagatgaggtcttgctgtgttgcttaggctggtctcgaactcctgacctatctagagataattttaaaa

SEQ ID NO: 101074 - DNA, 201 bp, Homo sapiens
tgagattacagtgggctatgattgtgccactgcactctagcctgggtgacagagtgagaccctgtccctaaaaataaataaataagtaaataaatgttcayctgattagatcaggccctcccaagataatctttcttttgccatataatgggacaaaataatgggagtctcatcatacttacagttttcatccactgaaag

SEQ ID NO: 101075 - DNA, 201 bp, Homo sapiens
aggtgagggaaggaaatgggaagtgagtgctaataagtgggggatttctcattggggcaatgaaaatattctaagcacagattgtggtgatggttgcacarctctactatattaaaaccattgacttgtatactttaaacaagtgagttttgtggtatatgaattctatttcagttaagatgttaaaaaggaaaacaaaag

SEQ ID NO: 101076 - DNA, 201 bp, Homo sapiens
tatttatttgagtatctctttttttcttagtcttgctaagggtttgtcaattttgtttagtttttcaaaaaccaactcttagttttgttgacttttttctrttgtttttctattctctatttgattcatttctgccctaaactttcctttcttctgcttactttgggcttatttgattctcctttttctagtttcttgaag

SEQ ID NO: 101077 - DNA, 201 bp, Homo sapiens
taatgtacagaagaaatcattaacagtgggaggttgggttaggaggacttagagggtttttttgttttgtttttgttttgtttttgtttttttagatgcartgttgacatgttgcccaggctaatctcaaactcatgcaatcctccagccttagcctcctaaatagctgggactataagtgcatgccatcgcgcatggctt

SEQ ID NO: 101078 - DNA, 201 bp, Homo sapiens
tcatttcttacctgggaaaattaaataatgtgtataagttaacaaatgccctggaatgtaatactcgataaaagctaattttatgaattaggagtagataygtagtgaagaaagctgcctatggctgcctttgttttgaattaagtttcagagggttttttaggtgacatttttcttaattattcttttgtcttatcagat

SEQ ID NO: 101079 - DNA, 201 bp, Homo sapiens
acagactatttttagaagatggaacaataggtcctggaaacattttaagtatctccttttgcccagaatttcttaccttaggtttttatttgcttttcacrtgatttaactgtagttaaacctgatggctttctttttctcctatctaccaagatattccttcttttttattataatgctgcatctgaaatgtaaataaat

SEQ ID NO: 101080 - DNA, 201 bp, Homo sapiens
acccaggctggagtgcagtggcacaatctcggctcactgcaacctccgcctcccaagttcaagtgattctcctgcttcagcctcctgagtagctgggattmcaggcacgcaccaccacgcctggctaatttttatatttttagtagagacagggtttcactatgttggtcaggctggtctcaaactcctgacctcgtgatc

SEQ ID NO: 101081 - DNA, 201 bp, Homo sapiens
tctcaaaaaaaaaaaaaaaaaaagaggcctcactgtgttgcccaggctggtctcaaactcctggcctcaagcaatcccccgacctcagccttccaaaacaytgggattacaggcgtgagccaccacaccagtttaagccaaatgtttttagagaaaatagaatcaagacataatttgtttacagaccttaaaaattatgag

SEQ ID NO: 101082 - DNA, 201 bp, Homo sapiens; identical to SEQ ID NO: 15924

SEQ ID NO: 101083 - DNA, 201 bp, Homo sapiens; identical to SEQ ID NO: 15925

SEQ ID NO: 101084 - DNA, 201 bp, Homo sapiens
cttagaccagctgtgttagtggcctctggatgcaggggttagcgtgacagtggggaaaattattaagatacttttcttctttttcattttggtattagaargagaaaggcaactaatactagtgacgggaatacatttttaaaaggtgaaacgccttattgcatgttcagggagggggaagaattttagtgtataacttag

SEQ ID NO: 101085 - DNA, 201 bp, Homo sapiens
cccttaactgctttctaatctgctacgtcttagctgaagtaggcagggaaaccagataagccagaactgtgggtcaagtcagaataaataggatcttagtraagcttagtgcagccctcaggaatctcacaatcaaatcaccattgtgccatgtaatttccaccataacatgccataagatcaaaagaagattaaaaatct

SEQ ID NO: 101086 - DNA, 201 bp, Homo sapiens
tgtagtgtgcaatgcaacaaaaaatttgagtcacctcactcacatgttcctagctgaggttgaacaaaatgatgccctaccttctttttgcagccctcatrttgtaaacaggcattcttttgagttttatttagtgaaagatgttttatgtttttgtgcttttcatgagtgatttcactgtttagaatggccaccaagtgt

SEQ ID NO: 101087 - DNA, 201 bp, Homo sapiens
cctcccaagtagttggaactacaggcgtacaccgccatgcccggataattttttatattttagtagagatggggtttcaccatgttgcccaggctggtctsgaactcctgaggtcaggcaatatgcccgcctcagcctcccaaagtgctaggattacaggcgtgagccaccgtgcccagcccttttttctttttataagat

SEQ ID NO: 101088 - DNA, 201 bp, Homo sapiens; identical to SEQ ID NO: 15923

SEQ ID NO: 101089 - DNA, 201 bp, Homo sapiens
ggtctcctgacctcgtgatccgcccgtctcggcctcccaaagtgctgggattacaggcgtgagccaccgagcctggcctaattttggtattttttatagargtggagtttcgccctgttgttgaggctggtcttgaactcctgggctcaagcgatcctcttgcctttgtctcccaaagtgctgggattacggtgtgagcca

SEQ ID NO: 101090 - DNA, 201 bp, Homo sapiens
caagttccagaaactcctgtaattttactaatgaaagcagtattgttatgacaactggattttttaaaaaaataaatactgtttgtcattgctcattgcarcattttttagagtagcaaaagattgatctaattagattgtggtatatccataaagcgaaatactaggtaaatgttaaaaaaattacaaagctctcctgta

SEQ ID NO: 101091 - DNA, 201 bp, Homo sapiens
  misc_feature (1)...(201): n = A,T,C or G
aggtaggcaagttaaattaactttgtttctatgaaaaccattggaactgataaacttgtattatacttgtaattgttttattaggtaagatggttcaaaangcgaatgccttaacttggtgttataaaagttgaatcggaaggaaaatatgtagaagctatttttaagtttttaacttatgtacagctcctggttgtgcaa

SEQ ID NO: 101092 - DNA, 201 bp, Homo sapiens
tgacaactggattttttaaaaaaataaatactgtttgtcattgctcattgcagcattttttagagtagcaaaagattgatctaattagattgtggtatatycataaagcgaaatactaggtaaatgttaaaaaaattacaaagctctcctgtaggggaggcaaaattttacctttactctcagggtttttcagctgggcct

SEQ ID NO: 101093 - DNA, 201 bp, Homo sapiens
gtagagagaagatgggcaaactagaagggccagagaactgaaatacataaaatgaagaaaaagaagagggatagttgaaaactggtggagcagttgacatyaatttcattaatgggacagcaagactattttgatgactgttatttttttcttttcttttttttttttttttctgagacagagtctcgctgtcgcccgggc

SEQ ID NO: 101094 - DNA, 201 bp, Homo sapiens
ctcgggaggctgaggctggaggatggtgtgaacccgggaggcggagcttgcagtgagccgagattgtgccactgcactccagtctctcaaataaataaatwaattaattaattaattaaattaaataaataaaaaataaaaaatttgagctatgtctcacgcctgtaatcccagcacattgggaggctgaggtgggaggat

SEQ ID NO: 101095 - DNA, 201 bp, Homo sapiens
acggcaaaaccccatctctacaaagatcagtcgggcatggttgcttgcacctgtagtcctagctactcaagaagctgaggtaggagaatcccttgagcccwggaggttgaggctgcagtgcgcattgctccactgcactctagcctgggcgacagtgagaccctgtctcaaaaaaaaatagaggttgggaactgtctctag

SEQ ID NO: 101096 - DNA, 201 bp, Homo sapiens
gatctctgcacaaccaatcacctcaacaagtgtttggatttctgttccaggagcagctgacagacgaagaaaagtgctggacaggaagggagaattctgaygccaacatgcagcgaagtatcatgtgagcaccctcccttgcccctgagtctttccttctccaagtcctctgtttctttctctaaatctgtacttaaaaaa

SEQ ID NO: 101097 - DNA, 201 bp, Homo sapiens
tttaaaaatatattgtgaaggggtaacgtattccaattgttctgcctgcaaaagcatgcatattaaaaaatctccctccagcgtctgtccctcctgaggcracagcattaccagttttttgtcttccaactgagatgttctgtacatatacaagatatgtggatacatttatagtctttcttttgtttttgttttttgaga

SEQ ID NO: 101098 - DNA, 201 bp, Homo sapiens
tttttaaaaatatattgtgaaggggtaacgtattccaattgttctgcctgcaaaagcatgcatattaaaaaatctccctccagcgtctgtccctcctgagrcaacagcattaccagttttttgtcttccaactgagatgttctgtacatatacaagatatgtggatacatttatagtctttcttttgtttttgttttttga

SEQ ID NO: 101099 - DNA, 201 bp, Homo sapiens
ccagtttatagaaggggaaatggagacatggggaggcaaactaagccacttgtctcctgccactggctcaaagcaaggaccatgctggggtcctgaccatyacagtcaccagggcgggcgccaggctcagttctctccctgactcatcctcctcaagcctcgccaacccctcagggcagctgagatgggaggtgctggtgc

SEQ ID NO: 101100 - DNA, 201 bp, Homo sapiens
cagcgccggcctactgagttttttgattccaaaattgagtttgagttgtggtgccaacatgtggcggccaaggctgtagagagtagtggagacttagaggygtgtggtgcgggacagagagtactgattccagaaaacgaaaggggaccccatgggttgaagaagatttctgtgcaaaggaagggaaagtcaaagaaaacc

SEQ ID NO: 101101 - DNA, 201 bp, Homo sapiens
gtgaggtctgcctcggcttgggcgcgggccctgcagcaggaagccagggtttgtttgccatgacagtgagagcaaatccattgagggctcacatcatggarcatttcttgggagccctgccctgtgccccgtgccttacctcatcagttcctaccagcaactctgtgagactggtcttgttaccctcacctccagtttata

SEQ ID NO: 101102 - DNA, 201 bp, Homo sapiens
ccaagaagatagacatcatcaaaggcctctttgtggcctgccgccactcagaagcccggttcatcgctaggtaagcgtgtgggcctgtgaggctacagagsgggactgcaggctcggaggtgaaaggagggagggactggcagctggaatcatcacaaatgccctgaccatccttggatgagaaaagcatgagcaggaggc

SEQ ID NO: 101103 - DNA, 201 bp, Homo sapiens
tgattctcctgcctcagcctcctgagtagttgggattacaggctggcaccaccatgcctggctaattttttgcatttttagtagagatggggtttcaccatgcgggccaggctggtcttgaactcctgacctcgtgatccgcctgtctcagccttccaaagtgctgggagtacaggcgtgagccacagcgccggcctactg

SEQ ID NO: 101104 - DNA, 201 bp, Homo sapiens
gtggcccacgcctgtaatcccagcactttgggaggctgaggcgggtggatcacctgaggtcaggagttcaagaccagcctggctgacatggtgaaatcccrtctctactaaaaatacaaaaattagctgggtgtggtggcacgcacctgtagtcccagctacttgggaggctgaggcacgagaatcgtttgtacccaggag

SEQ ID NO: 101105 - DNA, 201 bp, Homo sapiens
tgttcgttcattacggattgctttccctttcattcttttctgtgttagggttagggcgttatctcgataggtgtaggcaggttatgttatctccacatttyatttcagaccagaaaagaggtgacacacagtatctggtgacaagggtgtgttggttctgataggttgagagctgcttgtcacagctgtcaccgtgacttg

SEQ ID NO: 101106 - DNA, 201 bp, Homo sapiens
tgtcaggcatagagtaggcttcccagtaaacgcttatgtatttctccttcccttgcaactcagtctggtggttaagaggtgagctgtggagcaggccgacytggggtggaacgtactatagatgcaggttaagttcctttgaaaacccctctgtgccttagtttctgtaacagagttgttgtggagagtcagtataattga

SEQ ID NO: 101107 - DNA, 201 bp, Homo sapiens
taccagacccagcacacacggggtcggttaagaatactctgagctgcaggtaacagaaaacccaactacattggcttggacaaagaaggatctgtttttcycacaaaagaagttgcagatgctggctttcctgcccaacaatccatggcagctggggcctcttccactgtctcatgcctccacccttgatgggtcgtgttc

SEQ ID NO: 101108 - DNA, 201 bp, Homo sapiens
gatggtggagagaggctgtgaaacagggttgaggagaaggctgagagggaggagagcctgatggggacagatttgcaggggtgtgggagagaacacaggggcagcagttcaggtgagggaggaccaggcatgtgctgggacagggggtgtggggtgcagggaaggggagggctggggaaagatgctggaggcagagacagc

SEQ ID NO: 101109 - DNA, 201 bp, Homo sapiens
ggaggggctgaagggagctaaggggcggggccggggaaaagattgcgtgtgggcggggccacctggaagggggaggtgccaagggtggggctggctgggarccggaagtgctgagggggcgggggccacctggaagtgctgagggggcggggctagaagaaggtaaatcgcgggcagcagcatcacctggaaggagtgggc

SEQ ID NO: 101110 - DNA, 201 bp, Homo sapiens
atcttcagcaggaatcaggaagacaacactgggaagtacccggacatcatcagccgcatccccaaggtgggcgtctgcctcacacttgcactctgccaggrtctgtggtcaggggtgcaaaggcctgaggcccatctaggccagtgtggcacagtgcggggtttattgggaggagatcaggttgcgtttggctgcaaatga

SEQ ID NO: 101111 - DNA, 201 bp, Homo sapiens
gagagatggtggagagaggctgtgaaacagggttgaggagaaggctgagagggaggagagcctgatggggacagatttgcaggggtgtgggagagaacacaggggcagcagttcaggtgagggaggaccaggcatgtgctgggacagggggtgtggggtgcagggaaggggagggctggggaaagatgctggaggcagaga

SEQ ID NO: 101112 - DNA, 201 bp, Homo sapiens
gcagacagtggatgtcagggtgaggaggcaggaggaatgcctccaggatctccctgggtgactggatggatgacaaagccgtcggcagcttgggaccctgrtgaggggcaggcacctgcagggggcattaatcaccccagcgtggggcaggcatgagcaacctctatctgtgggcccccagggccatccaggaagtttgga

SEQ ID NO: 101113 - DNA, 201 bp, Homo sapiens
agaggtctgaaaggactttgactggagggattggaaggagtgggaggaaagaacatggtgtgtggggggccagcagcctgaaggggcccagccgccagtgstgggtggaaaggctggtgatgcggatggcccgcctgccaagggcctggagtgctcggtgcttatcatgaggacactggggagccatggaaggattgtgag

SEQ ID NO: 101114 - DNA, 201 bp, Homo sapiens
gggaggccgaggcgggcggatcatttgaggtcaggagttcgagaccagcctgaccaacacgttgaaaccccgtctctactaaaaattaaaaaaaattagcygggcatggtggtgcgcaccggtagtcccggctactccggaggagaatcacctgaacccacaaggtggaggttgcagcgagccgagatcgtgccactgcac

SEQ ID NO: 101115 - DNA, 201 bp, Homo sapiens
aacacaaaattagcccagcatggtggcgggtgcctgtaatcccggctactcaggaggctgaggtacgagaatcacttgaacccaggaggcagagattgcastgagctgagatcacgctattacaccccagcctgggtgacagagtgagactctgtctcaaaaacaaacaaacaaaattatcatgggtacggctcattctgc

SEQ ID NO: 101116 - DNA, 201 bp, Homo sapiens
ctcccccactgtaaccgtccggtgggttcaccttgcccgctgcctagacagagccgatttatctagacgggggaactgcagtggagaaagagtcattcccrcagagctggctgtgcgggagaccggagtttcatttttactcaaatcagtctccctgagcatgtggggagcagagtttttaaagataatttggcgtgtagg

SEQ ID NO: 101117 - DNA, 201 bp, Homo sapiens
gcctggccaacatggtgaaaccccatctctactaaaaacacaaaattagcccagcatggtggcgggtgcctgtaatcccggctactcaggaggctgaggtrcgagaatcacttgaacccaggaggcagagattgcagtgagctgagatcacgctattacaccccagcctgggtgacagagtgagactctgtctcaaaaaca

SEQ ID NO: 101118 - DNA, 201 bp, Homo sapiens
actttgaaggcccctgtgactatatcaggcccacctggatagtccagggtaatcccactatcggaaggtcagctgattagcaacctcaattaccctttgcyatgtaacctaacatattcccaggttccaggtattagaatagagatctcttttggagcttagactttaccctgaggcttctggggagctaggaagagtttt

SEQ ID NO: 101119 - DNA, 201 bp, Homo sapiens
agaccagcctggccaacatggtgaaaccccatctctactaaaaacacaaaattagcccagcatggtggcgggtgcctgtaatcccggctactcaggaggckgaggtacgagaatcacttgaacccaggaggcagagattgcagtgagctgagatcacgctattacaccccagcctgggtgacagagtgagactctgtctca

SEQ ID NO: 101120 - DNA, 201 bp, Homo sapiens
ctcttgcctccccttctcccagctgaagaaggactaccttgatggcgtgggtgacaccctggacctggtggtgatcggcgcctacctgggccgggggaagygggccggccggtacgggggcttcctgctggcctcctacgacgaggacagtgaggagctgcaggccatatgcaaggtcctggggaactggggctgatggca

SEQ ID NO: 101121 - DNA, 201 bp, Homo sapiens
gacgtttgagaagatcgaggaggtgtctgctcggtaactaatgaggactgcctgggtggggggcggggtcgcttctgggtctgtcctctgcatggcggtcygtgctgccttgttccgccaaaccctgtcaacttggcctctgaccccgctcgggcgtatgatcatggatgtcagacatggtcacaaaagcggctgcaggtc

SEQ ID NO: 101122 - DNA, 201 bp, Homo sapiens
gaccatcctggctaacatggtgaaaccatgtctctatcaaaaatacaaaaaattagctgggcgtggtggcgggcgcctgtagtcccagctactcgggaggmtgaggcaggagaatggcgtgaacccgggaggcggagcttgcagtgagccaagatcgtgccactgcactccagcctgggtgacagagcaagactctgtctc

SEQ ID NO: 101123 - DNA, 201 bp, Homo sapiens
ttgttttcatccagctctgcaccgtgtgccttgaacagagcctggcacatcacagttggaaggaatgactttgctttgacccagggctctatgcaattcartctccgttttgcctccgtagacccctggatccatctggttacaatcctgccaagaacaactatcatcccgtggaagatgcctgctggaaaccgggccaga

SEQ ID NO: 101124 - DNA, 201 bp, Homo sapiens
ttcctcacctctcagatgggggcacagtgatgagaggaagcatgttcttccacccactcttccccacgtgccaggcactcagcaacgggctttccctgacscaatgctccaaatcctcacaacactgctgggagtagattctgttgttatcctggtttcctgggtgagaaaagtaaagcggggaggtgggacagtattgag

SEQ ID NO: 101125 - DNA, 201 bp, Homo sapiens
agcgaggtcctgaaacgctttgaggaggcagctttcacctgcgaatacaaatatgacgggcagagggcacaggtatggggagtgggacatgtcccttccayagacaggaaaacgtcaaagagcaggggtgtggggtcactgaggcctgagcttcaagccggcctgcgccacagactgccgagccctcgctcatctctctgg

SEQ ID NO: 101126 - DNA, 201 bp, Homo sapiens
ctatagcctttctcttttacacagttcagtagcacacactctgtgatattctgccctttgtttgaaataacagcataccttagaaactgcccaagagctartttatgtagaccagcgggtacaattttataagcttccacagttgtttcacggaattatgtcatcaccttaaaacaatttttcactaacctttaaacttaa

SEQ ID NO: 101127 - DNA, 201 bp, Homo sapiens
tcgctcttgcgtctcttttccttccctagggttccttacctggctgtggcccggacgtttgagaagatcgaggaggtgtctgctcggtaactaatgaggamtgcctgggtggggggcggggtcgcttctgggtctgtcctctgcatggcggtctgtgctgccttgttccgccaaaccctgtcaacttggcctctgaccccg

SEQ ID NO: 101128 - DNA, 201 bp, Homo sapiens
aggtgggttaaaaagtatgacgcagtgagtccaaaatctctttgatgtcacgcctctacaaatgaaacagataacgacaagaaattctttcagctttaacrtttcatgattacagtttaagtctaacaaaaaagtgttcggaggattcttgacatcaattttgtacccccaattgagaccttatcaaggaggttaaatagc

SEQ ID NO: 101129 - DNA, 201 bp, Homo sapiens
tcctcctcttgcaggacttggcaaaccttttctataaagagccagagagtaaatattttaggctttatgggacacatttggcccctgttgcaaaaccattmttagatcccagaacctgtagaaacggtccagggtcggagtttgctgaccgtggccccagccaccctctgaccctgcctccagtctttcatcctcagtctg

SEQ ID NO: 101130 - DNA, 201 bp, Homo sapiens
gacacagggaggtgcagggactcgccacaagcacacacagctggagaaaattcatccaggccgcgagagaagggagacacgcagccacaactgtcaccctygacacccccacccgcgctctcccctgaaggtcggcagctggagtccgtccgggctgaggcagccgagaaaggcgacgtggggctggtggccgagaacagc

SEQ ID NO: 101131 - DNA, 201 bp, Homo sapiens
cccacctcggcctcccaaagtgctgggattacaggcgtgagccagtacacctggcctgaactcaccagatttagtgtatgtgctggaagcctgcaggcgcrtctactctgccttaaaattcactgaacaccccttctttgccagccctgggcggcccacgaggatgaaccatagagagccggccgccctgccccagccctc

SEQ ID NO: 101132 - DNA, 201 bp, Homo sapiens
agctgctgggaggagtgggaatattttcttctcatgacgatgagatttctttttaccactattcctaagtctcctatttcaggccaagtgctagaattcckctagttagcactgaggagtagacagcaggcctgagatctcagctcaaagctaacagaaaggaaaagggtaggtgtagttatatcttccatctgcagggtc

SEQ ID NO: 101133 - DNA, 201 bp, Homo sapiens
agaagaggccacccctgagttagggctgagaccatagggtcagaaaggagggtagacagagaggtttcagtcccctctactctcaacttttggaaaatggrgtccctccttcccccgctcactctagaactgttctttcctcttccagaagcctgccctggactgctcacaggtctccccgccccgtcctgccacatctcc

SEQ ID NO: 101134 - DNA, 201 bp, Homo sapiens
ggagtttctttttgaaggggaaattcatgtttctgtttttttttttttctttctttcttaaagaaagggttttatgtgtgtttagatctctgcacaaccartcacctcaacaagtgtttggatttctgttccaggagcagctgacagacgaagaaaagtgctggacaggaagggagaattctgacgccaacatgcagcgaa

SEQ ID NO: 101135 - DNA, 201 bp, Homo sapiens
gatggatgaaatgatgagatttgctgaggagacaaccagaaaatgttcattggatgcttgaaaggaagggaaggaaacagcaaagaaaccaaagtgtttgygggcagtgcccccactctgcctgctgtagtcgcccctttacacccccatttccccaccttccagggcggcactgaaggagtggaatggagtggtgtccga

SEQ ID NO: 101136 - DNA, 201 bp, Homo sapiens
taggcagggactccatttgctcctcagcatcacccatcacagggcaggcactctggagacttccagagatgtgtgatgggtgggtgagtggatgagtgggygggtggattaatgcactgatggatgaaatgatgagatttgctgaggagacaaccagaaaatgttcattggatgcttgaaaggaagggaaggaaacagcaa

SEQ ID NO: 101137 - DNA, 201 bp, Homo sapiens
actttgggaggccgaggcgggcggatcatttgaggtcaggagttcgagaccagcctgaccaacacgttgaaaccccgtctctactaaaaattaaaaaaaawtagccgggcatggtggtgcgcaccggtagtcccggctactccggaggagaatcacctgaacccacaaggtggaggttgcagcgagccgagatcgtgccac

SEQ ID NO: 101138 - DNA, 201 bp, Homo sapiens
gcctcggcctcccaaaatgctgggattacaggcctgagccaccacacccggccctcttctgtattttgtaaggatgctttttggattcagagcctaccttmattcactatgctctcatcttaatctacaggtacatccgcaaagaccttctttccaaatgaggtcatgttgtgaggctctgagtggacctgaattttgggg

SEQ ID NO: 101139 - DNA, 201 bp, Homo sapiens
cacgatttcagctcaccgcgacctccacctcctgggttcaagtgattctcctgcctcagcctcccaggtagctgggattacaggcatgcgccaccatgccyggctacttttgtatttttaatagagacagacacttttttgttagacttaaactttaatcatgaaatgttaaagctgaaagaatttcttgtcgttatctgt

SEQ ID NO: 101140 - DNA, 201 bp, Homo sapiens
tactacgactgcttttctttcttttgagacggagttttgctcttgctgcccaggctggagtgcagtggcacgatttcagctcaccgcgacctccacctccygggttcaagtgattctcctgcctcagcctcccaggtagctgggattacaggcatgcgccaccatgcccggctacttttgtatttttaatagagacagaca

SEQ ID NO: 101141 - DNA, 201 bp, Homo sapiens
tgtaggtggaacctagccttgaaaacctttgtctatttttattttgtttgagacggagtctcgccctgtcatccaggctggagtgcagcagcacaatctcmgctcactgcaacttccgcctccagggttcaagtgattctcctgcctcagtctcctgagtagctgggactacaggcgcgtgccaccacccccagctaactt

SEQ ID NO: 101142 - DNA, 201 bp, Homo sapiens
cttcccaggttcaagcgattcttctgcctccacatcccaagtagccagaattacaggtgcctcgccaccaagcctggctaatttttgtatttttagtagaraccgggtttcaccatgttggccaggctggtctcgaactcctaatctcaggtgttctggccgcctcagcctctcaaagtgctgggattacaggcgtgagcc

SEQ ID NO: 101143 - DNA, 201 bp, Homo sapiens
cttacattgcagcctcctggcatctgcagccttttcctgctccctctgcacaccatgtccccacgtgctgtcattcctccctgctttttttttttttttttgagatggaatctcactctgttgcccaggctggagtgcagtggcacgatctcagctcattgcaccttcaacttcccaggttcaagcgattcttctgcctcc

SEQ ID NO: 101144 - DNA, 201 bp, Homo sapiens
aggcaagacgcaaacttatttttctctctcctgagtgcagagtccgggattcatgtgaccgtctcacagggtcagaggcccaggcttcctctgtgctgtcrtttgctctctgtagatgcccttgtccctgtgaacatccatattctgccaacaggaagaggagggcaccccactcaacattaagtggatgttatttgaacc

SEQ ID NO: 101145 - DNA, 201 bp, Homo sapiens
cttgagtaccgtggtaaggagaaaggaacgtgggctttggagccagccacaccgggttttgaagccttgcctgaaccccagctatgttcctctgtcctcaktaccttcatctataaagtggggatgatctcacctgtcttggagggctgacttgaggattgagggtatttgagaatgtgatcagcctgtcaggcatagagt

SEQ ID NO: 101146 - DNA, 201 bp, Homo sapiens
ctccaggatctccctgggtgactggatggatgacaaagccgtcggcagcttgggaccctggtgaggggcaggcacctgcagggggcattaatcaccccagygtggggcaggcatgagcaacctctatctgtgggcccccagggccatccaggaagtttggaaacgggtctgaggctcaccaggtctggctcagagcccagg

SEQ ID NO: 101147 - DNA, 201 bp, Homo sapiens
ccttacattgcagcctcctggcatctgcagccttttcctgctccctctgcacaccatgtccccacgtgctgtcattcctccctgctttttttttttttttttgagatggaatctcactctgttgcccaggctggagtgcagtggcacgatctcagctcattgcaccttcaacttcccaggttcaagcgattcttctgcctc

SEQ ID NO: 101148 - DNA, 201 bp, Homo sapiens
gttgagaagccagccttgagtaccgtggtaaggagaaaggaacgtgggctttggagccagccacaccgggttttgaagccttgcctgaaccccagctatgytcctctgtcctcagtaccttcatctataaagtggggatgatctcacctgtcttggagggctgacttgaggattgagggtatttgagaatgtgatcagcct

SEQ ID NO: 101149 - DNA, 201 bp, Homo sapiens
attggattggcacaagatagaactgtaagacctgcactttgggaggccaaggcgggtggctcacctgaggtcagtagttcaagaccagcctggccaacatrgtgaaatcccatctctactaaaaatacaaaaaaatagctggatgtggtggtgggcgcctgtcatcccagctactcgggaggctgaggcaggagaatcgca

SEQ ID NO: 101150 - DNA, 201 bp, Homo sapiens
cccatctctactaaaaatacaaaaaaatagctggatgtggtggtgggcgcctgtcatcccagctactcgggaggctgaggcaggagaatcgcatgaacccrggaggcagaggttgcagtgagccaagatcacaccattgcactccagcctgggcggtaagaacgaaactctgtctcaaaaaaaagaacagatgacagatga

SEQ ID NO: 101151 - DNA, 201 bp, Homo sapiens
tcaaggtcgctgccttgcttggggttgacaaggagcagggtcttacgtggcccactgctttacaggcacattggattggcacaagatagaactgtaagacctgcactttgggaggccaaggcgggtggctcacctgaggtcagtagttcaagaccagcctggccaacatggtgaaatcccatctctactaaaaatacaaaa

SEQ ID NO: 101152 - DNA, 201 bp, Homo sapiens
ctactcgggaggctgaggcaggagaatcgcatgaacccaggaggcagaggttgcagtgagccaagatcacaccattgcactccagcctgggcggtaagaaygaaactctgtctcaaaaaaaagaacagatgacagatgagggcagactgtctccagagtcaaaatgcccttgtaggttcaatgggatttttttgccatctg

SEQ ID NO: 101153 - DNA, 201 bp, Homo sapiens
ccctcaaggtcgctgccttgcttggggttgacaaggagcagggtcttacgtggcccactgctttacaggcacattggattggcacaagatagaactgtaagacctgcactttgggaggccaaggcgggtggctcacctgaggtcagtagttcaagaccagcctggccaacatggtgaaatcccatctctactaaaaataca

SEQ ID NO: 101154 - DNA, 201 bp, Homo sapiens
cgggaggctgaggcaggagaatcgcatgaacccaggaggcagaggttgcagtgagccaagatcacaccattgcactccagcctgggcggtaagaacgaaaytctgtctcaaaaaaaagaacagatgacagatgagggcagactgtctccagagtcaaaatgcccttgtaggttcaatgggatttttttgccatctgaccgt

SEQ ID NO: 101155 - DNA, 201 bp, Homo sapiens
tcctctaaatgatttccttttccttgtaaattttaccataaagttgcagttcccaaacattcttagttcacagcacccttgatgtcttagtaatttttttmtgatgctcctaggccaataccttatcagttctattaagtagttatgtccaaacaactattagatactatacatacattggaaaaaaagtaatatttgtgc

SEQ ID NO: 101156 - DNA, 201 bp, Homo sapiens
gaggcaggagaatcgcatgaacccaggaggcagaggttgcagtgagccaagatcacaccattgcactccagcctgggcggtaagaacgaaactctgtctcraaaaaaagaacagatgacagatgagggcagactgtctccagagtcaaaatgcccttgtaggttcaatgggatttttttgccatctgaccgttctgtctat

SEQ ID NO: 101157 - DNA, 201 bp, Homo sapiens
ggaccgcaggagtctccatcccgcttccgcaggtggatagtgacaagggcatctcccttcgcttccctcggtttattcgagtccgtgaagacaagcagccrgagcaggccaccaccagtgctcaggtgaggtcctgggaagcaggggtgggccgcccagctgcttggccctaccagctttttagcgtggtggcctctctgg

SEQ ID NO: 101158 - DNA, 201 bp, Homo sapiens
cagagtgaggacgaggacagagaagccaagaggaagaaggaggaggaaggtgagcccccagaaggagagaagtgtgtgtgtgtgtgtgtgtgtgtgtgtgragccaagaggaaggaggaggaggaaggtgagcccccagaaggagaggggtgtgtgtgtgtgtgtgtgtgtgtgtgtgtgtgtgtgaagccaagaggaagg

SEQ ID NO: 101159 - DNA, 201 bp, Homo sapiens
gaagtgagctcatgcatttgggtattggcaagggtgtcccgaggaggcgtgaggaagcaagggtgcagacgggcagcatggtatagcctgcaccactgtcrctcttgcgtctcttttccttccctagggttccttacctggctgtggcccggacgtttgagaagatcgaggaggtgtctgctcggtaactaatgaggactg

SEQ ID NO: 101160 - DNA, 201 bp, Homo sapiens
ggctgagcctctgacctcccgcttcctccctgcagcttggaactggcttcagtgacgaggagctggaggagcatcaccagagcctcaaggtgagccatggyggctgcgcctcagcctccacccctctcccccctgcccctgacagcacagtccttccatgcagggctcttggcttccaccatcttggggctccaggtgtgg

SEQ ID NO: 101161 - DNA, 201 bp, Homo sapiens
agccccgccgtcccacctagctgtgcctctcccctccccaagatgtgcacccttcccgcccctccccactcacctacccgccccggagcggcgtccacctyccacaatgccccgcgcccaggcctggcccggcccttgctcccgggatgccccgcgcggtctcccgcctctcttcccgccgtgcctcgcgggggcgcttcc

SEQ ID NO: 101162 - DNA, 201 bp, Homo sapiens
ccttctcccagctgaagaaggactaccttgatggcgtgggtgacaccctggacctggtggtgatcggcgcctacctgggccgggggaagcgggccggccgrtacgggggcttcctgctggcctcctacgacgaggacagtgaggagctgcaggccatatgcaaggtcctggggaactggggctgatggcagaagcaggagg

SEQ ID NO: 101163 - DNA, 201 bp, Homo sapiens
caccttgggcgctcccccttctcatctcttgcctccccttctcccagctgaagaaggactaccttgatggcgtgggtgacaccctggacctggtggtgatyggcgcctacctgggccgggggaagcgggccggccggtacgggggcttcctgctggcctcctacgacgaggacagtgaggagctgcaggccatatgcaagg

SEQ ID NO: 101164 - DNA, 201 bp, Homo sapiens
gaccccggcctcccagcctgtccccagtcctggaccgtttgaccagaatcctgcctgctccggcgcttgtgagccagggcttcccaaggaccacgcttctrtgtctccctcagactcctgcgaggggctgatggtgaagaccctggatgttgatgccacctacgagatcgccaagagatcgcacaactggctcaaggtgat

SEQ ID NO: 101165 - DNA, 201 bp, Homo sapiens
gaaaggctgagcaattctgttccagggagggaagttctgagagagagggatgggggaggaactggagctggagagctgaagctgcagcagtggtgacttcragagagtcactgtgtaacctctggcaagggggaaggagtggacaggaagaaagttcttgtctggttccttgcaccctcagccccagcctcctccttcata

SEQ ID NO: 101166 - DNA, 201 bp, Homo sapiens
cccatttattcttgatcgttcaggttttcaagatctttatgttttcaacggccggtgtgtattgagaaaggctgagcaattctgttccagggagggaagtkctgagagagagggatgggggaggaactggagctggagagctgaagctgcagcagtggtgacttcgagagagtcactgtgtaacctctggcaagggggaag

SEQ ID NO: 101167 - DNA, 201 bp, Homo sapiens
gtttggaaacgggtctgaggctcaccaggtctggctcagagcccagggttcgggctggtcagtgtaggagggatgaccacccactggtgggttctcatccrcctggggagaggatgtgctgggagcactggagctggcttagggccatgggcaccaacatttagggaagtcgggggtttcaggctttcatgagaggacaga

SEQ ID NO: 101168 - DNA, 201 bp, Homo sapiens
gaaaagaggtgacacacagtatctggtgacaagggtgtgttggttctgataggttgagagctgcttgtcacagctgtcaccgtgacttgaggctccatctscccagctcttacacccaggcgcccatgggacccagctctggacagtaagtggggccagagcacatcccacgtgtgtaagctggtggctccaaaacaagcc

SEQ ID NO: 101169 - DNA, 201 bp, Homo sapiens
ctcactggcagtgctgtgagtggggcgggccgctcatcccggaccccagacatcttggggacctgaggccacgcgtgtgtcaggaaggcttctgggtagaycatcagctgggtcgcatcagtccttctcatggggtgcacagcttcctctcctccttcctgcacccaagcctaggggagtctcctcttcagagtctagcag

SEQ ID NO: 101170 - DNA, 201 bp, Homo sapiens
tcaagattttctcactcattcactcaagatgtgtttcgggagcactgacgtcataccagacccagcacacacggggtcggttaagaatactctgagctgcrggtaacagaaaacccaactacattggcttggacaaagaaggatctgtttttctcacaaaagaagttgcagatgctggctttcctgcccaacaatccatgg

SEQ ID NO: 101171 - DNA, 201 bp, Homo sapiens
agggggactgtggttggagggaccagaaggacaggagctcagccagagaaaatgcagaggtcaggtggatcggagagatggtggagagaggctgtgaaacrgggttgaggagaaggctgagagggaggagagcctgatggggacagatttgcaggggtgtgggagagaacacaggggcagcagttcaggtgagggaggacc

SEQ ID NO: 101172 - DNA, 201 bp, Homo sapiens
ttatagcgaggaccccctactcattcacagaggttccctgcagagcgtcccaccccagtgatgcccagtgcatagcactgccccaccctggtccttctcarcagcatgttagcatcgctggtccctgccagcccccttctctgtccccatttcctcttctctccttgtcctcctcacccccagcactcgcccctgtgtatt

SEQ ID NO: 101173 - DNA, 201 bp, Homo sapiens
tgtttcgggagcactgacgtcataccagacccagcacacacggggtcggttaagaatactctgagctgcaggtaacagaaaacccaactacattggcttgsacaaagaaggatctgtttttctcacaaaagaagttgcagatgctggctttcctgcccaacaatccatggcagctggggcctcttccactgtctcatgcct

SEQ ID NO: 101174 - DNA, 201 bp, Homo sapiens
cacttccctagtgaccttgtcccgcctgtggctttaaatcccatccgcgccctgatgacaccggcccagatgtctcccctgagtgtggtcatgctcgttcwtccaccgctttcctggctccacgtgcatgtttgctgacttcctacagccagcgtggctgggggcacgttccccaagccatttctaccaagtgggtgagcg

SEQ ID NO: 101175 - DNA, 201 bp, Homo sapiens
agagcctttctctttgcctgcccctaattaaataggaaataagttatttaagaaagcagggggcacggtgcccatcattctgcctgttagagacagtgacrgagagaggcacagttcagtgcacgtgttaggggagctcctgttccgtgccaagcactgttctttaaatcaattttcttaagatgtaatttccctaaaagt

SEQ ID NO: 101176 - DNA, 201 bp, Homo sapiens
gactgctcacaggtctccccgccccgtcctgccacatctcctgagaacaatgcttccctctctgacacctctcccatggacagttccccatcagggattcygaagcgtcgcacaggtgagaacacacgggcccctgccccttcagtcgcctgcctttctttttctcttttttttttttttttttttttttgagacatagtc

SEQ ID NO: 101177 - DNA, 201 bp, Homo sapiens
  misc_feature (1)...(201): n = A,T,C or G
tgccggccaccgcttgttaaaccccaagttcataccaaaggccatgcacagccctgcagtggcactatctgtcttggccatccatgccctgtgtgagcatnagaatcagctgaagagctgaaaaatatcctgaggtctctttctcccccccaacccttgtccccattttggtacagatgtaggcctggggctggggagtcc

SEQ ID NO: 101178 - DNA, 201 bp, Homo sapiens
cccctgcccaccacactctgctgcctcattgtaatgccggccaccgcttgttaaaccccaagttcataccaaaggccatgcacagccctgcagtggcactrtctgtcttggccatccatgccctgtgtgagcatcagaatcagctgaagagctgaaaaatatcctgaggtctctttctcccccccaacccttgtccccatt

SEQ ID NO: 101179 - DNA, 201 bp, Homo sapiens
taccctgaggcttctggggagctaggaagagttttgggcagaagagaggcagagatcatttagtcctgggcagtgtttaaaatattcatctggccaggcaygatggctcacgcctgtaatcccaacactttgggaggccaaggcgggtggatcacgaggtcagaagttcgagagcagccaggccaacatagtgaaacctca

SEQ ID NO: 101180 - DNA, 201 bp, Homo sapiens
tgtcaccctggctgctatggggaagctggattggaggggatcggtgcaggacagggaagcccagtaggcgaggctgagcagggagttggtgggaagtggayggcttaggaaatcatcaggttcactgaggaactgaatgtgggtgacaggaggagggagatgacaagagctcctaggtttccagcttgtgagaccaaatat

SEQ ID NO: 101181 - DNA, 201 bp, Homo sapiens
tgctccaaatcctcacaacactgctgggagtagattctgttgttatcctggtttcctgggtgagaaaagtaaagcggggaggtgggacagtattgaggacyggctaggaatcccagctccacctctctcagctgtgtgaccttgaggaagtgacttagcctttctgtgtctctcttctgaggatgtgaaacacttagccca

SEQ ID NO: 101182 - DNA, 201 bp, Homo sapiens
ttgccttccacttacccatttattcatttttttgagatagagtctcgctctgttgcccaggctggaatgcagtggcacaatcttagctcactgcaaccttygcctcctgggttcaagtgattctcctgcctcagcttcccgagtagctgggattacaggcacctgccaccaggcccggctaatttttgtatttttagtaca

SEQ ID NO: 101183 - DNA, 201 bp, Homo sapiens
gaactgtgccatgtcactgccattagctgcagaaaagtctaggagagcaaatatctggtgaaggggaatgaggttgtcggaattagctgagagccgttaasgatccagcacctggagccagcagcatggccgccctcacagatgggcagccagttaggtggcgagagggagaccggtagatgaatgctgtcggcctcaggc

SEQ ID NO: 101184 - DNA, 201 bp, Homo sapiens
aaatggtgtcgggccctcttgccagtgactagccccatgctttaagctctcagaatccttctgacatcagggttcttccctctcaaggctttccacgaacsctgtcactagttgtgacccgcacatgtcctgttcgcctcacatttagggcttattgtctttattctcacaaagatgtctcatctctcttctccctgccgg

SEQ ID NO: 101185 - DNA, 201 bp, Homo sapiens
ctccctggacaccaaggacatcgagcagatcgccgagttcctggagcagtcagtgaaaggtgagggtgctcacttttctctcctgaggtctgcagcttgcrctgaccccggcctcccagcctgtccccagtcctggaccgtttgaccagaatcctgcctgctccggcgcttgtgagccagggcttcccaaggaccacgctt

SEQ ID NO: 101186 - DNA, 201 bp, Homo sapiens
ggctggagtgcagtggcacgatctcagctcattgcaccttcaacttcccaggttcaagcgattcttctgcctccacatcccaagtagccagaattacaggygcctcgccaccaagcctggctaatttttgtatttttagtagagaccgggtttcaccatgttggccaggctggtctcgaactcctaatctcaggtgttctg

SEQ ID NO: 101187 - DNA, 201 bp, Homo sapiens
aaagcatctgtgtgcacctgcctctttgttagtgcatcttgagagctgcagaaggaaaagggaatttatctccccgtgtttgtctttccacctcatcttcyacctctctcaggccctgggtctctcccttcacttttcagattaaactcccatcggtcacatccttcatcctggacaccgaagccgtggcttgggaccggg

SEQ ID NO: 101188 - DNA, 201 bp, Homo sapiens
attaaactcccatcggtcacatccttcatcctggacaccgaagccgtggcttgggaccgggaaaagaagcagatccagccattccaagtgctcaccaccckcaaacgcaaggtagcatcacccgctccactgcctgccaaggccccgtacttcctcatcttccacccagtcctggctgtgggtcctgcccagtgcccagaa

SEQ ID NO: 101189 - DNA, 201 bp, Homo sapiens
tgagagggaggagagcctgatggggacagatttgcaggggtgtgggagagaacacaggggcagcagttcaggtgagggaggaccaggcatgtgctgggacrgggggtgtggggtgcagggaaggggagggctggggaaagatgctggaggcagagacagcaggatttgggggctgagatggaaggttggggcttagagagg

SEQ ID NO: 101190 - DNA, 201 bp, Homo sapiens
ctcttcattttggtaaccgctttattgagatataattcacaattatacagtttgcccatttaaagtgtacaattttgcccatttaaaatgtacaagtcagyggttttcagtgtatttaaagtgtatttcagtgtatttaaagtgcccatttaaagtgtacaagtcagtggttttcagtgtatgcgctgagttgtgcagtta

SEQ ID NO: 101191 - DNA, 201 bp, Homo sapiens
gaggcccatctaggccagtgtggcacagtgcggggtttattgggaggagatcaggttgcgtttggctgcaaatgacagagcactcagtcctgcgtggtgtragcccatatgattttttctcacatctagaggtgggcaccccagcaccgacttggctgagcactgatgtccccctgaaccaagcttatcgctacctctatc

SEQ ID NO: 101192 - DNA, 201 bp, Homo sapiens
agcaagggaggtggccagggaaggtacaggtgtgcagctgtgtcccagggatgacccggggacccaggttcctgtgtccctctgccctccaaaggttgtcrccccaatgtctgtgatcaaatgtggctcacttccctgttctaattgtgggaggagggacgcagaggagggaggggaggcaaccagattccttgcaaggat

SEQ ID NO: 101193 - DNA, 201 bp, Homo sapiens
aagtctaggagagcaaatatctggtgaaggggaatgaggttgtcggaattagctgagagccgttaaggatccagcacctggagccagcagcatggccgccytcacagatgggcagccagttaggtggcgagagggagaccggtagatgaatgctgtcggcctcaggcacagtgccccgtctcaccttcctgcactcacgaa

SEQ ID NO: 101194 - DNA, 201 bp, Homo sapiens
ccctaaccttcctagcggcatggctacagatgaatgactcagcctctctgtgtgtcagtttcttgatctacagtaaggagctaacagtggcaggtgctttrtctgttagggtgagggctaaacagtgggataggggtgtggaactcagtagttagtacatggaagctctcaaaaaaaattagctgcaatcatcaatatccc

SEQ ID NO: 101195 - DNA, 201 bp, Homo sapiens
agtggcaggtgctttgtctgttagggtgagggctaaacagtgggataggggtgtggaactcagtagttagtacatggaagctctcaaaaaaaattagctgyaatcatcaatatcccagataatcttttttttttttttttttgagatggagtctcactctgttgcccaggctggagtgcagtggcatgatctcagctcact

SEQ ID NO: 101196 - DNA, 201 bp, Homo sapiens
gggaccgatcgaacaaaagagaaaagcaattcaaagccacaagacggattagtcagtgttgacatgtggagacaactgctttgtcctttgtttaaaaacaytcagatcacctccttcctctctgacacacactcttgcaaggtccagctggaactgatttcaaagcaaaacacaaaactgtaaatgtgctggaaaaactca

SEQ ID NO: 101197 - DNA, 201 bp, Homo sapiens
gatgacaccggcccagatgtctcccctgagtgtggtcatgctcgttcatccaccgctttcctggctccacgtgcatgtttgctgacttcctacagccagcrtggctgggggcacgttccccaagccatttctaccaagtgggtgagcgttagacacagggaggtgcagggactcgccacaagcacacacagctggagaaaa

SEQ ID NO: 101198 - DNA, 201 bp, Homo sapiens
ataaaactggatcttcctcttgaaggtttcaggaagtcagtgggggttccgtgccgggagtcacaggttgtcattgtgcgaagctcctggggtttcccctygagtggaggacgggtgtgttgagggccagcgagcaggagcctgtcatcagtaagagttgatggatgtttgagtggagaggggcagtgaggggtggacaag

SEQ ID NO: 101199 - DNA, 201 bp, Homo sapiens
ataggttgttaagcaattaattgcttcactgtaattttgttaattatttgaagagatgtctgggctgattcccacgacatctaacatgcacacaggaggcygcactgaagactggctgaatggatgattggatgcgtgggtggataaatatcctataaagtaatgaggtcacccccccatctctgccatgctcaaaaccca

SEQ ID NO: 101200 - DNA, 201 bp, Homo sapiens
gtgaggctacagagggggactgcaggctcggaggtgaaaggagggagggactggcagctggaatcatcacaaatgccctgaccatccttggatgagaaaarcatgagcaggaggcccagcccctaaagagtgggaagggacaccatttcctttcacaggccagcttctgtcccttggtagtgctgtctagagaaggcccct

SEQ ID NO: 101201 - DNA, 201 bp, Homo sapiens
tagagagccggccgccctgccccagccctcgtgatgtgcttagtgtgctggggctgtgggacactgaataggttgttaagcaattaattgcttcactgtarttttgttaattatttgaagagatgtctgggctgattcccacgacatctaacatgcacacaggaggccgcactgaagactggctgaatggatgattggatg

SEQ ID NO: 101202 - DNA, 201 bp, Homo sapiens
gccatggtggatgctgggaagggcaagacagcagaggccagaaagacgtggctggaggagcaaggcatgatcctgaagcagacgttctggtgagagctggrcagtgggtggagttgccaggggctgtgggcagagtgccagggtgggggtggagccagaggagcagtgggtggggccagtgaagtgacggacaggcatcac

SEQ ID NO: 101203 - DNA, 201 bp, Homo sapiens
ttgttctcacccgccaccccagcgaggttcccgacctggaccgaattatccccgtgctgctggagcacggcctggaacgtctcccggagcactgcaagctsagcccaggtacaggccccaggggcgctcaccagcctggcagcagccctgctccctcctgagtcggcgtgagggtggccatcgtaggcgcccctctcagaa

SEQ ID NO: 101204 - DNA, 201 bp, Homo sapiens
ggcgcgtctactctgccttaaaattcactgaacaccccttctttgccagccctgggcggcccacgaggatgaaccatagagagccggccgccctgccccakccctcgtgatgtgcttagtgtgctggggctgtgggacactgaataggttgttaagcaattaattgcttcactgtaattttgttaattatttgaagagatg

SEQ ID NO: 101205 - DNA, 201 bp, Homo sapiens
cttatcagttaagttaaagggcttatttgaaattctctgttatgtgctgagatggaaatggtgttagaagttataggatgcggccgggcgcggtggcttaygcctgtaatcccagcacattgggaggccaagcagatcacaaggtcaggagatcgagaccatcctggctaacacggtgataccccatctctactaaaaata

SEQ ID NO: 101206 - DNA, 201 bp, Homo sapiens
tcggcctcccaaaatgctgggattacaggcatgagccaccgtgcccggccccatttgttcttatttaaacctagaaacccttcccatgtccagtctcttcycaggggccatccttggggttccttctggaagttcccttcagacttacttctagtccctcctcagtccactgaggagcccctccccagcagtgagggcccc

SEQ ID NO: 101207 - DNA, 201 bp, Homo sapiens
agagcctgggggatctttctaacacccagagttgactctgcccctctagggttccccagagccgtcaggagaaaatctaagcccatttggccactggctgycacctccctctctggcctcacttcctacctctctgttcctctggctctgaactcaccagattttttatttttgagacagagtcttgctctgtcgcctagc

SEQ ID NO: 101208 - DNA, 201 bp, Homo sapiens
gagaatcgcttgaacctgggaggcagaagttgcagtgagccgagatcacaccattgcactctagcctgggcaacagagcgagagtctgtctaaaaaaaaaagatttaaaaagtgcatagttaatatttgttgaataaaacttgggatgtatcatatcttgcaggtgcgttagggcagaaaaattagtgttgcctcctttgt

SEQ ID NO: 101209 - DNA, 201 bp, Homo sapiens
caggggccatccttggggttccttctggaagttcccttcagacttacttctagtccctcctcagtccactgaggagcccctccccagcagtgagggccccrccttgggcgctcccccttctcatctcttgcctccccttctcccagctgaagaaggactaccttgatggcgtgggtgacaccctggacctggtggtgatcg

SEQ ID NO: 101210 - DNA, 201 bp, Homo sapiens
aaagagccagagagtaaatattttaggctttatgggacacatttggcccctgttgcaaaaccattcttagatcccagaacctgtagaaacggtccagggtyggagtttgctgaccgtggccccagccaccctctgaccctgcctccagtctttcatcctcagtctgatccccgtagagcctgggggatctttctaacaccc

SEQ ID NO: 101211 - DNA, 201 bp, Homo sapiens
tgcccttgtaggttcaatgggatttttttgccatctgaccgttctgtctatcgtcagaagaggagaccccgaaagaaagcctcacagaggctgaagtggcmacagagaaggaaggagaagacggggaccagcccaccacgcctcccaagcccctaaagacctccagtgagtttctggtcctctcctccgccctgccccacc

SEQ ID NO: 101212 - DNA, 201 bp, Homo sapiens
gtgggcgcctgtcatcccagctactcgggaggctgaggcaggagaatcgcatgaacccaggaggcagaggttgcagtgagccaagatcacaccattgcacyccagcctgggcggtaagaacgaaactctgtctcaaaaaaaagaacagatgacagatgagggcagactgtctccagagtcaaaatgcccttgtaggttcaa

SEQ ID NO: 101213 - DNA, 201 bp, Homo sapiens
ttataaagagaggtttcctggactcacagttccacacggctggggaggcctcacagtcatggcagaaggcgaaagaggagcaaaggcacatcttacatggygccaggcaagagagcgtgtgcaggggaactgccctttataaagccgtcagatctcgtgagacttcctcactatcacgagaacagcacgggaaaaacctgc

SEQ ID NO: 101214 - DNA, 201 bp, Homo sapiens
gtggcctctctggaaccttgtggaggtgggagcagccagggagcttctgaccaccccgtcccaccctctctccgcaggtggcctgtttgtaccggaagcaragtcagattcagaaccaacaaggcgaggactcaggctctgaccctgaagatacctactaagccctcgccctcctagggcctgggtacagggcatgagttg

SEQ ID NO: 101215 - DNA, 201 bp, Homo sapiens
cacccagtaggggtctcgtgcctgttcgaggagtcccctatcaaagagcctttctctttgcctgcccctaattaaataggaaataagttatttaagaaagyagggggcacggtgcccatcattctgcctgttagagacagtgacggagagaggcacagttcagtgcacgtgttaggggagctcctgttccgtgccaagcac

SEQ ID NO: 101216 - DNA, 201 bp, Homo sapiens
aggatggtgacaaagatcaggaaggtggcaaacagtgaagggtcagtgaccccaggagaggtatagaaagacgctggcagcggccaggcacagtggctcaygcctgtaatcccagcacttgggagcctgaagcaggcagatcacttgaggtcaggagtttgagaccagcctggccaacatggtgaaaccctgtctctacta

SEQ ID NO: 101217 - DNA, 201 bp, Homo sapiens
gtgttctttttttttttttttttttttttttttgagacagagtctcactctgtcatccaggctggagtgcattggcatgatcttggctcactgtaacctcyacctcctggcttcaagtgattctcctgcctcagcctcccaagtagctgggactacaggcgcccgctaccgtgcccggctaattttttgtatttttagtag

SEQ ID NO: 101218 - DNA, 201 bp, Homo sapiens
tctaggccagtgtggcacagtgcggggtttattgggaggagatcaggttgcgtttggctgcaaatgacagagcactcagtcctgcgtggtgtaagcccatrtgattttttctcacatctagaggtgggcaccccagcaccgacttggctgagcactgatgtccccctgaaccaagcttatcgctacctctatcccctgctg

SEQ ID NO: 101219 - DNA, 201 bp, Homo sapiens
tggacacctcccacccacaacccctcccccgccgtggactgcagctgggagtcactgtccagcactgggttccatggccaccctagtgcaacaaagcctcrgaaagccagagtctaactctgcagcctctccagccaggaacgcggggaggaggagtcaggacgagtttggagggggccagcctgtggataggccccaagc

SEQ ID NO: 101220 - DNA, 201 bp, Homo sapiens
gctttcttccatgctttgctcagatatcacttcctcagcgaaactttcctcaccacctatgttagcttcccatttgctgccataacaattgaccacaaacrcagtggcttaaaacagtgtcagtttattgtcttacagtttgggagtcgtgagtctcaaatgggttgcactgggctaaactcaaggtgtcagcaggtctgc

SEQ ID NO: 101221 - DNA, 201 bp, Homo sapiens
tactctagcctgggtgacagtaagactccatctcaaaaaaataaaaataaaaaatcaaatatttccttgtgtccctggccaagcaaggccccctcctctgyccaacaccatgcatccaccagaggcaaccccaggtctgctttttggtcgccacaggttggttttacctgttctagagcttcctgttggtggtataatatg

SEQ ID NO: 101222 - DNA, 201 bp, Homo sapiens
ctgcagcttggaactggcttcagtgacgaggagctggaggagcatcaccagagcctcaaggtgagccatggcggctgcgcctcagcctccacccctctccyccctgcccctgacagcacagtccttccatgcagggctcttggcttccaccatcttggggctccaggtgtgggcaggagggcagcaggcagtggagctggc

SEQ ID NO: 101223 - DNA, 201 bp, Homo sapiens
cagagagtcctgcagctggctctgtaaattatatgtggagatccgggctccacaggaaaggaccagcattctgtgagcctatgtaacaaacaggcctggcyggtgacagtggctcctgtaatcccagcactttgggagggcaaggcgggtgaatcacttgaggttaggagttcgagaccagcctggccaacatggtgaaac

SEQ ID NO: 101224 - DNA, 201 bp, Homo sapiens
aggcgggtgaatcacttgaggttaggagttcgagaccagcctggccaacatggtgaaaccctgactactaaaaatacagaaattagctggatgtggtggcrtgctcttgtagtcccagctacttgggaggctgaggcaggagaatcacttgaacgtgggaggcagaggctgcactgagcggagattgcaccactgcacgcc

SEQ ID NO: 101225 - DNA, 201 bp, Homo sapiens
acttccctggttttctgtggatactgcgtagaccagagtggggtgggggccatgagtgtacacagctttagatggcaggagcaagtgctgggcctgtggcyggctgagcctctgacctcccgcttcctccctgcagcttggaactggcttcagtgacgaggagctggaggagcatcaccagagcctcaaggtgagccatgg

SEQ ID NO: 101226 - DNA, 201 bp, Homo sapiens
gagggaaaagaaggcttgccagtggaggagacagacaggggcaggggttctagagggaacggcacatgcaaaggcccagtagtggaagaggcattgcccayttatttgagaaacagagaggctcacgtgctggggtgaagagaggctcagggggccaggtgaggcgagggacgacccaggctgacccgggagagtcccccc

SEQ ID NO: 101227 - DNA, 201 bp, Homo sapiens
tgtacacagctttagatggcaggagcaagtgctgggcctgtggccggctgagcctctgacctcccgcttcctccctgcagcttggaactggcttcagtgaygaggagctggaggagcatcaccagagcctcaaggtgagccatggcggctgcgcctcagcctccacccctctcccccctgcccctgacagcacagtccttc

SEQ ID NO: 101228 - DNA, 201 bp, Homo sapiens
gacaagagctcctaggtttccagcttgtgagaccaaatattacattctcagagacattagtttctgtctcctcttggtggggaataaaagaaaagcatctrtgtgcacctgcctctttgttagtgcatcttgagagctgcagaaggaaaagggaatttatctccccgtgtttgtctttccacctcatcttccacctctctc

SEQ ID NO: 101229 - DNA, 201 bp, Homo sapiens
agtatttacaaaggactgattacgtgttagctactggattttaggtgcctgagatctggtaggaaacaaatcagacaaaaattcctctttatagaacttargttttttgggttttttgttttttgtttcttgttttttttttaaagacagggtcttgctctgttacccaggctggagtgcagtggtgctcctgggctcggg

SEQ ID NO: 101230 - DNA, 201 bp, Homo sapiens
atgtgttgtgtctcttctgtcctggcaagtgtggggccttctcacctggggataggtaagcaggcaaagtgggtgggagccacagggctcggggcagttasaggaagtggacccctgaggagaccagcctggccaacatggtgaaaccccatctctactaaaaccacaaaaatgagccagtgtggtggcgtgtgcctgtag

SEQ ID NO: 101231 - DNA, 201 bp, Homo sapiens
gcttccaccatcttggggctccaggtgtgggcaggagggcagcaggcagtggagctggctttggagtccagcatctccaggttcatgtctcagcactgccrgctactagctggtgaccctgctcaagcagcctcacctccccaagccctgtgcctcattcacaccaggggttagccaaaggacacagcaggtgccatagct

SEQ ID NO: 101232 - DNA, 201 bp, Homo sapiens
tgtttttttcccttcctccctctccccagccctccaacacttggccttgactttgagattccagaccctctgttcctctcttcctctgctcactgcaggcsctggtgctgcccagcccacgcccttacgtgcggatagatggcgctgtgattcccgaccactggctggaccccagcgctgtgtgggaggtgaagtgcgctg

SEQ ID NO: 101233 - DNA, 201 bp, Homo sapiens
gctgtggattttgagagtcaggggaggggtgtgtgtgtgagggggtggcttactccggagtctgggattcatcccgtcatttctttcaataaataattatyggatagctactttgtgacagggtctgtgctgggctctgggggcaaagctgtcatgggtgtcacctgcatagcatgtagccatgtagccatggcctaggaa

SEQ ID NO: 101234 - DNA, 201 bp, Homo sapiens
caatctcagctcactgcaagctccccacctcccggattcacgccattctcctgcctcagcttcctgagtagctgggactacaggcgcccgccaccacaccyggctaatttctttttgtatttttagtagaggcggggtttcaccgtgttagccaggatagtctccatctcctgacctcgtgatccacccgcctcggcctcc

SEQ ID NO: 101235 - DNA, 201 bp, Homo sapiens
tgatttaatactgaaaactgaaatacctcgaactagtagttcacacactggccagcaggtgtcgctgggtttcctttgaaaaatctaaaatatcttgcagygcccagtgagttccctgcatgttggtgaacccaccgaaaacagccataaagatctgatcgattgatcatctggggcctgcatgagattacaccaattgca

SEQ ID NO: 101236 - DNA, 201 bp, Homo sapiens
tcccaggcccctcctgctgctcctctcttcccccgcccatcacatctgcagccgcatccacagctcctcctcagctcgctccatcctggcttcccacaccyaccaggtgcacttccacctctgggccactaccttctttcccagcctaaaactctctttcccagatacacgcctggctcagtcccctgctttcttccatgc

SEQ ID NO: 101237 - DNA, 201 bp, Homo sapiens
tttttttttttttttttttttttttgagacagagtctcactctgtcatccaggctggagtgcattggcatgatcttggctcactgtaacctccacctcctrgcttcaagtgattctcctgcctcagcctcccaagtagctgggactacaggcgcccgctaccgtgcccggctaattttttgtatttttagtagagacgagg

SEQ ID NO: 101238 - DNA, 201 bp, Homo sapiens
aatgctccagagtgacccccgagatgcgaggcagctggggtatttatacaccaactcctgccgatcgtggggtgagggcctctcctggggctagtttattycctgccacttccagacttctgaggttccggggaagctgtctggaacacttggaggcagttaagatctgaggggagcagtggggagctcaggggacctgct

SEQ ID NO: 101239 - DNA, 201 bp, Homo sapiens
ttcaaggtccctctctttccaactccacattggcgtgaggtggatcttcctcaggtcctgcaacgagaagagtgtgtcgtagaagcacgcaggagaatccrgcctctgttaagccagatattagaggatttgcaaaagtgtaaaataatgcctctagtctcaccactttctcaaaacttgggttatgtttcatcaaaatat

SEQ ID NO: 101240 - DNA, 201 bp, Homo sapiens
tggctgagggcatgctgggagctccaggtggacgctgaggttggccctgggggtgtgtcaggggatcttgttcagagggagcaacattgagctatgtcccraacctcacatgctgaggcctggaggggtgacacagcttggtgtgtctggaaacaccccagtttagcagtgatataaaagaaggtggagtatgtggtgtgg

SEQ ID NO: 101241 - DNA, 201 bp, Homo sapiens
tcacgcctgtaatcagagcactttgggaggtgggaggatcgcttgagcccagtagttcaagaccagcctgggcaatatagaaaagaccttgtgtctattcmaaaaaaaaaaaaaaattaatattatttgggtgagcatattggatttatttttttaatttctcattttaaatttctaataggtgtaactataatattatgt

SEQ ID NO: 101242 - DNA, 201 bp, Homo sapiens
ggtgtccaacttgagatgtgcagtgagttcattggattttgaagacctagcatgaaaacagaatgttggaatcatactgttttagatgtattgagcaaaayagactcttcaaaccaagttcaacctggttttttccccctttttattaacgtggctgcaagaaagtttaaggttacatacgtggcttgccagatctttcca

SEQ ID NO: 101243 - DNA, 201 bp, Homo sapiens
ctttccaaagcgctgagattacaggcatgagccactgcagtagcctacatttctaattttagagcttctagtagccatattaaaaggtaagaagaaacagrtaaaatcatattttctttaatccaatgtctaagatattatcctttcaatgtgtgatgaatataagaaattattaacatggaattttacactcttttcttg

SEQ ID NO: 101244 - DNA, 201 bp, Homo sapiens
gaactgatttcaaagcaaaacacaaaactgtaaatgtgctggaaaaactcagtgaaaacttttggaattctaaggaaaggaggactttttttttttttttwaaattatcttggggatgaggctggatgcagtggctcacgcctgtaatcccaacactttgggaggctgaggtgggtggatctcttgtgatgtgcacctgta

SEQ ID NO: 101245 - DNA, 201 bp, Homo sapiens
tctcaaggctttccacgaaccctgtcactagttgtgacccgcacatgtcctgttcgcctcacatttagggcttattgtctttattctcacaaagatgtctyatctctcttctccctgccggccctgcagtccctggtacgtgagcccctttcccggcgccggcagctgctccgggagaactttgtggagacagagggcgag

SEQ ID NO: 101246 - DNA, 201 bp, Homo sapiens
tccagcacagacctttcctgtctcaggaaatagcactgttgtgcccccagggctgagcttctgcctggcacatggttagcacttagtgaacgtttctgaaygaatgggaaaatgctctccctttggaggagtggccagagtgagttggccacgtctctgtcctgagggaaagacggcggcaaggctgactcctgaggtccc

SEQ ID NO: 101247 - DNA, 201 bp, Homo sapiens
tctcattggccagaactgtgccatgtcactgccattagctgcagaaaagtctaggagagcaaatatctggtgaaggggaatgaggttgtcggaattagctragagccgttaaggatccagcacctggagccagcagcatggccgccctcacagatgggcagccagttaggtggcgagagggagaccggtagatgaatgctg

SEQ ID NO: 101248 - DNA, 201 bp, Homo sapiens
ctgccatgtgcctctggcctcatcatcacaatgtggctgcaggagttccagccctcatggccatgcctgctccacgcaccagggaagagcaaagggggttsgaccctgagtcagcctcagccagtgaacaccttctgctcaagttctgttgctcatcactttgctccatggctcacccctagctgcaaggaattctgggaa

SEQ ID NO: 101249 - DNA, 201 bp, Homo sapiens
atgtgcctctggcctcatcatcacaatgtggctgcaggagttccagccctcatggccatgcctgctccacgcaccagggaagagcaaagggggttggaccytgagtcagcctcagccagtgaacaccttctgctcaagttctgttgctcatcactttgctccatggctcacccctagctgcaaggaattctgggaaatgta

SEQ ID NO: 101250 - DNA, 201 bp, Homo sapiens
ttttgcattatttagaatagatttttaaatgagctattgtcaggacaaaaggcaaaaagaatccttaagactctcaatgcaaaaggggctttccaggtgaygtttatattggtgattattgcccacttgctgcgtatctgccagcatccagcattactgctaatttttagcctttcctattttggtaggtgaaagaagctc

SEQ ID NO: 101251 - DNA, 201 bp, Homo sapiens
gtgtgagccaccgcgcccggccctaattttgtatttgtaatagagatggggtttcactatgttggccaggctggtcttgaactcctgacctcaagtgatcsgcccgcctcggcctcccaaaatgctgggattacaggcctgagccaccacacccggccctcttctgtattttgtaaggatgctttttggattcagagccta

SEQ ID NO: 101252 - DNA, 201 bp, Homo sapiens
gcgggtgcctgtaatcccggctactcaggaggctgaggtacgagaatcacttgaacccaggaggcagagattgcagtgagctgagatcacgctattacacyccagcctgggtgacagagtgagactctgtctcaaaaacaaacaaacaaaattatcatgggtacggctcattctgcttgccttcactatcaaacccgtttc

SEQ ID NO: 101253 - DNA, 201 bp, Homo sapiens
aggactttgggaggtcgaggtgggaggatcgcttaagtccaggagtgagacaccagcgtgtgcaacacggcaaaaccccatctctacaaagatcagtcggrcatggttgcttgcacctgtagtcctagctactcaagaagctgaggtaggagaatcccttgagcccaggaggttgaggctgcagtgcgcattgctccactg

SEQ ID NO: 101254 - DNA, 201 bp, Homo sapiens
tggggtttcactgtgttagccaggaagatcttgatctcctgacctcgtgatccgcccacctccgcctcccaaagtgctgggattacaggtgtgagccaccrcgcccggccctaattttgtatttgtaatagagatggggtttcactatgttggccaggctggtcttgaactcctgacctcaagtgatccgcccgcctcggc

SEQ ID NO: 101255 - DNA, 201 bp, Homo sapiens
tgctgggattacaggcatgaaccatcgtgcctggcctctagggtgtggtcttaactacctcaccagcttatccgaagctacaatcctccagagtcctgacygatgatagtgggagctcatgaaacgtgggctccgctgatgctgctggtgggtgtgttcattttaacagccgttctgggaggtgcctacatgaccccttca

SEQ ID NO: 101256 - DNA, 201 bp, Homo sapiens
ttgaggctgcagtgcgcattgctccactgcactctagcctgggcgacagtgagaccctgtctcaaaaaaaaatagaggttgggaactgtctctagagctgygctgcttaccagctgtgtggccatgggtgagttaatcactctgtgccccagtttccttatccggaaaaggaagttagaaaggtcccttctggccaggcac

SEQ ID NO: 101257 - DNA, 201 bp, Homo sapiens
cagtaagtggggccagagcacatcccacgtgtgtaagctggtggctccaaaacaagccgaagggtctttggtcactgccagagatgttcatgacccgccaraggaaagggtcccttggccttctctgctctgtccacactcacttccctagtgaccttgtcccgcctgtggctttaaatcccatccgcgccctgatgacac

SEQ ID NO: 101258 - DNA, 201 bp, Homo sapiens
cctagtgaccttgtcccgcctgtggctttaaatcccatccgcgccctgatgacaccggcccagatgtctcccctgagtgtggtcatgctcgttcatccacygctttcctggctccacgtgcatgtttgctgacttcctacagccagcgtggctgggggcacgttccccaagccatttctaccaagtgggtgagcgttagac

SEQ ID NO: 101259 - DNA, 201 bp, Homo sapiens
aaattcatccaggccgcgagagaagggagacacgcagccacaactgtcaccctcgacacccccacccgcgctctcccctgaaggtcggcagctggagtccrtccgggctgaggcagccgagaaaggcgacgtggggctggtggccgagaacagccgcagcacccagaggctcatgctgccaccacctccgctcactgcctc

SEQ ID NO: 101260 - DNA, 201 bp, Homo sapiens
ggggatggggtgagggaaggagggcaggtattccaaaatgcagggcagcagcacggctggtggggtggaggtgtggtccctgccttcaccaggcactgacrgctcttcccctgactctccagtccacagccaagaagatagacatcatcaaaggcctctttgtggcctgccgccactcagaagcccggttcatcgctaggt

SEQ ID NO: 101261 - DNA, 201 bp, Homo sapiens
tccccagtctatgctagtgggcaggatcattactgcctggctcagtttcctcatctgtcacatggggctgtgtgatatctggggtcccttccaggctctgmagattcttctggtttttgaggagagggtctacatacatcaaggtcgaggagatcagagaagggaggaggcaagattggggaggtgcagacaagccccctt

SEQ ID NO: 101262 - DNA, 201 bp, Homo sapiens
gatctagacaaggctggtgcttgacacaaggatggtgacaaagatcaggaaggtggcaaacagtgaagggtcagtgaccccaggagaggtatagaaagacrctggcagcggccaggcacagtggctcacgcctgtaatcccagcacttgggagcctgaagcaggcagatcacttgaggtcaggagtttgagaccagcctgg

SEQ ID NO: 101263 - DNA, 201 bp, Homo sapiens
cagaaatagcagctcagagtcatacagggctgggcctcacaggccccagagttggggacttctctgcacccagtaggggtctcgtgcctgttcgaggagtmccctatcaaagagcctttctctttgcctgcccctaattaaataggaaataagttatttaagaaagcagggggcacggtgcccatcattctgcctgttaga

SEQ ID NO: 101264 - DNA, 201 bp, Homo sapiens
ggattggggatggtgagcaatgaggtgagaaggtcctggaaaaccagcttggggaacagcgtctttgtcctaagggggacttggaatgtttgctgtggggkaagaacagggcgagagacccattcgtaatgcggggcagtgtgagcccttgccgtccggtctagcctattgagcgctttagcgtggtgagtgtgacagggg

SEQ ID NO: 101265 - DNA, 201 bp, Homo sapiens
ggcaacaagcaaaggaggaggggagcatgctaggcaaggggaacatagaaattgagaaggcctgggggctgctgagggcctggtgtgctggcgtgtagagygcaggattggggatggtgagcaatgaggtgagaaggtcctggaaaaccagcttggggaacagcgtctttgtcctaagggggacttggaatgtttgctgtg

SEQ ID NO: 101266 - DNA, 201 bp, Homo sapiens
ggaagagttttgggcagaagagaggcagagatcatttagtcctgggcagtgtttaaaatattcatctggccaggcacgatggctcacgcctgtaatcccarcactttgggaggccaaggcgggtggatcacgaggtcagaagttcgagagcagccaggccaacatagtgaaacctcatctctgctacaaaagttagccggg

SEQ ID NO: 101267 - DNA, 201 bp, Homo sapiens
gccatgttagccaggctggtcttgaactcctgacctcaagtgatccacccacctcggcctcccaaagtgctgggatgacaggcgtgagctactgtgcctgrcctatagcctttctcttttacacagttcagtagcacacactctgtgatattctgccctttgtttgaaataacagcataccttagaaactgcccaagagct

SEQ ID NO: 101268 - DNA, 201 bp, Homo sapiens
caaagccaggccttgtggaaacctcccaggcccctcctgctgctcctctcttcccccgcccatcacatctgcagccgcatccacagctcctcctcagctcrctccatcctggcttcccacacccaccaggtgcacttccacctctgggccactaccttctttcccagcctaaaactctctttcccagatacacgcctggct

SEQ ID NO: 101269 - DNA, 201 bp, Homo sapiens
ctgctgggagaacattcccacccgggagtctctggatggatgctccgcacccccagctccctacttccctggttttctgtggatactgcgtagaccagagyggggtgggggccatgagtgtacacagctttagatggcaggagcaagtgctgggcctgtggccggctgagcctctgacctcccgcttcctccctgcagctt

SEQ ID NO: 101270 - DNA, 201 bp, Homo sapiens
acaaccagaaaatgttcattggatgcttgaaaggaagggaaggaaacagcaaagaaaccaaagtgtttgcgggcagtgcccccactctgcctgctgtagtygcccctttacacccccatttccccaccttccagggcggcactgaaggagtggaatggagtggtgtccgagagtgactctccggtgaagaggccagggagg

SEQ ID NO: 101271 - DNA, 201 bp, Homo sapiens
gaggtcaggagttcaagaccagcctggccaacatggtgaaaccccatctctactaaaaacacaaaattagcccagcatggtggcgggtgcctgtaatcccrgctactcaggaggctgaggtacgagaatcacttgaacccaggaggcagagattgcagtgagctgagatcacgctattacaccccagcctgggtgacagag

SEQ ID NO: 101272 - DNA, 201 bp, Homo sapiens
tcactctcacccaggctggagtgcaatggtgtgatctcggcccactgcactccagcctgggcgacagagcaagattccatctcaaaaaaaaaaaaaaaaaaggcatcccaatagatgctggagaccaatggcaaccttaggcagggactccatttgctcctcagcatcacccatcacagggcaggcactctggagacttcc

SEQ ID NO: 101273 - DNA, 201 bp, Homo sapiens
aaattagcccagcatggtggcgggtgcctgtaatcccggctactcaggaggctgaggtacgagaatcacttgaacccaggaggcagagattgcagtgagcygagatcacgctattacaccccagcctgggtgacagagtgagactctgtctcaaaaacaaacaaacaaaattatcatgggtacggctcattctgcttgcct

SEQ ID NO: 101274 - DNA, 201 bp, Homo sapiens
ttccgcaggtggatagtgacaagggcatctcccttcgcttccctcggtttattcgagtccgtgaagacaagcagccggagcaggccaccaccagtgctcakgtgaggtcctgggaagcaggggtgggccgcccagctgcttggccctaccagctttttagcgtggtggcctctctggaaccttgtggaggtgggagcagcc

SEQ ID NO: 101275 - DNA, 201 bp, Homo sapiens
caaagatcagtcgggcatggttgcttgcacctgtagtcctagctactcaagaagctgaggtaggagaatcccttgagcccaggaggttgaggctgcagtgygcattgctccactgcactctagcctgggcgacagtgagaccctgtctcaaaaaaaaatagaggttgggaactgtctctagagctgcgctgcttaccagct

SEQ ID NO: 101276 - DNA, 201 bp, Homo sapiens
acccaccctgcccagcaggcttccctcaggccccaactcctattgcacctgcttagggaagccgggtgcctctcccttcatgtgtgagaggaggtgcgtgyccccagcacttgagtcagactgtcttttatgtcttgtcacatggtaaagagcctccctaaccagacataagctccttcccacagagccagggctgtggga

SEQ ID NO: 101277 - DNA, 201 bp, Homo sapiens
aacccaccctgcccagcaggcttccctcaggccccaactcctattgcacctgcttagggaagccgggtgcctctcccttcatgtgtgagaggaggtgcgtstccccagcacttgagtcagactgtcttttatgtcttgtcacatggtaaagagcctccctaaccagacataagctccttcccacagagccagggctgtggg

SEQ ID NO: 101278 - DNA, 201 bp, Homo sapiens
catgtgagcaccctcccttgcccctgagtctttccttctccaagtcctctgtttctttctctaaatctgtacttaaaaaaacaaacaaacaaacaaaaacycttacgttagattttgagttggaatttccaggagtcaagtagtatggaaaatgagccgtgggatatggaagacagtgtattgaacaacagtttttagttg

SEQ ID NO: 101279 - DNA, 201 bp, Homo sapiens
cctaacccaccctgcccagcaggcttccctcaggccccaactcctattgcacctgcttagggaagccgggtgcctctcccttcatgtgtgagaggaggtgygtgtccccagcacttgagtcagactgtcttttatgtcttgtcacatggtaaagagcctccctaaccagacataagctccttcccacagagccagggctgt

SEQ ID NO: 101280 - DNA, 201 bp, Homo sapiens
agtgtgagctacttacgatataaaggttgaggccgggcgcagtggctcatgcctataatcccaggactttgggaggtcgaggtgggaggatcgcttaagtycaggagtgagacaccagcgtgtgcaacacggcaaaaccccatctctacaaagatcagtcgggcatggttgcttgcacctgtagtcctagctactcaagaa

SEQ ID NO: 101281 - DNA, 201 bp, Homo sapiens
gaagctgcttcctcagcaggtacagctggccggggcagagcagattggaacccagatgagtctgaatgcagagtttggctggggtcagtgtgagctacttrcgatataaaggttgaggccgggcgcagtggctcatgcctataatcccaggactttgggaggtcgaggtgggaggatcgcttaagtccaggagtgagacac

SEQ ID NO: 101282 - DNA, 201 bp, Homo sapiens
ctggaaggcggggaggtgaagatcttcagcaggaatcaggaagacaacactgggaagtacccggacatcatcagccgcatccccaaggtgggcgtctgccwcacacttgcactctgccagggtctgtggtcaggggtgcaaaggcctgaggcccatctaggccagtgtggcacagtgcggggtttattgggaggagatcag

SEQ ID NO: 101283 - DNA, 201 bp, Homo sapiens
tctccagcctgggcgagactccgcctcaaaaaaaaatcagaatgagatctagagcataatgacatttaaacaaatcagcacccacatgcagcaaggtgcaygtgcctacatggggagaggtgtagggattggaaatgaagaagaaaatgatggtagggccttccagagcagggctgggaggtgctgttggaactgaggaga

SEQ ID NO: 101284 - DNA, 201 bp, Homo sapiens
acctcggcctcccaaagtgctgggattacatgcctgtaggcatgagccaccatgcccggccaaaaacctttttttaaaaactgtattcttgagtggtctcmtgtgtagccgagtagagaatcgctggtctcgtggtgacagatagggaacaggggcaaggccagactaagggagacaaagcaacagatagtgacacgaagg

SEQ ID NO: 101285 - DNA, 201 bp, Homo sapiens
acacaaggatggtgacaaagatcaggaaggtggcaaacagtgaagggtcagtgaccccaggagaggtatagaaagacgctggcagcggccaggcacagtgkctcacgcctgtaatcccagcacttgggagcctgaagcaggcagatcacttgaggtcaggagtttgagaccagcctggccaacatggtgaaaccctgtctc

SEQ ID NO: 101286 - DNA, 201 bp, Homo sapiens
actggccacgtcttgatgctgtctcatctaagtagaagacaacagtactcttttttttttgaaatggagtctcactctcacccaggctggagtgcaatggygtgatctcggcccactgcactccagcctgggcgacagagcaagattccatctcaaaaaaaaaaaaaaaaaaggcatcccaatagatgctggagaccaatg

SEQ ID NO: 101287 - DNA, 201 bp, Homo sapiens
cctctgacctcccgcttcctccctgcagcttggaactggcttcagtgacgaggagctggaggagcatcaccagagcctcaaggtgagccatggcggctgcrcctcagcctccacccctctcccccctgcccctgacagcacagtccttccatgcagggctcttggcttccaccatcttggggctccaggtgtgggcaggag

SEQ ID NO: 101288 - DNA, 201 bp, Homo sapiens
accgtgttagccaggatggtcttgatctcctgacctcgtgatccgcccacctcggcctcccaaagtgttgggattacaggtgtgagccaccatgccaggcmccaacattttatatttagttgtttgcttaatatttctgcccttcaccagagtgttagcttcttgaaggcaggaacttcgtgtgtctgggtcactgccaaa

SEQ ID NO: 101289 - DNA, 201 bp, Homo sapiens
actacaggcgcctgccaccacacccagctaattttttttgtatttttagtagaagcagggtttcaccgtgttagccaggatggtcttgatctcctgacctygtgatccgcccacctcggcctcccaaagtgttgggattacaggtgtgagccaccatgccaggccccaacattttatatttagttgtttgcttaatatttc

SEQ ID NO: 101290 - DNA, 201 bp, Homo sapiens
atacaaaaattagccaggtgtggtggtgggcgcctgtaatcccagctccttgggaggctgaggcggaaggctctcttgaacccgggaggtggaggttgcaktgagcagagattgcaccactgctctccagcctgggcgagactccgcctcaaaaaaaaatcagaatgagatctagagcataatgacatttaaacaaatcag

SEQ ID NO: 101291 - DNA, 201 bp, Homo sapiens
agagaggtcctgtatacccttggccagtttccattgtcaatatcatacattactatgatccgtttctcaccactgagatactaatgtcagtacattactcktaactgaactccatactttattattcagatttcaccagattttttttttaatgttcacgccttccaacatttttttttttttttttttgagacagagtct

SEQ ID NO: 101292 - DNA, 201 bp, Homo sapiens
tgcctggctcagtttcctcatctgtcacatggggctgtgtgatatctggggtcccttccaggctctgaagattcttctggtttttgaggagagggtctacrtacatcaaggtcgaggagatcagagaagggaggaggcaagattggggaggtgcagacaagcccccttccctggcctgctctctccccaggtccctgagcg

SEQ ID NO: 101293 - DNA, 201 bp, Homo sapiens
gatgctatatatgccgccctgctcaagggctgtgaccggactgtcttaaaataaatagacatagaggctgggcgcagtggctcacgcctgtaatcccagcrctttgggaggctaaggtgggcggatcacctgaggtcgaaagttcaagaccagcctggctctactaaaaatacaaaaattagccaggtgtggtggtgggcg

SEQ ID NO: 101294 - DNA, 201 bp, Homo sapiens
tctggggtcccttccaggctctgaagattcttctggtttttgaggagagggtctacatacatcaaggtcgaggagatcagagaagggaggaggcaagattsgggaggtgcagacaagcccccttccctggcctgctctctccccaggtccctgagcggacggctgcgccttgggctggcagagcagtcggtgctggctgcc

SEQ ID NO: 101295 - DNA, 201 bp, Homo sapiens
tataaagccgtcagatctcgtgagacttcctcactatcacgagaacagcacgggaaaaacctgcccccatcgttcagttacctcccaccaggtccctccaygacacatggggattttgggagctatgattcaagacaagatgtgggtggggacacacggaccctgacaccatctctgtcccactctttggttctctctctc

SEQ ID NO: 101296 - DNA, 201 bp, Homo sapiens
aacccaggaggcagagggtgcagtgagccaagatcgtgccactacactacagcctccacgataagagtgagactccatcttttaaaaaaaaaaaaaaaaaagggtggatccaacagacacaggatcagagatggatctccaaaatagtgttgagaaaaaagacacaagatgatttacgatagtgacaatgatttcttgaca

SEQ ID NO: 101297 - DNA, 201 bp, Homo sapiens
ttagagcccagtttcactggcccagcctgggccacatacctatccctgaaccagccacagggatgcagcctggatcacgtgtccacccctggtcacaggcraaagggccagcccactcaaatcgtgtgtactgagagaatgtggggtaagaagcatcccaagaggaaaacggaggggctgttaccaggaggaaaaaatgga

SEQ ID NO: 101298 - DNA, 201 bp, Homo sapiens
acacagaagtgtccagagcaagggaggtggccagggaaggtacaggtgtgcagctgtgtcccagggatgacccggggacccaggttcctgtgtccctctgmcctccaaaggttgtcaccccaatgtctgtgatcaaatgtggctcacttccctgttctaattgtgggaggagggacgcagaggagggaggggaggcaacca

SEQ ID NO: 101299 - DNA, 201 bp, Homo sapiens
cagggttattattgcctttgctttttagcaaatctgctgtggcaggctgtggattttgagagtcaggggaggggtgtgtgtgtgagggggtggcttactcyggagtctgggattcatcccgtcatttctttcaataaataattatcggatagctactttgtgacagggtctgtgctgggctctgggggcaaagctgtcatg

SEQ ID NO: 101300 - DNA, 201 bp, Homo sapiens
gaggagggaggggaggcaaccagattccttgcaaggatgtgagccagacattgcacatgctgcgtgggttccaatcacatggcctttcccacctggaaggmaggccgggggctgtagtccccagtgggaggctaggtccccttctaaaacgtgggaggcttcgtgactgaatagcaagaaagcagaatggtcctggggccc

SEQ ID NO: 101301 - DNA, 201 bp, Homo sapiens
ccctgggaatctgtctctctccattgttcagctctactgtccttgaggttgtcctcaccctcaggcgggctctcccctcttagcggtccccttggaaagakggtgttagagcccagtttcactggcccagcctgggccacatacctatccctgaaccagccacagggatgcagcctggatcacgtgtccacccctggtcac

SEQ ID NO: 101302 - DNA, 201 bp, Homo sapiens
ggaggatcacttgagcccaggagttcgggaccagcctgggcaacatagtgagaccccacctctacaaaaacttttttaaaaaattagccaggcgtggtggygcatgcctgtggtcccagctacttgggaggctgaggcaggaggattgcttgagcccaggaggtggaggttgcagtgagccaagattgcaccactgcactc

SEQ ID NO: 101303 - DNA, 201 bp, Homo sapiens
gtcaggccagatagaatttctttctgtcacacagaagtgtccagagcaagggaggtggccagggaaggtacaggtgtgcagctgtgtcccagggatgaccyggggacccaggttcctgtgtccctctgccctccaaaggttgtcaccccaatgtctgtgatcaaatgtggctcacttccctgttctaattgtgggaggagg

SEQ ID NO: 101304 - DNA, 201 bp, Homo sapiens
cagtgtctggagatatttttggttgttacaacctagggacagagggtttgccattggcatctagtggctaaaagccaggcatgctgctaaacatccttcarttcataggacagcccccccaacaacacagaaccatcaggcccaacatgtcaatagtgtctaggttgagaaacctcgtgttaatgcagtccggcttcagga

SEQ ID NO: 101305 - DNA, 201 bp, Homo sapiens
atgggccagaaggcagtgggtcaggccagatagaatttctttctgtcacacagaagtgtccagagcaagggaggtggccagggaaggtacaggtgtgcagytgtgtcccagggatgacccggggacccaggttcctgtgtccctctgccctccaaaggttgtcaccccaatgtctgtgatcaaatgtggctcacttccctg

SEQ ID NO: 101306 - DNA, 201 bp, Homo sapiens
ggatttctgttccaggagcagctgacagacgaagaaaagtgctggacaggaagggagaattctgacgccaacatgcagcgaagtatcatgtgagcaccctyccttgcccctgagtctttccttctccaagtcctctgtttctttctctaaatctgtacttaaaaaaacaaacaaacaaacaaaaacccttacgttagattt

SEQ ID NO: 101307 - DNA, 201 bp, Homo sapiens
acctccgcctcccgggttcaagcgattcccctgcctcagcctcccgagtagctgggattacaggcacacgccaccacgcccggctaattttgtatttttartagagacggggtttctccatgttggtcagactggtctcgaactcccgacctcaggtgatccacccgcctcggcctcccaaaatgctgggattacaggcat

SEQ ID NO: 101308 - DNA, 201 bp, Homo sapiens
gccactgcgttccagcctgggcaacagagtgagactgtcttaaaaaaaagaaagacgctgacagcaagggagggcagccggcaacatgaggtttctgagtkccagacagggctgtgcatgcagaaaggccttaagggacccagagaggagcaggtgactgacacatggtgaagggtcttgacagtcatggagaggacatcc

SEQ ID NO: 101309 - DNA, 201 bp, Homo sapiens
tggctgccctctcccaggcagtgagcctcacgcccccgggccaaggtgagctcctgtggcccgtctctgcatccctcgctggagttacctcaggcttcccycctcctcttcagaggcccatgcccgccccttccccagcgggcccctgccataccaggctcctctctcctgggtgggggggagggggcgtcttgggccgcg

SEQ ID NO: 101310 - DNA, 201 bp, Homo sapiens
atggggaggcaaactaagccacttgtctcctgccactggctcaaagcaaggaccatgctggggtcctgaccatcacagtcaccagggcgggcgccaggctyagttctctccctgactcatcctcctcaagcctcgccaacccctcagggcagctgagatgggaggtgctggtgcacctacttgtgcccctccccagtctat

SEQ ID NO: 101311 - DNA, 201 bp, Homo sapiens
gtttcactctcattgcccaggctggagtgcaatggcacgatcttggctcactgcaacctccgcctcccgggttcaagcgattcccctgcctcagcctcccragtagctgggattacaggcacacgccaccacgcccggctaattttgtatttttagtagagacggggtttctccatgttggtcagactggtctcgaactcc

SEQ ID NO: 101312 - DNA, 201 bp, Homo sapiens
tggatctcttgtgatgtgcacctgtagtcccagctactcgggaggccgacgcaagacagtcgcttgaattcaggaggcggaggctgcagtcagccaagatygcaccaccgcactccagcctgggcgacagagcgagattccgtctcaaaaaaacaaaaacaaaaaacaaaactgatgagatgcccgtaaagtgttaattca

SEQ ID NO: 101313 - DNA, 201 bp, Homo sapiens
aactgatttcaaagcaaaacacaaaactgtaaatgtgctggaaaaactcagtgaaaacttttggaattctaaggaaaggaggacttttttttttttttttwaattatcttggggatgaggctggatgcagtggctcacgcctgtaatcccaacactttgggaggctgaggtgggtggatctcttgtgatgtgcacctgtag

SEQ ID NO: 101314 - DNA, 201 bp, Homo sapiens
attggcatgatcttggctcactgtaacctccacctcctggcttcaagtgattctcctgcctcagcctcccaagtagctgggactacaggcgcccgctaccrtgcccggctaattttttgtatttttagtagagacgaggtttcaccatgttggccaagatggtctcgatctcttgacctcatgatccacccacctcagcct

SEQ ID NO: 101315 - DNA, 201 bp, Homo sapiens
gaggaggaggaaggtgagcccccagaaggagaggtgtgtgtgtgtgtgtgtgtgtgtgtgtgtgtgtgtgtgtgtgtgtgtgtgttttggatctgcaaggkcaggggcctgagagctcaggatgtttggaccctgccgatttgatgcctgtgtccaggcatccaggaattccacctaccaatatgggaacttttgttctga

SEQ ID NO: 101316 - DNA, 201 bp, Homo sapiens
cacggggtgactgagagcagaggtggtgatctagacaaggctggtgcttgacacaaggatggtgacaaagatcaggaaggtggcaaacagtgaagggtcartgaccccaggagaggtatagaaagacgctggcagcggccaggcacagtggctcacgcctgtaatcccagcacttgggagcctgaagcaggcagatcactt

SEQ ID NO: 101317 - DNA, 201 bp, Homo sapiens
ccacgcgtgtgtcaggaaggcttctgggtagaccatcagctgggtcgcatcagtccttctcatggggtgcacagcttcctctcctccttcctgcacccaakcctaggggagtctcctcttcagagtctagcagacctaatgccatggctgccacatgacaggactcagtaaatacttcctggataaagggagagggaggca

SEQ ID NO: 101318 - DNA, 201 bp, Homo sapiens
taagagcacgggtccaccatccactggctgtatgacctgggacaaatgactgaccttctctgagcttaggttgctttatctgtagagatgatgataatgayagcacctaccgcacagaaatatctgagttagaagataacacgtgtacgctgctcagaactgggcccagccctcagtcggggctcagtcattgtgggtcat

SEQ ID NO: 101319 - DNA, 201 bp, Homo sapiens
gatgaccacccactggtgggttctcatccgcctggggagaggatgtgctgggagcactggagctggcttagggccatgggcaccaacatttagggaagtcrggggtttcaggctttcatgagaggacagagggactgagaaaggttgacttggatcaggaaagagttacgggcttatgggagccagaggagatgagactca

SEQ ID NO: 101320 - DNA, 201 bp, Homo sapiens
cacggtagcagtggcttaggcaagacgcaaacttatttttctctctcctgagtgcagagtccgggattcatgtgaccgtctcacagggtcagaggcccagrcttcctctgtgctgtcgtttgctctctgtagatgcccttgtccctgtgaacatccatattctgccaacaggaagaggagggcaccccactcaacattaag

SEQ ID NO: 101321 - DNA, 201 bp, Homo sapiens
gggatgaccacccactggtgggttctcatccgcctggggagaggatgtgctgggagcactggagctggcttagggccatgggcaccaacatttagggaagkcgggggtttcaggctttcatgagaggacagagggactgagaaaggttgacttggatcaggaaagagttacgggcttatgggagccagaggagatgagact

SEQ ID NO: 101322 - DNA, 201 bp, Homo sapiens
gatttccctgatgttggtttttgtatttcttctctgcaccttaaaaacctcggtaatgagacttctgtaggaaaaacccagcttctgtttctaatgaggcyccctaagtttttcagtaacaaagccattctttccagctttgaagttttagacagaaacacggttttcgttttagaggtggtgcagcttggtggctgggag

SEQ ID NO: 101323 - DNA, 201 bp, Homo sapiens
caccggaggctctctaagcagagtcttggttgggagaaatggtcaagtctctccctcctgtgttttggcgacaatcagcagcattgaaagggacagagagrcagccctgggaagtgagctcatgcatttgggtattggcaagggtgtcccgaggaggcgtgaggaagcaagggtgcagacgggcagcatggtatagcctgc

SEQ ID NO: 101324 - DNA, 201 bp, Homo sapiens
tgcttgaacctgggagatggaggttgtggtgagccgagatcgtgccattgcactccagcctgaacaacagggcaagactccatctcaaaaaaaaaaaaaaattatctgagacctgtatctccatcagggtctcaatgggagacagaaaccataccagtgatttgaacagagggagtttaaaggatggtcactaggtatgca

SEQ ID NO: 101325 - DNA, 201 bp, Homo sapiens
tccctgaccaccctgtgaagcagcaccctcatctcatcctcttcctctactcggctttcttttgttttctgaaagatttttttaacacctaaaattaatgwtgtgtttatgtgggggctttttgcccactttcctctgactctcctgctggaatgtgagctccaggttagcaaactttgttttcatccagctctgcaccgt

SEQ ID NO: 101326 - DNA, 201 bp, Homo sapiens
ggcagaggttgcagcgagccgagatcatgccactgcactccagcctgggcaacagagtgagactctgtctcaagaaaaaaggaaaggtcccttcctcccakgtctgattgttaatcgatgtggtgttagcatggcacctggcactttgcgacacccgggactatacgcacctccctctgtcccagctcagctacgcaatcc

SEQ ID NO: 101327 - DNA, 201 bp, Homo sapiens
aagagctatgggggtccttgatgggaccatgatcctgcactggagggcgggatgatggcccaggtgagaagaggccacccctgagttagggctgagaccayagggtcagaaaggagggtagacagagaggtttcagtcccctctactctcaacttttggaaaatggggtccctccttcccccgctcactctagaactgttc

SEQ ID NO: 101328 - DNA, 201 bp, Homo sapiens
aaattaatgagttccaaatgtggtttgtttaagaatataacatccctaaaatactgtaacacagacatatgtttatcagttttcaaattatcttaggttagaagctggagtctgtgacaatctgtgtctggatgtggtatggtatatttcttggtgttctttatctgatgtgcccaaaatatagatgttatccttatttac

SEQ ID NO: 101329 - DNA, 201 bp, Homo sapiens
ggaggcagaggttgcagttagccgagatcacaccactgtgctccagcctgggcaacaaagagtgaacttctgtctcaaaaaaaaaaaaaaaaaaaaaaaargaatggaaatttcaaacacttgaaataaaagtaaatataattttatgtgacaatttatttttcattgctactttcaggcatggcttatttataaaataaa

SEQ ID NO: 101330 - DNA, 201 bp, Homo sapiens; identical to SEQ ID NO: 15966

SEQ ID NO: 101331 - DNA, 201 bp, Homo sapiens
actctaggaatagtagccctatgtctcagagtgttgtattagagaatgtcatagctttttctcttggcacttcaaatcgtacatcatacttcacgaccccygtaacagcagacacaggtattaaagtaacacttgctgaggtcttgggccctgtttgccattgggctgcttctagtcattattttctaaaataattctgat

SEQ ID NO: 101332 - DNA, 201 bp, Homo sapiens
ggatggaggttgcagtgagccgagattgtgccactgcactccagcctgggcgacagagccagactctgcctcaaaaaaaaaaagcaaggtgcctagtaatwtttaaggtttctgaccttttatgaaaggaggaaataagaatatatattcgtatttgcttgaatttgcatcaggaactttaaaagctaacaaaactgatta

SEQ ID NO: 101333 - DNA, 201 bp, Homo sapiens
tatataaacacaacacatacacacactattttttaaaaatctgttttatactctaaataccattctgtaactgcttactcaacatattctgttgctatccrtgtacatgcatatctttttaatgcaacattatatttatgttatagacatatcaaaacttacttaacttttcttctattgttatgtatccaggttagctat

SEQ ID NO: 101334 - DNA, 201 bp, Homo sapiens
tactgcagtgaggggcatttttttttaaatgaggactaattcagaaaaaaattaaaatacttccaagctttttaaaatgttgccttttaatttaaaaatgyaatatctgcactgaagagattacagagaatgggatagcatgctggggacagagtttgagaatggtacaaaatactatgtaattaatggcattccttccct

SEQ ID NO: 101335 - DNA, 201 bp, Homo sapiens
ctggcctatcagtaatggccagagacaatatttttggtggaaagaacagctcacgaaaagctgagaaagaaaaggatgtattttgccaacagaaaattatytagatgtgcctagtgtttaggttgtgataagggaaggagcgatgacagaagaaaacttaaaaatctgcttgcaaaatggaaatagaggaaggtcacagtg

SEQ ID NO: 101336 - DNA, 201 bp, Homo sapiens
actgacttcaggcattttaatgggcactgatactagttattatgttgagcaggtcactaactgttactcctcatctgcaaaacaatggttaaaaatctctytacttacttgtgagattgtttcacaaataaaatttgaaatgaatgaagatcctttgagagtacatgtgctagacaaggaattattaatggaactattaat

SEQ ID NO: 101337 - DNA, 201 bp, Homo sapiens
acagagtttgagaatggtacaaaatactatgtaattaatggcattccttccctatttccaacctgaaaaagagatagaaggtaacattcttgctacagaarttccctgagaagtaatggattcatcagcattgactggaacacagcaaggcaggctggagttgcttagcttcaagaagacattctgtaaggagtgtgaata

SEQ ID NO: 101338 - DNA, 201 bp, Homo sapiens
gatgaactaagcactgtcagtgatgtcagtgctgctatattaatttagttacatctttgtatcagtgatctttatccctgtgtcttttcaggctgcaccarcagtacaaacgcttttaatttatgaataaagtgtatggaagcatcatgcacttaccctgtactgactgtttggaataaatgtaaaagcatttttctttgt

SEQ ID NO: 101339 - DNA, 201 bp, Homo sapiens
atgattagcctactttaaaaaacctagtggaaataagaaagagtaaattctagttctgattatgacatttattcaatttatttaactaggatttatcaagkactgacttcaggcattttaatgggcactgatactagttattatgttgagcaggtcactaactgttactcctcatctgcaaaacaatggttaaaaatctct

SEQ ID NO: 101340 - DNA, 201 bp, Homo sapiens
atgctcggtgggctgcacccactgtcctgcacccactgtctgacaagccccagtgagatgatcccggtacctcagttggaaatgtctctgcattttctgcrtcgctcacgctgggagctatagactggagctgttcctattcggccatcttggaactgccctcactgcaactcttgcagacccctaaatacactgccttgg

SEQ ID NO: 101341 - DNA, 201 bp, Homo sapiens
ggaatatgttgaacgaactgaccaccaccaacaccttcacacacagaccaatttgaactgtcattgtaattgatgttaagaagtgtgtgtttgtgtaaatrcttgaattgcgaagtagatgaattaacttgataaacatgtcaattaagtgtcatatttattggtttcagaagttaattgtgaatgattagcctactttaa

SEQ ID NO: 101342 - DNA, 201 bp, Homo sapiens
gggttattaaatctgaaacttgaaggaggaaatggaaatttaaagcaatgatcatcatttaatcactttacaaagcactttgctttaatctgttctctctyaccacctcatcaatgtggtctcttaaaggctatactgatttcagttcctaatgtgacctcacccccttatttgttttatttaattttatgggttttgttc

SEQ ID NO: 101343 - DNA, 201 bp, Homo sapiens
gattttctgggaactgtatgcctaatggacttattaagtacctaccatagaataatggatttccttagtttccaagtatcccaattcctgaacggtgggtkattaaatctgaaacttgaaggaggaaatggaaatttaaagcaatgatcatcatttaatcactttacaaagcactttgctttaatctgttctctcttacca

SEQ ID NO: 101344 - DNA, 201 bp, Homo sapiens
aactatagatggtcaccgacttatcatggtttgactttacagtggtgcaaaagaaataagcactcagtaaaaattgtactttgagtacccttacaaccctyctgtttttcactttcagtacagtattcagtaaattacatgagatagtaaccaccttattgtaaaataggctttgttttagatgattttgtccaactataa

SEQ ID NO: 101345 - DNA, 201 bp, Homo sapiens
aaatgttcatttttctctttgtagagcatcaggagtagactactcacctttaaaaaataatatatgataatataattttctaataagtatatttaaattartttattgaatttagtttttaaaatgactaaaaacatttttaaaaatgagaaaaattttaaaaattttaaaaaacatttttaaaaatgagaaaacgttaaa

SEQ ID NO: 101346 - DNA, 201 bp, Homo sapiens
ctatagttaagtgttatttgtttaatgggctgttaatcaacctagttcacatcaaaatgaaatattgttttcttccttctagtagtgtgatctctggtccyagcctagttttgctatcctgtgactgccctgtgaacacagcttagactctatgttgtgcaactagaatatgtaaacactcaagtatgggaacccattctc

SEQ ID NO: 101347 - DNA, 201 bp, Homo sapiens
ttgatcttttaggaaatacttttcaaagtgttcacatataacggggcctcatacattctaaactattttcattaagaaggctttggtctacatgaaaattsattacatatccgaaggaaaatagtaaatactctatagaaaacataaaacactcttaaaggaaatttttctgcattttgtatttattcattcttactgaat

SEQ ID NO: 101348 - DNA, 201 bp, Homo sapiens
atttcattctataggtaactctgtgttgaaaataggctaagagattgatttgatcttttaggaaatacttttcaaagtgttcacatataacggggcctcawacattctaaactattttcattaagaaggctttggtctacatgaaaattcattacatatccgaaggaaaatagtaaatactctatagaaaacataaaacac

SEQ ID NO: 101349 - DNA, 201 bp, Homo sapiens
tatatatatgcaccttttaagatgcttaccttttatacatgctaccttttaagataaatagttcaggtttcctgttgccttgtgcaacttaaaagggaaaygcactggagtcgatctttgaaaagaatggatgtttaagcacagagatctgaactactactcaaaatatgaaacagcgtgggaaacaaaagggaaatgagg

SEQ ID NO: 101350 - DNA, 201 bp, Homo sapiens
catttacatatgctgcattgcttttgttattagcctcaaatattaaaatatcactgtgacattggttcctacaaaatagaatagccaaacacttgttatamagtatctgtaaatttagcctctataagagaactttggatgtgtatttgggagtgaaagaaattgaagcataaagagatgcccagctccctgatcatgtta

SEQ ID NO: 101351 - DNA, 201 bp, Homo sapiens
aaaggtgtatttttaaaagtctttgttttttaaggtcttgttataacttggtgcccacttccacttcagagagagatcattgaattttcctagtgacaatraggcatgtttctttaaacttcattctgatgcatgaatattaaaaacctttaatgttttcctacctctttatgcctgagagaaaatatcaattattaatct

SEQ ID NO: 101352 - DNA, 201 bp, Homo sapiens
attacaggctactcgtaaagtaaatgaaaatagaatagcattatttgctctaataaaaactatattttgaggtaaagatgattatggaaattttttttttkaatgtagtatcgctctgttgctcaggctggagtgcagtggcgcgatctcagctcactgcaagctctacctcccgggttcacgccattctcctgcctcagc

SEQ ID NO: 101353 - DNA, 201 bp, Homo sapiens
atagcatactccctaatatgttcacaaaactgactaaactgagcctgctatccttattcctgccaaagtttggtccacattttctttaaggatggagaaayctattgggtgtaaaggcatttccttctgaagactttattttgcttctttgattacaggctactcgtaaagtaaatgaaaatagaatagcattatttgctc

SEQ ID NO: 101354 - DNA, 201 bp, Homo sapiens
caacaaaagtaagccaatattgaattgcactaagctcagtgttgaattgagggagaatgtgttttagaagtgacttttctctatgcatctaatttggaacytatgagtagttactattatgcccactttagccaattgaaaactcttgcttttaatataaacaactgaaatagagataacacctgaagaagcactgggata

SEQ ID NO: 101355 - DNA, 201 bp, Homo sapiens
aggcagtttacaacgtgaaaggaatcttgagggcaatcgcagaatgctgcttagcacactattttttacaatgtaaaggacaaatatgaatttttacttgwtcttttgtgttttatccgtatttgtttcctttggttgctgtccagtagacattttaagtctatgtaatttaggaagatcagcagtatcctaaagcaatga

SEQ ID NO: 101356 - DNA, 201 bp, Homo sapiens
tgaagtattcattatcattgtcatcaccatcatcaacaatgttttacctctagaagatagtactactactatactatatgctgctatactatgtaatagcrgtaatagtagcagcagcagcagcggcagcagcagcagcagcagcagcagcagcagcagtagtagtagtagatgaatgaatgaccttaggaaagtaagtga

SEQ ID NO: 101357 - DNA, 201 bp, Homo sapiens
aaggaaatgaattcatacgtgtagaatcctttaaaactacctggcacaaagtattcagtaaatatttactgaagtattcattatcattgtcatcaccatcrtcaacaatgttttacctctagaagatagtactactactatactatatgctgctatactatgtaatagcggtaatagtagcagcagcagcagcggcagcag

SEQ ID NO: 101358 - DNA, 201 bp, Homo sapiens
aagctacttaaactctttgccttagttactttatctatagaatgattgccataagataatacctatatcagaaagttgtgaaaaggaaatgaattcatacrtgtagaatcctttaaaactacctggcacaaagtattcagtaaatatttactgaagtattcattatcattgtcatcaccatcatcaacaatgttttacctc

SEQ ID NO: 101359 - DNA, 201 bp, Homo sapiens
gagtacccggctgtgtgaggtgtcagtctgcccctactggagggtgcctcccagttaggctactcgggggtcagggacccacttgaggaggcagtctgtcygttctcagatctgaaactccatgctgggagaaccactgctctcttcaaagctgtcagacagggacatttaagtctgcaaaggtttctgctgccttttgtt

SEQ ID NO: 101360 - DNA, 201 bp, Homo sapiens
ttcaaagtatagtgaaatatcagacctattagagccatcagcattcttactttgactaatattctattcagtacaatccataacaactgaagattacttcrttatagttgttgtatagtgaacagaatcagaagacaaaagtttgaagttagtctgtcatcctcaacatttcttatactgaagaacaatatggtatagcag

SEQ ID NO: 101361 - DNA, 201 bp, Homo sapiens
gggcgatggcaacctatgactagatgtttctcaacctttcagaatcatgataggggtggaggttgtatgctgatttaaaatgaagattccaggaacctacrtaaaactcagagagctacagtctttgggaatttgttccctaaaatctgtactttaacaggctttcctcagtaatgtttttttttgttttgttttttcttt

SEQ ID NO: 101362 - DNA, 201 bp, Homo sapiens
ggaaaaaacacaggaaacaaggcagaggatgggggaagtatgcacccagaacaggacagtgaagagacacactgtatagtcttctgggtggcagatttacyacctattagttttacttgggtgcatccctgttctgagattgagatgaataatcatagtacccaatgtaaatggtcaggagaatggtttattttcttttga

SEQ ID NO: 101363 - DNA, 201 bp, Homo sapiens
agtttggagataaatggaagggctttagagatgagggaaaaaacacaggaaacaaggcagaggatgggggaagtatgcacccagaacaggacagtgaagaracacactgtatagtcttctgggtggcagatttactacctattagttttacttgggtgcatccctgttctgagattgagatgaataatcatagtacccaat

SEQ ID NO: 101364 - DNA, 201 bp, Homo sapiens
cctgtaatcccagctacttgggaggctgaggcaggagaatcacttgaacctgggaggcggaggttgcagtgagctgaggtcgcaccattgcactccaaccygggcgacagtgcgagactctgtctcaaaaaaaaaaaattcaggatttgaagaacagattatattgaacagactttatgacctatactgttagaagaggga

SEQ ID NO: 101365 - DNA, 201 bp, Homo sapiens
cgaaatactactaaactctcttcttaggctcaaggtttgttaatttatctctaattacccaaagtttaaaagctttttttattctataattggattcaggrtatgtcgagtaaatgaagacaaaagacaattctgcattataatacataaatatttatggaagcaacattactttattaatgtaggctttcgcaactttca

SEQ ID NO: 101366 - DNA, 201 bp, Homo sapiens
cttaacacataccaattttgtatttgtttgatgtgctgcaattttttcatcttttcccattatttataaaggctttctgtatatatgagatcaagattttwgtgtgtgtgtgtgtgtgtgtgtgtgtgtgtgtggtgtgtaaggagtcaggggagcataacttagagaatattgtgaagtttgggattcttcagaaaaatt

SEQ ID NO: 101367 - DNA, 201 bp, Homo sapiens
ctttagttaatggtccactttttttttttttgagacagagtctcgctttgctgcccagactgtaatgcagtggcgctatctcagctcactgcaacctctgyctcccaggttcaagcagttctcctgcctcagcctcccgagtagctgggattgcaggcacctgccaccatgcccggctaagttttgtatattcagtagagg

SEQ ID NO: 101368 - DNA, 201 bp, Homo sapiens
ctcccaggttcacgcaattcttttgcctcagtctcccgagtagctgggattacaggtatgcaccaatgtgcctggctaatttttgaatttttagtagagayggggtttcaccatattggccaggctggtctcgaactcctgacctcaagtgatccacccgcctcagcctcccaaagtcctgggattacaggtgtgaatcaa

SEQ ID NO: 101369 - DNA, 201 bp, Homo sapiens
accgaggtatgtcatgaaaaagtagtgatgatacatttccagtgaccagtgtttgttttttatttgaattaaatggaattttttttttttttttttgagayggagtcttgctctgttgcctaagctggagtgcagtggcgcaatctcggctcactgcaacctccttctcccaggttcacgcaattcttttgcctcagtctc

SEQ ID NO: 101370 - DNA, 201 bp, Homo sapiens
tagtaacacaggtacagaattcgtttagggaagtggatggagataaggcttttacctgaattgagtttttaaatttatatttaaattgttgtgtttgtgtrtatgtgtgtgtgtatatacgtgtgtgtgtatatatgtgtatatataggagatggaaaaaatatatgtgtgagtatgtgttcccactcctcaaaactttga

SEQ ID NO: 101371 - DNA, 201 bp, Homo sapiens
tcacccaccttgattctctactgccgtgcacttcgtgtcactccccagttttagatacttcccagggtctcctttcttcagtgtcaaaaaaaaaaaaaaaagacacaagaaaattctaattggttccactaaaatttaggtattctagcctaccctacatcttcatggctacatgaaagctttcatgtactttttgctgac

SEQ ID NO: 101372 - DNA, 201 bp, Homo sapiens
gggcggatcacgaggtcaggagatcgagaccatcccggctaaaacggtgaaaccccgtctctactaaaaatacaaaaaattagccgggcgtagtggcgggygcctgtagtcccagctacttgggaggctgaggcaggagaatggcgtgaacccgggaggcggagcttgcagtgagccgagatcccgccactgcactccagc

SEQ ID NO: 101373 - DNA, 201 bp, Homo sapiens
actgtcgtttagaagtctgcagctaaaatattacacatacatagagtagttttgctctcaaagtttggatactcttcaggaaaataaaaaattgatattawttccatgaccttgaggtactggttatatgcctaataatgcatttgtatatcagacagggtgagagattaaaggtgctcacctcatacgttatggatattg

SEQ ID NO: 101374 - DNA, 201 bp, Homo sapiens
gaacatggaatatctttccatttttgtgtgtcctcttcaacttattttcatcactgttttgttttgttttgttttgtggtagagtcttgctctctcacccyggctggagtccaatggcatgatcttggctcactgcagcctctgcctcccaggttcaagtgattctccctgcctcagccttccaagtagctgggattgcag

SEQ ID NO: 101375 - DNA, 201 bp, Homo sapiens
tatactcagaaccacacacacttcttttatttatggaatcaaactcttagagctgaaaagattttaatctgttcggtctaatcattttagagataaggaarcagcccagtttaaatgacttataggagttagtattggcagagcagaaataatgtaactattttaaagcaaatcattatgaacttacacctatttagagct

SEQ ID NO: 101376 - DNA, 201 bp, Homo sapiens
tgtccattttgtgcttagcaatgataggctagttgatgtaaacattataaacatttgggccatgttctctaccctcagtaagcttatccaatatttggaarggtaagaccaacatgcttgaaacagcaatacacaatagaagttcaggatttcagccaggcacagtggctcacgcctgtaatcctagcactttgggaggct

SEQ ID NO: 101377 - DNA, 201 bp, Homo sapiens
gcctgagaaaggagaaaagataatgggccttaggatagaagaatcagtgctgatggaaatgacgagaatcttttgggctgggcttccttttttttttttttccctgaaaaactctcttttaatttgaaaattaaaatgggtcaaataacttaggaactaaatgttttaaagatagcttttaagatagggtctctgttgccc

SEQ ID NO: 101378 - DNA, 201 bp, Homo sapiens
tttgttttaaaaattcctctatgaccaaataagcttgagaagaaactatttaaaggaaattaaatgtattttcactggagaacttcttagaacctttaatrtactagactatattactaaccttcaagaagaataggcatgtaaataaagcatttcccaaactttcttggtcttggaggtctttttttcagacattctcat

SEQ ID NO: 101379 - DNA, 201 bp, Homo sapiens
cttaaaaccatcagatctcgtgagacttactcactatcatgagaacagcatgggaaagacctgtccccatgattcacttacctcccactgggtccctcctwcaacatgtggaaattcaagatgagatttgggtgaggacacagccaaaccatattccacttctggcccctcccaaatctcatgtcctcacatttcaaaacc

SEQ ID NO: 101380 - DNA, 201 bp, Homo sapiens
ccttaaaaccatcagatctcgtgagacttactcactatcatgagaacagcatgggaaagacctgtccccatgattcacttacctcccactgggtccctccytcaacatgtggaaattcaagatgagatttgggtgaggacacagccaaaccatattccacttctggcccctcccaaatctcatgtcctcacatttcaaaac

SEQ ID NO: 101381 - DNA, 201 bp, Homo sapiens
ctggggaggcctcacaatcacggtggaaggtctcacatggcagcagacaagagaagagagcttgtacagggaaactcccctccttaaaaccatcagatctygtgagacttactcactatcatgagaacagcatgggaaagacctgtccccatgattcacttacctcccactgggtccctccttcaacatgtggaaattcaa

SEQ ID NO: 101382 - DNA, 201 bp, Homo sapiens
tgtcccagtaacctttgtttaaaagattatcctttccacattaaactacattgatatagtgtgttagtcctttgtcacactgctgataaagacatataccygagactgggcaatttacaaaagaaacaggtttaatggacttatagttccatgtggctggggaggcctcacaatcacggtggaaggtctcacatggcagca

SEQ ID NO: 101383 - DNA, 201 bp, Homo sapiens
tcacacaagacccccatagaaggaggtggaaactgttcattctttttgatatccctactctgcatatattttagatctatagagtgactaacagtttgtttacagagcacttcttcatatatccttctttacttacatacattcactcttgtatgagctttgttcacccaggttaaaaattttattcattatgtctagctc

SEQ ID NO: 101384 - DNA, 201 bp, Homo sapiens
atcacacaagacccccatagaaggaggtggaaactgttcattctttttgatatccctactctgcatatattttagatctatagagtgactaacagtttgtttacagagcacttcttcatatatccttctttacttacatacattcactcttgtatgagctttgttcacccaggttaaaaattttattcattatgtctagct

SEQ ID NO: 101385 - DNA, 201 bp, Homo sapiens
ggaagcatagaaaagaacacttaatatatgaatacataatattattactgtgtttctctgctttgtttgaaaattgaaatattttgttaggacccatatcyttaaaaatgtgagattttaaaaatgttttatacttctgcactacaaaagcagtcattttatttctcttcgaaacttgtgtctgtaatttgggtcatgtat

SEQ ID NO: 101386 - DNA, 201 bp, Homo sapiens
tatcacacaagacccccatagaaggaggtggaaactgttcattctttttgatatccctactctgcatatattttagatctatagagtgactaacagtttgtttacagagcacttcttcatatatccttctttacttacatacattcactcttgtatgagctttgttcacccaggttaaaaattttattcattatgtctagc

SEQ ID NO: 101387 - DNA, 201 bp, Homo sapiens
atatcacacaagacccccatagaaggaggtggaaactgttcattctttttgatatccctactctgcatatattttagatctatagagtgactaacagtttgtttacagagcacttcttcatatatccttctttacttacatacattcactcttgtatgagctttgttcacccaggttaaaaattttattcattatgtctag

SEQ ID NO: 101388 - DNA, 201 bp, Homo sapiens
tgtccaactcataagagtaaactcacatacttttcacatataacctgaacaaccaacagagaatgtaattcatttcctattgaactctgtactctttgaaagttttgaaaaagacagtgaagtcgtaacaacagtgaatccttgaagattctgaaagagtgatacagtgagcctagccgatgtcacagcccagctatgtgg

SEQ ID NO: 101389 - DNA, 201 bp, Homo sapiens
gacaacaccatcagccaaaagaatagggagttaagttagaaaatgtggagaatgaggaaaagtgaaacagtcattgtggaaagtaagcacactgttaacatgtggtgttgcgtgtacaaagtgattgactatgaatttatggtgttgccaaatacccacttgtttgatgtttttccaagttttaactgcttgtttggtagt

SEQ ID NO: 101390 - DNA, 201 bp, Homo sapiens
tgacaacaccatcagccaaaagaatagggagttaagttagaaaatgtggagaatgaggaaaagtgaaacagtcattgtggaaagtaagcacactgttaacatgtggtgttgcgtgtacaaagtgattgactatgaatttatggtgttgccaaatacccacttgtttgatgtttttccaagttttaactgcttgtttggtag

SEQ ID NO: 101391 - DNA, 201 bp, Homo sapiens
atttgcttggtagatcttcctgcgtccctttattttgagcccatgtgtgtctctgcacatgagatgggtctcctgaatacagcacactgatgggtcttgaytctttatccaatttgccagtctgtgtcttttaatttgagtatttagcccatttacatttaaggttaatattgttatgtgtgaatttgatcctgtcattat

SEQ ID NO: 101392 - DNA, 201 bp, Homo sapiens
agccacatgtatatatgttagcactttggattataacatatgacacactgaccctatctttaccaagaaaccataaatctaaagataaataataaaaaaartcaatagtgacaagtcacatgataagtaataatgcaattgtatttttctaatccagatagaaagtacaaattcattttggaaagcttcctgtaagaaatg

SEQ ID NO: 101393 - DNA, 201 bp, Homo sapiens
ctcaaaaaataaataaatacacacacactcacacacgaacacatttgtactgtataaacaaatgtaaaaaatgcagccatgacaaaggctaaaaaggaggrattcagtgactctctgagaactcataataggaggatttgacttgatcatggcacagaaaaggaaggctctcctacacaagctaagacccaaaagaaaagt

SEQ ID NO: 101394 - DNA, 201 bp, Homo sapiens
caccatcatcaacaatgttttacctctagaagatagtactactactatactatatgctgctatactatgtaatagcggtaatagtagcagcagcagcagcggcagcagcagcagcagcagcagcagcagcagcagtagtagtagtagatgaatgaatgaccttaggaaagtaagtgactttttagaatctcagtttcttca

SEQ ID NO: 101395 - DNA, 201 bp, Homo sapiens
ccattgttttcagaagtccataatataaaatactccaaacataaattcaacattgcatgcagcaactggccatttgcttcaaaagaagtgatcacagtgtktatatatttaaaaagagaaacctttatttgtattattttttaaaaaactaagaagaaatacaacttcagaaaatcttttccagaataaatatttctagaa

SEQ ID NO: 101396 - DNA, 201 bp, Homo sapiens
tagccaagtgtttaatagacatagctaaagatttttatctttttgtttaggtatctgttgtcgcaagaagactcactctgctatttttatctagaagcacyccgtttctccctaaaacacagatttatgacttaattctctttcatgtaggacacctgttacctctatttggatcttgtgcttccagtttctcactcgttt

SEQ ID NO: 101397 - DNA, 201 bp, Homo sapiens
aagacacataattgtcagattcaccaagggtgcaatgaaggaaaaaatgttgagtgcagccagagagaaaggtcaggttgcccacaaagggaagcccatcrgaataacagcgatctctcagcagaaagcctacaagccagaagagagtggaggccaatattcaacattcttaaaggaaagaatgttcaactcagaatctca

SEQ ID NO: 101398 - DNA, 201 bp, Homo sapiens
aggaaatacagagaacaccacaaagatactccttgaaaagagcaaccccaagacacataattgtcagattcaccaagggtgcaatgaaggaaaaaatgttragtgcagccagagagaaaggtcaggttgcccacaaagggaagcccatcggaataacagcgatctctcagcagaaagcctacaagccagaagagagtggag

SEQ ID NO: 101399 - DNA, 201 bp, Homo sapiens
aaaggacaggcagaatggaaccaagttagaaaacactcttcaggatattatccaggagaacttcactaacctagcaaggcaggccaacattcaaattcagraaatacagagaacaccacaaagatactccttgaaaagagcaaccccaagacacataattgtcagattcaccaagggtgcaatgaaggaaaaaatgttgag

SEQ ID NO: 101400 - DNA, 201 bp, Homo sapiens
tatgagcttttaaaacagttcttgcaatgatatattttccttttagcttttcttttttcaaggtcttcctctactaacttgtcacttttgggcttcacagygccgagttcctataaaactgttgagtaaagtaaagataatgaagtgcccttttgaaaatcttttaacaatgtttagatgctcatcacagcattatttgta

SEQ ID NO: 101401 - DNA, 201 bp, Homo sapiens
aatgctcttagaaatatgggactgtgtgaaaagaccaaatctacatttgattggtgtaccggaaaggacaggcagaatggaaccaagttagaaaacactcytcaggatattatccaggagaacttcactaacctagcaaggcaggccaacattcaaattcaggaaatacagagaacaccacaaagatactccttgaaaaga

SEQ ID NO: 101402 - DNA, 201 bp, Homo sapiens
agtgtgtgtgggcacacagtggtgaacagatcgacatgattcctgccttggtagagcttaatgatggagaggaaaggagaaaaaatcaaacacacaaataratatgtaattacaagttgtgttaaggtctgtgaagtttgtttgttgtttttaagtgccacacacacacacacacaaaaagaataaccaaggaaacctgct

SEQ ID NO: 101403 - DNA, 201 bp, Homo sapiens
acaagtgaactttacaaaaatagtggtaattggttaatacaggtatcactgtagcttttttttttttttttgagtaacagcaagatttattgtgaagggcraaagaacaaagcttccacacacagtgtggaaggggacccaagcaggttgccccactgtaacttatttctaattgagctttacctcaccattttcatttaa

SEQ ID NO: 101404 - DNA, 201 bp, Homo sapiens
tcctgagtaaatatctagcagtaggattgctgggacctatggcaagtgcatgtttaactttgtaagaaacttccaaactgttttccaaaatcattgtacarttttacagtcctaccaacagtgtgtgaatttcagttgctccacatccttgacaacacttggtagtttcagtctttttcactttaacatttgaaataggtg

SEQ ID NO: 101405 - DNA, 201 bp, Homo sapiens
tttttttttctgagtagtttttctttgtgcagatacataatttgcttattcttttcattagttgatagatataaagctgttataaacattccagttcacayttttctgtgaacacagtttttatttctcctgagtaaatatctagcagtaggattgctgggacctatggcaagtgcatgtttaactttgtaagaaacttcc

SEQ ID NO: 101406 - DNA, 201 bp, Homo sapiens
agcattccatacataccgtggagctgctttagcagaggaatgaaggcatagatgagcctggaacattcaggacactaagtcattgcgagtagggtatcacmgggtgtcttgaaagctaaacctaaaaagataggcaaggtattagttcatgaagtgacttacatgccatgccaaggaatttgatctttccacatctcttgc

SEQ ID NO: 101407 - DNA, 201 bp, Homo sapiens
tcttgaccttgtgatccgcccaccttggcctcccaaagtgctgggatacaggtgtgagctactgtgcctggcctagaataatacttttaagattcatccayggtgtggtatatatcagtagtttcttttcttttttttttctgagtagtttttctttgtgcagatacataatttgcttattcttttcattagttgatagat

SEQ ID NO: 101408 - DNA, 201 bp, Homo sapiens
gcatgatctcggctcactgcaacctctgcctcccgggttcaaacattctcctgcctcagcctctcaagtagctgggactacaggcacatgccaccacgccyggctaattttttatatttttagcagagacatggtttcaccatgttagccaggatggtctcgatctcttgaccttgtgatccgcccaccttggcctcccaa

SEQ ID NO: 101409 - DNA, 201 bp, Homo sapiens
ttaaaaatggtcttcccactaaatgccaattaatgtagataggggtagagagtcacaaaaattgacttattagtttacagttctattagttctacagtctrttagacctataaccagctttctatatgaccttagataaatagtacatttacgatcaagaaaaatagtattatgtaaacttccaatgcaaatagcaaatat

SEQ ID NO: 101410 - DNA, 201 bp, Homo sapiens
ccagagatatggggcagatatgatttgaacccatgtctatctggctgttaatcctatgcttttatcttattccatactcaaaatcaaaatacattatacaraagaaacaaatgaatttggtgaatggcttgatatgagaggcaagttcatactgattctagaattgtttgttttgctttttctcaaaaggcttaaaattca

SEQ ID NO: 101411 - DNA, 201 bp, Homo sapiens
ttttaaaggtaagcatccaagattacaaatgataagctttgtatcttttccaagtaagcaagaagtgttagaggacacatatctaagagttcaagtgccartaactgatactgtgcataatctcatctcattgctggctaaaattatggtattttaattctcattttgtaaaagagggaaatgaggctcaaagaggaaatg

SEQ ID NO: 101412 - DNA, 201 bp, Homo sapiens
tccttcacaacgttcatcctaaactagagtgatatgaggcccttgaatgtcacacttctcaagcttgctgatcagttcagtcattttatctcactgaataraaaagaaagactgatgcatttcttctaaaactcattcctcagagagagaggtagaaatagaagtacttcatctcttagccaaagcaagaactttaagata

SEQ ID NO: 101413 - DNA, 201 bp, Homo sapiens
aggatacatcataattattttaaggaaaaagagaaaatattatcactataacaacctagaataacattgtctaatagaaatatcataaacatcatatatartttaatgttctctatgacctgcattagaaggatgaaaagagatagatgaaattgatttctgtattttatttaatccaatatactaaaaatatcattttca

SEQ ID NO: 101414 - DNA, 201 bp, Homo sapiens
gtgtttttaaaagaaaaatgtttttcagtcaaatgctgtacctgacttttttgagccaaatgttcatttttctctttgtagagcatcaggagtagactacycacctttaaaaaataatatatgataatataattttctaataagtatatttaaattagtttattgaatttagtttttaaaatgactaaaaacatttttaaa

SEQ ID NO: 101415 - DNA, 201 bp, Homo sapiens
atgcaaatcaaaaccacaatgagataccatctcacaccagttagaatggcaatcattaaaaagtcaggaaacaacaggtgctggagaggatgtggagaaayaggaacacttttacactgttggtgggactgtaaactagttcaaccattgtggaagtcaatgtggcgattcctcagggatctagaactagaaataccattt

SEQ ID NO: 101416 - DNA, 201 bp, Homo sapiens
aaactaaagagcttctgcacagcaaaagaaactaccatcagggtgaacaggcaacctacagaatgggagaaaatgttcgcaacctactcatctgacaaagrgctaatatccagaatctacaatgaactcaaacaaatttacaagaaaaaaacaaccccatcaaaaagtgggcaaaggatatgaacagacacttctcaaaag

SEQ ID NO: 101417 - DNA, 201 bp, Homo sapiens
ccaataatagtgatttaaaggaatcactttaactacttggaacttgatacatttccctgaagattatccttcctgcctcatagttaaggtaaaaatgtttwaaaaaaaaaaaaaagccaagtataaatttcaaccatgcactaaactttataattagtgtattgtagacgtgtttcatcattaacagaaggttctaattta

SEQ ID NO: 101418 - DNA, 201 bp, Homo sapiens
tccaaaacaccaaaagcaatggcaacaaaagccaaaattgacaaatgggatctaattaaactcaagagcttctgcacagcaaaagaaactaccatcagagygaacaggcaacctacaacatgggagaaaattttcgcaacctactcatctgacaaagggctaatatccagaatctacaatgaactcaaacaaatttacaag

SEQ ID NO: 101419 - DNA, 201 bp, Homo sapiens
cagaataagactgtgtgtgtgtgtgtgtgtgtgtgtgtgtgtgtgtgtgtataaaataaaataaagaccttcttagccaggtacacacacacatatacatrtattttttatatatacacatacatacatatatatttattgtgtatatatatacacacacatatatacatatatatttattgtgtatatatatagaatata

SEQ ID NO: 101420 - DNA, 201 bp, Homo sapiens
ttttaaattatattttaagttttagggtacatgtgcacaatgtgcaggtttgttacacatgtacacatgtaccatgttggtatgctgcacccattaactcrtcatttagcattaggtatatctcctaatgctatccctcccccttccccttccagcatctgttgtttcctgactttttaatgatcgccattctaactggtg

SEQ ID NO: 101421 - DNA, 201 bp, Homo sapiens
gattatacctctgatagctatttatacattcattgtatttcttattcagtattgtaattgtactctttggtacctcttagtgaagtacttcaggtcaatgyctgtgtctcatttaagaatgaaagaatgaatgctaatcgtatacattactataaattattgtctacagtttcaaaaccattcagctattgaactcatctg
